United States Patent Application Publication US 2014/0259212 A1 - sequence listing, part 5

SEQ ID NO: 10348 - DNA, 1674 bp, Burkholderia thailandensis E264
  CDS (1)..(1674): transl_table=11
atgtcgtacaaccgccgctcgaagaacatcacgcaaggcgtggcccgttcgccgaaccgctcgatgtattacgcgctcggctatcagaaggacgatttcgacaaaccgatgatcggcgtcgcgaacggccactcgacgatcacgccgtgcaacgcgggcctgcagcgcctcgtcgacgcggccgtttccgcggtcaagcaggcggacgcgaatccgcagacgttcggcacgccgacgatctccgacggcatgtcgatgggcaccgaagggatgaagtactcgctcgtgtcgcgcgaggtgatcgccgattgcatcgagacctgcgtgcagggccaatggatggacggcgtcgtcgtcgtgggcggctgcgacaagaacatgccgggcggcatgatcgcgctcgcgcgcatcaacgtgccgggcatctacgtgtacggcggcacgattcgcccgggtcactggaaaggcaaggatctgacgatcgtgtcggcgttcgaggcggtcggcgagttcaccgcggggcgcatgtcgcaggaggatttcgaaggggtcgaaaagaacgcgtgcccgacgacgggctcatgcggcggcatgtacaccgcgaacacgatgagctcgtcgttcgaggcgctcggcatgtcgctgctgtactcgtcgacgatggccaatcccgatcaggagaaggtcgattcggcggccgagtcggcgcgcgtgctcgtggaggcggtgaagaaggatctgaagccgcgcgacatcatcacgaagcaggcaatcgagaacgcggtgtcggtgatcatggccacgggcggctcgacgaacgcggtgctccactatctggcgatcgcgcacgcggccgagatcgactggtcgatcgaagacttcgagcgcatccgcaaacgcgtgccggtgatctgcgacctgaaaccctcgggccagtacgtcgccaccgacctgcacgcggcgggcggcattccgcaagtgatgaagctgctgctcgacgcgggcctgctgcacggcgattgcatgacgatcacgggccgcacgatcgccgaggagctgaaggacgtgccgagcgtgccgcgcgccgaccagaaggtgatctacccgatcgaccaggcgctgtacaaggaaggccacctcgcgatcctgaagggcaacctcgccgaggacggcgcggtcgcgaagatcaccggcctgaagaacccggtcatcaccggcccggcgcgcgtgttcgacgacgagcagagcgcgctcgccgcgatcctcgacgacaagatccgtgcgggcgacgtcgtcgtgctgcgctacctcggcccgcagggcggcccgggtatgccggagatgctcgcaccgacgtcggcgatcatcggcaagggcctcggcgaatcggtcggcctcatcacggacggccgcttctcgggcggcacgtgggggatggtggtcggccacgtcgcgccggaagcgttcgtcggcggcacgatcgcgctcgtgcaggaaggcgattcaatcacgatcgacgcgcacaagctgctgctgcagctgaacgtcgacgacgccgagctggcgcgccgccgcgccgcgtggaagcagccggcgccgcgctacacgcgcggggtgctcgcgaaatatgcggcgctcgcccgcccggcgaacaagggcgcggtgacgggctga

SEQ ID NO: 10349 - protein, 557 aa, Burkholderia thailandensis E264
MSYNRRSKNITQGVARSPNRSMYYALGYQKDDFDKPMIGVANGHSTITPCNAGLQRLVDAAVSAVKQADANPQTFGTPTISDGMSMGTEGMKYSLVSREVIADCIETCVQGQWMDGVVVVGGCDKNMPGGMIALARINVPGIYVYGGTIRPGHWKGKDLTIVSAFEAVGEFTAGRMSQEDFEGVEKNACPTTGSCGGMYTANTMSSSFEALGMSLLYSSTMANPDQEKVDSAAESARVLVEAVKKDLKPRDIITKQAIENAVSVIMATGGSTNAVLHYLAIAHAAEIDWSIEDFERIRKRVPVICDLKPSGQYVATDLHAAGGIPQVMKLLLDAGLLHGDCMTITGRTIAEELKDVPSVPRADQKVIYPIDQALYKEGHLAILKGNLAEDGAVAKITGLKNPVITGPARVFDDEQSALAAILDDKIRAGDVVVLRYLGPQGGPGMPEMLAPTSAIIGKGLGESVGLITDGRFSGGTWGMVVGHVAPEAFVGGTIALVQEGDSITIDAHKLLLQLNVDDAELARRRAAWKQPAPRYTRGVLAKYAALARPANKGAVTG

SEQ ID NO: 10350 - DNA, 1662 bp, Syntrophus aciditrophicus SB
  CDS (1)..(1662): transl_table=11
atgcgcagtgatatcatgaaaaaaggacttgaaaaggcgcctcatcgatctctgttcaaggcaatgggctatacggatgaagaaattgcccgcccgctgatcggtgttgtcaacgccgctaacgaaatcatccccggtcatatccatctggatcggatcgtggaggatgtcaaggcgggcatccggatggcaggtggaacgccggtggagtttcccgccatcgggatctgcgacggcatcgccatgggccatctgggtatgaaatattccctggccagccgggaattgatcgccgactccacagaagccatggtcatggcccatccctttgacggcctggttcttgttcctaactgtgacaaaatcattcccggaatgctcatggccgccctgcgcctcaatattccatcaatttttgtcagcggcggccccatgctggccggacgtctcgatggaaagtctgtggatctcatcagcgtcttcgaaggagtcggcgccgtgaaggcgggcaagatgacggaagagcagctgaaggccctggaggactgcgcctgtcccggatgcggatcctgttccggaatgtatacggccaattccatgaactgcgtgacggaggcactgggcctgggtctgccgggaaacggaacgattcctgcgattcatgcggcgcgacggcgccttgctaaagaggcgggagtccgaatcatggatctggtctccaaaaacatccggcctcgggacatcgccacgctcgatgccttcaaaaatgccctcgctgtggatatggccctgggctgctccaccaatacggtgctgcacatcccggcgattgcccacgaagcgggaattcgactggatcttgaccttttcaacgaaatcagtgcaaggacgccgaatctctgtcatctcagtccggccggcccccaccatatcgaggaacttgatgccgccggcgggattcaggcggtcatgaaagtcatcagtaaactgggggtgatccaggagtcggctttaaccgtatccggcaggacagttggagaaaacctggaaaaggcacgtgttctcaatgaggaggtgatccgcccattggaccgtgcctatcggcaggagggcggcatcgccattctccgaggaaatcttgctcccgatggcgcggtggtcaaacagtccggagtgctgccggaaatgatgatcaatgaaggaacggctcgcgtcttcgattccgaggatgaagcgattgccgcaatcctcggcggtaaaattgtcgcgggagatattgtggtcatccgctacgaaggtccgaaaggaggtccgggaatgcgggaaatgctgagccccacctcggccatcgcgggcatgggtctggatacctcggtcgctctgcttacggatggacgtttcagcggaggcacccgcggcgccgccatcgggcacatttctccggaggccgcggaaggaggcccgattgccctgatccgggagggagactggatcgccatcaacatcccggaaaaaacattgaccttgaaggttgacccggaagaactggaaaagagaaagcaggaatggaaacccaaagcatcacagaacctgaccggttatctggcccgttacgcaaggcttgtcacttccgcaagcacgggcgccatctttaaggattaa

SEQ ID NO: 10351 - protein, 553 aa, Syntrophus aciditrophicus SB
MRSDIMKKGLEKAPHRSLFKAMGYTDEEIARPLIGVVNAANEIIPGHIHLDRIVEDVKAGIRMAGGTPVEFPAIGICDGIAMGHLGMKYSLASRELIADSTEAMVMAHPFDGLVLVPNCDKIIPGMLMAALRLNIPSIFVSGGPMLAGRLDGKSVDLISVFEGVGAVKAGKMTEEQLKALEDCACPGCGSCSGMYTANSMNCVTEALGLGLPGNGTIPAIHAARRRLAKEAGVRIMDLVSKNIRPRDIATLDAFKNALAVDMALGCSTNTVLHIPAIAHEAGIRLDLDLFNEISARTPNLCHLSPAGPHHIEELDAAGGIQAVMKVISKLGVIQESALTVSGRTVGENLEKARVLNEEVIRPLDRAYRQEGGIAILRGNLAPDGAVVKQSGVLPEMMINEGTARVFDSEDEAIAAILGGKIVAGDIVVIRYEGPKGGPGMREMLSPTSAIAGMGLDTSVALLTDGRFSGGTRGAAIGHISPEAAEGGPIALIREGDWIAINIPEKTLTLKVDPEELEKRKQEWKPKASQNLTGYLARYARLVTSASTGAIFKD

SEQ ID NO: 10352 - DNA, 1854 bp, Frankia sp. CcI3
  CDS (1)..(1854): transl_table=11
atgcccgccctgcgctcccgcaccaccacccacggccggaacatggccggcgcccgcgccctgtggcgcgcgaccgggatgaccgacgacgactttggcaagccgatcgtcgccgtggctaacagcttcaccgagttcgtcccggggcatgtgcacttgcgtaaccttggctcgctggtggccggggcggtggccgaggccggtggggtggcgcgcgagttcaacaccattgccgtggacgacggcatcgcgatggggcatggcgggatgctctactcgctgccgtcccgcgagctcatcgccgacagcgtcgagtacatggtgaacgcccactgcgccgacgccctggtctgcatctccaactgcgacaagatcaccccggggatgctgctcgcggcactgcggctgaacatcccgaccgtgttcgtctccggcggagcgatggagtcgggcaacgcggtcatctccggcggcacggctcggtccaggctggacctcatcaccgcgatgtcggcggcggtcaacccggacgtctcggacggcgacctgtcgacgatcgagcgttcggcctgcccgacgtgtggatcctgctccggcatgttcacggcgaactcgatgaactgcctgaccgaggcgatcgggctgtccctgcccggcaacgggtcgaccctggccaccgccgccgcccgccgtgagctgttcgtcgaggccgggcgcctcgtggtcgacctggcgcggcgctattacgagaaggacgacgaggcggtcctgccccggtcgatcgcgaccgccgccgccttccgtaacgccttcgcggtcgacgtggcgatgggcggctcgacgaacaccgtgctgcatctgttggccgccgccgtcgaggccggcgttgacgtcaccctcgccgacatcgaccagatctcccgcaccgtcccctgcctgtgcaaggtggcgccgagctccacccgttactacatggaggacgtccaccgggcgggcggcatccccgcgatcctcggcgagctcgaccgggccgggctgctcgacccggacccgcacacggtgcactccgcgagcctgcgcgagttcctcgaccgctgggacgtccgcggcccgagcccctcgccggacgcgatcgagctgttccacgcggcgccgggtggcgtgcgcacgatcgagccgttcagctccaccaatcggtgggacacccttgacaccgacgccagggacggttgcatccgttcggtcgagcacgcctactccgccgagggtgggctcgcggtgctgttcggcaacctggccgtcgagggcgccgtcgtgaagacggccggtgtggacgagggccagtggaccttccgcggcccggcgctcgtggtcgagagccaggaagaagcggtcgacgccatcctcaccgggcgggtcaaggccgggaatgtgatcatcgtccgctacgagggccctcgcggcggtccggggatgcaggagatgctctaccccaccgcgttcctcaagggccgcggtctcggcccgaagtgcgccctgatcaccgacggccggttctccggcgggagctccggactgtcgatcggtcacgtctccccggaggcggcccacggcgggacgatcgccctggtccgcgacggggacatcatcgagatcgacatcccggcccgccggctggagctcgtggtctccgacgaggagctggcgagccgacgcgcggcgctggaggcggccggcggctaccgtcccaccgggcgggaacggccggtgtccatggcgctgcgggcctatgcggcgatggcgacctcggcctccaccggtgccgcgcgcgacgtcggtctgctcggcggctga

SEQ ID NO: 10353 - protein, 617 aa, Frankia sp. CcI3
MPALRSRTTTHGRNMAGARALWRATGMTDDDFGKPIVAVANSFTEFVPGHVHLRNLGSLVAGAVAEAGGVAREFNTIAVDDGIAMGHGGMLYSLPSRELIADSVEYMVNAHCADALVCISNCDKITPGMLLAALRLNIPTVFVSGGAMESGNAVISGGTARSRLDLITAMSAAVNPDVSDGDLSTIERSACPTCGSCSGMFTANSMNCLTEAIGLSLPGNGSTLATAAARRELFVEAGRLVVDLARRYYEKDDEAVLPRSIATAAAFRNAFAVDVAMGGSTNTVLHLLAAAVEAGVDVTLADIDQISRTVPCLCKVAPSSTRYYMEDVHRAGGIPAILGELDRAGLLDPDPHTVHSASLREFLDRWDVRGPSPSPDAIELFHAAPGGVRTIEPFSSTNRWDTLDTDARDGCIRSVEHAYSAEGGLAVLFGNLAVEGAVVKTAGVDEGQWTFRGPALVVESQEEAVDAILTGRVKAGNVIIVRYEGPRGGPGMQEMLYPTAFLKGRGLGPKCALITDGRFSGGSSGLSIGHVSPEAAHGGTIALVRDGDIIEIDIPARRLELVVSDEELASRRAALEAAGGYRPTGRERPVSMALRAYAAMATSASTGAARDVGLLGG

SEQ ID NO: 10354 - DNA, 1848 bp, Novosphingobium aromaticivorans DSM 12444
  CDS (1)..(1848): transl_table=11
atgcccgcctatcgttcgcgcacgaccacccacggccgcaacatggcaggtgcacgcggcctctggcgcgctaccggcatgaaggacagcgatttcggcaagccgatcatcgccgtcgtgaactcgtttacccagttcgtccccggccacgtccacctcaaggacctgggccagatggtcgcccgcgaaatcgaagcagcgggcggcgtcgcgaaggaattcaacaccatcgcggtcgacgatggcatcgccatgggccatgacggcatgctctattcgctgcccagccgcgatctgatcgccgacagcgtcgaatacatggtcaacgcccattgcgccgacgcgatggtctgcatctccaactgcgacaagatcacccccggcatgctcatggcggcaatgcggatcaacatcccggtggtcttcgtgtccggcggcccgatggaggccggcaaggtcatcctcaagggcaaggaacacgcgctcgacctcgtcgatgcgatggtcgccgccgcagacgaaagcttcaccgacgaggaagtgaccgccatcgagcgttcggcctgcccgacctgcggttcgtgctcgggcatgttcaccgccaattcgatgaactgcctgaccgaggcgcttggactttcgctgcccggcaacggatcgacccttgccacccacgccgatcgccagcgcctgttcctcgaagcaggccgcctcgtggtcgacctgtgcaagcgctactacgagcaggacgacgaaagcgtcctgccgcgttcgatcgccacgttcgaggctttcgagaacgcgatgagcctcgacatcgcgatgggcggttcgaccaacaccgtgctgcatctgctggccgccgcgcacgaggcgggcgtcaacttcaccatgtccgacatcgaccatctcagccgcaaggtgccgtgcctgtcaaaggtcgctccggcaaagtccgatgtgcacatggaagacgtccaccgcgcaggtggcatttatgccatcctcggcgaactggaccgcgcgggcctgcttcatacccatctgccgaccgtccacagccgcacgcttggcgatgcgctgaaccagtgggacgtgaagcgcaccaactcgcccacggtgcaggaattcttccgcgccgcgccgggcggcgtgccgacgcaggttgccttctcgcaggatcgccgctggaaggaactcgatctggaccgcgaaacgggcgtgatccgttcggccgagcatgcgttctcgaaggacggcggccttgccgtgctgttcggtaacatcgcccgcgagggttgcatcgtgaagaccgcgggcgtggacgacagcatcctgaagttcaccggtccggcaaaggtctatgaaagccaggatgccgccgtcaccgcgatcctcaccgggcaggtgacctcgggcgacgtggtcgtgatccggtacgaagggcccaagggcggccccggcatgcaggaaatgctctatccgacgagctacctgaagtcgaagggcctgggtgcggcctgcgcgctgctgaccgatggccgtttctcgggcggcacgtcgggcctgtccatcggccacgtctcgccggaggctgccgagggcggggagatcggtctggtcgagaacggcgacgtgatcgagatcgacattccgaaccgcaccatccaccttgccgtggcggacgatgtccttgcccagcgccgggcggagcaggaggcgaagggctggaagccggtcaaggaacgcccgcgcaaggtgtcgaccgcgctcagggcctatgccgcgatgaccaccagcgcggcgcgcggtgcggtgcgcgatctttcgcaactcaagatcgactga

SEQ ID NO: 10355 - protein, 615 aa, Novosphingobium aromaticivorans DSM 12444
MPAYRSRTTTHGRNMAGARGLWRATGMKDSDFGKPIIAVVNSFTQFVPGHVHLKDLGQMVAREIEAAGGVAKEFNTIAVDDGIAMGHDGMLYSLPSRDLIADSVEYMVNAHCADAMVCISNCDKITPGMLMAAMRINIPVVFVSGGPMEAGKVILKGKEHALDLVDAMVAAADESFTDEEVTAIERSACPTCGSCSGMFTANSMNCLTEALGLSLPGNGSTLATHADRQRLFLEAGRLVVDLCKRYYEQDDESVLPRSIATFEAFENAMSLDIAMGGSTNTVLHLLAAAHEAGVNFTMSDIDHLSRKVPCLSKVAPAKSDVHMEDVHRAGGIYAILGELDRAGLLHTHLPTVHSRTLGDALNQWDVKRTNSPTVQEFFRAAPGGVPTQVAFSQDRRWKELDLDRETGVIRSAEHAFSKDGGLAVLFGNIAREGCIVKTAGVDDSILKFTGPAKVYESQDAAVTAILTGQVTSGDVVVIRYEGPKGGPGMQEMLYPTSYLKSKGLGAACALLTDGRFSGGTSGLSIGHVSPEAAEGGEIGLVENGDVIEIDIPNRTIHLAVADDVLAQRRAEQEAKGWKPVKERPRKVSTALRAYAAMTTSAARGAVRDLSQLKID

SEQ ID NO: 10356 - DNA, 1845 bp, Saccharophagus degradans 2-40
  CDS (1)..(1845): transl_table=11
atgccgcaatatcgatctagaaccaccacccaaggccgcaatatggcgggtgcccgcgccctatggcgtgcgactggaatgaaagacgaagactttcaaaaacccattattgccgtagttaactccttcacccaatttgtgcctggtcatgttcacttaaaagacatgggccagcttgttgcgcgcgaaatagaaaaagcgggcggcgtagcgaaagagttcaacaccattgccgttgatgacggcatcgccatgggccacgacggcatgctctacagcttgccaagccgcgacattatcgccgactcggttgaatacatggttaacgcccactgtgccgacgccatggtgtgtatatcgaactgcgacaaaatcacaccgggaatgctaatggccgcaatgcgcctaaatatacctgttgtatttgtatctggcgggccaatggaagccggtaaaaccaagttggccgagcacggcttagacttggtagacgccatggttattgcagccgatagcagcgcaagcgacgaatacgtggcagaaatagagcgcagtgcttgcccaacttgtggctcttgctctggtatgttcaccgccaattcgatgaactgcctaactgaagcgttagggttaagcctgccaggtaacggtactgtagttgcgacccattccgaccgcagagctttattcgagcgcgcaggccaccttattgttgacctgtgtaaagattactacgagcgcgaaaacgccaacgttttgccacgttctattggtaacaaagccgccttcgaaaacgccattacgctcgacatcgcaatgggtggttctaccaacaccattctgcacttgctcgccattgcccaagaagcggaattagatttcaccatggaagatatcgaccgcattagccgctacgtaccgcagctgtgtaaggttgcgccaaacacgcaaaaataccatatagaagatgttcaccgcgcaggcggcattatgtctattctcggcgagctagcacgtggcaacctactaaacgtagactgcccaaccgtgcactcacccaccatggccgatgcaatcgcccagtgggatatcactcaaaccggctctgcagaagttgctgaattttataaagctggccctgcaggcataccaacccaaaccgcattcagccaatctacccgctggcagtcgctagatggcgatcgcgctgatggctgtatccgttctgttgagcacgcttatagcaaagaaggcggcctagccgtacttaccggtaacatcgcggaacaaggctgtgtagttaaaacagcaggtgtagacgaaagtatattagtgtttgaaggcacagcctacgtaacagaatcgcaagatcaggccgtggccgatattcttgccgacaaagttaccgcaggctctgtagttattgtgcgctacgaaggccccaaaggcggcccaggcatgcaagaaatgctttacccaacgtcttacattaagtctaaaggccttggtaaatcctgtgcgctacttacagatggccgcttctctggtggtacctcaggtttatctattggccacgtatcgccagaagcagcagcgggcggtgcaattggcttagttaaaacaggcgataaaattcttatcgacatccccaaccgcagcatcaacgtattgctagaagatggcgaattagaaaaacgtcgagcagagcaagatgctaaaggctggaaacccgaactaccgcgcccgcgcaaagtatctagcgcattaaaagcttatgccttacttgctaccagcgcagataaaggcgcagtaagagacctgaaaaaactagagtccttacagtag

SEQ ID NO: 10357 - protein, 614 aa, Saccharophagus degradans 2-40
MPQYRSRTTTQGRNMAGARALWRATGMKDEDFQKPIIAVVNSFTQFVPGHVHLKDMGQLVAREIEKAGGVAKEFNTIAVDDGIAMGHDGMLYSLPSRDIIADSVEYMVNAHCADAMVCISNCDKITPGMLMAAMRLNIPVVFVSGGPMEAGKTKLAEHGLDLVDAMVIAADSSASDEYVAEIERSACPTCGSCSGMFTANSMNCLTEALGLSLPGNGTVVATHSDRRALFERAGHLIVDLCKDYYERENANVLPRSIGNKAAFENAITLDIAMGGSTNTILHLLAIAQEAELDFTMEDIDRISRYVPQLCKVAPNTQKYHIEDVHRAGGIMSILGELARGNLLNVDCPTVHSPTMADAIAQWDITQTGSAEVAEFYKAGPAGIPTQTAFSQSTRWQSLDGDRADGCIRSVEHAYSKEGGLAVLTGNIAEQGCVVKTAGVDESILVFEGTAYVTESQDQAVADILADKVTAGSVVIVRYEGPKGGPGMQEMLYPTSYIKSKGLGKSCALLTDGRFSGGTSGLSIGHVSPEAAAGGAIGLVKTGDKILIDIPNRSINVLLEDGELEKRRAEQDAKGWKPELPRPRKVSSALKAYALLATSADKGAVRDLKKLESLQ

SEQ ID NO: 10358 - DNA, 1851 bp, Methylobacillus flagellatus KT
  CDS (1)..(1851): transl_table=11
atgccgcaataccgctccaggacctccacccatggccgcaacatggcaggcgcacgcgcactctggcgtgctaccgggatgaaggaggacgactttcagaaaccaatcattgcgattgccaattctttcacccaatttgttcccgggcacgtacacctcaaggatttgggacagctggtggctagggagatcgagcgtgcgggtggcgtcgccaaggaattcaacacgattgccgtggatgatggcattgccatgggccatagcggcatgctgtacagcttgcccagccgtgacctgattgccgatgccgtggagtatatggtgagcgcccactgcgccgatgcgctggtgtgcatctccaactgtgacaagatcactcctggcatgctcatggcggcgctacgcctgaatattcccgtggtattcgtctcgggcgggccgatggaggccggcaaggtcaattggcagggcaatatgcacaagctcgacctggtggatgccatggtcgctgctgcagacagcaatgtgtccgatgcggagtccgaggcgatcgaacgttctgcctgcccgacctgcggttcctgttccggcatgttcaccgccaactcgatgaactgcctgaccgaggcgctcggcctgagcctacctggtaacggctccacactggccacgcatgctgcgcgcaaggagctgttcctcaaggctggtcgcctgatcgtggaaatcaccaagcgctactacgaacaggatgacgagagtgtactgccgcgcagcattgccaacttcaaggcattcgagaatgccatgagcctcgacgtcgccatgggcggctcgaccaacactgtattgcatttgctggcagcggcgcacgaggctgaggtggatttcaccatggctgacattgaccgtatttcccgcggcgtgccctgcatatgcaaggtggcacctgctacggccaaatatcacatggaggatgtacatcgtgcaggtggcgtgatggccatcctgtcagagttgagtcgggccgggctgatccaccgtgacactcccaccgtgcacagtccaaccctgggtgaggcgttggataagtgggacatcatgaccaccaacgacgaggatgtgaagaaattttatcgtgccgcacctggcggtattagcacgacgatcgcattcagccagtccatgctctggccggacctggacactgaccgcaaggaaggctgcatccgcgacaaggatcatgcgtattctcaggatggcggactggcagtgctttacggcaacattgccctagacggctgtatcgtgaagacggccggcgtggacgacagcattctcaagttcacggggcgcgcgcgcatttttgaaagccaggatgatgccgtggctgccattcttgcagacaagatcgaagcgggggacatcgtcatcatccgctacgaaggcccgcgcggcggacctggcatgcaggaaatgctttacccgaccagctacctcaaatccaagggacttggcaaggcatgcgcgctgctgaccgatggccgcttttccggcggtacctccggtctgagtatcggccatgcctctccggaagctgccgaaggcggcgcaatcggcctggtggaggaaaacgatatcatcgagatcgacattcccaatcgtactattcatctggcggtcaaggacgaagtgcttgcccaccggcgcgctgccatggaggcacgcggcaaagatgcatggaagccggtcaaccgccagcgtcatatatccgttgcattgcgtgcgtatgctgccatgagcacgtccgcggccaagggggctgtgcgtgacgtcagccagatcgagaagtag

SEQ ID NO: 10359 - protein, 616 aa, Methylobacillus flagellatus KT
MPQYRSRTSTHGRNMAGARALWRATGMKEDDFQKPIIAIANSFTQFVPGHVHLKDLGQLVAREIERAGGVAKEFNTIAVDDGIAMGHSGMLYSLPSRDLIADAVEYMVSAHCADALVCISNCDKITPGMLMAALRLNIPVVFVSGGPMEAGKVNWQGNMHKLDLVDAMVAAADSNVSDAESEAIERSACPTCGSCSGMFTANSMNCLTEALGLSLPGNGSTLATHAARKELFLKAGRLIVEITKRYYEQDDESVLPRSIANFKAFENAMSLDVAMGGSTNTVLHLLAAAHEAEVDFTMADIDRISRGVPCICKVAPATAKYHMEDVHRAGGVMAILSELSRAGLIHRDTPTVHSPTLGEALDKWDIMTTNDEDVKKFYRAAPGGISTTIAFSQSMLWPDLDTDRKEGCIRDKDHAYSQDGGLAVLYGNIALDGCIVKTAGVDDSILKFTGRARIFESQDDAVAAILADKIEAGDIVIIRYEGPRGGPGMQEMLYPTSYLKSKGLGKACALLTDGRFSGGTSGLSIGHASPEAAEGGAIGLVEENDIIEIDIPNRTIHLAVKDEVLAHRRAAMEARGKDAWKPVNRQRHISVALRAYAAMSTSAAKGAVRDVSQIEK

SEQ ID NO: 10360 - DNA, 1863 bp, Burkholderia xenovorans LB400
  CDS (1)..(1863): transl_table=11
atgcctgaatatcgttcacgaacttcgactcatggtcgcaacatggccggcgcgcgcgccttgtggcgcgctaccggcatgaaggacggtgatttcggcaagcccattattgcggtggtgaactcgttcacgcagttcgtgccgggccatgtgcatctgcgcgacctgggcgcgctggtcgcgaaggaaatcgaagcggccggcggtgtcgccaaggaattcaacaccattgccgtggacgacggcatcgctatgggccacggcggcatgctgtattcgctgccgtcgcgcgagttgattgccgattccgtggaatacatggtcaacgcgcactgcgccgacgcgatggtctgcatttccaattgcgacaagatcacgccgggcatgctgatggccgccatgcgcctgaacatcccggtcgtgttcgtctccggcggtccaatggaagcgggcaaggtcaagtccccgaaagacggccaggtgatcgccaagatcgacctgatcgacgcgatgatcaaggcggccgactcgaaggtcagcgacgcggaagtcgcggaaatcgagcgcagcgcctgcccgacgtgcggttcctgttcgggcatgtttaccgcgaactcgatgaactgcctgaccgaagcgatcggcctggcgttgccgggcaacggcacgatcgtcgccacgcacgcatggcgcaaggacctgttcgagcaggccggccgcctggtggtggacctgtgccgccgctactatcaggaagaagacacgtcggttctgccgcgcagcatcgccagcaagcaggcattcgagaacgcaatggcgctcgacgtggctatgggcggttcgaccaataccgtgcttcacctgctggcagcggcgcaggaagccggtgtcgatttcaccatgtccgacatcgaccgcatctcgcgcaaagtgccgtgcctgtgcaaggccgcgcccgccaccgacaaataccatatcgaagacgtccaccgtgccggcggcattctcggcattctgggcgaactggcgcgcgcggatctgctcgacctgtcttgcggcaacgtgcatagcggcacgctgggcgatgcgatcgccagatgggacattgccggcggcgcgggcgaagaagcgcagaagttcttccgcgcggcaccgggcggtattccgaccaccgtcgcgttcagccaggaggccacgttcccctcgctggataccgaccgcaaaaccggctgtatccgcagcaagcaggatgcgtattcgaaagacggcggcctcgccgtgctgtacggcaatctcgcggagaagggttgtatcgtcaagaccgcgggtgtcgacgaatcgcaatgggttttctccgggcgtgcgcgcgtgttcgagagccaggacgacgccgtggaagccattctgggcgacaaggtggtggctggcgacgtggtcgtgatccgctatgaaggtcccaagggcggccccggcatgcaggaaatgctttaccccacgtcgtatctgaaatcgaagggcctgggcaagacctgtgcgctcttcaccgacggccgtttctccggcggttcgtccgggctcgtgatcgggcacgcgtcgccggaagcggcagaaggcggcacgatcggtctggtggaagagggcgatgtgatcgagatcgacattccgaagcgcaagatgcacctggtggtgtcggacggcgaattggcgcgccgccgggaagcgatggaggcacgcggtgacaaggcgtggatgccggcggcgcgtgagcgcgtggtgtcgcaggcattgcaggcttatgcggcgctggccacctctgctgatcgcggtgcggtacgggatatctcgcaactgaagcgcaagtaa

SEQ ID NO: 10361 - protein, 620 aa, Burkholderia xenovorans LB400
MPEYRSRTSTHGRNMAGARALWRATGMKDGDFGKPIIAVVNSFTQFVPGHVHLRDLGALVAKEIEAAGGVAKEFNTIAVDDGIAMGHGGMLYSLPSRELIADSVEYMVNAHCADAMVCISNCDKITPGMLMAAMRLNIPVVFVSGGPMEAGKVKSPKDGQVIAKIDLIDAMIKAADSKVSDAEVAEIERSACPTCGSCSGMFTANSMNCLTEAIGLALPGNGTIVATHAWRKDLFEQAGRLVVDLCRRYYQEEDTSVLPRSIASKQAFENAMALDVAMGGSTNTVLHLLAAAQEAGVDFTMSDIDRISRKVPCLCKAAPATDKYHIEDVHRAGGILGILGELARADLLDLSCGNVHSGTLGDAIARWDIAGGAGEEAQKFFRAAPGGIPTTVAFSQEATFPSLDTDRKTGCIRSKQDAYSKDGGLAVLYGNLAEKGCIVKTAGVDESQWVFSGRARVFESQDDAVEAILGDKVVAGDVVVIRYEGPKGGPGMQEMLYPTSYLKSKGLGKTCALFTDGRFSGGSSGLVIGHASPEAAEGGTIGLVEEGDVIEIDIPKRKMHLVVSDGELARRREAMEARGDKAWMPAARERVVSQALQAYAALATSADRGAVRDISQLKRK

SEQ ID NO: 10362 - DNA, 1662 bp, Methanococcoides burtonii DSM 6242
  CDS (1)..(1662): transl_table=11
atgagaagtgacaatacaaagaaaggagacgcacgagcgccaaatcgatcgcttttgaaagctataggagtgacggattctgaaatgaagaaaccgttcatagctgttgtgaactcctggacagagttcattccgggacatattcaccttgacaaagtagcagaagctgtgaaagccggtattcgtaatgcgggcggcgttcctttcgagttccatacaattggagtctgtgatggtattgcaatgggacatgaaggtatgaagtactcacttccaagcagagaagctatcgaagatactatcgaaataatgatacagggacaacagatggacggtatggtcatggtcacttcatgtgacaagatcacccccggacacttgatggctgccggaagagttgatatcccggccatcgttgtaacaggtggcccaatgctccccggatttgttgatgataagtacacagatctcgtatccgttttcgaaggagtcggttcctgccagagtggtgcagtctcatctgagaaactaaaacaacttgaagacctctgttgctgtggtgcaggttcatgtgcaggaatgttcactgcaaacacaatggcatgcatgacagaagctcttgggcttagtcttccgggctgtgctactgcacatgcagtagatgcaaagaagatgcgtatggcaaaggaatcaggagaacgtatcgttgaaatggtcagtgaaggactgacagcacgcaagatagtcactgacaagtcattcgagaatgcgatcagagtagaccttgcagttggaggaagtacgaacacaacacttcatctacctgctattgcccacgaattcggacttgaacttcctctagagaaattcaatgaactgagcaagacaactcctcacctaataggactaagaccgggtggagagaacttcatgattgatttcgaaagagctggcggagttcaggcgataatgaagagacttgtaacaaaactcaatcttgacgagaaaacgatcacaggaaagaccgttggtgagaacatagacgaattcgtaattgtcaatccaaagacaaacgcacgcgtcatcacgacgatcgaagagccactccacgaagaaggcggtattgcggtcctgaaaggaaaccttgcccctgatggatctgtggtcaaacagtctgccgttcatgaaaagatgctcagacacaccgggcctgcaagggtcttcgacagtgaagaggaggcaatggagaccatccttaaaggagatatcaaatcaggtgacgttgtggtcatcaggtatgaaggaccaaaaggaggaccaggaatgcgtgaaatgctctcccctacatccgccatagcaggaatgggacttatcgattccgttgcactcattacggatggaaggttctcaggcggtacaagaggtccatgcataggacatatatcccctgaagcttatgagggcggtcctattggattgatacaggaaggcgacatcatcgagattgatatgcctgaaagaagacttgagctcaaagtttcggaagaagatcttgaaaaaagaagggtattgttcaaaccagtagaaaaggaagctactggatacctttcacgctatcgaaagattgtgtcctcagcaagcaaaggtgctatcagagagtaa

SEQ ID NO: 10363 - protein, 553 aa, Methanococcoides burtonii DSM 6242
MRSDNTKKGDARAPNRSLLKAIGVTDSEMKKPFIAVVNSWTEFIPGHIHLDKVAEAVKAGIRNAGGVPFEFHTIGVCDGIAMGHEGMKYSLPSREAIEDTIEIMIQGQQMDGMVMVTSCDKITPGHLMAAGRVDIPAIVVTGGPMLPGFVDDKYTDLVSVFEGVGSCQSGAVSSEKLKQLEDLCCCGAGSCAGMFTANTMACMTEALGLSLPGCATAHAVDAKKMRMAKESGERIVEMVSEGLTARKIVTDKSFENAIRVDLAVGGSTNTTLHLPAIAHEFGLELPLEKFNELSKTTPHLIGLRPGGENFMIDFERAGGVQAIMKRLVTKLNLDEKTITGKTVGENIDEFVIVNPKTNARVITTIEEPLHEEGGIAVLKGNLAPDGSVVKQSAVHEKMLRHTGPARVFDSEEEAMETILKGDIKSGDVVVIRYEGPKGGPGMREMLSPTSAIAGMGLIDSVALITDGRFSGGTRGPCIGHISPEAYEGGPIGLIQEGDIIEIDMPERRLELKVSEEDLEKRRVLFKPVEKEATGYLSRYRKIVSSASKGAIRE

SEQ ID NO: 10364 - DNA, 1863 bp, Ralstonia metallidurans CH34
  CDS (1)..(1863): transl_table=11
atgcctgagtaccgatcacgaacttcgacgcacggccggaacatggcgggtgctcgcgccttgtggcgcgccaccgggatgaaggatggcgatttcggcaagcccatcatcgccgtggtgaactcgtttacccagttcgtgccgggccatgtccatttgcgcgacctcggcgcgctggttgcgaaggagatcgaagcggccggcggcgtggccaaggaattcaacacgatcgcggtggacgatgggatcgccatgggccacggaggcatgctctattcgctgccctcgcgcgagctgatcgccgactcggtggaatacatggtcaacgcgcattgcgccgacgccatggtctgtatttccaattgcgacaagatcaccccgggcatgctgatggccgcgatgcggctgaacattcccgtggtgttcgtctccggcggcccgatggaggccggcaaggtcaagtccccaacggacggccaggtgatcgcaaagatcgacctgatcgacgccatgatcaaggccgcggacccgaaggtcagcgacgctgaagtggccgaagtggagcgcagcgcctgcccgacatgcggttcctgctcggggatgttcacggcgaactcgatgaattgcctgaccgaggcgattggcctggcgttgccgggcaacggcacgatcgttgccacccacacatggcgcaagggcctgttcgaacaggcgggccgcctggtcgtggacctgtgccgccgctactaccaggaagaggacgcatcggtcctgccgcgcaacatcgctaccaagtcggcattcgagaatgccatggcactggacgtggccatgggcggttcgaccaataccgtgctgcacctgctggcggcagcccaggaagccggtgtcgatttcacgatgtccgacatcgatcgcatctcgcggaaggtgccgtgcctgtgcaaggccgcaccggccaccgacaagtaccacatcgaagacgtgcatcgcgcgggcggcatccttggcattctcggcgagctggcgcgtgccgagttgctggatctgtcgtgcggcaacgtgcatagcggcacgcttggcaatgccatttcccagtgggatgtcgttggtggtgcgggcgaggacgcgcagaagttcttccgcgctgcgccgggcggcattccgacgaccgtcgcgttcagccaggcggccaccttcgagtcactggataccgaccgaaagactggctgcatccggaacaagcagaacgcgtattcgaaggacggcggtctcgccgtgctctacggcaacctcgcggagaagggctgcatcgtcaagaccgctggcgtggacgaatcgcaatgggtcttctccgggcgcgcccgtgtcttcgaaagccaggacgaagccgtcgacgccattctgggcgacaaggtcgtggctggtgacgttgtcgtgattcgttacgaaggtcccaagggtggcccgggcatgcaggaaatgctctatcccacgtcgtacctgaagtcgaagggcctgggcaagacctgcgcgctgtttaccgacggtcggttctccggtgggtcgtccgggctggtcatcggacatgcctcgccggaagccgccgaaggcggcacgatcggcctggtggaggacggcgatctcatcgagatcgacattccgcagcgcaagatgcacctggcggtgtcggacgaaaccctggcgcgccgtcgcgaagccatggaggcgcgcggtgacaaggcgtgggagccggtggatcgtgtgcgcgtagtgtcccaggcattgcaggcgtacgctgcgctcgctacttcggcggatcgcggcgcggtgcgcgatatctcccagctcaagcgcaagtaa

SEQ ID NO: 10365 - protein, 620 aa, Ralstonia metallidurans CH34
MPEYRSRTSTHGRNMAGARALWRATGMKDGDFGKPIIAVVNSFTQFVPGHVHLRDLGALVAKEIEAAGGVAKEFNTIAVDDGIAMGHGGMLYSLPSRELIADSVEYMVNAHCADAMVCISNCDKITPGMLMAAMRLNIPVVFVSGGPMEAGKVKSPTDGQVIAKIDLIDAMIKAADPKVSDAEVAEVERSACPTCGSCSGMFTANSMNCLTEAIGLALPGNGTIVATHTWRKGLFEQAGRLVVDLCRRYYQEEDASVLPRNIATKSAFENAMALDVAMGGSTNTVLHLLAAAQEAGVDFTMSDIDRISRKVPCLCKAAPATDKYHIEDVHRAGGILGILGELARAELLDLSCGNVHSGTLGNAISQWDVVGGAGEDAQKFFRAAPGGIPTTVAFSQAATFESLDTDRKTGCIRNKQNAYSKDGGLAVLYGNLAEKGCIVKTAGVDESQWVFSGRARVFESQDEAVDAILGDKVVAGDVVVIRYEGPKGGPGMQEMLYPTSYLKSKGLGKTCALFTDGRFSGGSSGLVIGHASPEAAEGGTIGLVEDGDLIEIDIPQRKMHLAVSDETLARRREAMEARGDKAWEPVDRVRVVSQALQAYAALATSADRGAVRDISQLKRK

SEQ ID NO: 10366 - DNA, 1722 bp, Acidobacteria bacterium Ellin345
  CDS (1)..(1722): transl_table=11
atgaccgaaaaatccccaaagccacacaagcgtagcgacgccattaccgaaggtcccaaccgcgccccagcccgcgccatgctgcgcgccgccgggttcaccccggaagaccttcgtaagcccatcatcggcatcgccaacacctggatcgaaatcggtccctgcaacctgcaccttcgtgagctcgccgagcacatcaagcagggcgttcgcgaagccggcggtacgccaatggagttcaacaccgtctccatttctgacggcatcaccatgggctcggaaggcatgaaggcgtcgctggtcagccgcgaggtcatcgccgactccatcgaactcgtcgcgcgcggcaatcttttcgacggcctgatcgccctatcgggatgcgataaaaccatccccgggaccatcatggcgctcgagcgcctcgacatcccgggtctcatgctctatggcggctccatcgcgcccggcaaattccatgctcagaaggtcacgattcaagacgtcttcgaggcagtcggtacgcatgcgcgcggcaaaatgagcgacgctgatctcgaagaactcgaacacaacgcctgtcccggcgccggcgcctgcggtggacaattcaccgctaacaccatgtccatgtgcggcgaattcctcggcatctcgccgatgggcgctaacagcgtcccggcgatgaccgtagagaagcagcaggtcgcacgacgctgcggacacctcgtcatggaactggtccgccgcgacatccgccccagccaaatcatcacgcgcaaggcgatcgaaaacgcaatcgccagcgtcgccgcctccggcgggtcgaccaacgccgttcttcacttgctcgccatcgcgcacgaaatggacgtcgaactgaacatcgaagacttcgacaagatcagttcgcgcacgccactgctctgcgaactcaagcccgctggccgcttcaccgccaccgatcttcatgatgccggcggtattccgctcgtcgcgcaacgcctgctcgaagcgaacctgctgcacgccgacgcactgactgtcaccggtaagaccatcgccgaagaagcgaagcaggcgaaagaaacgccgggccaggaagtggttcgtccgcttaccgatcccatcaaagctaccggcggcctcatgatcctgaaaggcaacctcgcatccgaaggctgcgtggtcaaactcgtcggacacaagaagctcttctttgaaggccccgctcgcgtcttcgagtcggaagaagaagcctttgcgggcgtggaagaccgcaccatccaggcgggcgaagtggtcgtggtccgatatgaaggcccgaagggcggccctggcatgcgcgaaatgcttggcgtgacggcggccatcgccggcaccgaactcgccgagaccgtcgcgctcatcaccgacggacgtttctccggcgctacccgcggcttgagcgtgggccacgttgcgcccgaagccgcgaatggcggcgcgatcgctgtggtacgcaatggcgacatcatcactctcgacgtggaacgccgcgaactgcgcgtccacctcaccgacgcagaactcgaagcgcgcctccgcaactggcgcgcgccggagccacgatacaagcgcggcgtcttcgccaagtatgcgagcaccgtttcgtcggcgtcgttcggggccgttaccggctccaccatcgaaaacaagaccttagccgggagtacgaagtag

SEQ ID NO: 10367 - protein, 573 aa, Acidobacteria bacterium Ellin345
MTEKSPKPHKRSDAITEGPNRAPARAMLRAAGFTPEDLRKPIIGIANTWIEIGPCNLHLRELAEHIKQGVREAGGTPMEFNTVSISDGITMGSEGMKASLVSREVIADSIELVARGNLFDGLIALSGCDKTIPGTIMALERLDIPGLMLYGGSIAPGKFHAQKVTIQDVFEAVGTHARGKMSDADLEELEHNACPGAGACGGQFTANTMSMCGEFLGISPMGANSVPAMTVEKQQVARRCGHLVMELVRRDIRPSQIITRKAIENAIASVAASGGSTNAVLHLLAIAHEMDVELNIEDFDKISSRTPLLCELKPAGRFTATDLHDAGGIPLVAQRLLEANLLHADALTVTGKTIAEEAKQAKETPGQEVVRPLTDPIKATGGLMILKGNLASEGCVVKLVGHKKLFFEGPARVFESEEEAFAGVEDRTIQAGEVVVVRYEGPKGGPGMREMLGVTAAIAGTELAETVALITDGRFSGATRGLSVGHVAPEAANGGAIAVVRNGDIITLDVERRELRVHLTDAELEARLRNWRAPEPRYKRGVFAKYASTVSSASFGAVTGSTIENKTLAGSTK

SEQ ID NO: 10368 - DNA, 1845 bp, Silicibacter sp. TM1040
  CDS (1)..(1845): transl_table=11
atgccgatgtaccgatcaagaacctccacccacggtcgcaacatggccggcgctcgtggcctctggcgcgccactggcatgaccgaaagcgacttcggcaagccgatcatcgccatcgtgaactccttcacccaattcgtccccggccacgttcacctcaaggatctggggcagatggtggcccgtgaggttgagtccgctggcggtgtggccaaggagttcaacaccatcgctgtggacgacggcatcgccatgggccacgatggcatgctctattcgctcccctcgcgcgaggtgatcgcggattcggttgagtatatggtcaacgcccattgcgccgacgcgatggtctgtatctccaactgcgacaagatcacccccggcatgatgatggccgcaatgcgcctcaacatcccggtgatctttgtgtccggtggcccgatggaagcgggcaagatcgacatcgactcccttgatgccaagaaaatcgacctcgtggacgcaatggttgccgccgcaagcgacaagctgaccgacgaggaagtccagcacatcgaggaaaacgcctgccccacatgtggctcctgctctggcatgttcaccgcaaactcgatgaactgtctggccgaagcccttgggcttgcgctgcccggcaatggctccaccctggccacccactcggatcgcaagcaattgttcctcgaggcggggcgcaagatcgtcgagatcaccaagcgccactatgagcagaacgaaaaaggcctgctgccgcgcgaaatcgccacctttgaggcgtttgagaacgccatgagccttgatattgccatgggcggctccaccaataccgttttgcacctcctcgccatcgcgcatgagggcaaggtagacttcaccatgcaagacatcgaccggctgagccgcaaggtgccctgcctgtgtaaagtcgcgcccaatatcgagaacgtccatatggaggacgttcaccgcgccggtgggatcttctcgatcctcggggagctgtcccgtgcaggcctcctgcacaatgacgtcccgacggtccacagcgacagcatgggtgaagccatcgcccattgggacatcgctgtggcggacaaccaagcggcgaaggacctcttcaaggccgctcccggcggagtgcgtacgacgcaggccttcagccagtccaaccgcttcaaggatctcgacatcgaccgcaagggcggcgttatccgctccaaggaacatgccttcagccaggacggcggcctcgcggtgctctttgggaatatcgcactggatggctgcatcgtgaaaacggcgggcgtggacgcctcgatcctgaagttcaccggcaaagcctatgtctgcgagagccaggaccaggccgtcaatgatatcctcaccggcaaagttcaggcgggcgatgtagttgtcatccgctatgaggggccgcgcgggggaccgggcatgcaggaaatgctctacccaacgtcctacctcaaatccaaggggctcggaaaagactgtgctctgttgaccgatgggcgtttctccggcggcacgtcggggctttccattggccacgtctcgcccgaagccgccgaaggtggcaccatcggcctcgtggagcatggcgacaccatcgagatcgatatccccaaccgttccatccatctggcggtggatgaggccacccttgcagcgcgccgcgccgcgcaggatgagaaaggctggaaacctgttgccaagcgtaaacgcaaggtatcaaccgcgctcaaggcttacgccttgctggccacatctgcagccaaaggcgctgtgcgccaactgccagacgacgagtaa

SEQ ID NO: 10369 - protein, 614 aa, Silicibacter sp. TM1040
MPMYRSRTSTHGRNMAGARGLWRATGMTESDFGKPIIAIVNSFTQFVPGHVHLKDLGQMVAREVESAGGVAKEFNTIAVDDGIAMGHDGMLYSLPSREVIADSVEYMVNAHCADAMVCISNCDKITPGMMMAAMRLNIPVIFVSGGPMEAGKIDIDSLDAKKIDLVDAMVAAASDKLTDEEVQHIEENACPTCGSCSGMFTANSMNCLAEALGLALPGNGSTLATHSDRKQLFLEAGRKIVEITKRHYEQNEKGLLPREIATFEAFENAMSLDIAMGGSTNTVLHLLAIAHEGKVDFTMQDIDRLSRKVPCLCKVAPNIENVHMEDVHRAGGIFSILGELSRAGLLHNDVPTVHSDSMGEAIAHWDIAVADNQAAKDLFKAAPGGVRTTQAFSQSNRFKDLDIDRKGGVIRSKEHAFSQDGGLAVLFGNIALDGCIVKTAGVDASILKFTGKAYVCESQDQAVNDILTGKVQAGDVVVIRYEGPRGGPGMQEMLYPTSYLKSKGLGKDCALLTDGRFSGGTSGLSIGHVSPEAAEGGTIGLVEHGDTIEIDIPNRSIHLAVDEATLAARRAAQDEKGWKPVAKRKRKVSTALKAYALLATSAAKGAVRQLPDDE

SEQ ID NO: 10370 - DNA, 1701 bp, Rubrobacter xylanophilus DSM 9941
  CDS (1)..(1701): transl_table=11
atgcagaccacggacctcaggcgcaagagccgcatcatgttcgaggggcgggaccgggcccccgcccgctcctaccttctgggcatgggctacactcgggaggacctcgagaagcccatcgtgggggtggcccactcctggatcgagaccatgccctgcaactacaaccaccgccggctggccgagaaggtcaaggagggcatccgggcggccgggggcacccccatggagctgaacaccatcgcgatctccgacgggatcacgatgggcacccaggggatgaagacctccctggtctcgcgcgaggtgatcgccgactccatcgagctggtggggcgcggccacatgttcgacgccatggtgatcctggtcggctgcgacaagaccatccccgccggggcgatggcgctggcccggctggacgtccccggcatggtcatctactccggctccatagccccggggcgcttcaggggccgcgacgtgaccatccaggacgtcttcgagggggtgggcgcccacgccgcgggcaagatgagcgacgaggagctgcgggagctggaggagggggcctgcccgggcgcgggggcctgcggcggccagtacaccgccaacaccatggccatagcgctgcagtttttgggcctctcgccggtgggctccgccgacccgcccgccctggacggccgcaaggaggcggtctgcgaggaggcgggccggctggtgatgcgcctgctggagcgggacctcaagccctcggacatcctgagccgcgcggccttcgagaacgccatcgcctccgtggccgctaccgggggctccaccaacgcggtgctccacttcctcgccctcgcccaggaggcgggcatcccgctggacatagaggacttcgaccgggtcagctcccgcacccccatcatcgcggacctgaagcccggcggccgctttacggccgtggacatggaccgcgcagggggctcccggctgctgggcgcgcggatgctggaggcgaacctcgtggacggctcccagcccaccgtcaccgggcgcaccctggccgaggagttcgagggcgcgcgggagcgcccggggcaggaggtgatcctctccgccgagaggtccctcagcgagagcggcggcctggtgatcctcaagggcaacctggcccccgagggctgcgtggtgaaggtcgcgggctacacccgccgccgccacgagggtccggcgcgcgtcttcgactccgaggagcaggcgatggaggcggtccaggccggccggatctcggcgggcgacgtggtggtgatccgctacgaggggccgcgcggcggccccgggatgcgcgagatgctgggggtgaccgccgcgctggtgggccaggggctcggcgagagcgtggcgctgctaaccgacgggcgcttctcaggggccacccgcgggctcatggtgggccacgtcgccccggaggcggcccgcggcggccccatagccgccctgcgcgacggggaccgcatcacgatcgacgtcaccggcaggacgctgagcgtggcgctcaccggcgaggagctgcggaggcgcctggagaactggcgggagcccgagccgcgcttcaggctcggggtgatggccaagtacgccgccctcgtctcctcggcctccgagggggcggtgaccgtcccggactggcagcgccgcgccacctga

SEQ ID NO: 10371 - protein, 566 aa, Rubrobacter xylanophilus DSM 9941
MQTTDLRRKSRIMFEGRDRAPARSYLLGMGYTREDLEKPIVGVAHSWIETMPCNYNHRRLAEKVKEGIRAAGGTPMELNTIAISDGITMGTQGMKTSLVSREVIADSIELVGRGHMFDAMVILVGCDKTIPAGAMALARLDVPGMVIYSGSIAPGRFRGRDVTIQDVFEGVGAHAAGKMSDEELRELEEGACPGAGACGGQYTANTMAIALQFLGLSPVGSADPPALDGRKEAVCEEAGRLVMRLLERDLKPSDILSRAAFENAIASVAATGGSTNAVLHFLALAQEAGIPLDIEDFDRVSSRTPIIADLKPGGRFTAVDMDRAGGSRLLGARMLEANLVDGSQPTVTGRTLAEEFEGARERPGQEVILSAERSLSESGGLVILKGNLAPEGCVVKVAGYTRRRHEGPARVFDSEEQAMEAVQAGRISAGDVVVIRYEGPRGGPGMREMLGVTAALVGQGLGESVALLTDGRFSGATRGLMVGHVAPEAARGGPIAALRDGDRITIDVTGRTLSVALTGEELRRRLENWREPEPRFRLGVMAKYAALVSSASEGAVTVPDWQRRAT

SEQ ID NO: 10372 - DNA, 1836 bp, Mesorhizobium sp. BNC1
  CDS (1)..(1836): transl_table=11
atgcccgcttatcgctcccgcacgacaacccatggccgcaatatggccggtgcacgcggcctctggcgcgctaccggcatgaaggattccgatttcggcaagccgatcatcgccgtggtcaattccttcacgcagttcgtaccggggcacgtgcacctgaaagatctcggtcagctcgtggcgcacgagattgaggcggccggcggtgtggccaaggagttcaacacgattgccgtggatgatggcatcgccatgggccatgacggcatgctctattcgctgccctcgcgcgaactcatcgcggactcggtcgaatacatggtgaacgcccattgtgcggacgccatggtctgcatctccaattgcgacaagattacgccgggcatgctgatggcggccctgcggctcaatatcccggcggtattcgtgtccggcgggccgatggaggcgggcaaggttgtcctttccggtcagaaacgggcgctcgatctcgttgacgccatggttgccgcggcagacgaccgcgtgagcgacgaggatgtgcaggtgatcgaacggtccgcctgcccgacctgcggctcctgctcgggcatgttcaccgccaactccatgaattgccttacggaggcgctggggctctcgttgcccggcaacggctcgacgcttgccacccatgccgaccgccggcggctcttcgtcgaggctgggcatctcatcgtcgacctcgctcgccgctattacgaacaggatgacgacagcgtgctgccgcgcagcatcgcaagcttttcggctttccaaaatgcgatgacactcgacatcgccatgggcggctccaccaacaccgtgcttcacctgctcgccgccgcgcatgaggcggaggtggacttcaccatggaggagatagaccggctgtcacggcgcgtgcccgtgctctgcaaggtggcgcccgcgaagtcggacgtgcatatggaggacgtgcaccgcgccggcggcatcatggcgatcctgggcgaacttgaccggggaggcctcatcaatcgggacgtgccgacggttcacacggcaacccttggtcaggcaatcgagcattgggacatcacactgaccaaaagccagaaggtgcgcgacttcttccttgctgcgccgggcggcgtgcccacccaagtggcattcagccaggatcggcggtgggacgatctcgacctcgaccgccagagtggcgtgatccgcagcgccgaacatcccttctccaaggatggcgggctcgcggtgctgaagggcaatctcgccgaggacggctgcatcgtgaagacggccggggttgacgagtcgatcctgaaattttccggtccggcgcgcgtgttcgagagccaggattcggccgtgcaggcgatcctcgcaaacaagatcaatgccggcgacgtggtcgtgatccgctacgaaggaccgcgtggtgggccgggcatgcaggagatgctctatcccaccagctacctgaaggcgaagagcctgggcaaggattgcgcgctgattacggacgggcgtttctcgggcggcacgtccggcctttccatcgggcacgtctctcctgaggccgccaacggtggattgatcgggctggtgcgtgagggcgaccggatagagatcgatatcccgaaccggaagatccatctcgccgtggacgacgcggaaatcgcgcgtcgccgcgccgcacaggatgccaagggctggaagcctgcggaaaaccggaagcgacaggtcagcaccgcgcttaaggcctatgctgcttttgccacaagcgcggacaagggcgctgtgcgcaagctgccggattga

SEQ ID NO: 10373 - protein, 611 aa, Mesorhizobium sp. BNC1
MPAYRSRTTTHGRNMAGARGLWRATGMKDSDFGKPIIAVVNSFTQFVPGHVHLKDLGQLVAHEIEAAGGVAKEFNTIAVDDGIAMGHDGMLYSLPSRELIADSVEYMVNAHCADAMVCISNCDKITPGMLMAALRLNIPAVFVSGGPMEAGKVVLSGQKRALDLVDAMVAAADDRVSDEDVQVIERSACPTCGSCSGMFTANSMNCLTEALGLSLPGNGSTLATHADRRRLFVEAGHLIVDLARRYYEQDDDSVLPRSIASFSAFQNAMTLDIAMGGSTNTVLHLLAAAHEAEVDFTMEEIDRLSRRVPVLCKVAPAKSDVHMEDVHRAGGIMAILGELDRGGLINRDVPTVHTATLGQAIEHWDITLTKSQKVRDFFLAAPGGVPTQVAFSQDRRWDDLDLDRQSGVIRSAEHPFSKDGGLAVLKGNLAEDGCIVKTAGVDESILKFSGPARVFESQDSAVQAILANKINAGDVVVIRYEGPRGGPGMQEMLYPTSYLKAKSLGKDCALITDGRFSGGTSGLSIGHVSPEAANGGLIGLVREGDRIEIDIPNRKIHLAVDDAEIARRRAAQDAKGWKPAENRKRQVSTALKAYAAFATSADKGAVRKLPD

SEQ ID NO: 10374 - DNA, 1689 bp, Cytophaga hutchinsonii ATCC 33406
  CDS (1)..(1689): transl_table=11
ttgattattgtgagtacagaattaaataaaataagtaaacgtttaacccaggatccatctcagcccgcatctcaggcaatgatgtatggagctgggtttacagacgaggatatgaaaaagccaatcgttggtattggcagtacaggtttcgatggtaacacatgtaacatgcacttaaatatccttgccggacaagttaaaggcagtattacgcgtggcggtatggttggacttggtttcaacacgatcggcgtaagtgatgggatttcaatgggtacagaagggatgcgtttctctcttgtatcacgcgacgtaattgcggattcaattgaaacaatttgtgaagctcattactacgatgcgttggtaaccgttgtaggttgtgataaaaacatgcctggcgcacttattgcaatggctcgcttgaatcgcccgtcaatcatggtatacggcggtacaattcactcaggtcactacaaaggcgaaaaactaaacatcgtttcagcttttgaagcattgggtaaaaaagtagccggcacaatcactgaagaagattaccagggtgtaattaaaaatgcatgtccgggtgcgggtgcctgtggtggcatgtacacagcaaacacaatggcatctgcaattgaagcaatgggattaacacttccttattcttcaacggcacctgcaacaagcgaaaagaaaaaggcagaaacattggcgcttggcaaagcaatgatgcatctgctggagaaagatatcaagccgcgtgatatcatgacattcgaggcatttgaaaatgctatccgtgtgatcctggtattgggtggttctacaaatgcggtaatgcacttaattgcaattgcaaaagctgcgggtgttaaattaacgatcgatgattttcaacgcatcggtaatacaacaccgttactggcagatttaaaaccaagcggcaagtatatgatggaagatatggacgctattggcggcgtaccttctgtaatgcgtttgttggcaaaacataatttacttcatttagattgtatgactgtaacaggtaaaactgttggagagaatttaaaagaagctcaggatcttcctacggatcaggatctgatgtatgcatgggaaaacccgatcaaacaaacaggtcacttacagattctgtatggcaatcttgcaccacaaggttctgtggcaaagattaccggtaaagaaggaacatactttgaaggtcctgcacgcgtgtacgactctgaagaggctgtaaacaaaggtttagaggctaatgaagtaaaatcaggtgaagtaattgtaatccgttatgttggtccgaaaggcggcccgggcatgcctgaaatgttgaagccaactgctctattaatgggcttaggtttaggcaacgaatgtgccttaatcacagacggacgtttctctggcggtacacatggtttcgtagttggccacattacaccggaagcaacagaagggggtatgattggccttgtaaaaaatggcgacatcatccgtattgatgcagtaaacagagtcctagaagttaaaatttccgaggaggaagtaaccaaacgccgtgcggcatgggtaaaacctgcgccaagagctacatccggcgtgttatataaatacatgaaattagtatcttctgcatctgagggatgcgttaccgataattaa

SEQ ID NO: 10375 - protein, 562 aa, Cytophaga hutchinsonii ATCC 33406
MIIVSTELNKISKRLTQDPSQPASQAMMYGAGFTDEDMKKPIVGIGSTGFDGNTCNMHLNILAGQVKGSITRGGMVGLGFNTIGVSDGISMGTEGMRFSLVSRDVIADSIETICEAHYYDALVTVVGCDKNMPGALIAMARLNRPSIMVYGGTIHSGHYKGEKLNIVSAFEALGKKVAGTITEEDYQGVIKNACPGAGACGGMYTANTMASAIEAMGLTLPYSSTAPATSEKKKAETLALGKAMMHLLEKDIKPRDIMTFEAFENAIRVILVLGGSTNAVMHLIAIAKAAGVKLTIDDFQRIGNTTPLLADLKPSGKYMMEDMDAIGGVPSVMRLLAKHNLLHLDCMTVTGKTVGENLKEAQDLPTDQDLMYAWENPIKQTGHLQILYGNLAPQGSVAKITGKEGTYFEGPARVYDSEEAVNKGLEANEVKSGEVIVIRYVGPKGGPGMPEMLKPTALLMGLGLGNECALITDGRFSGGTHGFVVGHITPEATEGGMIGLVKNGDIIRIDAVNRVLEVKISEEEVTKRRAAWVKPAPRATSGVLYKYMKLVSSASEGCVTDN

SEQ ID NO: 10376 - DNA, 1845 bp, Rhodococcus sp. RHA1
  CDS (1)..(1845): transl_table=11
atgcccccgctgaggtcccgaaccaccaccgcaggacgaaatgccgcaggcgcccgcgcactgtggcgcgccaccggaatgaccgactccgacttcgggaagccgatcgtcgcgatcgcgaactcgtacacgcagttcgttcccgggcacgtccacctgaagaacgtcggcgacatcgtcgccgacgccgtccgcgccgccggtggtgtacctcgcgagttccacacgatcgccgtcgacgacggcatcgcgatgggacacggcggcatgctgtattcccttcccagccgcgagatcatcgccgactccgtcgagtacatggtcaacgcgcacaccgccgacgcactcgtctgcatctccaactgcgacaagatcactcccggaatgctcaatgccgcattgcgtttgaacgttccgaccgtgttcgtgtcgggcggcccgatggaggccggcaaggcggtggtggtgaacggtgtcgcccaggcaccgaccgacctcatcacggcgatctcggcgagcgccaacgacgaggtcgacgaggaaggtctgtccgaggtcgagcgcagcgcctgcccgacgtgcgggtcgtgctcgggcatgttcaccgcgaactccatgaactgcctcaccgaggcgctcggtctggcgttgccgggcaacggttccacgctggccacccacgaggcccgtcgcgcgctgttcacccgcgcgggcaccaccgtcgtcgaagccgccctgcggtactaccgggacgaggacgactccgtcctcccccgtaacatcgcgacgcccgccgcattccgcaacgcgatggcactggacgtcgcaatgggcggttccaccaacacggtcctgcacaccctcgcggccgcgcaggagggtgaggtctacgacttcgacctcgacaagatcgacgagatcagccgcaaggtgccgtgcctgtcgaaggtctcccccaactcggactaccacatggaggacgtgcaccgggcgggcggaatccccgccatcctcggcgaactccgccgggccggcctgctcgagagcgacgtctcgaccgtgcacaccgagagcttcgacgagtggctcgacacgtgggacatccggtccggcaaggcatccgacgaggcagtcgaactcttccacgccgcacccggcggtgtccgcaccaccgaaccgttctcgacgaacaaccgctggtcgtcgctcgacacggacgccgccaacggctgcatccgcgacttcgagcacaagcacacggtcgaaggcggcctggccgtgctgcgcggaaacatcgccgtcgacggcgccgtcatcaagacggcgggcatcgacgaagacctgttccacttccagggacccgcgcgcgtcgtggagtctcaggaagaggcggtgtcggtgatcctcgggaagaagatccagcccggcgaggtcctagtcgtgcgttacgagggtcctgcaggcggaccgggcatgcaggagatgctgcaccccaccgcattcctcaagggctccggcctcggaaagaagtgtgcgctgatcaccgacggccgattctccggcggttcctcgggactgtccatcggccacatctcccccgaggccgccagcggcggcgccatcggcctggtggaggacggcgaccaaatcctcatcgacatcgcgacccgcacgctgaagctcctcgtcgacgacgcggtgctcgccgagcgccgggcgaagatggagtcgtccgagcgtccgtggcagccggtgaaccgcgaacgcaccgtcaccaccgccctgcgggcgtacgccgcgctggccacgtccgcagacaagggcgcggtccgtcaggtcccctga

SEQ ID NO: 10377 - protein, 614 aa, Rhodococcus sp. RHA1
MPPLRSRTTTAGRNAAGARALWRATGMTDSDFGKPIVAIANSYTQFVPGHVHLKNVGDIVADAVRAAGGVPREFHTIAVDDGIAMGHGGMLYSLPSREIIADSVEYMVNAHTADALVCISNCDKITPGMLNAALRLNVPTVFVSGGPMEAGKAVVVNGVAQAPTDLITAISASANDEVDEEGLSEVERSACPTCGSCSGMFTANSMNCLTEALGLALPGNGSTLATHEARRALFTRAGTTVVEAALRYYRDEDDSVLPRNIATPAAFRNAMALDVAMGGSTNTVLHTLAAAQEGEVYDFDLDKIDEISRKVPCLSKVSPNSDYHMEDVHRAGGIPAILGELRRAGLLESDVSTVHTESFDEWLDTWDIRSGKASDEAVELFHAAPGGVRTTEPFSTNNRWSSLDTDAANGCIRDFEHKHTVEGGLAVLRGNIAVDGAVIKTAGIDEDLFHFQGPARVVESQEEAVSVILGKKIQPGEVLVVRYEGPAGGPGMQEMLHPTAFLKGSGLGKKCALITDGRFSGGSSGLSIGHISPEAASGGAIGLVEDGDQILIDIATRTLKLLVDDAVLAERRAKMESSERPWQPVNRERTVTTALRAYAALATSADKGAVRQVP

SEQ ID NO: 10378 - DNA, 1836 bp, Haemophilus somnus 129PT
  CDS (1)..(1836): transl_table=11
atgcctaaactacgttcagcgaccagtacacaaggtcgcaatatggcaggtgcacgtgctttatggcgggcaacaggaatgaaagaaaatgatttcggtaaaccgattattgcggttgtgaactcatttactcaatttgtacctggacatgttcacttaaaagatatggggcaactagttgctactgaaattgaaaaatttggtggggtagcaaaagagtttaataccatcgctgtagatgatggaattgctatggggcatggaggtatgctctattctttaccgagccgagatttaattgccgatagtgttgaatatatggttaacgctcactgtgctgatgcgatggtttgtatttctaactgtgataagatcacaccgggaatgttaatggctgcattgcgtttgaatattccaacagtctttgtttcaggtggcccaatggaagcgggtaaaaccaaattatccgatcaaatcattaaattagacttagtggatgctatgattcaaggtgcaaatccgaatgtttcagatgatgtcagcgaacaaattgagcgttctgcttgtccaacttgtggctcttgttcaggtatgtttaccgccaattcaatgaattgtttaaccgaagcactgggcttgagcttaccgggaaacggctcatgtttggctactcatgccgaccgcaaacaacttttcttagcggcaggaaaacagattgttgaactgtgcaaacgttattatgaacaagatgatacatctgttttacctcgctcaattgccacaaaagaagcctttgataacgctatgagtcttgatatcgctatgggtggttcgaccaatactgttttgcatttattagctgctgcacaggaagcggaagtcaatttcactatggcggatattgatcgcctttctcgggtagtaccgtgcctgagcaaagttgcaccaaatacccaaaagtatcatatggaagatgtgcatcgtgctggcggtattatggcaattttaggtgaattagatcgtgccggcttgttgaatagccaaactcgtacaattttgggtatgagcataggcgaacaaattgcaaaatatgacatcaaactcactcaagataaagccatacataaatttttccgtgcaggaccagcagggattcgcactactcaagctttcttgcaagattgtcgttgggatacggttgatgatgatcgtgaaaatggctgtattcgcagtaaagaatttgcgtacagccaagatggtgggttagctatgttgtcaggcaatattgctttagatggctgtatagtcaaaactgctggagtagatgaaagcattttaaagttcagcggtaaagccattgtatttgaaagtcaagaagatgctgtatcaggcattttggggggtaaagtacaagccggacatgttgtggtgattcggtatgaaggaccaaaaggcggacctggtatgcaagaaatgctttatccaaccagttatctcaaatctatgggcttaggtaaagcttgtgccttacttacagatggtcgtttctccggtggtacatcgggactgtctatcggacactgctcaccggaggcggcggcaggcggtttaattggtgtagtgaaagatggtgatattattgagattgatattccaaatcgtcgcatcgaattgatggtatccgaagaagaacttgctgagcgtcgagcagagcaagataaacttggctggaaaccagctaatcgccagagagaagtttcctttgccctaaaagtttacggatatttcgcaacatctgcggacaagggtgcagtacgagataaaacgaagatataa

SEQ ID NO: 10379 - protein, 611 aa, Haemophilus somnus 129PT
MPKLRSATSTQGRNMAGARALWRATGMKENDFGKPIIAVVNSFTQFVPGHVHLKDMGQLVATEIEKFGGVAKEFNTIAVDDGIAMGHGGMLYSLPSRDLIADSVEYMVNAHCADAMVCISNCDKITPGMLMAALRLNIPTVFVSGGPMEAGKTKLSDQIIKLDLVDAMIQGANPNVSDDVSEQIERSACPTCGSCSGMFTANSMNCLTEALGLSLPGNGSCLATHADRKQLFLAAGKQIVELCKRYYEQDDTSVLPRSIATKEAFDNAMSLDIAMGGSTNTVLHLLAAAQEAEVNFTMADIDRLSRVVPCLSKVAPNTQKYHMEDVHRAGGIMAILGELDRAGLLNSQTRTILGMSIGEQIAKYDIKLTQDKAIHKFFRAGPAGIRTTQAFLQDCRWDTVDDDRENGCIRSKEFAYSQDGGLAMLSGNIALDGCIVKTAGVDESILKFSGKAIVFESQEDAVSGILGGKVQAGHVVVIRYEGPKGGPGMQEMLYPTSYLKSMGLGKACALLTDGRFSGGTSGLSIGHCSPEAAAGGLIGVVKDGDIIEIDIPNRRIELMVSEEELAERRAEQDKLGWKPANRQREVSFALKVYGYFATSADKGAVRDKTKI

SEQ ID NO: 10380 - DNA, 1686 bp, Trichodesmium erythraeum IMS101
  CDS (1)..(1686): transl_table=11
atgccagagaatttgagaagtcaattagtcaccaaaggagtacaacgcgctcccaaccgagctatgctgagagctgtgggttttgaagattcagactttaccaaaccaattattggggttgccaatgcccatagcactattactccctgcaacatgggtattaatgatttggccatgagagctgtaagtggagtgaaagaagctggaggaatgccgcagatatttggaactattactattagcgatggaatttctatgggtactgaggggatgaaatattctctggtttctagagacgttattgctgattccatcgaaacagtttgtaatggccaaacaatggatggagttctagctattggtggatgcgataaaaatatgccaggagcaatgatagcgatcgctaggatgaatattcctgctatcttcgtatacggtggtactattaaaccaggcaactacaacggtaaagacctaacagttgtaagtgcttttgaagcagtgggagaatatagtgctggaaaaattgacgaaacagaattaacagaagttgaacgtagagcttgccctggtgctggttcctgtggaggaatgtttactgccaatactatgtcttcagcttttgaagcaatgggtatgagtctcatgtattcatcaacaatggctgcagaagatgcagaaaaagcagatagcacagaaaaatcagctcatgttttagtagaagctattcgcaaacaaattttacctagtcaaattattacccgtaaagctatcgaaaatgcaatttcagtaattatggctgtagggggttccactaatgcagtactacacctattagcaattgcttatgctgcaaatgtgaagttatctttagatgattttgaaataattagggccagagtacctgtattatgtgatttgaaacctagtggtaaatacgttacaacaaatttgcatcaagcgggtggaattcctttagtaatgaaaatgcttttagaacatgatttactccacccagatgctttaaccataacaggtaagactattggagagcaattaacaaatataccttctgaaccaccttctaatcaagacgtgattcgcccttggaataatcctatgtatgctcaaggacacttggctattttaaaaggaaatttggcgacagagggagcagttgctaaaattacaggagtgaagaacccagaaataacaggactagcaagagtatttgattcggaagaagcttgtttagaagcaatattagcagggaaaattcaagcagggaatattattgtagttcgctatgaaggtccaaaaggtggaccaggtatgcgagaaatgttagcaccaacttcggctattattggtgctggtttgggggataaagtgggattaattactgatggtaggttttctggtggtacttatggtatggtggttggtcatgtagctccagaagctgcagtaggtggcacgatcgctctagttaaggaaggagatatgattactattgatgctcataagcgtttactacagttaaatatttctgatgaggaattagaaaagcgtcgtcaagtatggaaaccacgaaaaccccaatatactagaggtgtattagctaaatatgctaagttagtttcttctagcagtgttggagcagtaactgacgctggattaggttga

SEQ ID NO: 10381 - protein, 561 aa, Trichodesmium erythraeum IMS101
MPENLRSQLVTKGVQRAPNRAMLRAVGFEDSDFTKPIIGVANAHSTITPCNMGINDLAMRAVSGVKEAGGMPQIFGTITISDGISMGTEGMKYSLVSRDVIADSIETVCNGQTMDGVLAIGGCDKNMPGAMIAIARMNIPAIFVYGGTIKPGNYNGKDLTVVSAFEAVGEYSAGKIDETELTEVERRACPGAGSCGGMFTANTMSSAFEAMGMSLMYSSTMAAEDAEKADSTEKSAHVLVEAIRKQILPSQIITRKAIENAISVIMAVGGSTNAVLHLLAIAYAANVKLSLDDFEIIRARVPVLCDLKPSGKYVTTNLHQAGGIPLVMKMLLEHDLLHPDALTITGKTIGEQLTNIPSEPPSNQDVIRPWNNPMYAQGHLAILKGNLATEGAVAKITGVKNPEITGLARVFDSEEACLEAILAGKIQAGNIIVVRYEGPKGGPGMREMLAPTSAIIGAGLGDKVGLITDGRFSGGTYGMVVGHVAPEAAVGGTIALVKEGDMITIDAHKRLLQLNISDEELEKRRQVWKPRKPQYTRGVLAKYAKLVSSSSVGAVTDAGLG

SEQ ID NO: 10382 - DNA, 1860 bp, Shewanella sp. MR-4
  CDS (1)..(1860): transl_table=11
atgccaaagttacgttcagcaaccagtaccgaaggccgcaatatggcgggtgcccgtgcgctatggcgcgccacaggggtgaaagacaatgattttggtaagccgattattgcgattgccaactcctttactcagtttgtccctggccatgtgcacttaaaagatatgggctctctggtggcgggcgccatcgaagaagcaggcggtattgccaaagaattcaacaccatcgctgtggatgatggtatcgccatgggccacggtggcatgctctacagtctgccttcgcgggagcttatcgccgatagcgtcgagtatatggtcaatgcccactgcgctgatgcgctggtttgtatctctaactgcgacaaaatcacccccggcatgttgatggcggcgctgcgcctcaatatccccgtggtgtttgtgtcgggcgggccgatggaggcgggtaaaaccaaactgtcggacaagcttatcaaactcgatttagtcgatgccatggtggcggcggcagactcgagtgtgagcgatgaagatagcgctaaaatcgaacgtagtgcttgccctacatgtggttcctgttcgggcatgtttaccgctaactcgatgaactgtttaaccgaagctttaggtctgtcgctgccgggcaacggctccatgctcgcgacccatgccgatcgccgcgaactgtttttagaagcgggccgccgcgtaatggcgctaaccaaacgttactacgaaaaagatgatgcctcggcactgccgcgcaacatcgccagctttaaagcctttgagaacgccatggcgctggatatcgccatgggcggttcgtctaatactgtgttgcacttattggctgcggcgcaggaggcagacgtggcatttactatggacgatatcgaccgtatgtcgcgccaagtgccgcatctgtgtaaggtggcgccgtcgaccgctaaataccatatggaagatgtgcaccgcgccggtggtgtgatgggcatcttaggcgaactcgaccgcgccggactgctgcataccgatgtgccacacgtcgccgccgatgcgggcggcaatctcaagtcggtgctcgcaaagtacgatgtcatgcaaacccaagatgacaacgtaaaacaattttttatggctggacctgcgggcattcctaccactaaagcctttagccaagactgccgctggccatcgctggacgatgacaggcgtgaaggttgtatccgtagccgcgaatttgccttcagccaagagggcggtttggccgtgttatcgggcaatctggccgacaatggctgtatcgttaaaactgccggtgtggatgagtctaacctgacctttactggcagcgctcgggtgtacgaaagccaagatgacgcagtcgctggcatcttaggtggcgaagtggtggcgggtgatgtggtggtgattcgttacgaagggccaaaaggcggcccaggtatgcaagaaatgttgtaccccaccagttacttaaaatcccgtggcttaggcaaggcctgcgcgctgatcaccgacggccgtttctctggtggaacttccggtttatccatcggccatgtatcgcctgaagcggcggcgggcggcactattgccttgattgaaaacggcgatcggatcgaaatcgatattcctaagcgcagtatcaagcttgcggtgagtgatgctgaattggctgcgcgccgtgaaaccatgctcgcccgtgggccaatggcgtggaaaccgctttcgcgtcagcgttatgtgtcgatggcgctcaaagcctacgccatgcttgccaccagtgccgataagggcgcggtgcgcgatcgcagtaagttggaggactga

SEQ ID NO: 10383 - protein, 619 aa, Shewanella sp. MR-4
MPKLRSATSTEGRNMAGARALWRATGVKDNDFGKPIIAIANSFTQFVPGHVHLKDMGSLVAGAIEEAGGIAKEFNTIAVDDGIAMGHGGMLYSLPSRELIADSVEYMVNAHCADALVCISNCDKITPGMLMAALRLNIPVVFVSGGPMEAGKTKLSDKLIKLDLVDAMVAAADSSVSDEDSAKIERSACPTCGSCSGMFTANSMNCLTEALGLSLPGNGSMLATHADRRELFLEAGRRVMALTKRYYEKDDASALPRNIASFKAFENAMALDIAMGGSSNTVLHLLAAAQEADVAFTMDDIDRMSRQVPHLCKVAPSTAKYHMEDVHRAGGVMGILGELDRAGLLHTDVPHVAADAGGNLKSVLAKYDVMQTQDDNVKQFFMAGPAGIPTTKAFSQDCRWPSLDDDRREGCIRSREFAFSQEGGLAVLSGNLADNGCIVKTAGVDESNLTFTGSARVYESQDDAVAGILGGEVVAGDVVVIRYEGPKGGPGMQEMLYPTSYLKSRGLGKACALITDGRFSGGTSGLSIGHVSPEAAAGGTIALIENGDRIEIDIPKRSIKLAVSDAELAARRETMLARGPMAWKPLSRQRYVSMALKAYAMLATSADKGAVRDRSKLED

SEQ ID NO: 10384 - DNA, 1860 bp, Shewanella sp. MR-7
  CDS (1)..(1860): transl_table=11
atgccaaagttacgttcagcaaccagtaccgaaggccgcaatatggcgggtgcccgtgcgctatggcgcgccacaggggtgaaagacaatgattttggtaagccgattattgcaattgccaactcctttactcagtttgttcccggccatgtgcatttaaaggatatgggttctctggtggcgggcgccatcgaagaggcgggcggtattgccaaggaattcaacaccatcgccgtcgatgatggtatcgccatgggccacggtggcatgctctacagtctgccttcgcgggagcttatcgccgatagcgtcgagtatatggtcaatgcccactgcgccgatgcgctggtttgtatctctaactgcgacaaaatcacccccggcatgttgatggcggcgctgcgcctcaatatccccgtggtgtttgtgtcgggcgggccgatggaggcgggtaaaaccaaactgtcggacaagcttatcaaactcgatttagtcgatgccatggtggcggcggcagactcgagtgtgagcgatgaagatagcgctaaaatcgaacgtagtgcttgccctacatgtggttcctgttcgggcatgtttaccgctaactcgatgaactgtttaaccgaagctttaggtctgtcgctgccgggcaacggctccatgctcgcgacccatagcgatcgccgcgaactgtttttagaagcaggccggcgcgtaatggcgctgaccaaacgttactacgaacaagatgatgtctcggcactgccgcgcaacatcgccagctttaaagcctttgagaacgccatggcgctggatatcgccatgggcggttcgtccaatactgtgttgcacttattggctgcggcgcaggaggcggacgtggcattcactatggacgatatcgaccgtatgtcgcgccaagtgccacatctgtgtaaggtggcgccgtcgaccgctaaataccatatggaagatgttcaccgcgctggtggcgtgatggggatcttaggcgagctagaccgcgccggactgctgcataccgatgtgccacatgttgccgccgatgcggggggcaatctcaagtcagtgctcgccaagtacgatgtcatgcaaacccaagatgacaaagtaaaacaattctttatggcggggcctgcgggcattcctaccactaaagcctttagccaagactgccgctggccatcgctggacgatgacaggcgtgaaggttgtatccgtagccgcgaatttgccttcagccaagagggcggtttggccgtgttatcgggcaatctggccgacaatggctgtatcgttaaaactgccggtgtggatgagtctaacctgacctttactggcagcgctcgggtgtacgaaagccaagatgacgctgtcgctggcattttaggtggcgaagtggtggcgggtgatgtggtggtgattcgttacgaagggccaaaaggcggcccaggtatgcaagaaatgttgtaccccaccagttacttaaaatcccgtggcttaggcaaggcctgcgcgctgatcactgatggccgcttctctggtggaacttccggtttatccatcggccatgtgtcgcctgaggcggcggcgggcggcacgattgccttgattgaaaacggcgatcgcatcgaaatcgatattcctaagcgcagtatcaagcttgctgtgagtgatgctgaattggctgcgcgccgtgaaaccatgctcgcccgtgggccaatggcgtggaaaccgctttcgcgtcagcgttatgtgtcgatggcgctcaaagcctacgccatgcttgccaccagtgccgataagggcgcggtgcgcgatcgcagtaagttggaggactga

SEQ ID NO: 10385 - protein, 619 aa, Shewanella sp. MR-7
MPKLRSATSTEGRNMAGARALWRATGVKDNDFGKPIIAIANSFTQFVPGHVHLKDMGSLVAGAIEEAGGIAKEFNTIAVDDGIAMGHGGMLYSLPSRELIADSVEYMVNAHCADALVCISNCDKITPGMLMAALRLNIPVVFVSGGPMEAGKTKLSDKLIKLDLVDAMVAAADSSVSDEDSAKIERSACPTCGSCSGMFTANSMNCLTEALGLSLPGNGSMLATHSDRRELFLEAGRRVMALTKRYYEQDDVSALPRNIASFKAFENAMALDIAMGGSSNTVLHLLAAAQEADVAFTMDDIDRMSRQVPHLCKVAPSTAKYHMEDVHRAGGVMGILGELDRAGLLHTDVPHVAADAGGNLKSVLAKYDVMQTQDDKVKQFFMAGPAGIPTTKAFSQDCRWPSLDDDRREGCIRSREFAFSQEGGLAVLSGNLADNGCIVKTAGVDESNLTFTGSARVYESQDDAVAGILGGEVVAGDVVVIRYEGPKGGPGMQEMLYPTSYLKSRGLGKACALITDGRFSGGTSGLSIGHVSPEAAAGGTIALIENGDRIEIDIPKRSIKLAVSDAELAARRETMLARGPMAWKPLSRQRYVSMALKAYAMLATSADKGAVRDRSKLED

SEQ ID NO: 10386 - DNA, 1854 bp, Alkalilimnicola ehrlichei MLHE-1
  CDS (1)..(1854): transl_table=11
atgccgcagtatcgctccaagacgtccaccgccggtcgcaacatggcgggcgcccgcgccctctggcgggccaccggcatgaaggatggcgacttcgacaagcccatcatcgccgtcgccaactccttcacccagttcgtccccggccacgtccacctgaaggacctggggcagctggtgatcgaagagatcgaaaaggccggcggcgtgggcaaggagttcgacaccatcgccgtggacgacggcatcgccatgggccacgacggcatgctctacagcctgcccagccgggacatcattgccgactcggtggagtacatggtcaatgcccactgcgccgacgcgctggtgtgcatctccaactgcgacaagatcacccccggcatgctgatggccgccatgcggctgaacatccccgtggtgttcgtctccggcgggcccatggaggcgggcaagacgaagctggccagcggcgaggagatcgccaccgacctggtggatgccatggtggccgcggccaacccggaggtctccgacgaggacgtggccatctacgagcgctccgcctgccccacctgcggctcctgctccggcatgttcaccgccaactccatgaactgcctcaccgaggccctgggcctgagcctgccgggcaacggctcgctgctggccacccacaccgaccgcgagcgcctgttccgcgatgccgggcgcacggtggtggaactggcccggcgctactacgagcaggacgacgagcgctgcctgccgcgcaacatcgccagccggtccgccttccgcaacgccatgagcctggacatcgccatgggcgggtccaccaacacggtgctgcacctgctggccgccgcccaggagggcgaggtcaagttcgacatggtcgacatcgacaagctctcccggaaggtgcccaacctctgcaaggtcgcccccgccaccccgctctttcacatggaggacgtgcaccgggccggcggcatcatgggcatcctcggcgagctggaccgggccaacctgctggacaccaccgtgcccacggtccacagcgacaccctggccgaggccctggaacgctgggacgtcaaacgcaccgacgacccggcggtgcacgacttcttcaaggccggtccggccggcgtccccagccagaccgccttcagccagtccacccgcttcgaagaactggacctggaccgggagtgcggctgcatccgtaccctggagcacgcctacagcaaggacggcgggctggcggtgctctacggcaacctggccgagcggggctgcatcgtgaagaccgccggggtggatgagtccatcctcaccttcgaagggccggcggtgatcttcgagagccaggacgccgccgtggaggggattctcggcggccaggtgaagaagggcaatgtggtcatcatccgctacgaggggccgcggggcgggccgggcatgcaggagatgctctaccccaccagctacctcaagtcccgcggcctgggcaaggactgcgcgctgatcaccgacggccgcttctccggcggcacctcggggctgtccatcggccacgtctccccggaggcggccgagggcggcaacatcgccctgatcgagccgggcgaccggatctgcatcgacatccccaagcgcagcatccgcatcgatatcagcgacgaggaattggcccgccgccgcgaggccatggcggccaagggccgcgatgcctggaagcccgccgccccccgccagcgcaaggtcagcacggccctgaaagcctacgccaagctgaccaccagcgcggacaagggcgcggtgcgaaacctggacctgctggactga

SEQ ID NO: 10387 - protein, 617 aa, Alkalilimnicola ehrlichei MLHE-1
MPQYRSKTSTAGRNMAGARALWRATGMKDGDFDKPIIAVANSFTQFVPGHVHLKDLGQLVIEEIEKAGGVGKEFDTIAVDDGIAMGHDGMLYSLPSRDIIADSVEYMVNAHCADALVCISNCDKITPGMLMAAMRLNIPVVFVSGGPMEAGKTKLASGEEIATDLVDAMVAAANPEVSDEDVAIYERSACPTCGSCSGMFTANSMNCLTEALGLSLPGNGSLLATHTDRERLFRDAGRTVVELARRYYEQDDERCLPRNIASRSAFRNAMSLDIAMGGSTNTVLHLLAAAQEGEVKFDMVDIDKLSRKVPNLCKVAPATPLFHMEDVHRAGGIMGILGELDRANLLDTTVPTVHSDTLAEALERWDVKRTDDPAVHDFFKAGPAGVPSQTAFSQSTRFEELDLDRECGCIRTLEHAYSKDGGLAVLYGNLAERGCIVKTAGVDESILTFEGPAVIFESQDAAVEGILGGQVKKGNVVIIRYEGPRGGPGMQEMLYPTSYLKSRGLGKDCALITDGRFSGGTSGLSIGHVSPEAAEGGNIALIEPGDRICIDIPKRSIRIDISDEELARRREAMAAKGRDAWKPAAPRQRKVSTALKAYAKLTTSADKGAVRNLDLLD

SEQ ID NO: 10388 - DNA, 1842 bp, Hyphomonas neptunium ATCC 15444
  CDS (1)..(1842): transl_table=11
atgatcccctaccgttcacgcacctccacccacggccgcaacatggccggtgcccgcggcctctggcgcgcgacgggcatgacggacagcgatttcggcaagccgatcatcgcggtggtgaactcgttcacccagttcgtgccggggcatgtgcacctgaaggatctcggccagcttgtagcccgggaaatcgaggcggccggcggcgtggccaaggaattcaacacgattgcggtcgatgacggcatcgccatgggccatgacgggatgctctactctctgccttcgcgcgagatcattgccgacagcgtggaatatatggtcaacgcccactgcgcggacgcgatggtgtgcatctccaattgcgacaagatcacgcccggcatgatgatggccgcgatgcgcctcgacattccggtcgtgttcgtttccggcgggccgatggaagcgggcaaggtgaacatcgatggcgagctgcgcgcggtggacctgatcgacgcgatgatcgaagcggcaaaccctgaccgcacggacgcggaagtcgacgagtttgagaagaatgcctgcccaacctgcgggtcgtgctcgggcatgtttacggccaactcgatgaattgcctcgccgaagcgctcggcctcgcgctgccgggcaatggctcgacactggcgacgcatgctgaccgcgaggcgctgttccggcgcgcgggacggcggatcgtggagctgaccaaagcctattatgaaggcggcgacaccggcgtttcggcgcgcgggattgccaccaaggcggcgttcgagaatgccatcacgctggacatcgcgatgggcggatcgaccaatacgatcctccacctgctggcgatggcacgtgagggcgaggtggactttacgctcgccgatattgaccggctgagccgggtgacgccgtgcctctgcaaggtggcgcccgcggtgcagaatgtgcacatggaagatgttcaccgcgcgggcgggattttcggcatcctcggagaactgggccgggcggggaaactcgatacctccgtgcgcacgatccatgaagacacgatggccgaggcgctgagcaaatgggatattgcggtaacgaacaatcccgaggtgcaggagctgttcctggcggcgccgggcggggttcgcacgacgcaggcgttcagccaggcgcgccggtataaagatctggatacggaccgggaaaagggcgtcatccgctcggccaagcatgccttctcgaaggatggcgggctcgcagtgctgtttggcaacattgctgagatgggctgcgtggtgaagacggccggcgtggatgacagcattctgaagttttccggcccggcggtgatctgcgagagccaggaagaggcgtgcgagcgcatcctgaagaagcgcgtgaaggcgggcgatgtcgtcatcatccgctatgaaggcccgcgcggtggccccggcatgcaggagatgctctatccgacatcgtatctcaaggcgatgcagctgggcaaggaatgtgctctgatcacggacggacgcttctcgggcggaacgtctggcctctcgatcgggcatgtcagcccggaagcggctgaaggcggggcgatcgggcttctgcacgaaggggatatcatcgagatcgacatcccgaaccggacgatcaatgcgaaggtttcagccgaagagttcgccaaacgccgcgccgagatggacgccaagggggcggccgcctggaagccggtggaagagcgcccgcgcaaggtgagccgtgcgctgaaggtttatgcggcgcatgtggggaatgcttctctgggcgcagtgcggctcgatccttag

SEQ ID NO: 10389 - protein, 613 aa, Hyphomonas neptunium ATCC 15444
MIPYRSRTSTHGRNMAGARGLWRATGMTDSDFGKPIIAVVNSFTQFVPGHVHLKDLGQLVAREIEAAGGVAKEFNTIAVDDGIAMGHDGMLYSLPSREIIADSVEYMVNAHCADAMVCISNCDKITPGMMMAAMRLDIPVVFVSGGPMEAGKVNIDGELRAVDLIDAMIEAANPDRTDAEVDEFEKNACPTCGSCSGMFTANSMNCLAEALGLALPGNGSTLATHADREALFRRAGRRIVELTKAYYEGGDTGVSARGIATKAAFENAITLDIAMGGSTNTILHLLAMAREGEVDFTLADIDRLSRVTPCLCKVAPAVQNVHMEDVHRAGGIFGILGELGRAGKLDTSVRTIHEDTMAEALSKWDIAVTNNPEVQELFLAAPGGVRTTQAFSQARRYKDLDTDREKGVIRSAKHAFSKDGGLAVLFGNIAEMGCVVKTAGVDDSILKFSGPAVICESQEEACERILKKRVKAGDVVIIRYEGPRGGPGMQEMLYPTSYLKAMQLGKECALITDGRFSGGTSGLSIGHVSPEAAEGGAIGLLHEGDIIEIDIPNRTINAKVSAEEFAKRRAEMDAKGAAAWKPVEERPRKVSRALKVYAAHVGNASLGAVRLDP

SEQ ID NO: 10390 - DNA, 1839 bp, Rhizobium leguminosarum bv. viciae 3841
  CDS (1)..(1839): transl_table=11
atgccagtttaccgttccagaaccacgacccatggccgcaacatggcgggcgcccgcggcctttggcgcgccacgggcatgaaggattcggatttcggcaagccgatcatcgcggtggtgaattccttcacccagttcgtgcccggtcacgtgcacctgaaggacctcggccagctcgttgcccgcgagatcgaggcggccggcggtgtcgccaaggaattcaacacgatcgccgtcgatgatggcatcgccatgggccatgacggcatgctttattcgctgccctcgcgcgagctcatcgccgacagcgtcgaatacatggtcaatgcccattgcgccgacgccatggtctgtatttccaactgcgacaagatcactcccggcatgctgatggcatcgctgcgcctcaatatcccgacggtcttcgtctcgggcggtccgatggaagccggtaaggtcgtgatgcacggcaagacgcatgcactcgacctcgtcgacgccatggttgccgctgccgatgacaagatcagcgacgaggacgtccagaccatcgagcgttcggcctgtccgacctgtggttcctgctccggcatgttcacggccaattcgatgaactgcctgacggaagccctcggcctgtcgctgcccggcaacggctcgacgcttgccacccatctcgaccgcaagcgcctcttcgtcgaggccggccacctgatcgtcgatctcgcccgccgttattacgagcaggatgacgtcaaggcgctgccgcgcaccatcgcttccaaacaggcgtttgagaatgccatgacgctcgatatcgccatgggcggttccaccaatacggtcctgcacattcttgccgccgcccatgaaggcgagatcgatttcactatggccgatatcgacgcgctgtcgcgccgcgtgccgtgcctgtcgaaggtcgcccccgccaagagcgatgttcatatggaagacgtccatcgcgccggcggcatcatgtcgatcctcggcgaactcgacaagggcggtctcttgaaccgcgattgcccgaccgtgcatgcagaaacgctgggcgacgcgatcgatcgctgggatatcacccgcaccaacagcgaaactgtccgtaaattctatcgtgccgctccgggtggcattcccacccaggtcgccttcagccaggaggcccgctgggacgaactcgacaccgaccgcgagaacggcgtcatccgctcggtcgaacatcccttctccaaggatggtggtcttgccgtgctcaagggcaaccttgcgatcgacggctgcatcgtcaagactgccggcgtcgatgaatcgatcttgaaattctccggcccggcccgcgtcttcgaaagccaggatgcctccgtcaaggcgatccttgccaacgaggtcaaggccggcgacgtcgtcgtcatccgctacgaaggcccgaagggcggccccggcatgcaggaaatgctctatccgacgagctacctgaagtcgaagggcctcggcaaggcctgcgcgctgatcaccgacggccgcttctccggcggcacctccggcctctcgatcggccacgcttcgccggaagcggcaaatggcggcacgatcggcctggtgcgcgaaggtgacatgatcgacatcgacatccccaaccgcacgatcagcctgcgtgtcagcgagaccgaactcgccgcccgccgcgccgagcaggacgccaagggctggtatcccacagaagtgcgcaagcgcaacgtcacgaccgcgctgaaggcctacgcggccttcgcaacgagcgccgatcgcggcgccgtgcgggatctgaacgtgcggtag

SEQ ID NO: 10391 - protein, 612 aa, Rhizobium leguminosarum bv. viciae 3841
MPVYRSRTTTHGRNMAGARGLWRATGMKDSDFGKPIIAVVNSFTQFVPGHVHLKDLGQLVAREIEAAGGVAKEFNTIAVDDGIAMGHDGMLYSLPSRELIADSVEYMVNAHCADAMVCISNCDKITPGMLMASLRLNIPTVFVSGGPMEAGKVVMHGKTHALDLVDAMVAAADDKISDEDVQTIERSACPTCGSCSGMFTANSMNCLTEALGLSLPGNGSTLATHLDRKRLFVEAGHLIVDLARRYYEQDDVKALPRTIASKQAFENAMTLDIAMGGSTNTVLHILAAAHEGEIDFTMADIDALSRRVPCLSKVAPAKSDVHMEDVHRAGGIMSILGELDKGGLLNRDCPTVHAETLGDAIDRWDITRTNSETVRKFYRAAPGGIPTQVAFSQEARWDELDTDRENGVIRSVEHPFSKDGGLAVLKGNLAIDGCIVKTAGVDESILKFSGPARVFESQDASVKAILANEVKAGDVVVIRYEGPKGGPGMQEMLYPTSYLKSKGLGKACALITDGRFSGGTSGLSIGHASPEAANGGTIGLVREGDMIDIDIPNRTISLRVSETELAARRAEQDAKGWYPTEVRKRNVTTALKAYAAFATSADRGAVRDLNVR

SEQ ID NO: 10392 - DNA, 1743 bp, Leuconostoc mesenteroides subsp. mesenteroides ATCC 8293
  CDS (1)..(1743): transl_table=11
atgacagacactttttcatttaatgtaaatagcgatgacttacaaaaacgatctgatcatatcaaaatgggtattcatcaagctccagcccgctcgttattatatgcgacaggtcaagtcagtaaccccgaagatatgaaaaaaccattcattgccatctgtaattcctatgtagaaatcatccctggccacgttcatctgcgtgaactagctgatgtcgccaaacaagccattcgtgatgccggtggtattccttttgagtttaacaccattggtgtggacgatggtattgcgatggggcatttaggcatgcgctattcgttgccatctcgtgaattaatcgccgattcggctgaaactgtcatcacagcacactggtttgatggtgtattcttcttaccaaactgtgacaaaattacgcctggcatgattatggcttctttacgctgtaatgtaccctctgtattcgtctccggtggccccatgaaagctggtttagatcctcaaggaaaagccacgactttatcttctatgttcgaggccgtgggtgcatttaaatcaggactaatgactgaggaagaattcttagaaatggagcaaaatgcctgccctacttgtggatcttgtgctggtatgttcacagctaactccatgaataccttaatggaagtgatgggtatcgccttgccgttcaatggtactgcactagcaatttctgatgaacgacgtgatttaattcgcgatggcgccaagcaattaatgcgtatggttaaggaaaatgttaaaccacgcgatttaattacaaaagaagcgcttgatgatgccatggcacttgatatggccatgggtggctcaaccaatactgttttgcacgtgttgtctatcgctcatgaagctggcattgattatgaccaagcagacattaacgaaattgctaaaaaagtcccttacctatctaaaattgccccttcttctaaatgggcaatggaagacgtgcataatgctggtggtgtgcccgctattatcaatgaactaattcgtatgggtgacgttttgcaccctgaccgcatgactgtaaccggtaagacattgcgcgaaaatgttgctgatcatgaaatcattaatgacgaaattatccggaagttcgatgttaatccctattcaaagcaaggtggcttatccattttatatggcaacttagcacccaaaggttcagttattaaagcaggtggcgttgacccaagtattaaagattttaccggagaagccattgtctttaattctgaacaagaagcggttgaggcgatagatagcggtcaaattcacgctggtcacgtgctgattattcgctatgagggaccaaaaggtggccctggtatgcccgaaatgctaggacctacatcagctattactggtatgggtctaggaaaagaggtggctttggttacggatggccgtttttccggtgcatcacgtggtatctctgttggccatgttagtcccgaagccgctgatgatggtccaattgcactggttgaaaatggtgacaagattaccattgatcttgtcaatcgtacgatgcatttgcatgttgatgatacagagctagcggaacgccatgaacatctcaaaccctttgttcctaaaatgcgaaatggctggatggcacgttatcaagccttagtcacttcagcaaatactggcggcgtattaaagggcgctgatgaattattccctagctaa

SEQ ID NO: 10393 - protein, 580 aa, Leuconostoc mesenteroides subsp. mesenteroides ATCC 8293
MTDTFSFNVNSDDLQKRSDHIKMGIHQAPARSLLYATGQVSNPEDMKKPFIAICNSYVEIIPGHVHLRELADVAKQAIRDAGGIPFEFNTIGVDDGIAMGHLGMRYSLPSRELIADSAETVITAHWFDGVFFLPNCDKITPGMIMASLRCNVPSVFVSGGPMKAGLDPQGKATTLSSMFEAVGAFKSGLMTEEEFLEMEQNACPTCGSCAGMFTANSMNTLMEVMGIALPFNGTALAISDERRDLIRDGAKQLMRMVKENVKPRDLITKEALDDAMALDMAMGGSTNTVLHVLSIAHEAGIDYDQADINEIAKKVPYLSKIAPSSKWAMEDVHNAGGVPAIINELIRMGDVLHPDRMTVTGKTLRENVADHEIINDEIIRKFDVNPYSKQGGLSILYGNLAPKGSVIKAGGVDPSIKDFTGEAIVFNSEQEAVEAIDSGQIHAGHVLIIRYEGPKGGPGMPEMLGPTSAITGMGLGKEVALVTDGRFSGASRGISVGHVSPEAADDGPIALVENGDKITIDLVNRTMHLHVDDTELAERHEHLKPFVPKMRNGWMARYQALVTSANTGGVLKGADELFPS

SEQ ID NO: 10394 - DNA, 1866 bp, Magnetococcus sp. MC-1
  CDS (1)..(1866): transl_table=11
atgcctcaataccgttcccgcacctccacccatggccgtaatatggcaggtgcccgcgctctttggcgggctactggcattaaggaggaggatttcggcaaacctatcatcgctgtggcgaactcctttactcaatttgttcccggtcatgtgcatctgcgggaggtcggcaaactggtggccgaagagattgaggcgtgtggagcgatcgcaaaagagttcaataccatcgccgtggatgatggcatcgccatggggcatggtggcatgctctattcgttgccttcgcgggatattattgccgatagcgtagaatatatgtgcaacgcccatacggcggatgcccttatttgcatctcgaactgcgacaagatcacccccggtatgttgatggcagctctgcgccttaatattcccaccgtctttgtctctggtggccctatggaggccggtaaagttcgcctaaccgatggcaccgcccgcaaggttgatctcatcgactctatgattgctgctggtaacagtgcggtttccagtgaggatttggagcgctatgagcgttcgtcctgccccacctgtggctcctgttcaggcatgttcacggccaactctatgaactgtctaaccgaagctttgggtctctccctgcccggcaatggcactgtattggcaacccacacggcacgtaaaaagctgtttttagatggggctaaacgcattgtcgaacttacccgccgcttctacgaacaggatgatgtatcggcactgccccgcagtattgccacctttgccgcctttgaaaatgccatggtgctggatattgccatggggggatcaaccaacacggttttgcatctactcgccgccgcccgcgaggcagaggtaaactttaccatggctgatattgaccgactctctcgtggcgtgccctgtctgtgtaaagtggccccctcgacggaaaaatatcatgtggaggatgtgcatcgggctggaggggtgttttccatcctaggcgagcttaaccgcatcggcctgatcaacgatcactgccttaccgtgcatgcccccaacatggccgaagccctgaaaaaggaggatattgtttctccccaggtcactgaagaagcgctaacccgttgttacgcagcaccgggcggcattcccaccattgagccctacagtcagtcggcccgttgggaaagtctggatgacgaccgtgtggacgggtgcattcgtggcggcgaacatgcttactccaaggatggtggactggccattctgtttggcaacatcgcccaggatggctgcattgttaaaaccgctggggtggatgaatcggtttggtgcttcaccggcccggcgcgtatcttccatagtcaagatgaagcgtgtgacgccattcttgcggaccagatcaaggcgggcgacgtcgtgttgatccgttatgaaggccccaagggtggccccggcatgcaggagatgctctaccccaccagttttctaaaatccaaagggctgggcaaagcgtgtgccttgattaccgatggacgcttttctggtggcacctcgggcctttcaattggtcactgctcacccgaggcagctcaagggggggccatcggtctggtggaagagggggatcttattgagattgatattcccaaccggttgcttcaggtcaagcttagtgatgcccaattggccgagcgccgccaagccatgttggcccgtgggaatgaggcgtttaagccggtgggacgtcagcgggtggtctctaaagcactacaagcctatgccgctttaaccacctcggcggcggaaggtgcggtgcgtaatctagagcagattcacattaaacgggattaa

SEQ ID NO: 10395 - protein, 621 aa, Magnetococcus sp. MC-1
MPQYRSRTSTHGRNMAGARALWRATGIKEEDFGKPIIAVANSFTQFVPGHVHLREVGKLVAEEIEACGAIAKEFNTIAVDDGIAMGHGGMLYSLPSRDIIADSVEYMCNAHTADALICISNCDKITPGMLMAALRLNIPTVFVSGGPMEAGKVRLTDGTARKVDLIDSMIAAGNSAVSSEDLERYERSSCPTCGSCSGMFTANSMNCLTEALGLSLPGNGTVLATHTARKKLFLDGAKRIVELTRRFYEQDDVSALPRSIATFAAFENAMVLDIAMGGSTNTVLHLLAAAREAEVNFTMADIDRLSRGVPCLCKVAPSTEKYHVEDVHRAGGVFSILGELNRIGLINDHCLTVHAPNMAEALKKEDIVSPQVTEEALTRCYAAPGGIPTIEPYSQSARWESLDDDRVDGCIRGGEHAYSKDGGLAILFGNIAQDGCIVKTAGVDESVWCFTGPARIFHSQDEACDAILADQIKAGDVVLIRYEGPKGGPGMQEMLYPTSFLKSKGLGKACALITDGRFSGGTSGLSIGHCSPEAAQGGAIGLVEEGDLIEIDIPNRLLQVKLSDAQLAERRQAMLARGNEAFKPVGRQRVVSKALQAYAALTTSAAEGAVRNLEQIHIKRD

SEQ ID NO: 10396 - DNA, 1860 bp, Shewanella sp. ANA-3
  CDS (1)..(1860): transl_table=11
atgccaaagttacgttcagcaaccagtaccgaaggccgcaatatggcgggtgcccgtgcgctatggcgcgccacaggggtgaaagacaatgattttggtaagccgattattgcgattgccaactcctttactcagtttgttcccggccatgtgcacttaaaagatatgggctctctggtggcggacgccatcgaagaggcgggcggtatcgccaaggaattcaacaccatcgctgtggatgatggtatcgccatgggccacggtggcatgctctacagtctgccttcgcgggagcttatcgccgatagcgttgagtatatggtcaatgcccactgcgccgatgcgctggtctgtatatctaactgcgacaaaatcacccccggcatgttgatggcggcgctgcgcctcaatatccccgtggtgtttgtgtcgggtgggccgatggaggcgggtaaaaccaaactgtcggacaagcttatcaagctcgatttagtcgatgctatggtggcggcggccgactcgagtgtgagcgatgaagatagcgccaaaattgaacgcagtgcttgccctacatgtggttcctgttcgggcatgtttaccgccaactcgatgaactgtttaaccgaagctttaggtctgtcgctgccgggcaacggctccatgctcgcgacccatgccgatcgccgtgagttgtttttagaagcgggccgccgcgtaatggcgctgaccaaacgttactacgaacaagatgatgcctctgcactgccacgcaacatcgccagctttaaagcctttgaaaacgccatggcgctagatatcgccatgggtggctcctctaatacagtgttgcacttattggctgcggcgcaggaggcggacgtggcattcactatggacgatatcgaccgtatgtcgcgccaagtgccgcatctgtgtaaggtggcgccgtcgaccgctaaataccatatggaagatgtgcaccgcgccggtggtgtgatgggtatcttaggcgagctagaccgcgccggactgctacataccgatgtgccacacgttgccgccgatgcggggggcaacctcaagtcggtgctcgccaagtacgatgtcatgcaaacccaagatgacaaagtaaaacaattctttatggcgggacctgcgggtattcctaccactaaagcctttagccaagactgccgctggccatcgctggacgatgacagacgtgaaggttgtatccgcagccgcgaatttgccttcagccaagagggcggtttggccgtgttatcgggtaatctggccgacaatggctgtattgttaaaacggcgggtgtggatgaatcgaatctgacctttatcggcagcgctcgggtgtacgaaagccaagacgatgcagtcgctggtatcttaggtggcgaagtggtggcgggtgatgtggtggtgattcgttacgaagggccaaaaggcggcccaggcatgcaagaaatgttgtatcccaccagttacttaaaatcccgcggtttaggcaaggcctgcgcactgatcaccgacggccgtttctctggtggaacttccggtttatccatcggccatgtgtcgcctgaggcggcggcgggcggcacgattgccttgattgaaaacggcgatcgcatcgaaatcgatattcctaaacgcagtatcaagcttgcggtgagtgatgccgagttagcggcgcgccgtgaaaccatgctcgcccgtgggccaatggcgtggaaaccgctttcgcgtcagcgttatgtgtcgatggcgctcaaagcctacgccatgcttgccaccagtgccgataagggcgcggtgcgcgatcgcagtaagttggaggactga

SEQ ID NO: 10397 - protein, 619 aa, Shewanella sp. ANA-3
MPKLRSATSTEGRNMAGARALWRATGVKDNDFGKPIIAIANSFTQFVPGHVHLKDMGSLVADAIEEAGGIAKEFNTIAVDDGIAMGHGGMLYSLPSRELIADSVEYMVNAHCADALVCISNCDKITPGMLMAALRLNIPVVFVSGGPMEAGKTKLSDKLIKLDLVDAMVAAADSSVSDEDSAKIERSACPTCGSCSGMFTANSMNCLTEALGLSLPGNGSMLATHADRRELFLEAGRRVMALTKRYYEQDDASALPRNIASFKAFENAMALDIAMGGSSNTVLHLLAAAQEADVAFTMDDIDRMSRQVPHLCKVAPSTAKYHMEDVHRAGGVMGILGELDRAGLLHTDVPHVAADAGGNLKSVLAKYDVMQTQDDKVKQFFMAGPAGIPTTKAFSQDCRWPSLDDDRREGCIRSREFAFSQEGGLAVLSGNLADNGCIVKTAGVDESNLTFIGSARVYESQDDAVAGILGGEVVAGDVVVIRYEGPKGGPGMQEMLYPTSYLKSRGLGKACALITDGRFSGGTSGLSIGHVSPEAAAGGTIALIENGDRIEIDIPKRSIKLAVSDAELAARRETMLARGPMAWKPLSRQRYVSMALKAYAMLATSADKGAVRDRSKLED

SEQ ID NO: 10398 - DNA, 1728 bp, Mycobacterium avium 104
  CDS (1)..(1728): transl_table=11
atgcccaccaccgattcggcgcgcgccgccgacatcaagcagcccgacatcaagccgcgcagtcgtgacgtcaccgacggcctggagaaggccgccgcccgggggatgctgcgggcggtaggcatgggcgacgaggacttcgccaagccgcagatcggggtggcgtcgtcctggaacgagatcacgccgtgcaacctgtcgctggaccggctggccaaggcggtcaaggaaggcgtcttcgccgcgggcggctacccgctggagttcggcaccatctcggtgtccgacggcatctcgatgggccacgagggcatgcacttctcgctggtgagccgcgaggtgatcgccgacagcgtcgagacggtgatgcaggccgagcgcctggacggctcggtgctgctggccggctgcgacaagtcgctccccggcatgctgatggccgcggcccgtctggacctggcctcggtgttcctctacgccggctcgatcctgcccggggtggccaagctgtccgacggcagcgagcgcgaggtgacgatcatcgacgcgttcgaggccgtcggcgcgtgcgcgcgcgggctgatgccgcgcgaggacgtcgacgccatcgagcgggccatctgtcccggcgagggcgcctgcggcggcatgtacaccgccaacaccatggccagcgccgccgaggcgctggggatgtcgctgccgggcagcgcggccccgccggccaccgaccgccgccgcgacggcttcgcccggcgcagcggccaggccgtcgtcgagctgctgcgccgcggcatcaccgcccgcgacatcctcaccaaggaggcgttcgagaacgcgatcgcggtggtgatggcgttcggcggctccaccaacgcggtgctgcacctgctggccatcgcccacgaggccgacgtggcgctgtcgctcgacgacttcagccggatcgggtcgaaggtgccgcacctggccgacgtcaagccgttcggccggcacgtgatgaccgacgtcgaccacatcggcggcgtgccggtgatgatgaaggcgctgctggacgccgggctgctgaacggcgactgcctgacggtgaccggtgcgacggtggcgcagaacctggccgcgatcgccccgcccgacccggacggcaaggtgctgcgggcgctgagcgatccgctgcacccgaccggcggcatcaccatcctgcgcgggtcgctggcgcccgagggcgcggtggtcaagtccgccggcttcgattccgacgtgttcgaaggcaccgcaagggttttcgacggcgagcgggccgcgctggacgcgctggaggacggcaccatcaccaagggcgacgcggtggtgatccggtacgagggccccaagggcgggcccgggatgcgcgagatgctcgccatcaccggcgcgatcaagggcgccgggctgggtaaggacgtgctgttactcaccgacggccgcttctccggcgggacgacgggactgtgtgtcggccacatcgcgcccgaggcggtggacgccgggccgatcgcctttctgcgcgacggcgaccgcatccgcctggacgtcgccaaccgggttctggacgtactcgtcgatccggccgaattcgactctcggcgaacagctttcaccccgccaccgccccgctacaagaccggggtgctggccaagtacgtcaaactggtcggttccgcggcgatcggcgccgtctgcggctag

SEQ ID NO: 10399 - protein, 575 aa, Mycobacterium avium 104
MPTTDSARAADIKQPDIKPRSRDVTDGLEKAAARGMLRAVGMGDEDFAKPQIGVASSWNEITPCNLSLDRLAKAVKEGVFAAGGYPLEFGTISVSDGISMGHEGMHFSLVSREVIADSVETVMQAERLDGSVLLAGCDKSLPGMLMAAARLDLASVFLYAGSILPGVAKLSDGSEREVTIIDAFEAVGACARGLMPREDVDAIERAICPGEGACGGMYTANTMASAAEALGMSLPGSAAPPATDRRRDGFARRSGQAVVELLRRGITARDILTKEAFENAIAVVMAFGGSTNAVLHLLAIAHEADVALSLDDFSRIGSKVPHLADVKPFGRHVMTDVDHIGGVPVMMKALLDAGLLNGDCLTVTGATVAQNLAAIAPPDPDGKVLRALSDPLHPTGGITILRGSLAPEGAVVKSAGFDSDVFEGTARVFDGERAALDALEDGTITKGDAVVIRYEGPKGGPGMREMLAITGAIKGAGLGKDVLLLTDGRFSGGTTGLCVGHIAPEAVDAGPIAFLRDGDRIRLDVANRVLDVLVDPAEFDSRRTAFTPPPPRYKTGVLAKYVKLVGSAAIGAVCG

SEQ ID NO: 10400 - DNA, 1704 bp, Nocardioides sp. JS614
  CDS (1)..(1704): transl_table=11
atgaccgagcccacctcccgccccgacatcaagccccgctcccgcgacgtcaccgacggcctggagaaggccgccgcgcgcggcatgctgcgggcggtaggcatgggcgacgaggacttcgcgaagccgcagatcggcgtgggctcgagctggaacgagatcaccccgtgcaacctgtccctggaccggctcgccaaggccgtgaagaacggcgtgcacgcggccggcggctacccgctggagttcggcaccatctcggtctccgacggcatctccatgggccacgagggcatgcacttctcgctggtctcccgcgaggtgatcgccgactcggtcgagaccgtgatgatggccgagcgcctggacggctcggtgctgctcgccggctgcgacaagtcgctgccgggcatgatgatggccgccgcccgcctcgacctggccagcgtgttcctctacgccggctcgacgatgcccgggcaggtggacggcaacgacgtcacgatcatcgacgcgttcgaggccgtcggggcgtgcctggccggcaagatcagccgcgacgaggtggaccggatcgagcgggccatctgtccgggcgagggcgcctgcggcggcatgtacaccgcgaacacgatggcctccatcgccgaggcgatcggcatgtcgctccccggctcggcggccccgccggcggtcgatcgccgacgcgacggcttcgcgcaccgctcgggggaggccgtggtcaacctgttgcgccagggcatcacggcccgccagatcatgactcgcgcggcgttcgagaacgcgatcacggtcgcgatggcgctcggcggctcgaccaacgccgtgctccacctgctcgcgatggctcgtgaggccgacgtcgacctcaccatcgacgacttcaaccggatcggtgacaaggtgccgcacctcggcgacctcaaaccgttcggcaagtacgtcatgaacgacgtcgacaagatcggcggcatccccgtcgtgatgaaggcactgctcgacgccggtctgatgcacggcgacgcgctcaccgtcaccggcaagaccctggccgagaacctcgccgagctggccccgccggagctcgatgacgaggtgatccgcaagctggaccggccgatccacaagaccggtgggctcacgatcctcaagggctcgctcgctcccgagggcgccgtggtcaagacggccggcttcgacgactccgtgttcaccggcaccgcccgcgtcttcgacggcgagcgggccgcgatggacgccctcgaggccgggcagatccagccccgcgacgtcgtggtgatccgctacgagggcccgaagggtggccccggcatgcgcgagatgctcgcgatcaccggcgcgatcaagggcgccggcctcggcaaggacgtcttgctgatcaccgacggcaggttctccggtggtacgacgggcctgtgcgtgggccacatcgcccccgaggccgtcgacggcggcccgatcgcgttcgtccgcgacggcgaccagatcaccctcgacgtcgccaaccggctgctcgaggtggaggtcgtcggtcccgatgccgaggccgagtgggagcgccgcaaggtcggctgggagccgaatccgcccaagtacacccgcggggtgctcggcaagtacgccaagatcgtccagtccgccgcgcacggcgccatcaccggctga

SEQ ID NO: 10401 - protein, 567 aa, Nocardioides sp. JS614
MTEPTSRPDIKPRSRDVTDGLEKAAARGMLRAVGMGDEDFAKPQIGVGSSWNEITPCNLSLDRLAKAVKNGVHAAGGYPLEFGTISVSDGISMGHEGMHFSLVSREVIADSVETVMMAERLDGSVLLAGCDKSLPGMMMAAARLDLASVFLYAGSTMPGQVDGNDVTIIDAFEAVGACLAGKISRDEVDRIERAICPGEGACGGMYTANTMASIAEAIGMSLPGSAAPPAVDRRRDGFAHRSGEAVVNLLRQGITARQIMTRAAFENAITVAMALGGSTNAVLHLLAMAREADVDLTIDDFNRIGDKVPHLGDLKPFGKYVMNDVDKIGGIPVVMKALLDAGLMHGDALTVTGKTLAENLAELAPPELDDEVIRKLDRPIHKTGGLTILKGSLAPEGAVVKTAGFDDSVFTGTARVFDGERAAMDALEAGQIQPRDVVVIRYEGPKGGPGMREMLAITGAIKGAGLGKDVLLITDGRFSGGTTGLCVGHIAPEAVDGGPIAFVRDGDQITLDVANRLLEVEVVGPDAEAEWERRKVGWEPNPPKYTRGVLGKYAKIVQSAAHGAITG

SEQ ID NO: 10402 - DNA, 1851 bp, Azoarcus sp. BH72
  CDS (1)..(1851): transl_table=11
atgccccaataccgttcccgcacctccaccgccggccgcaacatggcaggtgcccgcgccctgtggcgcgccaccggcatgaaggacggcgacttcgaaaagccgatcatcgcgatcgccaacagcttcacccagttcgtgccgggtcatgtgcacctgaaggacctcggccagcttgtcgcgcgcgagatcgaagccgccggcggcgtcgcgaaggaattcaacaccatcgcggtcgatgacggcatcgccatgggccacggcggcatgctgtattcgctgccctcgcgcgacctcatcgccgacagcgtcgaatacatggtgaacgcgcacaccgcggacgcgctggtgtgcatctccaactgcgacaagatcaccccgggcatgctgatggccgcgctgcgcctcaacattcccaccatcttcgtctccggcgggccgatggaggccggcaaggtgaaatgggaagccaagatcatcccgctcgacctcgtcgatgcgatggtcaaggccgcggacaagaactgttcggacgaggaagtcgacgcgatcgaacgctccgcctgtcccacctgtggttcctgctccggcatgttcaccgccaactcgatgaactgcctgaccgaagcgctgggcctgtcgctgcccggcaatggcaccacgctggccacccatgccgaccgcgaaaagctgttccgcgaggccggccgccgcatcgtcgatctcgccaagcgctactacgagaaggacgacgccacggtgctgccgcgcgccatcgccagcttcgccgcgttcgagaacgcgatcagcctggacgtggcgatgggcgggtccaccaacaccgtgctgcacctgctcgccgccgccaaggaggcaggggtggacttcacgatgaaggacatcgatcgcatctcgcgccacgtgccctgcctgtgcaaggtggcgccggcggtgccggacgtgcatatcgaggacgtgcaccgcgccggcgggatcatgagcatcctcggcgaactcgaccgcgctggcctgctcaaccgtgatgtgcccacggtgcacagcaagacgctgggcgaagcgctgggccgctgggacatcatgcaggcgcacgacaaggcggtgttcgatttcttcctcgccgctccgggcggcgtgccgacccaggtggccttcagccagaaccggcgctggaacgaactcgacatggaccgcgccaagggcgtgatccgcaacaaggccaacgccttcagccaggacggcggcctcgcggtgctgtacggcaacatcgccgaaaagggctgcatcgtgaagaccgccggcgtggatgagtcgatctggcagttcaccggcaaggcgcgggtgtacgaaagccaggaagacgccgtcgaaggcatcctgggcgagcaggtgcaggcgggtgacgtggtcgtgatccgctacgaaggccccaagggcggccccggcatgcaggagatgctgtaccccacctcgtacctgaagagccgcggcctgggcaaggagtgtgcgctgctgaccgatggccgcttctccggcggcacttcgggcctgtcgatcggccacgcttctccggaagccgcgatgggcggcgcgatcgcgctggtggaagacggcgacacgatcgagatcgacatccccaaccgccgcatcgcgctggcggtgtccgatgaagaacttgcccgccgccgcgccgcgatggaggccaaaggcgcagcggcctggaaaccggcaaaccgcgagcgcgtcgtttcggccgcgctgcaggcctatgctgcgctcaccacctcggccgacaccggggcggtgcgcgacatcacccaggtccagcgctga

SEQ ID NO: 10403 - protein, 616 aa, Azoarcus sp. BH72
MPQYRSRTSTAGRNMAGARALWRATGMKDGDFEKPIIAIANSFTQFVPGHVHLKDLGQLVAREIEAAGGVAKEFNTIAVDDGIAMGHGGMLYSLPSRDLIADSVEYMVNAHTADALVCISNCDKITPGMLMAALRLNIPTIFVSGGPMEAGKVKWEAKIIPLDLVDAMVKAADKNCSDEEVDAIERSACPTCGSCSGMFTANSMNCLTEALGLSLPGNGTTLATHADREKLFREAGRRIVDLAKRYYEKDDATVLPRAIASFAAFENAISLDVAMGGSTNTVLHLLAAAKEAGVDFTMKDIDRISRHVPCLCKVAPAVPDVHIEDVHRAGGIMSILGELDRAGLLNRDVPTVHSKTLGEALGRWDIMQAHDKAVFDFFLAAPGGVPTQVAFSQNRRWNELDMDRAKGVIRNKANAFSQDGGLAVLYGNIAEKGCIVKTAGVDESIWQFTGKARVYESQEDAVEGILGEQVQAGDVVVIRYEGPKGGPGMQEMLYPTSYLKSRGLGKECALLTDGRFSGGTSGLSIGHASPEAAMGGAIALVEDGDTIEIDIPNRRIALAVSDEELARRRAAMEAKGAAAWKPANRERVVSAALQAYAALTTSADTGAVRDITQVQR

SEQ ID NO: 10404 - DNA, 1860 bp, Neisseria meningitidis FAM18
  CDS (1)..(1860): transl_table=11
atgccagaataccgctccaaaacctccacccacggccgcaatatggcgggcgcacgtgcattgtggcgcgccaccggcgtgatggaaaccgacttcggcaagcccatcatcgccgttgccaactccttcacccaattcgtgcccggccatgtccacctgcacaatatgggccagctggttgcccgcgaaatcgaaaaggcgggcgccatcgccaaagaattcaacaccatcgccatcgacgacggcatcgctatgggacacagcggtatgctgtattccctgcccagccgcgatttgattgccgactccatcgaatatatggtcaatgcccactgcgccgacgcgctggtgtgcatttccaactgcgacaaaatcaccccgggcatgctgattgccgcgatgcgcctgaacatcccgaccatcttcgtttccggcggtccgatggaagcaggtaaagttatcggcgtggcaaacatccagcccgaacgccgtttggacttgattgacgcgatgattgaatcggcggacgacaatgtcagcaaccggcaagtcgaggaagtcgaacaaaacgcctgcccgacctgcggctcgtgttcgggtatgtttacggcaaactcgatgaactgcctgaccgaagcactcggtctgtccctacccggcaacggttcgtatttggcgacccacgtcggccgcaaagaactgttcctcgaagccggccgtatgattgtcgaaatcaccaaacgctattacgagcaaaacgatgaaaccgtgttaccgcgcagcattgccaccaaaaaagcgtttgaaaacgctatgacgatggatattgcgatgggcggcagcaccaataccattttgcacctgttggccgttgccaacgaagccggtgtcgatttcaaaatggccgacattgaccgcttaagccgcgttgtgccctgcatctgcaaaaccgcacccaacaaccacgactactatatggaagacgtgcaccgcgccggcggcattttcgccatcctgaaagaattggacaaagcgggcaagctgcacaccgacgtgcacactatccacgcaccgacgctgaaagacgcgattgaaaaatgggacataaccaaccctgaaaacacccgcgccatcgaacgcttcaaagccgcgcccggcggcgtacgcaccacccaagcgttctcgcaaaaccgtatgtggaaaaccctcgacctcgaccgcgaaaaaggctgtatccgcgacgtggcacacgcctactcgcaagacggcggtttggcggtcttgttcggcaacatcgccgagcgcggctgcgtggtaaaaaccgcaggcgtggacgagagcatcctcaaattcaccggccgcgcccgcgtgtttgaaagccaagaagacgcagtagaaggcattttgggcaaccaaatcgtcgccggcgacatcgtcatcatccgctacgaaggcccgaaaggcggcccgggcatgcaggaaatgctgtatccgacttcctacctgaaatctaaaggcctcggcaaagcctgcgctctcttaaccgacggacgcttctccggcggcacatcaggtttgtccatcggacacgcctcgcccgaagcggcggaaggtggcgcgatcggtttggtacacgaaggcgataccgtcgaaatcgacatccccaaccgcagcatccaccttgccatttccgatgaagagcttgccgcccgccgtgccgaaatggaagcgcgcggcagcaaagcgtggaaaccggaaaaccgcgaccgctacgtctccgcagccctgcgtgcttacggcgcgatggcgacttccgccgacaaaggcgcggtgcgcgacgtagcgcaaatcgaaagataa

SEQ ID NO: 10405 - protein, 619 aa, Neisseria meningitidis FAM18
MPEYRSKTSTHGRNMAGARALWRATGVMETDFGKPIIAVANSFTQFVPGHVHLHNMGQLVAREIEKAGAIAKEFNTIAIDDGIAMGHSGMLYSLPSRDLIADSIEYMVNAHCADALVCISNCDKITPGMLIAAMRLNIPTIFVSGGPMEAGKVIGVANIQPERRLDLIDAMIESADDNVSNRQVEEVEQNACPTCGSCSGMFTANSMNCLTEALGLSLPGNGSYLATHVGRKELFLEAGRMIVEITKRYYEQNDETVLPRSIATKKAFENAMTMDIAMGGSTNTILHLLAVANEAGVDFKMADIDRLSRVVPCICKTAPNNHDYYMEDVHRAGGIFAILKELDKAGKLHTDVHTIHAPTLKDAIEKWDITNPENTRAIERFKAAPGGVRTTQAFSQNRMWKTLDLDREKGCIRDVAHAYSQDGGLAVLFGNIAERGCVVKTAGVDESILKFTGRARVFESQEDAVEGILGNQIVAGDIVIIRYEGPKGGPGMQEMLYPTSYLKSKGLGKACALLTDGRFSGGTSGLSIGHASPEAAEGGAIGLVHEGDTVEIDIPNRSIHLAISDEELAARRAEMEARGSKAWKPENRDRYVSAALRAYGAMATSADKGAVRDVAQIER

SEQ ID NO: 10406 - DNA, 1695 bp, Acidovorax sp. JS42
  CDS (1)..(1695): transl_table=11
atgaccgacccgctgccgctgaaccgccgctccgcccacatcacccagggcaaggcgcgcgcgcccaaccgctccatgttctacggcatgggctaccaagagggtgacttcgccaagcccatggtgggcgtggccaacgggcacagcaccatcacgccctgcaacagcggcctgcaacgcctggccgacgcggccatcgcaggcatcgaggaagcgggcggcaacgcccaggtcttcggcacgcccaccatcagcgacggcatggccatgggtaccgagggcatgaagtacagcctggtgagccgcgaggtgattgccgactgcgtcgagacctgcgtgcagggccagtggatggacggcgtggtcgtcatcggcggctgcgacaagaacatgcccggcggcctgatgggcatgctgcgcgccaacgtgccggccatctacgtgtatggcggcaccatcctgccgggccgctggcaggggcaagacctgaacatcgtgagcgtgttcgaagccgtgggccagaacgccgcgggcaggatgaccgaccaggagctgaaggacatcgagcagcacgccatcccgggcacgggctcgtgcggcggcatgtacacggccaacaccatgtcctcggccttcgaggcgctgggcatgagcctgccctactcctccaccatggccaatccgcacgacgagaaaatgaactcggcccgcgaatccgcccgggtgctgatcgaggccatccgcaaggacttgaagccacgcgacatcgtcacgcgcaaggccatcgagaacgccgtggccgtgatcatggccacgggcggctccaccaacgcggtgctgcacttcctggcgatcgcgcacgcggcgggtgtggagtggtccatcgacgacttcgagcgcatgcgcaagaaggtcccagtgatctgcgacctcaagcccagcggccggtacctggccgtcgacctgcaccgcgcgggcggcattccccaggtgatgaaggtgctgctgaacgccggcctgttgcacggcgactgcatgaccatcaccggtaaaaccatcgccgaaaccctggccgacgtacccgacgcgccacggccggaccaggacgtgattcgcccgatcgacaaggcgctgtaccgcgaggggcacctcgccatcctcaagggcaacctgagtcccgagggcgccgtggccaagatcaccgggctgaagaaccccgtcatcaccgggcccgcgcgtgtgttcgacgacgagcagtcggcgctgcaggccatcctggacggcaggatcgtcgcgggcgacgtgatggtgttgcgctacctcggccccaagggtggcccgggcatgccggagatgctggcccccacgggcgcgctgatcggtgcgggcctgggcgagagcgtgggcctgatcaccgacgggcgcttctcgggcggcacctggggcatggtggtgggccacgtcgcgcccgaggccgctgcggggggcactattgcgctggtgcatgagggcgacacgatcaccatcgacgcccaccaactgctgctgcaactgcacgtggacgacgccacgctggcacagcgccgcgccgcctggcagccacccacgccgcgctacatgcggggcgtgcaggccaagtttgccttcaacgcctccagcgccagcaagggtgcggtgctggatgacttttcatga

SEQ ID NO: 10407 - protein, 564 aa, Acidovorax sp. JS42
MTDPLPLNRRSAHITQGKARAPNRSMFYGMGYQEGDFAKPMVGVANGHSTITPCNSGLQRLADAAIAGIEEAGGNAQVFGTPTISDGMAMGTEGMKYSLVSREVIADCVETCVQGQWMDGVVVIGGCDKNMPGGLMGMLRANVPAIYVYGGTILPGRWQGQDLNIVSVFEAVGQNAAGRMTDQELKDIEQHAIPGTGSCGGMYTANTMSSAFEALGMSLPYSSTMANPHDEKMNSARESARVLIEAIRKDLKPRDIVTRKAIENAVAVIMATGGSTNAVLHFLAIAHAAGVEWSIDDFERMRKKVPVICDLKPSGRYLAVDLHRAGGIPQVMKVLLNAGLLHGDCMTITGKTIAETLADVPDAPRPDQDVIRPIDKALYREGHLAILKGNLSPEGAVAKITGLKNPVITGPARVFDDEQSALQAILDGRIVAGDVMVLRYLGPKGGPGMPEMLAPTGALIGAGLGESVGLITDGRFSGGTWGMVVGHVAPEAAAGGTIALVHEGDTITIDAHQLLLQLHVDDATLAQRRAAWQPPTPRYMRGVQAKFAFNASSASKGAVLDDFS

SEQ ID NO: 10408 - DNA, 1857 bp, Acidovorax sp. JS42
  CDS (1)..(1857): transl_table=11
atgcccgcataccgttccaagacctccaccgccggccgcaacatggcaggggcccgctccctgtggcgcgccaccggcatgaaagacgccgatttctccaagcccatcatcgcggtggtcaactcgttcacccagttcgtgcccggccatgtgcacctgaaagacctgggccagctcgtggcgcgcgagatcgaggccgccggcggcgtggccaaggaattcaacaccatcgccgtggatgacggcatcgccatgggccacgacggcatgctgtattcgctgcccagccgcgacatcattgccgacagcgtggaatacatggtgaacgcgcactgtgccgacgccatggtctgcatcagcaactgcgacaagatcacccccggcatgctcatggccgccatgcggctgaacatcccggtgatcttcgtctccggcggccccatggaggccggcaaggtgcagcagaccgtgcccggcaccagcaccatccagatcaagaagctggacctgatcgacgccatggtgatggccgccgacgacaaggtgagcgacgccgacctggccgaggccgagcgcaatgcctgccccacctgcggctcctgctcgggcatgttcactgccaactccatgaactgcctgaccgaggcgctggggctgtccctgcccggcaacggcaccgtggtggccacgcacgccgaccgcgagcagctgttcaagcgcgcgggccgccgcatcgtggagctggcgcgccagcactatgagcaggacgatgagcgcatcctgccgcgctcggtgggcttcaaggcgttcgagaacgcgatgacgctggacatcgccatgggcggctccaccaacaccatcctgcacctgctggccattgcacaggaggccggcatcgacttcagcatggccgacatcgaccgcctgtcgcgcagcgtgccgcagctgtgcaaggtggcacccaacaccgacaagtaccacatcgaggacgtgcaccgcgccggcggcatcttcgccatcctgggcgagctggagcgtgcgggcaagctgcacaccgacgtgcccaccatccacgcacccacactgggcgaggcgctggcgcagtgggacgtgacgcgcacgcaggacgaggccgtccagacgttctacaaggccggccccggcggcgtgcccacgcaggtcgccttcagccagagcgtgcgctggcccagcctggacctggaccgcgccgcgggctgtatccgctccgcggagcacgccttcagcaaggaaggcggcctggcggtgctcaccggcaacatcgccaaggacggctgcgtggtcaagaccgcgggcgttcatgaatccatcctggtcttcgaaggcccggcgcatgtggtcgaaagccaggacgaggcggtggagaacatcctggccgacaaagtgaaggccggcgacgtggtggtggtgcgctacgagggccccaagggcggccccggcatgcaggaaatgctctaccccacgagctacatcaaatccaagggcctgggcaaggcctgcgcgctgctgaccgacgggcgcttctctggcggcacctcgggcctgtccatcggccactgctcgcccgaggcggcagccggcggcgcgatcggcctggtgcgcgacggcgaccgcatccgcatcgacattcccaaccgcaccatcaacgtactggtgagcgacgaggagttggcccagcgccgcgccgagcaggacgccaagggctggaagcccgcccagccacgtccgcgcaaggtctcggccgcgctcaaggcctatgccaagctcgtgacgtcggccgacaagggcgccgtgcgcgacgtgtcgctgctggactga

SEQ ID NO: 10409 - protein, 618 aa, Acidovorax sp. JS42
MPAYRSKTSTAGRNMAGARSLWRATGMKDADFSKPIIAVVNSFTQFVPGHVHLKDLGQLVAREIEAAGGVAKEFNTIAVDDGIAMGHDGMLYSLPSRDIIADSVEYMVNAHCADAMVCISNCDKITPGMLMAAMRLNIPVIFVSGGPMEAGKVQQTVPGTSTIQIKKLDLIDAMVMAADDKVSDADLAEAERNACPTCGSCSGMFTANSMNCLTEALGLSLPGNGTVVATHADREQLFKRAGRRIVELARQHYEQDDERILPRSVGFKAFENAMTLDIAMGGSTNTILHLLAIAQEAGIDFSMADIDRLSRSVPQLCKVAPNTDKYHIEDVHRAGGIFAILGELERAGKLHTDVPTIHAPTLGEALAQWDVTRTQDEAVQTFYKAGPGGVPTQVAFSQSVRWPSLDLDRAAGCIRSAEHAFSKEGGLAVLTGNIAKDGCVVKTAGVHESILVFEGPAHVVESQDEAVENILADKVKAGDVVVVRYEGPKGGPGMQEMLYPTSYIKSKGLGKACALLTDGRFSGGTSGLSIGHCSPEAAAGGAIGLVRDGDRIRIDIPNRTINVLVSDEELAQRRAEQDAKGWKPAQPRPRKVSAALKAYAKLVTSADKGAVRDVSLLD

SEQ ID NO: 10410 - DNA, 1860 bp, Magnetospirillum magnetotacticum MS-1
  CDS (1)..(1860): transl_table=11
ttgaccgccatgcctgcttaccgttcccgtacctcgacccacggccgcaacatgtccggcgcgcgcggactttggcgcgccactggcatgaccgatgccgatttcggcaagcccatcatcgccatcgccaattcctttacccagttcgtgcccggccatgtgcacctcaaggatctgggccagatggtggcgcgcgagatcgagcaggcgggcggcgtcgccaaggaattcgacaccattgccatcgatgacggcatcgccatgggccattcgggcatgctgtactcgctgccttcgcgcgagctgatcgccgacagcgtggaatacatggtcaacgcccattgcgccgacgccctggtctgcatctccaattgcgacaagatcacgcccggcatgctgatggcgtcgcttcgcctcaacatccccaccatcttcatttcgggcgggcccatggaggcgggcaaggtcacctataagggcgagacccatgcggtggatctgatcgacgccatgatcaagggcgccgacaagaatgtttccgacgaggaggccctggccttcgaacgggaaagctgccccacctgcggctcgtgttcaggcatgttcaccgccaattccatgaactgtctgatcgaggccctgggcctgggcctgcccggcaacggcacggtggtcgccacccatgccgaccgcaaggagctgttcctggaggccgggcggcgcatcgtcgatctggccaagcgcgcctatgaaggcgatgattcctcggttctgccgcgctccatcgccagtttccaggccttcgagaacgccatgacgctcgatatcgccatgggcggctccaccaataccgtgcttcatcttctggcggcggcacaggaagcgggggtggccttcggcatgaacgacatcgaccgtctgtcgcgccgcgtgccctgcctgtgcaaggtggcccccaacgtgcccgacgtccatatcgaggatgtgcaccgggcgggcggcatcatgggcatcctgggccagttggaccggggcgggctgatcaatcgcgattgcggcaccgtccattcccgcaccatggccgagggtctggataagtgggacatcgcgcgctccaacgatcccaaggtgcatgagttctacaaggccgcccctggcggggtgcgcaccaccgaggctttcagccagtccaagcgctttgccgaagtggacaaggaccgcgccaagggcgtcattcgttcggttgacagtgccttttccaaggatggcgggctggcggtgctgttcggcaatctggctttggacggctgcatcgttaagacggcgggcgttgacgacaagaacctgaccttctccggtcccgccgtgatctgtgaaagccaggatgaggcggtggccaagatcctaggcgggcaggtcaaatccggcgacgtggtcatcgtgcgctatgaaggcccgcgcggcgggccgggcatgcaggagatgctttatcccaccagctatctgaagagcatgggcctgggtaaggaatgtgcgctgatcacagatgggcgtttctcgggcggcacatcgggtctgtccatcggccacgtctcgcccgaggcggcggaaggcggggccatcggcctgatccaggcgggcgatatcatcgatattcatattcctaatcgcagcattgcaattcgggtgtccgatgccgaattggagaagcgcaggcaggccatgcagggccggggcgccaaggcctggaagccggtggatcgcgaccgtcaggtctcggcggcgcttaaggcctatgccgccatgaccaccagcgcggcccgtggcgcggtccgcgacgtctcgcaactggaccgctga

SEQ ID NO: 10411 - protein, 619 aa, Magnetospirillum magnetotacticum MS-1
MTAMPAYRSRTSTHGRNMSGARGLWRATGMTDADFGKPIIAIANSFTQFVPGHVHLKDLGQMVAREIEQAGGVAKEFDTIAIDDGIAMGHSGMLYSLPSRELIADSVEYMVNAHCADALVCISNCDKITPGMLMASLRLNIPTIFISGGPMEAGKVTYKGETHAVDLIDAMIKGADKNVSDEEALAFERESCPTCGSCSGMFTANSMNCLIEALGLGLPGNGTVVATHADRKELFLEAGRRIVDLAKRAYEGDDSSVLPRSIASFQAFENAMTLDIAMGGSTNTVLHLLAAAQEAGVAFGMNDIDRLSRRVPCLCKVAPNVPDVHIEDVHRAGGIMGILGQLDRGGLINRDCGTVHSRTMAEGLDKWDIARSNDPKVHEFYKAAPGGVRTTEAFSQSKRFAEVDKDRAKGVIRSVDSAFSKDGGLAVLFGNLALDGCIVKTAGVDDKNLTFSGPAVICESQDEAVAKILGGQVKSGDVVIVRYEGPRGGPGMQEMLYPTSYLKSMGLGKECALITDGRFSGGTSGLSIGHVSPEAAEGGAIGLIQAGDIIDIHIPNRSIAIRVSDAELEKRRQAMQGRGAKAWKPVDRDRQVSAALKAYAAMTTSAARGAVRDVSQLDR

SEQ ID NO: 10412 - DNA, 1701 bp, Nostoc punctiforme PCC 73102
  CDS (1)..(1701): transl_table=11
atgtcggagaatttgagaagccaagtagtgacgcaaggagtgcagcgatcgccaaatcgagctatgctgcgggcagttggttttaaagatgaagatttcaataaagccattgtcggtatagccaacggttacagcacgatcaccccctgcaatatggggataaatcaactggcacagagggcagaagctgggattaaaaccgccggagcaatgccgcaaatatttggcacaattaccatcagcgacgggatttcaatgggaaccgaagggatgaaatattccctagtatcgcgggaagttatcgccgattccatcgaaaccgcctgtaccggacaaagtatggatggtgtactagccattggtggctgtgataagaatatgccaggcgcaatgctagcgatcgcgcggatgaatatcccggcaatattcgtttacggtggcacaattaaacccggtcactacaacggacgcgatttaaccgttgtcagttcttttgaagctgttggtcaatacagtgcgggaaaaattgacgacaaggaattattagaagtcgaaagtcgcgcttgtcctggcgctggttcctgcgggggaatgttcacagctaacaccatgtcttcagcatttgaagcgatgggaatgagtttaccctattcttccacaatggcagccgaagatgccgaaaaagccgacagcacggaaaaatcagcctttgtgctagtcgaagccatcaagaagcaaatcttaccccggcaaattatcacccgtaaatctatagagaatgccatctctgtgattatggcggtgggtggttcgaccaatgcagtattgcatttcttagcgatcgcccgcgctgcgaatgtagagttaaccctagatgactttgaaacaatccgcgcccgtgttcccgttttgtgcgatctaaaaccaagcggtaaatatgtcgctacagatttgcacaaagctggtggcattccgcaagtcatgaagatgctactcgcacatggcttattgcatggtgatagtctcaccattagcggtcaaaccattgcagagatattagcagacatacccgaagagccatctgccaatcaagatgtgattcgggcttggaataacccgatgtatgctcaaggacatttagccatcctcagaggtaatctggcaacggaaggggctgtcgctaaaattaccggcgtgaaaaaaccagtcattaccgggcctgcacgggtgtttgagtcggaagaagcctctttagatgcaattttggcgggtaaaattcaagctggtgatattttggttattcgctacgaagggcccaaaggcggccctggaatgcgagaaatgttggctcccacttcggcaattatcggggctggcttgggtgatgcggtgggattaattaccgatgggcgcttttctggcggtacttatggcatggtggttggtcatgttgctccagaagcagcagtgggtggtgcgatcgcgcttgttgaagaaggcgatagtattaccattgatgcacccgcacgccttttgcagttgaatatatctgaagaagaattagctcgtcgtcgtgctaattggcaacctcccgctccacgttacaccaaaggcgtgttggcgaaatatgccaaactggtatcttctagcagcatcggtgctgtgacagatttggatttgttcaaaccacaacagaactaa

SEQ ID NO: 10413 - protein, 566 aa, Nostoc punctiforme PCC 73102
MSENLRSQVVTQGVQRSPNRAMLRAVGFKDEDFNKAIVGIANGYSTITPCNMGINQLAQRAEAGIKTAGAMPQIFGTITISDGISMGTEGMKYSLVSREVIADSIETACTGQSMDGVLAIGGCDKNMPGAMLAIARMNIPAIFVYGGTIKPGHYNGRDLTVVSSFEAVGQYSAGKIDDKELLEVESRACPGAGSCGGMFTANTMSSAFEAMGMSLPYSSTMAAEDAEKADSTEKSAFVLVEAIKKQILPRQIITRKSIENAISVIMAVGGSTNAVLHFLAIARAANVELTLDDFETIRARVPVLCDLKPSGKYVATDLHKAGGIPQVMKMLLAHGLLHGDSLTISGQTIAEILADIPEEPSANQDVIRAWNNPMYAQGHLAILRGNLATEGAVAKITGVKKPVITGPARVFESEEASLDAILAGKIQAGDILVIRYEGPKGGPGMREMLAPTSAIIGAGLGDAVGLITDGRFSGGTYGMVVGHVAPEAAVGGAIALVEEGDSITIDAPARLLQLNISEEELARRRANWQPPAPRYTKGVLAKYAKLVSSSSIGAVTDLDLFKPQQN

SEQ ID NO: 10414 - DNA, 1836 bp, Bifidobacterium longum DJO10A
  CDS (1)..(1836): transl_table=11
atgtcagggcgcgtctttgcaggcgcccgagccctctaccgtgctgcgggcgtcagcggagacgacatgggcaagaagcccatcatcgccatcgccaactcgttcgatgagttcctgcccggccacgtccacctcaacaaggtcggccgcatcgtttccgaggctatcaaggaagctggcggcatcccgcgcgagttcaacacgatggccgtggacgacggcatcgccatgggtcacaccggcatgctctactccctgccctcccgcgacatcatcgccgacaccgtcgaataccagtgcaacgcgcactgtgccgacgcactcatctgcatcccgaactgcgacaaggtcgtgccgggcatgctgatggccgccctgcgcctcaacatcccgaccgtgttcgtctccggtggcccgatggaggccggcaccacggtgctcgccgacggcaccgtcaagagcaccgaccttatcgacgtgatgtacgccaccgccgacgacagcgtctccgatgaggaactgctcaactatgagaagaccgtctgcccgacctgcggctcctgcgccggcatgttcaccgccaactcgatgaactgcctgaccgaggccatcggcctggccctgcccggcaacggcaccatcctcgcctcccactcctaccgcaaggacctgttcgagcgtgccgccaagcaggtcgtcaagatcgcccaccagtactatgacgattccgacgattccgtgctgccgcgctccatcgccaccaaggaagccttcgagaacgccatgaccatggatgtggccatgggcggttccaccaacaccgtgttgcacatcctcgccatggcccaatccgccgacgtggacttcaccctggacgacatcgagcgtatttcccacaccgtgccgtgcatctgcaaggcctcgccgtccggcaagtgggagatttccgacgtgcaccgcgccggcggcatcaccggcatcctcggcgagctcgaccgcgccggcaagctgcacaccaacgtgcactccatcgactacccgacgctggaagccaagctggccgattgggacatcatgcgcccgacctgcaccgaggaagcccaacagatgtacaaggccgctcctggccacatcatctccccggagccgtggacccacaccaccctgttcgattcgctcgaccgtgaccgcgccaacggcgccatccacgacatcaaccacccggagattcacgaaggcggcctcgccgtgctgcgcggcaacctggcccccgacggctgcgtggtcaagaccgccggtgttccgccggagatctggaagttccgtggaccggctctggtggtcgactcccaggagcaggccatcgaggtcattctgaacgacaccctgaagcccggcatggcgcttgtgattcgttacgaaggcccgaagggtggcccgggcatgcaggaaatgctgtacccgacctccttcgtcaagggcaagggcatcggcaagcaggtcgccatgctcaccgacggtcgctactccggcggttcctccggtctggccatcggccacatggcgcctgaggctgccaacaagggcccggtggcgctcatcaagaacggcgacatcatcgatatcgatatcgaagcccgttccgtgaacgtcgaactgactgacgagcagctggacgagcgtcgtcgcgagcttgaggctggcgacggctacgtggctcaccgcaaccgccacgtctcccaggcgctgaaggcgtacgccgccttcgcccgctcggccgacaagggtgcgacgcgtgacccggagctgatcaacaagctctccggtctcgactga

SEQ ID NO: 10415 - protein, 611 aa, Bifidobacterium longum DJO10A
MSGRVFAGARALYRAAGVSGDDMGKKPIIAIANSFDEFLPGHVHLNKVGRIVSEAIKEAGGIPREFNTMAVDDGIAMGHTGMLYSLPSRDIIADTVEYQCNAHCADALICIPNCDKVVPGMLMAALRLNIPTVFVSGGPMEAGTTVLADGTVKSTDLIDVMYATADDSVSDEELLNYEKTVCPTCGSCAGMFTANSMNCLTEAIGLALPGNGTILASHSYRKDLFERAAKQVVKIAHQYYDDSDDSVLPRSIATKEAFENAMTMDVAMGGSTNTVLHILAMAQSADVDFTLDDIERISHTVPCICKASPSGKWEISDVHRAGGITGILGELDRAGKLHTNVHSIDYPTLEAKLADWDIMRPTCTEEAQQMYKAAPGHIISPEPWTHTTLFDSLDRDRANGAIHDINHPEIHEGGLAVLRGNLAPDGCVVKTAGVPPEIWKFRGPALVVDSQEQAIEVILNDTLKPGMALVIRYEGPKGGPGMQEMLYPTSFVKGKGIGKQVAMLTDGRYSGGSSGLAIGHMAPEAANKGPVALIKNGDIIDIDIEARSVNVELTDEQLDERRRELEAGDGYVAHRNRHVSQALKAYAAFARSADKGATRDPELINKLSGLD

SEQ ID NO: 10416 - DNA, 1836 bp, Haemophilus somnus 2336
  CDS (1)..(1836): transl_table=11
atgcctaaactacgttcagcgaccagtacacaaggtcgtaatatggcaggtgcacgtgctttatggcgggcaacaggaatgaaagaaaatgatttcggtaaaccgattatcgcggttgtcaattcatttactcaatttgtacccggacatgttcacttaaaagatatggggcaactagttgctgctgaaattgaaaaatttggtggggtagcaaaagagtttaataccatcgctgtagatgatggaattgctatggggcatggaggtatgctctattctttaccgagccgagatttaattgccgatagtgttgaatatatggttaacgctcactgtgctgatgcgatggtttgtatttctaactgcgataagatcacaccgggaatgttaatggccgcattgcgtttgaatattccaacagtctttgtttcaggtggcccaatggaagcgggtaaaaccaaattatccgatcaaatcattaaattagacttagtggatgctatgattcaaggtgcaaatccgaatgtttcagatgatgtcagcgaacaaattgagcgttctgcttgtccaacttgtggctcttgttcaggtatgtttaccgccaattcaatgaattgtttaaccgaagcactgggcttgagcttaccgggaaatggctcatgtttggctactcatgccgaccgcaaacaacttttcttagcggcaggaaaacagattgttgaactgtgcaaacgttattatgaacaagatgatacatctgttttacctcgctcaattgccacaaaagaagcctttgataacgctatgagtcttgatatcgctatgggtggttcgaccaataccgttttgcatttattagctgctgcacaggaagcggaagtcaatttcactatggcggatattgatcgcctttctcgggtagtaccgtgcctgagcaaagttgcaccaaatacccaaaagtatcacatggaagatgtgcatcgtgctggcggtattatggcaattttaggtgaattagatcgtgccggcttgttgaatagccaaactcgtacaattttgggtatgagcataggtgaacaaattgcaaaatatgacatcaaactcactcaagataaagccatacataaatttttccgtgcaggaccagcagggattcgcactactcaagctttctcgcaagattgtcgttgggatacggttgatgatgatcgtgaaaatggttgtattcgcagtaaagaatttgcgtacagccaagatggtgggttagctatgttgtcaggcaatattgctttagacggttgtatagtcaaaactgctggagtagatgaaagcattttaaagttcagcggtaaagccattgtatttgaaagtcaagaagatgctgtatcaggcattttggggggtaaagtacaagctggacatgttgtggtgattcggtatgaaggaccaaaaggcggaccgggtatgcaagaaatgctttatccaaccagttatctcaaatctatgggcttaggtaaagcttgtgccttacttacagatggtcgtttctccggtggtacatcgggactgtctatcggacactgctcaccggaggcggcggcaggcggtttaattggtgtagtaaaagatggtgatattattgagattgatattccaaatcgtcgcatcgaattgatggtatccgaagaagaacttgctgagcgtcgagcagagcaagataaacttggctggaaaccagctaatcgccagagagaagtttcctttgctctaaaagtttacggatatttcgcaacatctgcggacaagggtgcagtacgagataaaacgaagatataa

SEQ ID NO: 10417 - protein, 611 aa, Haemophilus somnus 2336
MPKLRSATSTQGRNMAGARALWRATGMKENDFGKPIIAVVNSFTQFVPGHVHLKDMGQLVAAEIEKFGGVAKEFNTIAVDDGIAMGHGGMLYSLPSRDLIADSVEYMVNAHCADAMVCISNCDKITPGMLMAALRLNIPTVFVSGGPMEAGKTKLSDQIIKLDLVDAMIQGANPNVSDDVSEQIERSACPTCGSCSGMFTANSMNCLTEALGLSLPGNGSCLATHADRKQLFLAAGKQIVELCKRYYEQDDTSVLPRSIATKEAFDNAMSLDIAMGGSTNTVLHLLAAAQEAEVNFTMADIDRLSRVVPCLSKVAPNTQKYHMEDVHRAGGIMAILGELDRAGLLNSQTRTILGMSIGEQIAKYDIKLTQDKAIHKFFRAGPAGIRTTQAFSQDCRWDTVDDDRENGCIRSKEFAYSQDGGLAMLSGNIALDGCIVKTAGVDESILKFSGKAIVFESQEDAVSGILGGKVQAGHVVVIRYEGPKGGPGMQEMLYPTSYLKSMGLGKACALLTDGRFSGGTSGLSIGHCSPEAAAGGLIGVVKDGDIIEIDIPNRRIELMVSEEELAERRAEQDKLGWKPANRQREVSFALKVYGYFATSADKGAVRDKTKI

SEQ ID NO: 10418 - DNA, 1839 bp, Haemophilus influenzae R2846
  CDS (1)..(1839): transl_table=11
atgccaaaactacgttcagcgaccagcacacaaggtcgtaatatggcaggtgcacgtgccttatggcgtgcaacaggaatgaaagaaaatgactttggtaaaccgattattgcggtggtgaactctttcacgcaattcgtaccagggcatgtgcatttaaaagatatgggacagcttgttgctgcagaaattgaaaaagcgggcggcgtagcaaaagaatttaacaccattgcggtggatgatggtatcgcaatgggtcacggtggaatgctttattctttaccaagccgtgatttaatcgcagacagcgtagaatatatggtcaatgcgcactgtgctgatgcgatggtgtgtatttccaactgtgacaaaatcactccaggaatgttgatggcggcaatgcgtttaaatattccaactatcttcgtttcaggcggcccgatggaagcaggtaaaactaaactttctgatcaattaatccgcttagatttagtagatgcgatgattgaggcagccgatccgaatgtgtcagatgaacgtattgatgccatcgaacgcagtgcgtgtccaacttgtggttcatgctcaggtatgtttaccgcaaactctatgaattgccttactgaagccttaggtttatctttacctggtaatggttctatgttggcgactcatgctgaccgcaaagaattattcttaaaagcaggccgtcaaattgtcgagctttgcaaacgttattacgaacaagatgatgcaagcgtattgcctcgttcaatcggtacttttgatgcctttgaaaatgcaatgagcctcgatatcgcaatgggtggttcaagtaacactgttttacacttattagcggcagcacaagaagcaggcgtagattttaaaatggaagatattgaccgtttatcgcgcaaagtgccttgtttaagcaaaattgcaccaaacaccaataaatatcatatggaagacgtacaccgtgcaggcggtattatgggattgttgggtgaattagatcgcgctggattaattcataaaaatacacacaccgtgcttggaatgagcatgggagaacaactagaccaatacgatattattcgcaatcaagatgaagaattacataaattcttccgtgcaggtcctgcaggtatccgcacaactcaagcattctcacaagattgtcgctgggataccgtcgataatgatcgtgtaaacggttgtattcgcaataaagaaaatgcaatttcgcaagaaggtggcttagccgtattattcggtaatctcgctgaagacggatgtattgttaaaaccgctggtgtagatgaatctatttggaaattcactggcacggcaatcgtatttgaaagccaagaagatgcggttgcaggcattttaggtggcaaagttaaagaaggtcatgtcgttgttatccgctacgaaggccctaaaggcggaccaggtatgcaagaaatgttgtatccaaccagttacttaaaatcgatgggcttgggcaaaaaatgtgctttattaacggacggccgtttctctggtggtacatcaggcttgtctattggacatgcctcgccagaagctgcttctggcggtgcaattggcttagtacgcgatggcgatattatcaacattgatattccaaatcgtgcaattaacttagaaatgagtaatgatgaactcgcagcacgcagagccgaacaagatcaaaaaggttggcagccagctcaccgtgagcgtgaagtctctttcgcattgaaagtattcggccactttgcgacctcagcggacaaaggtgcggtacgcgataaaacattattaaaataa

SEQ ID NO: 10419 - protein, 612 aa, Haemophilus influenzae R2846
MPKLRSATSTQGRNMAGARALWRATGMKENDFGKPIIAVVNSFTQFVPGHVHLKDMGQLVAAEIEKAGGVAKEFNTIAVDDGIAMGHGGMLYSLPSRDLIADSVEYMVNAHCADAMVCISNCDKITPGMLMAAMRLNIPTIFVSGGPMEAGKTKLSDQLIRLDLVDAMIEAADPNVSDERIDAIERSACPTCGSCSGMFTANSMNCLTEALGLSLPGNGSMLATHADRKELFLKAGRQIVELCKRYYEQDDASVLPRSIGTFDAFENAMSLDIAMGGSSNTVLHLLAAAQEAGVDFKMEDIDRLSRKVPCLSKIAPNTNKYHMEDVHRAGGIMGLLGELDRAGLIHKNTHTVLGMSMGEQLDQYDIIRNQDEELHKFFRAGPAGIRTTQAFSQDCRWDTVDNDRVNGCIRNKENAISQEGGLAVLFGNLAEDGCIVKTAGVDESIWKFTGTAIVFESQEDAVAGILGGKVKEGHVVVIRYEGPKGGPGMQEMLYPTSYLKSMGLGKKCALLTDGRFSGGTSGLSIGHASPEAASGGAIGLVRDGDIINIDIPNRAINLEMSNDELAARRAEQDQKGWQPAHREREVSFALKVFGHFATSADKGAVRDKTLLK

SEQ ID NO: 10420 - DNA, 1686 bp, Crocosphaera watsonii WH 8501
  CDS (1)..(1686): transl_table=11
atgtcagagaatataagaagtcgcctcataacccacggtcctcaacgtaccccaaaccgtgcaatgctgcgtgctgtgggcttcggagatgatgactttactaaacccatcgttggggtagctaatggcttcagtaccatcaccccctgtaatatggggattaacgacttaaccaagcgcgctgaagcaggaattaaaacggccggtggtatgccccaaatattcggtactattactatcagtgatggtatctctatgggtacagaaggcatgaaatactccctggtgtcacgggatgtcattgccgactctatcgaaaccgcttgtaacggtcaaagtatggatggagtgattgcgatcggtggatgtgataaaaatatgccaggggctatgatcgctatggccagaatgaatatacctggaatcttcgtctatgggggaaccattaaacccggccgctacaacggggaagatttaacggtggtcagtgcttttgaagcagttggccaacatagtgcaggtaagatagatgataacacactattagccatcgagcgcaacgcttgtcccggtgctggttcctgtgggggaatgttcaccgcaaataccatgtcttctgcttttgaagtgatggggatgagtttaccttattcctctactatggcggccgaagatgcagaaaaagcagacagtaccgaaaagtcagcttttgccctagttaatgccattcgtaaccaaattttacctagtcaaatcttaacccgaaaagcctttgaaaacgccatttctgtaatcatggctgtaggtggttcaactaatgctgtattacaccttttagctattgctaataccatgggtgttgagttaactttagacgattttgaaaccattcgtcaacgggttccggtactatgtgatttgaaaccatcgggacgctatgttaccgttaatttacatcaagctggtggcattcctcaagtgatgaaaatgttattaactcatgggttattacatggggatgccttaactatttctggccaaactatcgccgaaattttagctgatataccagagcaacctcctgctaatcaagatgttattcgtccttgggataaccctgtttacaaagagggacatctagccattttaaaaggtaatttagcctccgagggttccgttgctaaaattagcggtgtcaagaacccaacaatgacaggccccgcacgagtatttgagtcagaagaggaatgtttagaggctattttagcaggaaaaattaacgcaggtgatgtgattattgtgcgttatgaaggtcccaaaggaggcccaggaatgcgagaaatgttagcaccaacctctgctattattggcgcaggtttaggtgattctgtaggcttaattaccgatggacgtttttcaggaggaacctacggtttagttgtgggccacgttgccccagaagcttatgttgggggaactattgggttagtaaaagagggggatagtattaccattgatgccaaagaaaagttgttacaagtgaacgtttctgaggaagaattagcccaacgtcgcgctaactggaaagcccccgaacctcgttataaaagaggggtattagccaaatatgcgaagttagtttcttctagtagtttaggaggagttactgacttgaatttgttttaa

SEQ ID NO: 10421 - protein, 561 aa, Crocosphaera watsonii WH 8501
MSENIRSRLITHGPQRTPNRAMLRAVGFGDDDFTKPIVGVANGFSTITPCNMGINDLTKRAEAGIKTAGGMPQIFGTITISDGISMGTEGMKYSLVSRDVIADSIETACNGQSMDGVIAIGGCDKNMPGAMIAMARMNIPGIFVYGGTIKPGRYNGEDLTVVSAFEAVGQHSAGKIDDNTLLAIERNACPGAGSCGGMFTANTMSSAFEVMGMSLPYSSTMAAEDAEKADSTEKSAFALVNAIRNQILPSQILTRKAFENAISVIMAVGGSTNAVLHLLAIANTMGVELTLDDFETIRQRVPVLCDLKPSGRYVTVNLHQAGGIPQVMKMLLTHGLLHGDALTISGQTIAEILADIPEQPPANQDVIRPWDNPVYKEGHLAILKGNLASEGSVAKISGVKNPTMTGPARVFESEEECLEAILAGKINAGDVIIVRYEGPKGGPGMREMLAPTSAIIGAGLGDSVGLITDGRFSGGTYGLVVGHVAPEAYVGGTIGLVKEGDSITIDAKEKLLQVNVSEEELAQRRANWKAPEPRYKRGVLAKYAKLVSSSSLGGVTDLNLF

SEQ ID NO: 10422 - DNA, 1701 bp, Prosthecochloris aestuarii DSM 271
  CDS (1)..(1701): transl_table=11
atgaaactcatgagatccgataccataaaaaaaggctttgaaaaagccccgcacagaagcctgctgaatgcaaccggcgcaatcagaagccagagcgacttcaaaaagccgttcataggcatctgcaactcctataatgaactgattcccggccacacccatcttcaggagctggggcgcatcgcaaaagaagcgatcagagaagctggcggtgttccgtttgagttcaataccataggggtctgcgacggcattgccatgggacatatgggcatgcgttattcgcttgccagccgggaactgattgccgacagcgtcgaaacagtcgcacaggcgcaccgtctcgacggtcttgtctgtatacctaattgcgacaagataaccccgggaatgatgatgggggtcctgcgcatcaacattcctgctgttttcgtttccggtggccctatgaaagccggccacacgccatcaggaaaaactgtcgatctcatatcggtcttcgaggctgtcggacagtgcagtaccggtgaaatcagcgatgaagagctcaggtctatagagagtaacgcatgccccacatgcggctcctgctcaggcatgttcacagcaaactcaatgaactgtcttgccgaagcgcttggctttgcgcttcctggcaacggcaccattcttgcggtcgatcaaggtcggaaagaactggtaaaacaggcatctgcagtcattctcgatctggtacagaacgatattaaaccaagggatatcctctcgaggaaatcaatgctcaacgcctttgcactcgatcttgcaatgggaggaagcaccaataccattcttcatacactggcgattgccaatgaagcggaactggagtttgacttttctgaactcaacgatctttctgccaggacaccctatatctgcaaggtcagccccgcaactcccgatgtccatatcgaggatgtcgaccgagcaggcggcatcagcgcaattctgcatgaactgtcaaaaatcgacggcttgctggacctctcgacaccaaccgttacgggaaaaacccttggagaaaatatcagcggagccgaagtcagagacagaaaagtcatccgttcggtcgaagaaccttactctcctaccggtggcctggcagtcctgtatggaaatcttgccccagacggcgctgttgtcaaaacaggggccgtcagcccgtcgatgatgaaacataccggcccggcaaggatcttcgaatgccaggatgatgccatcaaaggcattatggacggcgatgtcgtcaagggagatgtggttatcatccgctatgaaggccccaaggggggacctggtatgccggaaatgctctcgccaacaagcgcaatcatgggcagagggcttggcgacagcgtcgcactgattactgacggcaggttctcgggaggctcccgcggagcctgtgtaggtcatgtttctcccgaagcagcagaaaaaggcccaatagccgctgtagaaaacggcgatctggttaccatagatattccaaaccggactatctcggtcgatctctcagacgaggtcatcgaacagcgtcaggccagtctgccagtctttgaacctaaagttaaaaaaggatatctggcccgctacgcgcacatggtgacgtcagcaaatacaggggcgatactcaaaaatccagctattaatctttaa

SEQ ID NO: 10423 - protein, 566 aa, Prosthecochloris aestuarii DSM 271
MKLMRSDTIKKGFEKAPHRSLLNATGAIRSQSDFKKPFIGICNSYNELIPGHTHLQELGRIAKEAIREAGGVPFEFNTIGVCDGIAMGHMGMRYSLASRELIADSVETVAQAHRLDGLVCIPNCDKITPGMMMGVLRINIPAVFVSGGPMKAGHTPSGKTVDLISVFEAVGQCSTGEISDEELRSIESNACPTCGSCSGMFTANSMNCLAEALGFALPGNGTILAVDQGRKELVKQASAVILDLVQNDIKPRDILSRKSMLNAFALDLAMGGSTNTILHTLAIANEAELEFDFSELNDLSARTPYICKVSPATPDVHIEDVDRAGGISAILHELSKIDGLLDLSTPTVTGKTLGENISGAEVRDRKVIRSVEEPYSPTGGLAVLYGNLAPDGAVVKTGAVSPSMMKHTGPARIFECQDDAIKGIMDGDVVKGDVVIIRYEGPKGGPGMPEMLSPTSAIMGRGLGDSVALITDGRFSGGSRGACVGHVSPEAAEKGPIAAVENGDLVTIDIPNRTISVDLSDEVIEQRQASLPVFEPKVKKGYLARYAHMVTSANTGAILKNPAINL

SEQ ID NO: 10424 - DNA, 1833 bp, Xylella fastidiosa Ann-1
  CDS (1)..(1833): transl_table=11
atgcctgagtaccgatccaaaacttccacctacggccgcaatatggctggtgcgcgtgcgttatggcgcgctaccggcatgaaggatgacgacttccagaagccgatcatcgcgattgctaattctttcactcaattcgtcccagggcacgttcatctaaaggatcttggccagctagtcgcacgtgaaattgagcgtctcggtggtgtagccaaagaattcaacacgattgcggtagatgacggtatcgcgatggggcacgacggaatgctgtattcgctacctagtcgtgaaattatcgccgactccgtcgaatacatggcaaacgcgcattgtgctgatgcgctggtatgcatctccaactgcgacaaaatcactcctggcatgctgatggcatcgctccgcctgaacatcccaacggtgttcgtctcaggtgggccgatggaagccggaaaaacgacactggctgatcacaaactcgatctagttgacgcaatggtgctggctgccgaccctcacgcgagtgacgaggaagttgctaccgtggaacgcagtgcctgccccacttgcggttcatgttcgggcatgtttactgccaactcgatgaactgtctcaccgaagcactcggtttatccttgccaggtaacgggactgtcgttgcgacgcattctgaccgtaaacaactgtttttgaacgcgggacgcactgtcattgagttatgtcaccgctggtatggggctgaagatgccaccgcattacctcgaggcattgctacatttgctgcgttcgaaaacgcgataacactagatatcgcgatgggcggctcgactaatacgattttgcacctacttgcagccgcacaggaggcggaagtgtcttttacgatgcaagacattgatcgcttgtcacggaatgtgccgcaattatgcaaagttgctcccaacacgcagaaataccatattgaggatgtgcaccgcgctggaggcatcttcgggattctagctgaattggcacggggaaacttgttgcataccgacgtcgcaaccgtacatagcaaaaccctgggtgaggccatcgccacatgggacattatcgggacgcaggatgaagcgatccatacgttttataaagcaggttcagcaggcatcccaacccaggtggccttcagtcaaagtacgcgttggccgtcactcgatactgatcgtaccgaaggctgcatccgtgacatggaacatgcgttctcgaaggaaggaggcttggcagtgctctatggcaacattgcccaggatggctgcgtcgtaaagaccgccggtgtagacgcatcaatccatgtgttcgaaggttcggccctggtgtacgaaagccaggaggcagcggtcaaaggaatccttagcgacgaggtacaaccaggcatgatcgtcgtgattcgctacgaaggccccaagggcggccctggcatgcaggagatgctgtatccaacgtcgtatttgaagtccaaaggtctcgggaagcaatgtgctctattcaccgatggcaggttttctggcgggacctcaggtttatcaattggccacgcttcacccgaagccgcagcaggtggtgctattggcctcatccgggatggcgaccgtatccgcatcgacattccacagcgcgcgatcaatgtgctcatcagcgaagaggagttggcttcacggcgcctcgaacaacatgccatcggctggaagccggcccagtcacggacgcgtaaggtcagcagtgctctgaaggcgtatgcattacttgcaaccagcgccgacaagggggccgtacgcgacaaaacgctactttga

SEQ ID NO: 10425 - protein, 610 aa, Xylella fastidiosa Ann-1
MPEYRSKTSTYGRNMAGARALWRATGMKDDDFQKPIIAIANSFTQFVPGHVHLKDLGQLVAREIERLGGVAKEFNTIAVDDGIAMGHDGMLYSLPSREIIADSVEYMANAHCADALVCISNCDKITPGMLMASLRLNIPTVFVSGGPMEAGKTTLADHKLDLVDAMVLAADPHASDEEVATVERSACPTCGSCSGMFTANSMNCLTEALGLSLPGNGTVVATHSDRKQLFLNAGRTVIELCHRWYGAEDATALPRGIATFAAFENAITLDIAMGGSTNTILHLLAAAQEAEVSFTMQDIDRLSRNVPQLCKVAPNTQKYHIEDVHRAGGIFGILAELARGNLLHTDVATVHSKTLGEAIATWDIIGTQDEAIHTFYKAGSAGIPTQVAFSQSTRWPSLDTDRTEGCIRDMEHAFSKEGGLAVLYGNIAQDGCVVKTAGVDASIHVFEGSALVYESQEAAVKGILSDEVQPGMIVVIRYEGPKGGPGMQEMLYPTSYLKSKGLGKQCALFTDGRFSGGTSGLSIGHASPEAAAGGAIGLIRDGDRIRIDIPQRAINVLISEEELASRRLEQHAIGWKPAQSRTRKVSSALKAYALLATSADKGAVRDKTLL

SEQ ID NO: 10426 - DNA, 1767 bp, Sulfitobacter sp. EE-36
  CDS (1)..(1767): transl_table=11
atgtccaccaacacccgctttgataaatccagactgccaagccggcacgtgaccgaggggccagagcgcgcaccgcaccggtcctattactacgcaatgggcatgaccgaagaagagattcaccagcctctggtgggtgtggcaacctgctggaacgaagcggccccctgtaacatcgcgctgaaccgtcaggcccaagcggtcaaggtcggcgtcaaggcgcagcaaggcacgccacgcgaattcaccaccatcactgtcaccgacgggatcgccatgggccacgagggcatgcgctcttccctagcgtcgcgcgaagcgattgccgacacggtagagctgacaatgcgcggtcactgctacgatgcgattgtcggtcttgcgggctgtgacaaatcgctgccgggcatgatgatggcgatgctgcggctgaacgtgccgtccgtgttcctctacggtgggtcgatcctgccgggcaaagtcccggaaggggccgatgtgcctgccgatttcgccagccgcgatctgactgtgcaagacgttttcgaagccgtgggtaactaccagaacggcagcatgtcgcaagccgcgcttgaagtattggagcgcgtcgcttgcccgacagccggtgcctgcgggggccagttcaccgccaacactatggcctgcgtgtccgaggcaattggtctggcgctgctgaactcctctggcatgcctgcgccctatgaatcccgcgacgcctatgcggcggcctcgggtgaagccgtcatgaacctgatcgaaaagaacatccgcgcgcgcgacatctgcacccgcgaagcgttcgagaatgcggcgcgtatcgtggcctgcaccggcgggtcgaccaatgccggtctgcacctgcccgctatggccgccgaggcgggtatcgactttaacctcagcgatgtgtgcgacatcttccgcgacacgccttatttcgtcgacatgaaacccggcgggtcgcatgtggcaaaagacctgtatgacgcgggcggcgtgcctgttgtgatgaaagaactgcgcaaggctggcctgctgcatgatgactgtctcaccgcctcgggcctgtccatcggtgaagagctcgacaagatcgaacgcgaagccgacggcaaggtgatccacgcgatcgaaacaccgatcagcaagaccggcggcgtcgttggtctgaagggcaacttggcacccgaaggggccatcgtgaaaatcgcgggcatgtccgaagaagacatcgtctttaccggtccggcgctgatctttgaatgtgaacaggatgcgttcgaagccgtgcaaaaccgggcctacagcgaaggcgacgtgttcgtgatccgcaacgaaggccccgctggtggccccggcatgcgcgaaatgctggcgaccacggcggccctgtccggtcaaggcatgggcaaaaaggtggcactgatcaccgacggccgtttctccggcgcgacacggggtttctgcgttggtcacgtcggccccgaagccgcacatggcggaccgattgccttgctcaaacagggtgacatgatcacactgaacgcgatcaccggttcgatctctgtcgatatctcggacgaggaaatggcagaacgcaaagcggcttggcccggtgcccgcaaaacaaactatcaaagcggtgcactgtggaaatacgcgcagcttgtgggcccaacctatcttggtgcggtgacgcatcccggcgcgaaggcggaaacacatgactatatggacctgtaa

SEQ ID NO: 10427 - protein, 588 aa, Sulfitobacter sp. EE-36
MSTNTRFDKSRLPSRHVTEGPERAPHRSYYYAMGMTEEEIHQPLVGVATCWNEAAPCNIALNRQAQAVKVGVKAQQGTPREFTTITVTDGIAMGHEGMRSSLASREAIADTVELTMRGHCYDAIVGLAGCDKSLPGMMMAMLRLNVPSVFLYGGSILPGKVPEGADVPADFASRDLTVQDVFEAVGNYQNGSMSQAALEVLERVACPTAGACGGQFTANTMACVSEAIGLALLNSSGMPAPYESRDAYAAASGEAVMNLIEKNIRARDICTREAFENAARIVACTGGSTNAGLHLPAMAAEAGIDFNLSDVCDIFRDTPYFVDMKPGGSHVAKDLYDAGGVPVVMKELRKAGLLHDDCLTASGLSIGEELDKIEREADGKVIHAIETPISKTGGVVGLKGNLAPEGAIVKIAGMSEEDIVFTGPALIFECEQDAFEAVQNRAYSEGDVFVIRNEGPAGGPGMREMLATTAALSGQGMGKKVALITDGRFSGATRGFCVGHVGPEAAHGGPIALLKQGDMITLNAITGSISVDISDEEMAERKAAWPGARKTNYQSGALWKYAQLVGPTYLGAVTHPGAKAETHDYMDL

SEQ ID NO: 10428 - DNA, 1728 bp, Roseovarius nubinhibens ISM
  CDS (1)..(1728): transl_table=11
atgaccaaattcgacaaagcaaaattgcccagccgccatgtgaccgaaggcccggcgcgtgcgccgcaccggtcctacatgtatgcgatggggcttcaggaagaagaaatccatcagcctctggtcggcgtggcgacctgctggaacgaggcggcgccgtgcaacatttcgctcaaccggcaggcgcaatcggtcaagatgggcgtcaaggaagcgggcggcacgccgcgcgagtttaccaccatcaccgtgaccgacggcatcgccatgggccatgagggcatgcgcagctcgctcgcgtcgcgcgaggcgattgccgacactgtcgagctcaccatgcgcggccattgctatgatgcgctcgtcggtctggcgggctgtgacaagtcgctgccggggatgatgatggcgatggtgcggctcaacacgccgtcggtcttcatctatggcggctcgatcatgccgggccggttccagggccgtgacgtgaccgtgcaggacgtgttcgaggccgtcggccgccatcaggcaggggccaattcggacgaagagctgcgggcgctggaaaaggtggcctgcccgtcggccggggcctgtggcggccagttcaccgccaacaccatggcctgtgtctctgaagcgatcggtctggcgctgcccaactcggcgggcgcgcccgcgccctatgaaagccgcgatcaatatggcaccgcctctggtgcggcggtcatgacgcttttggaaaagaacatccgggcgcgcgacatcgtcacgctcaagagccttgagaatgccgcgcgggtcgtggcctgtaccggtgggtcgaccaatgccggtctgcacctgcccgcgattgcgcatgaggcggggctcgagtttttcctcgatgacgtctgccagatcttcaaggacacgccctatttcgtcgatctcaaaccgggcgggcaatatgtcgccaaggacctctatgaggcgggcggcgtgccggtggtgatgaaggagctgcgcaaggcggggctcatccacgaagattgcatgaccgtcaccgggcggaccattggcgaagagatcgacatcgtcgagcgcgaggccgatggccgggtgatctatcccgtcgagaagccgatcaccaagaccggcggcgtcgtgggcctcaagggcaatcttgccccgcagggcgccatcgtgaaggtcgcgggtatgagcgaggaagagcaagtcttctcgggccccgcgcgggtttttgaatgcgaagaggacgcctttgaggcggtcaaggcgcgcagctacaaggagggcgaggttctcgtcatccgcaacgagggccccgcaggcggtccgggcatgcgcgagatgctcgccaccacggcggcgctgtcggggcagggcatgggcaagaaggtcgcgctcatcaccgatggccggttctcgggcgcgacgcgtggcttctgcgtcggccatgtcggaccggaatcggcccatggcggcccgattgccctggtccaggatggcgatgtgatcaccatcaacgcgatcaccggcgagctcagcgtggcgctcagcgatgaggatctgacggcccgcaaggaggcctggaaaggcccgcgcgagacgatctattccagcggcgcgctgtggaaatacgcccagctcgtgggcgagacctacaagggcgctgtgacccaccccggtgccgaagcggagaagcatgtctatatggatctctaa

SEQ ID NO: 10429 - protein, 575 aa, Roseovarius nubinhibens ISM
MTKFDKAKLPSRHVTEGPARAPHRSYMYAMGLQEEEIHQPLVGVATCWNEAAPCNISLNRQAQSVKMGVKEAGGTPREFTTITVTDGIAMGHEGMRSSLASREAIADTVELTMRGHCYDALVGLAGCDKSLPGMMMAMVRLNTPSVFIYGGSIMPGRFQGRDVTVQDVFEAVGRHQAGANSDEELRALEKVACPSAGACGGQFTANTMACVSEAIGLALPNSAGAPAPYESRDQYGTASGAAVMTLLEKNIRARDIVTLKSLENAARVVACTGGSTNAGLHLPAIAHEAGLEFFLDDVCQIFKDTPYFVDLKPGGQYVAKDLYEAGGVPVVMKELRKAGLIHEDCMTVTGRTIGEEIDIVEREADGRVIYPVEKPITKTGGVVGLKGNLAPQGAIVKVAGMSEEEQVFSGPARVFECEEDAFEAVKARSYKEGEVLVIRNEGPAGGPGMREMLATTAALSGQGMGKKVALITDGRFSGATRGFCVGHVGPESAHGGPIALVQDGDVITINAITGELSVALSDEDLTARKEAWKGPRETIYSSGALWKYAQLVGETYKGAVTHPGAEAEKHVYMDL

SEQ ID NO: 10430 - DNA, 1758 bp, Oceanicola batsensis HTCC2597
  CDS (1)..(1758): transl_table=11
atgacgaaattcgacaaatcccggctgcccagccgatacgtcaccgaaggacccgagcgcgcgccgcaccgctcctacctctatgccatggggatttccgaagaagagatccaccagccgctcgtcggcgtggcgacctgctggaacgaggccgcgccctgcaacatcgcgctgaaccgccaggcgcaggccgtcaagctgggcgtgaaggcgcgcgaaggcacgccgcgcgaattcaccaccatcaccgtcaccgacggcatcgccatgggccacgaggggatgcgatcctccctcgcctcgcgcgaggccatcgccgacacggtggagctgaccatgcgcggccactgctacgacgcgatcgtcggactggcgggctgcgacaagtccctgcccggcatgatgatggccatggtacgtctgaacgtgccctcggtcttcatctacggcggttcgatcctgcccggcaaggcaccgcaggtcgacgagatccccgaggacttccgcacccgcgacctgaccgtgcaggacatgttcgaagcggtcggccgtcaccagaacaaggagttgtcggacgctgcgctcgacatgctggaacgggtggcctgcccctcctccggcgcctgcggcggccagttcaccgccaataccatggcctgcgtctccgaggcgatcgggctggcgctgctcaactcctccggcatgcctgcgccctacgagagccgcgaccagtacggcgaggcctcgggccgcgcggtcatgaacctgatcgagaagaacatccgcgcccgcgatgtcgtcacccgcaagtcgctggaaaacgccgcgcgcgtcgtggcctgcaccggcggctcgaccaacgccggcctgcacctgcccgcgatcgcgcacgaggccggcatcgactttcaccttgatgacgtctgcgagatcttccgcgacacaccctatttcgtgaacctcaagccgggcggcgaccacgtggccaaggacctgttcgacgtcggcggcatcccggtggtgatgaacgaactgcgcaaggccggcctgatccacgaggactgcgtcacggcctcgggcaagaccatcggcgaggaactcgacaccgtcacccgcaaggccgacggcaaggtgatctatccgatcgagacgccgatcaccaagaccggcggcgtggtgggcctcaagggcaacctcgcccccgaaggcgccatcgtgaaggtcgcgggcatttcggccgaggatcagaagttcaccggccccgcccgggtcttcgaatgcgaggaagacgcctttgccgccgtgcagaaacgggaatacgaggaaggcgaggtcatcgtcatccgcaacgagggccccgcgggcggtcccggcatgcgcgagatgctggccaccaccgccgccctgtccggccagggcatgggcaagaaggtcgcgctgatcaccgacggccgcttttccggcgcgacgcgcggcttctgcgttggccatgtcggccccgaggcagcgcatggcggcccgatcgcgatgctcaagaacggcgacatgatcaccatcgacgccatcgagggttcgatcgaggtcgacctctccgaggccgaactcgaggcgcgcaaggccgactggacgggccctcgcgagacgatctacgcctcgggcgcgctctggaaatatgcgcagctggtcggcaagacctatctcggcgctgtcacccatcccggcggcaaggccgagaaacatatctatgccgatctctga

SEQ ID NO: 10431 - protein, 585 aa, Oceanicola batsensis HTCC2597
MTKFDKSRLPSRYVTEGPERAPHRSYLYAMGISEEEIHQPLVGVATCWNEAAPCNIALNRQAQAVKLGVKAREGTPREFTTITVTDGIAMGHEGMRSSLASREAIADTVELTMRGHCYDAIVGLAGCDKSLPGMMMAMVRLNVPSVFIYGGSILPGKAPQVDEIPEDFRTRDLTVQDMFEAVGRHQNKELSDAALDMLERVACPSSGACGGQFTANTMACVSEAIGLALLNSSGMPAPYESRDQYGEASGRAVMNLIEKNIRARDVVTRKSLENAARVVACTGGSTNAGLHLPAIAHEAGIDFHLDDVCEIFRDTPYFVNLKPGGDHVAKDLFDVGGIPVVMNELRKAGLIHEDCVTASGKTIGEELDTVTRKADGKVIYPIETPITKTGGVVGLKGNLAPEGAIVKVAGISAEDQKFTGPARVFECEEDAFAAVQKREYEEGEVIVIRNEGPAGGPGMREMLATTAALSGQGMGKKVALITDGRFSGATRGFCVGHVGPEAAHGGPIAMLKNGDMITIDAIEGSIEVDLSEAELEARKADWTGPRETIYASGALWKYAQLVGKTYLGAVTHPGGKAEKHIYADL

SEQ ID NO: 10432 - DNA, 1716 bp, Erythrobacter sp. NAP1
  CDS (1)..(1716): transl_table=11
atgtccttcgataagtccaagttgccaagccgccatgtctcggtcgggcctgaacgcgcgccccaccgttcctactattacgcgatgggcatgaccgaggaagaaatcgcacgccccttcgtcgctgtggccagtgctggtaacgattccgcgccgtgcaacacaacgctcgatccgcaggcgaatatctgtcgcgaaggcgtcattgcggggggagggaccccgcgccgcttcaacaccatcacggttacggacgggatcgcgatgggccatcagggcatgaagagctcgctggtaagtcgcgaggtcattgcggactccgtcgagctttcggtgcgcggtcattgttacgatgcgcttgtaggatttgccggatgcgacaaaagcctgcccgggatgatgatggccatgctgcggctgaacgtgccgagcatctttgtctatggcggctcgatcctcccaggcactcatcgcggcaaggacgtgacggtcgtcgatgtgttcgaagccgtgggccagcatgctgccgggaattgcccgcttcaggagttgatcgagctcgaaaaggttgcctgtcccggacacggagcctgtggcggccagttcacagccaatacgatggcctgcgtgggtgaggcaatcggattgtcattgccgaacagcaacatggctcctgctccttacagatcgcgtgaagaaatcgctcgcgccgcgggcgagcaggtgatgatactgcttaagcaaaatctgcgcccacgcgacatctgcacgcgcgcggcctttgaaaacgcggcccgcgttgtcgccgcaaccggcggttctaccaatgccgctctgcaccttcctgccatggcgagcgaatgcgggattgatttcgatcttttcgacgttgcggagatcttcaaatcgacaccctacatcgccgacctgaagcccggcggtaagtacgtcgcaaaggacatgcacgaagcgggcggcgtctacatgggcatgaagacactgctcgaaggagggttcctcgatcccgggccgatgactgtgaccggcaagacgctgggcgagaacatcgaggagatcacctggaaccccgatcaaaaggtattctacgacgtaaagaacccgatcaccccgaccggcggtgtggttgggcttaagggctcgctcgcgcccgaaggtgcgatcgtaaaggttgccgggatggaacgtttgcaattcaccggcacggctcgcgtattcgaatgcgaggaagatgccttcgaggcggtcgagaagcgcgacattgtcgaaggcagcgtcatcgtcatccgctacgaaggccccaagggtggacctggaatgcgcgagatgctcgccaccaccgctgcgctttacggccagggtatgggtgagaaagtcgccctcatcacagatgggcggttctcaggcgctacgcgtggtttctgtatcggccatgtcggccctgaagccgcggatggcggaccgatcgctctcgtcgaggatggcgacacgatcagcatcgatgccgagcttggcacgatcgacctggaggtcgaccaaagcgtgcttgaagaacgccgaaaagcatggaagccgcgtacgaacgattatcagtcgggggcgctgtggcgttacgcgcagaatgtcgggtccgcacgaaacggagcgctcactcacccgggcgccaagtctgagacccatgtgtttgcggacatctag

SEQ ID NO: 10433 - protein, 571 aa, Erythrobacter sp. NAP1
MSFDKSKLPSRHVSVGPERAPHRSYYYAMGMTEEEIARPFVAVASAGNDSAPCNTTLDPQANICREGVIAGGGTPRRFNTITVTDGIAMGHQGMKSSLVSREVIADSVELSVRGHCYDALVGFAGCDKSLPGMMMAMLRLNVPSIFVYGGSILPGTHRGKDVTVVDVFEAVGQHAAGNCPLQELIELEKVACPGHGACGGQFTANTMACVGEAIGLSLPNSNMAPAPYRSREEIARAAGEQVMILLKQNLRPRDICTRAAFENAARVVAATGGSTNAALHLPAMASECGIDFDLFDVAEIFKSTPYIADLKPGGKYVAKDMHEAGGVYMGMKTLLEGGFLDPGPMTVTGKTLGENIEEITWNPDQKVFYDVKNPITPTGGVVGLKGSLAPEGAIVKVAGMERLQFTGTARVFECEEDAFEAVEKRDIVEGSVIVIRYEGPKGGPGMREMLATTAALYGQGMGEKVALITDGRFSGATRGFCIGHVGPEAADGGPIALVEDGDTISIDAELGTIDLEVDQSVLEERRKAWKPRTNDYQSGALWRYAQNVGSARNGALTHPGAKSETHVFADI

SEQ ID NO: 10434 - DNA, 1671 bp, Synechococcus sp. WH 7805
  CDS (1)..(1671): transl_table=11
atgctccgctccgatgccgtcaccaaggggatccagcgctctcccaaccgggcgatgctgcgggccgtgggtttcggcgatcaggactttggcaagccgatcatcggcatcgccaacggctacagcacgatcacgccctgcaacgtcgggctcgatgacttagcccggcgtgccgaagaggcggcccggctggccggtggaatgccacagaccttcggaaccatcaccgtcagcgacggcatctcgatgggcaccgagggaatgaaatattccctggtgagccgggaagtgatcgctgacgccatcgaaacggcctgcaatggccagagcatggatggcgtgttggccgtgggcggctgcgacaagaacatgcctggggccatgctcgcgatggcgaggatgaacatcccggcgatcttcgtgtatggcggcaccatcaagccgggaaaactgggcggctgcgacctcaccgtggtgagtgcttttgaagcagtgggtcagatcaccagcggcaagatcgacgaagagcagctcacggccattgagaaaaatgcctgccctggtgctggcagctgcggcggcatgttcaccgccaacaccatgagcgctgctatcgaaacgatggggctgagccttccccacagctccaccatggccgctgaagatgaggaaaaggctgacagtgcagcccgatcggccgaggtgttggtgcaggcgatccaggccggcatccgtcccctcgatctgatgacccgggaggcctttgaaaatgccatcagcgtgatcatggcggtgggtggctccaccaattccgtgctgcatctgctggccatagcccgcacggccggcgttgcactggccatcgacgactttgaacagatccgccagcgcgttccggtgatctgtgatctcaaacccagtggccgttacgtcacggtggatctccaccgcgccggtgggattccccaggtgatgaaactgctgctggatgccggcctcctccacggtgattgccgcacgatcgaaggcaaaaccctcaaggaactgcttgcggatgtgccctccacaccacccgcggatcaggatgtgattcggccgctctccaatcccctgtatgccaagggccacctggccatcctcaagggcaacctggccagcgaaggggccgtcgccaagatcagtggtgtgaagaatccagtgatcacaggcccagccagggtttttgaaagcgaagaaacttgcctggaagcgattctcgacaaccagatccaggccggtgatgtggtggtggtgcgcaacgaaggccccgtcggcggtcctggcatgcgcgaaatgctcagccccacctccgccatcgtgggtcaggggctgctcgacaaggtggcgctgatcaccgatggccgtttctccggtggctcctacgggttggtcatcggccatgtggcgcctgaagcggcagtcgggggcaccattggtttgatcgaggaaggagacagcatcaccgtggatgccaatcaactgctgctgcagctgaatgtggacgatgccgagctggagcgacgtcggaatgcatggtccgccccggttccgaaataccgcaccggaatcctcggcaaatatgcccggcttgtgagttccagcagccagggcgcggtcaccgatcagccctga

SEQ ID NO: 10435 - protein, 556 aa, Synechococcus sp. WH 7805
MLRSDAVTKGIQRSPNRAMLRAVGFGDQDFGKPIIGIANGYSTITPCNVGLDDLARRAEEAARLAGGMPQTFGTITVSDGISMGTEGMKYSLVSREVIADAIETACNGQSMDGVLAVGGCDKNMPGAMLAMARMNIPAIFVYGGTIKPGKLGGCDLTVVSAFEAVGQITSGKIDEEQLTAIEKNACPGAGSCGGMFTANTMSAAIETMGLSLPHSSTMAAEDEEKADSAARSAEVLVQAIQAGIRPLDLMTREAFENAISVIMAVGGSTNSVLHLLAIARTAGVALAIDDFEQIRQRVPVICDLKPSGRYVTVDLHRAGGIPQVMKLLLDAGLLHGDCRTIEGKTLKELLADVPSTPPADQDVIRPLSNPLYAKGHLAILKGNLASEGAVAKISGVKNPVITGPARVFESEETCLEAILDNQIQAGDVVVVRNEGPVGGPGMREMLSPTSAIVGQGLLDKVALITDGRFSGGSYGLVIGHVAPEAAVGGTIGLIEEGDSITVDANQLLLQLNVDDAELERRRNAWSAPVPKYRTGILGKYARLVSSSSQGAVTDQP

SEQ ID NO: 10436 - DNA, 1857 bp, Pseudoalteromonas tunicata D2
  CDS (1)..(1857): transl_table=11
atggctaaattaagaagtgcagaaacaactgaaggtcgcaaacgcgctggcgctcgcgcgctttggcgtgcaacaggaatgacagatcaggattttggtaaaccgattattgcggttgttaactcgttcactcaatttgtgccaggtcatgttcacctcaaccaactcagtgagttaatggcgcaaaccattacacaagcgggtggtgtgccaaaggaatttaataccattgcaatcgatgatggtatcgcaatgggtcatggcggcatgctttattctttgccttctcgcgatttaattgctgattcggttgaatacatggtcaacggtcactgcgctgatgccatgatctgtatttcaaactgcgacaaaataactccgggcatgatgcttgcagcgctgcgtttaaatatcccggttatttttgtttcaggtggtccaatggaggcgggcaaaacacgccttgctggcattgatatcaaacttgatttagttgatgccatggtaaaaggggcggattcaaatgtcagtgatgcagattctgaacaagtagagcgttcagcgtgcccaacgtgtggttcatgttcaggtatgtttaccgcaaattcaatgaactgtttattagaagctatcggtttagctctgcctggtaatggtacgacgcttgccacccataaagatcgtaaacaactttatgttgaagcgggtgcgcgcatagttgatttatgccgcgaatattatcaaaaagataacccagcagtattaccgcgcgccattgctaatcgcaccgcatttatgaatgcaatggtggttgatatcgcaatgggcggctcatcaaataccgtgctgcatttattggccgcagcgcaagaggcgggtgttgattttgatatgtctcatatcgacgcactttctcgtaaaacaccttttttatgtaaagttgccccagcgacccctgattaccacattgaagatgtacaccgcgctggtggcatgatggcgattattcgtgaacttggcaaagcgggtttggttgatttatcggtggatcatgttgccggtatgaccatggccgaattagttaaaaaatgggacgcaacggatcctgcaaatgaagccgcgcaaaaattctttcgcgctggccctgccggtatccgtaccactaaagccatgagtcaagagtgccgttggccagaaggagataatgatcgcgaaaacggatgtattcgcagtgttgaacatgcctttagacaagatggtggccttgcggtgttatacggtaacttagcgcaagatggctgtattgttaaaagtgcgggagtggtggatgacatgctgcattttgaaggtcgcgctgtggtctatgaatcacaagatgactctgttgaaggcattttaaacgatgaagtaaaagctggtgatgtggtggtcattcgttacgaagggccaaaaggcggcccaggcatgcaagaaatgctgtatccaacgagctatttgaaatcaaaaggtttggcagaaaaatgtgcgttgatcactgatggccgtttttcggggggaacatcagggttatcgattggccatgtttcaccagaagcagcaagcggtggcgccatcgcctatgtagaaaatggcgataaaatcattatcgatattgcaactcgccaaatcaaactcgatttaacagctgaagagcttgaagcgcgtaaacaaaagcagcttgctcgtggtaaagaggcctataaacctgttgatcgtgtacgttatgtatcgtcagctttaaaagcgtatgccttattggcaaccagtgcagataaaggtgcggtacgtgatttagctaaattagaggagctgagctga

SEQ ID NO: 10437 - protein, 618 aa, Pseudoalteromonas tunicata D2
MAKLRSAETTEGRKRAGARALWRATGMTDQDFGKPIIAVVNSFTQFVPGHVHLNQLSELMAQTITQAGGVPKEFNTIAIDDGIAMGHGGMLYSLPSRDLIADSVEYMVNGHCADAMICISNCDKITPGMMLAALRLNIPVIFVSGGPMEAGKTRLAGIDIKLDLVDAMVKGADSNVSDADSEQVERSACPTCGSCSGMFTANSMNCLLEAIGLALPGNGTTLATHKDRKQLYVEAGARIVDLCREYYQKDNPAVLPRAIANRTAFMNAMVVDIAMGGSSNTVLHLLAAAQEAGVDFDMSHIDALSRKTPFLCKVAPATPDYHIEDVHRAGGMMAIIRELGKAGLVDLSVDHVAGMTMAELVKKWDATDPANEAAQKFFRAGPAGIRTTKAMSQECRWPEGDNDRENGCIRSVEHAFRQDGGLAVLYGNLAQDGCIVKSAGVVDDMLHFEGRAVVYESQDDSVEGILNDEVKAGDVVVIRYEGPKGGPGMQEMLYPTSYLKSKGLAEKCALITDGRFSGGTSGLSIGHVSPEAASGGAIAYVENGDKIIIDIATRQIKLDLTAEELEARKQKQLARGKEAYKPVDRVRYVSSALKAYALLATSADKGAVRDLAKLEELS

SEQ ID NO: 10438 - DNA, 1842 bp, Photobacterium sp. SKA34
  CDS (1)..(1842): transl_table=11
atgcctaaataccgttcagcaaccactacccatggccgaaatatggctggcgctcgtgccttatggcgcgcaactggcgttaaagatgaagatttcggtaagccgattattgccgttgtgaactcgtttacccaatttgttcccggtcacgtacacttaaaagacctcggtcaattagtcgctaagcaaatcgaagaagcgggcggtattgccaaagagtttaatactattgccgttgatgatggtatcgcgatgggtcacggtgggatgttgtattcactaccgtcacgtgagctcatttcagattctgttgagtacatggtgaacgcccactgtgccgatgcgatggtatgtatctcaaactgcgacaaaatcacccctggaatgttgatggcatcacttcgcctaaatattccggttatttttgtttctggcggaccaatggaagcgggtaaaaccaagctttcagagcaagtgatcaaactcgatttagtcgatgcgatgatccaaggtgccgatcctaaagtgtcagatgagcaaagcgagcagatcgaacgttcagcgtgccctacctgtggttcgtgctctggtatgttcacagcaaactcaatgaactgtttaaccgaagcattaggtttaagtcagccaggtaatggttcaatgctagcgacgcacgcagatcgcgagcaactatttattaatgcgggtaaacgcattgtggcattgacgaaacgctactatgagcaagatgatgaatctgcactgcctcgtaacattgccaataaaaaagcctttgaaaatgcgatggcattagatattgcgatggggggatcaaccaataccgttttacaccttttagccgcagcgcaagaaggtgaaattgatttcaccatgaccgatattgatcgcatgtctcgtattgttcctcacctatgtaaagttgcgccgtcaacaccgaaatatcatatggaagatgttcaccgagcgggtggcgtttacagtattttaggtgaactggatcgtgcaggccttttccacaacgattgccacaatattttaggtgaaacctttgctgaaagtttccgccactacgacatcaccttaacagactcagaagacatcaaaacgttcttccgcgcaggtcctgcaggtattcgtaccacgcaagcattttcacaaaattgtcgttgggacacccttgatgatgatcgagaaaatggttgtattcgtaagaaagagtttgcctttagtcaagatggtggtctagctgtactgtctggcaatatggcactcgatggttgtattgttaaaaccgcaggtgttgatgaaagttgcttaacctttacaggaccggctgtcgtgtttgaaagccaagataccgcagttgaagcaattcttgctggcaaagtaaaagcgggcgatgtcgtggttattcgttatgaaggaccaaaaggtggccctgggatgcaagaaatgttgtatccaaccacttaccttaaatctatgggcctcggtaaagaatgtgcgttgatcactgacggtcgattctctggcggtactagtggcctatctattggtcatgtttcgcctgaagcggcaaacggtggcacgattggtcttatcgaaaatggcgatattatcgcgattgatattccaaaccgtagtattgaactgaatgttgatgagacaacacttgctgcacgtcgtgaagcaacgaaccaacgcggttggaagccagttgatcgtgaacgtcaggtttcttttgccctaaaagcctatgccaatctagcgaccagtgcagataaaggcgcagtacgcgataagtcaaaactagaaggataa

SEQ ID NO: 10439 - protein, 613 aa, Photobacterium sp. SKA34
MPKYRSATTTHGRNMAGARALWRATGVKDEDFGKPIIAVVNSFTQFVPGHVHLKDLGQLVAKQIEEAGGIAKEFNTIAVDDGIAMGHGGMLYSLPSRELISDSVEYMVNAHCADAMVCISNCDKITPGMLMASLRLNIPVIFVSGGPMEAGKTKLSEQVIKLDLVDAMIQGADPKVSDEQSEQIERSACPTCGSCSGMFTANSMNCLTEALGLSQPGNGSMLATHADREQLFINAGKRIVALTKRYYEQDDESALPRNIANKKAFENAMALDIAMGGSTNTVLHLLAAAQEGEIDFTMTDIDRMSRIVPHLCKVAPSTPKYHMEDVHRAGGVYSILGELDRAGLFHNDCHNILGETFAESFRHYDITLTDSEDIKTFFRAGPAGIRTTQAFSQNCRWDTLDDDRENGCIRKKEFAFSQDGGLAVLSGNMALDGCIVKTAGVDESCLTFTGPAVVFESQDTAVEAILAGKVKAGDVVVIRYEGPKGGPGMQEMLYPTTYLKSMGLGKECALITDGRFSGGTSGLSIGHVSPEAANGGTIGLIENGDIIAIDIPNRSIELNVDETTLAARREATNQRGWKPVDRERQVSFALKAYANLATSADKGAVRDKSKLEG

SEQ ID NO: 10440 - DNA, 1842 bp, Oceanospirillum sp. MED92
  CDS (1)..(1842): transl_table=11
atgccgcaatatcgctctaaaacatcgactgcgggtcgtaatatggcgggtgcacgtgcgctttggcgtgcaacgggaatgaaagatgaagatttccacaagccaattatcgctgtagctaactcttttacgcagtttgttccaggtcacgttcacctgaaagatatggggcagctggtcgcgcgtgagattgaaaaagcaggtggtgtagcaaaagaattcaatacgatcgcggtagatgatggtatcgcaatgggccatgatggcatgctttactcactgccctctcgtgacatcattgccgactccgttgaatacatggttaatgcacactgtgcagatgccattgtatgtatctcgaactgtgacaagattacaccgggcatgctgatggcgtccatgcgactgaacatccctgtaatctttgttacaggcgggccaatggaagcgggtaaaaccaagctggctgagcacaagctggatctggttgacgcgatggtactggcagcagacccaactgcttctgatgaagaagttgatgcggttgagcgctctgcttgcccgacttgtggttcttgttcggggatgttcacagccaactcgatgaactgcttggcagaagcgttgggcctggctctacctggaaatggtactgtcgttgcgactcacgctgaccgtgaaaacttgttcctggaagcgggtcgtaccattgttgatttggcgaaacgttattacgagcaggatgatgaatctgttctgcctcgttccgtaggtttcaaagcgttcgaaaactgcataacgcttgatatcgcaatgggtggttctaccaacactatcctgcacttgttggctattgctcaggaagcagaaattgacttcacaatggatgatattgatcgcctatcccgtgtagtaccgcagttatgtaaagttgcacctaatacacctgaatatcatattgaagatgtacaccgcgcaggtggcatcatgggcatccttggtgagttggatcgcgccggtaaactgcatactgatgttccaaccgtacatgcgccgacaatgaaggaagcattggataagtgggatatcatgcgtaacccttcgcctgaggtgctagagttttatcgcgcaggtcctgcaggtattccaactcagaccgcgtttagccaatctacgcgttggccaacgctggacggtgaccgtgaaaacggctgtatccgttcattagagaatgcgttctctttagaaggtggtttggctgtattgaaaggtaacattgcgctagatggttgcgtggttaagtctgctggcgtagatgaatctattcttgtcttcgaaggccctgcacatatcacagagtcacaagatgaagcggttcaaaatattctggatgacaaagtggtagcgggcgaagttgttatcgttcgttacgaaggccctaaaggtggtccgggtatgcaagagatgttgtacccaacctcttacattaagtctaaaggactgggtaaagcttgtgccttgctgactgatggtcgtttctctggtggtacttctggtctttcaattggccacgtttcccctgaagcagcggcgggcggtgcaatcggtctggtacgtaatggcgatattattcgtatcgatattcctaaccgtacaatcgatgttctgctatccgatgaggaacttgctgaacgccgtgcagagcaggataagttgggctggaaaccagtggaagagcgtccacgtaaagtatctgcagctctgaaagcatttggcatgttggcaacctctgcggataaaggtgcagtacgtgacctatccaaactggaagaattattctaa

SEQ ID NO: 10441 - protein, 613 aa, Oceanospirillum sp. MED92
MPQYRSKTSTAGRNMAGARALWRATGMKDEDFHKPIIAVANSFTQFVPGHVHLKDMGQLVAREIEKAGGVAKEFNTIAVDDGIAMGHDGMLYSLPSRDIIADSVEYMVNAHCADAIVCISNCDKITPGMLMASMRLNIPVIFVTGGPMEAGKTKLAEHKLDLVDAMVLAADPTASDEEVDAVERSACPTCGSCSGMFTANSMNCLAEALGLALPGNGTVVATHADRENLFLEAGRTIVDLAKRYYEQDDESVLPRSVGFKAFENCITLDIAMGGSTNTILHLLAIAQEAEIDFTMDDIDRLSRVVPQLCKVAPNTPEYHIEDVHRAGGIMGILGELDRAGKLHTDVPTVHAPTMKEALDKWDIMRNPSPEVLEFYRAGPAGIPTQTAFSQSTRWPTLDGDRENGCIRSLENAFSLEGGLAVLKGNIALDGCVVKSAGVDESILVFEGPAHITESQDEAVQNILDDKVVAGEVVIVRYEGPKGGPGMQEMLYPTSYIKSKGLGKACALLTDGRFSGGTSGLSIGHVSPEAAAGGAIGLVRNGDIIRIDIPNRTIDVLLSDEELAERRAEQDKLGWKPVEERPRKVSAALKAFGMLATSADKGAVRDLSKLEELF

SEQ ID NO: 10442 - DNA, 1854 bp, Xanthobacter autotrophicus Py2
  CDS (1)..(1854): transl_table=11
atgccccagtaccgctcccgcacctccactcacggtcgcaacatggccggcgcccgcggcctgtggcgcgccaccggcatgaaggacggggatttcggcaagcccatcatcgccgtggtgaactccttcacccagttcgtgcccggccacgtgcacctgaaggatctcggccagttggtggcccgcgagatcgagaaggccggcggcgtcgccaaggaattcaacaccatcgcggtggatgacggcatcgccatgggccatgacggcatgctctattccctgccgtcccgcgagatcatcgccgacagcgtggagtacatggtcaacgcgcactgcgccgacgccatggtgtgcatctccaactgcgacaagatcacccccggcatgctgatggccgccatgcggctcaacatcccggcggtgttcgtctccggcggccccatggaggccggcaaggtgctgctctccaccggcgagaagaaggtggacctcatcgacgccatgatcgcggcggccgacgacaaggtcaccgacgccgacgtgcaggtgatggagcgctccgcctgccccacctgcggctcgtgctccggcatgttcaccgccaattccatgaactgcctcaccgaggcgctgggcctggctctgcccggcaatggctccacgctcgccacccacgccgaccgcgagcggctgttcgtggaggccggccacctcatcgtcgacctcgcccgccgttattacgagcaggacgatgccagcgtcctgccgcgctccgtggcctcgttcaaggcgttcgagaacgccatgaccctggacatctccatgggcggctccaccaacacggtgctgcacctgctcgccgccgccaacgagggcgaggtgcccttcaccatggccgacatcgaccggctgtcgcgccgggtgccggtgctgtgcaaggtggcgcccgcggtggccaacatccacatggaggacgtgcaccgcgccggcggcatcatggccatcctcggcgagctggatcgcggcggcctcatccataccgacctgcccaccgtgcacgccgctaccatggccgacgcgctggaccgctgggacgtgaagcgcaccaagagcgagagcgtcgccaccttcttccgcgccgcgccgggcggggtgcccacacaggtggcgttcagccagtcccgccgctgggacgacctcgatctcgaccgcgagaccggcgtcatccgcgacgtggcccatgcctattccaaggacggcggcctcgccgtgctgtacggcaacatcgcgctggacggctgcatcgtgaagacggcgggcgtggacgcatcgatcctgaagttcaccggcaaggcgcgcatcttcgagagccaggacgcggcggtggaagccatcctctccaccgggcgcatccaggcgggcgacgtggtgctgatccgctacgagggtccgcgcggcgggccgggcatgcaggagatgctctatcccacgtcctacctgaagtcgaagggcctcgggaaggcgtgcgcgctggtcaccgacgggcgcttctcgggcggctcctcgggcctgtccatcggccatgtctcgccggaagcggcggagggcggggccatcgggctggtggaggaaggcgacaccatcgagatcgacatcccgaaccgcatcatccgcgtggcggtgtccgacgaggtgctcagccagcgccgcgccgccatggaggcgaagggcgacgccgcgtggaagcccgcggaccgcaagcgcgtggtctcccaggcgctgcaggcctatgcagcgctcaccacctccgccgcccgcggtgcggtgcgcgacgtgagccgcctgcggcgctga

SEQ ID NO: 10443 - protein, 617 aa, Xanthobacter autotrophicus Py2
MPQYRSRTSTHGRNMAGARGLWRATGMKDGDFGKPIIAVVNSFTQFVPGHVHLKDLGQLVAREIEKAGGVAKEFNTIAVDDGIAMGHDGMLYSLPSREIIADSVEYMVNAHCADAMVCISNCDKITPGMLMAAMRLNIPAVFVSGGPMEAGKVLLSTGEKKVDLIDAMIAAADDKVTDADVQVMERSACPTCGSCSGMFTANSMNCLTEALGLALPGNGSTLATHADRERLFVEAGHLIVDLARRYYEQDDASVLPRSVASFKAFENAMTLDISMGGSTNTVLHLLAAANEGEVPFTMADIDRLSRRVPVLCKVAPAVANIHMEDVHRAGGIMAILGELDRGGLIHTDLPTVHAATMADALDRWDVKRTKSESVATFFRAAPGGVPTQVAFSQSRRWDDLDLDRETGVIRDVAHAYSKDGGLAVLYGNIALDGCIVKTAGVDASILKFTGKARIFESQDAAVEAILSTGRIQAGDVVLIRYEGPRGGPGMQEMLYPTSYLKSKGLGKACALVTDGRFSGGSSGLSIGHVSPEAAEGGAIGLVEEGDTIEIDIPNRIIRVAVSDEVLSQRRAAMEAKGDAAWKPADRKRVVSQALQAYAALTTSAARGAVRDVSRLRR

SEQ ID NO: 10444 - DNA, 1836 bp, gamma proteobacterium HTCC2207
  CDS (1)..(1836): transl_table=11
atgcctaagtacagatcacataccaccacccagggccgcaatatggccggcgctcgtgcactttggcgcgcaacaggcatgaaggacgacgattttaataagccgatgatcgccatcgccaactcctacacgcagtttgttcccggtcatgtgcaccttaaagatatgggtgaactggttgcggcagagatttctaaggccggtggtattgcccgggagttccacactattgcggtagatgatggtattgccatgggccacgacggcatgctctattcattgccctcgcgagatgtgatcgccgactcggttgaatatatggtcaatgcccactgcgccgatgcgctggtgtgtatctccaactgtgacaaaattacgccgggcatgtttatggccgctatgcgcctcaacattccggtggtgtttgtttcaggcggccccatggaagcgggcaaaaccaagctctcggatcaaaagcttgatctagttgatgccatggtgattgcggttgatgacagcgccagtgatgaagaagttgctgagtatgagcgttctgcttgcccgacctgcggctcttgctctggtatgtttaccgccaactccatgaattgtttgatggaagcattgggcctagcgctgccgggcaacggtaccgtgctggcgacccactctgatcgcaaagaattattccaagaggctggccgcactatcgttaagttggccaaggcgcattacgacaacgatgattactctgtgctgcctcgttccattgctaatttcgaagcttttgaaaatgctatgaccctggatatttgcatgggtgggtcaactaacaccatcctgcatcttatggccgcggctcaagaaggttttgtcgattttgatctgggggatatcgaccgtctgtcacgcaaggtccctcagctatgtaaagtagccccaagcacaccggagtatcatgttgaagatgtgcatcgtgccggcggtattttaggcattctggctgagctgaatcgtgctggcttaatccatgacaacttaccaactgtgcattcggcgacattaaaagaagccttggaaaagtgggatattgtcagcggccatgtcagtgaggaagtaaagactttctataaagcaggtcccgcaggtattccaacacaaaccgcctttagtcagagcactcgctggccatctctagatgcagaccgcgccaacggttgtgttcgtgatatagaccatgcctttagccttgacggtggtctggcaattctgaccggtaatctttcgcctgacggctgcgtggttaagacctctggagtcgatgagtcgattcatgtattcgaaggccccgcatttattaccgaaagccaagatgaagctgtcgaaaaaatcttgaatgacgaggtcaaagcgggcgatgttgtgattgtgcgctatgaaggcccccgcggtggacccggcatgcaagagatgctctacccaaccacttatatcaaatcgaagaatctcggtgccgcttgcgcattgattaccgacggccgtttttccggcggtacctctgggctatctattggccatgtatcaccagaagccgctgctggcggtaatataggcctggtgcgtcaaggcgatataattcgcattgatatccccaatcgctctattgatatcctggtttcggatgccgagttagcggcacgtcgagtagagcaggataagctgggttggaagcctgtagaagagcgcccacgaaaggttacggcatctttgaaggcctatgctaagctggcgacgagcgccgataagggcgcggttagagatctctctcagctctaa

SEQ ID NO: 10445 - protein, 611 aa, gamma proteobacterium HTCC2207
MPKYRSHTTTQGRNMAGARALWRATGMKDDDFNKPMIAIANSYTQFVPGHVHLKDMGELVAAEISKAGGIAREFHTIAVDDGIAMGHDGMLYSLPSRDVIADSVEYMVNAHCADALVCISNCDKITPGMFMAAMRLNIPVVFVSGGPMEAGKTKLSDQKLDLVDAMVIAVDDSASDEEVAEYERSACPTCGSCSGMFTANSMNCLMEALGLALPGNGTVLATHSDRKELFQEAGRTIVKLAKAHYDNDDYSVLPRSIANFEAFENAMTLDICMGGSTNTILHLMAAAQEGFVDFDLGDIDRLSRKVPQLCKVAPSTPEYHVEDVHRAGGILGILAELNRAGLIHDNLPTVHSATLKEALEKWDIVSGHVSEEVKTFYKAGPAGIPTQTAFSQSTRWPSLDADRANGCVRDIDHAFSLDGGLAILTGNLSPDGCVVKTSGVDESIHVFEGPAFITESQDEAVEKILNDEVKAGDVVIVRYEGPRGGPGMQEMLYPTTYIKSKNLGAACALITDGRFSGGTSGLSIGHVSPEAAAGGNIGLVRQGDIIRIDIPNRSIDILVSDAELAARRVEQDKLGWKPVEERPRKVTASLKAYAKLATSADKGAVRDLSQL

SEQ ID NO: 10446 - DNA, 1662 bp, delta proteobacterium MLMS-1
  CDS (1)..(1662): transl_table=11
atgcgaagtgacgccctgcgtaaaggactggaacgaactccccaccgggccctgctcaaatccatgggttataccgacgaggagatctcccggccgttgatcggtatcgcccacgcccacaacgagattattcccggccatatccatctcgataaaatcgtggcggcggtcaaggatggtatccggatggccggcggtaccccgattgcctttgccaccatcggggtctgcgacggcctggcgatgaaccatgccggcatgaaatactccctggccagccgcgaggtgatcgccgattcggtggagatcatgggtatggcccatccctttgatgctctggtcatggtgcccaattgcgacaaggtcacccccggtatgctgatggccatgctgcggctcaatattccggccctgatggtcagcggcgggccgatgctcaccggccgtcatcggggcaaggatgtccacttggtcagcgtttttgaaggggtcggccgggtgcgctccggcaccatggagttggcggagctgcacgagttggaagaccaggcctgtcccggctgcggttcctgtgccggcatgttcaccgccaattccatgaactgcctggccgaggccatcggcctggccctgcccggcaacggtaccatcccggcggtggccgccgctcgcatccgcctggccaagcacgccgggatggcggtgatgcatctgctcgctgaaaatatccgcccccgggatattgccggcaaggcggcctttgccaacgccatggcggtggatatggccctgggctgctccaccaacaccgtgttgcacgtgccggccatcgcccgcgaggcgggagtcgagctgccgctgaccatgtttaacgaggtcagcgcccgggcgccccatctctgcagcttgatccccggcggcccccacagtctgcagcagcttgacgaagccggcggggtgtcggcggtgctgcacgagttgagtaaaatagaggccgggctcgatctggaggtgctcaccgccaccggcaaaaccctgcgggaaaacctggaaggggtcaagacccgggatgccgaagtgatcaggccggccggcaacccgtaccatcaagtgggggggattgcggtgctctatggtaatctggccccggatggggcggtggtcaagcaatcggcggtggccgacgagatgttgcgccaccgggggccggcccgggtctttgatggtgaggccgaggcccaggcggcgatcctggatggcaggatcaaccccggcgatgtggtggtgatccgctactgcggccccaaaggcggccccggtatgccggagatgctctcgcccacctccgccatcatcggcatggggctgggcaagagcgtggccctgatcaccgacggccgtttttccggcggcacccagggggcctgcatcggccatgtctcgccggaagccgccgagggcggccccatcgccctggtggccgagggtgatgagatcagtattgatatcggcaagcaccgcctggagttggaggtgagcgacgccgaattggaaaaacgtcgacaagcctggcagccgccaccccccaggatcaccaccggctacgccgcccgttacgcccgcatggtaacctccggcagcaccggggcgatcctggagtaa

SEQ ID NO: 10447 - protein, 553 aa, delta proteobacterium MLMS-1
MRSDALRKGLERTPHRALLKSMGYTDEEISRPLIGIAHAHNEIIPGHIHLDKIVAAVKDGIRMAGGTPIAFATIGVCDGLAMNHAGMKYSLASREVIADSVEIMGMAHPFDALVMVPNCDKVTPGMLMAMLRLNIPALMVSGGPMLTGRHRGKDVHLVSVFEGVGRVRSGTMELAELHELEDQACPGCGSCAGMFTANSMNCLAEAIGLALPGNGTIPAVAAARIRLAKHAGMAVMHLLAENIRPRDIAGKAAFANAMAVDMALGCSTNTVLHVPAIAREAGVELPLTMFNEVSARAPHLCSLIPGGPHSLQQLDEAGGVSAVLHELSKIEAGLDLEVLTATGKTLRENLEGVKTRDAEVIRPAGNPYHQVGGIAVLYGNLAPDGAVVKQSAVADEMLRHRGPARVFDGEAEAQAAILDGRINPGDVVVIRYCGPKGGPGMPEMLSPTSAIIGMGLGKSVALITDGRFSGGTQGACIGHVSPEAAEGGPIALVAEGDEISIDIGKHRLELEVSDAELEKRRQAWQPPPPRITTGYAARYARMVTSGSTGAILE

SEQ ID NO: 10448 - DNA, 1839 bp, Oceanobacter sp. RED65
  CDS (1)..(1839): transl_table=11
atgccacaataccgtagtaaaacctccaccgcaggccgtaacatggctggtgctcgcgcactatggcgtgccactggcatgaaggacgatgactttcaaaagccaatcatcgccgttgccaatagcttcacgcaatttgtgccgggtcacgtacaccttaaagatctaggtcaattggtttgtcgcgaaattgaagctgctggtggtgtggcaaaagaattcaataccattgcagtcgatgacggcattgcaatgggtcacgatggtatgctttacagtctacctagccgtgaaattatcgcagattctgtagaatacatggctaatgcgcactgtgctgatgctttagtctgtatttcaaactgcgacaagatcacaccgggaatgctcatggcggcgttgcgtttaaatattcctgtggtgtttgtatctggtggtccgatggaagccggtaaaacaaaactgtctgagcataaattagacttggttgatgccatggtcatcgctgccgacgatagcgccagtgacgaaaaagtcgcagaatacgagcgcagtgcttgcccaacatgcggttcttgctccggcatgttcactgccaacagcatgaactgtttaactgaggcccttggtttatccttgcccggtaatggctcaacattggcaacacactcagaccgcgagcgcttgttcctagaagccggtcggttaatcgtgaaaaacgcgaagcgttattatgagcaggacgatgaatccgtattgcctcgtaacatcgcaagctttaaagcatttgaaaatgctatggcactggatattgccatgggcggctccaccaatactatcttgcatttattagccgcagcacaagaagcggaactcgatttcgatatgaaagaaatagatcgtctttcacgatcagtacctcaattatgtaaagttgcgccgaattcgcccctataccatatggaagatgttcaccgtgccggtggtgtcatgggtattcttggcgaattggatcgcgctggcgtgctgcattcagatattccgactatccatagcgcaacggtaaaagaaggtctagataaatgggatatcatgcgcaaccctagtgaagaagtggtgaatttcttcaaagcaggtcccgctggtattccaactcaaaccgcatttagccaaagcacgcgctggccaaccttagatggtgatcgcgagaacggctgtatccgtagcatcgagaatgcatattcccttgaaggcggccttgctgttttatacggcaacattgctcaagacggctgtgtggtcaaaacagctggtgtagatgactctattttggtctttaccggcaaagcaaaaatatttgaatctcaagacgatgcagtaaaaggtattttggctgacgaagtgaaagccggtgacgtagtaattattcgctacgaaggtccaaaaggtggtcctggtatgcaagaaatgctttacccaacgtcatatctgaaatccaaaggattaggaaaagactgcgcgctattaactgacggccgtttttctggcggtacttccggtctatccattggtcactgctcaccagaagcagcggcaggtggggccattggtctattgcgtgatggagatgaaattcttatcaacattcctgaacgcagcatcaacgtaaatctgagtgacgaggaactatctcaccgtcgccatgaacaggacaaactaggttggaagcctgtcgaagagcgtccacgtaaggtcactacggcattgaaagcttatgctaaatttgccaccagtgccgataaaggtgcggtcagagacaaagctatgctcgacgactga

SEQ ID NO: 10449 - protein, 612 aa, Oceanobacter sp. RED65
MPQYRSKTSTAGRNMAGARALWRATGMKDDDFQKPIIAVANSFTQFVPGHVHLKDLGQLVCREIEAAGGVAKEFNTIAVDDGIAMGHDGMLYSLPSREIIADSVEYMANAHCADALVCISNCDKITPGMLMAALRLNIPVVFVSGGPMEAGKTKLSEHKLDLVDAMVIAADDSASDEKVAEYERSACPTCGSCSGMFTANSMNCLTEALGLSLPGNGSTLATHSDRERLFLEAGRLIVKNAKRYYEQDDESVLPRNIASFKAFENAMALDIAMGGSTNTILHLLAAAQEAELDFDMKEIDRLSRSVPQLCKVAPNSPLYHMEDVHRAGGVMGILGELDRAGVLHSDIPTIHSATVKEGLDKWDIMRNPSEEVVNFFKAGPAGIPTQTAFSQSTRWPTLDGDRENGCIRSIENAYSLEGGLAVLYGNIAQDGCVVKTAGVDDSILVFTGKAKIFESQDDAVKGILADEVKAGDVVIIRYEGPKGGPGMQEMLYPTSYLKSKGLGKDCALLTDGRFSGGTSGLSIGHCSPEAAAGGAIGLLRDGDEILINIPERSINVNLSDEELSHRRHEQDKLGWKPVEERPRKVTTALKAYAKFATSADKGAVRDKAMLDD

SEQ ID NO: 10450 - DNA, 1692 bp, Desulfitobacterium hafniense DCB-2
  CDS (1)..(1692): transl_table=11
atgaacagtaatactataaaaacaggaattgatcgggcaccccaccgctcccttttaaaagctttggggctgacggatcgtgaactcagcaaaccatttatcggggtcgtcaattcctttactgagctggtgcccggtcatatgcacctacggcaagtcacagaagcggtgaaagcagggatccgggaaaacgggggaaccccttttgagttttctaccatagcggtctgtgacggcattgccatgggccatgaggggatgcattattctctggccagccgtgaaattgtggccgatgccattgaggtcatggcgaagggacatcaattggatgctttggtcttaatccccagctgtgacaaagtagtccccgggatgctgatggcggccatgcgcttaaatatcccggccattgtggtcagcggcggccccatgctgcctggccggttcgaaggcaatcctgtaaccctgagtacagtttttgaaggggtggggcaggtccacgccggcaaaaaggacgaagcctggcttcatgaactggaagctaaagcctgtccgacctgcggttcttgtgccgggatgtttaccgccaattccatgaactgtctgaccgaggctctcggcatggctttaccgggcaatggtaccattcccgcagtctattccgagcgtttagtacttgctaaagaaaccggctatcaggtcatggagctttatcgtcaagaccttaaacccagagatattgtcacccaaagcacactgaaaaatggcgtggccgtggatatggccttaggctgttccaccaatactatccttcacttacctgccatcgccaacgaaggggatatcgactgggatctgggcaaggttaatgaagtcagtgaaaaaaccccccaaatctgtaaactcgccccggcttctgaaactcctttggctgcactccatgaagcaggcggggtcagtgcggttctcaaacagcttttggatgccggattgattgacggatcgaccatgaccgtgtccggcgtgactatggctgaacgcttaaaggatgccaaagttgtggacacagaaattatccgcccccaatccaaccccttctcccaaagagggggattgcgcatcctcttcggcaacctggctccggaaggagcggtcattaaacaaggtgctttaagcagccaggactttgtctttgaaggatcagccaaggtcttcaatggagaggttcccgctgccgaggctatccgcaacctggagatcaaagccggcgacgtagtggtcattcgctatgaagggccaaaaggcgggccgggtatgcgggagatgctgggaccgacagcgaccttagcaggtatgggcctggattccgatgtggctttgcttacagacggacgattctcaggcgccagccgcggtctatccatcggtcatgtctcaccggaagccgccttgggaggggacatcgctctcttaaaggatggggataaaattcgcattgatattggtaaaggccgtcttgagtggatcgtatctgaagaagaaagagaacagcgccgacaagaatttgcagccatggcagttaagcccgatcatctcaagcctgaactacgccaaggctacctgggacggtacgcctatttcgtacaatctgcttctaaaggagcggccttacgacgagtaaaggagtga

SEQ ID NO: 10451 - protein, 563 aa, Desulfitobacterium hafniense DCB-2
MNSNTIKTGIDRAPHRSLLKALGLTDRELSKPFIGVVNSFTELVPGHMHLRQVTEAVKAGIRENGGTPFEFSTIAVCDGIAMGHEGMHYSLASREIVADAIEVMAKGHQLDALVLIPSCDKVVPGMLMAAMRLNIPAIVVSGGPMLPGRFEGNPVTLSTVFEGVGQVHAGKKDEAWLHELEAKACPTCGSCAGMFTANSMNCLTEALGMALPGNGTIPAVYSERLVLAKETGYQVMELYRQDLKPRDIVTQSTLKNGVAVDMALGCSTNTILHLPAIANEGDIDWDLGKVNEVSEKTPQICKLAPASETPLAALHEAGGVSAVLKQLLDAGLIDGSTMTVSGVTMAERLKDAKVVDTEIIRPQSNPFSQRGGLRILFGNLAPEGAVIKQGALSSQDFVFEGSAKVFNGEVPAAEAIRNLEIKAGDVVVIRYEGPKGGPGMREMLGPTATLAGMGLDSDVALLTDGRFSGASRGLSIGHVSPEAALGGDIALLKDGDKIRIDIGKGRLEWIVSEEEREQRRQEFAAMAVKPDHLKPELRQGYLGRYAYFVQSASKGAALRRVKE

SEQ ID NO: 10452 - DNA, 1842 bp, Vibrio sp. Ex25
  CDS (1)..(1842): transl_table=11
atgccaaaatatagatcagcaaccacaacacatggtcgtaacatggcgggtgcacgagcactatggcgtgcaacgggtgtgaaagaagaagacttcggtaaaccaatcattgccgtcgtaaactcgtttactcaatttgttccgggtcacgtacacctaaaagacatgggtcagcttgtcgcacgtgaaatcgaaaaagccggcggcatcgcaaaagaattcaacaccatcgcggttgatgatggtattgcaatgggtcacggcggcatgctgtactcactgccttcacgcgaactaatcgcagactcagtagaatacatggtcaacgcgcactgtgccgatgccatggtatgtatctctaactgtgacaaaatcactccgggaatgttgatggcatcgatgcgtcttaacatccctgttatctttgtttctggtggcccaatggaagcgggtaaaaccaagctttctgatcagatcatcaaactagaccttgttgatgcaatgatccaaggcgcggatccaaaagtatctgatgagcaaagcgagcagatcgaacgcagcgcatgtccaacctgtggatcgtgttcaggcatgttcacggcaaactcgatgaactgtctaacggaagcgctgggtctttctcagccgggcaacggttctatgctggcgacgcacgcagaccgtgaacaactgtttcttaatgcaggtcgtcgcatcgttgaactgactcgtcgttactacgagcaagatgacgaatccgcgttgccacgcaacatcgcaacttatgatgccttcgaaaatgcaatggcactggatatcgccatgggcggctcgaccaacaccattttgcacctattggctgcagcgcaagaaggtgaagtggatttcgatatggaagatatcgatcgcctgtctcgccaagtaccgcacctatgtaaagttgcaccatctactcagaaatatcatatggaagacgtacaccgcgctggtggcgtaatggcgattcttggtgaattggatcgtgctggtctactgcacaatgatgctcgcaccgtactgggtctttcaatgaaagagcagttggcaaaatacgacatcatccaaactgaagacgaagaggtacttaagttctaccgcgcaggccctgcgggtattcgtaccacccaagcgttctcgcaagattgtcgttgggatcgccttgatgacgaccgtgcagaaggttgtattcgcgcgaaagacaacgccttcagccaagaaggtggcctagccgttctatcaggcaacatcgcattggatggctgtatcgttaagacagccggtgttgatgaaagcattcttaagttcactggtccggctgtggtatttgaaagccaagaagatgcggtggaaggcatcttaggaggtaaagtgaaagccggtgatgtggttgttatccgttatgaaggtccaaaaggtggcccaggcatgcaagaaatgctttacccaaccacttacctaaaatcgatgggccttggtaaagaatgtgcactgctgactgacggtcgtttctctggtggtacatcaggactctctatcggccatgcttctcctgaagccgctaacggcggtgctattggactggtgaaaccgggcgatatgatcgcgattgatattccgaaccgttcaatttcactcgaagtgtctgaacaagaacttgcagagcgccgtgcaaaacaagatgaacttggctggaaacctgttgatcgtcaaagagaagtttcctttgcacttaaagcgtacgcgagcatggccaccagtgctgacaagggtgcagtacgagacaagtcgaagctagagggctag

SEQ ID NO: 10453 - protein, 613 aa, Vibrio sp. Ex25
MPKYRSATTTHGRNMAGARALWRATGVKEEDFGKPIIAVVNSFTQFVPGHVHLKDMGQLVAREIEKAGGIAKEFNTIAVDDGIAMGHGGMLYSLPSRELIADSVEYMVNAHCADAMVCISNCDKITPGMLMASMRLNIPVIFVSGGPMEAGKTKLSDQIIKLDLVDAMIQGADPKVSDEQSEQIERSACPTCGSCSGMFTANSMNCLTEALGLSQPGNGSMLATHADREQLFLNAGRRIVELTRRYYEQDDESALPRNIATYDAFENAMALDIAMGGSTNTILHLLAAAQEGEVDFDMEDIDRLSRQVPHLCKVAPSTQKYHMEDVHRAGGVMAILGELDRAGLLHNDARTVLGLSMKEQLAKYDIIQTEDEEVLKFYRAGPAGIRTTQAFSQDCRWDRLDDDRAEGCIRAKDNAFSQEGGLAVLSGNIALDGCIVKTAGVDESILKFTGPAVVFESQEDAVEGILGGKVKAGDVVVIRYEGPKGGPGMQEMLYPTTYLKSMGLGKECALLTDGRFSGGTSGLSIGHASPEAANGGAIGLVKPGDMIAIDIPNRSISLEVSEQELAERRAKQDELGWKPVDRQREVSFALKAYASMATSADKGAVRDKSKLEG

SEQ ID NO: 10454 - DNA, 1857 bp, Alteromonadales bacterium TW-7
  CDS (1)..(1857): transl_table=11
atggctaaattaagaagtgcaacaacaactgaaggacgtaaacgcgcaggcgcacgtgcattatggcgcgcaacaggcatgaccgacaccgactttggtaaaccaattattgctgtagttaactcgtttacgcaatttgtgccagggcacgtacaccttaatcagctaagtgagctaatggctgaaacaatcacgcaagcgggtggtgtaccaaaagaatttaatactattgcaattgatgacggtatcgcaatgggccacgggggtatgctttactcactgccttcgcgcgatctcattgccgactctgttgagtacatggttaacggccactgcgccgatgcgatgatctgtatttctaactgtgacaaaatcaccccagggatgatgcttgcagcgctacgcttaaatataccggttatttttgtatcgggtggaccaatggaagcgggtaaaacgaaacttgctaacattgatatcaaattagatttagtcgatgccatggttaaaggcgctgatgagtcggtaagtgatgctgattcagagcaagtagagcgctctgcatgtcctacctgcgggtcgtgttcaggtatgtttaccgcaaactcaatgaactgtttattagaagctattggccttgcactaccgggtaacggtacaacgcttgcaacccataaagatcgtaagcaactgtatgtagaagcgggtgctcgcattgttgatttatgccgcgagtactaccaaaaagataaccaagacgtattgccacgcgctattgctaacaaaacagcctttatgaactctatggttgttgatattgccatgggcggttcatctaacaccgtactgcatttactagcagccgcacaagaagctggcgtagattttgacatgtcgcacattgacgagctatctcgtaaaaccccatttttatgtaaagtagctccagcaacagcacagtaccatattgaagatgttcaccgcgctggtggcatgatggcaattgtgcgtgagctaggcaaagccggtttagttgatttatcggtaaaccacgttgcaggtatgactatgggtgagcttgttaaaaaatgggatgcgacagatcctaaaaacgaagcggcacaaaagttttaccgcgcgggaccagctggcattcgtactacaaaagcaatgagccaagagtgtcgttgggatgaaggcgataacgaccgcgaacatggttgtattcgaagtgttgaacacgcatttagacaagatggcggcttagctgtactttcaggaaacttagcggttgatggctgtattgttaaaagcgcaggcgtagttgacgaaatgctgcattttgaaggcactgcagtggtatacgaatcacaagatgattcagtagaaggcattttaaacgacgaagtaaaagccggtgatgttgtggttattcgttacgaaggccctaaaggcggccctggtatgcaagaaatgctttacccaacgagctacttaaaatcaaaaggtttagctgaaaagtgtgcgctgatcacagatggacgcttttcgggcggcacgtctggtttatctattggccacgtatcgccagaggcggcaagcggtggtgctattgcgtacgttgaaaatggcgacaaaattattattgatattgcaacgcgtgagatcacgcttgcactaagtgaggaagagcttgaagcgcgtaagcaaaagcaattagcgcgtggtaaacaggcgtataagccccttgaccgtgagcgttatgtttcgtcggcattaaaagcctatgcactacttgcaacgagtgcagataagggcgcagtgcgtgacttagagaaactggaggagctgagctaa

SEQ ID NO: 10455 - protein, 618 aa, Alteromonadales bacterium TW-7
MAKLRSATTTEGRKRAGARALWRATGMTDTDFGKPIIAVVNSFTQFVPGHVHLNQLSELMAETITQAGGVPKEFNTIAIDDGIAMGHGGMLYSLPSRDLIADSVEYMVNGHCADAMICISNCDKITPGMMLAALRLNIPVIFVSGGPMEAGKTKLANIDIKLDLVDAMVKGADESVSDADSEQVERSACPTCGSCSGMFTANSMNCLLEAIGLALPGNGTTLATHKDRKQLYVEAGARIVDLCREYYQKDNQDVLPRAIANKTAFMNSMVVDIAMGGSSNTVLHLLAAAQEAGVDFDMSHIDELSRKTPFLCKVAPATAQYHIEDVHRAGGMMAIVRELGKAGLVDLSVNHVAGMTMGELVKKWDATDPKNEAAQKFYRAGPAGIRTTKAMSQECRWDEGDNDREHGCIRSVEHAFRQDGGLAVLSGNLAVDGCIVKSAGVVDEMLHFEGTAVVYESQDDSVEGILNDEVKAGDVVVIRYEGPKGGPGMQEMLYPTSYLKSKGLAEKCALITDGRFSGGTSGLSIGHVSPEAASGGAIAYVENGDKIIIDIATREITLALSEEELEARKQKQLARGKQAYKPLDRERYVSSALKAYALLATSADKGAVRDLEKLEELS

SEQ ID NO: 10456 - DNA, 1845 bp, marine gamma proteobacterium HTCC2143
  CDS (1)..(1845): transl_table=11
atgccacaatatcgatccaaaacgtccacggctgggcgcaatatggctggagcgcgagcactatggcgggcaacggggatgaaagacgatgactttcaaaaaccgatcatcgctatttccaattcctttactcaattcgtgcccgggcatgtccatctaaaagatctgggacagttggtggcaagagaaatcgaaagagccggaggggtggctaaagaatttaacacgatagccgttgacgatggcatcgctatgggccatgacgggatgctttatagtctgccatcccgcgatctaatagccgactcagttgaatatatggtcaatgcacactgcgctgacgcgatcgtctgtatatcgaattgcgataaaataacaccggggatgctcaatgccgctatgcggctcaatatcccagttatctttgtctccggcgggccgatggaagcggggaaaaccaagctttccgacaataaactggatcttatcgatgcaatggttattgcggccgatgacagtaagactgacgaagaagtcgctgaaatcgaacgttctgcctgcccaacctgcggctcctgctcgggcatgtttactgcaaattctatgaattgcctcaccgaagcgttaggcctttcacttcccggcaatgggtcaatgctcgcgactcatgctgatagggaaatgctattcctacaagcaggaagaaccattgtagacataacccgacgccattatgaagaagacgactactcactactacctcgctcaattgcaaattttgacgcctttgaaaatgcaatgacgcttgatatagcaatgggaggctctacgaacacaatcctgcatttgctggcagccgcacaagaaggcgaaattgattttaccctcgctgacattgaccgactttctcgcggcgttccacaattgtgtaaagttgcacccaacacaccagaatatcatatggaagacgtgcaccgcgctggcggagtcatgggtattctaggagagctggatcgagccggcttaatacatggcgaaagcccgacagtacatagtgcaacgatgacgcaggcactggcaaaatgggatataaaacaatctcaagatgaatctgttcagcagttttttaaagccggacctgcgggtattccaacgcagaccgcgttcagtcaagacactcgctgggcaactgttgacagcgatcgtaaggcgggatgtattcgatcattagagaatgcctattcactggagggcggtctcgccgttctgttcggtaatatcgcagtggacggctgcgtagtaaaaacgtccggtgtcgacgaaagtatctttgtgtttgaaggtaaggcacatatctgtgaaagtcaggaggacgccgtagcagatattcttgaggatcgagtacaagaaggcgacgttgtcattattcgctatgaaggtccgcagggtggtccaggcatgcaggagatgttatatccaaccagctatctgaaatcaaaagggcttggcaaggcctgcgcactgttaactgacgggcgcttttctggcggtacatcagggttatcgatagggcatgcgtcgcctgaagcagctgcaggaggagcaatagcgttggtacaggaaggcgatatcatcaggatagacattcccaaacgttctatcgatgtggtgctgcccgagggtgagctagaaaaaagaagagcaacaatggatgccaaaggtaacgaggcgtgggcgccagttaaggtacgtccgaggaaggtctctcctgcactgcgtgcttatgctaaaatggctacaagtgctgataagggggctgtccgggatgttagcaagctcgattga

SEQ ID NO: 10457 - protein, 614 aa, marine gamma proteobacterium HTCC2143
MPQYRSKTSTAGRNMAGARALWRATGMKDDDFQKPIIAISNSFTQFVPGHVHLKDLGQLVAREIERAGGVAKEFNTIAVDDGIAMGHDGMLYSLPSRDLIADSVEYMVNAHCADAIVCISNCDKITPGMLNAAMRLNIPVIFVSGGPMEAGKTKLSDNKLDLIDAMVIAADDSKTDEEVAEIERSACPTCGSCSGMFTANSMNCLTEALGLSLPGNGSMLATHADREMLFLQAGRTIVDITRRHYEEDDYSLLPRSIANFDAFENAMTLDIAMGGSTNTILHLLAAAQEGEIDFTLADIDRLSRGVPQLCKVAPNTPEYHMEDVHRAGGVMGILGELDRAGLIHGESPTVHSATMTQALAKWDIKQSQDESVQQFFKAGPAGIPTQTAFSQDTRWATVDSDRKAGCIRSLENAYSLEGGLAVLFGNIAVDGCVVKTSGVDESIFVFEGKAHICESQEDAVADILEDRVQEGDVVIIRYEGPQGGPGMQEMLYPTSYLKSKGLGKACALLTDGRFSGGTSGLSIGHASPEAAAGGAIALVQEGDIIRIDIPKRSIDVVLPEGELEKRRATMDAKGNEAWAPVKVRPRKVSPALRAYAKMATSADKGAVRDVSKLD

SEQ ID NO: 10458 - DNA, 1842 bp, marine gamma proteobacterium HTCC2080
  CDS (1)..(1842): transl_table=11
atgccccaataccgatccaaaacatcgaccgctggacgtaatatggcgggcgcaagagcgctgtggcgcgccactggaatgactgacggcgatttcgaaaagccaattatcgccgtggtgaattctttcacacagtttgtgcctggccatgtgcacttaaaagacatgggtcagctggtggccagagaaatcgaagccgctggtggcgttgctaaagagttcaacactatagcggtcgacgatggtatcgccatgggtcacgacggcatgctttatagcctaccctctcgagacattattgctgactctgtcgagtatatggtcaatgcgcactgtgccgatgcgatggtctgtatttccaattgcgacaaaatcactccgggaatgctcaacgctgccatgcgtttgaatattccgtgtgtttttgtttctggaggacccatggaggccggcaagacaaagctgtctgaacataaactcgatcttgtagacgccatggttatcgcggctgacgactctgcagatgatgcgacggttgaagcctatgagcggtctgcctgcccaacctgcggctcctgctctggcatgtttaccgccaactcaatgaactgccttacggaggcgttgggtctaagcttgcccggaaatggctcactattggctacccacgccgatcgagaggcgctatttaagcgcgcaggccgtgtctctgttgcgcttgcacggcgttggtacgagcaagatgatgcctctgctctccctcgaaacatagccaaccgtcaggcatttgaaaacgccatgtgtctggatattgctatgggcggctccacgaataccattttgcatctactcgctgcggcacaagaggccaacctcgatttttctatgacagatatcgacaccctaagccgacaagtaccccagctgtgcaaagttgctcccagtacaccgctgtaccacatggaagatgtccatcgtgctggaggtgtgatggccatactcggggagcttgcccggggcggcctcatcaataccaacaccttcacggtgcacaccgcctcactaggtgatgcactttcagagtgggatatcgcgcaaaccaaaagcgccgatgtgcacaaacttttttcagccgggcctgctggcataccaacacagcaagccttcagtcaagctacccgctggcctagccttgatcttgatagagcgggaggctgcatacgcgatgtcgcccacgcttactctcaggagggtggcttagccgttttatttggcaatattgctgaggacggctgcgtagttaagaccgcgggggtggatgacgacgtcttgtgtttcagcggacctgcccatatttgtgaaagtcaggaagccgctgtagccgatatcctcgaagatcgcgttgccgcaggtgccgtcgtcatcattcgttatgaggggcctcgaggcgggccgggaatgcaagaaatgctgtatcccaccagctacctaaagtcgaaaggtctaggcaaagcttgtgcactagtgaccgacggccgcttctcgggcggcacatcagggctgtcgataggacatgtgtcacccgaagccgctgccggtggcgcaattggtctggtccagtccggggatactattgcaattgacattcctaaccgacgcattgatgtcttgctcgaggcagcagtcctagacaatcggcgagtggaaatggataactcacaaaaaccctggcagccccaagccgcacgcccaaggcaggtcagcgccgccttaaaagtttacgctcgcatggtaaccagcgccgacaagggtgccgttagggatttatcgctgttggactaa

SEQ ID NO: 10459 - protein, 613 aa, marine gamma proteobacterium HTCC2080
MPQYRSKTSTAGRNMAGARALWRATGMTDGDFEKPIIAVVNSFTQFVPGHVHLKDMGQLVAREIEAAGGVAKEFNTIAVDDGIAMGHDGMLYSLPSRDIIADSVEYMVNAHCADAMVCISNCDKITPGMLNAAMRLNIPCVFVSGGPMEAGKTKLSEHKLDLVDAMVIAADDSADDATVEAYERSACPTCGSCSGMFTANSMNCLTEALGLSLPGNGSLLATHADREALFKRAGRVSVALARRWYEQDDASALPRNIANRQAFENAMCLDIAMGGSTNTILHLLAAAQEANLDFSMTDIDTLSRQVPQLCKVAPSTPLYHMEDVHRAGGVMAILGELARGGLINTNTFTVHTASLGDALSEWDIAQTKSADVHKLFSAGPAGIPTQQAFSQATRWPSLDLDRAGGCIRDVAHAYSQEGGLAVLFGNIAEDGCVVKTAGVDDDVLCFSGPAHICESQEAAVADILEDRVAAGAVVIIRYEGPRGGPGMQEMLYPTSYLKSKGLGKACALVTDGRFSGGTSGLSIGHVSPEAAAGGAIGLVQSGDTIAIDIPNRRIDVLLEAAVLDNRRVEMDNSQKPWQPQAARPRQVSAALKVYARMVTSADKGAVRDLSLLD

SEQ ID NO: 10460 - DNA, 1674 bp, Candidatus Desulfococcus oleovorans Hxd3
  CDS (1)..(1674): transl_table=11
atgaaaagcgattcaatgaaagagggactggcacgggcgccccatcgctctctgctcaagtccatcggctatacggatgaggaaatcggacggcccattatcggcatcgtcaattcggccaacgagatcgtacccggccacgcggacttgaacaaaatcgcccgggccgtcaaggacggggtttacatggccgggggcacgccggtggagttttccaccatcggcgtgtgcgacggcattgccatgaaccatatcggcatgaaatactctctgggcagccgggagctgatcgccgactccgtggagatcatggccacggcccacgcctttgacgcactggtgatgattcccaactgcgacaagatcgttccgggcatgctcatggccgcggcccggctcaacctgcccaccatcttcatcagcggcggccccatgctggcgggccggtatcccggcaagcccgaaaaaaaagtggacctgatcaccgtgttcgaagccgtgggcgccgtcaaatccggcagaatggcccctgaagaacttgccatcatcgaagacgcggcctgtcccacctgcggatcgtgttccggcatgttcacggccaactccatgaactgcctgaccgaggccatcggcatgggcctgccgggcaacggcacggtgccggcggtgatgtccgaacgggtgcgcatggccaagcaggccggcatgcggattctcgaccttcttaaaaacggcgtcaccccggacaaaatcatgacggccaaagcgttccgcaacgcactggccgtggacatggccctgggatgttccaccaacaccgtgttgcacctgccggccattgcccacgaagccggggtctccatcagcctggacctgatcaatgagatcagcggcatcgccccccacctctgctccctgagcccggcggggcccaaccatatcgaagacctgaacatggccggtggcattcaggctgttttaaaagagcttgcccggaaaagcgggctgattgatcctgactgcctgaccgtcaccggcagaaccgtcggcgaaaatatcgcgtcggccagggacgcggacggccaggtgatccgcaccctggaaaccccccaccatgcccagggcggcctggccgtccttttcggcaaccttgcgccggatggatgcgtggtcaagcagtctgcggttgtcgataagatgctggtccacgaaggccctgcccgggtgtttgattccgaggaagatgccaccaccgccatcatggacggcagaatcaagaagggagacgtgctggtcatccgctacgagggccccaagggcggtccgggcatgcgggagatgctcacccccacgtcggccctggccggcatgggactggacagcaccgtggccctgatcaccgacggccggttttccggcggcagccggggcgcggccatcggtcatgtgtcgcccgaggccatggagggcggtcccattgccgttgtaaaggaaggggacacgatcaccatcgacattcccaaaaagaagatcggtctgaaactggacgccggcgagattcagaaccggctatccggatggaaccggcccgctcccaaaattacgcggggctacatggcgcgatacgccgaccaggtgtcgtcggccaataccggcgccatctttaaaaaatag

SEQ ID NO: 10461 - protein, 557 aa, Candidatus Desulfococcus oleovorans Hxd3
MKSDSMKEGLARAPHRSLLKSIGYTDEEIGRPIIGIVNSANEIVPGHADLNKIARAVKDGVYMAGGTPVEFSTIGVCDGIAMNHIGMKYSLGSRELIADSVEIMATAHAFDALVMIPNCDKIVPGMLMAAARLNLPTIFISGGPMLAGRYPGKPEKKVDLITVFEAVGAVKSGRMAPEELAIIEDAACPTCGSCSGMFTANSMNCLTEAIGMGLPGNGTVPAVMSERVRMAKQAGMRILDLLKNGVTPDKIMTAKAFRNALAVDMALGCSTNTVLHLPAIAHEAGVSISLDLINEISGIAPHLCSLSPAGPNHIEDLNMAGGIQAVLKELARKSGLIDPDCLTVTGRTVGENIASARDADGQVIRTLETPHHAQGGLAVLFGNLAPDGCVVKQSAVVDKMLVHEGPARVFDSEEDATTAIMDGRIKKGDVLVIRYEGPKGGPGMREMLTPTSALAGMGLDSTVALITDGRFSGGSRGAAIGHVSPEAMEGGPIAVVKEGDTITIDIPKKKIGLKLDAGEIQNRLSGWNRPAPKITRGYMARYADQVSSANTGAIFKK

SEQ ID NO: 10462 - DNA, 1812 bp, Escherichia coli B
  CDS (1)..(1812): transl_table=11
atgaatccacaaatgttacgcgtaacaaatcgaatcattgaacgttcgcgcgagactcgctctgcttatctcgcccggatagaacaagcgaaaacgtcgaccgttcatcgttcgcagttggcatgcggtaacctggcacacggtttcgctgcctgccagccagaagacaaagcctctttgaaaagcatgttgcgtaacaatatcgccatcatcacctcctataacgacatgctctccgcgcaccagccttatgaacactatccagaaatcattcgtaaagccctgcatgaagcgaatgcggttggtcaggttgcgggcggtgttccggcgatgtgtgatggtgtcacccaggggcaggatggaatggaattgtcgctgctaagccgcgaagtgatagcgatgtctgcggcggtcgggctgtcccataacatgtttgatggtgctctgttcctcggggtgtgcgacaagattgtcccgggtctgacgatggcagccctgtcgtttggtcatttgcctgcggtgtttgtaccgtctggaccgatggcaagcggtttgccaaataaagaaaaagtgcgtattcgccagctttatgccgaaggtaaagtggaccgcatggccctactggagtcagaagccgcgtcttatcatgcgccgggaacatgtactttctacggtactgccaacaccaaccagatggtggtggagtttatggggatgcagttgccaggctcttcttttgttcatccggactctccgctgcgcgatgctttgaccgctgccgctgcgcgtcaggttacacgcatgaccggtaatggtaatgaatggatgccgatcggtaagatgatcgatgagaaagtggtggtgaacggtattgttgcactgctggcgaccggtggttccactaaccacaccatgcacctggtggcgatggcgcgcgcggccggtattcagattaactgggatgacttctctgacctttctgatgttgtaccgctgatggcacgtctctacccgaacggtccgtccgatattaaccacttccaggcggcaggtggcgtaccggttctggtgcgtgaactgctcaaagcaggtctgctgcatgaagatgtcaatacggtggcaggctttggtctgtctcgttatacgcttgaaccatggctgaataatggtgaactggactggcgggaaggggcggaaaaatcactcgacggcaatgtgatcgcttccttcgaacaacctttctctcatcatggtgggacaaaagtgttaagcggtaacctgggccgtgcggttatgaaaacctctgccgtgccggttgagaaccaggtgattgaagcgccagcggttgtttttgaaagccagcatgacgttatgccggcctttgaagcgggtttgctggaccgcgattgtgtcgttgttgtccgtcatcaggggccaaaagcgaacggaatgccagaattacataaactcatgccgccacttggtgtattattggaccggtgtttcaaaattgcgttagttaccgatggacgactctccggcgcttcaggtaaagtgccgtcagctatccacgtaacaccagaagcctacgatggcgggctgctggcaaaagtgcgcgacggggacatcattcgtgtgaatggacagacaggcgaactgacgctgctggtagacgaagcggaactggctgctcgcgaaccgcacattcctgacctgagcgcgtcacgcgtgggaacaggacgtgaattattcagcgccttgcgtgaaaaactgtccggtgccgaacagggcgcaacctgtatcactttttaa

SEQ ID NO: 10463 - protein, 603 aa, Escherichia coli B
MNPQMLRVTNRIIERSRETRSAYLARIEQAKTSTVHRSQLACGNLAHGFAACQPEDKASLKSMLRNNIAIITSYNDMLSAHQPYEHYPEIIRKALHEANAVGQVAGGVPAMCDGVTQGQDGMELSLLSREVIAMSAAVGLSHNMFDGALFLGVCDKIVPGLTMAALSFGHLPAVFVPSGPMASGLPNKEKVRIRQLYAEGKVDRMALLESEAASYHAPGTCTFYGTANTNQMVVEFMGMQLPGSSFVHPDSPLRDALTAAAARQVTRMTGNGNEWMPIGKMIDEKVVVNGIVALLATGGSTNHTMHLVAMARAAGIQINWDDFSDLSDVVPLMARLYPNGPSDINHFQAAGGVPVLVRELLKAGLLHEDVNTVAGFGLSRYTLEPWLNNGELDWREGAEKSLDGNVIASFEQPFSHHGGTKVLSGNLGRAVMKTSAVPVENQVIEAPAVVFESQHDVMPAFEAGLLDRDCVVVVRHQGPKANGMPELHKLMPPLGVLLDRCFKIALVTDGRLSGASGKVPSAIHVTPEAYDGGLLAKVRDGDIIRVNGQTGELTLLVDEAELAAREPHIPDLSASRVGTGRELFSALREKLSGAEQGATCITF

SEQ ID NO: 10464 - DNA, 1842 bp, Pseudomonas putida GB-1
  CDS (1)..(1842): transl_table=11
atgcctgattatcgttccaagacttccacccaaggccgcaacatggccggcgcccgtgccctgtggcgcgccaccgggatgaaggacgaagacttcaagaaaccgatcatcgccatcgccaactcgttcacccagttcgtcccgggccacgtgcacctgaaggacctgggccagctggttgcccgcgaaatcgaacgcgccggtggcgtggccaaggaattcaacaccatcgcggtcgatgacggcatcgccatgggccacgacggcatgctgtactcgctgccaagccgcgagatcattgccgacgccgtggaatacatggtcaacgcccactgcgccgacgccatcgtctgtatctccaactgcgacaagatcacccccggcatgctgatggccgccctgcgcctgaacatcccggtgatcttcgtgtccggtggcccgatggaagccggcaagaccaagctggccagccacggcctggacctggtcgatgccatggtgatcgctgccgactcctcggcttccgatgaaaaagtcgccgaatacgagcgcagcgcctgcccgacctgcggttcgtgctccggcatgttcaccgccaactcgatgaactgcctgaccgaagccctgggcctggccctgccgggcaacggctcgaccctggccacccacgccgaccgcgagcagctgttcctcaccgccggccgcaccatcgtcgagctgtgcaaacgctactacggcgagaacgacgagtcggtactgccacgcagcatcgccaacttcaaggcgttcgaaaacgccatgatgctcgacatcgccatgggcggttcgaccaacaccatcctgcacctgctggccgcagcccaggaaggcgaagtcgaattcgatctgcgtgacatcgatcgcctgtcgcgcaaagtgccgcagctgtgcaaagtggcgccgaacatccagaagtaccacatggaagacgtgcaccgcgccggcggcatcttcagcatcctcggttcgctggcccgtggcggcctgctgcacaccgacctgccgaccgtgcacagccgcagcatggaagaagccatcgccaaatgggacatcacccagaccgatgacgaagccgtgcacaccttcttcaaggccggccctgccggtatcccgacgcagaccgcgttcagccagtcgacccgttgggaaaccctcgacgacgaccgtgaaaacggctgcatccgcagcttcgagcacgcctactcgcaagagggcggcctggccgtgctgtacggcaacatcgccctggatggctgcgtggtgaaaaccgctggcgtagacgaatcgatccacgtattcgaaggcaatgccaaaatcttcgagagccaggacagcgcggtgcgcggcattcttgccgacgaggtgaaggcgggcgacatcgtgatcatccgctacgaaggcccgaaaggcggcccaggcatgcaggaaatgctgtacccgacctcgtacctgaagtccaaaggcctgggcaaggcttgcgccctgctcaccgacggccgcttctcgggcggcacctcgggcctgtcgatcggccacgcctcgccggaagccgctgctggcggcgccatcggcctggtgcgcgacggcgacaaggtgttgatcgacatccccaaccgttcgatcaacctgctggtcagcgatgaagaactggccgagcgccgcgtcgaacaggacaagaagggctggaagcctgcggaagtacgcccacgcaaggtgaccaccgcgctgaaggcctatgccctgctggcgaccagtgccgacaagggtgctgtgcgtaacaaggcgatgctggaagggctctga

SEQ ID NO: 10465 - protein, 613 aa, Pseudomonas putida GB-1
MPDYRSKTSTQGRNMAGARALWRATGMKDEDFKKPIIAIANSFTQFVPGHVHLKDLGQLVAREIERAGGVAKEFNTIAVDDGIAMGHDGMLYSLPSREIIADAVEYMVNAHCADAIVCISNCDKITPGMLMAALRLNIPVIFVSGGPMEAGKTKLASHGLDLVDAMVIAADSSASDEKVAEYERSACPTCGSCSGMFTANSMNCLTEALGLALPGNGSTLATHADREQLFLTAGRTIVELCKRYYGENDESVLPRSIANFKAFENAMMLDIAMGGSTNTILHLLAAAQEGEVEFDLRDIDRLSRKVPQLCKVAPNIQKYHMEDVHRAGGIFSILGSLARGGLLHTDLPTVHSRSMEEAIAKWDITQTDDEAVHTFFKAGPAGIPTQTAFSQSTRWETLDDDRENGCIRSFEHAYSQEGGLAVLYGNIALDGCVVKTAGVDESIHVFEGNAKIFESQDSAVRGILADEVKAGDIVIIRYEGPKGGPGMQEMLYPTSYLKSKGLGKACALLTDGRFSGGTSGLSIGHASPEAAAGGAIGLVRDGDKVLIDIPNRSINLLVSDEELAERRVEQDKKGWKPAEVRPRKVTTALKAYALLATSADKGAVRNKAMLEGL

SEQ ID NO: 10466 - DNA, 1827 bp, Pseudomonas putida GB-1
  CDS (1)..(1827): transl_table=11
atgcatccgcgcatccttgaggtcacccagcggctggtcgaacgcagccgtgccacccgcgaacgttacctgcagctgattcgcggcgcggccagtgaaggccccatgcgtgccagcctgcagtgcgccaacttcgcccacggcgtggccggttgcggcagcgaagacaagcacacgctgcgcctgatgaacgcggccaacgtggctatcgtctcggcctacaacgacatgttgtccgcccaccagccgtacctgcatttccccgagcaaatcaagcaggccctgcgtgaggtcggctcggtcggccagttcgccggtggcgtgccggccatgtgcgacggtgtgacccagggcgagccgggcatggaactggccatcgccagccgcgaagtgatcgccatgtccacggctgtcgcgctgtcgcacaacatgttcgacgccgcgctgatgctgggcatatgcgacaagatcgttcctggcctgatgatgggcgcgctgcgtttcggccacttgccgaccattttcgtaccgggtgggccaatggtgtccggcatttccaacaagcagaaggccgacgtgcgccagcgctatgccgaaggcaaggccagccgtgaggaactgctggagtcggagatgaattcctaccacagcccaggcacctgcaccttctacggcaccgccaataccaaccaactggtgatggaggtaatgggcctgcacctgccgggcgcttcgttcgtcaacccgtacacaccgctgcgcgacgcactcaccgccgaggctgcgcagcaggtgacacgcatgaccaaggccagtggcagcttcatgccgctgggtgaaatcgtcgacgaaaaagcgttggtcaactccatcgtcgccctgcacgctaccggcggctcgaccaaccacaccctgcacattccagcgattgcccaggctgcgggtatccagctgacctggcaggacatggccgacctttccgaagtggtgccgaccctgtcgcacgtctaccccaacggcaaggccgacatcaaccacttccaggcggctggtggcatggccttcctgatccgcgagctgctcgacgccgggctgctgcacgaggatgtcaataccgtggccggccacggcttgcgtcgctacacccaggaaccgttcctcgacaacggcaagctggtgtggcgcgaagggccgcagcagagcctggacgagagcatcctgcgcccggtggcgcggccgttctccgccgaaggcggcctgcgggtgatggagggcaacctgggccgtggcgtgatgaaagtgtccgccgtcgccgccgaacatcaggtggtcgaggccccggcgcgggtgttccaggaccagcagtcgctggccgatgcgttcaaggccggtgagcttgagcgtgactttgtcgccgtggtgcgcttccaggggccacgttgcaacggcatgccagagctgcacaagctaacgccattcctcggtgtgctgcaggaccgtggctacaaggtagcgctggttacagacgggcgtatgtccggtgcctcgggcaagatcccggcggctatccacgtttgccccgaggcttacgacggcggcccgctggcgcgtgtgcgcgatggtgatatcgtgcgggtcgatggtgtcgaaggtaccttgcgggtcatggtctcggccgaagagttggccagccgcgatctgccgccggcgccccagggcaatgacctgggttgcgggcgcgagctgttcggcttcatgcgcatggcgttcagcccggcagagcagggcgcgagtgcgttcacttcggccctggagaacctcaaatga

SEQ ID NO: 10467 - protein, 608 aa, Pseudomonas putida GB-1
MHPRILEVTQRLVERSRATRERYLQLIRGAASEGPMRASLQCANFAHGVAGCGSEDKHTLRLMNAANVAIVSAYNDMLSAHQPYLHFPEQIKQALREVGSVGQFAGGVPAMCDGVTQGEPGMELAIASREVIAMSTAVALSHNMFDAALMLGICDKIVPGLMMGALRFGHLPTIFVPGGPMVSGISNKQKADVRQRYAEGKASREELLESEMNSYHSPGTCTFYGTANTNQLVMEVMGLHLPGASFVNPYTPLRDALTAEAAQQVTRMTKASGSFMPLGEIVDEKALVNSIVALHATGGSTNHTLHIPAIAQAAGIQLTWQDMADLSEVVPTLSHVYPNGKADINHFQAAGGMAFLIRELLDAGLLHEDVNTVAGHGLRRYTQEPFLDNGKLVWREGPQQSLDESILRPVARPFSAEGGLRVMEGNLGRGVMKVSAVAAEHQVVEAPARVFQDQQSLADAFKAGELERDFVAVVRFQGPRCNGMPELHKLTPFLGVLQDRGYKVALVTDGRMSGASGKIPAAIHVCPEAYDGGPLARVRDGDIVRVDGVEGTLRVMVSAEELASRDLPPAPQGNDLGCGRELFGFMRMAFSPAEQGASAFTSALENLK

SEQ ID NO: 10468 - DNA, 1692 bp, Marinobacter sp. ELB17
  CDS (1)..(1692): transl_table=11
atgagtgataccccccaagaccctcgccgccgttattccgctccggttgtggacggtgtggctaaatccgccagtcgttccatgctgagggccgtcggttttaacgacgaagatttcagcaaaccgcagatcggcattgcttccacctggagtatggttaccccctgtaatagccacattaacgagctggccgacattgcttgtaagggtgcggaccaggccggtggtaaaggcgttatttttaacaccattacgatttctgacggcattgccaacggcaccgaaggaatgaagtattccctggtgtcgcgggaagtcatcgcagattccattgaaaccgtggccggttgcgagggttttgacggcctggttgccattggcggctgtgacaaaaacatgcccggctgcatcatgggcctggcgcggcttaaccggcccagcgtgtttgtttatggcggtactattttgcctggtgaaggtcacaccgacattatttcagtgtttgaagcggtgggcgcccatgccaaaggcgaactgtcgttgattgaagtgaagcatattgaagaaaccgccattcccggccccggttcctgtggcggcatgtacaccgccaataccatggcctcggccatagaagcactgggtatgagcctgcccggcagctcggcgcagaatgcggtgtcgaatgacaaaaaagccgattgcgaagccgccggtgccgcggtcatgaatctgttggatcgagatatcaaaccttccgacattatgactcagcacgcctttgagaacgccatcactgtgatcatcaccttgggtggttccaccaacgccgtactgcacctgattggtatggccaacacggcgggtgtagagctaaccctggatgacttcactcgcattggtaaaaaggttccattgttggcggatctgcgccctagcggccattacatgatgagcgaattggtggccattggcggcatccagccactcatgaaaatgctgctagacgccggcatgctccacggcgattgcctgacagtaaccggcaaaactctggccgaaaacctggccacggtagaaccttatgccgatggccagaaaatcattatgcctctggaccagcccattaaagcggaaagccacctgcgcattctgtttggtaatctggcgccggaaggctccgtggcaaaaattaccggtaaggaaggcacccactttaaaggtcgggcgcgggtgtttggttcggaagaagaagcccaagcacgaattctggacggcactgtggtggctggcgatgtgctggttatccgctatgaaggcccacgcggcggccccggcatgcgcgaaatgctgtcacccacctcggcgattatgggccgtgggctgggcagcgatgtggctttgataactgacggtcgtttctccggtggtagccacggcttcgtcgtaggccacattacgccggaagcgtttgatggcggccctattgccttggtgcaagacggcgacgaaatcgtgattgatgccgtggccgacactattgagctaaatgtcagtgacgacgaactgcagagccgtcgcgacgcctggcagcaaccgcaaccgcgttacacccgcggtgtgttagccaagtatgcgcgcaccgtgagttcggcgtcgaccggtgcagtgaccgacctgcccgagccttga

SEQ ID NO: 10469 - protein, 563 aa, Marinobacter sp. ELB17
MSDTPQDPRRRYSAPVVDGVAKSASRSMLRAVGFNDEDFSKPQIGIASTWSMVTPCNSHINELADIACKGADQAGGKGVIFNTITISDGIANGTEGMKYSLVSREVIADSIETVAGCEGFDGLVAIGGCDKNMPGCIMGLARLNRPSVFVYGGTILPGEGHTDIISVFEAVGAHAKGELSLIEVKHIEETAIPGPGSCGGMYTANTMASAIEALGMSLPGSSAQNAVSNDKKADCEAAGAAVMNLLDRDIKPSDIMTQHAFENAITVIITLGGSTNAVLHLIGMANTAGVELTLDDFTRIGKKVPLLADLRPSGHYMMSELVAIGGIQPLMKMLLDAGMLHGDCLTVTGKTLAENLATVEPYADGQKIIMPLDQPIKAESHLRILFGNLAPEGSVAKITGKEGTHFKGRARVFGSEEEAQARILDGTVVAGDVLVIRYEGPRGGPGMREMLSPTSAIMGRGLGSDVALITDGRFSGGSHGFVVGHITPEAFDGGPIALVQDGDEIVIDAVADTIELNVSDDELQSRRDAWQQPQPRYTRGVLAKYARTVSSASTGAVTDLPEP

SEQ ID NO: 10470 - DNA, 1785 bp, Oryza sativa subsp
  CDS (1)..(1785)
atgcagtcgcttgccctcacctccccctcccttccggcgccggcgaccgcatccggccgccgccgccgccgcctggagcgcatccgcgccaccgcggtgtccgacgagccgaagctgaacaagtacagcgcgcgcatcacggagcccaagtcgcagggggcgtcgcaggcggtgctctacggcgtggggctcaccgacgccgacctccgcaagccgcaggtgggcgtctcctctgtctggtacgagggcaacacctgcaacatgcaccttctccgcctcgccgaggccgtcagggacggcgtccgcgaggccggcatggtggccttccgcttcaacaccgtcggggtcagcgacgccatctccatgggcacccggggcatgtgctacagcctccagtcgcgcgacctcatcgccgacagcatcgagaccgtcatgggcgcgcagcactacgacgccaacatctccattcctggatgcgacaagaacatgccaggaacaataatggcaatggggcggctgaaccgaccaagtatcatgatatatggtggaactattaagcctggtcattttcagggtaattcttatgacatagtatctgctttccagtgctatggagaatttgttaccggatcaatcagtgatgagcaaagaaagaatgtgctccgcaactcatgcccaggagcaggtgcgtgtggtggtatgtacaccgcgaacacaatggcatccgccatcgagaccatgggtatgagccttccgtacagttcttcaacccctgctgaagacccactaaagctagaggaatgccgtcttgctgggaagtatcttttagaattgttaaagatggatttgaagcctgaagacattatcactgagaaatctttgcggaacgcaatggtcattgtcatggcacttggtgggtctactaatgctgttttgcatttaattgctatcgctaggtctgtaggtctgcaattaactcttgatgattttcagaaggtcagtgaccaagttcctttccttgcggaccttaagcctagtggcaaatatgtcatggaggatctgcataagattggtggaacacctgcagtaattcattatcttctggagcaaggtcttcttgatggtgattgtatgaccgtcactgggaaaactctagcggaaaatgctaaaatcttccctcctctgtccgaaggacagcaaataataaggcccctggacaacccaatcaaatcaactggtcatatacaaatactttatggcaatcttgcaccagaaggttctgtagcaaaaattactggcaaagaggggatgtttttctcaggccctgcactagtgtttgagggtgaagaatctatgattacagctatatcagaaaacccagcgaatttcaaggggaaggtagtagtgatacgaggagaaggaccgaaaggtggaccagggatgcctgaaatgctgactccaactagtgcaataatgggtgctggtcttgggaaggagtgtgccctgctgaccgatggcagattttctggaggatcacatggatttgttgtaggccacatttgtcctgaagcacaggagggaggtccaattggtcttgttcaaaacggtgacaaaattaccattgatgttgtgaagagagtaattgatgttgaactgactgaagctgagctggaagaaagacggaggaaatggacgccgccgccacacaaggctgcccgtggagcgctttggaagtacacgaagctcgtgtcccctgcatcaagaggatgcgtcaccgatgagtag

SEQ ID NO: 10471 - protein, 594 aa, Oryza sativa subsp
MQSLALTSPSLPAPATASGRRRRRLERIRATAVSDEPKLNKYSARITEPKSQGASQAVLYGVGLTDADLRKPQVGVSSVWYEGNTCNMHLLRLAEAVRDGVREAGMVAFRFNTVGVSDAISMGTRGMCYSLQSRDLIADSIETVMGAQHYDANISIPGCDKNMPGTIMAMGRLNRPSIMIYGGTIKPGHFQGNSYDIVSAFQCYGEFVTGSISDEQRKNVLRNSCPGAGACGGMYTANTMASAIETMGMSLPYSSSTPAEDPLKLEECRLAGKYLLELLKMDLKPEDIITEKSLRNAMVIVMALGGSTNAVLHLIAIARSVGLQLTLDDFQKVSDQVPFLADLKPSGKYVMEDLHKIGGTPAVIHYLLEQGLLDGDCMTVTGKTLAENAKIFPPLSEGQQIIRPLDNPIKSTGHIQILYGNLAPEGSVAKITGKEGMFFSGPALVFEGEESMITAISENPANFKGKVVVIRGEGPKGGPGMPEMLTPTSAIMGAGLGKECALLTDGRFSGGSHGFVVGHICPEAQEGGPIGLVQNGDKITIDVVKRVIDVELTEAELEERRRKWTPPPHKAARGALWKYTKLVSPASRGCVTDE

SEQ ID NO: 10472 - DNA, 1854 bp, Magnetospirillum gryphiswaldense
  CDS (1)..(1854): transl_table=11
atgccggaatatcgctctcgtacctccacccatggccgtaacatgtcgggcgcccgcggcctgtggcgcgccacaggcatgaaggatgaggatttcggcaagccgatcatcgccgtggtcaattccttcacccagttcgtgcccggtcacgtccacctgaaggatctgggccagatggtcgcgcgcgagatcgaggcggccggcggcatcgccaaggaattcaacaccatcgccatcgatgacggcatcgccatgggccatgccggcatgctgtattcgctgccgtcgcgcgagatcatcgccgattcggtggaatacatgtgcaacgcccacaccgccgacgccatggtgtgcatctccaattgcgacaagatcacgccgggcatgctgatggcggcgttgcgcctgaacatcccggcggtgttcgtctcgggcgggccgatggaagcgggcaaggtggtctatcagggcgagacccacgccgtcgatctgatcgacgccatgatcaagggcgccgacaagaacgtttccgacgaagaggccatggccttcgagcgcgaaagctgccccacctgcggctcgtgctcgggcatgttcaccgccaattccatgaactgcctgaccgaggccttgggcctgtcgctgcccggcaacggcaccgtggtcgccacccatgccgaccgcaaggaattgttcctggaagccgggcgccgcatcgtcgccatcacccgggcctattacgaacagggcgaccaatcggtgctgccgcgttccgtcgccaccttcaaggcgtttgaaaacgccatgaccctggatatcgccatgggcggctccaccaacaccgtgttgcatctgctggccgccgcccaggaagccggtgtcgatttcaccatggccgatatcgaccgcctcagccgccgcgtgccctgcctgtgcaaggtcgcccccaacatcgccgatgtccacatcgaggacgtgcaccgtgccggcggcatcatgtcgatcctgggtcagttggaacaagccggtctgctgcacgccgattgcggtaccgtgcattccggcaccatggcgcaagccctggccaagtgggacatcagccgctccgacgatgccagcgtgcacgacttcttccgcgctgcccccggcggtgtgcgcaccaccgaggcgttcagccagtccaagcgctgggacgccctggacaccgaccgggaaaagggcatcatccgctctgctggttcggcgttttccaaggatggcggcttggccgtgctgttcggcaacatcgccctggacggctgcatcgtcaagaccgccggcgtcgacgaatccaacctgaccttcaccggtccggcggtgatctgtgaaagccaggacgaggcggtggccaagattttgggtggtgccgtcaaggagggcgatgtggtcatcgtccgctatgaaggccccaagggtggccccggcatgcaggaaatgctctacccgaccagctatctgaaaagcatgggcctgggcaagaagtgcgccctgatcaccgatggccgtttctccggcggcacctcgggtctgtccatcggccatgcctcgccggaagcggccgagggcggcgccattggtttggtgcaggaaggcgacaccatcgtcatcgacatccccaaccgtgtcatcaaggtcgatgtgtccgatgacgaactggccaagcgccgggccgcaatggaagcacagggcaaaaacgcctggaagccggtgggccgcgaccgtccggtcagcccggcattgcgcgcctatgccgccatgaccacttccgccgcccgcggcgccgtgcgcgacgtgtcccagttggagcggtcgtag

SEQ ID NO: 10473 - protein, 617 aa, Magnetospirillum gryphiswaldense
MPEYRSRTSTHGRNMSGARGLWRATGMKDEDFGKPIIAVVNSFTQFVPGHVHLKDLGQMVAREIEAAGGIAKEFNTIAIDDGIAMGHAGMLYSLPSREIIADSVEYMCNAHTADAMVCISNCDKITPGMLMAALRLNIPAVFVSGGPMEAGKVVYQGETHAVDLIDAMIKGADKNVSDEEAMAFERESCPTCGSCSGMFTANSMNCLTEALGLSLPGNGTVVATHADRKELFLEAGRRIVAITRAYYEQGDQSVLPRSVATFKAFENAMTLDIAMGGSTNTVLHLLAAAQEAGVDFTMADIDRLSRRVPCLCKVAPNIADVHIEDVHRAGGIMSILGQLEQAGLLHADCGTVHSGTMAQALAKWDISRSDDASVHDFFRAAPGGVRTTEAFSQSKRWDALDTDREKGIIRSAGSAFSKDGGLAVLFGNIALDGCIVKTAGVDESNLTFTGPAVICESQDEAVAKILGGAVKEGDVVIVRYEGPKGGPGMQEMLYPTSYLKSMGLGKKCALITDGRFSGGTSGLSIGHASPEAAEGGAIGLVQEGDTIVIDIPNRVIKVDVSDDELAKRRAAMEAQGKNAWKPVGRDRPVSPALRAYAAMTTSAARGAVRDVSQLERS

SEQ ID NO: 10474 - DNA, 1806 bp, Phaeosphaeria nodorum
  CDS (1)..(1806)
atgtctctcgcacgctttggaggcgcactttcacgtgtgagatgtgcaccgcggccgcaatggcacgctgcacgagcactctcgagctccgccatccattcagcgaaagccgacaatgagctcaattcggtcagcaaacacattacgcagcccaagtcgcagggcgcctcgcaggccatgctgtacgcgactggcatgagcgaggatgatatgaataaggcccaggtcggcatctcatcagtgtggtactcgggcaacccatgcaatatgcacctgatggacctcaacaacaaggtcaaagagggtgtgcagcgggctggtctcttgggcatgcagttcaacaccattggtgtgagtgacggcatttccatgggcaccaagggcatgcgctactcgctgcagtcgcgtgagatcatcgcagactcgattgagactgtcatgggcggccaatggtacgatgcgaacatttccatccccggatgcgacaagaacatgcccggtgtcatcatggctatgggccgtgtgaaccggccctcgctgatggtctacggcggaaccatccagcctggatgcgcaaagactctcgacaaccagtccatcgacatcgtctctgccttccaggcctacggacaattcataactggagagatcactgaagaccagcgcttcgatgtcatcagacacgcatgcaacggtcagggtgcttgtggaggcatgtacacggcaaacacaatggctactgccattgagaccatgggcatgtcgctgcccggctcatcgtcgaaccccgccaactcgcaggccaagatgctggaatgcctggctgcgggaggcgcaatcaagaacctgctcaaggaggacctgcgccccagcgacatcctcaccaggcaagcactcgagaacgccatggttgtcatcagcatcaccggaggctccaccaacgccgtattacacctgatcgccatcgccgactctgttggtctcaaactgaccatcgacgacttccagagcgtgagcgaccggattccgttgctcgctgatctcaagccctctggcaagtacgtcatggctgatgttcacgacatcgggggtactcccgcactgctcaagttcctgcttaaggagggcctgctcgacggcagccagatgactgtcactggcaagaccctaaagcagaacttggagaacgtcaaggacttcccctccgaccagaagatcatccgccctctcagcgagcccctcaagactaccggccatttgcaaattctccgtggtagtctcgcaccaggtggctgtgtcggcaagatcaccggcaaagaaggaaccatcttcaccggcaaagccaaatgctacgatgccgaagacgacttcatcagtgcgctcgagcgcggcgagatcaaaaagggcgagaagactgtcgtcgtcatccgctacgaaggccccaagggcgggcccggcatgcctgaaatgctcaagcccagctccgccatcatgggcgcaggtctcggcaaggatgtcgcactcatcactgacgggcgcttcagcggtggtagccacggtttcttgatcggccacattgtgcctgaagcgcaggagggcggaccgatcggtcttgtccaggatggcgatgagatcaccatcgactctgagtcgaatgaacttaacattggcgtgagcgagcaggagttggcggagcgcaggaagagctggaaggcgccggcgctgaagtatcaaaagggcacgctgttcaagtatgcgcggttcgtcaaggacgccagctcgggatgcgtgacggactcggcataa

SEQ ID NO: 10475 - protein, 601 aa, Phaeosphaeria nodorum
MSLARFGGALSRVRCAPRPQWHAARALSSSAIHSAKADNELNSVSKHITQPKSQGASQAMLYATGMSEDDMNKAQVGISSVWYSGNPCNMHLMDLNNKVKEGVQRAGLLGMQFNTIGVSDGISMGTKGMRYSLQSREIIADSIETVMGGQWYDANISIPGCDKNMPGVIMAMGRVNRPSLMVYGGTIQPGCAKTLDNQSIDIVSAFQAYGQFITGEITEDQRFDVIRHACNGQGACGGMYTANTMATAIETMGMSLPGSSSNPANSQAKMLECLAAGGAIKNLLKEDLRPSDILTRQALENAMVVISITGGSTNAVLHLIAIADSVGLKLTIDDFQSVSDRIPLLADLKPSGKYVMADVHDIGGTPALLKFLLKEGLLDGSQMTVTGKTLKQNLENVKDFPSDQKIIRPLSEPLKTTGHLQILRGSLAPGGCVGKITGKEGTIFTGKAKCYDAEDDFISALERGEIKKGEKTVVVIRYEGPKGGPGMPEMLKPSSAIMGAGLGKDVALITDGRFSGGSHGFLIGHIVPEAQEGGPIGLVQDGDEITIDSESNELNIGVSEQELAERRKSWKAPALKYQKGTLFKYARFVKDASSGCVTDSA

SEQ ID NO: 10476 - DNA, 1827 bp, Pseudomonas chlororaphis
  CDS (1)..(1827): transl_table=11
atgcatccccgcgttcttgaggtcaccgaacggcttgtcgcccgcagtcgcgccactcgcgaggcttacctcgccctgatccgcggcgccgccagcgatggcccgcaacggggcaagctgcagtgtgcgaacttcgcccacggcgttgccggttgcggctcggaagacaagcacagcctgcgcatgatgaatgccgccaacgtggcgattgtttcgtcatataacgacatgctctcggcgcaccagccgtacgagcactttcccgaacagatcaagaaggccctgcgcgagatgggttcggtcggccagttcgccggcggcacccccgccatgtgcgatggcgtgacccagggcgaggccggcatggagctgagcctgccgagccgcgaggtgatcgcgctgtccaccgcggtggccttgtcccacaacatgttcgacgccgcgctgatgctcggcatctgcgacaagatcgtcccgggcctgatgatgggcgcgttgcgcttcggccacctgccgaccatcttcgtcccgggcgggccgatgccgtcgggcatttccaacaaggaaaaggccgacgtgcgccagcgttacgccgaaggcaaggcgacccgcgaagagctgctggaatcggagatgaagtcctaccacagcccgggtacctgcaccttctacggcaccgccaacaccaaccagctgctgatggaagtcatgggcctgcacttgccgggcgcgtccttcgtcaacccctatacgccactgcgcgacgccctgacccatgaggcggcgcagcaggtcactcgcctgaccaagcagagcggcaacttcacgccgatcggcgagatcgtcgacgagcgttcgctggtcaactccatcgttgccctgcacgccactggtggttcgaccaaccacaccctgcacatgccggcgattgcccaggccgcgggcatccagctgacctggcaggatatggccgacctgtccgaggtggtgccgaccctgtcccacgtctatccgaacggcaaggccgacatcaaccacttccaggcggcgggcggcatggcgttcctgattcgtgaactgctggaagccggcctgctccacgaagacgtcaacaccgtggccgggcgtggcctgagccgctacacccaggaaccgttcctggacaacggcaagctggtgtggcgcgacggcccgatcgaaagcctcgacgaaaacatcctgcgtccggtggcccgcgcgttctcgccggaaggcggcctgcgggtgatggaaggcaacctcggtcgcggggtgatgaaagtctccgccgtggcgctgcagcaccagatcgtcgaagcgccggcggtggtgttccaggaccagcaggacctggccgatgcgttcaaggccggcgagctggagaaagacttcgtggcagtgatgcgcttccagggcccacgctccaacggcatgccggaactgcacaagatgacgccgttcctcggcgtgttgcaggaccgtggcttcaaggtcgcgctggtcaccgacgggcgcatgtccggggcctcgggcaagatcccggcggcgatccacgtcagccctgaagcccaggtcggcggggcgctggcacgggtgcgcgacggcgacatcattcgcgtggatggcgtaaagggcacgctggagcttaaggtagacgccgatgaattcgctgcccgcgaaccggccaagggcctgctgggtaacaacgtcggcagcggtcgcgaattgttcggtttcatgcgcatggccttcagctcggcggagcagggcgccagcgcctttacctctgccctggagaaccttaagtga

SEQ ID NO: 10477 - protein, 608 aa, Pseudomonas chlororaphis
MHPRVLEVTERLVARSRATREAYLALIRGAASDGPQRGKLQCANFAHGVAGCGSEDKHSLRMMNAANVAIVSSYNDMLSAHQPYEHFPEQIKKALREMGSVGQFAGGTPAMCDGVTQGEAGMELSLPSREVIALSTAVALSHNMFDAALMLGICDKIVPGLMMGALRFGHLPTIFVPGGPMPSGISNKEKADVRQRYAEGKATREELLESEMKSYHSPGTCTFYGTANTNQLLMEVMGLHLPGASFVNPYTPLRDALTHEAAQQVTRLTKQSGNFTPIGEIVDERSLVNSIVALHATGGSTNHTLHMPAIAQAAGIQLTWQDMADLSEVVPTLSHVYPNGKADINHFQAAGGMAFLIRELLEAGLLHEDVNTVAGRGLSRYTQEPFLDNGKLVWRDGPIESLDENILRPVARAFSPEGGLRVMEGNLGRGVMKVSAVALQHQIVEAPAVVFQDQQDLADAFKAGELEKDFVAVMRFQGPRSNGMPELHKMTPFLGVLQDRGFKVALVTDGRMSGASGKIPAAIHVSPEAQVGGALARVRDGDIIRVDGVKGTLELKVDADEFAAREPAKGLLGNNVGSGRELFGFMRMAFSSAEQGASAFTSALENLK

SEQ ID NO: 10478 - DNA, 1665 bp, Candidatus Kuenenia stuttgartiensis
  CDS (1)..(1665): transl_table=11
atggaattgagaagcgataaaattacgaaaggtcttgagcgtgttcctgcacgggcacttttatacgcaactggtttaagcaaagaggatttagataaaccgttcattggaatagcgagcagttttaccgaccttattcccggacatgtccatatgcgtccgctggagagggccattgaaaaaggcatccatgcgggaggaggggtaagctttgtttttggtataccgggtatctgtgacggcattgcaatggggcatagcggaatgcattattctcttgtgtcaagggatctgattgcagatatgatagagtgtgtggtaagtgctcactgtctggatgggttggtgatgcttacaaattgcgacaaaataacgccgggaatgttgatggcctgcgcaagattggatatccccgggattgttgttactgctggccctatgatttccggacgttatggaaagcaaaagttatccctggtgaaagatacctttgaagcggtagggagaagacgtaaaggcgaaattgacgataaagaattgtcgtgtttagagatggatgcttgtcccggagctggatcatgtcaggggttatatacggccaacacgatggcatgtgtatcggaggcgttaggtatgtctctgccaagatgcgccgcttctcttgcaatttcggcggagaaggaacgtattgcctataaaagtggccaacgggttgtagatcttgtaagaaaagatattacttcgagaaagattatgacgcgtaaagcatttgaaaatgcgatcatgatagatatggcgcttggcgggtcaacaaattcctgtttgcatattcctgcgattgcaaacgaggctggcgtggaagtaaatttgaagttgtttgacgaaattagtgcaagaacacctcatataacaagcttgcagcctggtggcgaatatttgcttgaagatttatattatgcgggcggcattcccgccgtaatgaatcgattacaggatgacctgtacgattgtattaccgtaagcgggtttaatacaaaagagatagcgaaatccgccataattaacgatgacgaggtgataaggtcaaaggatgccgcatatcataaagaaggtgggatagctgttttatatggtaatttatctcccgatggtgccgtgataaagcagagcgctgtatccgaaaacatgatgcagtttactgggaaggcaaaggttttcaatagtgaagaggctgcaatgaatgcaattatggattccatgattagcaaaggcatggtggtcgtgatacgatatgagggtccgcgcggggggcctgggatgagagagatgttgtctcctacggcggcgcttgtgggacttgggttaggagagtccgttgctttaattacggatgggcgtttttccgggggaacgcaaggtccctgcgttgggcatgtatcgcctgaagcaatggttgggggtcccattgccttggtggaggatggtgatgaaataacgatagatattccaggtcgcacattaaatttgaatgtttcgaaggaaattcttactcgtagaaaggaagcatggaaaccgccaaaaccaaaaataacacatggggtgttgtcccggtatgcaaaatgtgttacatcggcggataaaggcgctgtgttaacggcggaatag

SEQ ID NO: 10479 - protein, 554 aa, Candidatus Kuenenia stuttgartiensis
MELRSDKITKGLERVPARALLYATGLSKEDLDKPFIGIASSFTDLIPGHVHMRPLERAIEKGIHAGGGVSFVFGIPGICDGIAMGHSGMHYSLVSRDLIADMIECVVSAHCLDGLVMLTNCDKITPGMLMACARLDIPGIVVTAGPMISGRYGKQKLSLVKDTFEAVGRRRKGEIDDKELSCLEMDACPGAGSCQGLYTANTMACVSEALGMSLPRCAASLAISAEKERIAYKSGQRVVDLVRKDITSRKIMTRKAFENAIMIDMALGGSTNSCLHIPAIANEAGVEVNLKLFDEISARTPHITSLQPGGEYLLEDLYYAGGIPAVMNRLQDDLYDCITVSGFNTKEIAKSAIINDDEVIRSKDAAYHKEGGIAVLYGNLSPDGAVIKQSAVSENMMQFTGKAKVFNSEEAAMNAIMDSMISKGMVVVIRYEGPRGGPGMREMLSPTAALVGLGLGESVALITDGRFSGGTQGPCVGHVSPEAMVGGPIALVEDGDEITIDIPGRTLNLNVSKEILTRRKEAWKPPKPKITHGVLSRYAKCVTSADKGAVLTAE

SEQ ID NO: 10480 - DNA, 1737 bp, Aspergillus oryzae
  CDS (1)..(1737)
atgaccctcgttcacattggactgacctcgtatggagatgcccacttttccctcttcttgcgcaaagtgtttatcaaggccttggggtactcggaagatgctctttctcgtccaattattggcatcatcaatactggctctggcttcaatccgtgtcatggaaacacgccgcagctaatcgaagcagccaagcgaggtatccatctgaatggtggcatagccattgatttccccaccatcagtctgcacgaatcattttcgcatccgacgagcatgtttctgcgaaacttaatgagcatggacactgaggagatgattcgcgcccaacccgtggatgcgtgtattatgatcggaggttgtgataagacagttccagcccagattatgggaggtatttcggccaacaagccagtgctgcctcttctgactgggcctatgatgccgggaagtcatagagggcagcggattggtgcttgtaccgattgtagaaacaattgggcatcatatcgtgccggaaccattgacatggaagagatttcggcgatcaatgaggagttggcaccaacgattggcacctgcggtgtgatgggcactgcgagtactatggcttgcatcacggccgcgctaggcttgatccccctacagggagcctctgctcctgcggtgtctgcggcgaggctccgcatcgcagaacaaacaggtgccaatgctgttgctgcggctgaaagtcgacggtcaccgcagacaattttaacctctgattcgttctacaatgccgcagtggtactccaagccatcggtggttctacaaacgccatggttcacctgatggctataatcaaccgccatcccgacattagtgggtcaataactctccaaacgttggacgaggtcggccgtagaactccactccttgtcgatctgaaacccagcggcgacaattatatgaccgattttcacaatgctggtggcatgctgtgccttctgcatcgtctacgaccgctcctccgcctttcagccaaaacgatcacgggcgaaacccttggtgaagttttggatcgcacccctttccgagactttgagtactctcagaacattatccgtacattgtccaatcctttacatccttcgtcgtccttagtggttgttgagggcaacatcgcgccccacggggccgtgatcaaagcatccgcatccaaggataaacgtcttctccgccatacaggacctgcggtcgttttcgagaatcctcgtgatctttcattacgcctcgacagtccggaccttgacgtgacagccgactcggtactggtgctgaaaggcattggtccaattgggaaccctggaatgcctgaggcgggaatgattcccattccacgcaagctggctgcccaaggggtaacagatatgcttcgaatctcggacggccggatgtcaggaacggcaggggggacgattgttctacatgtctcgcccgagtccgccgttccagattcgccatttggtgttattgagactggcgatatgatcgtgtgcgatgttgaaaatcgcgtgatccgcttggagatctccgacgaagagctacaggaaaggattgcacagcgccggcggttaaccgctgaagacaagacttcgacgtggaatgagaggcaaactaggcgaggatatcggggtctctacgagcgggaggtcaaccaggcacatgaagaaagtctcccttctcatcatctactatga

SEQ ID NO: 10481 - protein, 578 aa, Aspergillus oryzae
MTLVHIGLTSYGDAHFSLFLRKVFIKALGYSEDALSRPIIGIINTGSGFNPCHGNTPQLIEAAKRGIHLNGGIAIDFPTISLHESFSHPTSMFLRNLMSMDTEEMIRAQPVDACIMIGGCDKTVPAQIMGGISANKPVLPLLTGPMMPGSHRGQRIGACTDCRNNWASYRAGTIDMEEISAINEELAPTIGTCGVMGTASTMACITAALGLIPLQGASAPAVSAARLRIAEQTGANAVAAAESRRSPQTILTSDSFYNAAVVLQAIGGSTNAMVHLMAIINRHPDISGSITLQTLDEVGRRTPLLVDLKPSGDNYMTDFHNAGGMLCLLHRLRPLLRLSAKTITGETLGEVLDRTPFRDFEYSQNIIRTLSNPLHPSSSLVVVEGNIAPHGAVIKASASKDKRLLRHTGPAVVFENPRDLSLRLDSPDLDVTADSVLVLKGIGPIGNPGMPEAGMIPIPRKLAAQGVTDMLRISDGRMSGTAGGTIVLHVSPESAVPDSPFGVIETGDMIVCDVENRVIRLEISDEELQERIAQRRRLTAEDKTSTWNERQTRRGYRGLYEREVNQAHEESLPSHHLL

SEQ ID NO: 10482 - DNA, 1728 bp, Aspergillus oryzae
  CDS (1)..(1728)
atggccctctacattgagcggtacctcaactatggtatcacccgggaagaactgatgtctggtaaaccaataatcggaatagcacagtccgggtccgacttgtctccatgcaaccgccatcacctcgagttggcgaaacgggttcgagaaggtatcaggtccgccggagggatcgcctttgaattccccacgcatcctattcaggagactagcaggagacccactgcttgtattgaccgaaatctatcgtatctgggcctggtagaaattctcttcggatatcccttggacggtgtagtcctcctgacgggctgcgacaagactactcccgccgctctgatggccgcggctacagtgaatatcccagcaatatgcttgaatgtcggcccaatgcttaacggttacgtgaagaaggacctggcggggtccggaatggtattgtggacgggtagagagatgtatgcggcaggtgagatcaacaaggaggaattcattgactatgtgtccaaaggtacaccatcagtgggacattgtaacacgatgggaacagcatcaactatgaatgctttggcagaagcgcttggaatggccctacctgggtcggctgccataccggctccgtatcgtgaacgtggccaatgtgcttacgaaacaggtttgcgtattgtcgaaatggttcattccgatcggaagcccagcgatattatgactcgagaggctttcgagaatgttattgtagttaatactgctatcggcggcagtaccaatgcccctattcatatcaacgccattgccaaacatattggggttgaggtttcactggatgactgggaccgacttggatttcatattccactactgctaaacatgcaaccagccggtgaactgctgggagaggaatactatcgggcgggcgggctacccgcgattatggcggagctgctagatgctaggaagctgaacccggatgctttaacatgcaatggttacacagtagccgagaatgtccgggacaaacatacctgggaccgtcgaatgatcaagccgtacaatgagccacttctggaagatgccggttttctccatcttcaaggcagtctgttccggtctgctatcatgaagacatgtgtgatatcggagcctttccgacaaaagttcttggagaatcccaaggacccgaatgcatttgaaggtacggttgtagtatttgatggaccggaggattatcatcaccgacttgaggacccttccacccccatcgacgacagaagtatcctggtgatgcgcggtgctggcccattgggatatccaggtgccgccgaggtcgtcaacatgcacccacctggacggcttttacgacaaggggtcaaatcgcttccgtgcattggagacgggcgacaatcgggaacttccggctcaccatcaatcctcaatgctagtcccgaggcagcggcgggtggtaatctagcccttcttcaagatggggacagactccgtgttgatctaaataaacggcgcgttgacatccttgtttccacggaggaactggaaaagcggagaaagacactagaagcccaaggaggttatgatgtgccggaaagtcaaactccatggcaggaactgttcaggagggagacgacacagttgagtgatggtatggtcctccgagacgcggtaaaataccaacgacttgcccagcgatatgagaacccccggcacaatcattga

SEQ ID NO: 10483 - protein, 575 aa, Aspergillus oryzae
MALYIERYLNYGITREELMSGKPIIGIAQSGSDLSPCNRHHLELAKRVREGIRSAGGIAFEFPTHPIQETSRRPTACIDRNLSYLGLVEILFGYPLDGVVLLTGCDKTTPAALMAAATVNIPAICLNVGPMLNGYVKKDLAGSGMVLWTGREMYAAGEINKEEFIDYVSKGTPSVGHCNTMGTASTMNALAEALGMALPGSAAIPAPYRERGQCAYETGLRIVEMVHSDRKPSDIMTREAFENVIVVNTAIGGSTNAPIHINAIAKHIGVEVSLDDWDRLGFHIPLLLNMQPAGELLGEEYYRAGGLPAIMAELLDARKLNPDALTCNGYTVAENVRDKHTWDRRMIKPYNEPLLEDAGFLHLQGSLFRSAIMKTCVISEPFRQKFLENPKDPNAFEGTVVVFDGPEDYHHRLEDPSTPIDDRSILVMRGAGPLGYPGAAEVVNMHPPGRLLRQGVKSLPCIGDGRQSGTSGSPSILNASPEAAAGGNLALLQDGDRLRVDLNKRRVDILVSTEELEKRRKTLEAQGGYDVPESQTPWQELFRRETTQLSDGMVLRDAVKYQRLAQRYENPRHNH

SEQ ID NO: 10484 - DNA, 1848 bp, Aspergillus oryzae
  CDS (1)..(1848)
atgcttctttcacaaacccgggggcgtatgccctctgctctgcggagcctctccaggcggtccgccgtcaatgttcgtcccctctctaccaccctccccaagcaaaaggcctcttcctccgaagacgacaacgctctgaacaaggtctcccgccatgtcacacagcccatctcgcagggtgcttcccaggccatgctttacgctaccggtctcaccgaggaggacatgaacaaagctcaagtcggtatctcctccgtttggtatagcggtaacccctgtaacatgcatctgctcgatctcaaccaccgcgtcaagcaaggtgtggaacaggcaggcttgatcggcatgcagttcaacaccgtcggtgtcagtgatgcaatcagtatgggtacgaagggtatgcgatattctcttcagagtcgtgatctgattgccgactctatcgagactgttatgggtggtcagtggtacgatgccaacatcagtatcccgggttgcgacaaaaacatgcccggtgtgttgatggccatgggcagagtcaaccggccgagcattatgttgtacggaggcaccatcaagcccggttgtgccgctacccaaaacaatgccgagattgacatcgtctccgcattccaggcctacgggcagttcctgagcggcgacattaccgagcctcagcgatttgatattatccgtaacgcttgcccaggaggcggtgcctgcggtggtatgtacacggccaacaccatggccaccgccattgagaccattggtatgaccctccctggctcttcttccaaccccgccgagtcccgcgccaaggaccttgagtgtctggctgttggtggggcgatcaagaagcttctgaaggaggacatccgccctagggatattatgacccgccaagctttcgaaaacgccatggttgtggtgaacatcaccggtggctcgaccaacgctgtgctgcacttgattgccatcgctgattcggtcggcatcaagctggatattgaggacttccagtccgtctccgaccgtattcctttcttggctgatctgaagccatcgggcaagtacgtcatggccgacatgcacaagatcggaggtacccccgcactgctcaagttcctgctcaaggaaggcctcatcgatggttccggcatgactgtcaccggtgagactctagccaagaacctcgagaaggttcccgatttccccgaagatcagaagatcatccgccctctgtccaaccccatcaaggagactggccatatccagattctgaagggatccctggctccgggtggcagtgttggtaagatcactggcaaggagggtacttctttcactggtaaggcacgtgtcttcgatgatgaggatgatttcatcgctgctctggagcgtggtgagatcaaaaaggaggacaagactgttgtggttatccgctacaccgggcccaaggggggtcctggtatgcccgaaatgttgaagccctcttctgcccttatgggctatggtctcggacagtcggttgccctcatcaccgatggacgtttctccggcggctctcatggcttcctgatcggacacattgtccctgaggctgctgttggtggacctattggtctcgtcaaggatggtgatgtcatcgtcattgatgctgagaagcgcgttctcgaccttgaggttgaccaggagactctcgccgagagacgcaagcagtgggaagccgataaggaggccggcaagctgcctcccaccggtctgactatgagaggaaccctcggcaagtacgctaggaccgtcaaggatgccagccacggctgtatcaccgatgctcttgattaa

SEQ ID NO: 10485 - protein, 615 aa, Aspergillus oryzae
MLLSQTRGRMPSALRSLSRRSAVNVRPLSTTLPKQKASSSEDDNALNKVSRHVTQPISQGASQAMLYATGLTEEDMNKAQVGISSVWYSGNPCNMHLLDLNHRVKQGVEQAGLIGMQFNTVGVSDAISMGTKGMRYSLQSRDLIADSIETVMGGQWYDANISIPGCDKNMPGVLMAMGRVNRPSIMLYGGTIKPGCAATQNNAEIDIVSAFQAYGQFLSGDITEPQRFDIIRNACPGGGACGGMYTANTMATAIETIGMTLPGSSSNPAESRAKDLECLAVGGAIKKLLKEDIRPRDIMTRQAFENAMVVVNITGGSTNAVLHLIAIADSVGIKLDIEDFQSVSDRIPFLADLKPSGKYVMADMHKIGGTPALLKFLLKEGLIDGSGMTVTGETLAKNLEKVPDFPEDQKIIRPLSNPIKETGHIQILKGSLAPGGSVGKITGKEGTSFTGKARVFDDEDDFIAALERGEIKKEDKTVVVIRYTGPKGGPGMPEMLKPSSALMGYGLGQSVALITDGRFSGGSHGFLIGHIVPEAAVGGPIGLVKDGDVIVIDAEKRVLDLEVDQETLAERRKQWEADKEAGKLPPTGLTMRGTLGKYARTVKDASHGCITDALD

SEQ ID NO: 10486 - DNA, 1827 bp, Aspergillus oryzae
  CDS (1)..(1827)
atggatccctccaaccccgccgtctccgcaacctttggggaagcgaaatacatcgaattcccctgtcttccagaggggacgaagcatgaggatggaacacctgcactgaatcgctactctgcaaccatcactagaggccatgacttccctggcgctaaggcaatgctctatgcagcaggtgttcccgaccaaaacgctatggcaaagagtcctcaggtaggagttgcatctgtgtggtgggaaggaaatccgtgtaacatgcacctgctggatatgggcaagacggtaaagaaggccgtcgagggccagggcatgattggttggcaatataacaccattggtgtttcagatgccatcaccatgggcagtgaaggcatgcggttttctctccaaacgcgtgagatcattgcagatagtgtcgagactgtgacttgtgctcagtaccacgatgcctgcattgccatccccggatgcgacaagaacatgcctggagtggtgatgggtatggccaggcataaccggccctccatcatgatctacggcgggactattcagattgggtattccaacctcctacgaaagccaattaacgtttcgagttgcttcgaagccgctggggcttactcatatgatactttgcgtcaaccggacgacggtggagacaccagcaagaccaaggatgagatcatggatgatcttgaaagacatgcctgtcccagcgcgggcgcatgtggaggcatgttcactgcgaacacaatggccacagctatcgagtcgatgggtctgtctttgcctggctcctcttccacccccgctacatctccatcaaaaatgcgagagtgtgtcaaggtggcggaagcgattaaagtttgcatggagaagaatataagaccgcgtgatcttttgactaagcggtcattcgaaaatgccctcgtcatgacgatggctcttggaggaagcaccaacggtgtgctccacttccttgccatggctcggacagctggcgtggaacttactttagatgatattcaaagggtcagtaacaagatcccattcattgctgacctttcccccagtggaaaatactacatggcggacttgtacgatattggcggggtaccgtctgtccaaaagctgttgattgcagggggcctgcttgatggcgatattccaacagttaccggaaagactctggccgagaacgtggcatcattcccatcgttaccggacgatcaggttattattcgtcctttggacaaccctattaaggcgactggccaccttcagatcctccgtggaaacctagcccccggaggcgctgtggccaagatcaccggcaaggagggcactaaatttataggaaaggcacgagtgtttgataaggagtatcaactcaatgatgcactcaaccagggtaaaataccccgagatgagaatttagtgatcatcgtccgttatgagggccccaagggcggaccgggaatgccggaacagctcaaggccagcgcggcattgatgggagccaagcttaccaacgtggcactgatcactgatggaagatactcaggggcaagtcatgggttcatcgtcggccatatcgtacccgaagccgcggtaggaggaccaatcgctgttgtccgcgatggggacgtggtcacaattaatgcggaaaccaacgaaattagcatggatgtctcggatgaagaaatccagcaacggctgagagagtggcaacctcccgcaccgcacgttacacgcggtgtgctggccaagtatgctcggctggttggtgacgcttcccacggcgcaatgacggaccttttctag

SEQ ID NO: 10487 - protein, 608 aa, Aspergillus oryzae
MDPSNPAVSATFGEAKYIEFPCLPEGTKHEDGTPALNRYSATITRGHDFPGAKAMLYAAGVPDQNAMAKSPQVGVASVWWEGNPCNMHLLDMGKTVKKAVEGQGMIGWQYNTIGVSDAITMGSEGMRFSLQTREIIADSVETVTCAQYHDACIAIPGCDKNMPGVVMGMARHNRPSIMIYGGTIQIGYSNLLRKPINVSSCFEAAGAYSYDTLRQPDDGGDTSKTKDEIMDDLERHACPSAGACGGMFTANTMATAIESMGLSLPGSSSTPATSPSKMRECVKVAEAIKVCMEKNIRPRDLLTKRSFENALVMTMALGGSTNGVLHFLAMARTAGVELTLDDIQRVSNKIPFIADLSPSGKYYMADLYDIGGVPSVQKLLIAGGLLDGDIPTVTGKTLAENVASFPSLPDDQVIIRPLDNPIKATGHLQILRGNLAPGGAVAKITGKEGTKFIGKARVFDKEYQLNDALNQGKIPRDENLVIIVRYEGPKGGPGMPEQLKASAALMGAKLTNVALITDGRYSGASHGFIVGHIVPEAAVGGPIAVVRDGDVVTINAETNEISMDVSDEEIQQRLREWQPPAPHVTRGVLAKYARLVGDASHGAMTDLF

SEQ ID NO: 10488 - DNA, 1788 bp, Paracoccidioides brasiliensis
  CDS (1)..(1788)
atgaatcccgaagagaaggtcgatggcttcgaagagccgcgatacatccagttcccttgcctgccggacgatgcgactcgggatggaaagccggtgttgaataaatattctacatttcttacagcgatgttatatggcgcgggggtgccggatcgtgagagcatgaaaaatagcccccaggtcggcattgcgacggtatggtgggaagggaatgcctgtaatatgcaccttttggatctggggaagacggtcaaaaaagccatcacggatcaggggatgctgggctggcaatataacaccatcggtgtctccgatgctatttccatgggtagtgaaggtatgcgatactccctccaatctcgggagatcattgcagacagcatcgagacagtagtaggtgctcaatatcatgatgctgcattgcgattccgttgcgacaagaacatgccaggctgcgtcatgggtatggccagacataacagaccgtctttgatgatatacggtgggacaattcaggtcgggtactccaagttactccgcaggcgaatcaacgtctctacttgctacgaagcagctggcgcgtacgcttacaacaccttaacccagcccgacgacggcggagaccgctcgaggacgaaagatgaaatcatggaagacattgagcgaaatgcctgtcccagcgctggcgcatgcgcgggaatgtacacagcaaacaccctggctaccgcgattgagtcaatgggtttgactctgccaggctcctcgtccaccccagctacggtgcctgccaagatgcgcgagtgcgtaaaagcagcggacgcgatcagaatatgtatggagaagaacattaggccgcgagatctacttacgaaacgctcctttgagaatgcgctggtaataaccatggcgctgggcgggagcacgaacagcatcgttcacctgatagcgatggccagaacggcccgggttgaattaacactcgatgattcccagcgtgtgagcgacaaaatcccgtttattgttgacttggcacccagtgggaaatactacatggcagacctttatgaaattggcgggattccatctgtgcagaagctgttgattgccgcaggcttgatggacggtgacatccccacagtaactggcaaaacgctagcagagaacatccaatccttcccctccctcccacaggaccaggccatcatccacccgctagccaaccccatcaagagcacgggccatatacaaatattgaaaggcaacctcgcccccggcggcgccgtagccaaaatcacaggcaaagaaggcaccaaattcaccggcaaagccctcgttttcaacaaagaacacgagcttgacgaagcgcttaacaagggcctaataccccgcggcgaaaacctagtgctaatagttcgctacgagggtccgaagggtggccccggcatgcccgagcagctgaaggccagcgcagcgctgatgggcgccaaactgacgaatgtcgcgctaattacggacgggaggtattcgggggccagtcatgggtttattgtcgggcatattgtgcctgaggcggcggttggggggcccattgctgttgtgcacaatggggatatgattacgattgatgcggagagaaatgagattagtatggcggtttcggaggaggaggttgcggagaggttgaaggagtggaggccgccgaagccgcatgtgactagggggacgttggccaagtatgcgagacttgttggagacgcgtcgcatggggctatgacggatatgttttga

SEQ ID NO: 10489 - protein, 595 aa, Paracoccidioides brasiliensis
MNPEEKVDGFEEPRYIQFPCLPDDATRDGKPVLNKYSTFLTAMLYGAGVPDRESMKNSPQVGIATVWWEGNACNMHLLDLGKTVKKAITDQGMLGWQYNTIGVSDAISMGSEGMRYSLQSREIIADSIETVVGAQYHDAALRFRCDKNMPGCVMGMARHNRPSLMIYGGTIQVGYSKLLRRRINVSTCYEAAGAYAYNTLTQPDDGGDRSRTKDEIMEDIERNACPSAGACAGMYTANTLATAIESMGLTLPGSSSTPATVPAKMRECVKAADAIRICMEKNIRPRDLLTKRSFENALVITMALGGSTNSIVHLIAMARTARVELTLDDSQRVSDKIPFIVDLAPSGKYYMADLYEIGGIPSVQKLLIAAGLMDGDIPTVTGKTLAENIQSFPSLPQDQAIIHPLANPIKSTGHIQILKGNLAPGGAVAKITGKEGTKFTGKALVFNKEHELDEALNKGLIPRGENLVLIVRYEGPKGGPGMPEQLKASAALMGAKLTNVALITDGRYSGASHGFIVGHIVPEAAVGGPIAVVHNGDMITIDAERNEISMAVSEEEVAERLKEWRPPKPHVTRGTLAKYARLVGDASHGAMTDMF

SEQ ID NO: 10490 - DNA, 2132 bp, Arabidopsis thaliana
  CDS (55)..(1881)
acgcactgcgccgccaaaaaacccttctttaaaccctttcctcctcgcgccgtcatgcaagccaccatcttctctccacgcgccactctcttcccctgtaaacctctcctcccttcccacaatgtcaactctcgccgtccctcaatcatctcctgctccgcccaatccgtaaccgctgatccttcaccacctatcactgacaccaataagctcaacaaatacagctcaagaatcactgaacccaaatcccaaggtgggtctcaagcaattcttcacggtgttggtttatcagacgacgatttgctaaaaccccagattggtatctcgtcggtttggtatgaagggaacacttgtaacatgcatttgctgaaattgtctgaggctgtgaaagaaggagttgaaaatgcaggaatggttgggtttaggtttaatactattggtgtgagtgatgctatttcgatgggaacgagagggatgtgttttagtttgcaatctagggatttgattgctgatagtattgagactgttatgagtgctcagtggtatgatggtaacatatctattcccggttgtgataaaaatatgcctggaactattatggctatgggaaggcttaacagaccagggattatggtttatggtggaaccattaagcctggccattttcaagacaagacatatgacattgtatctgctttccagagttatggagaatttgttagtggctccataagtgatgaacagagaaagactgtcctccatcattcatgtcctggagctggagcctgtggtggcatgtacacagcgaatacaatggcttctgctatcggagcaatgggaatgtcccttccttacagttcttcaatacctgctgaagacccattgaagttggacgagtgtcgcttagcaggaaaatatcttctagaattgctaaagatggacttaaaaccccgtgacattatcactccaaaatcacttcgtaatgcaatggtttccgtcatggcccttgggggatcgacaaatgcagtattgcatctaattgctattgcaaggtctgttggtttggagttgactcttgacgattttcagaaagttagcgatgcggttccatttctagcagatcttaaacccagtgggaagtatgttatggaggatatacataagataggtggtacgccagctgttctccgctatttattagagctaggattgatggatggtgattgtatgacagtgacagggcagactttggctcaaaatttagaaaacgtcccaagcttaacagaagggcaggagataattagacctctgtcaaatccaatcaaggagactggacacatacaaattttgagaggagaccttgcaccagatggttctgtagcaaaaattaccggcaaagagggcttatatttctctggtcctgcacttgtatttgaaggagaggaatctatgttggctgctatatcagcagacccaatgagttttaagggaactgtggttgttatcagaggagaggggcctaaaggaggtccaggtatgcctgagatgttgacaccgacaagtgcaataatgggtgccggtcttggaaaggaatgtgcattactgactgatggtaggttctctggtgggtcacacggttttgttgttggccacatttgccctgaagctcaggagggtggtccgatcggtctgatcaagaacggagacataatcaccattgacataggaaagaagagaatagacacacaagtctcacccgaagaaatgaatgaccgtagaaagaaatggactgctcctgcatacaaggttaaccgcggagtcctatataagtacatcaagaacgtgcaatcggcttcagatggatgtgtgactgacgagtaaagtgaacgatctaagagagagttttgtgaatgagcagcagaatgtagtgtacgttcatgagggaatttgtaagtttatttattgtagcttctagatcatgttactttgtgactgatcattagctatttgcagggttcgtttttaagattttgtttctcttaaatgtcaaaataaaaacttgtgattgtggccgaattccaaagaatataaagacagaataaagacggatttgcacaaaaaaaaaaaaaaaa

SEQ ID NO: 10491 - protein, 608 aa, Arabidopsis thaliana
MQATIFSPRATLFPCKPLLPSHNVNSRRPSIISCSAQSVTADPSPPITDTNKLNKYSSRITEPKSQGGSQAILHGVGLSDDDLLKPQIGISSVWYEGNTCNMHLLKLSEAVKEGVENAGMVGFRFNTIGVSDAISMGTRGMCFSLQSRDLIADSIETVMSAQWYDGNISIPGCDKNMPGTIMAMGRLNRPGIMVYGGTIKPGHFQDKTYDIVSAFQSYGEFVSGSISDEQRKTVLHHSCPGAGACGGMYTANTMASAIGAMGMSLPYSSSIPAEDPLKLDECRLAGKYLLELLKMDLKPRDIITPKSLRNAMVSVMALGGSTNAVLHLIAIARSVGLELTLDDFQKVSDAVPFLADLKPSGKYVMEDIHKIGGTPAVLRYLLELGLMDGDCMTVTGQTLAQNLENVPSLTEGQEIIRPLSNPIKETGHIQILRGDLAPDGSVAKITGKEGLYFSGPALVFEGEESMLAAISADPMSFKGTVVVIRGEGPKGGPGMPEMLTPTSAIMGAGLGKECALLTDGRFSGGSHGFVVGHICPEAQEGGPIGLIKNGDIITIDIGKKRIDTQVSPEEMNDRRKKWTAPAYKVNRGVLYKYIKNVQSASDGCVTDE

SEQ ID NO: 10492 - DNA, 1821 bp, Rhizobium meliloti
  CDS (1)..(1821): transl_table=11
atgtccgccgattcccgcatagccgccattaccgcccgcatcgtcgaacgctcgaagccttaccgggagccctacctcgatcgcgtccgcagcgctgcgacgaacggaccgcaccggaccgttctcggctgcggcaatctcgcgcatggatttgcggtctgttcccccgccgagaaggtggcccttgcgggcgaccgcgtccccaatctcggcatcatcacctcctacaacgacatgctctcggcgcatcagccgttcgaaacctatccggcgctgatccgggaggccgcgcacgaggcgggcggcgtcgctcaggtcgccggcggcgttccggcaatgtgcgacggcgtcacccaaggccagcccggcatggagctgtcgctcttctcgcgcgatgtcatcgccatggcggccggcatcggcctgtcgcacaacatgttcgacgcggccgtctatctcggcgtctgcgacaagatcgtgcccggactcgcgatcgccgcgctcaccttcggccatctgcccgcggtcttcatccccgccggaccgatgaccacgggcctgccgaacgatgagaaggccaaggttcggcaactcttcgccgaaggcaaggtcggccgcgacgagctcctggaggctgagtccaagtcctatcacggccctggcacctgtaccttctacggcaccgccaattccaaccagatgctgatggagatcatgggcttccacctgcccggcgcctccttcatcaatcccggcacgccgcttcgcgacgcgctgaccagggaagcgacgaagcgggcgcttgcgatcaccgcgctcggcaacgaattcacgcccgccggcgagatgatcgacgaacggtcgatcgtcaacggcgtcgtcggcctgcatgcgaccggcggctcgacgaaccacacgatgcatctcgtcgcgatggcccgcgccgcgggcatcgtgcttacctggcaggacatttcggagctttccgatctcgtgccgctgctcgcgcgcgtctacccgaacgggctggccgacgtgaaccatttccacgcggcaggcggcatgggcttcctgatcgcccaactcctcaggaaaggcttgctgcacgacgatgtccgcaccgtctacgggcaggggctgagcgcctatgcgatcgacgtgaagctcggcgagaacggcagcgtcaagcgtgagcctgcgccggaggcaagcgccgacccgaaggtgctcgcgaccgtcgaccgcccgttccagcacaccggcggcctcaagatgctgagcggcaatatcggcaaggcggtcatcaagatctccgccgtcaagccggagagccacgtcatcgaagcgccggccaagatcttcaacgatcaggcggaactgaacgccgccttcaaggctggaaagctcgaaggcgatttcgtggccgtcgtgcgctttcaggggccaaaggccaacggcatgcccgaactgcacaagctgacgacggtgctcggcatcctgcaggatcgcggccagaaagtcgcgattctcaccgacgggcgtatgtccggtgcctccggcaaggttccggcagcgatccacgtgaccccggaagcgaaggaaggcggcccgatcgcacgtattcaggaaggcgacatcgtccgcatagacgcgatcaacggcaaggtcgaggtgctcgtcgaggacatcgcgctgaagacgcgcgttccggcgcatatcgacctctccgacaacgagttcggcatgggccgcgagctcttcgctccgttcagacagatcgccggtgcggccgaccgcggcggaagcgtgctgttccattag

SEQ ID NO: 10493 - protein, 606 aa, Rhizobium meliloti
MSADSRIAAITARIVERSKPYREPYLDRVRSAATNGPHRTVLGCGNLAHGFAVCSPAEKVALAGDRVPNLGIITSYNDMLSAHQPFETYPALIREAAHEAGGVAQVAGGVPAMCDGVTQGQPGMELSLFSRDVIAMAAGIGLSHNMFDAAVYLGVCDKIVPGLAIAALTFGHLPAVFIPAGPMTTGLPNDEKAKVRQLFAEGKVGRDELLEAESKSYHGPGTCTFYGTANSNQMLMEIMGFHLPGASFINPGTPLRDALTREATKRALAITALGNEFTPAGEMIDERSIVNGVVGLHATGGSTNHTMHLVAMARAAGIVLTWQDISELSDLVPLLARVYPNGLADVNHFHAAGGMGFLIAQLLRKGLLHDDVRTVYGQGLSAYAIDVKLGENGSVKREPAPEASADPKVLATVDRPFQHTGGLKMLSGNIGKAVIKISAVKPESHVIEAPAKIFNDQAELNAAFKAGKLEGDFVAVVRFQGPKANGMPELHKLTTVLGILQDRGQKVAILTDGRMSGASGKVPAAIHVTPEAKEGGPIARIQEGDIVRIDAINGKVEVLVEDIALKTRVPAHIDLSDNEFGMGRELFAPFRQIAGAADRGGSVLFH

SEQ ID NO: 10494 - DNA, 1797 bp, Schizosaccharomyces pombe
  CDS (1)..(1797)
atgatgttctgcaagcttctccgttgtcaaaacggtattgctagcaaaagagctgcattaagcctaaaaggctttaaaacctcttcgatcaatttagtcgagaagaaattgaacaagtatagtgaaacaatcactggtccgaagtctcagggtgcttcccaagctatgttatatgctactggacttaatgaggaggacatgaaaaaaccccaagtcggcattgctagttgttggtatgaaggaaatccttgcaatatgcatttacttgatctcggtcgacgagtgaaagaaggtgtcaaaaaggctggattgaccggattccagtttaatactattggtgttagtgatggtatttctatgggtactactggtatgcgttatagtttgcaatctcgtgagattattgcagactccattgagaccgtcatgcaaggtcaatggtatgatgccaacgtctctattcctggctgtgacaaaaacatgcctggttgtttaatcgctatgggaagattcaaccgccctagtattatggtttacggcggtagtattcgtgctggtcactctccttgtcagaacaatgcacccatcgatattgtttctgcttttcaatcctatggtgaatttatcacaggaaaaattgatgagccaacccgtcatgacattattcgtcatgcatgtcctggaggtggtgcttgtggtggtatgtatactgcaaatacaatggctagctgtgccgaagctatgggtatgacattacccggttcttcttcttaccttgctggctcacctgagaagtttgcagaatgcgaagctgcaggtagtgctataaagcgacttttggttgacgacattaaacctcgcgacatcatgacacgttctgcttttgaaaatgctatggtcttgacgatgactcttggtggctctaccaactctgttcttcatttgatcgcaattgctaagtctgttggtatcactttaactttggatgatttccaagccgtcagtaaccgtacaccgtttattgccgatatgaagcctagcgggaagtacgttatggaagatttgttcgctatcggaggtattccttcagtacttaaatatctccatgctgaaggtctcatcgatggttctaatattaccgttactggtaaaactctcgctgagaacctacgaggattcaaggaccttgccgaaggtcaaaagatcattagacctttgagcaaccccatcaagaccgagggtcatttacgtgtcctccgtggttctttagcccctgaaggttctgtcgcaaagattactggcaaagagggcttgaacttcaccggcaaagctcgtgtttttgatgccgaaaacgattttattgctgccttagagcgtggtgagttcaagaagggcgagaagactgtcgtcattattcgttttgagggaccaaaaggtggacctggtatgccggaaatgttaaagccttcaagtgctattatgggagctggtcttggaaaggatgttgcacttttgactgacggtcgtttcagtggtggctctcacggatttttgattggacacgttgatcccgaagcacaagttggaggccctattgctcttgttcaggacggcgatgtcattgaaatcaatgctgtaaagaacactttagatttgatggttgatgagaaggagatggcgagacgccgcagtgtttggaaggcacctcctttgaagtaccaacaaggaacccttttaaaatatgctcgcaacgttagcactgcctccaagggtgctgttacagattccttagagtaa

SEQ ID NO: 10495 - protein, 598 aa, Schizosaccharomyces pombe
MMFCKLLRCQNGIASKRAALSLKGFKTSSINLVEKKLNKYSETITGPKSQGASQAMLYATGLNEEDMKKPQVGIASCWYEGNPCNMHLLDLGRRVKEGVKKAGLTGFQFNTIGVSDGISMGTTGMRYSLQSREIIADSIETVMQGQWYDANVSIPGCDKNMPGCLIAMGRFNRPSIMVYGGSIRAGHSPCQNNAPIDIVSAFQSYGEFITGKIDEPTRHDIIRHACPGGGACGGMYTANTMASCAEAMGMTLPGSSSYLAGSPEKFAECEAAGSAIKRLLVDDIKPRDIMTRSAFENAMVLTMTLGGSTNSVLHLIAIAKSVGITLTLDDFQAVSNRTPFIADMKPSGKYVMEDLFAIGGIPSVLKYLHAEGLIDGSNITVTGKTLAENLRGFKDLAEGQKIIRPLSNPIKTEGHLRVLRGSLAPEGSVAKITGKEGLNFTGKARVFDAENDFIAALERGEFKKGEKTVVIIRFEGPKGGPGMPEMLKPSSAIMGAGLGKDVALLTDGRFSGGSHGFLIGHVDPEAQVGGPIALVQDGDVIEINAVKNTLDLMVDEKEMARRRSVWKAPPLKYQQGTLLKYARNVSTASKGAVTDSLE

SEQ ID NO: 10496 - DNA, 2267 bp, Saccharomyces cerevisiae
  CDS (313)..(2070)
gttggcatttgcttctccacctcacctttttatgttcttattccctcttgtatccattccgtcctcgctgaacccatgaaaagaaaaaaaattaactagtcacatagttaaatggcgctgttcttcgctgcgagcggaaccgggcctgaaaaaaaattttctcttttcctctccagatgactcagtaatatagtagtatattatataatgtaacaaaagaagagactgaagttttattatgcattgtagcgcctgtaatctttagtaacggattcttgtatttttttgtaaacagccaagaaaaaagtagagatgggcttgttaacgaaagttgctacatctagacaattctctacaacgagatgcgttgcaaagaagctcaacaagtactcgtatatcatcactgaacctaagggccaaggtgcgtcccaggccatgctttatgccaccggtttcaagaaggaagatttcaagaagcctcaagtcggggttggttcctgttggtggtccggtaacccatgtaacatgcatctattggacttgaataacagatgttctcaatccattgaaaaagcgggtttgaaagctatgcagttcaacaccatcggtgtttcagacggtatctctatgggtactaaaggtatgagatactcgttacaaagtagagaaatcattgcagactcctttgaaaccatcatgatggcacaacactacgatgctaacatcgccatcccatcatgtgacaaaaacatgcccggtgtcatgatggccatgggtagacataacagaccttccatcatggtatatggtggtactatcttgcccggtcatccaacatgtggttcttcgaagatctctaaaaacatcgatatcgtctctgcgttccaatcctacggtgaatatatttccaagcaattcactgaagaagaaagagaagatgttgtggaacatgcatgcccaggtcctggttcttgtggtggtatgtatactgccaacacaatggcttctgccgctgaagtgctaggtttgaccattccaaactcctcttccttcccagccgtttccaaggagaagttagctgagtgtgacaacattggtgaatacatcaagaagacaatggaattgggtattttacctcgtgatatcctcacaaaagaggcttttgaaaacgccattacttatgtcgttgcaaccggtgggtccactaatgctgttttgcatttggtggctgttgctcactctgcgggtgtcaagttgtcaccagatgatttccaaagaatcagtgatactacaccattgatcggtgacttcaaaccttctggtaaatacgtcatggccgatttgattaacgttggtggtacccaatctgtgattaagtatctatatgaaaacaacatgttgcacggtaacacaatgactgttaccggtgacactttggcagaacgtgcaaagaaagcaccaagcctacctgaaggacaagagattattaagccactctcccacccaatcaaggccaacggtcacttgcaaattctgtacggttcattggcaccaggtggagctgtgggtaaaattaccggtaaggaaggtacttacttcaagggtagagcacgtgtgttcgaagaggaaggtgcctttattgaagccttggaaagaggtgaaatcaagaagggtgaaaaaaccgttgttgttatcagatatgaaggtccaagaggtgcaccaggtatgcctgaaatgctaaagccttcctctgctctgatgggttacggtttgggtaaagatgttgcattgttgactgatggtagattctctggtggttctcacgggttcttaatcggccacattgttcccgaagccgctgaaggtggtcctatcgggttggtcagagacggcgatgagattatcattgatgctgataataacaagattgacctattagtctctgataaggaaatggctcaacgtaaacaaagttgggttgcacctccacctcgttacacaagaggtactctatccaagtatgctaagttggtttccaacgcttccaacggttgtgttttagatgcttgatgcattataggccccaatcgatgaatatatatatagagattctccttttccatcatcttttttgttcgcaatcttttcatatatatatatatataaatatttattatagtccattgaatggataaacatttatttaaaaaaaaacaacgatcagtatttttttatttgaaaagtcgccttaattataatctacgaaa

SEQ ID NO: 10497 - protein, 585 aa, Saccharomyces cerevisiae
MGLLTKVATSRQFSTTRCVAKKLNKYSYIITEPKGQGASQAMLYATGFKKEDFKKPQVGVGSCWWSGNPCNMHLLDLNNRCSQSIEKAGLKAMQFNTIGVSDGISMGTKGMRYSLQSREIIADSFETIMMAQHYDANIAIPSCDKNMPGVMMAMGRHNRPSIMVYGGTILPGHPTCGSSKISKNIDIVSAFQSYGEYISKQFTEEEREDVVEHACPGPGSCGGMYTANTMASAAEVLGLTIPNSSSFPAVSKEKLAECDNIGEYIKKTMELGILPRDILTKEAFENAITYVVATGGSTNAVLHLVAVAHSAGVKLSPDDFQRISDTTPLIGDFKPSGKYVMADLINVGGTQSVIKYLYENNMLHGNTMTVTGDTLAERAKKAPSLPEGQEIIKPLSHPIKANGHLQILYGSLAPGGAVGKITGKEGTYFKGRARVFEEEGAFIEALERGEIKKGEKTVVVIRYEGPRGAPGMPEMLKPSSALMGYGLGKDVALLTDGRFSGGSHGFLIGHIVPEAAEGGPIGLVRDGDEIIIDADNNKIDLLVSDKEMAQRKQSWVAPPPRYTRGTLSKYAKLVSNASNGCVLDA

SEQ ID NO: 10498 - DNA, 1830 bp, Acinetobacter sp
  CDS (1)..(1830): transl_table=11
atgcctgattatcgttctaaaacatcgacacacggaagaaacatggctggtgcacgtggattatggcgtgcaacaggaatgaaagatgaagattttggaaaaccgattattgctgtcgtcaactcatttactcagtttgtaccaggccatgttcatttaaaagatcttgggcaaatggttgcagaacaaattcaggcggctggtggtgtagcaaaagagtttaataccattgctgtagatgacggaattgccatgggacatgatggcatgttgtattcattgccgtcacgtgatctgattgcagattctgttgaatacatggtcaatgcgcattgtgcagatgcaatggtatgtatctctaactgtgacaaaattacaccaggcatgctcatggctgcaatgcgcttgaatattccagtggttttcgtttctggcggaccaatggaagcgggtaaagtcaaattccgtggtaatgaaaaagcgattgatttagtcgatgccatggttgttgctgcggatgacagttataccgatgaagaagttcaggcatttgaacgctcggcttgcccaacatgtggttcatgctcgggaatgtttactgcaaactcaatgaactgtttaaccgaagcacttggattgtctttgccaggaaatggttcaattgttgcgacacatgccaaccgtaaaaagttattcttaaaagcgggtgagttgattgttagcttggcaaaacgctactacgaacaagatgatagcagtattttgccacgttcaattgcgaccaaagctgcctatgaaaatgccatgactttagatatcgcgatgggtggttcaaccaatacggtattacatttgcttgctgctgcaagtgaagccgaagtggacttcaccatggacgatattgatcgtttatcacgtaatgttcctgttctttgtaaggttgcaccagcaaaacaagatgttcacatggaagacgtacaccgtgcaggtgggatcatgtcaattctgggtgagctggatcgtgctaaattgctgaatacaacagtgagcactgtgcatgaaaagaccttgcaagatgcgctcaataaatgggatattattcgtaccgaagacgcagatgtctatgaatttttccgctcttcaccaggtggtgtgccaactcaagtggcattctcacaaaaccgttattattcgacacttgatggtgaccgtgaaaatggtgtgattcgtaatgccgaacatgctttttctaaagacggtggtttggctgtactttatggcaacatcgcgctagagggttgtattgtaaaaacggctggtgtagacgaatcgattttaaaatttaatggtactgcacgcgtttttgaaagtcaggatgctgcggtagaagcaatcttgggtaatgagattaaagcgggcgatgttgtcgtgattcgttacgaaggtccacgtggtggcccaggtatgcaagaaatgttatacccaaccagctatctaaaatctaaaggtttaggtaaggattgcgcccttattacagatggtcgtttctctggtggttcatcgggcttatcaattgggcatatttcgccagaagcagcagaaggcggtgctattggtttggtagaagatggtgatttgattgaaatcgatattccaaaccgtagcatgaatctaaaagtagatgatgaaacgctggctgctcgccgtaaagctcaagatgagaaaggctggaaaccagtggaagagcgtaaacgtaaggtttctaaagccctgaaagtttatgctatgcatacaacaagcgcagcgaaaggtgcggtacgcatattataa

SEQ ID NO: 10499 - protein, 609 aa, Acinetobacter sp
MPDYRSKTSTHGRNMAGARGLWRATGMKDEDFGKPIIAVVNSFTQFVPGHVHLKDLGQMVAEQIQAAGGVAKEFNTIAVDDGIAMGHDGMLYSLPSRDLIADSVEYMVNAHCADAMVCISNCDKITPGMLMAAMRLNIPVVFVSGGPMEAGKVKFRGNEKAIDLVDAMVVAADDSYTDEEVQAFERSACPTCGSCSGMFTANSMNCLTEALGLSLPGNGSIVATHANRKKLFLKAGELIVSLAKRYYEQDDSSILPRSIATKAAYENAMTLDIAMGGSTNTVLHLLAAASEAEVDFTMDDIDRLSRNVPVLCKVAPAKQDVHMEDVHRAGGIMSILGELDRAKLLNTTVSTVHEKTLQDALNKWDIIRTEDADVYEFFRSSPGGVPTQVAFSQNRYYSTLDGDRENGVIRNAEHAFSKDGGLAVLYGNIALEGCIVKTAGVDESILKFNGTARVFESQDAAVEAILGNEIKAGDVVVIRYEGPRGGPGMQEMLYPTSYLKSKGLGKDCALITDGRFSGGSSGLSIGHISPEAAEGGAIGLVEDGDLIEIDIPNRSMNLKVDDETLAARRKAQDEKGWKPVEERKRKVSKALKVYAMHTTSAAKGAVRIL

SEQ ID NO: 10500 - DNA, 1704 bp, Azoarcus sp
  CDS (1)..(1704): transl_table=11
atgtccgaccctacccgtccagcccggatcgatgaacgttcccgcaacgtgaccgaaggcgtgatgcgggcgcccaatcgatcgatgtactacgcgatgggctatcgggaaactgatttcggcaagccgatggttggcgtggcgagcgcacattcgacgatcacgccctgcaacagcgggctgcaaccgctggccgataccgtggccgcggccttgaaggaggccggggccaatccgcaactgttcggtactcccaccgtgtccgacggcatcggcatgggcaccgagggcatgaagtattcgctggtatcgcgggaagtgatcgccgacagcatcgagacctgcgtcaatgggctgtggcaggacggggtcgtcgtgatcggcggatgcgacaagaacatgcccggcggcatgatggcgcttgtccgcaccaacgtgcctggaatctatgtctatggcggcacgatcaaaccggggcattacaagggcagggatctgaacatcgtctcggttttcgaggcggtgggggaattcatcgcggggcagctcgacccggtcgatttcaaggaaatcgaaaagcgcgcctgccccggcagcggctcgtgcggcgggatgtacacggcaaacacgatgagcgccgcgttcgaggcgctcggcatgagcctgccatattcttcgacgatggccaacgaggacgctgagaagctcgcgagcgccgcggagtccgcccgggtgctggtggaggcgatcaaacgcggccttcgcccgcgcgacatcgtcacccgggaggcgatcgagaacgctgtcagcgtgatcatggcgacgggaggctcgaccaacgcggtgctgcactttctggcgattgcccacgcggccgaagtgccgtggacaatcgacgacttcgagcgcattcggcgtcgcgtgccggtcatcgtcgacatgaagccgtccgggcgctacctcgcgaccgatctccatcaggcaggcggcatcccgcaggtgatgaagctgctgctcgacgccgggctgctgcatggcgcgtgcgtcacgatcaccgggcagacgatcgcggaggtcctggagaacgtgccggcggcaccgcgtgccgatcagggcgtcatccggacgctgtccgatccgctgtacgcggagggccatctggcgatcctcaggggcaacctctcgccggaaggctgcgtggcgaagatttcgggcctgaagaatcccgccatcaccggcccggcgcgcgtcttcgactccgaggacgacgcgatggcggcgatcatggcgcgccggatcgtggagggtgacgtcgtggtaatccgctacgagggacccaagggcggccccggcatgcgcgagatgctcgccccgacgtcggcgctcgtcgggcaggggctgggagagtcggtcgggctgatcactgacggccgcttctcgggaggcacctggggcatggtcgtcggccacgtttcccccgaagcgttcgtcggtggcccgattgcgctggttcgcgaaggggactcggtcacgatcgacgcgcaccggcagctcgtccagctgaatgtcggtgatgaagagctcgcgcgccgagccgccgactggacgccgccgtccccgcgctacacccgcggcgtgctggcgaagtttgcgaagttcgccagttccgcgagcaagggcgcggttaccgatctggacttgtag

SEQ ID NO: 10501 - protein, 567 aa, Azoarcus sp
MSDPTRPARIDERSRNVTEGVMRAPNRSMYYAMGYRETDFGKPMVGVASAHSTITPCNSGLQPLADTVAAALKEAGANPQLFGTPTVSDGIGMGTEGMKYSLVSREVIADSIETCVNGLWQDGVVVIGGCDKNMPGGMMALVRTNVPGIYVYGGTIKPGHYKGRDLNIVSVFEAVGEFIAGQLDPVDFKEIEKRACPGSGSCGGMYTANTMSAAFEALGMSLPYSSTMANEDAEKLASAAESARVLVEAIKRGLRPRDIVTREAIENAVSVIMATGGSTNAVLHFLAIAHAAEVPWTIDDFERIRRRVPVIVDMKPSGRYLATDLHQAGGIPQVMKLLLDAGLLHGACVTITGQTIAEVLENVPAAPRADQGVIRTLSDPLYAEGHLAILRGNLSPEGCVAKISGLKNPAITGPARVFDSEDDAMAAIMARRIVEGDVVVIRYEGPKGGPGMREMLAPTSALVGQGLGESVGLITDGRFSGGTWGMVVGHVSPEAFVGGPIALVREGDSVTIDAHRQLVQLNVGDEELARRAADWTPPSPRYTRGVLAKFAKFASSASKGAVTDLDL

SEQ ID NO: 10502 - DNA, 1860 bp, Bordetella bronchiseptica
  CDS (1)..(1860): transl_table=11
atgccgcactatcgctcccgtacttccacccatggccgcaacatggcaggcgcgcgcgcgctatggcgcgctaccggcatgaaggatggcgatttcggcaagcccatcatcgccgtggtgaactcgttcacccagttcgtgccgggccacgtgcacctgcgcgacctgggcgcgctggtggccagcgagatcgaggccgccggcggcgtggccaaggaattcaacaccatcgcggtcgacgacggcatcgccatgggccacggcgggatgctgtactcgctgccctcgcgcgagctgatcgccgactcggtcgagtacatggtcaacgcgcactgcgccgacgccatggtgtgcatctcgaactgcgacaagatcaccccgggcatgctgatggccgcgatgcgcctgaacatcccggtggtgttcgtctcgggcgggccgatggaagcgggcaagatcacctcgcccgtcgacggcaaggtcatcgccaagctggacctggtcgacgccatgatcaaggcggccgatcccaacgtgtccgacgccgaagccgaagaggtcgagcgcagcgcgtgcccgacctgcggctcctgttccggcatgttcaccgccaactcgatgaactgcctgaccgaggcgatcggcctggcgctgccgggcaacggcaccatcgtcgccacgcacgcctggcgcaagggcctgttcgagcaggccggccgcctggtggtcgagctgtgccggcgctactacgagcaggacgacgcctcggtgctgccgcgcagcatcgccaccaagagcgcgttcgagaacgccatgacgctggacgtggcgatgggcggctcgaccaacacggtgctgcacctgctggccgccgcccaggaagccggcgtggacttcaccatgtccgacatcgatcgcatctcgcgccgcgtgccctgcctgtgcaaggcggcgccggccaccgacaaataccacatcgaggatgtgcaccgcgccggcggcatcctcggcatcctgggcgaactggggcgcgccgacctgctcgacctgtcgtgcggcaacgtgcacagcggcacgctgggcgaggcgatcaaccagtgggacatcaacggcggcgccggcgaagccgcccagaaattcttccgcgccgcgcccggcggcattccgaccacggtggccttcagccaggacgcgaccttcctgacgctggatatggaccgccagaccggctgcatccgcgacaaggcccacgcctattcgcaggacggcggcctggcggtgctgtacggcaacctggccgagaagggctgcatcgtcaagacggcgggcgtggatgagtcgcaatgggtcttcaccggccgcgcgcgcgtgttcgaaagccaggaagacgccgtcgaaggcatcctgggcgatcgcgtgcaggccggcgacgtggtcatcatccgctacgaaggccccaagggcggccccggcatgcaggagatgctctatcccacgtcctacctgaagtccaaggggctgggcaagacttgcgccttgttcaccgatggccgtttctcgggcggctcgtcgggcctggtgatcggccatgcctcgccggaagcggccgagggcggcaccatcggcctggtcgaagaaggtgacaccatcgagatcgacatccccaaccgccgcatccacctggccgtcggcgacaccgtgctggccgagcgccgcgccgccatgcaggcgcgcggcgagcaggcctggcagccggtcgaccgcgagcgcgtggtgtcccaggcgctgcgcgcctacgcggcgctggccacctcggccgaccgcggcgccgtgcgcgacctgtcgcaactgaagcgctga

SEQ ID NO: 10503 - protein, 619 aa, Bordetella bronchiseptica
MPHYRSRTSTHGRNMAGARALWRATGMKDGDFGKPIIAVVNSFTQFVPGHVHLRDLGALVASEIEAAGGVAKEFNTIAVDDGIAMGHGGMLYSLPSRELIADSVEYMVNAHCADAMVCISNCDKITPGMLMAAMRLNIPVVFVSGGPMEAGKITSPVDGKVIAKLDLVDAMIKAADPNVSDAEAEEVERSACPTCGSCSGMFTANSMNCLTEAIGLALPGNGTIVATHAWRKGLFEQAGRLVVELCRRYYEQDDASVLPRSIATKSAFENAMTLDVAMGGSTNTVLHLLAAAQEAGVDFTMSDIDRISRRVPCLCKAAPATDKYHIEDVHRAGGILGILGELGRADLLDLSCGNVHSGTLGEAINQWDINGGAGEAAQKFFRAAPGGIPTTVAFSQDATFLTLDMDRQTGCIRDKAHAYSQDGGLAVLYGNLAEKGCIVKTAGVDESQWVFTGRARVFESQEDAVEGILGDRVQAGDVVIIRYEGPKGGPGMQEMLYPTSYLKSKGLGKTCALFTDGRFSGGSSGLVIGHASPEAAEGGTIGLVEEGDTIEIDIPNRRIHLAVGDTVLAERRAAMQARGEQAWQPVDRERVVSQALRAYAALATSADRGAVRDLSQLKR

SEQ ID NO: 10504 - DNA, 1860 bp, Bordetella pertussis
  CDS (1)..(1860): transl_table=11
atgccgcactatcgctcccgtacttccacccatggccgcaacatggcaggcgcgcgcgcgctatggcgcgccaccggcatgaaggatggcgatttcggcaagcccatcatcgccgtggtgaactcgttcacccagttcgtgccgggccacgtgcacctgcgcgacctgggcgcgctggtggcccgcgagatcgaggccgccggcggcgtggccaaggaattcaacaccatcgcggtcgacgacggcatcgccatgggtcacggcgggatgctgtactcgctgccctcgcgcgagctgatcgccgactcggtcgagtacatggtcaacgcgcactgcgccgacgccatggtgtgcatctcgaactgcgacaagatcaccccgggcatgctgatggccgcgatgcgcctgaacatcccggtggtgttcgtctcgggcgggccgatggaagcgggcaagatcacctcgcccgtcgacggcaaggtcatcgccaagctggacctggtcgacgccatgatcaaggcggccgatcccaacgtgtccgacgccgaggccgaagaggtcgagcgcagcgcgtgcccgacctgcggctcctgttccggcatgttcaccgccaactcgatgaactgcctgaccgaggccatcggcctggcgctgccgggcaacggcaccatcgtcgccacgcacgcctggcgcaagggcctgttcgagcaggccggccgcctggtggtcgagctgtgccggcgctactacgagcaggacgacgcctcggtgctgccgcgcagcatcgccaccaagagcgcgttcgagaacgccatgacgctggacgtggcgatgggcggctcgaccaatacggtgctgcacctgctggccgccgcccaggaagccggcgtggacttcaccatgtccgacatcgatcgcatctcgcgccgcgtgccctgcctgtgcaaggcggcgccggccaccgacaaataccacatcgaggatgtgcaccgcgccggcggcatcctcggcatcctgggcgaactggggcgcgccgacctgctcgacctgtcgtgcggcaacgtgcacagcggcacgctgggcgaggcgatcaaccagtgggacatcaacggcggcgccggcgaagccgcccagaaattcttccgcgccgcgcccggcggcattccgaccacggtggccttcagccaggacgcgaccttcctgacgctggacatggaccgccagaccggctgcatccgcgacaaggcccacgcctattcgcaggacggcggcctggcggtgctgtacggcaacctggccgagaagggctgcatcgtcaagacggcgggcgtggatgagtcgcaatgggtcttcaccggccgcgcgcgcgtgttcgaaagccaggaagacgccgtcgaaggcatcctgggcgatcgcgtgcaggccggcgacgtggtcatcatccgctacgaaggccccaagggcggtcccggcatgcaggagatgctctatcccacgtcctacctgaagtccaaggggctgggcaagacttgcgccttgttcaccgatggccgtttctcgggcggctcgtcgggcctggtgatcggccacgcctcgccggaagcggccgagggcggcaccatcggcctggtcgaagaaggtgacaccatcgagatcgacatccccaaccgccgcatccacctggccgtcggcgacaccgtgctggccgagcgccgcgccgccatgcaggcgcgcggcgagcaggcctggcagccggtcgaccgcgagcgcgtggtgtcccaggcgctgcgcgcctacgcggcgctggccacttcggccgaccgcggcgccgtgcgcgacctgtcgcaactgaagcgctga

SEQ ID NO: 10505 - protein, 619 aa, Bordetella pertussis
MPHYRSRTSTHGRNMAGARALWRATGMKDGDFGKPIIAVVNSFTQFVPGHVHLRDLGALVAREIEAAGGVAKEFNTIAVDDGIAMGHGGMLYSLPSRELIADSVEYMVNAHCADAMVCISNCDKITPGMLMAAMRLNIPVVFVSGGPMEAGKITSPVDGKVIAKLDLVDAMIKAADPNVSDAEAEEVERSACPTCGSCSGMFTANSMNCLTEAIGLALPGNGTIVATHAWRKGLFEQAGRLVVELCRRYYEQDDASVLPRSIATKSAFENAMTLDVAMGGSTNTVLHLLAAAQEAGVDFTMSDIDRISRRVPCLCKAAPATDKYHIEDVHRAGGILGILGELGRADLLDLSCGNVHSGTLGEAINQWDINGGAGEAAQKFFRAAPGGIPTTVAFSQDATFLTLDMDRQTGCIRDKAHAYSQDGGLAVLYGNLAEKGCIVKTAGVDESQWVFTGRARVFESQEDAVEGILGDRVQAGDVVIIRYEGPKGGPGMQEMLYPTSYLKSKGLGKTCALFTDGRFSGGSSGLVIGHASPEAAEGGTIGLVEEGDTIEIDIPNRRIHLAVGDTVLAERRAAMQARGEQAWQPVDRERVVSQALRAYAALATSADRGAVRDLSQLKR

SEQ ID NO: 10506 - DNA, 1851 bp, Bradyrhizobium japonicum
  CDS (1)..(1851): transl_table=11
atgccagcctatcgctcccgcaccaccacccacggccgcaacatggcgggtgcccgcggcctctggcgcgcgaccggcatgaaggatgcggacttcggcaagccgatcatcgcggtcgtcaactccttcacccagttcgtgcctggccatgtccatctcaaggacctcggccagctcgtcgcccgcgagatcgagcaggccggcggcgtcgccaaggaattcaacaccatcgcggtcgatgacggtatcgccatgggccatgacggcatgctctacagcctgccgtcgcgcgagctgatcgccgacagcgtcgaatacatggccaacgcccattgcgccgacggcctcgtctgcatctccaattgcgacaagatcacgcccggcatgctgatggcggcgctgcggctcaacatcccggccgtgttcgtctcgggcgggccgatggaggccggcaaggtcaagctccagggcaagaccaaggccgtcgacctcatcgacgccatggttgccgcggcggactccaaggtcagcgacgaagacgtcaaggtgatcgagcgctcggcgtgcccgacctgcggctcctgctcgggcatgttcaccgcgaattcgatgaactgcctgaccgaagcgctcggcctcgcgctgcccggcaacggctcggtggtcgcgacccatgccgaccgcaagcggctgttcgtcgaggccggccataccatcgtcgatctcgtccgccgctattacgagcaggacgatgcctcggtgctgccgcgcaacgtcgcgaacttcaaggcgttcgagaacgcgatgacgctcgacatcgcgatgggcggctcgaccaacaccgtgctgcatctgcttgcggcggctcacgaagggcaggtcgcgttcaccatgaaggatatcgaccggctgtcgcgccgtgttcccgtgctctgcaaggtcgcgccgtcggttgccgacgtccatgtcgaggacgtgcaccgcgccggcggcatcatgggcattctcggcgagctcgatcgcgccggcctgatcgatacgtcggtctcgaccgtgcatgcgccgaccatggctgacgcgctggagcgttgggacatcaagcgctccaagagcgaggcggtgcgcaccttctatcgtgcctcgcccggcggcatcccgacgcaagtcgcattcagccaggagcgtcgctacgacgagctcgatgccgatcgcgagaagggcgtcgtgcgcgatctcgaacacgccttcagcaaggatggcggtctcgccgtgctctacggcaacctcgcacaggacggctgcatcgtgaagactgccggcgtcgacgcctcgatcctgaaattctccggccccgcgcgcgtgttcgagagccaggacgcggccgtcgaaggcattttgggcggcaaggtcgtcgccggtgaggtcgtggtcatcatctacgaaggcccgcgcggcggccccggcatgcaggaaatgctgtatccgaccagctatctgaaatcgatgggcctcggcaaagcctgcgcgctcgtcaccgacggacgcttctcgggcggctcgtccggcctgtcgatcggacatctgtcgccggaagccgccgagggcggcaacatcggcctggtgcggaccggcgaccttatcgcgatcgacattccgaaccgcagcatcacgctggaggtttccgacgaggagctcgccaagcgccgcgcgtcggaagaggcgaagggggacgccgcctggcaggcgacgggccgcaagcgcaacgtttccaccgcgctccaggcttacgctgcgctcaccaccagcgccgcgcgcggcgcggtgcgcgaagtgaagcgccgctcgaactga

SEQ ID NO: 10507 - protein, 616 aa, Bradyrhizobium japonicum
MPAYRSRTTTHGRNMAGARGLWRATGMKDADFGKPIIAVVNSFTQFVPGHVHLKDLGQLVAREIEQAGGVAKEFNTIAVDDGIAMGHDGMLYSLPSRELIADSVEYMANAHCADGLVCISNCDKITPGMLMAALRLNIPAVFVSGGPMEAGKVKLQGKTKAVDLIDAMVAAADSKVSDEDVKVIERSACPTCGSCSGMFTANSMNCLTEALGLALPGNGSVVATHADRKRLFVEAGHTIVDLVRRYYEQDDASVLPRNVANFKAFENAMTLDIAMGGSTNTVLHLLAAAHEGQVAFTMKDIDRLSRRVPVLCKVAPSVADVHVEDVHRAGGIMGILGELDRAGLIDTSVSTVHAPTMADALERWDIKRSKSEAVRTFYRASPGGIPTQVAFSQERRYDELDADREKGVVRDLEHAFSKDGGLAVLYGNLAQDGCIVKTAGVDASILKFSGPARVFESQDAAVEGILGGKVVAGEVVVIIYEGPRGGPGMQEMLYPTSYLKSMGLGKACALVTDGRFSGGSSGLSIGHLSPEAAEGGNIGLVRTGDLIAIDIPNRSITLEVSDEELAKRRASEEAKGDAAWQATGRKRNVSTALQAYAALTTSAARGAVREVKRRSN

SEQ ID NO: 10508 - DNA, 1860 bp, Burkholderia sp
  CDS (1)..(1860): transl_table=11
atgcccacttaccgttccaaaacctccaccgcaggccgcaacatggcaggtgcgcgctcgctctggcgcgccaccggcatgaaagacgacgatttctcgaagccgatcatcgcggtcgtcaactcgttcacccagttcgtgccggggcacgtgcacctgaaggatctcggccagctcgtcgcgcgcgagatcgaggctgccggcggcgtcgcgaaggaattcaacacgatcgcggtcgacgacggcatcgcgatgggccacgacggcatgctgtattcgctgccgagccgcgacatcatcgccgactcggtcgaatacatggtgaacgcgcactgcgcggatgcgatggtgtgcatctcgaactgcgacaagatcacgccggggatgctgatggccgcgatgcgcctgaacatcccggtgatcttcgtgtcgggcggcccgatggaagcgggcaagacgcgcctcgcgaacccggtcaccaaggccatcgaagtgaagaagctcgacctcgtcgacgcgatggtgattgcggtcgacccgtcgtattccgacgctgaagtcgccgaagtcgaacgctcggcctgcccgacttgcggctcgtgctcgggcatgttcaccgcgaactcgatgaactgcctgaccgaagcgctcggcctgtcgctgcccggcaacggcacggtggtggccacgcacgccgaccgcgagcaactgttcaagcgcgccggccgtcgcatcgtcgaactcacccgccagcactacgagcaggacgacgaacgcgtgttgccgcgctcggtgggcttcaaggcgttcgagaacgcgatgacgctcgacatcgcgatgggcggctcgaccaacacgatcctgcacctgctggcgatcgcgcaggaagccggcatcgacttcacgatgaaggacatcgaccgcctgtcgcgcgtcgtgccgcagctgtgcaaggtcgcaccgaacacgaacaagtaccacatcgaggacgtgcaccgcgcaggcggcatcatggcgatcctcggcgagctcgaccgcgccggcaagctgcacaccgacgtgccgaccgtacacacgccgtcgctgaaggatgcgctcgaccagtgggacatcgtccgcacgcaggacgatgcggtccgcacgttctaccaggccggcccggccggcgtcccgacgcaggtcgcgttcagccagaacacgcgctggccgagcctcgacctcgatcgcgccgaaggctgcatccgctcgtacgagcatgcgttctcgaaggaaggcggcctcgccgtgctgacgggcaacatcgcgctcgacggctgcgtggtgaagacggccggcgtcgacgagagcattctcgtgttcgaaggcacggcgcacgtgaccgaatcgcaggacgaagcagtcgaaaacatcctgaacgacaaggtcaaggcgggcgacgtggtgatcgtgcgctacgaaggcccgaagggtggccccggcatgcaggaaatgctctacccgaccagctacatcaagtcgaagggcctcggcaaggcatgcgcgctgctgacggacggccgtttctcgggcggcacgtcgggcctgtcgatcggccattgctcgccggaagcggcagcgggcggcgcgatcggcctcgtgcgcgacggcgacaagatccgcatcgacatcccgaaccgcacgatcaacgtgctggtgtcggacgaggaactggcgcgccgccgcgaagagcagaacgcgaagggctggaagccggcgcaaccgcgtccgcgcaaggtgtccgctgcgctgaaggcctacgcgaagctggtcatgtccgccgacaagggggccgtgcgcgacctgtcgctgctcgacgactga

SEQ ID NO: 10509 - protein, 619 aa, Burkholderia sp
MPTYRSKTSTAGRNMAGARSLWRATGMKDDDFSKPIIAVVNSFTQFVPGHVHLKDLGQLVAREIEAAGGVAKEFNTIAVDDGIAMGHDGMLYSLPSRDIIADSVEYMVNAHCADAMVCISNCDKITPGMLMAAMRLNIPVIFVSGGPMEAGKTRLANPVTKAIEVKKLDLVDAMVIAVDPSYSDAEVAEVERSACPTCGSCSGMFTANSMNCLTEALGLSLPGNGTVVATHADREQLFKRAGRRIVELTRQHYEQDDERVLPRSVGFKAFENAMTLDIAMGGSTNTILHLLAIAQEAGIDFTMKDIDRLSRVVPQLCKVAPNTNKYHIEDVHRAGGIMAILGELDRAGKLHTDVPTVHTPSLKDALDQWDIVRTQDDAVRTFYQAGPAGVPTQVAFSQNTRWPSLDLDRAEGCIRSYEHAFSKEGGLAVLTGNIALDGCVVKTAGVDESILVFEGTAHVTESQDEAVENILNDKVKAGDVVIVRYEGPKGGPGMQEMLYPTSYIKSKGLGKACALLTDGRFSGGTSGLSIGHCSPEAAAGGAIGLVRDGDKIRIDIPNRTINVLVSDEELARRREEQNAKGWKPAQPRPRKVSAALKAYAKLVMSADKGAVRDLSLLDD

SEQ ID NO: 10510 - DNA, 1662 bp, Methanosarcina acetivorans
  CDS (1)..(1662): transl_table=11
atgagaagcgccattattaaagaggggcctgaacgtgctgctaatcgttccctcctgaaagcaaccggggttacggattcggaaatgaagaaaccgttcatagcggttgtcaattcctggaatgaaatagtccctggccatattcacctggataaacttgctgaagctgttaaagccgggatcaggaacgcagggggagttccttttgagttccataccataggagtctgcgatgggcttgcaatggggcatgagggtatgaaatattccctcccgagcagggaggttatagaggacacgatcgaactgatggtcagagcccaccagtttgacggaatggtccttatccctacctgtgataagatcgtgcctggacatctgatggcagcaggcaggcttgatattcctgccattgttgtaaccggagggccaatgctcccaggatacgtggatgacaaatacaccgacctcatctcagtctttgaaggggtcggagcctatagcgcaggcaaactttccgaagccgaacttaaaaggcttgaaaacctgtcctgtgcaggagcaggttcctgtgccgggatgtttactgcaaacacaatggcctgcatgactgaagccctcgggctgagcctacccggctgtgcaactgcccatgcagtggatgcaaaaaaggttcgtattgccaaggaatccggagagcgtattgttgcgcttgtaaaagagaacctgaccccgaggaagattgttactcagaagtcctttgaaaatgccataatggtcgatatggcagtcggaggaagcacaaacaccacattacatcttcctgcccttgcccatgagttcgggcttgagctgccccttaagacctttgatgaactgagcaggacaactccccacctgatttccctccgacccggaggtcccaatttcatgttgcacttcgacagggcaggcggagtcgaggctgtcgtgcagaggcttgcttcaaaactccaccttgaccagcttacagtcaacggcaaaactatcggggaaaacctggacgagcttgaaatagttaacccgaagctgaatgcggagatcattacaaccctcgaaaacccaatccatgccgaaggaggaattgcagtcctcaaaggcagccttgctccagacggctcagttgtcaaacaggctgcagttgacccgaaaatgcgcgtccatacgggtcctgcaaaagtgtatgactgtgaagaagacgccatgaagagcatccttgcaggagatgtaaaacccggagatattgtcgttatccggtacgaaggccccaaaggaggaccaggcatgcgcgaaatgcttgcagccacagccgcaatcggaggcatgggcctgctcgagtccgtggctctgataactgatgggcgcttctccggaggtacccgcgggccatgtatagggcatgtctctcctgaagccagcgaaggagggccaatagggcttgtaaaagatggggaccttatcgaaatcaacattcctgaaaggatcctgaatctgaaagtcactgaagaagagctcgaaaagcgtaaagctgcctttgtgccccctaaaaaagaggtcacgggttaccttgccaggtaccagcgttccgtccattccgcaaacactggcggaatagtggactga

SEQ ID NO: 10511 - protein, 553 aa, Methanosarcina acetivorans
MRSAIIKEGPERAANRSLLKATGVTDSEMKKPFIAVVNSWNEIVPGHIHLDKLAEAVKAGIRNAGGVPFEFHTIGVCDGLAMGHEGMKYSLPSREVIEDTIELMVRAHQFDGMVLIPTCDKIVPGHLMAAGRLDIPAIVVTGGPMLPGYVDDKYTDLISVFEGVGAYSAGKLSEAELKRLENLSCAGAGSCAGMFTANTMACMTEALGLSLPGCATAHAVDAKKVRIAKESGERIVALVKENLTPRKIVTQKSFENAIMVDMAVGGSTNTTLHLPALAHEFGLELPLKTFDELSRTTPHLISLRPGGPNFMLHFDRAGGVEAVVQRLASKLHLDQLTVNGKTIGENLDELEIVNPKLNAEIITTLENPIHAEGGIAVLKGSLAPDGSVVKQAAVDPKMRVHTGPAKVYDCEEDAMKSILAGDVKPGDIVVIRYEGPKGGPGMREMLAATAAIGGMGLLESVALITDGRFSGGTRGPCIGHVSPEASEGGPIGLVKDGDLIEINIPERILNLKVTEEELEKRKAAFVPPKKEVTGYLARYQRSVHSANTGGIVD

SEQ ID NO: 10512 - DNA, 1707 bp, Nocardia farcinica
  CDS (1)..(1707): transl_table=11
gtggccgagcagacgaacacccccgacctcaagccccgcagccgcgacgtcaccgacgggctggaacgcaccgccgcccgcggcatgctgcgcgcggtgggcatgggcgacgacgactgggagaagccgcagatcggcgtcgcctcctcctggaacgagatcaccccgtgcaacctgtcgctggaccggctcgcgcagggctgcaaggacggcgtgttcgccgccggtggcttcccgatgcagttcggcaccatctcggtctccgacggcatctcgatgggccacgagggcatgcacttctcgctggtgtcgcgcgaagtgatcgccgacagcgtggagacggtgatgcaggccgagcggctcgacggctcggtgctgctggccgggtgcgacaagtcgctgcccggcatgctgatggccgcggcccgcctcgacctggccagcgtgttcctctacgcgggctcgatcctgcccggcatcgccaagctctccgacggcaccgagcgcgaggtgacgatcatcgacgcgttcgaggcggtcggagcgtgcgcgcgcgggctgatgagccgggccgacgtcgacgccatcgaacgcgcgatctgtcccggcgagggcgcctgcggcggcatgtacaccgccaacacgatggccagcgcggccgaggcgctgggcatgtcgctgcccggcagcgccgcaccgcccgccaccgaccgccgccgcgacgggtacgcccgccgcagcggtcaggccgtggtcgagctgctgcgccgcggcatcaccgcccgcgacatcctcaccaaggaggcgttcgagaacgccatcgcggtggtgatggccttcggcggctcgaccaacgcggtgctgcacttgctcgcgatcgcgcacgaggcgcgggtggagctcaccctcgacgatttcgcgcgggtgggcaggcgggtgccgcacctggccgacgtcaagccgttcggcgcgcatgtgatgaccgatgtcgaccgcatcggcggcgtgccggtgatgatgaagaccctgctcgacgccgggctgctgcacggtgactgcctcaccgtcaccggccgcaccgtcgcggagaacctcgcccacatcgccccgcccgacccggacggcaaggtggtgcgcgcgctgaacgatccgatccatcccaccggcggcatcaccatcctgtccggctcgctggcgcccggcggggcggtggtgaaatccgccggtttcgacgaggacgtcttcaccggcacggccagggtcttcgatcgcgaacgcgccgcgatggacgcgctcgaggacggcaccatcaccgcaggcgacgtggtggtcatccgctacgagggccccaagggcggacccggcatgcgcgagatgctggccatcaccgccgccatcaagggcgcgggcctgggcaaggacgtgctgctgctcaccgacggccgcttctccggtggcaccaccggactgtgtgtcgggcacgtcgcgcccgaggcggtggacggtggtccgatcgcgttcgtccgcgacggcgaccgcatccggctcgacgtggccgcgggcaccctggacctgctggtggagcccgccgaactcgagcggcgcaaacaggactggcgaccgctgccgccgcgctacacccgcggcgtgctcgccaagtacaccaagctggtcggttcggcctcggtcggcgcggtctgcgactga

SEQ ID NO: 10513 - protein, 568 aa, Nocardia farcinica
MAEQTNTPDLKPRSRDVTDGLERTAARGMLRAVGMGDDDWEKPQIGVASSWNEITPCNLSLDRLAQGCKDGVFAAGGFPMQFGTISVSDGISMGHEGMHFSLVSREVIADSVETVMQAERLDGSVLLAGCDKSLPGMLMAAARLDLASVFLYAGSILPGIAKLSDGTEREVTIIDAFEAVGACARGLMSRADVDAIERAICPGEGACGGMYTANTMASAAEALGMSLPGSAAPPATDRRRDGYARRSGQAVVELLRRGITARDILTKEAFENAIAVVMAFGGSTNAVLHLLAIAHEARVELTLDDFARVGRRVPHLADVKPFGAHVMTDVDRIGGVPVMMKTLLDAGLLHGDCLTVTGRTVAENLAHIAPPDPDGKVVRALNDPIHPTGGITILSGSLAPGGAVVKSAGFDEDVFTGTARVFDRERAAMDALEDGTITAGDVVVIRYEGPKGGPGMREMLAITAAIKGAGLGKDVLLLTDGRFSGGTTGLCVGHVAPEAVDGGPIAFVRDGDRIRLDVAAGTLDLLVEPAELERRKQDWRPLPPRYTRGVLAKYTKLVGSASVGAVCD

SEQ ID NO: 10514 - DNA, 1845 bp, Rhizobium loti
  CDS (1)..(1845): transl_table=11
atgcccgcctatcgctcccgcaccaccacccatggccgcaacatggccggcgcccgcggcctgtggcgcgcgaccggcatgaaggattcggatttcggcaagccgatcatcgccgtggtcaactccttcacccagttcgtgccgggccatgtccacttgaaggacctcggccagctggtggcgcgcgagatcgagaaggccggcggcgtcgccaaggaattcaacaccatcgcggtcgacgacggcatcgccatgggccacgacggcatgctctattcgctgccgtcgcgcgagctgatcgccgattccgtcgagtacatggtcaacgcccactgcgccgacgccatggtctgcatctccaattgcgacaagatcacccccggcatgctgatggcctcgctgcgcctcaacatcccgaccgtcttcgtctccggcgggccgatggaagccggcaaggtggtgctggccggcaagactcaggcgctcgacctggtcgacgccatggtcgcggccgccgacgacaagatctccgacgaggacgtcaaggtcatcgagcgctcggcttgcccgacctgcggttcctgctcgggcatgttcaccgccaattccatgaactgcctgaccgaggcgctcggcctgtcgttgccgggcaacggctcgacgctggccacgcatgccgaccgcaagcggctgttcgtcgaggccggccatctcatcgtcgatctggcccagcgctattacgagcaggatgacgaaacggcactgccgcgcagcatcgcctcgaaaggcgccttcgaaaacgccatgacgctcgacatcgccatgggcggctcgaccaacaccgtgctgcacatcctggccgccgcacatgagggcgaggtcgacttcaccatggaggatatcgaccggctgtcgcggcgggttccagtgctctgcaaggtggcgccggccaagtccgacgtccacatggaagacgtccaccgtgccggcggcatcatggcgatcctcggccagctcgacaatgccgggctgatcaaccgcgacctgccgacagtgcacacatcaagcctcggcgaggcgcttgaccattgggatatttcccgcacctccagccagaacgtccgcgacttcttcctcgccgcgcccggcggcgtgccgacccaggtcgccttcagccaggaccgccgctgggacgagctcgatctcgatcgtgaaaagggtgtcatccgttcggcggaaacgccgttctcgaaagatggcggtcttgccgtgctgaaaggcaatctggcgctcgacggctgcatcgtgaagacggccggtgtcgatgagtcgatcctgaaattcaccggcccggcgcgggtgttcgaaagccaggacgcttcggtcaaggcaatcctctccaacgagatcaaggccggcgacgtcgttgtcatccgctatgagggcccgcgcggcggccccggcatgcaggaaatgctctacccgaccagctatctgaagtcgaagggcctgggcaaggcctgcgcgctggtcaccgatggccgcttctccggcggcacgtcgggcctgtcgatcggccatgcgtcgccggaagccgccgaaggcggcacgatcgggctggtccaagagggcgacacgatcgagatcgatatccccaaccgcaccatccgcctcgctgtcagcgacgccgaactcgacagccgccgggcggcgatggaagccaagggcgccctggcctggaagcccgaggaaaagcgcaagcgcaaggtgacgaccgcgctgcgcgcctacgccgccttcgccaccagcgccgacaagggcgcggtgcggcacgtgccggagtga

SEQ ID NO: 10515 - protein, 614 aa, Rhizobium loti
MPAYRSRTTTHGRNMAGARGLWRATGMKDSDFGKPIIAVVNSFTQFVPGHVHLKDLGQLVAREIEKAGGVAKEFNTIAVDDGIAMGHDGMLYSLPSRELIADSVEYMVNAHCADAMVCISNCDKITPGMLMASLRLNIPTVFVSGGPMEAGKVVLAGKTQALDLVDAMVAAADDKISDEDVKVIERSACPTCGSCSGMFTANSMNCLTEALGLSLPGNGSTLATHADRKRLFVEAGHLIVDLAQRYYEQDDETALPRSIASKGAFENAMTLDIAMGGSTNTVLHILAAAHEGEVDFTMEDIDRLSRRVPVLCKVAPAKSDVHMEDVHRAGGIMAILGQLDNAGLINRDLPTVHTSSLGEALDHWDISRTSSQNVRDFFLAAPGGVPTQVAFSQDRRWDELDLDREKGVIRSAETPFSKDGGLAVLKGNLALDGCIVKTAGVDESILKFTGPARVFESQDASVKAILSNEIKAGDVVVIRYEGPRGGPGMQEMLYPTSYLKSKGLGKACALVTDGRFSGGTSGLSIGHASPEAAEGGTIGLVQEGDTIEIDIPNRTIRLAVSDAELDSRRAAMEAKGALAWKPEEKRKRKVTTALRAYAAFATSADKGAVRHVPE

SEQ ID NO: 10516 - DNA, 1725 bp, Bradyrhizobium japonicum
  CDS (1)..(1725): transl_table=11
atgaacgcaaagaccaacatcaagcagaggctgccgagccgtcacgtgacggaaggccctgcgcgcgcgccccatcgctcctacttctacgccatgggtctgacgacggagcagatccaccagcccttcgtcggcgtcgcctcctgctggaacgaggccgcgccctgcaacatcgctttgatgcgccaggcgcaggcggtgaagaagggcgtcgcgcatgccggcggcacaccccgcgaattctgcaccatcaccgtgaccgacggcatcgccatgggccatgacggcatgcgctcctcgctgccgtcgcgcgaatgcatcgccgattccgtcgagctgaccgtccgcggccatgcctatgacgccctcgtcggccttgccggctgcgacaagtcgctgccgggcatgatgatggcgatggttcgcctcaacgtgccctcgatcttcatctatggcggctcgatcctgcccggcaacttccgcgggcagcaggtcaccgtgcaggacatgttcgaggccgtcggcaagcactcggtcggcgccatgtcggacgaggatctcgacgagatcgagcgcgtggcgtgcccctcggcgggtgcctgcggcgcgcagttcacggccaacaccatggcgaccgtctcggaagccatcggccttgcgctgccttactcggccggtgctccggcaccgtatgaaatccgcgacgccttctgcatgaccgcgggcgagaaggtgatggagctgatcgaccagaacatccggccgcgcgacatcgtcacccgcaaggcgctggagaatgcggccgccgtggtcgcggcctccggcggctcgaccaatgctgcgctgcacctgccggcgatcgcgcacgagtgcggcatcaagtttgacttattcgacgtcgccgaaatcttcaaaaagacaccatatgtcgcggatttgaagccgggcggccgttatgtcgccaaagacatgtttgaagtaggtggcatcccgcttctgatgaagacgctgctcgacaacggatttctccacggcgactgcattacggtcaccggtcgaacgatcgccgaaaacctcaagagcgtgaagtggaatccgcaccaggatgtggtgcacccggcagacaagccgatcaccgtcaccggtggtgtggtgggtctgaagggcaatttggcgccagaaggtgcgatcgtgaaagtcgcgggaatgtccaacctgaggtttaccggtccggcacgctgcttcgaccgggaagaggacgccttcgaggccgtccagaaccgcacataccgcgaaggcgaagtcatcgtgatccgctacgagggccccaagggcggccccggcatgcgggaaatgctccagaccaccgcggcgctgaccgggcagggcatgggcggcaagatcgcgctcatcactgacggccgcttctccggcgccacccgcggcttctgcatcggccatgtcgggccggaagccgccatcggcggcccgatcgggctgctcgaggatggcgacatcatcgagatcgacgcggtcgccggcacccttaacgtaaaattgagcgaccaggagcttgcccagcgcaagaccaaatggagcgctcgcgcgactaaccacacgacgggcgcgctctggaaatatgctcagcaggttggaccagcggtcgggggggcggtcacccatccgggcggtgcgcacgagaaacagtgctatgcggacatctag

SEQ ID NO: 10517 - protein, 574 aa, Bradyrhizobium japonicum
MNAKTNIKQRLPSRHVTEGPARAPHRSYFYAMGLTTEQIHQPFVGVASCWNEAAPCNIALMRQAQAVKKGVAHAGGTPREFCTITVTDGIAMGHDGMRSSLPSRECIADSVELTVRGHAYDALVGLAGCDKSLPGMMMAMVRLNVPSIFIYGGSILPGNFRGQQVTVQDMFEAVGKHSVGAMSDEDLDEIERVACPSAGACGAQFTANTMATVSEAIGLALPYSAGAPAPYEIRDAFCMTAGEKVMELIDQNIRPRDIVTRKALENAAAVVAASGGSTNAALHLPAIAHECGIKFDLFDVAEIFKKTPYVADLKPGGRYVAKDMFEVGGIPLLMKTLLDNGFLHGDCITVTGRTIAENLKSVKWNPHQDVVHPADKPITVTGGVVGLKGNLAPEGAIVKVAGMSNLRFTGPARCFDREEDAFEAVQNRTYREGEVIVIRYEGPKGGPGMREMLQTTAALTGQGMGGKIALITDGRFSGATRGFCIGHVGPEAAIGGPIGLLEDGDIIEIDAVAGTLNVKLSDQELAQRKTKWSARATNHTTGALWKYAQQVGPAVGGAVTHPGGAHEKQCYADI

SEQ ID NO: 10518 - DNA, 1674 bp, Burkholderia sp
  CDS (1)..(1674): transl_table=11
atggcttacaaccgtcgctcgaagcacatcacgcaaggtgtggcccgctcgccgaaccgctcgatgtattacgcactcggctaccagaaggacgatttcgacaagccgatggtcggcatcgcgaacggccattcgacgatcacgccgtgcaattccggcctgcagcgcctgtcggacgcggccgtcgcggccgtgaaggcggccgatgcgaacccgcagatcttcggcacgccgacgatttcggacggcatgtcgatgggcaccgaaggcatgaagtactcgctcgtgtcgcgcgaggtgatcgccgactgcatcgaaacctgcgtgcaggggcaatggatggacggcgtggtcgtcgttggcggctgcgacaagaacatgccgggcgggatgatcgcgctcgcacgcctgaacgtgccgggcatctacgtgtacggcggcacgatccgccccggcaactggaaaggccgggacctgacgatcgtgtcgtcgttcgaggccgtcggcgaattcacggcgggccggatgtcgcaggaggatttcgaaggcgtcgagcggaacgcatgcccgacgtcgggctcctgcggcgggatgtacaccgcgaacacgatgagctcgtcgttcgaggcgctcgggatgtcgctgctgtactcgtcgacgatggcgaaccccgaccaggagaaggtcgattcggccgccgaatcggcacgcgtgctcgtcgaggccgtgaagcgcgacctgaagccgcgcgacatcatcacgaaggagtcgatcgagaacgcggtgtcggtgatcatggcgacgggcggctcgaccaatgcggtgctgcactacctcgcgatcgcgcacgcggccgaggtcgactggacgatcgaggacttcgagcgcatccgcaagcgcgtgcccgtgatctgcgacctgaagccgtcggggaagtacgtcgccaccgacctgcaccgggccggcgggatcccgcaggtgttgaagatcctgctcgacgcggggctgctgcacggcgactgcatgacgatcaccggccgcacgattgccgacgaactgaaggacgtgccgagcgtgccgcgcgccgaccaggacgtgatcttcccgatcgaccgcgcgctgtacaaggaaggccaccttgccatcctgaaaggcaatctcgcggaagacggcgcggtcgcgaagatcaccggcctgaagaacccggtgatcacgggcccggcacgcgtgttcgacgacgagcagagtgcgatggatgcgattctcggcgaccggatccgcgcaggcgacatcctcgtgctgcgctacctcggcccgaagggcggccccggcatgccggaaatgctcgcgccgacgtccgcgatcatcggcaaggggctcggcgaatcggtcggcttcatcaccgacggccgcttctcgggcgggacctgggggatggtggtcggccacgtcgcgcccgaggcgttcgtcggcggcacgatcgcgctcgtgcaggaaggcgactcgatcacgatcgacgcgcaccggctgctgctgcagctgaacgtcgacgatgcggaactcgcgcgccgccgcgccgcatggcaacagccggcgccacgctacacccgcggcgtgctcgcgaaattcgccgcgctcgcccgcccggcgaaccagggcgccgtcacgggttga

SEQ ID NO: 10519 - protein, 557 aa, Burkholderia sp
MAYNRRSKHITQGVARSPNRSMYYALGYQKDDFDKPMVGIANGHSTITPCNSGLQRLSDAAVAAVKAADANPQIFGTPTISDGMSMGTEGMKYSLVSREVIADCIETCVQGQWMDGVVVVGGCDKNMPGGMIALARLNVPGIYVYGGTIRPGNWKGRDLTIVSSFEAVGEFTAGRMSQEDFEGVERNACPTSGSCGGMYTANTMSSSFEALGMSLLYSSTMANPDQEKVDSAAESARVLVEAVKRDLKPRDIITKESIENAVSVIMATGGSTNAVLHYLAIAHAAEVDWTIEDFERIRKRVPVICDLKPSGKYVATDLHRAGGIPQVLKILLDAGLLHGDCMTITGRTIADELKDVPSVPRADQDVIFPIDRALYKEGHLAILKGNLAEDGAVAKITGLKNPVITGPARVFDDEQSAMDAILGDRIRAGDILVLRYLGPKGGPGMPEMLAPTSAIIGKGLGESVGFITDGRFSGGTWGMVVGHVAPEAFVGGTIALVQEGDSITIDAHRLLLQLNVDDAELARRRAAWQQPAPRYTRGVLAKFAALARPANQGAVTG

SEQ ID NO: 10520 - DNA, 1890 bp, Nocardia farcinica
  CDS (1)..(1890): transl_table=11
atgccagaacttcgttccaggacggtcacccacgggcggaacatggccggtgcgcgggcattgatgcgcgcttccggcgtgcccgccgccgacatcggcgccaaaccggtcgtcgccgtcgccaacagtttcaccgagttcgttcccggccacacccatctgcaaccggtcgggcgcatcgtcggcgacgcgatccgccgggcgggcggcattccgcgcgagttcaacaccatcgccgtcgacgacggtatcgcgatggggcaccagggcatgctgtactcgctgccctcgcgcgacctcatcgccgattcgatcgaatacatggtccaggcgcactgcgccgacgcgctggtgtgtatctccaactgcgacaagatcaccccggggatgctgctggcggcgatgcggttggacattccgaccgtgttcgtctcgggcgggccgatggagggcgggcgcgccacgctcgccgacggcacggtgcgccggctcgacctgatcaccgccatgagcgaggccgtcaacgacgccacctccgacgccgacctggccaccatcgaggagaacgcctgccccacctgcggctcgtgcgcggggatgttcaccgcgaactcgatgaactgcctggtggaggcgctgggcttggcgctgccgggcaacggcacgacgctggccacccacaccgcccgacgcgacctgtacgaggcggccggggcaacgatcatggcgatcacccgccgctactacgaccgcgacgacgccaccgtcctgccgcgcgcgatcgcctcacgggcggcgttcgacaacgcgatggcgctggacctggcgatgggcgggtccaccaacaccgtgctgcatctgctggccgccgcgcacgaggccgggctcgactacaccctggccgacatcgagaaacggtcccgtgcggtgccctgtctgtgcaaggtggcgcccaacggcagccatctgatggaggatgtgcaccgcgcgggcgggattccggcgatcctcggtgaattgcgccggggcgggcacctgcatacgacggtgcgggcggtccacagcgagtcgctggacgggtggctcgccgaatgggatgtgcgcgggccgaatccggcgcaggcggcggtcgacctgttccacgccgcgcccggcggggtgcgttcggcgacggcgttctcgcaatcggcgcggtgggcggcactggacctcgatgccgaatcggggtgcatccgcgacgtggcgcacgcctactccgaggatggtggactggcggtgctgcgcggcaatctcgccgtcgacggagccgtggtgaagtccgccggtgttcccgccgacctgcacgtcttcaccggcgaggcggtggtcgccgaatcgcaggaggaggcggtgacggcggttctctccgggcgggtgcggccgggcacggtactggtgatccggtacgagggaccgcgcggtgggccgggcatgcaggaaatgctgtatcccacggcctatttgaagggccgtgggctggcggggtcggtcgcggtggtcaccgacgggcggttctccggcgggagttccggtctgtcgatcggccacgtctccccggaagccgcggcgggcggcaccatcgccgcggtcaccgacggcgacccgatcaccatcgacatcccgtcccgcaccctccggctcgaggtcgacgacgccgaaatcgcccgccgcctggcccaccgacgccgcaccggctaccgcccgcgcagccgccaccgtccgctgagcaccgccctgcgcgcctacgcgctgctcgcgcaatccgccgacaagggcggtgtgcgccggttgccgcccgacgagctcggcgggccggaggcggcattcgacacgcagacccgcgccggctga

SEQ ID NO: 10521 - protein, 629 aa, Nocardia farcinica
MPELRSRTVTHGRNMAGARALMRASGVPAADIGAKPVVAVANSFTEFVPGHTHLQPVGRIVGDAIRRAGGIPREFNTIAVDDGIAMGHQGMLYSLPSRDLIADSIEYMVQAHCADALVCISNCDKITPGMLLAAMRLDIPTVFVSGGPMEGGRATLADGTVRRLDLITAMSEAVNDATSDADLATIEENACPTCGSCAGMFTANSMNCLVEALGLALPGNGTTLATHTARRDLYEAAGATIMAITRRYYDRDDATVLPRAIASRAAFDNAMALDLAMGGSTNTVLHLLAAAHEAGLDYTLADIEKRSRAVPCLCKVAPNGSHLMEDVHRAGGIPAILGELRRGGHLHTTVRAVHSESLDGWLAEWDVRGPNPAQAAVDLFHAAPGGVRSATAFSQSARWAALDLDAESGCIRDVAHAYSEDGGLAVLRGNLAVDGAVVKSAGVPADLHVFTGEAVVAESQEEAVTAVLSGRVRPGTVLVIRYEGPRGGPGMQEMLYPTAYLKGRGLAGSVAVVTDGRFSGGSSGLSIGHVSPEAAAGGTIAAVTDGDPITIDIPSRTLRLEVDDAEIARRLAHRRRTGYRPRSRHRPLSTALRAYALLAQSADKGGVRRLPPDELGGPEAAFDTQTRAG

SEQ ID NO: 10522 - DNA, 1860 bp, Ralstonia eutropha
  CDS (1)..(1860): transl_table=11
atgcccgcataccgttccaagacctccaccgccggccgcaacatggctggggcccgctcgctgtggcgcgccaccggcatgaaagacgacgatttcaacaagccgatcatcgcggtggtgaactcgttcacccagttcgtgcccggccacgtccacctgaaggacctgggccagctcgtcgcgcgcgaaatcgaagccgctggcggcgtggccaaggagttcaacacgattgcggtcgatgacggcatcgccatgggccacgacggcatgctgtattcgctgccgagccgcgacatcatcgccgactcggtcgagtacatggtcaacgcgcactgcgccgacgccatggtgtgcatctcgaactgcgacaagatcaccccgggcatgctgatggccgccatgcgcctgaacatccccgtgatcttcgtctcgggcggcccgatggaagccggcaagacgcgcctggccaacccggtcaccaaggccgtcgaattcaagaagctcgacctggttgacgccatggtgatcgcggccgacccggcctattccgacgccgacgtggccgaggtcgagcgctccgcctgccccacctgcggctcgtgctcgggcatgttcacggccaattcgatgaactgcctgaccgaagcactgggcctgtcgctgcccggcaatggcaccgtcgtcgccacgcacgcggaccgcgagcagctgttcaagcgcgcgggcagccgtatcgtcgaactggcccgccagtactacgagcaggaagacgcgcgcgtgctgccgcgttcggtcggcttcaaggcgttcgagaacgcgatgacgctggacatcgccatgggcggttccacgaataccatcctgcacctgctggcaatcgcgcaggaagcgggcatcgatttctccatgaatgacatcgaccgcctgtcgcgcgtcgtgccacagctgtgcaaggtggcgcccaacaccaacaagtaccacatcgaagacgtgcaccgcgcgggcggcatcatggccatcctgggcgagctcgagcgtgccggcaagctgcataccgacgtgccgaccgtacatgccccgtcgctcggcgacgcgctgaatcagtgggacatcgtccgcacgaaggacgaggccgtccgtcatttctacatggctggcccggccggcatcccgacgcaggtggcgttcagccagaacacgcgctggccgagcctagacctggaccgcgccgagggctgcatccgctcgtacgagcacgccttctccaaggaaggtggcctggcagtgctgcgcggcaatatcgcgctggacggctgcgtggtgaagactgccggcgtggacgaaagcatcctcgtgttcgagggttcggctcacgtgaccgaatcgcaggacgaggcggtcgagaacatcctcaacgacaaggtcaaggccggggatgtcgtgatcgtgcgctacgaaggtcccaagggcggccccggcatgcaggaaatgctctacccgacgagctacatcaagtcgaagggcctgggcaaggcttgcgcgctactcacggatggccgcttctcgggcggcacgtccgggctgtcgatcggccactgctcgccggaagcagccgccggcggcgccatcggcctcgtgcgcgacggcgacaagatccgcatcgacattccgaaccggacgatcgatgtgctcgtgtcggacgaagaactggcgcgccgccgcgaagagcagaacgccaagggctggaagccggcgaaggcacgtccgcgtaaagtgtcggccgcactgaaggcgtatgccaagctcgtcatgtcggcggacaagggcgcagtgcgcgatctgtcgttgctggacgattga

SEQ ID NO: 10523 - protein, 619 aa, Ralstonia eutropha
MPAYRSKTSTAGRNMAGARSLWRATGMKDDDFNKPIIAVVNSFTQFVPGHVHLKDLGQLVAREIEAAGGVAKEFNTIAVDDGIAMGHDGMLYSLPSRDIIADSVEYMVNAHCADAMVCISNCDKITPGMLMAAMRLNIPVIFVSGGPMEAGKTRLANPVTKAVEFKKLDLVDAMVIAADPAYSDADVAEVERSACPTCGSCSGMFTANSMNCLTEALGLSLPGNGTVVATHADREQLFKRAGSRIVELARQYYEQEDARVLPRSVGFKAFENAMTLDIAMGGSTNTILHLLAIAQEAGIDFSMNDIDRLSRVVPQLCKVAPNTNKYHIEDVHRAGGIMAILGELERAGKLHTDVPTVHAPSLGDALNQWDIVRTKDEAVRHFYMAGPAGIPTQVAFSQNTRWPSLDLDRAEGCIRSYEHAFSKEGGLAVLRGNIALDGCVVKTAGVDESILVFEGSAHVTESQDEAVENILNDKVKAGDVVIVRYEGPKGGPGMQEMLYPTSYIKSKGLGKACALLTDGRFSGGTSGLSIGHCSPEAAAGGAIGLVRDGDKIRIDIPNRTIDVLVSDEELARRREEQNAKGWKPAKARPRKVSAALKAYAKLVMSADKGAVRDLSLLDD

SEQ ID NO: 10524 - DNA, 1749 bp, Bradyrhizobium japonicum
  CDS (1)..(1749): transl_table=11
atgaagttgcgatgtcccgccgcgtacgggacatcgcacgtagatgatgcaaatatgaagaagttgcgatcacggataacgacagacggcctcgaccgggccccgcaccgcgcattcatgcgcgcaatggggctggacgatgcggcaatcgccaagcccatggtaggcattgtcagcatgaagggcgagcagacgccctgcaacatgacccacgacttccaggtggccgcggccaagacaggtattgaggaggccggcggcacgccgcgcgaattctcgaccgtgtcggtctctgacgggatcagcatgaatcacgagggaatgaagttctccctcttttcgcgcgagctgatcgccgactcgatcgaggctgtcgttcatggtctcgcctatgacgcgttgatcggatacggcggatgcgacaagacgcttcccggcgtgatgatgggcatggttcgttgcaacgtgccgtcgattttcatctacggcggcagttcgctgccggggcgcgtggacggacgaacgctgacagtgctcgactcctacgaggctgtcggcagcttcatgaccggagagatcgatagcgccacactggagcggatcgagcgcgcctgcctgccgaccatcggtgcgtgcgcgggccagtttactgcgaacaccatgggaatggtgtcggaggcgatggggctcaccattcccaacgtctcgatggtgcccggtgtctacgccgagcgcgcgcagatctcgcgacgcgccgggcggctgatcatggaaatgctggaacgcggtgggccgctgccacgggacatcgtgacgcggaaatccctcgagaacggggcggcgatcgtcgccgctacgggcggctcgaccaacgccgcgctgcatctgcccgccatcgcgaacgaggccggcatcgcattcacgatcgacgatgtcggcgaggtctttgccaggacgccgctgatcggaaatctgcggcccggaggcaaatacacggcgaaggatgtccacgacataggtggcgccgccgtggtgatccaggagttgatcagaaccggtcatatcgacggtaactgcatcaccatcaccggccggacgcttgccgaagaatatggcgcggccaacgcgccggacggtgaggtcgtttacgcggcaagtgcgccgatcatgccggatggcggtgtcgcggtgctgaagggcaacctctgtccggacggtgcggtcatcaaggtcgcaggtttgaagagccagttcttcgagggtgtcgcgcgcgttttcgaagacgaggaggcttgcgtcgcagcggttcgcgaccgcagctacaaggcaggtgaggtcctggtgatccgcaacgaagggccggtcggcggccccggtatgcgcgagatgctcggcgtcaccgcgctgatctacgggcagggcatgggcgaaaaggtggccctgatcaccgacgggcggttctccggcgcgacccgcggcatgtgtatcggctacgtgtcccccgaagcattcgttggcggtccgttggccctcgttcgcgacggcgacaagatccggattgatgctacaaaccggcgtatggatatgctggtcgacgagccggagctcgcggcgcgccgacgtgattggaaaccacgcccgccgcgtcaccgcgcaggcgcgctcgcaaaatatgcgcgactggtcggccaggcgccgggcggagcggttacccatgaggggcccgcagaatggccctggttcgaatga

SEQ ID NO: 10525 - protein, 582 aa, Bradyrhizobium japonicum
MKLRCPAAYGTSHVDDANMKKLRSRITTDGLDRAPHRAFMRAMGLDDAAIAKPMVGIVSMKGEQTPCNMTHDFQVAAAKTGIEEAGGTPREFSTVSVSDGISMNHEGMKFSLFSRELIADSIEAVVHGLAYDALIGYGGCDKTLPGVMMGMVRCNVPSIFIYGGSSLPGRVDGRTLTVLDSYEAVGSFMTGEIDSATLERIERACLPTIGACAGQFTANTMGMVSEAMGLTIPNVSMVPGVYAERAQISRRAGRLIMEMLERGGPLPRDIVTRKSLENGAAIVAATGGSTNAALHLPAIANEAGIAFTIDDVGEVFARTPLIGNLRPGGKYTAKDVHDIGGAAVVIQELIRTGHIDGNCITITGRTLAEEYGAANAPDGEVVYAASAPIMPDGGVAVLKGNLCPDGAVIKVAGLKSQFFEGVARVFEDEEACVAAVRDRSYKAGEVLVIRNEGPVGGPGMREMLGVTALIYGQGMGEKVALITDGRFSGATRGMCIGYVSPEAFVGGPLALVRDGDKIRIDATNRRMDMLVDEPELAARRRDWKPRPPRHRAGALAKYARLVGQAPGGAVTHEGPAEWPWFE

SEQ ID NO: 10526 - DNA, 1842 bp, Nocardia farcinica
  CDS (1)..(1842): transl_table=11
atgccaccgcttcgttcacgcaccaccaccgccggacgcaatgccgcaggcgcacgcgcgctctggcgcgccaccggcctcaccgactccgatttcggcaagcccatcgtcgcgatcgcgaactcctacacccagttcgtgcccgggcacgtgcatctgaaggacgtcggggagatcgtggccgaggccgtgcgcgccgcgggtggcgtgccgcgtgagttccacaccatcgccgtcgacgacggcatcgcgatgggccacggcggcatgctgtactcgctgccgtcccgcgagatcatcgccgactcggtggaatacatggtcaacgcgcacaccgccgacgcgctggtgtgcatctccaattgcgacaagatcacccccggcatgctcaatgccgccatgcgcctgaacatcccgacggtcttcgtctccggcgggccgatggaggcgggcaaggccgtggtggtgggcggtgtggcgcaggcgcccacggacctgatcaccgcgatctcggccagtgccaacagctccgtcaccgacgagggcctgagcgaggtcgagcgcagcgcctgcccgacgtgtggatcctgctcgggcatgttcaccgcgaactcgatgaactgcctcaccgaggcgctgggtctcgcgctgccgggcaacggttccacgctggccacccacgccgcgcgccgcgcgctgttcgagaaggcgggcagggtcgtcgtcgacatcgccaaccgctggtaccgcgaggacgacgcctcggtgctgccgcgcaacgtcgccaacgccaaggccttccgcaacgcgatggccctggacgtggccatgggcgggtccaccaacacggtgctgcacacgctggccgccgcgcaggagggcgagatcgatttcgatctggagaccatcgacgagatcagccgcaaggtgccgtgcctgtcgaaggtctcgccgaactccgactaccacatggaggacgtgcaccgggccggcggcatcccagccatcctcggcgagctgcgccgggccggcctgctgcacaccgacgtgaccaccgtgcacaccccgacgctcgaggagtggctcgacacctgggacatccgctcgggcaaggcctccgcggaggcgatcgagctgttccacgccgcgcccggcggcgtgcgcaccaccgagccgttctccaccgacaaccggtggtcctcgctggacaccgacgccgcgggcggctgcatccgcgacaaggagcacgcctacaccgtcgagggcggcctggtggtgttgcgcggcaacatcgctccggacggcgcgatcctcaagacggcgggcatcgacgaggacctgttctccttccagggccccgcggtggtcgtggagtcgcaggaggaggccgtctcggtgatcctcggcaagaagatcaagccgggcgacgtgctcgtggtccgctacgaggggcccgcgggcggccccggcatgcaggagatgctgcaccccaccgcgttcctcaagggcgcgggcctgggcaagcagtgcgcgctgatcaccgacggccggttctccggcggcacctcggggctgtccatcggccacatctccccggaggccgccagcggcggcgtgatcggcctggtcgagaacggcgaccagatccgcatcgatgtcgccacccgcaccctggaggtgctcgtcgacgacgcggtgctggccgagcggcgggccaagatggaggcctccgaacgtccctggcagccggtcgaccgcgaccgcacggtcaccacggcgctgcgcgcctacgcggcgctggcgacctcggccgacaagggcgccgtccgccgcgtgccctga

SEQ ID NO: 10527 - protein, 613 aa, Nocardia farcinica
MPPLRSRTTTAGRNAAGARALWRATGLTDSDFGKPIVAIANSYTQFVPGHVHLKDVGEIVAEAVRAAGGVPREFHTIAVDDGIAMGHGGMLYSLPSREIIADSVEYMVNAHTADALVCISNCDKITPGMLNAAMRLNIPTVFVSGGPMEAGKAVVVGGVAQAPTDLITAISASANSSVTDEGLSEVERSACPTCGSCSGMFTANSMNCLTEALGLALPGNGSTLATHAARRALFEKAGRVVVDIANRWYREDDASVLPRNVANAKAFRNAMALDVAMGGSTNTVLHTLAAAQEGEIDFDLETIDEISRKVPCLSKVSPNSDYHMEDVHRAGGIPAILGELRRAGLLHTDVTTVHTPTLEEWLDTWDIRSGKASAEAIELFHAAPGGVRTTEPFSTDNRWSSLDTDAAGGCIRDKEHAYTVEGGLVVLRGNIAPDGAILKTAGIDEDLFSFQGPAVVVESQEEAVSVILGKKIKPGDVLVVRYEGPAGGPGMQEMLHPTAFLKGAGLGKQCALITDGRFSGGTSGLSIGHISPEAASGGVIGLVENGDQIRIDVATRTLEVLVDDAVLAERRAKMEASERPWQPVDRDRTVTTALRAYAALATSADKGAVRRVP

SEQ ID NO: 10528 - DNA, 1662 bp, Aeropyrum pernix
  CDS (1)..(1662): transl_table=11
ttgaagaggcctaggagtaggctatggtatgatggcttggagaacacaccgcacagagtctatctgagggctattggattcactagcgacgacttccagaaaccacttattgccgtggtagcggcatggagcgaggccgggccctgcaactttaacgtgctgccaggaagtctccgcgtgaaggagggggttaggtcagcggggggtgtgccactggcggttcccactatcgttgttaacgatggcataaacatgggaactcccgggatgcgttatagcctcataagtagggagctaattgcagacactatagaagcacaagtggccagccacgggttcgacggctgggtcggtattgggggctgtgacaagacccagcctgggataatgatggccatggcaaggctcgacctcccgagcatctacatttatggggggaccgctgagcatggcgttcttgatggggaaacagtgacagtccaatctgcattcgaggctgtgggggcctatcttaaaggtctaatagatgaggaacgcctttacgagatagagaaggctgccatgcccacgccgggcacctgccagggcctcttcacagccaacacaatggccatacttgcagaggccttgggcctctctcccctcggctcggcaagccctccagcaactagctctgagagggctagggagctggccagggctggagctctggcagtggggcttgtggagactggcctgaccccccgaaggattctcacctacgaggcattctacaacgctatagtgacattgatggctatatcaggctccactaacgccgtgctccacctcctagcaatagccagagaggctggggtcaagttggcacttgacgatttcgacgaagccagtagaaaggtgcctgtgatagctgccctggcccccgcggggaagtatacgatggtggacctacataatgtgggtggtgctccggttatcctcaggaagcttctcgaccgggggttgctctatggtgaggctgtgacagttgagggggtggagatagggaaactacttagcaaatgggagcctaggaccgactataatattctctacgatttcgataaaccatacaagcctcatgcgggcctgaggatactcagaggctccctcgcgcctaggggtgcagttatgaagataggggcaagcggcattctgaagttcaagggggctgcaaaggtgttcgacagcgaggaagaagctttcaaggccattgagagaggttacgtagaagagggggacgtcgtcgtagttcgctatgtaggccccaagggcgcgcccggcatgccggagatgctcaagataaccgcggccatagtgggggcagggctgggagagaaggtcgcactcataactgacgggaggtttagcggggcaacaagaggagtgatggtaggtcatgcagcaccggaggctgccgtaggaggaccgatagctctagttgaaaacggagatgaaatagtcatagacggtgaaaaaggaacgctcgatgtcctcttgggaggagacgaactcgccaggagacgagataaatggtctcctcctcccctcccaaagcaaggtttgcttcggaagtatgcaaagcttgtaacacaagctgacgagggagcggttacccactga

SEQ ID NO: 10529 - protein, 553 aa, Aeropyrum pernix
MKRPRSRLWYDGLENTPHRVYLRAIGFTSDDFQKPLIAVVAAWSEAGPCNFNVLPGSLRVKEGVRSAGGVPLAVPTIVVNDGINMGTPGMRYSLISRELIADTIEAQVASHGFDGWVGIGGCDKTQPGIMMAMARLDLPSIYIYGGTAEHGVLDGETVTVQSAFEAVGAYLKGLIDEERLYEIEKAAMPTPGTCQGLFTANTMAILAEALGLSPLGSASPPATSSERARELARAGALAVGLVETGLTPRRILTYEAFYNAIVTLMAISGSTNAVLHLLAIAREAGVKLALDDFDEASRKVPVIAALAPAGKYTMVDLHNVGGAPVILRKLLDRGLLYGEAVTVEGVEIGKLLSKWEPRTDYNILYDFDKPYKPHAGLRILRGSLAPRGAVMKIGASGILKFKGAAKVFDSEEEAFKAIERGYVEEGDVVVVRYVGPKGAPGMPEMLKITAAIVGAGLGEKVALITDGRFSGATRGVMVGHAAPEAAVGGPIALVENGDEIVIDGEKGTLDVLLGGDELARRRDKWSPPPLPKQGLLRKYAKLVTQADEGAVTH

SEQ ID NO: 10530 - DNA, 1836 bp, Agrobacterium tumefaciens
  CDS (1)..(1836): transl_table=11
atgccagcctatcgctccagaacgacaacccacggccgcaacatggcgggcgcgcgcggcctttggcgcgccaccggcatgaaggacagcgatttcggcaagccgatcatcgcggtggtcaattccttcacgcagttcgtaccgggccatgtgcatctaaaggatctcggccagctcgttgcccgcgaaatcgaggcggccggcggcgttgccaaggaattcaacacgattgcggtcgatgatggtatcgccatgggccatgacggcatgctctattcgctgccgtcgcgcgagatcatcgctgactcggtcgaatatatggtcaatgcccattgcgccgatgcgatggtctgcatttccaactgcgacaagatcacgcccggcatgctgaatgccgcgatgcgcctcaacattcccgccgttttcgtgtccggtggtccaatggaagcgggcaaggtggttctgcacggcaagaccgttgcgctcgatctggtcgacgcgatggtggctgctgccgacgacaagatttccgatgaggacgtcaagatcatcgagcgctccgcctgcccgacctgcggttcctgttccggcatgttcacggccaattccatgaactgtctgaccgaggcgctcggcctgtcattgcccggcaacggctcgacgcttgccacccactccgatcgcaagcgcctgttcgttgaagccggtcacctgatcgtcgatctggcccgccgttattacgagcaggacgacgaaaccgttctgccgcgcaccatcgccaacaaggcggcgttcgaaaacgccatgtcgctggatattgccatgggcggctccaccaacacggttctgcatattctggcggcagcccacgagggcggcgtcgatttcggtatggaggacatcgaccggctttcccgcaaggttccctgcctttccaaggttgcgcctgcgaagcaggatgtgcacatggaagacgtgcatcgcgccggcggcatcatgcgtattctcggtgagctggagcgtggcggtctcatcaaccgcgatacctataccgtacacgaagcgacgcttggcgatgccatcgaccgctgggacatcacgcgcaccaacagcgaaatggtgcggcagttcttcaaggccgctccgggcggcgtaccgacacaggtggccttcagccagtcctcgcgctgggatgatctggacaccgacagcgacaacggcgtcattcgttcggtcgagaagcctttctccaaggatggcggtctggccgttctttacggcaacatcgcgctcgatggctgcatcgtgaagacggcgggtgttgatgaatccatcctgaaattcaacggatcggcagtcgtttacgaaagccaggacgcggccgtgaagggcattctcggcaacgaggtcaaggcgggcgacgtcgtcgtcatccgctatgaaggaccgaagggcggcccgggcatgcaggaaatgctctatccgaccagctacctcaagtccaagggcctcggtaaagcctgcgcgctcatcaccgatggtcgcttctccggtggcacgtcaggcctttccatcggtcatgcctcgccggaagcggcgcagggcggtgccatcggcctcgtgcgtcagggcgacctgattgagatcgatattccgaaccgcacgatcaatctcaaggtttcggatgcggaactggccgcgcgccgggccgagcaggaagaaaagggctggaagccggaagcaccgcgcaagcgtaatgtcacgacggcgctcaaggcctatgcggcctttgcgtcgagcgcggacaagggtgctgtgcggattctgccggagtaa

SEQ ID NO: 10531 - protein, 611 aa, Agrobacterium tumefaciens
MPAYRSRTTTHGRNMAGARGLWRATGMKDSDFGKPIIAVVNSFTQFVPGHVHLKDLGQLVAREIEAAGGVAKEFNTIAVDDGIAMGHDGMLYSLPSREIIADSVEYMVNAHCADAMVCISNCDKITPGMLNAAMRLNIPAVFVSGGPMEAGKVVLHGKTVALDLVDAMVAAADDKISDEDVKIIERSACPTCGSCSGMFTANSMNCLTEALGLSLPGNGSTLATHSDRKRLFVEAGHLIVDLARRYYEQDDETVLPRTIANKAAFENAMSLDIAMGGSTNTVLHILAAAHEGGVDFGMEDIDRLSRKVPCLSKVAPAKQDVHMEDVHRAGGIMRILGELERGGLINRDTYTVHEATLGDAIDRWDITRTNSEMVRQFFKAAPGGVPTQVAFSQSSRWDDLDTDSDNGVIRSVEKPFSKDGGLAVLYGNIALDGCIVKTAGVDESILKFNGSAVVYESQDAAVKGILGNEVKAGDVVVIRYEGPKGGPGMQEMLYPTSYLKSKGLGKACALITDGRFSGGTSGLSIGHASPEAAQGGAIGLVRQGDLIEIDIPNRTINLKVSDAELAARRAEQEEKGWKPEAPRKRNVTTALKAYAAFASSADKGAVRILPE

SEQ ID NO: 10532 - DNA, 1668 bp, Aquifex aeolicus
  CDS (1)..(1668): transl_table=11
atgaaattcaggagtgataaggtaaaaaaaggaatagaaagggctcctcacagggcgcttttgagggcctgcggactttctgatgaggactttgacaagccacttatagggatagcaaactcatacatagacataattccggggcacgttcacctgagggagttcgtagaacctataaaggaagaagtcaggaaactgggcggagttcctatagagttcaacgtaatcggagttgacgacggaatagccatgggacacgaaggtatgcattactccctcccctccagagaactcatagctgacagcatagaaacggttgtaaacgcgcaccagctggacgcactcatatgcattcccaattgtgacaaaatagttccgggaatgctcatgggagctttgagggtaaacgtccccaccgttttcataagcgggggacccatgctcgcgggagaggtaaacggtcaaaaggtggatctcatcagcgtctttgaaggtataggtaaggtaaagaggggagagatttcagagcaggaactaaaagttatagaagcatccgcctgtcccacatgcggtagctgttctggaatgtttactgcaaattctatgaactgcttaacggaagtactcggtcttgcacttcccggaaacggaactatcctcgccatagacccgaggcgtgaaatactggcgagaaacgcggtaaaagccctctttgaacttctagaaaaggatgtaaaaccgagggatatagtcacggaagaagccctggacgacgccttcaccgtggacatagcgatgggaggctcttcaaacaccatacttcacttacttgcgatcgcgagggaggccggaatagagtacaaccttgccaagataaacgagatatctaagagaacacccactatatgtaagatttcacccgcatcacactaccacattgaggatctagatcgcgttggtggaatacccactattatgaaggagctctcaaaactcggactccttcacacggaaaggaaaaccgtaagcggtaaaacgataggggaaataataagcgatgctccggacgccgacggcgaggtagtgagaaccattgagaacccttattccaaggacggaggtatagcaatactctttggaaacctcgcccccgagggagctgttgtaaagaccgcgggagttgatcccaagatgctcacctttaagggtaaagccatatgctttgattcggaagaggaggctatagagggaattctcggaggaaaggtaaagcccggacacgtggtcgtgataaggtacgaggggcctaagggagggcccggtatgagggagatgctctcacccacttccgcaataatgggaatgggactgggagacaaagtggcactcattacggatggaaggttctccggcggaacgagaggggcgtgcgtgggacacatttctcccgaagcggcggcaggaggaccgataggaatagtaaaagacggagacgagatattaatagatataccgaacagaaggatagagctcctgatttccgaagaagagttcaatgaaaggatgaagaacttcaaacctaagcaaaaggagataaagagttcctggctaaggcggtacgcaaaactcgtgacttccgcctcaaaaggtgctatcctcgaggcttaa

SEQ ID NO: 10533 - protein, 555 aa, Aquifex aeolicus
MKFRSDKVKKGIERAPHRALLRACGLSDEDFDKPLIGIANSYIDIIPGHVHLREFVEPIKEEVRKLGGVPIEFNVIGVDDGIAMGHEGMHYSLPSRELIADSIETVVNAHQLDALICIPNCDKIVPGMLMGALRVNVPTVFISGGPMLAGEVNGQKVDLISVFEGIGKVKRGEISEQELKVIEASACPTCGSCSGMFTANSMNCLTEVLGLALPGNGTILAIDPRREILARNAVKALFELLEKDVKPRDIVTEEALDDAFTVDIAMGGSSNTILHLLAIAREAGIEYNLAKINEISKRTPTICKISPASHYHIEDLDRVGGIPTIMKELSKLGLLHTERKTVSGKTIGEIISDAPDADGEVVRTIENPYSKDGGIAILFGNLAPEGAVVKTAGVDPKMLTFKGKAICFDSEEEAIEGILGGKVKPGHVVVIRYEGPKGGPGMREMLSPTSAIMGMGLGDKVALITDGRFSGGTRGACVGHISPEAAAGGPIGIVKDGDEILIDIPNRRIELLISEEEFNERMKNFKPKQKEIKSSWLRRYAKLVTSASKGAILEA

SEQ ID NO: 10534 - DNA, 1674 bp, Bacillus anthracis
  CDS (1)..(1674): transl_table=11
atgagaagtgacatgattaaaaaaggttttgataaagcgccgcatcgtagtttattaaaagcaactggtttgaaagatgaagactttgataaaccgtttatagcgatctgtaattcttttattgaaattattccaggtcataagcacttaaatgagtttgggaagcttgttaaagaagcagtacgtgcagcaggtatggttccatttgaatttaatacaattggagtagatgacggtattgcgatggggcatatcggtatgcgctattcgcttccgagtcgagaaattattgcagattcagtagaaacggttgtaaatgcccattggtttgatggcatgatttgcattccaaactgtgacaaaatcacacccggtatgatgatggctgcacttcgtattaacattccaactgtttttgtttcaggtggtccgatggcggctggaaaaacatctaaaggagacgttgttgatttaagttctgttttcgaaggagtaggggcttatcaatctgggaaaatttcagaagaagaattaaaggatattgaagatcatggctgtccatcttgtggttcttgttctggtatgtttacagcgaactctatgaactgtttatgtgaagtgttaggtttagctcttcctggtaacggaagtattttggctattgatccaagacgcgaagaattaattaaacaagcagcagaaaaattaaagattttaattgaaagagatattaaaccgagagacattgtaacggaagaagcaattgatgatgcgttcgcgcttgatatggcaatgggcggttcaacaaatacagtgttgcatacattggcgctcgcgcaagaggctggattagattacgatatgaaccgtattgatgccgtttcaagacgtgtaccacatttatgtaaagtaagccctgcttccaattggcatatggaagacattgatcgtgcaggcgggattagtgcaattttgaaagagatgagccgaaaagaaggggtacttcatttagaccgtattactgctacggggcaaacattaagagaaaatattgctcatgcagagattaaagataaggaagtgattcattctcttgaaaatcctcatagtgaagaaggtggattacgtatattaaaaggaaaccttgcgaaagacggagcagttattaaaagcggggcaactgaagtaaaacgatttgaaggaccttgtgttatttttaattcacaagatgaggcgcttgccggcattatgcttgggaaggttaagaaaggagatgtagttgttattcgttatgaaggaccaagaggcggtcctggtatgccggaaatgttagcaccaacgtcagcgattgctggcatgggattaggtgcagatgttgcgttattaaccgatggtcgtttctctggtgcttcacgtggtatttcagtaggtcatatttcgccagaagcagctgcgggcggaacgattgcacttcttgaacaaggggatatcgtttgtatcgatgttgaggaaaggttgttagaagtaagagttagtgacgaagaattaggtaagcgtaaaaaagaatggaaacgaccagaaccgaaagtgaaaacgggctggcttggacgttatgcacaaatggtaacatcggcgaatacaggtgcagtcctaaaaatcccgaattttgattga

SEQ ID NO: 10535 - protein, 557 aa, Bacillus anthracis
MRSDMIKKGFDKAPHRSLLKATGLKDEDFDKPFIAICNSFIEIIPGHKHLNEFGKLVKEAVRAAGMVPFEFNTIGVDDGIAMGHIGMRYSLPSREIIADSVETVVNAHWFDGMICIPNCDKITPGMMMAALRINIPTVFVSGGPMAAGKTSKGDVVDLSSVFEGVGAYQSGKISEEELKDIEDHGCPSCGSCSGMFTANSMNCLCEVLGLALPGNGSILAIDPRREELIKQAAEKLKILIERDIKPRDIVTEEAIDDAFALDMAMGGSTNTVLHTLALAQEAGLDYDMNRIDAVSRRVPHLCKVSPASNWHMEDIDRAGGISAILKEMSRKEGVLHLDRITATGQTLRENIAHAEIKDKEVIHSLENPHSEEGGLRILKGNLAKDGAVIKSGATEVKRFEGPCVIFNSQDEALAGIMLGKVKKGDVVVIRYEGPRGGPGMPEMLAPTSAIAGMGLGADVALLTDGRFSGASRGISVGHISPEAAAGGTIALLEQGDIVCIDVEERLLEVRVSDEELGKRKKEWKRPEPKVKTGWLGRYAQMVTSANTGAVLKIPNFD

SEQ ID NO: 10536 - DNA, 1674 bp, Bacillus cereus
  CDS (1)..(1674): transl_table=11
atgagaagtgacatgattaaaaaaggttttgataaagcgccacaccgtagtttattaaaagcaactggtttgaaagatgaagattttgataaaccgtttatagctatctgtaattcttttattgaaattattccaggtcataagcatttaaatgagtttgggaaacttgttaaagaagcagtgcgtgcagcaggtatggttccatttgaatttaatacaattggagtagatgacggtattgcgatggggcatatcggtatgcgctattcgcttccgagtcgagaaatcattgcagattcagtagaaacggttgtaaatgcacactggtttgatggcatgatttgtattccaaactgtgacaaaatcacacctggtatgatgatggctgcactacgtattaatattccgactgtgtttgtttcgggcggcccgatggcagcaggaaaaacatctaaaggagaagttgttgatctgagttccgtttttgaaggagtaggagcttatcaatctgggaaaatttcagaagaagaattaaaagatattgaagatcatggctgtccatcttgtggttcttgttccggtatgtttacagcgaactctatgaactgtttatgtgaagtgttaggtttagctcttcctggtaacggaagtattttggctattgatccgagacgtgaggagttaattaaagaagcagcagaaaaattaaagattttaattgaaagagatattaaaccacgagacattgtaacggaagaagcaattgatgatgcgttcgcgcttgatatggcgatgggcggttcaacaaatacagtgttacatacattagcactcgcacatgaggcaggactagattatgatatgagccgtattgatgccgtttcaagacgtgtaccacatttatgtaaagtaagccctgcttccaattggcatatggaagacattgatcgtgcaggcgggattagtgccattttgaaagagatgagccgaaaagaaggggtacttcatttagaccgtattactgctacggggcaaacattaagaggaaatattgctcatgcagagattaaagataaggaagtgattcattctcttgaaaatcctcatagtgaagaaggtggattacgtatattaaaaggaaaccttgcgaaagacggagcagttattaaaagcggggcaactgaagtgaaacgatttgaaggaccttgtgttatttttaattcacaagatgaggcgcttgccggcattatgcttgggaaggttaagaaaggagacgtagttgttattcgttatgaaggaccaagaggcggtcctggtatgccggaaatgttagcaccaacgtcagcgattgctggcatgggattaggtgcagatgttgcgttattaaccgatggtcgtttctctggtgcttcacgtggtatttcagtaggtcatatttcgccagaagcagctgcgggcgggaccatcgcacttcttgaacaaggggatatcgtttgtatcgatgttgaggaaaggttgttagaagtaagagtgagtgacgaagaattagataagcgtaaaaaagaatggaaacgaccagaaccgaaagtgaaaacgggctggcttgggcgttatgcacaaatggtaacatcggcgaatacaggtgcagtcttaaaagtcccgaattttgattga

SEQ ID NO: 10537 - protein, 557 aa, Bacillus cereus
MRSDMIKKGFDKAPHRSLLKATGLKDEDFDKPFIAICNSFIEIIPGHKHLNEFGKLVKEAVRAAGMVPFEFNTIGVDDGIAMGHIGMRYSLPSREIIADSVETVVNAHWFDGMICIPNCDKITPGMMMAALRINIPTVFVSGGPMAAGKTSKGEVVDLSSVFEGVGAYQSGKISEEELKDIEDHGCPSCGSCSGMFTANSMNCLCEVLGLALPGNGSILAIDPRREELIKEAAEKLKILIERDIKPRDIVTEEAIDDAFALDMAMGGSTNTVLHTLALAHEAGLDYDMSRIDAVSRRVPHLCKVSPASNWHMEDIDRAGGISAILKEMSRKEGVLHLDRITATGQTLRGNIAHAEIKDKEVIHSLENPHSEEGGLRILKGNLAKDGAVIKSGATEVKRFEGPCVIFNSQDEALAGIMLGKVKKGDVVVIRYEGPRGGPGMPEMLAPTSAIAGMGLGADVALLTDGRFSGASRGISVGHISPEAAAGGTIALLEQGDIVCIDVEERLLEVRVSDEELDKRKKEWKRPEPKVKTGWLGRYAQMVTSANTGAVLKVPNFD

SEQ ID NO: 10538 - DNA, 1674 bp, Bacillus thuringiensis subsp
  CDS (1)..(1674): transl_table=11
atgagaagtgacatgattaaaaaaggttttgataaagcgccgcatcgtagtttattaaaagcaactggtttgaaagatgaagactttgataaaccgtttatagcgatctgtaattcttttattgaaattattccaggtcataagcacttaaatgagtttgggaaacttgttaaagaagcagtacgtgcagcaggcatggttccatttgaatttaatacaattggagtagatgacggtattgcgatggggcatatcggtatgcgttattcgcttccgagtcgtgaaattattgcagattcagtggaaacggttgtaaacgcacattggtttgatggcatgatttgtattccaaactgtgacaaaattacaccaggtatgatgatggctgcactacgtattaatattccgactgtgtttgtttcgggcggcccgatggcagcaggaaaaacatctaaaggagacgttgttgatttaagttctgttttcgaaggagtaggggcttatcaatctgggaaaatttcagaagaagaattaaaggatattgaagatcatggctgtccatcttgtggttcttgttctggtatgtttacagcgaactctatgaactgtttatgtgaagtgttaggtttagctcttcctggtaacggaagtattttggctattgatccaagacgcgaagaattaattaaacaagcagcagaaaaattaaagattttaattgaaagagatattaaaccgagagacattgtaacggaagaagcaattgatgatgcgttcgcgcttgatatggcaatgggcggttcaacaaatacagtgttgcatacattggcgctcgcgcaagaggctggattagattacgatatgaaccgtattgatgccgtttcaagacgtgtaccacatttatgtaaagtaagccctgcttccaattggcatatggaagacattgatcgtgcaggcgggattagtgcaattttgaaagagatgagccgaaaagaaggggtacttcatttagaccgtattactgctacggggcaaacattaagagaaaatattgctcatgcagagattaaagataaggaagtgattcattctcttgaaaatcctcatagtgaagaaggtggattacgtatattaaaaggaaaccttgcgaaagacggagcagttattaaaagcggggcaaccgaagtaaaacgatttgaagggccttgtgttatttttaattcacaagatgaggcgcttgccggcattatgcttgggaaggttaagaaaggagatgtagttattattcgttatgaaggaccaagaggcggtccaggtatgccggaaatgttagcgccaacgtcagcgattgctggcatgggattaggtgcggatgttgcgttattaaccgatggtcgtttctctggtgcttcacgtggtatttcagtagggcatatttcgccagaagcagctgcgggcggaacgattgcacttcttgaacaaggggatatcgtttgtatcgatgttgaggaaaggttgttagaagtgagagttagtgacgaagaattagataagcgtaaaaaagaatggaaacgaccagaaccgaaagtgaaaacgggctggcttggacgttatgcacaaatggtaacatcggcgaatacaggtgcagtcctaaaaatcccgaattttgattga

SEQ ID NO: 10539 - protein, 557 aa, Bacillus thuringiensis subsp
MRSDMIKKGFDKAPHRSLLKATGLKDEDFDKPFIAICNSFIEIIPGHKHLNEFGKLVKEAVRAAGMVPFEFNTIGVDDGIAMGHIGMRYSLPSREIIADSVETVVNAHWFDGMICIPNCDKITPGMMMAALRINIPTVFVSGGPMAAGKTSKGDVVDLSSVFEGVGAYQSGKISEEELKDIEDHGCPSCGSCSGMFTANSMNCLCEVLGLALPGNGSILAIDPRREELIKQAAEKLKILIERDIKPRDIVTEEAIDDAFALDMAMGGSTNTVLHTLALAQEAGLDYDMNRIDAVSRRVPHLCKVSPASNWHMEDIDRAGGISAILKEMSRKEGVLHLDRITATGQTLRENIAHAEIKDKEVIHSLENPHSEEGGLRILKGNLAKDGAVIKSGATEVKRFEGPCVIFNSQDEALAGIMLGKVKKGDVVIIRYEGPRGGPGMPEMLAPTSAIAGMGLGADVALLTDGRFSGASRGISVGHISPEAAAGGTIALLEQGDIVCIDVEERLLEVRVSDEELDKRKKEWKRPEPKVKTGWLGRYAQMVTSANTGAVLKIPNFD

SEQ ID NO: 10540 - DNA, 1665 bp, Bacillus clausii
  CDS (1)..(1665): transl_table=11
atgagaagcaacatgattaaaaaagggatcgatcgagcgcctcaccgaagccttttgcgggctgccggcgtaaaagaagaggatatggataagccgtttatcggcgtctgcaactcctatattgacatcatcccagggcatatgcatttgaataaatttgcagaagtggcgaaagaagccattattgaagccggaggcattcctttcgaattcaatacaatcggcgtagatgatgggattgcgatggggcacatcggcatgcgctattcgctgccaagcagggaaattatttgtgatgctgccgaaacagtcatcaatgcccactggtttgacggcgtcttctatataccgaattgcgacaaaattacgccaggaatgctgatggcggctgtacgcacaaacgtgcctgcggtctttgtctctggtggtccgatggaagcaggccgtactaaagagggaaaaagcctttcacttgtatccgtatttgaaggagtaggcgcattttcgtcaggaaaaatgacaagggaagagctgcttgaaattgaacagttagcttgcccaacttgcggatcttgttctggaatgtttacagccaattcaatgaattcgcttatggaaatgctcggtctggctcttccaggaaacggaacgcttgtcgctacatctacggaacgtcataacttgattaaagatgcagcgaagcatttaatcaatttgattgaaaaagatattcgcccacgcgacatcgttaccgaagaaacaattgacgatgcctttgcccttgatatggcaatggggggatctaccaatacagtgctccatacattggccattgccaatgaagccgaaatcgactacgatttgacacgtatcaacgaagtggctgagcgagtgccttacctttgcaaaattagccctgcctctgattactcgatggacgacgtccataaggcgggcggtgtagctgcgatcatgaaagagctgattgaaatgggagcggtcaaaggcgaccggatcaccattacaggaaaatcactctatgaaaatgtcgctcatgctcaaataacaaataccgatgtcattcgcacgaaagagactgcgtatagtccagtcggcggtctatcaatcctttatggaaatttggccccggacggcgctgtcatcaaagtaggtgcagtggacccttcgattaaaacatttactggggaagcgatcgtgtttaattcccaagaagaagcgcaagagcaaattaataacggcgctgtgaaagaagggcaagttgttgttatccgttatgaaggccctaaaggcggtcctggaatgccagaaatgctggcaccgacttcagccattcaaggcagagggcttggcaccaaagttgcactcattacggacggccgtttttccggcgcttcacgaggaatttcaatcgggcatatatcgccggaagcagcagaaggcgggccaatcgccttcgtggaaaatggcgacatgatcaaaatcgatttaatcgaacgcacaattgagtgggaaataagcgaagaagagttagcaaaacgccgtgaaggatggacagagccggaaccaaaagtcaaaaaaggctatttggcccgttactcaaaacttgttacttcagccaatacaggcggcgttatgaaaatctaa

SEQ ID NO: 10541 - protein, 554 aa, Bacillus clausii
MRSNMIKKGIDRAPHRSLLRAAGVKEEDMDKPFIGVCNSYIDIIPGHMHLNKFAEVAKEAIIEAGGIPFEFNTIGVDDGIAMGHIGMRYSLPSREIICDAAETVINAHWFDGVFYIPNCDKITPGMLMAAVRTNVPAVFVSGGPMEAGRTKEGKSLSLVSVFEGVGAFSSGKMTREELLEIEQLACPTCGSCSGMFTANSMNSLMEMLGLALPGNGTLVATSTERHNLIKDAAKHLINLIEKDIRPRDIVTEETIDDAFALDMAMGGSTNTVLHTLAIANEAEIDYDLTRINEVAERVPYLCKISPASDYSMDDVHKAGGVAAIMKELIEMGAVKGDRITITGKSLYENVAHAQITNTDVIRTKETAYSPVGGLSILYGNLAPDGAVIKVGAVDPSIKTFTGEAIVFNSQEEAQEQINNGAVKEGQVVVIRYEGPKGGPGMPEMLAPTSAIQGRGLGTKVALITDGRFSGASRGISIGHISPEAAEGGPIAFVENGDMIKIDLIERTIEWEISEEELAKRREGWTEPEPKVKKGYLARYSKLVTSANTGGVMKI

SEQ ID NO: 10542 - DNA, 1677 bp, Bacillus subtilis
  CDS (1)..(1677): transl_table=11
atggcagaattacgcagtaatatgatcacacaaggaatcgatagagctccgcaccgcagtttgcttcgtgcagcaggggtaaaagaagaggatttcggcaagccgtttattgcggtgtgtaattcatacattgatatcgttcccggtcatgttcacttgcaggagtttgggaaaatcgtaaaagaagcaatcagagaagcagggggcgttccgtttgaatttaataccattggggtagatgatggcatcgcaatggggcatatcggtatgagatattcgctgccaagccgtgaaattatcgcagactctgtggaaacggttgtatccgcacactggtttgacggaatggtctgtattccgaactgcgacaaaatcacaccgggaatgcttatggcggcaatgcgcatcaacattccgacgatttttgtcagcggcggaccgatggcggcaggaagaacaagttacgggcgaaaaatctccctttcctcagtattcgaaggggtaggcgcctaccaagcagggaaaatcaacgaaaacgagcttcaagaactagagcagttcggatgcccaacgtgcgggtcttgctcaggcatgtttacggcgaactcaatgaactgtctgtcagaagcacttggtcttgctttgccgggtaatggaaccattctggcaacatctccggaacgcaaagagtttgtgagaaaatcggctgcgcaattaatggaaacgattcgcaaagatatcaaaccgcgtgatattgttacagtaaaagcgattgataacgcgtttgcactcgatatggcgctcggaggttctacaaataccgttcttcatacccttgcccttgcaaacgaagccggcgttgaatactctttagaacgcattaacgaagtcgctgagcgcgtgccgcacttggctaagctggcgcctgcatcggatgtgtttattgaagatcttcacgaagcgggcggcgtttcagcggctctgaatgagctttcgaagaaagaaggagcgcttcatttagatgcgctgactgttacaggaaaaactcttggagaaaccattgccggacatgaagtaaaggattatgacgtcattcacccgctggatcaaccattcactgaaaagggaggccttgctgttttattcggtaatctagctccggacggcgctatcattaaaacaggcggcgtacagaatgggattacaagacacgaagggccggctgtcgtattcgattctcaggacgaggcgcttgacggcattatcaaccgaaaagtaaaagaaggcgacgttgtcatcatcagatacgaagggccaaaaggcggacctggcatgccggaaatgctggcgccaacatcccaaatcgttggaatgggactcgggccaaaagtggcattgattacggacggacgtttttccggagcctcccgtggcctctcaatcggccacgtatcacctgaggccgctgagggcgggccgcttgcctttgttgaaaacggagaccatattatcgttgatattgaaaaacgcatcttggatgtacaagtgccagaagaagagtgggaaaaacgaaaagcgaactggaaaggttttgaaccgaaagtgaaaaccggctacctggcacgttattctaaacttgtgacaagtgccaacaccggcggtattatgaaaatctag

SEQ ID NO: 10543 - protein, 558 aa, Bacillus subtilis
MAELRSNMITQGIDRAPHRSLLRAAGVKEEDFGKPFIAVCNSYIDIVPGHVHLQEFGKIVKEAIREAGGVPFEFNTIGVDDGIAMGHIGMRYSLPSREIIADSVETVVSAHWFDGMVCIPNCDKITPGMLMAAMRINIPTIFVSGGPMAAGRTSYGRKISLSSVFEGVGAYQAGKINENELQELEQFGCPTCGSCSGMFTANSMNCLSEALGLALPGNGTILATSPERKEFVRKSAAQLMETIRKDIKPRDIVTVKAIDNAFALDMALGGSTNTVLHTLALANEAGVEYSLERINEVAERVPHLAKLAPASDVFIEDLHEAGGVSAALNELSKKEGALHLDALTVTGKTLGETIAGHEVKDYDVIHPLDQPFTEKGGLAVLFGNLAPDGAIIKTGGVQNGITRHEGPAVVFDSQDEALDGIINRKVKEGDVVIIRYEGPKGGPGMPEMLAPTSQIVGMGLGPKVALITDGRFSGASRGLSIGHVSPEAAEGGPLAFVENGDHIIVDIEKRILDVQVPEEEWEKRKANWKGFEPKVKTGYLARYSKLVTSANTGGIMKI

SEQ ID NO: 10544 - DNA, 1803 bp, Bacteroides thetaiotaomicron
  CDS (1)..(1803): transl_table=11
atgaaaaagcaattacgcagttcgtttagtacacaaggccgtcgcatggcgggagcccgcgcattatgggcagccaacggcatgaagaaaaatcagatgggaaaacccattatcgctatcgtcaattcgtttacacaatttgttccgggacacgtgcacctgcatgaaatcgggcagttggtgaaggcggaaattgagaagctgggatgcttcgctgcggaatttaatacgattgctattgatgacggtatcgctatgggacatgacggaatgctttactcgcttccttcccgtgatatcatagcggacagcgtagaatatatggtcaatgcgcacaaggcggatgcaatggtatgtatcagcaactgcgataagattaccccagggatgctgatggctgccatgcgcctgaatatccctaccgtatttgtatccggcggaccgatggaagccggagagtggaacggtcagcatctggacttgatcgatgccatgattaaatcggcggacgacagtgtaagcgatcaggaagtagcgaatatcgaacagaatgcctgtcctacctgcggatgttgttccggaatgtttacggcaaactcgatgaactgtctgaatgaagctatcggcttggctcttccgggaaacggcacaatcgtggctacgcacgaaaatcgtacgaaactgtttgaagatgctgccaaactgattgtggaaaatgcaatgaaatattatgaagaaggtgacgaaagtgtacttccccgcagcatagctacccgtcaggcattcctcaatgccatgacgctggatattgcgatgggcggttctaccaatacggtgcttcacctgttggccgtggcacatgaggcaggagtcgatttcaagatggacgacatcgatatgctgtcacgcaagacaccctgcctgtgtaaagtcgctccgaatactcaaaaatatcatattcaggacgttaaccgtgcgggtggcatcattgctatcctggcagagttggcaaaaggcggtctgattgatacttccgttctccgtgtggatggcatgtcgctggcggaagcgatcgatcaatattcaattaccagcccgaacgttacggaaaaagcaatgagcaaatattcaagtgcggcaggaaacagattcaatctcgtacttggttctcagggagcttattatcaggaattagataaagatcgcgcgaacggatgtatccgtgatctggagcacgcctatagcaaggacggaggtttggcggtactgaaaggaaatatcgctcaggacggttgcgtagtaaaaacggcgggtgtagacgaaagcatctggaagtttaccggacctgccaaagtattcgactcacaagaagcagcctgtgaaggcatcctcggaggccgagtcgtcagcggcgacgttgtcgtcatcacgcacgaaggtccgaagggcggtcccggtatgcaggaaatgctttacccgacttcttatatcaaatcccgtcacctcggcaaagaatgtgccttgattaccgacggacgtttcagtggtggaacttccggattgagtatcggacacgtttctcccgaagccgctgccggaggtaatataggaaaaatagtagatggagatatcatcgaaatcgacattcccgcccgaacgattaacgtgcgactaacagatgaagaactggctgcccgcccgatgactcccgtcacccgtgaccgttacgtgccgaagagcctgaaagcatacgccagcatggtaagctctgccgataagggagcagtgagattaatagactga

SEQ ID NO: 10545 - protein, 600 aa, Bacteroides thetaiotaomicron
MKKQLRSSFSTQGRRMAGARALWAANGMKKNQMGKPIIAIVNSFTQFVPGHVHLHEIGQLVKAEIEKLGCFAAEFNTIAIDDGIAMGHDGMLYSLPSRDIIADSVEYMVNAHKADAMVCISNCDKITPGMLMAAMRLNIPTVFVSGGPMEAGEWNGQHLDLIDAMIKSADDSVSDQEVANIEQNACPTCGCCSGMFTANSMNCLNEAIGLALPGNGTIVATHENRTKLFEDAAKLIVENAMKYYEEGDESVLPRSIATRQAFLNAMTLDIAMGGSTNTVLHLLAVAHEAGVDFKMDDIDMLSRKTPCLCKVAPNTQKYHIQDVNRAGGIIAILAELAKGGLIDTSVLRVDGMSLAEAIDQYSITSPNVTEKAMSKYSSAAGNRFNLVLGSQGAYYQELDKDRANGCIRDLEHAYSKDGGLAVLKGNIAQDGCVVKTAGVDESIWKFTGPAKVFDSQEAACEGILGGRVVSGDVVVITHEGPKGGPGMQEMLYPTSYIKSRHLGKECALITDGRFSGGTSGLSIGHVSPEAAAGGNIGKIVDGDIIEIDIPARTINVRLTDEELAARPMTPVTRDRYVPKSLKAYASMVSSADKGAVRLID

SEQ ID NO: 10546 - DNA, 1839 bp, Bartonella henselae
  CDS (1)..(1839): transl_table=11
atgccttcttaccggtcaagaatatcgactcatgggcgtaatatggcaggagctcgcagtctttggcgtgcaacagggatgaaagagtctgattttggtaaacccattattgcaattgcgaattcttttacacaatttgtaccagggcatgtccatttaaaagatcttgggcaactagtggcacaacagatagtggcttctggcggtattgcgaaggagtttaacacgattgctatagatgatggaatcgctatggggcatgatggaatgctttattctttaccttcacgtgaaatcattgctgattctgttgaatatatgatcaatgcccattgtgcggatgcgcttgtctgtatttccaattgtgacaagattacgcctggtatgttaatggcgtctttacgtttgaatattccaacaatttttgtttcaggcggtcctatggaggcaggtaagattaaatggaaagatcaagatctaactgtcgaccttgttgatgctatggttgctgcggctgctgaaaataactcagaggaagaagttgctgagatggagcgtgctgcttgtcctacatgtggttcttgttcaggaatgtttaccgctaattctatgaattgtttaacagaggcattagggctttctcttcccggaaatggatcaatgttagcaacgcatgcagatcgtcagatgctttttgaagaagctggacgacagattgtcacgttggttaagcgttattatgagaaaggcgatgagacagttttaccgcgctcgatcgcttcacgcaaagcttttgaaaatgcaatgactgtagatatttccatggggggatcaaccaatacagtacttcatcttttagcggcagcacaagagggtgaggtagattttaccatgacagagattgatcgcctttcacgccgtgttcctgttttatgtaaggttgcacctgctgttgcgaatgtgcatatggaagatgttcaccgtgctggtggtattatgggccttttaggtgaattagatgcggttggactcattgatacctctgcttacacggttcatgcaaaaacgatgaaagaagctctatgccgctgggatgtgaaacgaaccaatgaaccaaagactcatgaattttatcgtgcagctccagggggtatttcaacccagacagcgtttagtcaatctcgtcgttatgatagccttgatcttgatcgtgaaaaaggtattatccgcgataaagaacatgcttattcgcaagatggaggcttggctgttctatatggaaatcttgcgaaagatggctgtattgtaaaaacagcaggcgttgaccaatcaattttaacatttaaaggtccagcaagaatttttgaaagccaagattcagctgtttcagcgattttgaatgatacaattcaatcaggcgatattgttttaatccgttatgaaggtccacgtggtggacctggaatgcaagaaatgctctatcctacgagctatcttaaatccaaaggattaggaaaggtatgtgcacttataacagacggccgtttttcgggggggacttcggggctttctatcggacatgtttctccagaagctgctgaaggaggagcaattgctctagtggaagagggagatatcatagaaattgatattcctaatcgtaccattcatatgttagttgaggatgatgagctgatgcatcgtcgtgtcaaaatggaagcaaaaggaaaagcagcttggcaaccgactgagaaacgtaagcgtaaggtttcaaaggctcttaaggcatatgcagctatgacgacttctgctgcaaaaggtgctgtgcgtaatatttga

SEQ ID NO: 10547 - protein, 612 aa, Bartonella henselae
MPSYRSRISTHGRNMAGARSLWRATGMKESDFGKPIIAIANSFTQFVPGHVHLKDLGQLVAQQIVASGGIAKEFNTIAIDDGIAMGHDGMLYSLPSREIIADSVEYMINAHCADALVCISNCDKITPGMLMASLRLNIPTIFVSGGPMEAGKIKWKDQDLTVDLVDAMVAAAAENNSEEEVAEMERAACPTCGSCSGMFTANSMNCLTEALGLSLPGNGSMLATHADRQMLFEEAGRQIVTLVKRYYEKGDETVLPRSIASRKAFENAMTVDISMGGSTNTVLHLLAAAQEGEVDFTMTEIDRLSRRVPVLCKVAPAVANVHMEDVHRAGGIMGLLGELDAVGLIDTSAYTVHAKTMKEALCRWDVKRTNEPKTHEFYRAAPGGISTQTAFSQSRRYDSLDLDREKGIIRDKEHAYSQDGGLAVLYGNLAKDGCIVKTAGVDQSILTFKGPARIFESQDSAVSAILNDTIQSGDIVLIRYEGPRGGPGMQEMLYPTSYLKSKGLGKVCALITDGRFSGGTSGLSIGHVSPEAAEGGAIALVEEGDIIEIDIPNRTIHMLVEDDELMHRRVKMEAKGKAAWQPTEKRKRKVSKALKAYAAMTTSAAKGAVRNI

SEQ ID NO: 10548 - DNA, 1857 bp, Blochmannia floridanus
  CDS (1)..(1857): transl_table=11
atgcctaagtatcgttcttctactactactcaaggtcgtaatatggctggggcccgagctttgtggagggctacaggaatgaattctggagattttaataaaattattgttgctgtggttaactcatttactcaatttgtaccggggcatgttcatttaagaaatgtaggaaaattggtttctgaagagatttatattaatggaggagttgcaaaagaatttaacacaattgctattgatgatggaattgctatgggacatagtggaatgttgtattctttaccatctagagatttaattgctgattctgtagagtatgtgataaatgctcattgtgttgatgcgatggtgtgtatctctaattgcgataaaattactccgggaatgttaatggctgcgttaagattaaatattccaactgtttttgtatctggtggtcctatggaatcaggatcagtgacgttgtctagatataataatagtagtgatgttaaattaagtttagttgatgcaataactgcgtctgctaatccgaatattactgatatcgataaggaacagattgagttagaggcatgtcctacttgtggatcgtgttcaggaatgtttactgcgaattctatgaattgtttaatggaagttttaggattagcacaaccgggaaatggatcattattagcaacacattttgatcgtaaagaaatgtttttaaatgccggtcggtatattatgaatttatctcgattatattatgaaaaagataattctattgtattacctcgtaatatagcgaataagatggcttttgaaaatgctgctatgttagatattgctatgggaggttcaacgaatactgttttacatttgcttgcagctgctcaagaaggagaaatatcatttactatgaaagatattgatcgtttatctcgaaaggttcctcatttatgtaaaatagctccgaattctgatcgttattatatggaggattttcatagagctggaggagtaatgggtattcttggcgagttacagcgttgtggtttgttatatgagaatacatataatatattaaataaatctttattggatacgttaagacagtatgatataaaattatgtcaggatttagaaataaaaaggatgtatgcggcagctcctgctggagtacgtactattaagccgttttctcaaaataatagatggaattctttggatatagatcgttttgctggttgtattcggtctcaagagtatgcttatagtcaagatggaggtctggctgtattatatggaaatttagctccaaaagggtgtctagtaaaaacagctggggttatttcggagttaaaaagttttcgaggacctgctaaagtatatgaaagtcaggaagagtctgttcaggctattttaactggtcaagtatgttctggagatgtagtagtgattcgatatgaaggtccaaaagggggtcctggtatgcaggaaatgctgtatcctacatcttttttaagatctatgggtttggatttacattgtgctttgattacagatggaaggttttcaggaggaacatctggattatcagttgggcatatatctccagaggcggcatcagcaggtttaatcggtttagtgtgtgatggtgatatgattaatatcaatattagtaagcgtagtattgtattagaagtatctgattatgtattaaaaaatcgttatgaaatagaaatatctcgaggaacgaaagcatggactccatcttgtagaaatagagatgtatcgttttctttgaaggcttatgctaaattggttactagtgctgataccggtgcggttcgggatcggtctcaattgtaa

SEQ ID NO: 10549 - protein, 618 aa, Blochmannia floridanus
MPKYRSSTTTQGRNMAGARALWRATGMNSGDFNKIIVAVVNSFTQFVPGHVHLRNVGKLVSEEIYINGGVAKEFNTIAIDDGIAMGHSGMLYSLPSRDLIADSVEYVINAHCVDAMVCISNCDKITPGMLMAALRLNIPTVFVSGGPMESGSVTLSRYNNSSDVKLSLVDAITASANPNITDIDKEQIELEACPTCGSCSGMFTANSMNCLMEVLGLAQPGNGSLLATHFDRKEMFLNAGRYIMNLSRLYYEKDNSIVLPRNIANKMAFENAAMLDIAMGGSTNTVLHLLAAAQEGEISFTMKDIDRLSRKVPHLCKIAPNSDRYYMEDFHRAGGVMGILGELQRCGLLYENTYNILNKSLLDTLRQYDIKLCQDLEIKRMYAAAPAGVRTIKPFSQNNRWNSLDIDRFAGCIRSQEYAYSQDGGLAVLYGNLAPKGCLVKTAGVISELKSFRGPAKVYESQEESVQAILTGQVCSGDVVVIRYEGPKGGPGMQEMLYPTSFLRSMGLDLHCALITDGRFSGGTSGLSVGHISPEAASAGLIGLVCDGDMININISKRSIVLEVSDYVLKNRYEIEISRGTKAWTPSCRNRDVSFSLKAYAKLVTSADTGAVRDRSQL

SEQ ID NO: 10550 - DNA, 1842 bp, Brucella melitensis; identical to SEQ ID NO: 10288
  CDS (7)..(1842): transl_table=11

SEQ ID NO: 10551 - protein, 611 aa, Brucella melitensis
MPPYRSRTTTHGRNMAGARGLWRATGMKDEDFGKPIIAVVNSFTQFVPGHVHLKDLGQLVAREIESAGGVAKEFNTIAVDDGIAMGHDGMLYSLPSRELIADSVEYMVNAHCADAMVCISNCDKITPGMLMAALRLNIPVVFVSGGPMEAGKVVWEDSVKKLDLVDAMVAAADDHYTDEQVKAIERSACPTCGSCSGMFTANSMNCLTEALGLSLPGNGSTLATHADRKRLFVEAGHLIVDLARRYYEQDDESVLPRSIATFSAFENAMTLDIAMGGSTNTVLHLLAAAQEAEIDFTMADIDRLSRRVPVLCKVAPAVSSVHMEDVHHAGGIMGILGQLDNAGLLTTSIPTVHSETLAKALDHWDVTRTNSEMVHKFYSAAPGGVPTQVAFSQERRFDKVDTDREKGVIHSKEHAFSQDGGLAVLYGNLAEDGCIVKTAGVDDSILKFSGPARIFESQDSAVLGILNGKIKPGDIVLIRYEGPRGGPGMQEMLYPTSYLKSKGLGKACALITDGRFSGGSSGLSIGHVSPEAAEGGTIGLVREGDIIDIDIPNRKIHLAVDDATLAERRAEQDAAGWKPAEERKRKISTALKAYAAMATSAARGAVRKLPD

SEQ ID NO: 10552 - DNA, 1854 bp, Buchnera aphidicola subsp
  CDS (1)..(1854): transl_table=11
atgcctaaatatcgttcatttacaactacacatggtagaaatatgtctggagcgagatccctgtggcgtgctacaggaatgacagatgaagactttaaaaaacctattattgcaatagtaaattcattttctcaatttgtaccaggacatattcatttacaagaagttggaaaaataatctctaaagaaataaaaaaatatggtggcgttccaaaagaatttaatactattgcaatagatgatggaatagcaatgggacattcaggaatgttatattctctaccgtctcgtgaattaattgcagattctatagaatacgtaattaatgctcattgtgtcgattcaatgatctgtgtttcaaattgcgataaaataactccagctatgtttatggcatctttacgtttaaatataccatcagtctttgtttcaggaggaccaatggaagcaggtaaaataaaaacaaaagataaaacaaaaaaaattgatttagttgatgccataatacatggaggtgattctaataaatccgatgattttataagagaaattgaactttcagcttgccctacttgcggttcctgttcaggtatgtttacagcaaattctatgaattgtttaatagaagctataggtttaagtttacctggaaacggaacactattagcaactcatattgatcgtaaaaaattatttaaaaaatctgcacgaaatatcgttaaaattacgaaagattattaccttaataacaataaaaacgttttaccacgcaatatagcaaataaagaatctttcgaaaatgctatggctttagatattgccatgggaggatcaactaatactattttgcatttattagctgcagcatacgagggaaaagttgattttaaaatgtcagatattaacaacctttcaaaaaaaattcctcatatttgcaaagtagctccgagtactaatttgtatcatgtagaagatgtacatcgagcaggtggtgtaatgagaattttaggagaattaaatcgttctaatttattaaataaaaaaacagaaaacatattaggattgaatttagaaaaaacattaaaaaaatatgatattttgtctacaaaaaataaaaatgtaataaagatgtttcatgcaggtccaggtggtaatcgtacaattaaacctttttctcaaaattatagatggaataaattagacaaagatcgcgttaatggatgtattcgttcacatgaaaatgcctatagtaaaaatggtggattatctgttttgtatggaaatttagcaaaaaatggatgtataataaaaacagctagcatagataaaaaacattatattttttctggacctgctaaggtttatgaaagtcaagaagaagctgttagtgctattttatcaggtaaaattattgctggtgatgttatcgttattcgatatgaaggtcccaagggtgggcccggaatgcaagaaatgctatatccaacaacatatttaaaatctataaatttagataaacaatgtgcattaatcaccgacggacgtttttctggaggaacatctggtttatctataggtcatatttcgcctgaagcagcaaataagggtattatcgctttagtagaaaatggtgatgatattcaaattaatattgtaaacaagacaattcatttaaatattacagaaaaagaactaaatcttcgtatcattaaagaaaatgcaaaaggtttaaaagcatataaacctcttaatcgcaaaagaaatatttcttttgcccttcgtgcctatgcacattttgctttgagtgcagataaaggtgcaataagaaataaaaagaaactatttaatttttaa

SEQ ID NO: 10553 - protein, 617 aa, Buchnera aphidicola subsp
MPKYRSFTTTHGRNMSGARSLWRATGMTDEDFKKPIIAIVNSFSQFVPGHIHLQEVGKIISKEIKKYGGVPKEFNTIAIDDGIAMGHSGMLYSLPSRELIADSIEYVINAHCVDSMICVSNCDKITPAMFMASLRLNIPSVFVSGGPMEAGKIKTKDKTKKIDLVDAIIHGGDSNKSDDFIREIELSACPTCGSCSGMFTANSMNCLIEAIGLSLPGNGTLLATHIDRKKLFKKSARNIVKITKDYYLNNNKNVLPRNIANKESFENAMALDIAMGGSTNTILHLLAAAYEGKVDFKMSDINNLSKKIPHICKVAPSTNLYHVEDVHRAGGVMRILGELNRSNLLNKKTENILGLNLEKTLKKYDILSTKNKNVIKMFHAGPGGNRTIKPFSQNYRWNKLDKDRVNGCIRSHENAYSKNGGLSVLYGNLAKNGCIIKTASIDKKHYIFSGPAKVYESQEEAVSAILSGKIIAGDVIVIRYEGPKGGPGMQEMLYPTTYLKSINLDKQCALITDGRFSGGTSGLSIGHISPEAANKGIIALVENGDDIQINIVNKTIHLNITEKELNLRIIKENAKGLKAYKPLNRKRNISFALRAYAHFALSADKGAIRNKKKLFNF

SEQ ID NO: 10554 - DNA, 1677 bp, Campylobacter jejuni
  CDS (1)..(1677): transl_table=11
atgagaagcgatgcgataaaaaaaggacatttaagagcacctaatcgttctttacttcgtgcttgtggtttgaaagatgaagattttgacaaaccttttataggtgtagcaaatagctatatagatataatcccagggcattattttttaaatgattatgctaaaatcattaaagatgagatacgcaaaaatggttgcgtaccttttgagtttaataccataggcgtagatgatggtatagctatgggacatgaaggtatgctttattctttaccaagtcgtgaacttatcgcaaattctattgaaacggtgatgaatgctcatcaacttgatgctttaatctgtattccaaactgcgataaaattactcctggtatgttaatgggagctttaagggtcaatgttccaaccatttttgtaagtggtgggcctatggcttcaggagtaaccaaaaaaggagaaaagatcagccttagctctgtttttgaagctgtaggggcttatgaatccaaaaaaattagtgaagaagaatttaaagatatagaatgttcagcctgtccaagtggtggatcttgttcgggaatgtttacagcaaattctatgaataccttatgcgaagctatgggtatagcactagaaggcaatggaaccattttagctttaagtaaagaaagagaagagcttttaagaaaagcagcgcgtcgtatttgtgaaatcgccctagatgaacgttttaaaattcgtaatatcatcactcaaaaagctgtgcgtaatgctatggtagtagatatggcaatgggtggaagtagcaatacagttttacacatgcttgccatttcgcgtgaagcaggggtagcactagatattaaagatttaaatttcatctcaagcaaagttgcacacatagcaaaaatagccccatcgctaaatagtgtttatatggatgatatccacaaagcaggcggtgtgagtgcagttatggctgaaatttcaagcagacaaggacatattttagaacttgatgcactgaccattacaggagaaagtctcaaagaacgcttaaaaaatgccaaaatcaaagatgaaaatatcattcgtaaagtagataatgcttactcaaaagtaggtgggcttgccattttgtttggaaatttagccaagcaaggttgcgttataaaaaccgcaggaataatcggagaaagaaaatttaaaggcaaagctgtttgttttaactctcaagatgaagctataaaaggcattattaaaggcaaggtgcaaaaaggaaatgtttgtgtaatacgctatgaaggtccaaaagggggtcctggtatgcaagaaatgttaagtcctacttcacttttaatgggtatgggtttaggtgctgatgtagctttaatcaccgatggtcgttttagtggggctacaaggggtttaagcgtcggtcatatttcccctgaagcagctgaaggtggtcttataggacttttaaaagatggagatgaaatagaaattgatgtagatgcttatactatccatgcaaatgtaagtgaagaagaaattgctaaacgtaaaaaagaatttgcattgcctcaaaaagaggtgtcttcaagatggcttagaatgtatcaaaaacttgttagcaatgctagtaaaggtgcggttttagatatggaatga

SEQ ID NO: 10555 - protein, 558 aa, Campylobacter jejuni
MRSDAIKKGHLRAPNRSLLRACGLKDEDFDKPFIGVANSYIDIIPGHYFLNDYAKIIKDEIRKNGCVPFEFNTIGVDDGIAMGHEGMLYSLPSRELIANSIETVMNAHQLDALICIPNCDKITPGMLMGALRVNVPTIFVSGGPMASGVTKKGEKISLSSVFEAVGAYESKKISEEEFKDIECSACPSGGSCSGMFTANSMNTLCEAMGIALEGNGTILALSKEREELLRKAARRICEIALDERFKIRNIITQKAVRNAMVVDMAMGGSSNTVLHMLAISREAGVALDIKDLNFISSKVAHIAKIAPSLNSVYMDDIHKAGGVSAVMAEISSRQGHILELDALTITGESLKERLKNAKIKDENIIRKVDNAYSKVGGLAILFGNLAKQGCVIKTAGIIGERKFKGKAVCFNSQDEAIKGIIKGKVQKGNVCVIRYEGPKGGPGMQEMLSPTSLLMGMGLGADVALITDGRFSGATRGLSVGHISPEAAEGGLIGLLKDGDEIEIDVDAYTIHANVSEEEIAKRKKEFALPQKEVSSRWLRMYQKLVSNASKGAVLDME

SEQ ID NO: 10556 - DNA, 1677 bp, Campylobacter jejuni
  CDS (1)..(1677): transl_table=11
atgagaagcgatgcgataaaaaaaggacatttaaaagcacctaatcgttctttacttcgtgcttgtggtttgaaagatgaagattttgacaaaccttttataggtgtagcaaatagctatatagatataatcccaggacattattttttaaataattatgctaaaatcattaaagatgagatatgcaaaaatggttgtgtgccttttgagtttaataccataggtgtagatgatggtatagctatgggacatgaaggtatgctttattctttaccaagtcgtgaaatcatcgcaaattccattgaaacagtgatgaatgctcatcaacttgatgctttaatctgcatcccaaactgcgataaaatcactcctggtatgttaatgggagctttaagagtaaatgttccaaccatttttgtaagtggtgggcctatggcttcaggggtaactaaaaaaggagaaaagattagtcttagctctgtttttgaagctgtaggggcttatgaagccaaaaaaattagcgaagaagaatttaaagatatagaatgttcagcctgtccaagtggtggatcttgctcgggaatgtttacagcaaattctatgaataccttatgcgaagctatgggtatagcactagaaggtaatggaaccatcttagctttaagcaaagaaagagaagagcttttaagaaaagcagcgcgtcgtatttgtgaaatcgccttagatgagcgttttaaaattcgcaatatcatcactcaaaaagccgtgcgtaatgctatggtagtagatatggcaatgggtggaagtagcaatactgttttacacatgcttgccatttcgcgtgaagcaggggtggcactagatattaaagatttaaatttcatctcaagcaaagttgcacacatagcaaaaatagccccgtcgctaaatagtgtttatatggatgatatccacaaagcaggcggtgtgagtgcagttatggctgaaatttcaagcagacaaggacatattttagaacttgatgcactgaccattacaggagaaagtctcaaagaacgcttaaaaaatgccaaaatcaaagatgaaaatatcattcgtaaagtagataatgcttactcaaaagtaggtgggcttgccattttgtttggaaatttagccgagcaaggttgcgttataaaaaccgcaggaataatcggagaaagaaaatttaaaggcaaagctgtttgttttaactctcaagatgaagctataaaaggcattatcaaaggcaaggtgcaaaaaggaaatgtttgtgtaatacgctatgaaggtccaaaagggggtcctggtatgcaagaaatgttaagtcctacttcacttttaatgggtatgggtttaggtgctgatgtagctttaatcaccgatggtcgttttagcggggctacaaggggtttaagcgttggtcatatttcccctgaagcagctgaaggtggtcttataggacttttaaaagatggagatgaaatagaaattgatgtagatgcttatactatccatgcaaatgtaagtgaagaagaaattgctaaacgtaaaaaagaatttgcattgcctcaaaaagaggtgtcttcaagatggcttagaatgtatcaaaaacttgttagcaatgctagtaaaggtgcggttttagatatggaatga

SEQ ID NO: 10557 - protein, 558 aa, Campylobacter jejuni
MRSDAIKKGHLKAPNRSLLRACGLKDEDFDKPFIGVANSYIDIIPGHYFLNNYAKIIKDEICKNGCVPFEFNTIGVDDGIAMGHEGMLYSLPSREIIANSIETVMNAHQLDALICIPNCDKITPGMLMGALRVNVPTIFVSGGPMASGVTKKGEKISLSSVFEAVGAYEAKKISEEEFKDIECSACPSGGSCSGMFTANSMNTLCEAMGIALEGNGTILALSKEREELLRKAARRICEIALDERFKIRNIITQKAVRNAMVVDMAMGGSSNTVLHMLAISREAGVALDIKDLNFISSKVAHIAKIAPSLNSVYMDDIHKAGGVSAVMAEISSRQGHILELDALTITGESLKERLKNAKIKDENIIRKVDNAYSKVGGLAILFGNLAEQGCVIKTAGIIGERKFKGKAVCFNSQDEAIKGIIKGKVQKGNVCVIRYEGPKGGPGMQEMLSPTSLLMGMGLGADVALITDGRFSGATRGLSVGHISPEAAEGGLIGLLKDGDEIEIDVDAYTIHANVSEEEIAKRKKEFALPQKEVSSRWLRMYQKLVSNASKGAVLDME

SEQ ID NO: 10558 - DNA, 1662 bp, Carboxydothermus hydrogenoformans
  CDS (1)..(1662): transl_table=11
atgccaagtcacctcattaagtcaggcattagcaaagcaccgcatcgaagtttacttaaggctttgggaattaccgataatgagctaaaacgcccgtttatcggcgttgttcacagtttttcggaaattgttcccgggcacgttcatttaagaacggtggttgaagcggtaaaagccggagtgagaactgccggcggggttccctttgagctcccggtaatcggtgtttgcgatggtatagccatgaaccacgagggaatgaagtattcgcttgccagccgggaacttattgccgattcggtggaagtaatggttaaagctcaccagtttgatgcccttgtctttgttcccaactgcgacaaaattgttcccggaatgttaattgcggcaatgcgtttaaatcttccggctatttttgtcagcggtgggccgatgttagcgggaagagtaaggggaaaaagcgtttccctcagcaatgtttttgaaggggtaggggctgttgctgccggccttatgagtgaagaggaacttttagagtatgaaaattacgcctgccccggctgtggctcgtgtgccgggatgtttaccgccaactcgatgaactgtttaaccgaggccatagggatggcccttcccggaaacggcactattccggcggtgtatgccgaaaggttaaggcttgctaaactttccggggaaaaggtaatggaactactttcccaaaatatccgtccccgggatatctttacccgggagagtttgttaaatggtttggcggtagatatggctttagggtgctcgaccaatacggttttacatttggcggcggtagcttatgaggcgggagtggagttcgatttaaacctggttaacgaggtaagtgaaagaacgccaaacctctgccgtttaagcccggcgggaccgcaccacatggaagacctgtattttgccgggggaattccggcggtaatgaaggagctttcaaagaaaggtttgatcagagaagacctccttaccgtttcgggaaaaacggtgggggaaaacctgaaaaatgctgtcaataaaaatcccgaagttatccgacccattgataatccttactcggagacggggggcttagcaattttgtttggaaccctggcaccccggggagcggtggtgaaaaaatcggcggttttaccggaaatgttaacccataccggtccggcccgggtttttgatagcgaagaagatgctaccactgccattttaaccgggcaaataaagaaaggcgatgtggtggttatccgctatgaaggccccaaaggtggtcctggcatgcgggagatgttaacaccaacttcggcccttgccgggatgggcttggataaagatgtggcattgattaccgatggccggttttcgggagcaacccggggagcagcaatcgggcatgtttctcccgaaggttatgaaggtggaccgatagctttggttcgggaaggagacttaataaaaatagatattccggggcaaagattagatcttttagtatcagaagaagaacttaaccaaagaaaagcccggttacaaattcccgagcctaagattaaagaaggttaccttgctcgttatcaaaaattagtgagctctgctaatttaggtgcggtgtttttaaagtag

SEQ ID NO: 10559 - protein, 553 aa, Carboxydothermus hydrogenoformans
MPSHLIKSGISKAPHRSLLKALGITDNELKRPFIGVVHSFSEIVPGHVHLRTVVEAVKAGVRTAGGVPFELPVIGVCDGIAMNHEGMKYSLASRELIADSVEVMVKAHQFDALVFVPNCDKIVPGMLIAAMRLNLPAIFVSGGPMLAGRVRGKSVSLSNVFEGVGAVAAGLMSEEELLEYENYACPGCGSCAGMFTANSMNCLTEAIGMALPGNGTIPAVYAERLRLAKLSGEKVMELLSQNIRPRDIFTRESLLNGLAVDMALGCSTNTVLHLAAVAYEAGVEFDLNLVNEVSERTPNLCRLSPAGPHHMEDLYFAGGIPAVMKELSKKGLIREDLLTVSGKTVGENLKNAVNKNPEVIRPIDNPYSETGGLAILFGTLAPRGAVVKKSAVLPEMLTHTGPARVFDSEEDATTAILTGQIKKGDVVVIRYEGPKGGPGMREMLTPTSALAGMGLDKDVALITDGRFSGATRGAAIGHVSPEGYEGGPIALVREGDLIKIDIPGQRLDLLVSEEELNQRKARLQIPEPKIKEGYLARYQKLVSSANLGAVFLK

SEQ ID NO: 10560 - DNA, 1854 bp, Caulobacter crescentus
  CDS (1)..(1854): transl_table=11
atgcctccctatcgctcacgcaccaccacccatggccgcaacatggccggcgcccggggcctctggcgcgccaccggcatgaaggacgaggacttcggcaagccgatcatcgccgtggccaacagcttcacccagttcgtgcccggccacgtgcacctgaaggacctgggccaactggtcgcccgcgagatcgaggcggccgggggcgtggccaaggagttcaacaccatcgccgtcgacgacggcatcgccatgggccatggcggcatgctgtactcgctgcccagccgtgacctgatcgccgacagcgtcgaatacatggtcaacgcccactgcgccgacgcgatcgtctgcatctccaactgcgacaagatcacgcccggcatgctgatggccgccatgcgcctgaacatcccggtggtcttcgtttccggcgggccgatggaggccggcaaggtgacggtgaagggcaagatccgcgcgctggacctcgtcgacgccatggtcgtggccgccgacgacagctattccgacgaagaggtcgaggcgatcgagaaggccgcgtgcccgacctgcggctcgtgctcgggcatgttcaccgccaactcgatgaactgtctgaccgaagcccttggcctgtcgctgcccggcaacggctcggtgctggccacccacgccgatcgtgaggccctgttcaaggaagccggccgtgtggtcgtggatctctgccagcgttggtacgagcaggaggacgccaccgccctgccgcgcggcatcgccacccgcgccgcgttcgaaaacgccatgagtctcgacatcgccatgggcggctcgaccaacaccgtgctgcacctgttggccgccgcgcatgagggcgggatcgacttcagcatggccgatatcgaccgcctgtcgcgccacgtgccgtgcctgtccaaggtggccccggccaagagcgacgtgcacatggaggacgtccaccgcgccgggggcgtcatggccattctgggcgagctggagcgcggcggcctgatcgacgccagccagccgaccgtccacgccccgaccatgggcgaggccctggcgcgctgggatatcggccgcaccaacagccagatcgcccacgagttcttcaaggccgcgccgggcggcaagccgacccaggtggccttcagccaggccgcccgttgggaggagctggacctggatcgcgaaaacggcgtcatccgctcggtcgagcatccgttctcgaaggacggggggctcgcggtcctgttcggcaacctcgcgcctgagggctgcattgtgaagaccgccggggtcgacgagtcgatcctgaccttccggggcactgcccgcgtgttcgaaagccaggacgcggcggtcagcggcattctgggcggtcaggtcaaggccggcgaggtcgtggtcatccgctacgaaggtcccaagggcgggccgggcatgcaggagatgctgtatccgaccacctatctgaaatcgaagggcctgggcgcggcctgcgccctggtcaccgacggccgcttctcgggcggcacctcgggtctgtcgatcggccacgtctcgcccgaagccggcgagggcggcctgatcgccctggtggagaccggcgacccgatcctgatcgacatcccgacgcgcgggatcacgctggaggtctccgacgcggtgctggccgcccgtcgcgaggcgcagctggcgcggggcaaggacgcctggacgccgctcaaccgcaagcgtgacctgacccccgccctgcgcgcctacgccgccatgaccaccaacgccgcccgcggcgcggtgcgcgacgtcagccagatcgagcgggggtag

SEQ ID NO: 10561 - protein, 617 aa, Caulobacter crescentus
MPPYRSRTTTHGRNMAGARGLWRATGMKDEDFGKPIIAVANSFTQFVPGHVHLKDLGQLVAREIEAAGGVAKEFNTIAVDDGIAMGHGGMLYSLPSRDLIADSVEYMVNAHCADAIVCISNCDKITPGMLMAAMRLNIPVVFVSGGPMEAGKVTVKGKIRALDLVDAMVVAADDSYSDEEVEAIEKAACPTCGSCSGMFTANSMNCLTEALGLSLPGNGSVLATHADREALFKEAGRVVVDLCQRWYEQEDATALPRGIATRAAFENAMSLDIAMGGSTNTVLHLLAAAHEGGIDFSMADIDRLSRHVPCLSKVAPAKSDVHMEDVHRAGGVMAILGELERGGLIDASQPTVHAPTMGEALARWDIGRTNSQIAHEFFKAAPGGKPTQVAFSQAARWEELDLDRENGVIRSVEHPFSKDGGLAVLFGNLAPEGCIVKTAGVDESILTFRGTARVFESQDAAVSGILGGQVKAGEVVVIRYEGPKGGPGMQEMLYPTTYLKSKGLGAACALVTDGRFSGGTSGLSIGHVSPEAGEGGLIALVETGDPILIDIPTRGITLEVSDAVLAARREAQLARGKDAWTPLNRKRDLTPALRAYAAMTTNAARGAVRDVSQIERG

SEQ ID NO: 10562 - DNA, 1683 bp, Chlorobium tepidum
  CDS (1)..(1683): transl_table=11
atgagatcagataccataaaaaaaggatttgaaaaggctccgcaccgcagtctcctcaaggcaaccggatgcgtttcgacacgagatgatttctcgaaaccgttcatcggcatctgcaactccttcaacgagctgattccgggccacgcgcatttgcaggagctgggccgcatcgccaaggaagccgtgcgcgaggctggcggcgtgccgttcgagttcaacaccatcggcgtctgcgacggcattgcgatgggccacgtcggcatgcgctactcgctggccagccgcgagctgatcgccgactcggtcgagaccgtcgtcgaagcgcaccggctcgacggcctggtctgcatcccaaactgcgacaaaatcacccccggcatgatgatgggcgcgctcaggacgaacgtgccggttgtcttcgtctcaggcgggccgatgaaggccgggcacaccccatcgggcaaaacggtcgatcttatctcggttttcgaggcggtcggcaagtgcagcaccggcgaaatcacggaggatgaactccagaccgtcgaggagtgcggctgcccaggatgcggctcctgctccggcatgttcacggccaactcgatgaactgcctctgcgaagcgctcggtttcgcgctgcccggcaacggcacgatccttgccgccgatccgcgacgcaacgagctggtcaaagccgctgccggacgcatcatcgatctggtgaagaaggaggttcgcccgcgccagattctgacccgtacgtcgatgctcaacgccttcgcgctcgacctggcgatgggcggcagcaccaacacgattctgcacacgctggccatcgcaagcgaagctgaactcgacttcgacttctcggagctgaacgacctgtcagccaaaacgccctatatctgcaaggtgagcccggcaaccaccgaggtacacatcgaggatgttgatcgcgcgggcggcatttcggccattctgaaggagctgtcgaaggttgaggggctgctcgacctctccgccccgaccgtcaccggcaagacgctcggcgagaatatcgccagcgccgaggtgctcgaccgcacggtgattcgctccgtcgaggagccgtattcgaccaccggcggtctggcagtgctctacgggaaccttgcgccgaacggcgcagttgtcaaaaccggcgcggtcagcccggcgatgatgaagcacaccggcccggcgaaggtctatgactgccaggacgacgccattgcgggcattatgaatggcgacgtcaagtcgggcgatgtggtggtgatccgctacgaaggcccgcgcggcggccccgggatgccggagatgctctcgccaaccagcgccatcataggccgcggcctcggcgattcagtcgcgctcatcaccgacgggcgcttctccggcggatcgcgtggcgcctgtgtaggtcacgtctcgcccgaagccgccgaccgcggcccgatcgcggcggtacaaaccggcgacatgatcaccatcgacataccggctcgttcgatgacggtagcactcgatgacgagaccatccgccagcgcatcgaggcgttgccaaagttcgagccgaaaatcaaaaaagggtatctggcacgatacgcacgaatggtcacctcggccaataccggtgcggttctgaaaaacgatttttaa

SEQ ID NO: 10563 - protein, 560 aa, Chlorobium tepidum
MRSDTIKKGFEKAPHRSLLKATGCVSTRDDFSKPFIGICNSFNELIPGHAHLQELGRIAKEAVREAGGVPFEFNTIGVCDGIAMGHVGMRYSLASRELIADSVETVVEAHRLDGLVCIPNCDKITPGMMMGALRTNVPVVFVSGGPMKAGHTPSGKTVDLISVFEAVGKCSTGEITEDELQTVEECGCPGCGSCSGMFTANSMNCLCEALGFALPGNGTILAADPRRNELVKAAAGRIIDLVKKEVRPRQILTRTSMLNAFALDLAMGGSTNTILHTLAIASEAELDFDFSELNDLSAKTPYICKVSPATTEVHIEDVDRAGGISAILKELSKVEGLLDLSAPTVTGKTLGENIASAEVLDRTVIRSVEEPYSTTGGLAVLYGNLAPNGAVVKTGAVSPAMMKHTGPAKVYDCQDDAIAGIMNGDVKSGDVVVIRYEGPRGGPGMPEMLSPTSAIIGRGLGDSVALITDGRFSGGSRGACVGHVSPEAADRGPIAAVQTGDMITIDIPARSMTVALDDETIRQRIEALPKFEPKIKKGYLARYARMVTSANTGAVLKNDF

SEQ ID NO: 10564 - DNA, 1857 bp, Chromobacterium violaceum
  CDS (1)..(1857): transl_table=11
atgcctcaataccgctcccgcacttccaccgccggccgcaacatggcgggtgcccgcgcgctatggcgcgccaccgggatgaccgacgccgacttcggcaagcccatcatcgccatcgccaactccttcacccagttcgtgcccggccacgtgcacctgcagaacatgggccagctggtggcgcgcgagatcgaaaaagccggcggcgtcgccaaggaattcaacaccatcgccatcgacgacggcatcgcgatgggccacggcggcatgctgtacagcctgccttcccgcgacctgatcgccgacagcgtcgagtacatggtcaacgcccactgcgccgacgcgctggtgtgcatctccaactgcgacaagatcacccccggcatgctgatggcggcgatgcggctcaacattccggtggtgttcgtctccggcgggccgatggaggccggcaaggtgcagtggggcaacgaagtgcgcaagctggacctggtggacgcgatggtggaggccgccaacagcgcggtgtccgacgccgacgtcgaccgcgtcgagcgctcagcctgtccgacctgcggctcctgctccggcatgttcaccgcgaactcgatgaattgcctgaccgaggcgctgggcctcagcctgcccggcaacggcagcctggtggccacccacgcggaccggaaagaattgttcctcaaggccggccgcctgatcgtcgaattggccaagcgccattacgagggcgaggactattccatcctgccgcgcggcatcgccaccaaacaggccttcgagaacgcgatgagcctggacgtggcgatgggcggctccaccaataccgtgctgcacctgttggccgccgccagcgaggccggcgtggacttcaagatggccgacatcgaccgcatcagccgcggcgtgccctgcctgtccaaggtggcgccggcgacgcaaaaataccatatggaggacgtgcaccgcgccggcggcgtgatcggcatcctggccgagctggaccgcgccggcctgatccaccgcgacgtcgccaccgtgcacagccccagcctgggggcagccatcgagcagtgggacgtgatgcgccacggcgaaggcagcgagccgcaccgcctgttccgcgcggcgccgggcggcgtggccaccaccatcgccttcagccagagcatgcgctacccgacgctggacgacgaccgcgccgacggctgcatccgcgaccaggcgcacgcctattcgcaggacggcggcctggcggtgctgtatggcaatatcgccgagcgcggctgcatcgtgaagacagccggcgttgacgaatcgatactgaaattcaccggccgcgcccgcatcttcgaaagccaggacgcggcggtggaaggcatcctcgccgaccagatcgtcgccggcgacatcgtcatcatccgctacgagggaccgaagggcggaccaggcatgcaggagatgctgtacccgacttcgtatctgaagtccaaggggctgggcaaggcctgcgccttgctgaccgacggccgcttctccggcggcacctccggcctgtccatcggccacgcctcgccggaggcggccgagggcggcgcgatcggtctggcgcaagagggcgacacggtggagatcgacatccctaaccgccgcatccatctggccgtttccgatgaggagttggccaagcgccgcgcggcgatggaggcgaaaggccgcgacgcctggaaaccgctgggccgcgaacgggtggtcagcccggcgctgcgcgcctacgcggcgatgaccaccagcgccgacaccggcgcggtgcgcgatgtgtcgcaagtggaacgcaaataa

SEQ ID NO: 10565 - protein, 618 aa, Chromobacterium violaceum
MPQYRSRTSTAGRNMAGARALWRATGMTDADFGKPIIAIANSFTQFVPGHVHLQNMGQLVAREIEKAGGVAKEFNTIAIDDGIAMGHGGMLYSLPSRDLIADSVEYMVNAHCADALVCISNCDKITPGMLMAAMRLNIPVVFVSGGPMEAGKVQWGNEVRKLDLVDAMVEAANSAVSDADVDRVERSACPTCGSCSGMFTANSMNCLTEALGLSLPGNGSLVATHADRKELFLKAGRLIVELAKRHYEGEDYSILPRGIATKQAFENAMSLDVAMGGSTNTVLHLLAAASEAGVDFKMADIDRISRGVPCLSKVAPATQKYHMEDVHRAGGVIGILAELDRAGLIHRDVATVHSPSLGAAIEQWDVMRHGEGSEPHRLFRAAPGGVATTIAFSQSMRYPTLDDDRADGCIRDQAHAYSQDGGLAVLYGNIAERGCIVKTAGVDESILKFTGRARIFESQDAAVEGILADQIVAGDIVIIRYEGPKGGPGMQEMLYPTSYLKSKGLGKACALLTDGRFSGGTSGLSIGHASPEAAEGGAIGLAQEGDTVEIDIPNRRIHLAVSDEELAKRRAAMEAKGRDAWKPLGRERVVSPALRAYAAMTTSADTGAVRDVSQVERK

SEQ ID NO: 10566 - DNA, 1659 bp, Clostridium acetobutylicum
  CDS (1)..(1659): transl_table=11
gtgaattctgataaggcaatgaaaggagtagaaagagctccccacagatctctttttaaggctttaggttttatagatgaggaaatggatagacctcttataggaatagctaattcttacagcgaacttataccaggtcatatgaatcttgataaaatagttaaggctgtaaaagatggaataagaatggcaggaggtgttcctgtagaatttggaaccattggagtttgtgatggtatttctatgaatcataagggaatgagttattctcttccatcaagacagattatagcagatagtgttgagatcgtggctaaagcacatgctcttgatgggcttgtacttgtgccaaattgcgataaggtagttccaggaatgcttatggcggctggaagagttaacataccttcaatagtaataagtggaggaccaatgctttctggtagaacaaatggaagggtcacagatctaaactctgtattcgaagcagttggagcagtttcagcgggaaaaatgtctttagaagaattagctgagcttgagaatacggcatgccctacttgtgggtcttgttctggaatgtttacagcaaattcaatgaactgtctttctgaggttttaggtcttgcgcttccttacaatggaactataccagctgtattttcagaaagattaagacttgctaaaaaggcaggtatgaaaatagttgaattggttcaaaaggacataagaccaagtgacatacttacagaagctgcatttatgaatgcagtcgcaatggatatggcactagggggttctactaattcacttcttcatttaccagctatagcttatgaatgtgacgtggatattaatttcgataaaataaatgagataagtgaaaagattccgcatgtgtgtaagttaagtcctgcaggatttcatcacatagaggacttgcatatggcaggtggaataccggctgttgttaatggaattataaaaaaaggacttctaaatggagagtgtatgacagttacaggtaaaactttgtatgagaatgtgaaggatgcgaaaatcaaaaacattgatgtaataagaatagataatccttatagtgagacaggtggactttcagtattgagaggaaatttagctccagatggcgctatagttaaaaaggcagcagtagcacccgaaatgatgcagcatactggtccggctagggtatttaatagtgaagaggaagtttctaaggcaatacttggtggaaaaataaatccaggtgatgttgttgtgataaggtatgagggccctaagggtggaccaggaatgaaggaaatgctttcgccaacagcttcacttgcaggaatgggacttgataagagtgtggcgcttataactgatggaagattctcaggtgctacaagaggagcatccattggacatgtatctccagaagcggcagaaggtggtccaatagggttggttgaagagggagacacaattgaaatagatattgaaaagaaaactataaacctacttgttccggaagaaaaattaaaaaacagaaaaccggaaaaggttgaaaaacctgtgaagggatatttaaatacgtataggcagggggtatcatctgcttgtacaggagcagtttttcatagtacaaaggagtga

SEQ ID NO: 10567 - protein, 552 aa, Clostridium acetobutylicum
MNSDKAMKGVERAPHRSLFKALGFIDEEMDRPLIGIANSYSELIPGHMNLDKIVKAVKDGIRMAGGVPVEFGTIGVCDGISMNHKGMSYSLPSRQIIADSVEIVAKAHALDGLVLVPNCDKVVPGMLMAAGRVNIPSIVISGGPMLSGRTNGRVTDLNSVFEAVGAVSAGKMSLEELAELENTACPTCGSCSGMFTANSMNCLSEVLGLALPYNGTIPAVFSERLRLAKKAGMKIVELVQKDIRPSDILTEAAFMNAVAMDMALGGSTNSLLHLPAIAYECDVDINFDKINEISEKIPHVCKLSPAGFHHIEDLHMAGGIPAVVNGIIKKGLLNGECMTVTGKTLYENVKDAKIKNIDVIRIDNPYSETGGLSVLRGNLAPDGAIVKKAAVAPEMMQHTGPARVFNSEEEVSKAILGGKINPGDVVVIRYEGPKGGPGMKEMLSPTASLAGMGLDKSVALITDGRFSGATRGASIGHVSPEAAEGGPIGLVEEGDTIEIDIEKKTINLLVPEEKLKNRKPEKVEKPVKGYLNTYRQGVSSACTGAVFHSTKE

SEQ ID NO: 10568 - DNA, 1863 bp, Colwellia psychrerythraea
  CDS (1)..(1863): transl_table=11
atgcctaaattaagatctgcaacttctactcaaggccgtaacatggccggtgcccgtgctttatggcgtgctacaggcatgacagatggcgattttgggaaacctattatcgcggtagtgaactctttcactcaatttgtacccggtcatgtgcatttgaaagacatgggacaattagttgctggtgccattgaagaagcaggcggtgttgctaaagaattcaacactatcgctgtagatgacggtatcgctatgggtcattcaggtatgctttatagcttaccttcacgtgatttaattgccgactcagttgagtatatggtaaatgctcattgtgctgatgccatggtttgtatctcaaactgtgacaaaatcaccccaggtatgatgatggcagcaatgcgcttaaacatcccagtaatttttgtatctggtggtccaatggaagccggtaaaacaaaattgagtgatcaaattattaagcttgatttagttgatgccatgattaaaggtgcggatccaacagtaagtgatgaagacagtgataaaattgaacgctctgcctgtccgacgtgtggttcatgttcaggtatgttcaccgccaactccatgaactgtttagcagaagcattaggtttagctcttccgggtaatggttcaatgttggcaacacatgctgatagagagcaattattcttaaaagcgggtaaacaaattgttgaattaacgaaacgttattaccaagataacgatgaatcagctctaccacgtaatattgcttgtaaagaggcattacacaatgccatgtgtttagatattgcgatgggtggttcaaccaacactatcttgcatttattggcaacagcacaagaagctgaaattgattacaccatggaagacatggataaattatcacgcatcgtgccacagttatgtaaagttgcgccatcaacacctgagtatcatatggaagatgtgcatcgcgccggtggtgtgatttcaattcttggtgaattatcgcgtgctggtttattaaagactgacgtacctaatgttttaggtactacgttagctgatgtaattgccaaatatgacattacccttactgacgatgaagacattaaaaaattctaccgtgctggccctgcaggtattcgcactactaaagcctttagtcaagattgtcgctgggataccttagacgatgaccgagtaaatggttgtattcgtaaccttgaaaatgccttttcgttagaaggtggtttagcggtactttcaggtaatattgcagtagatggctgtgttgttaaaactgcaggtgtaagtgacgacaacttagtatttacaggtcctgcacacatttttgaaagccaagatgatgccgtagccggtgttttagacggaaaagtagtcgctggtgaagtggttgttattcgttatgaaggccctaaaggcggcccaggtatgcaagaaatgctttatccaaccacttacttaaagtcgatgggattaggtaaagcctgtgccttattaactgatggtcgcttctctggtggtacttctggtttatccattggtcatgtttctcctgaagcagctgacggcggcacaatcgccttagttgaacaaggtgatatcattcatattgatattcctacccgtgaaattaccctacaagtatctgaagaagtacttgaagaacgtcgtgctgcaatgatttctaaaggtaagcaagcttggaaaccagcagatcgtgttcgtccaattagctacgcacttaaaaactacgcaatgttagccactagtgctgataaaggtgctgtgcgtaacagagacttattagatggtttagttgataagtaa

SEQ ID NO: 10569 - protein, 620 aa, Colwellia psychrerythraea
MPKLRSATSTQGRNMAGARALWRATGMTDGDFGKPIIAVVNSFTQFVPGHVHLKDMGQLVAGAIEEAGGVAKEFNTIAVDDGIAMGHSGMLYSLPSRDLIADSVEYMVNAHCADAMVCISNCDKITPGMMMAAMRLNIPVIFVSGGPMEAGKTKLSDQIIKLDLVDAMIKGADPTVSDEDSDKIERSACPTCGSCSGMFTANSMNCLAEALGLALPGNGSMLATHADREQLFLKAGKQIVELTKRYYQDNDESALPRNIACKEALHNAMCLDIAMGGSTNTILHLLATAQEAEIDYTMEDMDKLSRIVPQLCKVAPSTPEYHMEDVHRAGGVISILGELSRAGLLKTDVPNVLGTTLADVIAKYDITLTDDEDIKKFYRAGPAGIRTTKAFSQDCRWDTLDDDRVNGCIRNLENAFSLEGGLAVLSGNIAVDGCVVKTAGVSDDNLVFTGPAHIFESQDDAVAGVLDGKVVAGEVVVIRYEGPKGGPGMQEMLYPTTYLKSMGLGKACALLTDGRFSGGTSGLSIGHVSPEAADGGTIALVEQGDIIHIDIPTREITLQVSEEVLEERRAAMISKGKQAWKPADRVRPISYALKNYAMLATSADKGAVRNRDLLDGLVDK

SEQ ID NO: 10570 - DNA, 1857 bp, Dechloromonas aromatica
  CDS (1)..(1857): transl_table=11
atgccccaataccgctcccacacctcgacccacggccgcaacatggctggtgcccgctccttgtggcgcgccaccggcatgaaggatggtgacttcggcaagccgatcatcgccgtggtcaatagcttcacccagttcgtgccgggccacgtccatctgaaggacatggggcagctggtggcgcgcgaaatcgaagccgctggcggcgtcgccaaggaattcaacaccatcgccatcgacgacggcatcgccatgggccacagcggtatgctgtattcgctgcccagccgcgacctgatcgccgactcggtcgaatacatggtcaacgcccactgtgccgacgccatggtctgcatctccaactgcgacaagatcaccccgggcatgctgatggccgccatgcgcctcaacatcccggtcatcttcgtgtccggtggcccgatggaagccggcaaggtcaagattcaggggcaagttatccatctcgacctcattgatgccatggtcaaggctgcagatcactcggtttcccaagctgaactggatgatgtcgagcgttcggcctgcccgacctgtggctcctgctccggcatgtttaccgccaattcgatgaactgcctgaccgaagcctttggcctcagcctgcccggcaacggtaccgtcgtcgccacgcacgccgaccgcaagcaactcttcctgcgtgccggtcgccagatcgtcgagctgtgcaagcgctactacgagcaggatgatgcctcggtcctgccgcgtgcgatcgccaccaaggccgccttcgaaaatgccatgaccctcgatgtcgccatgggtggctcgaccaacaccgtgctgcatatcctggctacggcgcaggaggccggtgttgacttcacgatggccgacatcgaccgcatttcgcgctcggtgccgtgcctgtgcaaggtcgcgccgatgactgacaagtatcacattgaagacgtccatcgcgctggtggcatcatgggcatcctcggcgaactcgaccgggctggtctgatcaatcgtgacgtcccgaacgtctatgcaaaaaacctcggtgaagcaatcgaccgttgggatgtggtgcgccagcacgacgtcaaggtgcacgaattcttcaaggcagcgcccggtggcgtgccaacgcaagtcgctttctcgcaggatcgccgcttcaacgaactggatattgatcgtacccacggctgtatccgcaacaaggccaacgcctattcgcaggaaggtggtctggctgtgctctacggcaacatcgcgctggatggttgtatcgtcaagacagccggtgtcgacgagtcgatctggaaattcaccggcaaggcccgcgtttttgaaagccaggatgctgcggtcgaagccatcctgggcgagaaaatcgtcgccggcgacgttgtcgttatccgctacgaaggcccgaagggcggccccggcatgcaggaaatgctctacccgacgtcttatctgaaatcgatgggtctcggcaaggaatgtgcgctgctcaccgatggtcgtttctccgggggcacttccggtctctccattggtcatgcctcgcccgaggcggccgatggcggcgccatcggtctggtggaggagggcgataccatcgaaatcgacatcccgaatcgtcgcatccatctggcggtcaccgatggcgagctggcccagcgtcgcgccgcgatggaagccaagggcgaagccgcctggcagccggttagtcgcgaacgggtcatttcgcctgccttgcaagcctacgccctgatggcgacgtcggccgacaagggtgccgtgcgcgacgtcaaacagatccagcgccgcaagtga

SEQ ID NO: 10571 - protein, 618 aa, Dechloromonas aromatica
MPQYRSHTSTHGRNMAGARSLWRATGMKDGDFGKPIIAVVNSFTQFVPGHVHLKDMGQLVAREIEAAGGVAKEFNTIAIDDGIAMGHSGMLYSLPSRDLIADSVEYMVNAHCADAMVCISNCDKITPGMLMAAMRLNIPVIFVSGGPMEAGKVKIQGQVIHLDLIDAMVKAADHSVSQAELDDVERSACPTCGSCSGMFTANSMNCLTEAFGLSLPGNGTVVATHADRKQLFLRAGRQIVELCKRYYEQDDASVLPRAIATKAAFENAMTLDVAMGGSTNTVLHILATAQEAGVDFTMADIDRISRSVPCLCKVAPMTDKYHIEDVHRAGGIMGILGELDRAGLINRDVPNVYAKNLGEAIDRWDVVRQHDVKVHEFFKAAPGGVPTQVAFSQDRRFNELDIDRTHGCIRNKANAYSQEGGLAVLYGNIALDGCIVKTAGVDESIWKFTGKARVFESQDAAVEAILGEKIVAGDVVVIRYEGPKGGPGMQEMLYPTSYLKSMGLGKECALLTDGRFSGGTSGLSIGHASPEAADGGAIGLVEEGDTIEIDIPNRRIHLAVTDGELAQRRAAMEAKGEAAWQPVSRERVISPALQAYALMATSADKGAVRDVKQIQRRK

SEQ ID NO: 10572 - DNA, 1824 bp, Deinococcus radiodurans
  CDS (1)..(1824): transl_table=11
atgccgacttaccgttccagaaccaccaccgagggccgtaatatggccggcgcccgtgccctgtggcgcgccaccggcatgaccgacggcgatttccagaagccgatcatcgcggtggtcaactcgttcacccagttcgtgccggggcacgtgcacctcaaggacctcgggcaactcgtcgcgggtgaaatcgcggcggcgggcggcgtggcgaaggagttcaacaccatcgccgtggacgacggcatcgccatgggccacgacgggatgctctactcactgcccagccgcgaaatcatcgccgacagcgtggagtacatggtcaacgcccactgcgccgacgcgatggtttgcatctccaactgcgacaagattacccccggcatgctgatggccgcgctgcgcctcaatatccccaccgtgttcgtctcgggcgggccgatggaagcgggcaaggtcaagctcggtgacggcgagcacgcgctggacctggtggacgcaatggtgatggccgccgacgacagcgtgagcgaggaagacatcgaactggtggagcgctcggcctgccccacctgcggctcgtgctcgggcatgttcaccgccaactcgatgaactgcctgacggaggcgctgggcctctcgctgccgggcaacggctcggtgctggcgacccactccgaccgccagaacctgttcaagcgcgccgggcacctgatcgtggacctcgccaagcgctactacgagggcgatgacgagagcgtgctgccgcgcagtgtcgccacctacgacgccttcgagaacgccatgaccctcgacatctcgatgggcggctcgaccaatacggtgctgcacctgctggccgccgcgcacgaggccggggtggatttcaccatgcaggacatcgaccagctctcgcggcgggtgccggtgctgtgcaaggtggcgcccgccaagaacgacgtgcacatggaagacgtgcaccgcgctgggggcatcatgggcattctgggcgagcttgaccgcgccgggctgctgaagaccgacgtgagcaccgtacacgcccccagcatgagcgccgccctgaacgagtgggacgtggtccgcaatgagaaccaccacgagttctaccgcgccgcgcccggcggcattcccaccgtcttcgccttctcgcagtcgcgccgttaccgcgaactcgacaccgaccgggaagcaggcgtcattcgcagcgccgagcacgctttctcgcaggacggcgggctggcggtgctgtacggcaacctcgccgaagacggctgcatcgtcaagacggcgggcgtggacgaatccatcctgaagttcagcggcccggcgcgcgttttcgagtcgcaagacgcctcggtggacgccatcctcagcggcgaagtcaaggaaggcgaggtcgtgctgattcgctacgaaggcccacgcggtggccccggcatgcaggaaatgctctacccgacgagctacctcaagtccaaggggctgggcaaagcctgcgcgctggtcaccgacggtcgtttctcgggcggcagcagcggcctgagcatcggccacgtctcgcccgaggcggcggagggcggcaccatcggcctggtcgagacgggcgacctcatcgaaatcgacatcccgaaccgcaccattcacctcgccgtgccggacgctgaactcgccgcccgccgccagaagcgcgaggaagaaggctggcaccccgccgaaccccggccccgcaaaatcaccgctgccctacgcgcctatgcgtctatgacgacgagcgcttcgcggggcgcggtgcggaatatctga

SEQ ID NO: 10573 - protein, 607 aa, Deinococcus radiodurans
MPTYRSRTTTEGRNMAGARALWRATGMTDGDFQKPIIAVVNSFTQFVPGHVHLKDLGQLVAGEIAAAGGVAKEFNTIAVDDGIAMGHDGMLYSLPSREIIADSVEYMVNAHCADAMVCISNCDKITPGMLMAALRLNIPTVFVSGGPMEAGKVKLGDGEHALDLVDAMVMAADDSVSEEDIELVERSACPTCGSCSGMFTANSMNCLTEALGLSLPGNGSVLATHSDRQNLFKRAGHLIVDLAKRYYEGDDESVLPRSVATYDAFENAMTLDISMGGSTNTVLHLLAAAHEAGVDFTMQDIDQLSRRVPVLCKVAPAKNDVHMEDVHRAGGIMGILGELDRAGLLKTDVSTVHAPSMSAALNEWDVVRNENHHEFYRAAPGGIPTVFAFSQSRRYRELDTDREAGVIRSAEHAFSQDGGLAVLYGNLAEDGCIVKTAGVDESILKFSGPARVFESQDASVDAILSGEVKEGEVVLIRYEGPRGGPGMQEMLYPTSYLKSKGLGKACALVTDGRFSGGSSGLSIGHVSPEAAEGGTIGLVETGDLIEIDIPNRTIHLAVPDAELAARRQKREEEGWHPAEPRPRKITAALRAYASMTTSASRGAVRNI

SEQ ID NO: 10574 - DNA, 1668 bp, Desulfovibrio desulfuricans
  CDS (1)..(1668): transl_table=11
atgagaagcaagaaaatgacacacgggcttgaaaaagccccgcatcgttcgctgctgtacgccctgggcctgacccgtgaagaattgtccagaccgcttgtgggggtggtcaattccgccaacgaggtggtaccgggacacatccacctgcacaccattgccgaagcagtgaaggccggagtgcgcgccgcgggtggcacacccatggagtttcccgccatagcggtatgcgacgggctggccatgaaccatgaaggcatgcgtttttcgttgcccagccgcgaaatcattgcagattccattgagataatggccacggctcatccttttgatgcgctggtcttcatacccaactgtgataagtcggttcccggcatgcttatggccatgctgcgtatgaacgtgccgtccattcttatcagcggcggccccatgatggcaggcacgggcaacggcaaggccgcagacctcatcaccgtatttgaaggtgtgggcatggtgcggcagggcagaatgacggaagacgaactggagcagctttccgagacggcatgtcccggctgcgggtcgtgcgcgggcatgttcacggcaaactccatgaactgtctttccgaaaccatagggcttgcgctgccgggcaacggtaccacgccggccaattccgcagcgcgggtgcggctggccaaacatgccggcatgcgcgtcatggagctgctggagcgcgatataaagccgcgtgatatcgtgaccgaaaaggccgtggccaacgctgttgccgcggatatggcgctgggctgttccacaaacacggtactgcatctgcccgctgtatttgccgaggcagggcttgatcttactctgggcatttttgacgaggtaagccgcaagacccccaacctgtgcaagctctcgcccgccggtgaccagcatatacaggacctgcaccgtgcagggggtattcccgcggtcatggccgaactggacaaggccgggcgcatacaccgcgacgcactgaccgtcacaggccgtaccgtgggcgaaaaccttgatgcactgggcgccgcggtgcgtgaccacgatgtcatcaggcccatggaaaagccgtattcgccgcagggcggtattgccattctgtacggttcgcttgcgccggaaggggccgtggtcaagcagtctgccgttgcaccggaaatgatgcagcgtacagcgcgtgcccgtgtgtttgaatcagaagaagctgcctttgaagccattatggcgcagcggattgaaaagggcgatgccatcatcatacgctacgaagggccgaaaggcggtcccggtatgcgcgaaatgctgtctcccaccgcagccattgccggcatagggctgggggccgatgtggcgttgattaccgacgggcgtttttccggcggaaccagaggtgccgccatagggcatgtatcacccgaagctgctgacggcggtcccatagggctggtgcgtgaaggggacatgatcgagatagacatccccgcccgcaagctggacctgctggttgacgaagcggaaatggagcgccggcgtgctgcatttacgcccgtggtgaaagaggtcacctctccgctgctgaaacgctacagccgtctggtgacgtctgccgccaacggtgccgtgtacaagcgctga

SEQ ID NO: 10575 - protein, 555 aa, Desulfovibrio desulfuricans
MRSKKMTHGLEKAPHRSLLYALGLTREELSRPLVGVVNSANEVVPGHIHLHTIAEAVKAGVRAAGGTPMEFPAIAVCDGLAMNHEGMRFSLPSREIIADSIEIMATAHPFDALVFIPNCDKSVPGMLMAMLRMNVPSILISGGPMMAGTGNGKAADLITVFEGVGMVRQGRMTEDELEQLSETACPGCGSCAGMFTANSMNCLSETIGLALPGNGTTPANSAARVRLAKHAGMRVMELLERDIKPRDIVTEKAVANAVAADMALGCSTNTVLHLPAVFAEAGLDLTLGIFDEVSRKTPNLCKLSPAGDQHIQDLHRAGGIPAVMAELDKAGRIHRDALTVTGRTVGENLDALGAAVRDHDVIRPMEKPYSPQGGIAILYGSLAPEGAVVKQSAVAPEMMQRTARARVFESEEAAFEAIMAQRIEKGDAIIIRYEGPKGGPGMREMLSPTAAIAGIGLGADVALITDGRFSGGTRGAAIGHVSPEAADGGPIGLVREGDMIEIDIPARKLDLLVDEAEMERRRAAFTPVVKEVTSPLLKRYSRLVTSAANGAVYKR

SEQ ID NO: 10576 - DNA, 1851 bp, Escherichia coli O157
  CDS (1)..(1851): transl_table=11
atgcctaagtaccgttccgccaccaccactcatggtcgtaatatggcgggtgctcgtgcgctgtggcgcgccaccggaatgaccgacgccgatttcggtaagccgattatcgcggttgtgaactcgttcacccaatttgtaccgggtcacgtccatctgcgcgatctcggtaaactggtcgccgaacaaattgaagcggctggcggcgttgccaaagagttcaacaccattgcggtggatgatgggattgccatgggccacggggggatgctttattcactgccatctcgcgaactgatcgctgattccgttgagtatatggtcaacgcccactgcgccgacgccatggtctgcatctctaactgtgacaaaatcaccccggggatgctgatggcttccctgcgtctgaatattccggtgatctttgtttccggcggcccgatggaggccgggaaaaccaaactgtccgatcagatcatcaagctcgatctggttgatgcgatgatccagggcgcagacccgaaagtatctgactcccagagcgatcaggttgaacgttccgcatgcccaacctgcggttcctgctccgggatgtttaccgctaactcaatgaactgcctgaccgaagcgctgggtctgtcgcagccgggcaacggctcgctgctggcaacccactctgaccgtaagcagctgttcctcaatgctggtaaacgcattgttgaattgaccaaacgttactacgagcaaaacgacgaaagtgcactgccccgcaatattgctagcaaagcggcgtttgaaaatgccatgacgctggatatcgcgatgggtggatcgactaacaccgtacttcacctgctggcggcggcgcaggaagcggaaatcgacttcaccatgagtgatatcgataagctttcccgcaaggttccgcagttatgcaaagtcgcgccgagcacccaaaaataccatatggaagatgttcaccgtgctggtggtgttatcggtattctcggcgagctggatcgtgcggggttactgaaccgtgatgtgaaaaacgtacttggcctgacgttgccgcaaacgctggaacaatacgacgttatgctgacccaggatgacgcggtaaaaaatatgttccgcgccggccctgcgggtatccgtaccacccaggcattctcgcaagattgccgttgggatacgctggacgacgatcgcgccaatggctgtatccgctcgctggaacacgcctatagcaaagacggcggcctggcggtgctctacggtaatttcgcggaaaacggctgcatcgttaaaactgcgggcgtcgatgacagcatcctcaaattcaccggcccggcgaaagtgtacgaaagccaggacgacgcggtagaagcgattctcggcggtaaagttgtcgccggagatgtggtagtaattcgctatgaaggcccaaaaggtggtccggggatgcaggaaatgctctacccaaccagcttcctgaaatcaatggggctcggtaaagcctgtgcgctgatcaccgacggtcgtttctctggcggcacctctggcctttctatcggccacgtctcaccggaagcggcaagcggcggcagcattggcctgattgaagacggcgacctgatcgccatcgacattccgaaccgtggcattcagttacaggtaagcgatgccgaactggcggcgcgtcgtgaagcgcaggaagctcggggtgacaaagcctggacgccgaaaaatcgtgaacgtcagatctcctttgccctgcgtgcttatgccagcctggcaaccagcgccgacaaaggcgcggtgcgcgataaatcgaaactggggggttaa

SEQ ID NO: 10577 - protein, 616 aa, Escherichia coli O157
MPKYRSATTTHGRNMAGARALWRATGMTDADFGKPIIAVVNSFTQFVPGHVHLRDLGKLVAEQIEAAGGVAKEFNTIAVDDGIAMGHGGMLYSLPSRELIADSVEYMVNAHCADAMVCISNCDKITPGMLMASLRLNIPVIFVSGGPMEAGKTKLSDQIIKLDLVDAMIQGADPKVSDSQSDQVERSACPTCGSCSGMFTANSMNCLTEALGLSQPGNGSLLATHSDRKQLFLNAGKRIVELTKRYYEQNDESALPRNIASKAAFENAMTLDIAMGGSTNTVLHLLAAAQEAEIDFTMSDIDKLSRKVPQLCKVAPSTQKYHMEDVHRAGGVIGILGELDRAGLLNRDVKNVLGLTLPQTLEQYDVMLTQDDAVKNMFRAGPAGIRTTQAFSQDCRWDTLDDDRANGCIRSLEHAYSKDGGLAVLYGNFAENGCIVKTAGVDDSILKFTGPAKVYESQDDAVEAILGGKVVAGDVVVIRYEGPKGGPGMQEMLYPTSFLKSMGLGKACALITDGRFSGGTSGLSIGHVSPEAASGGSIGLIEDGDLIAIDIPNRGIQLQVSDAELAARREAQEARGDKAWTPKNRERQISFALRAYASLATSADKGAVRDKSKLGG

SEQ ID NO: 10578 - DNA, 1851 bp, Escherichia coli O6
  CDS (1)..(1851): transl_table=11
atgcctaagtaccgttccgccaccaccactcatggtcgtaatatggcgggtgctcgtgcgctgtggcgcgccaccggaatgaccgacgccgatttcggtaagccgattatcgcggttgtgaactcgttcacccaatttgtaccgggtcacgtccatctacgcgatctcggtaaactggttgccgaacaaattgaagcggctggcggcgttgccaaagagttcaacaccattgcggtggatgatgggatcgctatgggccacgggggcatgctttattcactgccatctcgcgaactgatcgctgattccgttgaatatatggtcaacgcccactgcgccgacgccatggtctgcatctctaactgcgacaaaatcaccccggggatgctgatggcttccctgcgcctgaatattccggtgatctttgtttccggcggcccgatggaggccgggaaaaccaaactgtccgatcagatcattaagctcgatctggttgatgcgatgatccagggcgcagacccgaaagtttctgactcccagagcgctcaggttgaacgatccgcctgcccaacctgcggttcctgctccgggatgtttactgctaactcaatgaactgcctgaccgaagcgctgggcctgtcgcagccgggcaacggctcgctgctggcaacccacgctgatcgcaagcaactgttcctcaatgctggtaaacgcattgttgaattgaccaaacgttactacgaacaggatgatgaaagcgcactgccgcgtaacatcgccagtaaggcggcgtttgaaaacgccatgacgctggatatcgcgatgggcggctctaccaacaccgttcttcacctactggcggcggcgcaggaagcggaaatcgacttcaccatgagtgatatcgataagctctcccgcaaagtaccgcagctgtgtaaagttgcgccgagcacccaaaaataccatatggaagatgttcaccgtgctggtggtgttatcggtattctcggcgagctggatcgcgcggggttactgaaccgtgatgtgaaaaacgtacttggcctgacgttgccgcaaacactggaacaatacgacatcgtcgtgacccaggatgatgcggtaaaaaatatgttccgcgctggccctgcgggcattcgtactacacaggcattctcgcaggattgccgctgggatacgctggacgacgatcgctccaatggctgtatccgctcgctggaacacgcctacagcaaagacggcggtctggcggtgctctacggtaatttcgcagaaaacggctgcatcgtgaaaaccgcaggcgtcgatgacagcatcctaaaattcaccggcccggcgaaagtgtacgaaagccaggacgacgcggtagaagcgatcctcggtggcaaagttgtcgcgggcgatgtggtggtgatccgctatgaaggcccgaaaggcggccctggcatgcaggaaatgctctacccaaccagcttcctgaaatcaatggggctcggcaaagcctgtgcgctgatcaccgatggacgcttctccggcggcacctctggtctttccatcggccacgtctcgccggaagcggcaagcggcggcagcattggcctgattgaagatggtgacctgatcgctatcgatattccgaaccgaggcattcagttacaggtaagcgatgccgaactggcggcgcgtcgtgaagcgcaggaagcccgtggcgacaaagcctggacgccgaaaaaacgtgaacgtcaggtttcctttgccctgcgtgcctacgccagcctggcaaccagcgccgacaaaggcgcggtgcgcgataaatcgaaactggggggttaa

SEQ ID NO: 10579 - protein, 616 aa, Escherichia coli O6
MPKYRSATTTHGRNMAGARALWRATGMTDADFGKPIIAVVNSFTQFVPGHVHLRDLGKLVAEQIEAAGGVAKEFNTIAVDDGIAMGHGGMLYSLPSRELIADSVEYMVNAHCADAMVCISNCDKITPGMLMASLRLNIPVIFVSGGPMEAGKTKLSDQIIKLDLVDAMIQGADPKVSDSQSAQVERSACPTCGSCSGMFTANSMNCLTEALGLSQPGNGSLLATHADRKQLFLNAGKRIVELTKRYYEQDDESALPRNIASKAAFENAMTLDIAMGGSTNTVLHLLAAAQEAEIDFTMSDIDKLSRKVPQLCKVAPSTQKYHMEDVHRAGGVIGILGELDRAGLLNRDVKNVLGLTLPQTLEQYDIVVTQDDAVKNMFRAGPAGIRTTQAFSQDCRWDTLDDDRSNGCIRSLEHAYSKDGGLAVLYGNFAENGCIVKTAGVDDSILKFTGPAKVYESQDDAVEAILGGKVVAGDVVVIRYEGPKGGPGMQEMLYPTSFLKSMGLGKACALITDGRFSGGTSGLSIGHVSPEAASGGSIGLIEDGDLIAIDIPNRGIQLQVSDAELAARREAQEARGDKAWTPKKRERQVSFALRAYASLATSADKGAVRDKSKLGG

SEQ ID NO: 10580 - DNA, 1851 bp, Escherichia coli
  CDS (1)..(1851): transl_table=11
atgcctaagtaccgttccgccaccaccactcatggtcgtaatatggcgggtgctcgtgcgctgtggcgcgccaccggaatgaccgacgccgatttcggtaagccgattatcgcggttgtgaactcgttcacccaatttgtaccgggtcacgtccatctgcgcgatctcggtaaactggtcgccgaacaaattgaagcggctggcggcgttgccaaagagttcaacaccattgcggtggatgatgggattgccatgggccacggggggatgctttattcactgccatctcgcgaactgatcgctgattccgttgagtatatggtcaacgcccactgcgccgacgccatggtctgcatctctaactgcgacaaaatcaccccggggatgctgatggcttccctgcgcctgaatattccggtgatctttgtttccggcggcccgatggaggccgggaaaaccaaactttccgatcagatcatcaagctcgatctggttgatgcgatgatccagggcgcagacccgaaagtatctgactcccagagcgatcaggttgaacgttccgcgtgtccgacctgcggttcctgctccgggatgtttaccgctaactcaatgaactgcctgaccgaagcgctgggcctgtcgcagccgggcaacggctcgctgctggcaacccacgccgaccgtaagcagctgttccttaatgctggtaaacgcattgttgaattgaccaaacgttattacgagcaaaacgacgaaagtgcactgccgcgtaatatcgccagtaaggcggcgtttgaaaacgccatgacgctggatatcgcgatgggtggatcgactaacaccgtacttcacctgctggcggcggcgcaggaagcggaaatcgacttcaccatgagtgatatcgataagctttcccgcaaggttccacagctgtgtaaagttgcgccgagcacccagaaataccatatggaagatgttcaccgtgctggtggtgttatcggtattctcggcgaactggatcgcgcggggttactgaaccgtgatgtgaaaaacgtacttggcctgacgttgccgcaaacgctggaacaatacgacgttatgctgacccaggatgacgcggtaaaaaatatgttccgcgcaggtcctgcaggcattcgtaccacacaggcattctcgcaagattgccgttgggatacgctggacgacgatcgcgccaatggctgtatccgctcgctggaacacgcctacagcaaagacggcggcctggcggtgctctacggtaactttgcggaaaacggctgcatcgtgaaaacggcaggcgtcgatgacagcatcctcaaattcaccggcccggcgaaagtgtacgaaagccaggacgatgcggtagaagcgattctcggcggtaaagttgtcgccggagatgtggtagtaattcgctatgaaggcccgaaaggcggtccggggatgcaggaaatgctctacccaaccagcttcctgaaatcaatgggtctcggcaaagcctgtgcgctgatcaccgacggtcgtttctctggtggcacctctggtctttccatcggccacgtctcaccggaagcggcaagcggcggcagcattggcctgattgaagacggtgacctgatcgctatcgacatcccgaaccgtggcattcagttacaggtaagcgatgccgaactggcggcgcgtcgtgaagcgcaggacgctcgaggtgacaaagcctggacgccgaaaaatcgtgaacgtcaggtctcctttgccctgcgtgcttatgccagcctggcaaccagcgccgacaaaggcgcggtgcgcgataaatcgaaactggggggttaa

SEQ ID NO: 10581 - protein, 616 aa, Escherichia coli
MPKYRSATTTHGRNMAGARALWRATGMTDADFGKPIIAVVNSFTQFVPGHVHLRDLGKLVAEQIEAAGGVAKEFNTIAVDDGIAMGHGGMLYSLPSRELIADSVEYMVNAHCADAMVCISNCDKITPGMLMASLRLNIPVIFVSGGPMEAGKTKLSDQIIKLDLVDAMIQGADPKVSDSQSDQVERSACPTCGSCSGMFTANSMNCLTEALGLSQPGNGSLLATHADRKQLFLNAGKRIVELTKRYYEQNDESALPRNIASKAAFENAMTLDIAMGGSTNTVLHLLAAAQEAEIDFTMSDIDKLSRKVPQLCKVAPSTQKYHMEDVHRAGGVIGILGELDRAGLLNRDVKNVLGLTLPQTLEQYDVMLTQDDAVKNMFRAGPAGIRTTQAFSQDCRWDTLDDDRANGCIRSLEHAYSKDGGLAVLYGNFAENGCIVKTAGVDDSILKFTGPAKVYESQDDAVEAILGGKVVAGDVVVIRYEGPKGGPGMQEMLYPTSFLKSMGLGKACALITDGRFSGGTSGLSIGHVSPEAASGGSIGLIEDGDLIAIDIPNRGIQLQVSDAELAARREAQDARGDKAWTPKNRERQVSFALRAYASLATSADKGAVRDKSKLGG

SEQ ID NO: 10582 - DNA, 1656 bp, Francisella tularensis subsp
  CDS (1)..(1656): transl_table=11
atgaaaaaagtattgaataaatatagtagaagattaactgaggataagtcacaaggtgcttctcaagcaatgctatatggcacagagatgaatgatgcagatatgcataaaccacaaatagggattggtagtgtgtggtatgaaggaaatacatgtaatatgcatttaaatcagttagcacaatttgtaaaagatagtgttgagaaagaaaacctcaaggggatgagatttaatactatcggagttagtgatggtatttctatgggtacagatggtatgagctactcattacaatctagagatcttattgcagactctattgagactgtaatgtctgcacactggtatgatggtttagtatctatacctggttgtgataagaatatgccaggatgtatgatggctttaggtagacttaatagaccagggtttgtgatctacggaggtactatccaagcaggtgtaatgcgtggtaaaccaatagatatcgttacagcatttcagagttatggagcatgtctatctggtcagatcacagagcaagagcgtcaagaaactatcaaaaaagcatgtccaggtgctggagcatgtggtggtatgtatactgcaaatactatggcatgtgctatagaagcactaggtatgagtttgccatttagttcatctacatcagcaacatctgttgagaaagtacaagagtgtgataaagctggagaaacaattaaaaacttgctagagcttgatattaaaccaagagatatcatgactcgtaaagcttttgaaaatgcaatggtacttatcaccgtgatgggaggctctacaaatgctgtacttcacctattagctatggcaagctcggtagatgttgatttaagtattgatgatttccaagaaatagctaacaaaacgccagttctagctgactttaaacctagtggtaaatatgtaaaggctaatttacatgctataggtggtactccagctgtgatgaaaatgctactaaaagctggtatgctccatggagattgtttaacagtaacaggtaagactttagcagaaaatcttgagaatgttgcagatcttccagaagataatacaatcatacataaattagataatcctattaaaaagacaggacatttacaaatcttaaaaggtaatgttgcaccagaaggatctgtagctaaaatcactggtaaggagggagagatatttgaaggagttgcaaatgtctttgactcagaagaagagatggttgctgcggtagaaacaggcaaagtcaaaaaaggtgatgtaatagttattcgttatgaaggccctaaaggtggtccaggtatgccagaaatgttaaagccaacatcacttataatgggggctggtttaggtcaagatgttgctttgattacagatggtcgtttctctggtgggtcacatggctttattgttggacacattactccagaggcttatgagggagggatgatagctttgcttgagaatggtgataagattactattgatgctatcaataacgttataaatgttgatttatcagatcaggaaatagcccaaagaaaatccaaatggagagcatctaagcaaaaagcaagtagaggaactctaaagaaatacataaaaacagtatcatcagcataa

SEQ ID NO: 10583 - protein, 551 aa, Francisella tularensis subsp
MKKVLNKYSRRLTEDKSQGASQAMLYGTEMNDADMHKPQIGIGSVWYEGNTCNMHLNQLAQFVKDSVEKENLKGMRFNTIGVSDGISMGTDGMSYSLQSRDLIADSIETVMSAHWYDGLVSIPGCDKNMPGCMMALGRLNRPGFVIYGGTIQAGVMRGKPIDIVTAFQSYGACLSGQITEQERQETIKKACPGAGACGGMYTANTMACAIEALGMSLPFSSSTSATSVEKVQECDKAGETIKNLLELDIKPRDIMTRKAFENAMVLITVMGGSTNAVLHLLAMASSVDVDLSIDDFQEIANKTPVLADFKPSGKYVKANLHAIGGTPAVMKMLLKAGMLHGDCLTVTGKTLAENLENVADLPEDNTIIHKLDNPIKKTGHLQILKGNVAPEGSVAKITGKEGEIFEGVANVFDSEEEMVAAVETGKVKKGDVIVIRYEGPKGGPGMPEMLKPTSLIMGAGLGQDVALITDGRFSGGSHGFIVGHITPEAYEGGMIALLENGDKITIDAINNVINVDLSDQEIAQRKSKWRASKQKASRGTLKKYIKTVSSA

SEQ ID NO: 10584 - DNA, 1662 bp, Geobacter sulfurreducens
  CDS (1)..(1662): transl_table=11
atgcgcagcgacactataaagaagggcgttgaacgcacgccgcaccgcgctctcatcaagggtaccggcgtcccccagagccagatggacaagccgttcatcggcgtcgccaccagtttcaccgatctgattcccggccatgtggggatgcgcgatctggagcgttttatcgaaaaaggcatccactcgggcgggggatacgcctttttcttcggcattccaggtgtctgcgacggcatctccatgggacacaaggggatgcactactcgcttcccacccgtgaactcattgccgacatggtggagtcggttgctgaagctcatcggctcgacggcctggtgctgctcaccaattgcgacaagatcacgcccggcatgcttatggcggcggcacgactcaacattccttcgatcgtggttaccgcgggtccgatgatggctggtcgcggtacggaaggacgccgttattcattcgttaccgatacctttgaggccatggcccgctacaaggccggggtcatcgacgagcgtgagcttggagtctgcgaggacaatgcctgccccggcatgggatcttgtcaggggcttttcactgccaataccatggcaattctgaccgagaccatgggcatgagtctcccccgttgcggcacggctctcgcggtgtcagccctcaagcggcgcatcgcctttgcgtccggggagaagatcgtcgatcttgtccgtaacgatatcactccgcgtcagatccttacccgcgatgcttttgagaatgccatccgcgtggaccttgcgttgggtggctcatccaatacggtgctccatctcctggccattgcccgggaggctggagtggacttgccactggaaacatttgatacgctagccaaggaaaccccccagatatcttcgatgaatccggcgggcgagtacttcatggaggatctggacgccggtggcggcgtcatgggtgtactccggcagcttggttctctggtccgtgataacccgacggtcatggggctctccactctccagctcgcttcaaccgtggagtctgtggacgaacgagtcattcgtcccctgtcgaacccggtgaagaaagagggggggatcgccgtcctcttcggcaacctggcgcccaagggtgccgttgtcaaacagtccggcgtctcggatgccatgatgacattcgaggggactgcccgttgcttcgattctgaagaggcggccatggcggctctcatgggggggaggatcgttgccggcgacgtagtggttatccgctacgagggccccaagggggggccgggcatgcgggaaatgctggcacccacggcgactctgatggggctcggcctcggcgactcggttgcactcatcaccgacggcaggttctccgggggtacccgcggtccctgtattgggcacatttctcccgaggccgctgaaggcggccccattgccctcgtggaggagggtgaccgcatcctgctcgatatccccaaccgtcggctggaactcctcgttgacgaggcggttctgcaggagcgtcgcgcccgttggacggcgcccgagccgaagatcaaaaccggctggctcgcccgctatgcgaaggtggtgacatccgcctacaccggtgcggtgacctcggccgactga

SEQ ID NO: 10585 - protein, 553 aa, Geobacter sulfurreducens
MRSDTIKKGVERTPHRALIKGTGVPQSQMDKPFIGVATSFTDLIPGHVGMRDLERFIEKGIHSGGGYAFFFGIPGVCDGISMGHKGMHYSLPTRELIADMVESVAEAHRLDGLVLLTNCDKITPGMLMAAARLNIPSIVVTAGPMMAGRGTEGRRYSFVTDTFEAMARYKAGVIDERELGVCEDNACPGMGSCQGLFTANTMAILTETMGMSLPRCGTALAVSALKRRIAFASGEKIVDLVRNDITPRQILTRDAFENAIRVDLALGGSSNTVLHLLAIAREAGVDLPLETFDTLAKETPQISSMNPAGEYFMEDLDAGGGVMGVLRQLGSLVRDNPTVMGLSTLQLASTVESVDERVIRPLSNPVKKEGGIAVLFGNLAPKGAVVKQSGVSDAMMTFEGTARCFDSEEAAMAALMGGRIVAGDVVVIRYEGPKGGPGMREMLAPTATLMGLGLGDSVALITDGRFSGGTRGPCIGHISPEAAEGGPIALVEEGDRILLDIPNRRLELLVDEAVLQERRARWTAPEPKIKTGWLARYAKVVTSAYTGAVTSAD

SEQ ID NO: 10586 - DNA, 1683 bp, Gloeobacter violaceus
  CDS (1)..(1683): transl_table=11
atgtccggcaatctgcgcagccgcatcgtcacccagggggtgcagcgctcccccaaccgcgccatgctgcgggcggtgggttttggcgacggtgatttcgagcggcccatcgtgggggtggccaacggcttcagcacgattaccccctgcaatctgggcctgggagctttggcggagcgggcggaggcggcgttgcgcgccggcggggcgatgccccaactattcggaacgatcacgatcagcgacggcatctcgatgggtaccgaggggatgaagtactcgctggtgtcccgcgaggtgatcgccgacagcatcgagacggtctgcaacggtcagagcctggacggggtgctcgctatcggcggctgcgacaagaacatgccgggtgcgatgatcgccattgccagactcaatatcccggcggtcttcgtctacggcggcacgatcaaacccggccgctaccaggatcaggacctcacggtcgtgagcgccttcgaagcggtgggccagtacagcgccggcaaaattgaccagacgaccctcgtcgaaatcgagcggcgcgcctgcccgggggcgggctcctgcggcggcatgtacaccgccaatacgatgagttcggccttcgaggcgatgggcatgagcttggtgtactcctcgacgatggccgccgaggatcccgaaaaagcggacagcaccgccctgtcggccaaggtgctggttgaagcgatccaagcgcaaatcctgccgagcgccatcctgacgcgaaaagctttcgagaacgccatcgctgtgatcatggccatcggcggctcgaccaacgccgtgctgcacctgcttgccatcgcccacagcgcccgggtgccactcgcactggatgacttcgagtgcatccgcgcgcgggtgccggtgctgtgcgatctcaagcccagcggtcgctttgtcgccaccgatctgcacagagccgggggtattccccaggtgatgaaaatgttgctcgtgcgcgggctcctccacggcgacgccctcacggtaaccggccagacggtcgccgaggtgctgcgcgacgtacccacagaaccgcgcaccgaccaggaggtgatccgtccctgggaccggcctctctacagttcggggcacctggccattttgcgcggcaacctggcgagcgaaggggcggtcgccaagattaccggcgtcaaaaagccccagatcactggtcctgcccgcgtcttcgactccgaagaaagctgcatggaagcaattctggcgggcgccatccagccgggcgatgtgatcgtcattcgctacgaaggccccaagggcggtcccggcatgcgggagatgctctcgcccacttcggccatcatcggcgcgggtctgggcgatgcggtgggactgatcaccgacggccgcttctcggggggcacctacggcatggtcgtgggccacgtcgccccggaagccttcgtgggcggcaccatcgccctggtcgaagcaggagatctgatcaccatcgacgccccggcgcgcaagatcgagctattggtgaccacagacgaactggagcgccgacgcgccgcctggcggccgcctgccccccgttacatccgcggggtgctcgccaagtacgcccgtcaggtgaacagcagcagcctcggggcggtcaccgacgcctttatttga

SEQ ID NO: 10587 - protein, 560 aa, Gloeobacter violaceus
MSGNLRSRIVTQGVQRSPNRAMLRAVGFGDGDFERPIVGVANGFSTITPCNLGLGALAERAEAALRAGGAMPQLFGTITISDGISMGTEGMKYSLVSREVIADSIETVCNGQSLDGVLAIGGCDKNMPGAMIAIARLNIPAVFVYGGTIKPGRYQDQDLTVVSAFEAVGQYSAGKIDQTTLVEIERRACPGAGSCGGMYTANTMSSAFEAMGMSLVYSSTMAAEDPEKADSTALSAKVLVEAIQAQILPSAILTRKAFENAIAVIMAIGGSTNAVLHLLAIAHSARVPLALDDFECIRARVPVLCDLKPSGRFVATDLHRAGGIPQVMKMLLVRGLLHGDALTVTGQTVAEVLRDVPTEPRTDQEVIRPWDRPLYSSGHLAILRGNLASEGAVAKITGVKKPQITGPARVFDSEESCMEAILAGAIQPGDVIVIRYEGPKGGPGMREMLSPTSAIIGAGLGDAVGLITDGRFSGGTYGMVVGHVAPEAFVGGTIALVEAGDLITIDAPARKIELLVTTDELERRRAAWRPPAPRYIRGVLAKYARQVNSSSLGAVTDAFI

SEQ ID NO: 10588 - DNA, 1857 bp, Gluconobacter oxydans
  CDS (1)..(1857): transl_table=11
atgcccgcctatcgctcccgcaccaccacacatggccgcaacatggctggcgcacgtgcgctctggcgggcgacgggcatgaaggacggcgatttcggcaagcccattatcgccattgccaattccttcacgcagttcgtgccgggccacgtccatctgaaggacatgggcagtctggtggcctccgcgatcgaagaagtcggcggaattgccaaggaattcaacacgatcgcagtggatgacggcatcgcgatgggccacggcggaatgctgtattccctgccctcgcgcgagttgatcgcggattccgtggaatacatggtcaacgcgcattgcgcggatgcgatcgtctgcatcagcaactgcgacaagatcacgccgggcatgctgatggcctccatgcggctgaacatccccgtcgtgttcgtctccggtggcccgatggaagccggcaagatcaacggcccgggcgtgacccgcaagctggacctgattgattccatggtcgcggccgccaatccggacgtgtccgacagcgagtccgaacagatcgaacgctccgcctgccccacctgcggctcctgctcgggcatgttcacggccaattccatgaactgcctgaccgaagctctgggtctgtccctgcccggcaatggttccctgctcgccacccataacgaccgccgcgaactgttcctgagtgcaggccgccggatcgtggaactcgcgcgccgctggtacgaacaggacgatgcttccgtcctgccccgcagcattgccacgcgcgcggcattcgagaacgccatgacgctcgatatcgccatgggcggctccaccaacacggtcctgcatcttctggccgcagcccgcgaaggtgaagtcgatttccacatgcacgacatcgaccgcctgtcgcgccgtgtccccaatctgtgcaaggtcgcaccggccaagaacgacgtgcacatggaagacgtccatcgtgccggtggtatccccgccattctgggtgaactggaccgcgcgggcctgatccacaaggatgttccgaccgtctacgcaccgacactcggggacgcgctgaagaagtgggacatcctgaacggcgacgaagaggccgctcatctgttcaaggccgcccctggcaatgtccggaccgttcatgccttttcgcagtccagccgctaccacgaactggatcaggaccgcgaaggcggcgtcctgcgcgacaaggcgcatgccttctcgcaggatggcggtctggccgtgctgtacggtaaccttgccgaagacggcgccatcgtcaaaacggccggtgtcgaagccagcatcctgaccttcacgggaacggcacgggtcttcgagagccaggacgatgccgtggcggctatcctgggtaaccgcatcgtggccggtgacgtcgtggtcatccgctacgaaggccctaagggcggccccggcatgcaggaaatgctgtatccgacgagctatctgaaatcgaagggtttgggcaaggtctgcgccctgatcacggatggccgcttctcaggtggaagctcaggcctgtccatcggccacatgtcccccgaagcagcggaaggtggcctgatcggtctggtcgaggatggcgatcgcatcgagatcgatatcccgaaccgtaccctgcatcttgccgtttcggactctgacattgccgatcgccgtgagcgcatgaatgcgcgtggcgccagcgcctggaagccgaaccgtgagcgcgtggtttcgaaagcccttcaggcctatgccgcaatgaccacgagcgcggcccatggcgctgtccgcgatctgtcgcagatcatcgtgaagacgcggatctga

SEQ ID NO: 10589 - protein, 618 aa, Gluconobacter oxydans
MPAYRSRTTTHGRNMAGARALWRATGMKDGDFGKPIIAIANSFTQFVPGHVHLKDMGSLVASAIEEVGGIAKEFNTIAVDDGIAMGHGGMLYSLPSRELIADSVEYMVNAHCADAIVCISNCDKITPGMLMASMRLNIPVVFVSGGPMEAGKINGPGVTRKLDLIDSMVAAANPDVSDSESEQIERSACPTCGSCSGMFTANSMNCLTEALGLSLPGNGSLLATHNDRRELFLSAGRRIVELARRWYEQDDASVLPRSIATRAAFENAMTLDIAMGGSTNTVLHLLAAAREGEVDFHMHDIDRLSRRVPNLCKVAPAKNDVHMEDVHRAGGIPAILGELDRAGLIHKDVPTVYAPTLGDALKKWDILNGDEEAAHLFKAAPGNVRTVHAFSQSSRYHELDQDREGGVLRDKAHAFSQDGGLAVLYGNLAEDGAIVKTAGVEASILTFTGTARVFESQDDAVAAILGNRIVAGDVVVIRYEGPKGGPGMQEMLYPTSYLKSKGLGKVCALITDGRFSGGSSGLSIGHMSPEAAEGGLIGLVEDGDRIEIDIPNRTLHLAVSDSDIADRRERMNARGASAWKPNRERVVSKALQAYAAMTTSAAHGAVRDLSQIIVKTRI

SEQ ID NO: 10590 - DNA, 1839 bp, Haemophilus influenzae
  CDS (1)..(1839): transl_table=11
atgcccaaactacgttcagcgaccagcacacaaggtcgtaatatggcaggcgcacgtgccttatggcgtgcaacaggaatgaaagaaaatgactttggtaaaccgattattgcggtggtgaactctttcacgcaattcgtaccagggcatgtgcatttaaaagatatgggacagcttgttgccgcagaaattgaaaaagcgggcggcgtagcaaaagaatttaacaccattgcggtggatgatggtatcgcgatgggacacggtgggatgctttattccttaccaagccgtgatttaatcgctgatagcgtggaatatatggtcaatgcgcactgtgctgatgcgatggtgtgtatttccaactgtgacaaaatcactccaggaatgttaatggcggcaatgcgtttaaatattccaactatcttcgtttcaggcggcccgatggaagcaggtaaaactaaactttctgatcaattaatccgcttagatttagtagatgcgatgattgaggcagccgatccaaatgtaagcgatgagcgtattgatgcgattgagcgtagcgcttgcccaacttgtggttcttgctctggcatgtttaccgctaactcaatgaactgcttaactgaagccttaggtttatctttacctggtaatggttctatgttagccactcacgcagaccgcaaagaattattcttaaaagcaggtcgtcaaattgtcgagctttgcaaacgctattatgaacaagatgatgcaagcgtattgcctcgttcaatcggtacttttgatgcctttgaaaatgcaatgagcctcgatatcgcaatgggtggttcaagtaacactgttttacacttattagcggcagcacaagaagcaggcgtggattttaaaatggaagatattgaccgtttatcgcgcaaagtgccttgtttaagcaaaattgcaccaaacaccaataaatatcatatggaagacgtacaccgtgcaggcggtattatgggattgttgggtgaattagatcgcgctggattaattcataaaaatacacacaccgtgcttggaatgagcatgggagagcaactagaccaatacgatattattcgcaatcaagatgaagaattacataaattcttccgtgcaggccctgcaggtatccgcacaactcaagcattctcacaagattgccgctgggataccgttgataatgatcgtgtaaacggttgtattcgcaataaagaaaatgcgatttcacaagaaggtggcttagccgtattattcggtaatctcgctgaagacggatgtatcgttaaaaccgctggtgtagatgaatctatttggaaattcactggcacagcaatcgtatttgaaagccaagaagatgcggttgcaggcattttaggtggcaaagtcaaagaaggtcatgttgttgttatccgttacgaagggcctaaaggcggaccaggtatgcaagaaatgttatacccaaccagttacttaaaatcgatgggcttgggcaaaaaatgcgctttattaacggatggtcgcttctctggcggtacatcaggcttgtctattggacatgcttcaccagaagctgcttctggcggtgcaatcggcttagtacgcgatggcgatattatcaacattgatattccaaatcgtgcaattaacttagaaatcagtaatgatgaactcgcagcacgcagagccgaacaagatcaaaaaggttggcagccagctaaccgtgaacgtgaagtatctttcgctttaaaagtattcggtcactttgcgacctcagcggacaaaggtgcggtacgcgataaaacattattaaaataa

SEQ ID NO: 10591 - protein, 612 aa, Haemophilus influenzae
MPKLRSATSTQGRNMAGARALWRATGMKENDFGKPIIAVVNSFTQFVPGHVHLKDMGQLVAAEIEKAGGVAKEFNTIAVDDGIAMGHGGMLYSLPSRDLIADSVEYMVNAHCADAMVCISNCDKITPGMLMAAMRLNIPTIFVSGGPMEAGKTKLSDQLIRLDLVDAMIEAADPNVSDERIDAIERSACPTCGSCSGMFTANSMNCLTEALGLSLPGNGSMLATHADRKELFLKAGRQIVELCKRYYEQDDASVLPRSIGTFDAFENAMSLDIAMGGSSNTVLHLLAAAQEAGVDFKMEDIDRLSRKVPCLSKIAPNTNKYHMEDVHRAGGIMGLLGELDRAGLIHKNTHTVLGMSMGEQLDQYDIIRNQDEELHKFFRAGPAGIRTTQAFSQDCRWDTVDNDRVNGCIRNKENAISQEGGLAVLFGNLAEDGCIVKTAGVDESIWKFTGTAIVFESQEDAVAGILGGKVKEGHVVVIRYEGPKGGPGMQEMLYPTSYLKSMGLGKKCALLTDGRFSGGTSGLSIGHASPEAASGGAIGLVRDGDIINIDIPNRAINLEISNDELAARRAEQDQKGWQPANREREVSFALKVFGHFATSADKGAVRDKTLLK

SEQ ID NO: 10592 - DNA, 1839 bp, Haemophilus influenzae
  CDS (1)..(1839): transl_table=11
atgcccaaactacgttcagcgaccagcacacaaggtcgtaatatggcaggcgcacgtgccttatggcgtgcaacaggaatgaaagaaaatgactttggtaaaccgattattgcggtggtgaactctttcacgcaattcgtaccagggcatgtgcatttaaaagatatgggacagcttgttgccgcagaaatagaaaaagcgggcggcgtagcaaaagaatttaacaccattgcggtggatgatggtatcgcaatgggtcacggtggaatgctttattctttaccaagccgtgatttaatcgctgatagcgtggaatatatggtcaatgcacactgtgctgatgcgatggtgtgtatttctaactgtgacaaaatcaccccgggaatgttaatggcggcaatgcgcttaaacattccgacaatttttgtttcaggcggcccaatggaagcgggcaaaacaaaactttctgatcaattaatccgcttagatttggttgatgcgatgattgaggcagccgatccgaatgtatcagatgaacgtattgatgccatcgaacgcagtgcgtgtccaacttgtggttcatgttctggtatgtttaccgctaactcaatgaactgcttaactgaagccttaggtttatctttacctggtaatggttctatgttagccactcacgcagaccgtaaagaattattcttaaaagcaggtcgtcaaattgtcgagctttgcaaacgctattatgaacaagatgatgcaagcgtattgcctcgttcaatcggtacttttgatgcctttgaaaatgcaatgagcctcgatatcgcaatgggtggttcaagtaacactgttttacacttattagcggcagcacaagaagcaggcgtggattttaaaatggaagatattgaccgtttatcgcgcaaagtgccttgtttaagcaaaattgcaccaaacaccaataaatatcatatggaagacgtacaccgtgcaggcggtattatgggattgttgggtgaattagatcgtgctggattaattcataaaaatacacacaccgtgcttggaatgagcatgggagagcaactagaccaatacgatattattcgcaatcaagatgaagaattacataaattcttccgtgcaggccctgcaggtatccgcacaactcaagcattctcacaagattgccgctgggataccgttgataatgatcgtgtaaacggttgtattcgcaataaagaaaatgcgatttcacaagaaggtggcttagccgtattattcggtaatctcgctgaagacggatgtatcgttaaaaccgctggtgtagatgaatctatttggaaattcactggcacggcaatcgtatttgaaagccaagaagatgcggttgcaggcattttaggtggcaaagtcaaagaaggtcatgttgttgttatccgttacgaagggcctaaaggcggaccaggtatgcaagaaatgttatacccaaccagttacttaaaatcgatgggcttgggcaaaaaatgcgctttattaacggatggtcgcttctctggcggtacatcaggcttgtctattggacatgtttcaccagaagctgcttctggcggtgcaatcggcttagtacgcaatggcgatattatcaacattgatattccaaaccgtgcaattaacttagaaatcagtaatgaagaactcgcaacacgcagagccgaacaagatcaaaaaggttggcagccagctaaccgtgaacgtgaagtatctttcgctttaaaagtattcggtcactttgcgacctcagcggacaaaggtgcggtacgcgataaaacattattaaaataa

SEQ ID NO: 10593 - protein, 612 aa, Haemophilus influenzae
MPKLRSATSTQGRNMAGARALWRATGMKENDFGKPIIAVVNSFTQFVPGHVHLKDMGQLVAAEIEKAGGVAKEFNTIAVDDGIAMGHGGMLYSLPSRDLIADSVEYMVNAHCADAMVCISNCDKITPGMLMAAMRLNIPTIFVSGGPMEAGKTKLSDQLIRLDLVDAMIEAADPNVSDERIDAIERSACPTCGSCSGMFTANSMNCLTEALGLSLPGNGSMLATHADRKELFLKAGRQIVELCKRYYEQDDASVLPRSIGTFDAFENAMSLDIAMGGSSNTVLHLLAAAQEAGVDFKMEDIDRLSRKVPCLSKIAPNTNKYHMEDVHRAGGIMGLLGELDRAGLIHKNTHTVLGMSMGEQLDQYDIIRNQDEELHKFFRAGPAGIRTTQAFSQDCRWDTVDNDRVNGCIRNKENAISQEGGLAVLFGNLAEDGCIVKTAGVDESIWKFTGTAIVFESQEDAVAGILGGKVKEGHVVVIRYEGPKGGPGMQEMLYPTSYLKSMGLGKKCALLTDGRFSGGTSGLSIGHVSPEAASGGAIGLVRNGDIINIDIPNRAINLEISNEELATRRAEQDQKGWQPANREREVSFALKVFGHFATSADKGAVRDKTLLK

SEQ ID NO: 10594 - DNA, 1719 bp, Helicobacter hepaticus
  CDS (1)..(1719): transl_table=11
atgcgaagcgacattgtgaaaaagggctatcaaagagcccctcatagaagtttattgcgtgccacagggctaaaagatgaagattttaataaaccctttatcggcattgcaaatagttatattgacattattcccgggcattttttcttaaaccgctatgcgcagattatcaaagaggagattcgcgctgctgggggcgtgccttttgaatttaataccattggcgtagatgatggcatcgcaatggggcatagcggtatgctctactctttgcctagtcgtgagctgattgcagattctattgaaacaatgatgaacgcgcactcgctagatgcgatgatttgtatcccaaattgcgataaaatcgtgcccggaatgcttatgggtgcgttgcgcgtgaatgtgccaactatctttgtgagtggtggtccaatgaaagccgggaagctagaggacggcacaattttggatttaaattctgcttttgaagcggtgggagcattcgcagagggcaagattagcgaaaaaaggctacacgagatagaatgcaatgcgtgtccgggcggtgggagctgtagtggaatgtttactgcaaactctatgaatacgctttgtgaggcaatgggggttgcgctgccgggaaatggcacgattttagccttaagcaaggagcgtgaggagcttttacgcaaagctgcgcgtagaattgtagaaattgccctagatgagcgtaaaaccgagcagtttagattccgcaatatcctcaataaaaaggctgtgcataatgcctttgtcgtggatatggcaatgggtggtagcacaaacacaatcttgcatatgttagctattgctaaagaggcggaggtggatttcaacttagattctatcaatgccattgcctctcaagtagcgcatatcgctaaaattgctccagcattaagcacaatccatatggaagacatcaatcgcgcagggggcgtgtcggcagtaatgaatgaagttgcaaaaagaaatgcgtctttgggcagtcattccgcagattctattctctatttagacgcactcacaattacaggcgagactttgggagaacgcattgcaaacgcacagattgtagattctagcgttatccgacacaatgaaaacgcgtattcgccggtaggtgggctaaagattctttatggtaatttagcgcgtgaaggagcggtgctcaaggtcgccgcagtggcagaatctatgaaagaatttgagggaagtgcggtgtgctttaattcgcaagaggaagcgattaaaggcattgcgggaggcaaggtaaaagcggggaatgttgtagtaatccgctatgagggacccaaagggggaccgggaatgcaagaaatgctcactcccacaagcctcattatgggaatgggacttggtgaatctgtcgcactcattaccgatgggcgctttagtggtgcgacaaggggaggctgtatcgggcatattagcccagaagcagcagaaggaggattaatcgcgctcattgaggacggagacaaaatcgcaatttcagtttcaaaaggcacattggaattgcttgtggattctaagattatagaatctcgccgcacgcaatggaagcctataaaaaaagagataaaaagcaaatggcttaaaagatactctttgcttgtgagcaacgccgcaaatggcgcggttttaaagacggagatatga

SEQ ID NO: 10595 - protein, 572 aa, Helicobacter hepaticus
MRSDIVKKGYQRAPHRSLLRATGLKDEDFNKPFIGIANSYIDIIPGHFFLNRYAQIIKEEIRAAGGVPFEFNTIGVDDGIAMGHSGMLYSLPSRELIADSIETMMNAHSLDAMICIPNCDKIVPGMLMGALRVNVPTIFVSGGPMKAGKLEDGTILDLNSAFEAVGAFAEGKISEKRLHEIECNACPGGGSCSGMFTANSMNTLCEAMGVALPGNGTILALSKEREELLRKAARRIVEIALDERKTEQFRFRNILNKKAVHNAFVVDMAMGGSTNTILHMLAIAKEAEVDFNLDSINAIASQVAHIAKIAPALSTIHMEDINRAGGVSAVMNEVAKRNASLGSHSADSILYLDALTITGETLGERIANAQIVDSSVIRHNENAYSPVGGLKILYGNLAREGAVLKVAAVAESMKEFEGSAVCFNSQEEAIKGIAGGKVKAGNVVVIRYEGPKGGPGMQEMLTPTSLIMGMGLGESVALITDGRFSGATRGGCIGHISPEAAEGGLIALIEDGDKIAISVSKGTLELLVDSKIIESRRTQWKPIKKEIKSKWLKRYSLLVSNAANGAVLKTEI

SEQ ID NO: 10596 - DNA, 1695 bp, Listeria innocua
  CDS (1)..(1695): transl_table=11
atgcgtagtgacaaaattaaaaaaggtgttgaacaggctccagcaagaagtttgctgcatgccacaggtcaaatcaaaagtccaggtgatatggataaaccatttatcgctatttgtaactcttacattgatattgtaccaggtcacgttcatttgcgagaacttgcggatgtggctaaagaagctattagagaagctggcggtatcccatttgaatttaatacgattggtgtagatgacggcattgctatgggacatatcggtatgcgttactccctcccttctcgtgaagtaattgctgatgctgctgaaaccgtcattaatgcacattggtttgatggtgttttctacattccaaactgtgacaaaatcacaccaggtatgctacttgcttctgtccgtacaaatgtacctgctatcttctgttctggtggtcctatgaaagctggattatctgctcacggaaaagcccttactctttcttccgtttttgaagcggttggtgcttttaaagaaggcagtatgtcacaagaagatttccttgatatggaagcaaacgcgtgtccgacttgcggctcgtgtgcaggaatgttcactgcaaactcaatgaactgtttaatggaaatcctcggtatggctgttccgggaaatggtacaacgcttgctgtttcggatgcacgccgagaacttattagagagtcagcattccatttaatggatttagtgaaaaaagatattcgtcctcgtgacattattactaaagatgcgatagatgatgcatttgctctagacatggcaatgggtggctctacaaatactgttttacatacactcgcccttgcaaatgaagctgggattgaagattacgatttagaacgtatcaatgacatcgctaaacgcgtcccttacctttccaaaatcgccccttcttcttcttactcgatgcatgatgttcatgaagctggtggtgtttcagctattattaaagaacttgttgatcttggtggcgctattcatccagaccgcataacagttactgggaagacaattagagaaaatgttgctgatgcaaaaattaataatacagatgttatccatccaaaagaaaatccttatagcccagttggtggactttccatgttgtttggaaatatcgcaccaaaaggagcaaccatcaaagttggtggtgtagatccttccgtacaagttttcaaaggggaagctatttgctttagttctcatgatgaggcagttgaagccattgataatcatacggttcgcgaaggtcatgtagtagttattcgctatgaaggtccaaaaggcggaccaggaatgccagaaatgctagctccaacatctagtattgttggccgcggtttaggtaaagacgtcgcactcattacagatggccgtttctccggagcaacacgcgggattgcagttggtcacatttctcctgaagctgctgctggcggtccaatcgcacttgttcacgacggagatattatcacaattgatttaccaaatcggacgttaaatgtagatgttccagatgaagttttagaagaaagaagaaaagaattaccgaaatttaaagccaaagtaaaaactggttatcttgcaagatatactgcactcgtaacaagtgctcacactggtggtattttgcaaattccagaagatttaatcgactaa

SEQ ID NO: 10597 - protein, 564 aa, Listeria innocua
MRSDKIKKGVEQAPARSLLHATGQIKSPGDMDKPFIAICNSYIDIVPGHVHLRELADVAKEAIREAGGIPFEFNTIGVDDGIAMGHIGMRYSLPSREVIADAAETVINAHWFDGVFYIPNCDKITPGMLLASVRTNVPAIFCSGGPMKAGLSAHGKALTLSSVFEAVGAFKEGSMSQEDFLDMEANACPTCGSCAGMFTANSMNCLMEILGMAVPGNGTTLAVSDARRELIRESAFHLMDLVKKDIRPRDIITKDAIDDAFALDMAMGGSTNTVLHTLALANEAGIEDYDLERINDIAKRVPYLSKIAPSSSYSMHDVHEAGGVSAIIKELVDLGGAIHPDRITVTGKTIRENVADAKINNTDVIHPKENPYSPVGGLSMLFGNIAPKGATIKVGGVDPSVQVFKGEAICFSSHDEAVEAIDNHTVREGHVVVIRYEGPKGGPGMPEMLAPTSSIVGRGLGKDVALITDGRFSGATRGIAVGHISPEAAAGGPIALVHDGDIITIDLPNRTLNVDVPDEVLEERRKELPKFKAKVKTGYLARYTALVTSAHTGGILQIPEDLID

SEQ ID NO: 10598 - DNA, 1689 bp, Methylococcus capsulatus
  CDS (1)..(1689): transl_table=11
atgaccgacaagcacccccgtccccattcgtcccaggtcgtcgacggcatggagcgcgccccgagccgcgcgatgctgcacgccgtcggcttcgccgatgccgacttcgccaaaccgcagatcggcatcgcttccacctgggcgatggtgacgccgtgcaacatgcacatcaacaagctcgccgaggacgcagcacgcggcgtcgacggcggcggcggcaaggcagtgatcttcaacaccatcaccatttccgacggcatctcgatgggcaccgaaggaatgaaatactccctcgtgtcgcgggaagtcatcgccgactcgatcgaaaccgtggtggcctgtcagggttatgacggcgtggtcgccatcggcggctgcgacaagaacatgcccggctgcctgatcgccctcgcccgcctcaaccgtccggcggtgttcgtctatggcggcaccatcctgccgggctgccacgacggcaagaagctggacgtggtgtcggtgttcgaagcggtcggcgcccgcgccaaccaccgcatcgacgatgccgaactgcacgccatcgaatccaatgccatccccggtccgggctcctgcggtggcatgtataccgccaacaccatggcctccgccatcgaggcattagggatgagcctgccgggcagttcggcccaggtggccatttcccgcgccaaggaactggattgcgagcgggccggcgcgcaggtcctcaagctcctggacctggggctcaaaccccgcgacatcatgaccaagaaggcgttcgagaacgccatcacggtggtgatcgccctgggcggctccaccaacgccgtgctgcacctcctggccatggccaacgcctgcggcgtcgacctgaagctcgacgatttcacccgcatcgggcgcaaagtgccgatgctggcggatctgaaacccagcggcagatactccatggccgaactggtggaaatcggcggcatccagccgctgatgaagaccttgctggacgcgggactcctgcacggcgactgcatgaccgtaaccggcaagaccctggaagaaaacctggccgacgcgcccgactacccggccggacaagacatgatccggtcgctggacaaccccatcaaaaaggacagccatctggtgatcctcaagggcaacctggcgccggaaggcgcggtcgccaagatcaccggcaaggaaggactgagcttcaccggcaccgcccgcgtattcgactgcgaggaagcggcgctcacggccatcctcgacggcacgatcgtgaaaggcgacgtcatcgtcatccgctatgaaggccccaagggcggccccggcatgcgcgagatgctctcgccgacctcggcggtcatgggcaagggattgggcaaggaggtcgccctcatcaccgacggccgcttttccggcggcacccacggcttcgtggtcggccacatcacgccggaagcctacaccggcggccccctggcgatcgtccgggacggcgataccatcaccatcgacgccgagacccgcgaattgagcctgcacgtcaccgacgatgaaatcggccggcgcctggcgcagtggactcaaccggcgccgcgctacaccaagggcgtgctggccaaatacgccaggttggtgagcccggcctcggaaggcgccgtcaccgacgacggcctctga

SEQ ID NO: 10599 - protein, 562 aa, Methylococcus capsulatus
MTDKHPRPHSSQVVDGMERAPSRAMLHAVGFADADFAKPQIGIASTWAMVTPCNMHINKLAEDAARGVDGGGGKAVIFNTITISDGISMGTEGMKYSLVSREVIADSIETVVACQGYDGVVAIGGCDKNMPGCLIALARLNRPAVFVYGGTILPGCHDGKKLDVVSVFEAVGARANHRIDDAELHAIESNAIPGPGSCGGMYTANTMASAIEALGMSLPGSSAQVAISRAKELDCERAGAQVLKLLDLGLKPRDIMTKKAFENAITVVIALGGSTNAVLHLLAMANACGVDLKLDDFTRIGRKVPMLADLKPSGRYSMAELVEIGGIQPLMKTLLDAGLLHGDCMTVTGKTLEENLADAPDYPAGQDMIRSLDNPIKKDSHLVILKGNLAPEGAVAKITGKEGLSFTGTARVFDCEEAALTAILDGTIVKGDVIVIRYEGPKGGPGMREMLSPTSAVMGKGLGKEVALITDGRFSGGTHGFVVGHITPEAYTGGPLAIVRDGDTITIDAETRELSLHVTDDEIGRRLAQWTQPAPRYTKGVLAKYARLVSPASEGAVTDDGL

SEQ ID NO: 10600 - DNA, 1860 bp, Neisseria gonorrhoeae
  CDS (1)..(1860): transl_table=11
atgccagaataccgctccaaaacctccacccacggccgcaatatggcgggcgcgcgcgcattgtggcgcgccaccggcgtgatggaaaccgacttcggcaagcccatcatcgccgttgccaactccttcacccaattcgtgccaggccacgtccacctgcacaatatgggccagctggttgcccgcgagattgaaaaagcgggtgcaattgccaaagaattcaacaccatcgccatcgacgacggcatcgccatggggcacagcggtatgttgtactccctgcccagccgcgatttgattgccgactccatcgaatatatggtcaacgcccactgcgccgacgcgctggtgtgcatttccaactgcgacaaaatcaccccgggaatgctgattgccgccatgcgcctgaacatccccaccatcttcgtctccggcggcccgatggaagcgggcaaggtcatcggcgtggcaaacatccaacccgaacgccgtttggacttgattgacgccatgatcgaatcggcggacgacaatgtcagcaaccggcaagtcgaagaagtcgaacaaaacgcctgcccgacctgcggctcgtgttcgggtatgtttacggcaaactcgatgaactgcctgaccgaagcgctcggtctgtccctgcccggcaacggttcgtatttggcgacccacgcaggccgcaaagaattgttcctcgaagcagggcgtatgattgtcgaaatcaccaaacgctattacgagcaagacgacgaaaccgtgctgccgcgcagcattgccaccaaaaaagcgtttgaaaacgccatgacgatggatattgcgatgggaggcagcaccaataccatcctgcacttgctcgccgtcgccaacgaagcgggcgtggatttcaaaatggcagacatcgaccgcttaagccgcgtcgtgccctgcatctgcaaaaccgcgcccaacaaccacgactactatatggaagacgtgcaccgcgccggcggcatcttcgccattctgaaagaacttgacaaagcgggcaaactgcacaccgacgtgtacacgatccacgcgccgacactgaaagacgcgattgaaaaatgggacgtcaccaatcccgaaaacacccgcgccatcgaacgtttcaaagcggctcccggcggcgtgcgcaccactcaggcgttctcgcaaaaccgtatttggaaaaccctcgaccttgaccgcgaaaaaggctgtatccgcgacgtggcacacgcctactcgcaagacggcggtttggcggtcttattcggcaacatcgccgagcgcggctgcgtggtaaaaaccgcaggcgtggacgagagcatcctcaaattcaccggccgcgcgcgcgtgtttgaaagccaggaagccgccgtcgaaggtattttgggcaaccaaatcgtcgccggcaacatcgtcatcatccgctacgaaggcccgaaaggcggcccgggtatgcaggaaatgctatacccgacctcctacctgaaatccaaaggcttgggcaaagcctgcgccctcttaaccgacggacgcttctccggcggcacatcaggtttgtccatcggacacgcctcgcccgaagcggcggaaggcggcgcaatcggtttggtacacgaaggcgatacgattgaaatcgacatccccaaacgcagcatccgccttgtcatttccgatgaagagcttgccgcacgccgtgccgaaatggaagctcgcggcagcaaagcgtggaaaccggaaaaccgcgaccgctacgtctccgccgcattaagggcttacggcgcgatggcgacttccgccgacaaaggcgcggtgcgcgacgtatcgcaaatcgagagataa

SEQ ID NO: 10601 - protein, 619 aa, Neisseria gonorrhoeae
MPEYRSKTSTHGRNMAGARALWRATGVMETDFGKPIIAVANSFTQFVPGHVHLHNMGQLVAREIEKAGAIAKEFNTIAIDDGIAMGHSGMLYSLPSRDLIADSIEYMVNAHCADALVCISNCDKITPGMLIAAMRLNIPTIFVSGGPMEAGKVIGVANIQPERRLDLIDAMIESADDNVSNRQVEEVEQNACPTCGSCSGMFTANSMNCLTEALGLSLPGNGSYLATHAGRKELFLEAGRMIVEITKRYYEQDDETVLPRSIATKKAFENAMTMDIAMGGSTNTILHLLAVANEAGVDFKMADIDRLSRVVPCICKTAPNNHDYYMEDVHRAGGIFAILKELDKAGKLHTDVYTIHAPTLKDAIEKWDVTNPENTRAIERFKAAPGGVRTTQAFSQNRIWKTLDLDREKGCIRDVAHAYSQDGGLAVLFGNIAERGCVVKTAGVDESILKFTGRARVFESQEAAVEGILGNQIVAGNIVIIRYEGPKGGPGMQEMLYPTSYLKSKGLGKACALLTDGRFSGGTSGLSIGHASPEAAEGGAIGLVHEGDTIEIDIPKRSIRLVISDEELAARRAEMEARGSKAWKPENRDRYVSAALRAYGAMATSADKGAVRDVSQIER

SEQ ID NO: 10602 - DNA, 1860 bp, Neisseria meningitidis serogroup B
  CDS (1)..(1860): transl_table=11
atgcctgaataccgctccaaaacctccacccacggccgcaatatggcgggcgcacgtgcattgtggcgcgccaccggcgtgatggaaaccgacttcggcaagcccatcatcgccgttgccaactccttcacccaattcgtgcccggccatgtccacctgcacaatatgggccagctggttgcccgcgaaatcgaaaaagccggcgcaatcgccaaagaattcaacaccatcgccatcgacgacggcatcgctatgggacacagcggcatgctgtactccctgcccagccgcgatttgattgccgactctatcgaatatatggtcaacgcccactgcgccgacgcgctggtgtgcatttccaactgcgacaaaatcaccccgggcatgctgattgccgcgatgcgcctgaacatccccaccatcttcgtctccggcggcccgatggaagcgggcaaggttatcggcgtggcaaacatccagcccgaacgccgtttggacttgattgacgcgatgattgaatcggcggacgacaatgtcagcaaccggcaagtcgaggaagtcgaacaaaacgcctgcccgacctgcggctcgtgttcgggtatgtttacggcaaactcgatgaactgcctgaccgaagcactcggcctttccctgcccggcaacggttcgtatttggcgacccacgccggccgcaaagaattgttcctcgaagccggccgtatgattgtcgaaatcaccaaacgctattacgagcaaaacgatgaaaccgtgttaccgcgcagcattgccaccaaaaaagcgtttgaaaacgctatgacgatggatattgcgatgggcggcagcaccaataccattttgcacctgttggccgttgccaacgaagccggtgtcgatttcaaaatggcagacatcgaccgcttaagccgcgtcgtgccctgcatctgcaaaaccgcacccaacaaccacgactactatatggaagacgtgcatcgcgccggcggtatcttcgccatcctgaaagaactggacaaagcgggcaaactgcacaccgacgtgcacaccatccacgcgccgacgctgaaagacgcgattgaacaatgggacgtgaccaatcccgaaaacacccgtgccatcgaacgcttcaaagccgcgccgggcggcgtacgcaccacccaagcgttctcgcaaaaccgtatgtggaaaaccctcgacctcgaccgcgaaaaaggctgtatccgcgacgtggcacacgcctactcgcaagacggcggtttggcggtcttgttcggcaacatcgccgagcgcggctgcgtggtaaaaaccgcaggcgtggacgagagcatcctcaaattcaccggccgcgcccgcgtgtttgaaagccaagaagacgcagtagaaggcattttgggcaaccaaatcgtcgctggcgacatcgtcatcatccgctacgaaggcccgaaaggcggcccgggcatgcaggaaatgctgtatccgacttcctacctgaaatctaaaggcctcggcaaagcctgcgctctcttaaccgacggacgcttctccggcggcacatcaggtttgtccatcggacacgcctcgcccgaagcggcggaaggtggcgcgatcggtttggtacacgaaggcgataccgtcgaaatcgacatccccaaccgcagcatccaccttgccatttccgatgaagagcttgccgcacgccgtgccgaaatggaagcgcgcggcagcaaagcatggaagcctaaaaaccgcgaccgctacgtctccgccgcattaagagcttacggcgcgatggcgacttccgccgacaaaggcgcggtgcgcgacgtagcgcaaatcgaaagataa

SEQ ID NO: 10603 - protein, 619 aa, Neisseria meningitidis serogroup B
MPEYRSKTSTHGRNMAGARALWRATGVMETDFGKPIIAVANSFTQFVPGHVHLHNMGQLVAREIEKAGAIAKEFNTIAIDDGIAMGHSGMLYSLPSRDLIADSIEYMVNAHCADALVCISNCDKITPGMLIAAMRLNIPTIFVSGGPMEAGKVIGVANIQPERRLDLIDAMIESADDNVSNRQVEEVEQNACPTCGSCSGMFTANSMNCLTEALGLSLPGNGSYLATHAGRKELFLEAGRMIVEITKRYYEQNDETVLPRSIATKKAFENAMTMDIAMGGSTNTILHLLAVANEAGVDFKMADIDRLSRVVPCICKTAPNNHDYYMEDVHRAGGIFAILKELDKAGKLHTDVHTIHAPTLKDAIEQWDVTNPENTRAIERFKAAPGGVRTTQAFSQNRMWKTLDLDREKGCIRDVAHAYSQDGGLAVLFGNIAERGCVVKTAGVDESILKFTGRARVFESQEDAVEGILGNQIVAGDIVIIRYEGPKGGPGMQEMLYPTSYLKSKGLGKACALLTDGRFSGGTSGLSIGHASPEAAEGGAIGLVHEGDTVEIDIPNRSIHLAISDEELAARRAEMEARGSKAWKPKNRDRYVSAALRAYGAMATSADKGAVRDVAQIER

SEQ ID NO: 10604 - DNA, 1674 bp, Nitrosomonas europaea
  CDS (1)..(1674): transl_table=11
atgccagataatcgacgcagccaaaccattacccaaggtgcacaacgcacccccaaccgcgccatgttacgcgcagtcggtttcggtgacggagacttcgataaacctatcgtcggggttgccaacggtttttccaccatcacaccctgcaacatggggctggatacccttgccaaatgcgccgaacatgcgctgaaaaccgccggtgccatgccgcagatgtttggcaccatcaccgtatccgacgggatctccatgggtaccgaaggcatgaagtattctctggtttcgcgcgaagtgatcgccgattcgatcgaaacctgcgtacaggcggaaagtatggatggcgtcatcgccatcggtggttgcgataaaaacatgcctggcgccatgatcgcgctggccagactgaacgtaccgtccatcttcgtctatggcggtaccatcaaacctggccattaccagggccgtgatctgaccatcgtaagcgctttcgaagctgtcggacagcataccgcgcacaagatagacgatcatgaactgctggaagtcgaacgccatgcctgtcccggcgccggttcgtgcggtggtatgtacacagccaacaccatgtcatctgccatcgaggcaatgggaatgagcctgccttactcttccaccatggcagcagaagatgaggaaaaacggatcagcgccatacgctccgccgaagtactggtggacgcggtcaaaaagcagattctgccgcgcagcctgatcacccgcaaatccatcgaaaatgcggtatctgtcgtcatggcggtgggaggttcgaccaatgccgtgctgcacctgctggccatcgcccatgcagccgaagtggaattcagcatcgatgatttcgaagccattcgtgcacgcgtaccggtattgtgcgatctgaaaccttccggacgctatgtagccacggatctgcacaaagcgggcggtattccgcaagtgatgaaaatgttgctggtacacgacctgctgcacggcgactgtctgaccatcagcggacaaaccatcgcggaagtgctgaaagacattcccgaacagccgcgtgccgatcaggatgtgattcaaccctgggacaatccggtatatgaacaggggcacctggcgatcctgaaaggtaatctttcatcagaaggtgcggttgccaagatttccggcatcaaaaatcccagtattaccggtcccgccagagtgttcgattctgaagaaacctgcatggctgccattcttgaacgcaaaatccagccaggtgatgtggtggtcatccgctacgaaggcccacagggcggacccggcatgcgcgaaatgctttctcccacttcagcactgatcggtgaagggctgggtgattcggtcgggttgattaccgatgggcgtttctccggtggtacctacggaatggtggtgggccatgtggcaccggaagcattcgccggcggaacgatcgccctggtacaagagggagattcgattacgatcgatgcacaccgtcgcctgctgcaactgaatgttcctgaagccgagctggaacgccgccgggcagcctggcatccacctgcaccacgctacacacgcggcgtactggcgaaatacgccaagctggtatccactgccagccgtggtgcagtcaccgattaa

SEQ ID NO: 10605 - protein, 557 aa, Nitrosomonas europaea
MPDNRRSQTITQGAQRTPNRAMLRAVGFGDGDFDKPIVGVANGFSTITPCNMGLDTLAKCAEHALKTAGAMPQMFGTITVSDGISMGTEGMKYSLVSREVIADSIETCVQAESMDGVIAIGGCDKNMPGAMIALARLNVPSIFVYGGTIKPGHYQGRDLTIVSAFEAVGQHTAHKIDDHELLEVERHACPGAGSCGGMYTANTMSSAIEAMGMSLPYSSTMAAEDEEKRISAIRSAEVLVDAVKKQILPRSLITRKSIENAVSVVMAVGGSTNAVLHLLAIAHAAEVEFSIDDFEAIRARVPVLCDLKPSGRYVATDLHKAGGIPQVMKMLLVHDLLHGDCLTISGQTIAEVLKDIPEQPRADQDVIQPWDNPVYEQGHLAILKGNLSSEGAVAKISGIKNPSITGPARVFDSEETCMAAILERKIQPGDVVVIRYEGPQGGPGMREMLSPTSALIGEGLGDSVGLITDGRFSGGTYGMVVGHVAPEAFAGGTIALVQEGDSITIDAHRRLLQLNVPEAELERRRAAWHPPAPRYTRGVLAKYAKLVSTASRGAVTD

SEQ ID NO: 10606 - DNA, 1836 bp, Pasteurella multocida
  CDS (1)..(1836): transl_table=11
atgcctaaattacgttcagcgaccagtacacagggtcgtaatatggcgggtgcccgtgccttgtggcgtgccacgggaatgaaagaaaacgactttggtaaaccgattattgccgtcgtcaactcctttacgcaatttgtgcccggtcatgtgcatttaaaagacatggggcaacttgtcgcccgtgaaattgaaaaagccggtggtgtggcgaaagagtttaataccattgcggtggatgatgggattgccatggggcatggtgggatgctctattctttaccaagccgtgatttgattgccgatagtgtggaatatatggtcaacgcacactgtgccgatgccatggtgtgtatttctaactgcgacaaaatcaccccggggatgctcatggcggcgttacgcttgaatattccttgtgtgtttgtctcgggcggaccgatggaagcgggcaaaactaaactgtctgataaaatcatcaaactggatttagtagatgccatgatccaaggtgccaacccaaatgtatcagacgaagacagcgcccagatcgaacgctctgcttgtccaacctgtggctcttgctcgggtatgtttaccgcaaattcaatgaactgcttaacagaagcccttggcttaagtctgccgggcaacggatcctgccttgcaacccacgcagatcgtaaacaactgttccttgatgcggggaaacaagtggtcgaattgtgcaaacgctactatgaacaagaggatgacagcgtcttacctcgttctatcgccaacaaaaaggcctttgaaaatgccatgagcttagatattgccatgggcgggtcaaccaataccgtcttgcatttattagccgcggcacaagaagcggaagtggatttcaccatggctgatattgatcgcctatcacgtcaagtgccttgtttaagcaaagtcgcgccaaatacgcaaaaataccacatggaagatgtacaccgtgcaggaggtattatggcgattttaggggaattagatcgtgccaatttattacataatgatactcgcacagtattaggcatgagtctcgctgagcaaattgccaaatatgacattgtgctcactaaagatgaagccgtacacaaattcttccgcgctggtcccgcaggaattcgtacgaccgaagctttttcacaagattgccgttgggatacagtggatgatgatcgtgaaaatggctgtattcgtagtaaaacatttgcctatagccaagatggcgggcttgccatgttatcaggcaacttagcgatggacggttgtattgtgaaaaccgctggagtagatgagagcattttaaaattcactggcgatgccattgtgtttgaaagccaagaagatgcggtggcagggattttaggtggcaaagtacaagcaggtcatgtggtcgtgattcgctacgaaggaccaaaaggcggaccgggtatgcaagaaatgctgtatcccaccagttatttaaaatccatgggcttaggtaaagcctgtgccttattaacagacgggcgtttctctggcgggacatcggggttatctattgggcattgctcaccagaagccgccgcgggtggattaattggcttagtaaaagacggtgataagattgaaattgatattccaaatcgatccattcaattatgtgtcgcggaagaagaactcgctcagcgccgagcagaacaagacaaactgggttggcaaccagtaaaccgccaacgtgaagtgtcctttgccttgaaagtatatggtcattttgcgacctcggcagataaaggcgcggtaagagataaaaccaaaatttaa

SEQ ID NO: 10607 - protein, 611 aa, Pasteurella multocida
MPKLRSATSTQGRNMAGARALWRATGMKENDFGKPIIAVVNSFTQFVPGHVHLKDMGQLVAREIEKAGGVAKEFNTIAVDDGIAMGHGGMLYSLPSRDLIADSVEYMVNAHCADAMVCISNCDKITPGMLMAALRLNIPCVFVSGGPMEAGKTKLSDKIIKLDLVDAMIQGANPNVSDEDSAQIERSACPTCGSCSGMFTANSMNCLTEALGLSLPGNGSCLATHADRKQLFLDAGKQVVELCKRYYEQEDDSVLPRSIANKKAFENAMSLDIAMGGSTNTVLHLLAAAQEAEVDFTMADIDRLSRQVPCLSKVAPNTQKYHMEDVHRAGGIMAILGELDRANLLHNDTRTVLGMSLAEQIAKYDIVLTKDEAVHKFFRAGPAGIRTTEAFSQDCRWDTVDDDRENGCIRSKTFAYSQDGGLAMLSGNLAMDGCIVKTAGVDESILKFTGDAIVFESQEDAVAGILGGKVQAGHVVVIRYEGPKGGPGMQEMLYPTSYLKSMGLGKACALLTDGRFSGGTSGLSIGHCSPEAAAGGLIGLVKDGDKIEIDIPNRSIQLCVAEEELAQRRAEQDKLGWQPVNRQREVSFALKVYGHFATSADKGAVRDKTKI

SEQ ID NO: 10608 - DNA, 1842 bp, Photobacterium profundum
  CDS (1)..(1842): transl_table=11
atgcctaagtatcgttcagccaccaccacccatggtcgtaatatggccggagcccgcgcattatggcgtgcaacaggcgttaaagatgaagatttcggcaagccgatcattgccgtcgtgaactcttttacgcaatttgtaccaggtcatgttcacctaaaagacatgggacagctagtggcaggagagatagagaaagcaggtggtattgccaaggaattcaataccattgccgttgatgatggtatcgcaatgggccatggcggcatgctgtattcgcttccgtcacgagagctcattgcagattcggtggaatacatggttaatgcacactgtgccgatgcaatggtgtgcatctctaactgtgacaaaatcacccctggcatgctaatggcagcactgcgactcaatatcccagtgatctttgtttctggtggtccaatggaagccggtaaaaccaagctgtctgatcagatcctaaagctggatcttgttgatgccatgattcaaggtgcagatcctacggtgtctgacgaacaaagcgaacaaatagaacgatctgcttgtccaacctgtggttcatgttcagggatgttcaccgcgaactccatgaactgtctaacagaagcattaggattaagccaaccaggtaatggttcaatgctggcgactcacgccgatcgcgaacaactctttatcaatgcgggtaaacgtatcgttgatctgactaaacgttattacctcaacgatgatgacaccgcattaccgcgtaatattgcgaataaaaaagcctttgaaaatgcaatggcgctcgatatcgcaatgggtggctcaaccaataccgtattacacctattagccgcagcaaaagaaggtgacattgattttgatatggacgacatcgatcgtatgtctcgtcttataccacacctttgtaaagtagctccctcaacacccaaataccacatggaagatgtacaccgtgctggtggtgtttacagtattttaggtgagcttgatcgcgccggtctgctgcacaacgatacccacaatatacttggtcaaacctttgctgaatcactggctgaatacgatatcgcggtaaccgaatcacaagcggtgaaagatttcttccgtgccggtcctgctggtattcgcaccaccaaagccttctcacaaagttgtcgttgggataccttagatgacgatcgcaccaatggctgtattcgcagtaaagagcatgcatttagccaagatggcgggctcgcagtcctctctggcaacattgcgatcaaaggctgtattgttaaaacagcaggcgttgatgaaaacagcttagtctttagcggacccgctgtggttttcgaaagccaagatactgctgttgaaggtattcttggtggtaaagtgaaatctggcgatgtggttgttattcgttatgaagggcctaaaggtggtcctgggatgcaagaaatgctgtacccaaccacttaccttaaatcaattggtttagggaaagaatgtgccttaatcactgacggccgtttttctggcggcacaagcggtttatcgattggtcatgtttcacctgaagcagccgctggcggtacgattggtctagtgaacgatggtgatatcattaatatcgatattcccaaccgcagtattgaattacatgttgatgacacagaacttgcccaacgccgtgcaacagcagatcagcaaggttggaaaccagttaaccgtcaacgtgaagtgtcttacgcattacgtgcgtatgcattgcttgcaaccagtgccgatcaaggcgctatccgtgacaaatctaaactcgaaggataa

SEQ ID NO: 10609 - protein, 613 aa, Photobacterium profundum
MPKYRSATTTHGRNMAGARALWRATGVKDEDFGKPIIAVVNSFTQFVPGHVHLKDMGQLVAGEIEKAGGIAKEFNTIAVDDGIAMGHGGMLYSLPSRELIADSVEYMVNAHCADAMVCISNCDKITPGMLMAALRLNIPVIFVSGGPMEAGKTKLSDQILKLDLVDAMIQGADPTVSDEQSEQIERSACPTCGSCSGMFTANSMNCLTEALGLSQPGNGSMLATHADREQLFINAGKRIVDLTKRYYLNDDDTALPRNIANKKAFENAMALDIAMGGSTNTVLHLLAAAKEGDIDFDMDDIDRMSRLIPHLCKVAPSTPKYHMEDVHRAGGVYSILGELDRAGLLHNDTHNILGQTFAESLAEYDIAVTESQAVKDFFRAGPAGIRTTKAFSQSCRWDTLDDDRTNGCIRSKEHAFSQDGGLAVLSGNIAIKGCIVKTAGVDENSLVFSGPAVVFESQDTAVEGILGGKVKSGDVVVIRYEGPKGGPGMQEMLYPTTYLKSIGLGKECALITDGRFSGGTSGLSIGHVSPEAAAGGTIGLVNDGDIINIDIPNRSIELHVDDTELAQRRATADQQGWKPVNRQREVSYALRAYALLATSADQGAIRDKSKLEG

SEQ ID NO: 10610 - DNA, 1848 bp, Pseudomonas syringae pv
  CDS (1)..(1848): transl_table=11
atgcctgattaccgctcgaaaacgtccacccacggccgcaacatggccggcgcccgtgccctgtggcgcgccacgggcatgaaggacgaagacttcaagaaaccgatcattgccatcgccaactccttcacccagttcgtacccggccacgtccacctcaaggacatgggccagttggtcgcgcgtgaagtcgagcgcgccggtggcgtggccaaggaattcaacaccattgcggtcgacgatggcatcgccatgggccacgacgggatgctctattcgctgccgagccgcgagatcattgccgactccgtcgagtacatggtcaatgcgcattgcgccgacgccatcgtgtgcatttccaactgcgacaagatcaccccgggcatgctgatggcgtcgttgcgcctgaacattccggtgatcttcgtttccggcgggccaatggaagcgggcaagaccaaactggccagccacggcctcgatctggtcgatgcgatggtcatcgccgccgactcgacagccagtgacgaaaaagtcgccgagtacgagcgcagcgcctgtccgacctgcgggtcgtgttccggcatgttcaccgccaactcgatgaactgcctgaccgaagcactgggcctggcgttgccgggcaatggctcggctctcgccacccacagcgaccgcgagcaactgttcctgcaggctggccgcaccatcgttgacctgtgccgtcagtactacaaggaaaacgacgattcggtgttgccgcgcaacatcgccaacttcaaggcgttcgaaaacgccatgacgctggacatcgccatgggcggctcgaccaacaccatcctgcacttgctggccgccgctcaggaagccgagatcgatttcgacctgcgccacatcgaccgtctgtcgcgcaaggtgccgcagctgtgcaaggtcgcgccgaacatccagaagtaccacatggaagacgtgcaccgcgctggcgggatcttcagcatccttggcgagctggcccgtggcggcctgctgcacaccgacctgccgaccgtgcacagcaagaccctggccgaaggcatcgccaaatgggacatcacccagactgacgacgaggccgtgcacaccttcttcaaggcaggcccggcgggcatcccgacgcagaccgcgttcagccagtcgacccgttgggacagtctggatgatgaccgtgaaaacggctgcatccgcagcgtagagcacgcctattcgcaagaaggcggcctggccgtgttgtacggcaacatcgcactggacggctgcgtggtgaaaaccgctggcgtcgacgagtcgattcacgtcttcgaaggcaacgcgaagatcttcgaaagccaggacagcgcggtgcgcgggattctcgctgacgaagtcaaagcgggcgacattgtcatcatccgctacgaaggcccgaaaggcggcccgggcatgcaggaaatgctctacccgacgtcctacctgaagtccaaggggctgggcaaggattgcgcactgctgactgatggccgcttctcgggcggtacgtccggcctgtccatcggccacgcctcaccggaagcggcggcaggcggagcgatcggtctggtgcgcgacggtgacaaggtgctgatcgacatccccaatcgctcgatcaacctgctgatcgacgatgccgagatggccgagcgtcgcaccgaacaggacaagaaaggctggaaacctgtcgagtcgcgtccacgcaaagtgaccaccgccctcaaggcctacgccctgctggcgaccagcgctgacaagggcgcggtgcgtgacaaggcgttgctggacaaactggtgccttga

SEQ ID NO: 10611 - protein, 615 aa, Pseudomonas syringae pv
MPDYRSKTSTHGRNMAGARALWRATGMKDEDFKKPIIAIANSFTQFVPGHVHLKDMGQLVAREVERAGGVAKEFNTIAVDDGIAMGHDGMLYSLPSREIIADSVEYMVNAHCADAIVCISNCDKITPGMLMASLRLNIPVIFVSGGPMEAGKTKLASHGLDLVDAMVIAADSTASDEKVAEYERSACPTCGSCSGMFTANSMNCLTEALGLALPGNGSALATHSDREQLFLQAGRTIVDLCRQYYKENDDSVLPRNIANFKAFENAMTLDIAMGGSTNTILHLLAAAQEAEIDFDLRHIDRLSRKVPQLCKVAPNIQKYHMEDVHRAGGIFSILGELARGGLLHTDLPTVHSKTLAEGIAKWDITQTDDEAVHTFFKAGPAGIPTQTAFSQSTRWDSLDDDRENGCIRSVEHAYSQEGGLAVLYGNIALDGCVVKTAGVDESIHVFEGNAKIFESQDSAVRGILADEVKAGDIVIIRYEGPKGGPGMQEMLYPTSYLKSKGLGKDCALLTDGRFSGGTSGLSIGHASPEAAAGGAIGLVRDGDKVLIDIPNRSINLLIDDAEMAERRTEQDKKGWKPVESRPRKVTTALKAYALLATSADKGAVRDKALLDKLVP

SEQ ID NO: 10612 - DNA, 1839 bp, Pseudomonas aeruginosa
  CDS (1)..(1839): transl_table=11
atgcccgattaccgctcgaaaacctccacccacggccgcaacatggccggcgcccgcgccctctggcgcgccaccgggatgaaggacgaagacttcaagaagccgatcatcgccatcgccaactccttcacccagttcgtgcccggccacgtgcacctgaaggacctcggccaactggtcgcccgcgagatcgagaaggccggcggcgtggccaaggaattcaacaccatcgccgtcgacgacggcatcgccatgggccacgacggcatgctctattcgctgccgagccgggagatcatcgccgactccgtggaatacatggtcaacgcccactgcgccgacgccatcgtctgcatctccaactgcgacaagatcacccccggcatgctgatggccgcgctgcgcctgaacatcccggtagtgttcgtctccggcgggccgatggaagccggcaagaccaagctggccagccacggcctggacctggtcgatgccatggtggtggccgccgacgactcctgctccgacgagaaggtcgccgagtacgagcgcagcgcctgcccgacctgcggctcctgctccggcatgttcaccgccaactcgatgaactgcctgaccgaggcgctcggcctgtcgctgccgggcaacggctcgaccctggccacccacgccgaccgcgagcaactgttcctacgcgccgggcgcctggccgtggaactctgccagcgctattacggcgaaggcgacgacagcgtgctgccgcgcaacatcgccaacttcaaggccttcgagaacgccatgaccctggacatcgccatgggcggctcgaccaataccatcctgcacctgctggccgccgcccaggaggccgaggtgccgttcgacctgcgcgacatcgaccgcctgtcgcgcaaggtgccgcaactgtgcaaggtggcgccgaacatccagaagtaccacatggaagacgtgcatcgcgccggcggcatcttctccatcctcggcgaactggcccgcggtggcctgctgcacaccgacgtccccaccgtgcacagcccgagcatggccgacgccatcgcccagtgggacatcacccagacccgcgacgaagccgtgcacaccttcttcaaggccggtccggcgggcatcccgacccagaccgcgttcagccagaacacccgctggccgagcctggacgacgaccgcgccgagggctgcatccgcagcgtcgagcatgcctattccaaggaaggcgggctggccgtgctctacggcaacatcgctctcgacggctgcgtggtgaagaccgccggggtcgacgagtcgatccacgtgttcgaaggcagcgcgaagatcttcgaaagccaggacgccgcggtgaaaggcatcctcggcgacgaggtgaaggccggcgacatcgtgatcatccgctacgaaggaccgaagggcgggccgggcatgcaggaaatgctctatccgaccagctacctgaagtccaagggcctgggcaagcagtgcgccctgctcaccgacggacgcttctccggcggcacctcgggcctgtccatcggccacgcctccccggaagccgccgccggcggcgccatcggcctggtgcaggacggcgacaaggtgctgatcgacattcccaatcgctcgatcaacctgctggtcagcgacgaagaactcgccgcacgccgcgccgaacaggacaagaagggctggaagccggccgcgccgcgtgcccgccgcgtcagcaccgcgctcaaggcctacgccctgctcgccaccagcgccgacaagggcgcggtacgcaacaaggcgctgctggacggctga

SEQ ID NO: 10613 - protein, 612 aa, Pseudomonas aeruginosa
MPDYRSKTSTHGRNMAGARALWRATGMKDEDFKKPIIAIANSFTQFVPGHVHLKDLGQLVAREIEKAGGVAKEFNTIAVDDGIAMGHDGMLYSLPSREIIADSVEYMVNAHCADAIVCISNCDKITPGMLMAALRLNIPVVFVSGGPMEAGKTKLASHGLDLVDAMVVAADDSCSDEKVAEYERSACPTCGSCSGMFTANSMNCLTEALGLSLPGNGSTLATHADREQLFLRAGRLAVELCQRYYGEGDDSVLPRNIANFKAFENAMTLDIAMGGSTNTILHLLAAAQEAEVPFDLRDIDRLSRKVPQLCKVAPNIQKYHMEDVHRAGGIFSILGELARGGLLHTDVPTVHSPSMADAIAQWDITQTRDEAVHTFFKAGPAGIPTQTAFSQNTRWPSLDDDRAEGCIRSVEHAYSKEGGLAVLYGNIALDGCVVKTAGVDESIHVFEGSAKIFESQDAAVKGILGDEVKAGDIVIIRYEGPKGGPGMQEMLYPTSYLKSKGLGKQCALLTDGRFSGGTSGLSIGHASPEAAAGGAIGLVQDGDKVLIDIPNRSINLLVSDEELAARRAEQDKKGWKPAAPRARRVSTALKAYALLATSADKGAVRNKALLDG

SEQ ID NO: 10614 - DNA, 1842 bp, Pseudomonas fluorescens
  CDS (1)..(1842): transl_table=11
atgcctgattaccgctcgaaaacatccacccatggccgcaacatggccggcgcccgcgccctgtggcgcgccacggggatgaaagatgacgacttcaagaagccgatcatcgccattgccaactccttcacccagttcgtcccggggcacgtgcacctgaaggacctgggccagctggtggctcgcgagatcgaacgcgccggtggcgtggccaaggaattcaacaccatcgccgtggacgacggcatcgccatgggccatgacggcatgctgtattcgctgccgagccgcgagatcatcgccgactccgtggagtacatggtcaacgcccactgtgccgacgccatcgtgtgcatttccaactgcgacaagatcacccccggcatgctgatggccgccctgcgcctgaacatcccggtgatcttcgtttccggcggcccgatggaagccggcaagaccaagctcgccagccatggcctggacctggtggacgccatggtcatcgccgccgactccagcgcttctgacgagaaggttgccgagtacgagcgcagcgcctgcccgacctgcggttcatgctccggcatgttcaccgccaactccatgaactgcctgaccgaagccctggggctcgccctgccgggcaacggttcgaccctggccacccacagcgatcgcgaagagctgttcctgcgggccgggcgcaccatcgtcgagctgtgccagcgctactacggcgacaacgacgagtcggtcctgccgcgcaacatcgccaacttcaaggcgttcgagaacgccatgaccctggatatcgccatgggcggttccaccaacaccatcctgcacctgctggccgccgcccaggaagccgagatcgacttcgacctgcgggacatcgatcgcctgtcgcgccacgtgccgcagctgtgcaaagtggcgccgaacatccagaagtaccacatggaagacgtgcaccgcgccggcggtatcttcagcatcctcggcgaactggcccgtggcggcctgctgcacaccgacctgcccaccgtgcacagcaagaccatggccgaaggcatcgcccagtgggacatcacccagaccagcgacgaagccgtgcatcacttcttcaaggccggcccggcgggcatcccgacccagacggcgttcagccagtcgacccgttgggacagcctcgacgatgaccgtgaaaacggctgcatccgcagtgtcgagcatgcctactcgaaagaaggcggcctggccgtgctctacggcaacatcgccctggacggctgcgtggtgaagaccgccggtgtcgacgagtcgatccatgtcttcgaaggcaacgccaagatcttcgagagccaggacagcgcggtgcgcggcatcctcgccgacgaggtgaaggaaggcgacatcgtgatcatccgttacgaaggcccgaaaggcggcccgggcatgcaggaaatgctctatccgacctcctacctgaagtccaagggcctgggcaaagcctgcgccctgctcaccgacggccgcttctccggcggcacctcgggcctgtccatcggccacgcctcgcctgaagcggcagccggtggcaccatcggcctggtgcaggacggcgacaaggtactgatcgacattcccaaccgctcgatcaacctgttggtcagcgacgaggaactggcggcccgccgtgtcgagcaggacaagaaaggctggaaaccggtggaagcacgcccgcgcaaggtgaccaccgcgctgaaggcctacgccctgctagccaccagcgccgacaagggtgcggtgcgcaacaaggccatgctcgacggcctgtga

SEQ ID NO: 10615 - protein, 613 aa, Pseudomonas fluorescens
MPDYRSKTSTHGRNMAGARALWRATGMKDDDFKKPIIAIANSFTQFVPGHVHLKDLGQLVAREIERAGGVAKEFNTIAVDDGIAMGHDGMLYSLPSREIIADSVEYMVNAHCADAIVCISNCDKITPGMLMAALRLNIPVIFVSGGPMEAGKTKLASHGLDLVDAMVIAADSSASDEKVAEYERSACPTCGSCSGMFTANSMNCLTEALGLALPGNGSTLATHSDREELFLRAGRTIVELCQRYYGDNDESVLPRNIANFKAFENAMTLDIAMGGSTNTILHLLAAAQEAEIDFDLRDIDRLSRHVPQLCKVAPNIQKYHMEDVHRAGGIFSILGELARGGLLHTDLPTVHSKTMAEGIAQWDITQTSDEAVHHFFKAGPAGIPTQTAFSQSTRWDSLDDDRENGCIRSVEHAYSKEGGLAVLYGNIALDGCVVKTAGVDESIHVFEGNAKIFESQDSAVRGILADEVKEGDIVIIRYEGPKGGPGMQEMLYPTSYLKSKGLGKACALLTDGRFSGGTSGLSIGHASPEAAAGGTIGLVQDGDKVLIDIPNRSINLLVSDEELAARRVEQDKKGWKPVEARPRKVTTALKAYALLATSADKGAVRNKAMLDGL

SEQ ID NO: 10616 - DNA, 1842 bp, Pseudomonas fluorescens
  CDS (1)..(1842): transl_table=11
atgccagattaccgctcgaaaacatccacccacggccgcaacatggccggcgcccgcgcactgtggcgcgccaccgggatgaaagatgacgacttcaagaagccgatcatcgccattgccaactccttcacccagttcgtcccgggccacgtccacctgaaggacctcggccagctggttgcccgtgagatcgaacgcgctggcggcgttgcaaaagaattcaacaccatcgccgtggatgacggcatcgccatgggccacgacggcatgctctattcgctgccgagccgcgagatcatcgccgactccgtcgagtacatggtcaacgcccactgcgccgacgccatcgtctgcatctcgaactgcgacaagatcacccccggcatgctgatggccgcgctgcgcctgaacatcccggtgatcttcgtctccggcggtccgatggaagccggcaagaccaaactggccagccacggtctcgacctcgtcgacgccatggtcatcgccgccgactccagcgcttctgacgagaaggttgccgagtacgagcgcagcgcctgcccgacctgcggttcgtgctccggcatgttcaccgccaactcgatgaactgcctgaccgaggccctgggccttgcattgccgggcaacggttcgaccctggccacccacagcgaccgcgaacagctgttcctgcaggccggccgtaccatcgtcgagctgtgcaaacgctactacggcgagaacgacgagtcggtactgccgcgcaacatcgccaacttcaaggcgttcgagaacgcgatgatgctcgacatcgccatgggcggttcgaccaacaccatcctgcacttgctggccgcagcccaggaagcagagatcgacttcgacctgcgtgacattgatcgtctgtcgcgcaaggtgccgcaactgtgcaaggtcgcgccgaacatccagaagtaccacatggaagacgtgcaccgcgccggcggcatcttcagcattctcggttcgctggcccgtggcggcctgctgcacaccgacctgccgaccgtgcacagtcgcagcatggaagaagccatcgccaaatgggacatcacccagaccgacgatgaagccgtgcatcatttcttcaaggccggcccggccggcattccgacgcagaccgcgttcagccagtcgacccgctgggaaaccctggacgacgaccgtgaaaacggctgcatccgcagctttgaacacgcttattcgaaagaaggcggcctggccgtgctgtacggcaacatcgccctggacggctgcgtggtgaaaaccgccggtgtcgacgagtcgatccacgtgttcgaaggcaacgcgaagatcttcgaaagccaggacagcgccgtacgcggcatcctcgccgacgaagtaaaggaaggcgacatcgtcatcattcgctacgaaggcccgaaaggcggcccgggcatgcaggaaatgctctatccgacctcgtacctgaaatccaaaggcctgggcaaagcctgcgccctgctgaccgacggtcgtttctccggcggtacgtccggcttgtccatcggccacgcttcaccagaggctgcggccggcggcgcgatcggcctggtacaggacggcgacaaggtgctgatcgacattccgaaccgttcgatcaacctgctgatcagcgacgaagaactggcggcacgccgggtcgagcaggacaagaaaggctggaaaccggtcgaacagcgtccacgcaaagtgaccaccgccctcaaggcctacgccctgctggcgaccagcgccgacaagggtgctgtgcgtaacaaggcgatgctcgacgggctgtaa

SEQ ID NO: 10617 - protein, 613 aa, Pseudomonas fluorescens
MPDYRSKTSTHGRNMAGARALWRATGMKDDDFKKPIIAIANSFTQFVPGHVHLKDLGQLVAREIERAGGVAKEFNTIAVDDGIAMGHDGMLYSLPSREIIADSVEYMVNAHCADAIVCISNCDKITPGMLMAALRLNIPVIFVSGGPMEAGKTKLASHGLDLVDAMVIAADSSASDEKVAEYERSACPTCGSCSGMFTANSMNCLTEALGLALPGNGSTLATHSDREQLFLQAGRTIVELCKRYYGENDESVLPRNIANFKAFENAMMLDIAMGGSTNTILHLLAAAQEAEIDFDLRDIDRLSRKVPQLCKVAPNIQKYHMEDVHRAGGIFSILGSLARGGLLHTDLPTVHSRSMEEAIAKWDITQTDDEAVHHFFKAGPAGIPTQTAFSQSTRWETLDDDRENGCIRSFEHAYSKEGGLAVLYGNIALDGCVVKTAGVDESIHVFEGNAKIFESQDSAVRGILADEVKEGDIVIIRYEGPKGGPGMQEMLYPTSYLKSKGLGKACALLTDGRFSGGTSGLSIGHASPEAAAGGAIGLVQDGDKVLIDIPNRSINLLISDEELAARRVEQDKKGWKPVEQRPRKVTTALKAYALLATSADKGAVRNKAMLDGL

SEQ ID NO: 10618 - DNA, 1842 bp, Pseudomonas putida
  CDS (1)..(1842): transl_table=11
atgcctgattatcgttccaagacttccacccaaggccgcaacatggccggcgcccgtgccctgtggcgcgccaccgggatgaaggacgaagacttcaagaaaccgatcatcgccatcgccaactcgttcacccagttcgtaccgggccatgtgcacctgaaggacctgggccagctggtggctcgcgaaatcgaacgcgccggtggcgtggccaaggaattcaacaccatcgcggtcgatgacggcatcgccatgggccacgacggcatgctgtactcgctgccaagccgcgaaatcattgccgacgccgtggaatacatggtcaatgcgcactgcgccgacgccatcgtctgtatctccaactgcgacaagatcacccccggcatgctgatggccgccctgcgcctgaacatcccggtgatcttcgtttccggcggcccgatggaagccggcaagaccaagctggccagccacggcctggacctggtcgatgccatggtcatcgcggccgactccacggcctccgacgagaaagtcgccgaatacgagcgcagcgcctgcccgacctgtggttcgtgctccggcatgttcaccgccaactcgatgaactgcctgaccgaagccctgggcctggccctgccgggcaacggttcgaccctggccacccactccgaccgcgagcagctgttcctcacggccggccgtaccatcgtcgagctgtgcaagcgctactacggcgagaatgacgagtcggtcctgccacgcagcatcgccaacttcaaagcgttcgaaaacgccatgatgctggacatcgccatgggcggctcgaccaacaccatcctgcacctgctggcagcagcacaggaaggcgaagtggcgttcgacctgcgcgacatcgaccgcctgtcacgcaaagtgccgcagctgtgcaaagtggcgccgaacatccagaagtaccacatggaagacgtccaccgcgccggcggcatcttcagcatcctcggttcgctggcccgtggcggcctgctgcacaccgacctgccgaccgtgcacagccgcagcatggaagaagccatcgccaaatgggacatcacccagaccgatgacgaagccgtgcacaccttcttcaaggctggccctgccggtatcccgacccagaccgcattcagccagtcgacccgttgggaaaccctcgacgacgaccgtgaaaacggctgtatccgcagctttgaacacgcctactcgcaagagggcggcctggccgtgctgtacggcaacatcgcactggatggctgcgtggtcaaaaccgccggtgtcgacgaatcgatccacgtgttcgagggcaccgcgaagatcttcgaaagccaggacagcgccgtgcgcggcatcctcgccgacgaggtgaaagccggcgacatcgtcatcatccgctacgaaggcccgaaaggcggcccgggcatgcaagaaatgctctacccgacctcgtacctcaagtccaaaggcctgggcaaggcctgcgccctgctcaccgacggtcgcttctcgggcggtacctcgggcctgtcgatcggccacgcctcgccagaggccgcggcgggcggcgccatcggcctggtgcgcgacggcgacaaggtactgatcgacatccctaaccgctcgatcaacctgctggtcagcgatgaagagctggcgcaacgccgtgtcgagcaggacaagaagggctggaagccagccgaggtccgtccacgcaaggtaaccaccgcgctcaaggcctatgccctgctggccaccagtgccgacaagggtgcggtgcgtaacaaggcaatgctggaaggcctctga

SEQ ID NO: 10619 - protein, 613 aa, Pseudomonas putida
MPDYRSKTSTQGRNMAGARALWRATGMKDEDFKKPIIAIANSFTQFVPGHVHLKDLGQLVAREIERAGGVAKEFNTIAVDDGIAMGHDGMLYSLPSREIIADAVEYMVNAHCADAIVCISNCDKITPGMLMAALRLNIPVIFVSGGPMEAGKTKLASHGLDLVDAMVIAADSTASDEKVAEYERSACPTCGSCSGMFTANSMNCLTEALGLALPGNGSTLATHSDREQLFLTAGRTIVELCKRYYGENDESVLPRSIANFKAFENAMMLDIAMGGSTNTILHLLAAAQEGEVAFDLRDIDRLSRKVPQLCKVAPNIQKYHMEDVHRAGGIFSILGSLARGGLLHTDLPTVHSRSMEEAIAKWDITQTDDEAVHTFFKAGPAGIPTQTAFSQSTRWETLDDDRENGCIRSFEHAYSQEGGLAVLYGNIALDGCVVKTAGVDESIHVFEGTAKIFESQDSAVRGILADEVKAGDIVIIRYEGPKGGPGMQEMLYPTSYLKSKGLGKACALLTDGRFSGGTSGLSIGHASPEAAAGGAIGLVRDGDKVLIDIPNRSINLLVSDEELAQRRVEQDKKGWKPAEVRPRKVTTALKAYALLATSADKGAVRNKAMLEGL

SEQ ID NO: 10620 - DNA, 1848 bp, Pseudomonas syringae pv
  CDS (1)..(1848): transl_table=11
atgcctgattaccgctcgaaaacctccacccacggccgcaacatggccggcgcccgtgccctgtggcgcgccacgggcatgaaggacgaagactttaagaaaccgatcattgccattgccaactccttcacccagttcgtaccgggccacgtccacctcaaggacatgggccagctggtcgcgcgtgaagtcgaacgcgccggtggcgtggccaaggaattcaacaccattgcggtcgacgacggcatcgccatgggccacgacggcatgctctattcgctgccgagccgcgagatcattgccgactcggtcgagtacatggtcaacgcgcattgcgccgacgccatcgtgtgcatttccaactgcgacaagatcacccccggcatgctgatggcgtcgttgcgcctgaacattccggtgatcttcgtctccggcgggccgatggaagcgggcaagaccaaactggccagccacggcctggatctggtcgatgcgatggtcatcgccgccgactcgacagccagtgacgaaaaagtcgccgagtatgagcgcagcgcctgtccgacctgcgggtcgtgttccggcatgttcaccgccaactcgatgaactgcctgaccgaggcactgggcctggccctgccgggcaacggttccgcactcgccacccacagcgaccgcgagcaactgttcctgcaggccggccgcaccatcgttgacctgtgccgtcagtactacaaggaaaacgatgattcggtgttgccgcgcaacatcgccaacttcaaggcgttcgagaacgccatgacgctggacatcgccatgggcggttcgaccaacaccatcctgcacttgctggcagcggcccaggaagccgagatcgacttcgacctgcgccacatcgaccatctttcgcgcaaggtgccgcagctgtgcaaggtcgcgccgaatatccagaagtaccacatggaagacgtgcaccgcgcaggcgggatcttcagcatcctcggcgagctggcgcgtggcggtctgctgcacaccgacctgcccaccgtacacagcaagaccctggctgaaggcatcgccaaatgggacatcacccagactgacgacgaagccgtgcacaccttcttcaaggcaggcccggcgggcatcccgacgcagaccgcgttcagccagtcgacccgctgggaaagcctggatgacgaccgtgaaaacggctgcatccgcagcgtccagcacgcctattcgcaagaaggtggcctggccgtgctatacggcaacatcgccctggacggctgcgtggtgaaaaccgccggtgtcgacgagtcgatccacgtcttcgaaggcagcgcgaagatcttcgaaagccaggacagcgcggtacgcgggattctcgcagacgaagtcaaagcgggcgacatcgtgatcatccgctacgaaggcccgaaaggcggcccgggcatgcaggaaatgctctacccgacgtcctacctgaagtccaaggggctgggcaaggattgcgcgctgctgactgacggccgtttctcgggcggtacgtccggcctgtccatcggccacgcctcgccggaagcggcggcaggtggcgcgatcggtctggtgcgcgacggtgacaaggtgctgatcgacatccccaatcgctcgatcaacctgctgatcgacgatgccgagatggccgagcgtcgcaccgaacaggacaagaaaggctggaagcctgtcgagtcgcgtccgcgcaaagtgaccaccgccctcaaggcctacgccctgctggcgaccagcgccgacaagggcgccgtgcgtgacaaggcgttgctggacaaactggtgccttga

SEQ ID NO: 10621 - protein, 615 aa, Pseudomonas syringae pv
MPDYRSKTSTHGRNMAGARALWRATGMKDEDFKKPIIAIANSFTQFVPGHVHLKDMGQLVAREVERAGGVAKEFNTIAVDDGIAMGHDGMLYSLPSREIIADSVEYMVNAHCADAIVCISNCDKITPGMLMASLRLNIPVIFVSGGPMEAGKTKLASHGLDLVDAMVIAADSTASDEKVAEYERSACPTCGSCSGMFTANSMNCLTEALGLALPGNGSALATHSDREQLFLQAGRTIVDLCRQYYKENDDSVLPRNIANFKAFENAMTLDIAMGGSTNTILHLLAAAQEAEIDFDLRHIDHLSRKVPQLCKVAPNIQKYHMEDVHRAGGIFSILGELARGGLLHTDLPTVHSKTLAEGIAKWDITQTDDEAVHTFFKAGPAGIPTQTAFSQSTRWESLDDDRENGCIRSVQHAYSQEGGLAVLYGNIALDGCVVKTAGVDESIHVFEGSAKIFESQDSAVRGILADEVKAGDIVIIRYEGPKGGPGMQEMLYPTSYLKSKGLGKDCALLTDGRFSGGTSGLSIGHASPEAAAGGAIGLVRDGDKVLIDIPNRSINLLIDDAEMAERRTEQDKKGWKPVESRPRKVTTALKAYALLATSADKGAVRDKALLDKLVP

SEQ ID NO: 10622 - DNA, 1656 bp, Pyrococcus abyssi
  CDS (1)..(1656): transl_table=11
atgagaagtgatgttataaaaaaggggattgagagggccccacatagggccttatttaaagcaatgggattgaccgatgaagaacttgataaaccgctaataggaatagttaattcgtttaatgaactaattcccggccatatccaccttagaaggattgcagaagccgtaaagactggagttaggatgagtggtggaacacctttagaattctcaacgattggaatatgcgatggaatagctatgggacatggaggcatgaagtactccctcccttcaagagaactcatagctgattcaattgaagcggtcgttagggcttacaacttcgatggtatagtaatgatagcctcgtgcgataagataatcccagggatgctcatggccatggctaggttagacattccagcgatattcatttcaggtgggcccatgctaccgggtagattcaaaggggaatacgttgatgttaaaactgtatttgaagcagttggggctgttaaagctggtaagatgagtgagaaagagttaaaactgcttgaggactttgcatgcccagggtgtggtagttgcgccggtatgttcactgctaacacaatgaacgcgctaactgaggcccttggaatttcgcttccatggaatggaaccgctccagccgtttacgctcatagaataaggatagccaagcaaactggcatgcaaataatgaagctcgttgaagaagatttaaagccgagcgatattctaacacctgaagcctttgaagatgcaatagctgttgacatggctctagggggttccacgaatacggtgcttcacttaatggcgatagctcgagaggcgggggtaaagttaaccctagatacttttgacgagataagtgagaaaacaccaacactcgtcaagataagtcctgcaggtaagcatttcgttctggatctttacgaggctggcggtgttcttgcgataatgaagagattgagcgaactcggattaattcacgaagatagaattacggtaagcctcaaaacagttggagagctcctaagggacgtatccgtcttaagggatgacgtgataagacccgttacgaggccataccttagcaggggagggttaatgattctatatggaagcctagctccaaagggagcggtgctaaaggtttccgcaatcccagatatagaaaccttcgaaggtgaagcaagggttttcgactgtgaggaggatgccgttaaagcgatactcagtggagatatcgagaaaggagacgtcgtagtaattagatacgaaggtccaaaaggcggtccgggaatgagggaaatgctagctccgacgtctgcaatcgctgggatgggactagatagagacgtagctttagttacagatggtagattctcgggagcaacgagggggttatcaataggtcacgtctctcccgaggctgcggaaggaggacctatagccttagttgaagatggagacttaataaggatcgacgttaaagcaaagagaatagacttgctagttgatgaagaagaactgaaggaaaggaaagccaagtggaaaccgaaagttaaggaggtgaagggatacctaaaaaggtactccagcttagttacctcagccaatactggagcggttttcagggaatga

SEQ ID NO: 10623 - protein, 551 aa, Pyrococcus abyssi
MRSDVIKKGIERAPHRALFKAMGLTDEELDKPLIGIVNSFNELIPGHIHLRRIAEAVKTGVRMSGGTPLEFSTIGICDGIAMGHGGMKYSLPSRELIADSIEAVVRAYNFDGIVMIASCDKIIPGMLMAMARLDIPAIFISGGPMLPGRFKGEYVDVKTVFEAVGAVKAGKMSEKELKLLEDFACPGCGSCAGMFTANTMNALTEALGISLPWNGTAPAVYAHRIRIAKQTGMQIMKLVEEDLKPSDILTPEAFEDAIAVDMALGGSTNTVLHLMAIAREAGVKLTLDTFDEISEKTPTLVKISPAGKHFVLDLYEAGGVLAIMKRLSELGLIHEDRITVSLKTVGELLRDVSVLRDDVIRPVTRPYLSRGGLMILYGSLAPKGAVLKVSAIPDIETFEGEARVFDCEEDAVKAILSGDIEKGDVVVIRYEGPKGGPGMREMLAPTSAIAGMGLDRDVALVTDGRFSGATRGLSIGHVSPEAAEGGPIALVEDGDLIRIDVKAKRIDLLVDEEELKERKAKWKPKVKEVKGYLKRYSSLVTSANTGAVFRE

SEQ ID NO: 10624 - DNA, 1674 bp, Ralstonia solanacearum
  CDS (1)..(1674): transl_table=11
atgccagacaacaagcgttcccagcacatcacccagggtgtggcgcgctcgcccaaccgctcgatgtactacgcgctgggctacaagaaggaagacttcagcaacccgatgatcggcgtagccaatggtcattcgaccatcacgccgtgcaactcgggcctgcagaagctggctgacgcggccgtggccgccgtcaaggcgtcgaacgccaatccgcagatcttcggcacgcccaccatttccgacggcatgtcgatgggcaccgagggcatgaagtattcgctgatctcgcgcgaggtcatcgccgactgcatcgagacctgcgcacagggccagtggatggacggcgtggtcgttatcggcggctgcgacaagaacatgcccggcggcatgatcgccctggcccgcaccaacgtgcccggcatctacgtgtacggcggcaccatcaaaccgggcaactggaagggcaaggatctgaccatcgtgtcgtcgttcgaggctgtgggcgagttcaccgccggccgcatgagcgaggaagacttcgagggcgtggagcgcaacgcctgcccgacctcgggttcgtgcggcggcatgtacaccgccaacacgatgagctcgtcgttcgaggcgctgggcatgtcgctgctgtattcgtcgaccatggccaaccccgatcaggagaaggtcgacagcgccgccgaatcggcccgcgtgctggtcgaggccgtgcgccgcgacctcaagccgcgcgacatcatcacgcgcaagtccatcgagaacgccgtggccgtcatcatggccaccggcggctcgaccaacgccgtgctgcactacctggccatcgcccacgccgccggcgtggaatggaccattgacgacttcgagcgcgtgcgtcagcgcgtgccggtcatctgcaacctgaagccgtcgggccagtacgtggccaccgacctgcacaaggccggcggcatcccgcaggtgatgaagatcctcctgaacgctggcctgctgcacggcgactgcgtcaccatcaccggcaagacgctggccgaagagctggccaacgtgcccgaccaaccgcgcgcggaccaggacgtgatcctgccgatcgagcgcgcgctctaccagcagggccacctcgccatcctcaagggcaacctggccgaagaaggcgccgtggcgaagatcaccggcctgaagaacccggtcatctccggcccggcgcgcgtattcgacgacgagcagagcgcgatgaccgccatcctggccgaccagatcaaggccggcgacgtgctggtgctgcgctacctgggcccgaagggcggccccggcatgccggaaatgctggcgccgacctcggccatcatcggcaagggcctgggcgaatcggtgggcttcgtcaccgacgggcgcttctcgggcggcacctggggcatggtggtcggccacgtcgcgccggaagccttcgtgggcggcaccatcgccctggtgcaggaaggtgattcgatcaccatcgacgcgcaccagcgcctgctgcagctgaacgtgccggaagacgaactggcccgccgccgcgccgcgtggaagcagccggcaccgcgctacacgcgcggcgtgctcgccaagttcgcgcagctgacgtcgacggccagcaagggcgccgtcacggactga

SEQ ID NO: 10625 - protein, 557 aa, Ralstonia solanacearum
MPDNKRSQHITQGVARSPNRSMYYALGYKKEDFSNPMIGVANGHSTITPCNSGLQKLADAAVAAVKASNANPQIFGTPTISDGMSMGTEGMKYSLISREVIADCIETCAQGQWMDGVVVIGGCDKNMPGGMIALARTNVPGIYVYGGTIKPGNWKGKDLTIVSSFEAVGEFTAGRMSEEDFEGVERNACPTSGSCGGMYTANTMSSSFEALGMSLLYSSTMANPDQEKVDSAAESARVLVEAVRRDLKPRDIITRKSIENAVAVIMATGGSTNAVLHYLAIAHAAGVEWTIDDFERVRQRVPVICNLKPSGQYVATDLHKAGGIPQVMKILLNAGLLHGDCVTITGKTLAEELANVPDQPRADQDVILPIERALYQQGHLAILKGNLAEEGAVAKITGLKNPVISGPARVFDDEQSAMTAILADQIKAGDVLVLRYLGPKGGPGMPEMLAPTSAIIGKGLGESVGFVTDGRFSGGTWGMVVGHVAPEAFVGGTIALVQEGDSITIDAHQRLLQLNVPEDELARRRAAWKQPAPRYTRGVLAKFAQLTSTASKGAVTD

SEQ ID NO: 10626 - DNA, 1839 bp, Rhizobium meliloti
  CDS (1)..(1839): transl_table=11
atgcctgcctatcgctcccgcaccaccacccacggccgcaacatggccggcgcccgcggcctctggcgcgcgacgggcatgaaggacagcgacttcggcaagcctattatcgcggtggtgaactcgttcacgcagttcgtgccgggccatgtgcatctgaaggacctcggccagctcgtcgcgcgcgagatcgaggcggccggcggcgtcgccaaggaattcaatacgatcgccgtcgacgacggcatcgccatgggccatgacggcatgctctattcgctgccctcgcgcgagatcatcgccgacagcgtcgaatatatggtgaacgcccattgcgccgacgccatggtctgcatctccaattgcgacaagatcacccccggcatgctgatggcggcattgcgcctcaacattccggccgtcttcgtctccggcgggccgatggaggccggcaaggtggtgctgcacggcaagacgcatgcgctcgacctcgtcgacgctatggtcgcggccgccgacgacaaagtctccgacgaggacgtccagatcatcgagcgctccgcctgcccgacctgcggctcctgctccggcatgttcacggccaattcgatgaactgtctgaccgaggcgctcggtctgtcgctgcccggcaacggctcgacgctcgcgacccatgccgaccgcaaacgcctgttcgtcgaggccggccacctcatcgtcgacctggcgcgccgctattacgagcaggaggacgagcgggtgctgccccgcaacatcgccaccaagcaggccttcgagaacgccatggcgctcgacatcgccatgggcggctcgacgaatacggtgctccacatccttgccgccgcctatgagggcgagatcgacttcaccatggacgatatcgaccggctgtcgcgcaaggtcccgtgcctgtcgaaggtcgctccggcgaaagccgacgtgcacatggaagacgtacacagggccggcggcatcatgtcgatcctcggcgagctggacaagggcggcctcatcaaccgcgactgcccgacagtccacgccgagacgctcggcgacgcgatcgaccgctgggacatcacccgcacgtcgagcgacactgtccgaaaattcttccgcgccgctcccggaggcattccgacgcaggtcgccttcagccaggaggcacgctgggacgagctcgatacagaccgcgaaaacggtgtcatccgctcggtcgaacatcccttctccaaggatggcggcctcgcagtactcaagggcaacatcgcgctcgacggctgcatcgtgaaaaccgcgggcgtggacgagagcatcctgaaattctccggcccggcgcgcgtcttcgagagccaggacgcagccgtgaagggcatcctcgccaacgagatcaaggccggcgacgtcgtcgtcatccgctacgaggggccgaagggcggaccgggcatgcaggaaatgctctacccgacgagctatctgaagtcgaagggtctcggcaaagcctgtgcgctgatcaccgacggacgcttctccggcggcacctccggtctttcgatcggccacgtctctcccgaagcggcgaatggcggaacgatcgggctggtgcgcgaaggcgacatgatcgatatcgacattccgaaccgcaccatcagtctgcgggtggacgaggccgagcttgccgcacgccgcaccgaacaggatgccaagggctggaagccggtcgagcagcgcaagcgccgggtgacgaccgcgctcaaggcctatgcggccttcgcgacatcggccgaccgcggcgccgtgagagatctgggcgaccgttaa

SEQ ID NO: 10627 - protein, 612 aa, Rhizobium meliloti
MPAYRSRTTTHGRNMAGARGLWRATGMKDSDFGKPIIAVVNSFTQFVPGHVHLKDLGQLVAREIEAAGGVAKEFNTIAVDDGIAMGHDGMLYSLPSREIIADSVEYMVNAHCADAMVCISNCDKITPGMLMAALRLNIPAVFVSGGPMEAGKVVLHGKTHALDLVDAMVAAADDKVSDEDVQIIERSACPTCGSCSGMFTANSMNCLTEALGLSLPGNGSTLATHADRKRLFVEAGHLIVDLARRYYEQEDERVLPRNIATKQAFENAMALDIAMGGSTNTVLHILAAAYEGEIDFTMDDIDRLSRKVPCLSKVAPAKADVHMEDVHRAGGIMSILGELDKGGLINRDCPTVHAETLGDAIDRWDITRTSSDTVRKFFRAAPGGIPTQVAFSQEARWDELDTDRENGVIRSVEHPFSKDGGLAVLKGNIALDGCIVKTAGVDESILKFSGPARVFESQDAAVKGILANEIKAGDVVVIRYEGPKGGPGMQEMLYPTSYLKSKGLGKACALITDGRFSGGTSGLSIGHVSPEAANGGTIGLVREGDMIDIDIPNRTISLRVDEAELAARRTEQDAKGWKPVEQRKRRVTTALKAYAAFATSADRGAVRDLGDR

SEQ ID NO: 10628 - DNA, 1764 bp, Rhodopirellula baltica; identical to SEQ ID NO: 10300
  CDS (61)..(1764): transl_table=11

SEQ ID NO: 10629 - protein, 567 aa, Rhodopirellula baltica
MTASQPESDSNALNKYSSKITQPKSQGASQAMLYATGMSSEDMNKPQVGIGSMWYEGNSCNMHLLDLAADVKAGVTDAGMVGMRFNTIGVSDGISMGTDGMSFSLQSRDLIADSIETIMGAQWYDALITLPGCDKNMPGCLMAMGRLNRPSIMVYGGTIKPGSYRDEKLDIVSAFQCYGQFIAGQISEEERSEIVRRSCPGAGACGGMYTANTMATAIEALGMALPYSASIPAEHPEKKEECKRAGLAILELLKKDIKPRDIMTRGAFEDAMVTLMALGGSTNAVLHLIAMARSVDVPLTIEDFQSVSDRTPFLADLKPSGKFVQEDLHSVGGTPAVMKYLLEKGMIKGEHMTVTGKTLAENLADLPGLKTGQKIVSTVEEPIKKSGHIRILKGSLATEGAVAKITGKEGLQFSGPARVYDNEELMLAALEQKQIQKGDVVVIRYEGPKGGPGMPEMLTPTSAIMGAGLGSDVAMLTDGRFSGGSHGFIVGHITPEAQVGGPIALIEDGDTITIDAETNSLDLEVDAAELEARRSKWTAPPLKATRGTLYKYIKCVKSASEGCVTDE

SEQ ID NO: 10630 - DNA, 1857 bp, Rhodopseudomonas palustris
  CDS (1)..(1857): transl_table=11
atgcctgcttatcgctcgagaacgacgacccacggccgcaacatggccggcgcgcgcggcctgtggcgcgccaccggtatgaaggattccgacttcggcaagccgatcatcgcggtggtcaactcgttcacccagttcgtgcccggccacgtccacctgaaggacctcggccagctcgttgcgcgtgagatcgaagcggccggcggcgttgccaaggagttcaacaccatcgcggtcgacgacggcattgcgatgggccacgacggcatgctgtattcgcttccgtcgcgtgaactgatcgccgacagcgtcgagtacatggtcaatgcccattgcgccgacgcgatggtgtgcatctccaactgcgacaagatcacgcccggcatgctgatggcggcgatgcggcttaacattccggccgtgttcgtctccggcggcccgatggaagctggcaaggtggtgctgaagggcaagacccacgcggtcgacctgatcgacgcgatggtcgccgccgccgacagcgccatgagcgacgaagacgtgcagacgatggaacgctcggcatgtccgacctgcggctcgtgctcaggcatgttcaccgccaattcgatgaactgccttaccgaagcgctcggcctgtcgttgccgggcaacggctcggtgctcgccacccatgccgatcgcaagcggctgttcgtcgaggctggccacaccatcgtcgatctagcgcgccgttactacgaaggcgacgacgcctcggtgctgccgcgcaacatcgcgaacttcaaggcgttcgagaacgcgatgacgctcgacatcgcgatgggcggctcaaccaacaccgtgctgcatctgctggccgcggcgcgcgaggccgaactcgacttctcgatgaaggatatcgatcggctgtcgcgccgggtgccgtgtctgagtaagatcgctccgtcggtgtctgacgtgcacatggaagacgtgcatcgcgccggcggcatcatggcgatcctcggcgagctcgaccgcgccggcctgctcgacacctcgtgcaccacggtgcattccgaaaccctcggcgcggccttggcgcggtgggacatccgccagagcaacagcgagagcgtccgcaccttcttccgtgcggcgccgggcggcgtgccgtcgcagaccgcgttcagccaggaccgccgctacgacgagctcgatctcgaccgtgagaagggcgtgatccgcgacgccgcgcatgccttcagcaaggacggcggcctcgccgtgctgtacggcaacatcgcgctggacggctgcattgtgaagaccgccggcgtcgacgcctcgatcctgaccttctcgggtccggtgaaggtgttcgagagccaggacgacgcggtgtcggcgatcctgaccaacaagatcgtcgccggcgatgtggtcgtgatccgctacgaaggtccgcgcggtggtccgggcatgcaggagatgctgtatccgaccagctatctgaaatcgaagggcctcggcaaagcctgcgcgctgatcaccgacggccggttctcgggcggcacctcgggcctgtcgatcggccacgtctcgccggaagcggcggaaggcggcctgatcggcctggtacgcgacggcgaccggatctcgatcgacatcccgaaccgtaccatcagcctcgacgtctccgaagccgaactcgccaagcgcggcgaggaagagcgggcgcgcggcgaagcggcgtggacgcccaaggaccgcaagcgcaacgtctcggctgcgctgcaggcctacgcgatgctgaccaccagcgccgccaacggcgcggtgcgcgatgtgaagcgtcggttcggtaagaactaa

SEQ ID NO: 10631 - protein, 618 aa, Rhodopseudomonas palustris
MPAYRSRTTTHGRNMAGARGLWRATGMKDSDFGKPIIAVVNSFTQFVPGHVHLKDLGQLVAREIEAAGGVAKEFNTIAVDDGIAMGHDGMLYSLPSRELIADSVEYMVNAHCADAMVCISNCDKITPGMLMAAMRLNIPAVFVSGGPMEAGKVVLKGKTHAVDLIDAMVAAADSAMSDEDVQTMERSACPTCGSCSGMFTANSMNCLTEALGLSLPGNGSVLATHADRKRLFVEAGHTIVDLARRYYEGDDASVLPRNIANFKAFENAMTLDIAMGGSTNTVLHLLAAAREAELDFSMKDIDRLSRRVPCLSKIAPSVSDVHMEDVHRAGGIMAILGELDRAGLLDTSCTTVHSETLGAALARWDIRQSNSESVRTFFRAAPGGVPSQTAFSQDRRYDELDLDREKGVIRDAAHAFSKDGGLAVLYGNIALDGCIVKTAGVDASILTFSGPVKVFESQDDAVSAILTNKIVAGDVVVIRYEGPRGGPGMQEMLYPTSYLKSKGLGKACALITDGRFSGGTSGLSIGHVSPEAAEGGLIGLVRDGDRISIDIPNRTISLDVSEAELAKRGEEERARGEAAWTPKDRKRNVSAALQAYAMLTTSAANGAVRDVKRRFGKN

SEQ ID NO: 10632 - DNA, 1839 bp, Rhodobacter sphaeroides
  CDS (1)..(1839): transl_table=11
atgcccgcatttcgttcccgcaccagcacgcatggccgcaacatggccggagcccgtggcctctggcgcgcgaccggcgtgaaggacagcgacttcggcaagccgatcatcgccatcgtgaacagctttacccagttcgtgccgggccacgtccacctcaaggatctgggccagctcgtggcgcgcgaggtcgaggccgcaggcggcatcgccaaggaattcaacaccatcgccgtcgatgacgggatcgccatgggccatgacgggatgctctattccctgccctcgcgcgagctcatcgcggactcggtcgaatacatggtcaacgcccattgcgccgacgcgatggtctgcatctcgaactgcgacaagatcacccccggcatgctgatggccgcgatgcggctgaacatccccgcggtcttcgtctcgggcgggccgatggaggcgggcaaggtcacgctcggcgacgggcgcaccgtgaagatggacctgatcgacgcgatggtggccgccgccgacgagaaagtgtccgacgacgacctgacccgcatcgagcaggccgcctgccccacctgcggctcctgctcgggcatgttcaccgccaactcgatgaactgcctgaccgaggcgctcggcctgtcgctgccgggcaacggctcgacgctggccacgcacgcctaccgcaaggagctcttcctcgaggccgggcgccgcgcggtcgagctctgccgccgctactacgagcaggaggacgagggcgtcctgccgcgcgccatcgctaccaaggaagcgttcgagaatgcgatggcgctcgacatcgcgatgggcggctcgaccaacacggtgctccatatcctcgccgccgcccaggaaggcggcgtcgatttcaccatggacgacatcgacgcgctctcccgccgggtgccctgcctctgcaaggtcgcgccgaacaaggcggacgtgcatatcgaggacgtgcaccgcgcgggcggcatcatgtcgatcctgggcgagctcgaccgcggcgggcttctgcaccgcgacacccgcaccgtccatgcgccgaccctcggcgccgccatcgaccagtgggacatcggccgctccaacgcgcccgaggcgcgcgagctgttcctcgcggcgccgggcggcgtgcccacgcaggtggccttcagccagtcctcgacctgggacacgctcgacaccgaccgcgagaccggcgtgatccgctcggtcgcgacccccttctcgaaggacggcggcctcgcggtgctgaagggcaacctcgcgcccgacggctgcatcgtgaaaacggcgggcgtggacgagtcgatcctcgtcttcgccgggcccgccaaggtgttcgagagccaggacgcggccgtctacggcatcctgaacggcggcgtgcaggcgggcgacgtggtggtgatccgctacgagggcccgaagggcggccccggcatgcaggagatgctctatccgacctcctacctgaagtcgaaggggctgggcaaagcctgtgcgctcataaccgacgggcgtttctcgggcggcacctcggggctctccatcggccatgcctcgcccgaggcggcgtcgggcggccccatcggcctcgtgcgcgagggcgaccggatcgagatcgacatcccgaaccgcaccatcacgctggccgtgccggaggccgagctggccgcccgccgtgccgagcaggatgcgaagggctggaagcccgcgggcccgcgcaagcgcaaggtctcgcaggcgctgaaggtctatgcgcagttcgcctcctcggccgacaagggagccgtgcgcgtcctgccggagtga

SEQ ID NO: 10633 - protein, 612 aa, Rhodobacter sphaeroides
MPAFRSRTSTHGRNMAGARGLWRATGVKDSDFGKPIIAIVNSFTQFVPGHVHLKDLGQLVAREVEAAGGIAKEFNTIAVDDGIAMGHDGMLYSLPSRELIADSVEYMVNAHCADAMVCISNCDKITPGMLMAAMRLNIPAVFVSGGPMEAGKVTLGDGRTVKMDLIDAMVAAADEKVSDDDLTRIEQAACPTCGSCSGMFTANSMNCLTEALGLSLPGNGSTLATHAYRKELFLEAGRRAVELCRRYYEQEDEGVLPRAIATKEAFENAMALDIAMGGSTNTVLHILAAAQEGGVDFTMDDIDALSRRVPCLCKVAPNKADVHIEDVHRAGGIMSILGELDRGGLLHRDTRTVHAPTLGAAIDQWDIGRSNAPEARELFLAAPGGVPTQVAFSQSSTWDTLDTDRETGVIRSVATPFSKDGGLAVLKGNLAPDGCIVKTAGVDESILVFAGPAKVFESQDAAVYGILNGGVQAGDVVVIRYEGPKGGPGMQEMLYPTSYLKSKGLGKACALITDGRFSGGTSGLSIGHASPEAASGGPIGLVREGDRIEIDIPNRTITLAVPEAELAARRAEQDAKGWKPAGPRKRKVSQALKVYAQFASSADKGAVRVLPE

SEQ ID NO: 10634 - DNA, 1851 bp, Salmonella paratyphi
  CDS (1)..(1851): transl_table=11
atgcctaagtaccgttccgccaccaccactcatggtcgtaatatggcgggtgcccgcgcgctgtggcgcgccaccggaatgaccgacagtgattttggcaaaccgattatcgccgtggtgaactcattcactcagtttgtgccgggtcacgttcatctgcgcgatctcggtaagctggtcgccgaacagattgaagcttccggcggtgtggcgaaagagttcaacactattgccgtggatgacgggatcgccatggggcacgggggtatgctctattcactgccgtcgcgcgagctgatcgccgactccgtggagtacatggtgaacgctcactgcgctgacgcgatggtgtgtatctccaactgcgacaaaatcaccccagggatgctcatggcctcgctgcgcctgaatattccggtgatctttgtctccggcggcccgatggaagccgggaaaaccaaactgtccgatcagatcatcaagctcgatctggttgatgccatgattcagggagcggacccgaaagtctctgacgatcaaagtaaccaggttgaacgctccgcctgtccaacctgcggctcctgctccggcatgtttaccgctaactccatgaattgcctgaccgaagcgctgggcctgtcgcagccgggcaacggctcgctgctggcgacccatgctgaccggaagcagttgttcctcaatgctggtaagcggattgttgaactgactaaacgctattacgagcaggatgacgaaagcgcactgccgcgtaacatcgccaacaaggcggcgtttgagaatgcgatgacgctggatattgcgatgggcggttcgaccaataccgttctgcatctactggcggcggcgcaggaagcggaaatcgacttcaccatgagtgatatcgacaagctgtcccgcaaggtgccgcagctgtgtaaagtggcgccaagtacccagaaataccatatggaagatgttcaccgtgccggcggtgtgctgggtattttaggcgagctggatcgcgccgggctgctgaaccgcaacgtgaaaaacgtattaggcctgacgctgccgcaaacgctggaacagtacgacatcacggttacgcaggacgaagcggttaaaaaaatgttccgtgctggccctgccggtatccgtactacccaggcgttctctcaggattgtcgctgggattcgctggatgacgaccgcgcagcgggttgcatccgctcgctggaatatgcctatagcaaagacggcggtctggcggtgctgtatggcaacttcgccgaaaacggctgcatcgtaaaaaccgcgggcgtggatgacagcatccttaaatttaccggtcctgccaaagtttacgaaagccaggacgatgcggtagaggcgattctcggcggcaaagtagtggaaggcgatgtggtcgtaatccgctacgaagggccgaaaggcgggccgggaatgcaggaaatgctctatccgaccagtttcctgaagtcgatggggctgggcaaagcctgcgcgctcatcaccgatgggcgtttctccggcggtacttcgggtctttccatcggccacgtctcgccggaagcggccagcggcggcactattgcgctgattgaagatggcgacaccattgcgattgatatcccgaaccgcagcattcagttgcagttgagcgaggctgaaatcgccgcacgccgcgaggcgcaggaagctcgcggcgataaagcctggacgccgaaaaatcgtcagcgtcaggtttcgtttgccctgcgtgcctacgccagcctggcgaccagcgccgataaaggcgcggtgcgcgataaatcgaaactgggaggttga

SEQ ID NO: 10635 - protein, 616 aa, Salmonella paratyphi
MPKYRSATTTHGRNMAGARALWRATGMTDSDFGKPIIAVVNSFTQFVPGHVHLRDLGKLVAEQIEASGGVAKEFNTIAVDDGIAMGHGGMLYSLPSRELIADSVEYMVNAHCADAMVCISNCDKITPGMLMASLRLNIPVIFVSGGPMEAGKTKLSDQIIKLDLVDAMIQGADPKVSDDQSNQVERSACPTCGSCSGMFTANSMNCLTEALGLSQPGNGSLLATHADRKQLFLNAGKRIVELTKRYYEQDDESALPRNIANKAAFENAMTLDIAMGGSTNTVLHLLAAAQEAEIDFTMSDIDKLSRKVPQLCKVAPSTQKYHMEDVHRAGGVLGILGELDRAGLLNRNVKNVLGLTLPQTLEQYDITVTQDEAVKKMFRAGPAGIRTTQAFSQDCRWDSLDDDRAAGCIRSLEYAYSKDGGLAVLYGNFAENGCIVKTAGVDDSILKFTGPAKVYESQDDAVEAILGGKVVEGDVVVIRYEGPKGGPGMQEMLYPTSFLKSMGLGKACALITDGRFSGGTSGLSIGHVSPEAASGGTIALIEDGDTIAIDIPNRSIQLQLSEAEIAARREAQEARGDKAWTPKNRQRQVSFALRAYASLATSADKGAVRDKSKLGG

SEQ ID NO: 10636 - DNA, 1851 bp, Salmonella typhimurium
  CDS (1)..(1851): transl_table=11
atgcctaagtaccgttccgccaccaccactcatggtcgtaatatggcgggtgcccgcgcgctgtggcgcgccaccggaatgaccgacagtgattttggcaaaccgattatcgccgtggtgaactcattcactcagtttgtgccgggtcacgttcatctgcgcgatctcggtaagctggtcgccgaacagattgaagcttccggcggggtggcgaaagagttcaacactattgccgtggatgacgggattgccatggggcacgggggtatgctctattcactgccgtcgcgcgagctgatcgccgactccgttgagtacatggtgaacgctcactgcgctgacgcgatggtgtgtatctccaactgcgacaaaatcaccccagggatgctcatggcctcgctgcgcctgaatattccggtgatctttgtctccggcggcccgatggaagccgggaaaaccaagctttcagacaaaattatcaagctggatctggttgatgccatgattcagggagcggacccgaaagtctctgacgatcaaagtaaccaggttgaacgctccgcctgtccaacctgcggctcctgctccggcatgtttaccgctaactccatgaactgcctgaccgaagcgctgggcctgtcgcagccgggcaacggctcgctgctggcaactcacgctgaccgtaagcagttgttcctcaatgccggtaagcggattgttgaactgactaaacgctattacgagcaaaacgacgaaagtgcactgccgcgtaacatcgccagcaaagccgcgtttgaaaacgcgatgacgctggatatcgcgatgggcggttcgaccaacaccgttcttcacctgctggcggcggcgcaggaagcggaaatcgacttcaccatgagtgatatcgacaagctgtcccgcaaggtgccgcagctgtgtaaagtggcgccaagtacccagaaataccatatggaagatgttcaccgtgccggcggtgtgctgggtattttaggcgagctggatcgcgccgggctgctgaaccgcaacgtgaaaaacgtattaggcctgacgttgccgcaaacgctggaacagtacgacatcacggttacgcaggacgaagcggttaaaaaaatgttccgtgctggccctgccggtatccgtactacccaggcgttctcgcaggattgtcgctgggattcgctggatgacgaccgcgcagcgggttgcatccgctcgctggaatatgcctatagcaaagacggcggtctggcggtgctgtatggcaacttcgccgaaaacggctgcattgtgaaaaccgcaggcgtggatgacagcatccttaaatttaccggcccggctaaagtgtatgaaagccaggacgacgcggtagaggcgattctcggcggcaaagtagtggaaggcgatgtagtcgtgatccgctacgaagggccgaaaggcgggccgggaatgcaggaaatgctctatccgaccagtttcctgaagtcgatggggctgggcaaagcctgcgcgctcatcaccgatgggcgtttctccggcggtacttcgggtctttccatcggccacgtctcgccggaagcggccagcggcggcactattgcgttgattgaagatggcgacactattgcgattgatatcccgaaccgcagcattcagttgcagttgagtgaggctgaaatcgccgcacgccgcgaggcgcaggaagctcgtggcgacaaagcctggacgccgaaaaatcgtcagcgtcaggtttcgtttgccctgcgtgcctacgccagcctggcgaccagcgccgataaaggcgcggtgcgcgataaatcgaaattgggaggttga

SEQ ID NO: 10637 - protein, 616 aa, Salmonella typhimurium
MPKYRSATTTHGRNMAGARALWRATGMTDSDFGKPIIAVVNSFTQFVPGHVHLRDLGKLVAEQIEASGGVAKEFNTIAVDDGIAMGHGGMLYSLPSRELIADSVEYMVNAHCADAMVCISNCDKITPGMLMASLRLNIPVIFVSGGPMEAGKTKLSDKIIKLDLVDAMIQGADPKVSDDQSNQVERSACPTCGSCSGMFTANSMNCLTEALGLSQPGNGSLLATHADRKQLFLNAGKRIVELTKRYYEQNDESALPRNIASKAAFENAMTLDIAMGGSTNTVLHLLAAAQEAEIDFTMSDIDKLSRKVPQLCKVAPSTQKYHMEDVHRAGGVLGILGELDRAGLLNRNVKNVLGLTLPQTLEQYDITVTQDEAVKKMFRAGPAGIRTTQAFSQDCRWDSLDDDRAAGCIRSLEYAYSKDGGLAVLYGNFAENGCIVKTAGVDDSILKFTGPAKVYESQDDAVEAILGGKVVEGDVVVIRYEGPKGGPGMQEMLYPTSFLKSMGLGKACALITDGRFSGGTSGLSIGHVSPEAASGGTIALIEDGDTIAIDIPNRSIQLQLSEAEIAARREAQEARGDKAWTPKNRQRQVSFALRAYASLATSADKGAVRDKSKLGG

SEQ ID NO: 10638 - DNA, 1860 bp, Shewanella oneidensis
  CDS (1)..(1860): transl_table=11
atgccaaagttacgatcagctaccagtacggaaggccgcaatatggcgggtgcccgtgcgctatggcgcgccaccggggtgaaagacaatgattttggtaagccgattattgcgattgccaactcctttactcagtttgttcccggccatgtgcacttaaaagatatgggctcactggtggcgagtgcgattgaagaggcgggcggtatcgccaaagaattcaatactatcgccgtcgacgatggtatcgccatgggccacggtggcatgctctacagtttgccctcgcgggagctgattgccgatagtgtggagtacatggtcaatgcccactgcgccgatgccttagtgtgtatctccaactgcgacaaaatcactcccggcatgttgatggcggcgctgcgtctcaatattcccgtggtatttgtgtcgggtgggccgatggaagcgggtaaaaccaaactgtcggacaaacttatcaagctcgatttagtcgatgccatggtggcggcggccgactcgagtgtgagcgatgaagatagcgccaaaatcgagcgcagtgcttgcccgacgtgtggttcctgttcgggcatgttcaccgccaactctatgaactgtttgaccgaagccctggggttatcgctgccgggcaacggctccatgctggcaacccatagcgatcgccgcgagctgtttttagaggcgggccggcgcgtgatggcgctgaccaagcgttattacgagcaagatgacacctcggcgctgccgcgtaatatcgcctgctttaaagcttttgagaacgccaccgcattagatatcgccatgggcggttcgtctaatactgtgttgcacttgttagcggcggcgcaggaggcggaagtcgcatttactatggacgatatcgaccgtatgtcgcgccttgtgccgcacctttgtaaagtcgccccatcgacgcctaaatatcatatggaagatgtgcaccgcgccggtggcgtgatgggcattttaggcgagcttgaccgcgccggattgctgcataccgatgtgccacacgttgccgccgatgcaggcggaaatctcaagtcggtgcttgccaagtacgatgtcatgcaaacccaagatgacaacgtaaaacaattctttatggcgggacctgcgggcatccccaccactaaagcctttagtcaagactgccgctggccatcgctggatgatgacaggcgagaagggtgtatccgcagccgcgaatttgcctttagccaagaaggcgggctggccgtgctgtcgggcaatttagctgaaaatggctgtattgttaaaacggcgggcgtggatgagtcgaatttgatttttgttggctcggctcgcgtctacgaaagccaagatgatgcggtggcgggcattttaggtggcgaagtagtggcgggcgatgtggtcgtcatccgttacgaagggccaaaaggtggtccgggtatgcaagaaatgttgtaccccaccagttacttaaaatcccgcggcttaggcaaggcctgcgcgctaatcaccgatggacgtttctctggtggaacatccggtttatccatcggccatgtgtcgcccgaggcggcggctggcggcacgattgccttgattgaaaacggcgatcgcattgaaatcgatatcccagcgcgcagtattaagctcgctgtgagcgatgccgagttagcggggcgtcgtgagaccatgttagcgcgtggtccaatggcgtggaagcctgttggtcgcgagcgttttgtatctatggcactaaaagcctacgccatgcttgccaccagtgccgataagggcgcggtgcgcgatcgcagcaagttggaggactga

SEQ ID NO: 10639 - protein, 619 aa, Shewanella oneidensis
MPKLRSATSTEGRNMAGARALWRATGVKDNDFGKPIIAIANSFTQFVPGHVHLKDMGSLVASAIEEAGGIAKEFNTIAVDDGIAMGHGGMLYSLPSRELIADSVEYMVNAHCADALVCISNCDKITPGMLMAALRLNIPVVFVSGGPMEAGKTKLSDKLIKLDLVDAMVAAADSSVSDEDSAKIERSACPTCGSCSGMFTANSMNCLTEALGLSLPGNGSMLATHSDRRELFLEAGRRVMALTKRYYEQDDTSALPRNIACFKAFENATALDIAMGGSSNTVLHLLAAAQEAEVAFTMDDIDRMSRLVPHLCKVAPSTPKYHMEDVHRAGGVMGILGELDRAGLLHTDVPHVAADAGGNLKSVLAKYDVMQTQDDNVKQFFMAGPAGIPTTKAFSQDCRWPSLDDDRREGCIRSREFAFSQEGGLAVLSGNLAENGCIVKTAGVDESNLIFVGSARVYESQDDAVAGILGGEVVAGDVVVIRYEGPKGGPGMQEMLYPTSYLKSRGLGKACALITDGRFSGGTSGLSIGHVSPEAAAGGTIALIENGDRIEIDIPARSIKLAVSDAELAGRRETMLARGPMAWKPVGRERFVSMALKAYAMLATSADKGAVRDRSKLED

SEQ ID NO: 10640 - DNA, 1851 bp, Shigella flexneri
  CDS (1)..(1851): transl_table=11
atgcctaagtaccgttccgccaccaccactcatggtcgtaatatggcgggtgctcgtgcgctgtggcgcgccaccggaatgaccgacgccgattttggcaagccgattatcgcggttgtgaactcgttcacccaatttgtaccgggtcacgtccatctgcgcgatctcggtaaactggtcgccgaacaaattgaagcggctggcggcgttgccaaagagttcaacaccattgcggtggatgatgggattgccatgggccacggggggatgctttattcacttccatctcgcgaactgatcgctgattccgttgagtatatggtcaacgcccactgcgccgacgccatggtctgcatctctaactgcgacaaaatcaccccggggatgctgatggcttccctgcgcctgaatattccggtgatctttgtttccggcggcccgatggaggccgggaaaaccaaactgtccgatcagataatcaaactcgatctggttgatgcgatgatccagggcgcagacccgaaagtttctgactcccagagcgatcaggttgaacgttccgcgtgtccgacctgcggctcctgctccgggatgtttaccgctaactcaatgaactgcctgaccgaagcgctgggcctgtcgcagccgggcaacggctcgctgctggcaacccacgcggaccgtaagcagttgttcctcaatgccggtaaacgcattgttgaattgaccaaacgttactacgagcaaaacgacgaaagtgcactgccgcgcaatattgctagcaaagcggcgtttgaaaatgccatgacgctggatatcgcgatgggcggctctaccaacacggtacttcacctgctggcggcggcgcaggaagcggaaatcgacttcaccatgagtgatatcgacaaactttcgcgtaaagtcccgcagttatgcaaagttgcgccgagcacccaaaaataccatatggaagatgttcaccgtgctggtggtgttatcggtattctcggtgaactggatcgcgcggggttactgaaccgtgatgtgaaaaacgtacttggcctgacgttgccgcaaactctggaacaatacgacgttatgctgacccaggatgacgcggtaaaaaatatgttccgcgcaggccctgcgggcattcgtactacacaggcattctcgcaggattgccgttgggattctctcgatgacgatcgcgcaaacggctgtatccgctcgctggaacacgcctacagcaaagacggcggcctggcggtgctctacggtaattttgctgaaaacggctgcatcgtgaaaaccgcgggcgtcgatgacagcatcctcaaattcaccggcccggcgaaagtgtacgaaagccaggacgacgcggtagaagcgatcctcggtggcaaagttgtcgcgggcgatgtggtggtgatccgctatgaaggcccgaaaggcggccctggcatgcaggaaatgctctacccaaccagcttcctgaaatcaatgggtctcggtaaagcctgtgcgctgatcaccgacggtcgtttctctggcggcacctctggtctttccatcggccacgtctcaccggaagcggcaagcggcggcagcattggtctgattgaagatggtgacctgatcgctatcgacatcccgaaccgtggcattcagttacaggtaagcgatgccgaactggcggcgcgtcgtgaagcgcaggaagctcggggtgacaaagcctggacgccgaaaaaccgtgaacgtcaggtttcctttgccctgtgcgcctacgccagcctggcaaccagcgccgacaaaggtgcggtgcgcgataaatcgaaactggggggttaa

SEQ ID NO: 10641 - protein, 616 aa, Shigella flexneri
MPKYRSATTTHGRNMAGARALWRATGMTDADFGKPIIAVVNSFTQFVPGHVHLRDLGKLVAEQIEAAGGVAKEFNTIAVDDGIAMGHGGMLYSLPSRELIADSVEYMVNAHCADAMVCISNCDKITPGMLMASLRLNIPVIFVSGGPMEAGKTKLSDQIIKLDLVDAMIQGADPKVSDSQSDQVERSACPTCGSCSGMFTANSMNCLTEALGLSQPGNGSLLATHADRKQLFLNAGKRIVELTKRYYEQNDESALPRNIASKAAFENAMTLDIAMGGSTNTVLHLLAAAQEAEIDFTMSDIDKLSRKVPQLCKVAPSTQKYHMEDVHRAGGVIGILGELDRAGLLNRDVKNVLGLTLPQTLEQYDVMLTQDDAVKNMFRAGPAGIRTTQAFSQDCRWDSLDDDRANGCIRSLEHAYSKDGGLAVLYGNFAENGCIVKTAGVDDSILKFTGPAKVYESQDDAVEAILGGKVVAGDVVVIRYEGPKGGPGMQEMLYPTSFLKSMGLGKACALITDGRFSGGTSGLSIGHVSPEAASGGSIGLIEDGDLIAIDIPNRGIQLQVSDAELAARREAQEARGDKAWTPKNRERQVSFALCAYASLATSADKGAVRDKSKLGG

SEQ ID NO: 10642 - DNA, 1833 bp, Silicibacter pomeroyi
  CDS (1)..(1833): transl_table=11
atgccaatgtaccgatccagaacctcgacccatggacgcaacatggccggcgcgcgcgggctctggcgcgcgaccggcatgaccgatggcgatttcggcaagccgatcatcgccatcgtcaactcgttcacgcaatttgtgccgggtcatgtacatctgaaggacctgggccagatggtcgcgcgcgaggtcgaggccgccggcggcgtcgccaaggagttcaacaccatcgcagtcgatgacggcatcgccatgggtcatgacggcatgctgtattcgctgccctcgcgcgaggtgatcgccgacagtgtcgaatacatggtcaacgcccattgcgccgatgcgatggtctgtatctcgaactgcgacaagatcacgccgggcatgctgatggcggcgatgcggctgaatatcccggcgatcttcgtttcgggcgggccgatggaggcgggcaagatcgacatcgccgatctggagatgaccaagatcgacctggtcgatgccatggtcgccgccgccaacgacaagttcaccgacgaacaggtgcagcatatcgaggagaacgcctgccccacctgcggttcctgctcgggcatgttcaccgccaactcgatgaactgcctggccgaggcgctggggcttgcgctgccgggcaatggctcgacgctggccacccattcggaccgcaaggcgctgttcctcgaggccgggcgccgcatcgtcgagatcaccaagcgccattacgagggcgaggaaaagggcctgctgccgcgtgaaatcgcgacgttcgaggcgtttgagaacgcgatgagcctggatatcgccatgggtggctcgaccaataccgtgctgcaccttctggccatcgcccatgagggcgaggtggatttcaccatgaccgacatggaccggctcagccgcaaggtgccctgcctgtgcaaggtcgcgcccaataccgcaaacgtccatatggaagatgtgcaccgcgcgggcggcatcttctcgattctgggagaactgagccgcgccgggctgctgcatgacgattgcggcacggtgcattcggcctcgatgggtgaggcgattgcgaaatgggacatcaaggtcgccaacaaccccgaggccgagagcctgttcaaggccgcgcccggaggcgtgcgcacgacccaggccttcagccagtcgaaccgctacaaggatctggataccgatcgcgaaggcggcgtgatccgttccaaggagcacgccttcagtcaggacggcgggcttgcggtcctgttcggcaatatcgccgaggatggctgtatcgtgaaaaccgccggcgtggacgcctcgatcctgcagttcaccggcaccgcccatgtgtgcgagagccaggacgacgcggtcaacaacatcctgaccggcaaggtcaaggaaggcgacgttgtggtgatccgctacgaggggccgcgcggcgggccgggcatgcaggagatgctctatccgacctcctacctgaagtcgaaagggctgggcaaagcctgcgcgctgctgaccgacggacgcttttcgggcggcacctcggggctgtcgatcggtcacgtctcgcccgaggcggccgagggtggcaccatcggtctggtcgaggacggcgaccggatcgagatcgacattcccaaccgccgcattcatctggcagtgtcggacgaggtgctggccgcccgccgtgcggcgcaagaggccaagggctggcatccggccaaaccgcgcaagcgcaaggtgtcgaccgcgctcaaggcctatgccaagctgaccaccagtgccgccaagggcgctgtgcgtcaggtctga

SEQ ID NO: 10643 - protein, 610 aa, Silicibacter pomeroyi
MPMYRSRTSTHGRNMAGARGLWRATGMTDGDFGKPIIAIVNSFTQFVPGHVHLKDLGQMVAREVEAAGGVAKEFNTIAVDDGIAMGHDGMLYSLPSREVIADSVEYMVNAHCADAMVCISNCDKITPGMLMAAMRLNIPAIFVSGGPMEAGKIDIADLEMTKIDLVDAMVAAANDKFTDEQVQHIEENACPTCGSCSGMFTANSMNCLAEALGLALPGNGSTLATHSDRKALFLEAGRRIVEITKRHYEGEEKGLLPREIATFEAFENAMSLDIAMGGSTNTVLHLLAIAHEGEVDFTMTDMDRLSRKVPCLCKVAPNTANVHMEDVHRAGGIFSILGELSRAGLLHDDCGTVHSASMGEAIAKWDIKVANNPEAESLFKAAPGGVRTTQAFSQSNRYKDLDTDREGGVIRSKEHAFSQDGGLAVLFGNIAEDGCIVKTAGVDASILQFTGTAHVCESQDDAVNNILTGKVKEGDVVVIRYEGPRGGPGMQEMLYPTSYLKSKGLGKACALLTDGRFSGGTSGLSIGHVSPEAAEGGTIGLVEDGDRIEIDIPNRRIHLAVSDEVLAARRAAQEAKGWHPAKPRKRKVSTALKAYAKLTTSAAKGAVRQV

SEQ ID NO: 10644 - DNA, 1689 bp, Staphylococcus aureus
  CDS (1)..(1689): transl_table=11
atgcgaagcgacatgatcaaaaaaggagatcaccaagcaccagcaagaagtcttttacatgccacgggcgcgctaaaaagtccaactgatatgaacaaaccatttgtagctatttgtaactcttatattgatattgttcctggacatgttcacttgagagagcttgcagatatagctaaagaagcaattagagaagccggtgccattccatttgaattcaatacaattggtgttgatgatggaatagctatgggacatatcggaatgcgatattctctaccatcacgtgaaattattgcagatgcagctgaaactgtaattaacgctcattggtttgacggcgtattttacattcctaattgtgacaagattacacccggtatgattttagcagccatgaggacaaacgtaccagctatcttttgctctggtggaccaatgaaagctggcttatctgcacatggaaaagcattaacactttcatcaatgtttgaagcagtcggcgcatttaaagaaggatcgatttctaaagaagaatttttagatatggaacaaaatgcctgccctacttgtggttcatgtgctgggatgtttactgcaaattcaatgaactgtttgatggaagttttaggtctagcattaccatacaacggtactgcacttgcagtcagtgatcagcgacgagaaatgattcgccaagcagcttttaaattagttgaaaatattaaaaatgatttaaaaccacgtgatatcgttactcgcgaagcaattgatgatgcatttgcacttgatatggctatgggtggttcaacaaacacggtactgcatacgttagccattgccaatgaagctggtattgattatgacttagagcgcattaatgctattgccaaacgcacgccatatttatcaaaaatagcacctagttcatcgtattcaatgcatgatgtgcatgaagctggtggcgtcccagcaattattaatgaattgatgaagaaagatggcacgttacacccagatagaatcacagttactggcaaaacgttacgtgaaaataacgaaggcaaagaaattaagaactttgatgtcattcaccctcttgatgcaccatatgatgcacaaggcggtttatctatcttatttggtaatatcgcccctaaaggcgcagttattaaagttggcggcgttgatccatctatcaaaacatttactaggaaagcaatttgtttcaattcgcatgatgaagctgttgaagcaatagacaatcgtaccgttcgtgcaggccacgtcgttgtcattagatatgaaggacctaaaggtggaccaggtatgcctgaaatgttagcacctacttcctctattgttggtcgcggcttaggtaaagatgttgcattaattactgatgggcgtttttccggtgccacaagaggtattgcagttggtcatatttcccctgaagctgcatctggtggaccaattgccttaattgaagatggtgatgagattactattgatttaacaaatcgtacattaaacgtaaaccagcctgaagatgttctagcgcgtcgccgagaatctttaacaccatttaaagcgaaagtaaaaacaggttatctagctcgttatactgccctagtaactagcgcaaatacaggtggcgtcatgcaagtccctgagaatttaatttaa

SEQ ID NO: 10645 - protein, 562 aa, Staphylococcus aureus
MRSDMIKKGDHQAPARSLLHATGALKSPTDMNKPFVAICNSYIDIVPGHVHLRELADIAKEAIREAGAIPFEFNTIGVDDGIAMGHIGMRYSLPSREIIADAAETVINAHWFDGVFYIPNCDKITPGMILAAMRTNVPAIFCSGGPMKAGLSAHGKALTLSSMFEAVGAFKEGSISKEEFLDMEQNACPTCGSCAGMFTANSMNCLMEVLGLALPYNGTALAVSDQRREMIRQAAFKLVENIKNDLKPRDIVTREAIDDAFALDMAMGGSTNTVLHTLAIANEAGIDYDLERINAIAKRTPYLSKIAPSSSYSMHDVHEAGGVPAIINELMKKDGTLHPDRITVTGKTLRENNEGKEIKNFDVIHPLDAPYDAQGGLSILFGNIAPKGAVIKVGGVDPSIKTFTRKAICFNSHDEAVEAIDNRTVRAGHVVVIRYEGPKGGPGMPEMLAPTSSIVGRGLGKDVALITDGRFSGATRGIAVGHISPEAASGGPIALIEDGDEITIDLTNRTLNVNQPEDVLARRRESLTPFKAKVKTGYLARYTALVTSANTGGVMQVPENLI

SEQ ID NO: 10646 - DNA, 1689 bp, Staphylococcus epidermidis
  CDS (1)..(1689): transl_table=11
atgcgaagtgatatgatcaaaaaaggagatcaccaagctcctgcaagaagtcttttacatgcgactggcgctcttaaacaacctacagatatgaataaacctttcgtagcaatttgtaactcttatattgatattgttcctgggcacgttcatttaagagaattagcagacatcgcaaaggaagctattagagaagcaggtgctatcccattcgaatttaatactattggtgttgacgatggaatagctatgggacatattggcatgagatattccttaccttcaagagaaattatcgcagatgcagctgaaacagttattaacgctcattggtttgatggtgttttttacattcctaattgcgataaaattacgccaggaatgttactcgcagctgttagaacaaatgtaccagctatcttttgctcaggaggcccaatgaaagctggtctttccgctcaaggtaaggcattgacattatcttcaatgtttgaagcggttggagcttttaaagaaggaacaatctcaaaagaagcatttttagacatggagcaaaacgcttgtcctacatgtggttcgtgcgccggtatgtttaccgcaaactcaatgaactgtttaatggaagttttaggtttagccctaccatataatggtacagctctagctgtgagtgaccaacgtcgtgaaatgattagacaagctgcattcaggttggttgaaaatattaaaaatgatattaaacctcgcgatattatcacacaagatgcaattgatgatgcttttgctcttgatatggccatgggaggttctactaatactgttcttcatactcttgcaattgcaaatgaagcaggtattgactacgatttagaacgtattaatgaaattgctaaaaaaacaccttacctttctaaaattgcacctagttcttcttattctatgcacgatgttcatgaagcaggtggcgtcccagctattataaatgaattgatgaaaaaggatggtactttacatccggatagattaacagttacgggtaaaaccttgagagaaaataatgaaggtaaaaacatcaaaaattttgatgttattcatcctcttgaaaacccttatgataaacaaggtggattatctgttttattcggaaacctcgcacctaaaggagcggtaatcaaggtcggtggagttgatccttcaattaaagtatttacaggaaaggcaatttgttttaactctcatgatgaagctgttgaagccattgataatcatacagtaagagaaggacatgttgttgttattagatatgagggacctaagggaggtcctggaatgccagaaatgctagcccctacgtcttccatagtgggcagaggattaggtaaagatgttgcattaattacggacggtagattttcgggagcaactagaggtattgcagttggacatatttcacctgaagccgcttcaggtggacccattggcttaataagagatggtgataaaattacgattgatttaatcaatagaactctaaacgtcaatcaatctgaagaagaactgtatcgccgtaaaaatcagcttgaaccattcagagcaaaggttaaaacaggctacttagctagatatactagtttagtcacaagcgctaatactggaggtattatgcaagttccggaaaaccttatttaa

SEQ ID NO: 10647 - protein, 562 aa, Staphylococcus epidermidis
MRSDMIKKGDHQAPARSLLHATGALKQPTDMNKPFVAICNSYIDIVPGHVHLRELADIAKEAIREAGAIPFEFNTIGVDDGIAMGHIGMRYSLPSREIIADAAETVINAHWFDGVFYIPNCDKITPGMLLAAVRTNVPAIFCSGGPMKAGLSAQGKALTLSSMFEAVGAFKEGTISKEAFLDMEQNACPTCGSCAGMFTANSMNCLMEVLGLALPYNGTALAVSDQRREMIRQAAFRLVENIKNDIKPRDIITQDAIDDAFALDMAMGGSTNTVLHTLAIANEAGIDYDLERINEIAKKTPYLSKIAPSSSYSMHDVHEAGGVPAIINELMKKDGTLHPDRLTVTGKTLRENNEGKNIKNFDVIHPLENPYDKQGGLSVLFGNLAPKGAVIKVGGVDPSIKVFTGKAICFNSHDEAVEAIDNHTVREGHVVVIRYEGPKGGPGMPEMLAPTSSIVGRGLGKDVALITDGRFSGATRGIAVGHISPEAASGGPIGLIRDGDKITIDLINRTLNVNQSEEELYRRKNQLEPFRAKVKTGYLARYTSLVTSANTGGIMQVPENLI

SEQ ID NO: 10648 - DNA, 1854 bp, Streptomyces avermitilis
  CDS (1)..(1854): transl_table=11
atgcccgagctgaggtcccgcacagtcacccacggtcgcaacatggcgggcgcccgcgcccttatgcgcgcctccggtgtaccgggcgcggacatcggccggaagccgatcatcgcggtcgccaactccttcacggagttcgtgcccggccacacccacctccagccggtcggccggatcgtcagcgaggccatcacggccgccggcggcatcgcgcgcgagttcaacacgatcgcggtcgacgacggcatcgcgatgggccacggcggcatgctgtactccctcccgtcccgcgacctgatcgcggactcggtcgagtacatggtcgaggcccactgcgccgacgccctgatctgcatctcgaactgcgacaagatcacgcccggcatgctcatggccgctctgcgcctgaacatcccgacggtcttcgtctccggcggccccatggagtccggccgcgccaccctggtcgacggcacggtccgtacgctcgacctggtcgacgcgatctccgacgccgtgaacgacaagatctcggacgaggacatcctccgtatcgaggagaacgcctgtcccacctgcggctcctgctccggcatgttcaccgccaactcgatgaactgcctgaccgaggccatcggcctgagcctgcccggcaacggctcggtcctcgccacgcacacggcccgcaagggtctgtacgaggacgcggcccgcacggtcgtggacatcacgcgccgttactacgagcaggacgacgagtcggtcctgccccgcaacatcgccacgcacgccgccttcgagaacgccatggccctcgacatcgccatgggcggctccaccaacacgatcctgcacctgctggccgccgcccaggaagcgggcgtccccttcggcctggacgagatcaacgaggtctcgcgccgcgtgccctgcctcgccaaggtcgccccgaacgtcgccaaggaccgtacgtactacatggaggacgtgcaccgcgcgggcggcatcccggccctgctgggcgagctgcaccgggccggcctgctgaacgaggacgtgcactcggtgcacagcccgtccctctccgactggctgaagacgtgggacgtgcgggcgggttccccgtcccccgaggccatcgaactgtggcacgcggcccccggctgcgtccgctcctccgaggccttctcccagtccgagcgctgggaggcgctcgacgaggacgcggagggcggctgcatccgctccgccgaacacgcgtactccaaggacggcggcctcgcggtcctcaagggcaacctggcggtcgacggctgcgtcgtgaagacggcgggcgtcgacgagtcgatctggaccttcgagggcccggcggtcgtctgcgagtcgcaggacgaggccgtcgacaagatcctccgcaaggagatcacccacggcgacgtggtcgtcatccgctacgagggccccaagggcggccccggcatgcaggagatgctctacccgacgtcgttcctgaagggccggggcctcggcaagacctgtgccctgatcacggacggccgtttctccggcggcacctcgggcctgtcgatcggccacgcctcccccgaggcggcgtccggcggcacgatcgcgctggtccaggacggcgaccgcatccgcatcgacatcccgaaccgcacgatcgacctcctggtggacgaggccgaactgtcccgccgcgaccaggccctgaacggcgtctacgcccccgtgaaccgcgagcgcaaggtctccgcggccctgcgcgcgtacgccgcgatggccacgagcgcggacaagggcgcggtccgggacgtgtcgaagctgggctga

SEQ ID NO: 10649 - protein, 617 aa, Streptomyces avermitilis
MPELRSRTVTHGRNMAGARALMRASGVPGADIGRKPIIAVANSFTEFVPGHTHLQPVGRIVSEAITAAGGIAREFNTIAVDDGIAMGHGGMLYSLPSRDLIADSVEYMVEAHCADALICISNCDKITPGMLMAALRLNIPTVFVSGGPMESGRATLVDGTVRTLDLVDAISDAVNDKISDEDILRIEENACPTCGSCSGMFTANSMNCLTEAIGLSLPGNGSVLATHTARKGLYEDAARTVVDITRRYYEQDDESVLPRNIATHAAFENAMALDIAMGGSTNTILHLLAAAQEAGVPFGLDEINEVSRRVPCLAKVAPNVAKDRTYYMEDVHRAGGIPALLGELHRAGLLNEDVHSVHSPSLSDWLKTWDVRAGSPSPEAIELWHAAPGCVRSSEAFSQSERWEALDEDAEGGCIRSAEHAYSKDGGLAVLKGNLAVDGCVVKTAGVDESIWTFEGPAVVCESQDEAVDKILRKEITHGDVVVIRYEGPKGGPGMQEMLYPTSFLKGRGLGKTCALITDGRFSGGTSGLSIGHASPEAASGGTIALVQDGDRIRIDIPNRTIDLLVDEAELSRRDQALNGVYAPVNRERKVSAALRAYAAMATSADKGAVRDVSKLG

SEQ ID NO: 10650 - DNA, 1854 bp, Streptomyces coelicolor
  CDS (1)..(1854): transl_table=11
atgcccgaactgaggtcccgcacagtcacccacggccgcaacatggcgggcgcccgcgcccttatgcgtgcctccggtgtacccggcgcggacatcgggcggaagccgatcatcgccgtcgccaacagcttcacggagttcgtgccgggccacacgcacctggcccccgtcggccgcatcgtcagcgaggcggtcaccgcggccggcggcatcccgcgcgagttcaacacgatcgccgtggacgacggcatcgccatgggccacggcggcatgctctacagcctcccctcccgcgacctgatcgcggacagcgtggagtacatggtcgaggcgcactgcgccgacgccctgatctgcatctccaactgcgacaagatcaccccgggcatgctcaacgcggcgctccgcctgaacatccccacggtcttcgtctccggcggacccatggagtccggccgcgccaccctggtcgacggcacggtccgcaccctcgacctggtcgacgcgatgtcggaggcggtcaacgacaagatctccgacgcggacatcctccgcatcgaggagaacgcctgcccgacctgcggctcctgttccggcatgttcaccgccaactcgatgaactgcctgaccgaggccatcggcctctccctgcccggcaacggctcggtcctggccacccacaccgcccgcaagacgctctacgagaacgccgcccgcacggtgctcgacctgacccgccgctactacgagcaggacgacgactcggtcctgccgcgcaacatcgccacccccgccgccttcggcaacgccatggcgctggacatcgcgatgggcggctccaccaacacgatcctgcacctgctggccgccgcccaggaggccgaggtctcctacggcctcgccgagatggacgccctctcgcgcagcgtcccctgcctggccaaggtcgcgcccaacgtggccaaggaccgcacgtactacatggaggacgtgcaccgcgccggcggcatccccgccctcctcggcgaactgcaccgcggcggcctgctcaacgaggacgtccactccgtccacagcccgtccctggccgactggctgaagacctgggacgtgcgcggcggctccccctccaaggaggcagtcgagctgtggcacgcggcccccggctgcgtccgctccgccgaggccttctcccagtccgagcgctgggacaccctggacgaggacgccgagggcggctgcatccgctccgtcgagcacgcctactccaaggacggcggcctcgcggtcctgcgcggcaacctcgccgtcgacggctgcgtcgtcaagacggccggcgtcgacgagtccatctggaccttcgagggcccggcggtcgtctgcgagtcgcaggaggaggccgtccagaagatcctcacccagcaggtcaaggagggcgacgtcgtcgtcatccgctacgagggccccaagggcggccccggcatgcaggagatgctctacccgacctcgtacctgaagggccgcggcctcggaaaggcctgcgccctggtcaccgacggccgcttctcgggtggcacctcgggcctgtccatcggccacgcctcgccggaggcggcggccggcggcaccatcgccctggtcgaggacggcgaccgcatccgcatcgacatcccgaaccgctccatcgagctgctcgtggacgacgccgagctgacccgccgcgagcaggccctgaacggcgtgtacgccccgaagaaccgcgaccgcaaggtctccgcggccctcaaggcgtacgccgcgatggccaccagcgccgacaagggcgcggtccgcgacgtcagcaagctgggctga

SEQ ID NO: 10651 - protein, 617 aa, Streptomyces coelicolor
MPELRSRTVTHGRNMAGARALMRASGVPGADIGRKPIIAVANSFTEFVPGHTHLAPVGRIVSEAVTAAGGIPREFNTIAVDDGIAMGHGGMLYSLPSRDLIADSVEYMVEAHCADALICISNCDKITPGMLNAALRLNIPTVFVSGGPMESGRATLVDGTVRTLDLVDAMSEAVNDKISDADILRIEENACPTCGSCSGMFTANSMNCLTEAIGLSLPGNGSVLATHTARKTLYENAARTVLDLTRRYYEQDDDSVLPRNIATPAAFGNAMALDIAMGGSTNTILHLLAAAQEAEVSYGLAEMDALSRSVPCLAKVAPNVAKDRTYYMEDVHRAGGIPALLGELHRGGLLNEDVHSVHSPSLADWLKTWDVRGGSPSKEAVELWHAAPGCVRSAEAFSQSERWDTLDEDAEGGCIRSVEHAYSKDGGLAVLRGNLAVDGCVVKTAGVDESIWTFEGPAVVCESQEEAVQKILTQQVKEGDVVVIRYEGPKGGPGMQEMLYPTSYLKGRGLGKACALVTDGRFSGGTSGLSIGHASPEAAAGGTIALVEDGDRIRIDIPNRSIELLVDDAELTRREQALNGVYAPKNRDRKVSAALKAYAAMATSADKGAVRDVSKLG

SEQ ID NO: 10652 - DNA, 1686 bp, Sulfolobus acidocaldarius
  CDS (1)..(1686): transl_table=11
atgccagaaagtaaattaaatagtcctttaagatatcacggtatatataatgcaccgcatagggcttttttgagatctgtaggtcttacagatggcgaaataaacaaaccacttgttgcagtggctacagcctggagtgaagctggtccatgtaactttcacacattatctttagcacatgtagctaaagaaggggcaaaagaaggaggactaacaccactagcctttccaactatagttgtcaacgacaatataggtatgggaactgagggaatgagatacagcttagttagcagggatctaatagctgacatggtggaggctcaatttaacgcacatgccttcgatgcactaataggtattggaggttgtgataagacaactccaggaatcctaatggctatggctaggcttaacgttccctcaatttatatttatggtggatcagcagagcctggcttttatctcggaaggagattaacaatagaggacgtccatgaagccataggtgcattcattgcaggtaaaatagatgaacatgagttatacgaaatagagaagagagcccatccaactgtaggtacatgctcaggtatgtttacggcaaacacaatgggctctatgtctgaagcactaggtatggctttaccgggaagtgcctctccgacagccacttcttccagaagaataatgtatgtcagagagactggaaaggcagtgagtagactacttgagaacggagttaaatcaagggatatactaacttttgaggcgtttgaaaatgcaatagcagttcttatggcaatgggagggtcaacaaacgcagtgcttcacttactcgcaatagcttatgaggctggagtgaagctaacattagatgatttcaataggatctcaaagaggactccttacataggtagtttgaaacctggtggagactacgtcatggcagatttagatgaagtgggcggtgtgccccttgtaatgaagaagttattagatgcaggattgctcaatggagacgtactgactgttactggcaaaacaatgaaacaaaacctccaagagtacagaattccaaatgttccacataatcatatcgtaaaggatgtcaagaatcccataaagccaaggggagggatagtcatacttaagggaagtctagcaccagagggggctgttataaaagttgcagcgacaaatgttacaaagtttgagggcaaagctaaagtttacaactcagaggagcaagccttcaagggtattcagagtaatgaagtaaaagacggagaggtcgttgtcataagatatgagggaccaaaaggtggacctggtatgcctgaaatgttgagagtcactgctgcgatagttggtgccggattaagtaatgttgccatggttacggatggtagattttcaggggctaccagaggacctatggtgggtcatgtagctcctgaagctatggtaggaggaccaatagcaattgtggaagatggtgatgttatagtaatagatgttgaaaacgaaagacttgatataaaactatctgacgctgagattaaaaggaggctcaacaattggtctccaccagaacccaggtataagtctggtttactggcaaaatatgcgtcgttggtagctcaatcttccatgggtgctgtaacgagacctgtgattaagtga

SEQ ID NO: 10653 - protein, 561 aa, Sulfolobus acidocaldarius
MPESKLNSPLRYHGIYNAPHRAFLRSVGLTDGEINKPLVAVATAWSEAGPCNFHTLSLAHVAKEGAKEGGLTPLAFPTIVVNDNIGMGTEGMRYSLVSRDLIADMVEAQFNAHAFDALIGIGGCDKTTPGILMAMARLNVPSIYIYGGSAEPGFYLGRRLTIEDVHEAIGAFIAGKIDEHELYEIEKRAHPTVGTCSGMFTANTMGSMSEALGMALPGSASPTATSSRRIMYVRETGKAVSRLLENGVKSRDILTFEAFENAIAVLMAMGGSTNAVLHLLAIAYEAGVKLTLDDFNRISKRTPYIGSLKPGGDYVMADLDEVGGVPLVMKKLLDAGLLNGDVLTVTGKTMKQNLQEYRIPNVPHNHIVKDVKNPIKPRGGIVILKGSLAPEGAVIKVAATNVTKFEGKAKVYNSEEQAFKGIQSNEVKDGEVVVIRYEGPKGGPGMPEMLRVTAAIVGAGLSNVAMVTDGRFSGATRGPMVGHVAPEAMVGGPIAIVEDGDVIVIDVENERLDIKLSDAEIKRRLNNWSPPEPRYKSGLLAKYASLVAQSSMGAVTRPVIK

SEQ ID NO: 10654 - DNA, 1698 bp, Symbiobacterium thermophilum
  CDS (1)..(1698): transl_table=11
atggagggatcgacggtgcgcagcgacctgatcaagaaggggcccgaccgggccccgcatcgagcgctgctgaaggcgaccggcgtcaccgacgccgacatggggaaacccttcatcggcatcgccaacagctacatcgacatcgtgccggggcacgtccacctgaaggagttcggcgacctggtgaaggaggccgtgcgggaggcgggcggcgtgcccttcatcttcaacaccatcggcgtcgacgacggcatcgccatgggtcacatcgggatgcgctacagcctccccagccgggagctgatcgccgacgcggtggagacggtgatcgaggcgcaccagctggacgcgctgatctgcatccccaactgcgacaagatcaccccgggcatgctcatggcggccatgcgggtgaacatcccgacgatcttcatctccggcggccccatggccgccggccggctcaaggacggccgcagggccgacctgatcaccatcttcgagggggtcggcgcccacagccgggggatgatcagcgacgaggagctgaaggagctggaggacctggcctgccccagctgcggctcctgctcgggcatgttcaccgccaactcgatgaactgcctctgcgaggccctcggcctggccttgccgggcaacggcaccgccctggcgcggtcggccgagcgggaggcgctggcgcgggcggcggcccggcgcatcgtggagatggccctggccggaggccccaggccccgggacatcgtcacgcccgaggccatcgacaacgcctttgcgctggacatcgcgatgggcggatccaccaacaccgtcctgcacaccctggccgtcgccaccgaagcgggcatcgcgtacccgctggagcggatcaacgcgctctccgcccgggtgccgtacctgtgcaaggtctcgcccgccacggccgaggtgcacatcgaggacgtgcatgccgccggcggcgtgatggcgatcctgaaggagctgtcccggaaggaggggacgctgcatccccactgcctgacggtgacggggaagacgatcggcgagctctgggccgaggccgagaaccggaaccgggaggtcatccgtccggtggaggacccgtacgccgagaccggcggcctggcgatcctcttcggcaacctggcccccgacggcgcagcgttgaaggtgggggcggtggacccgtccatcaccacgttcaccggccgggcgatctgcttcgactcccaggacgaggcgctgcaggggatcttcggcggcagggtgcagccgggccacgtggtggtgatccgctacgaggggcccaagggcggccccggcatgccggagatgctggcgcccacgtcggccattgtggggatgggcctggggaaggaggttgccctgatcaccgacggccgcttctccggcggcacccggggcatctgcctgggccatatctcgcccgaggcggccgaaggggggcccatcgccctggtgcgggacggcgacgtgatcaccatcgacatccccggccgccggctcacgctggaggtgccggcggatgagctggagcggcgccgggcagcctgggtcaagcccgcgcccaaggtgcggaagggctggctggggcgctatgccgccctggtcacgtcggccaacaccggtgcggtgctgcgcacgccggaagagtga

SEQ ID NO: 10655 - protein, 565 aa, Symbiobacterium thermophilum
MEGSTVRSDLIKKGPDRAPHRALLKATGVTDADMGKPFIGIANSYIDIVPGHVHLKEFGDLVKEAVREAGGVPFIFNTIGVDDGIAMGHIGMRYSLPSRELIADAVETVIEAHQLDALICIPNCDKITPGMLMAAMRVNIPTIFISGGPMAAGRLKDGRRADLITIFEGVGAHSRGMISDEELKELEDLACPSCGSCSGMFTANSMNCLCEALGLALPGNGTALARSAEREALARAAARRIVEMALAGGPRPRDIVTPEAIDNAFALDIAMGGSTNTVLHTLAVATEAGIAYPLERINALSARVPYLCKVSPATAEVHIEDVHAAGGVMAILKELSRKEGTLHPHCLTVTGKTIGELWAEAENRNREVIRPVEDPYAETGGLAILFGNLAPDGAALKVGAVDPSITTFTGRAICFDSQDEALQGIFGGRVQPGHVVVIRYEGPKGGPGMPEMLAPTSAIVGMGLGKEVALITDGRFSGGTRGICLGHISPEAAEGGPIALVRDGDVITIDIPGRRLTLEVPADELERRRAAWVKPAPKVRKGWLGRYAALVTSANTGAVLRTPEE

SEQ ID NO: 10656 - DNA, 1686 bp, Synechocystis sp
  CDS (1)..(1686): transl_table=11
atgtccaacaatcccagaagccaggtaattacccagggcacccaacggagtcccaaccgggccatgctccgggccgttggttttggcgatgatgactttacgaaacccattgtgggtattgccaacgggtacagcaccattaccccctgcaacatgggcattaatgatctggctctacgggccgaggccggcttacggacagcgggggccatgccccaattgtttggcactatcaccatcagtgacggtatttccatgggtacggaagggatgaaatattccctagtttcccgggaagtgattgctgattccatcgaaacagtatgcaatggccaacgcatggacggagttttggcgatcgggggctgtgataagaatatgccgggggcaatgattgccatggctcgcctcaatattccctctatctttgtttacggtggcactattaaacccggacattatgccggggaagatttaacagtggtcagtgcctttgaagcggtgggccagtacagcgctggcaaaattgatgaggaaaccctctacggcattgaacggaatgcctgtcctggggctggttcctgtggggggatgttcaccgccaacaccatgtcctccgcctttgaagctatggggatgagcttgccctattcttctaccatggccgcagtggatggggaaaaagccgacagcaccgaggagtccgccaaggttttggtggaagccatcaaaaaacagattttgcccagtcaaattctgacccggaaagcttttgaaaatgccattgccgtgattatggccgtggggggctccactaatgcagtgctccatctgctggcgatcgccaacaccattggggtgcccctaagcttggacgattttgaaaccattcgccacaaagtacctgtactgtgcgacctcaaaccttccggcaaatacgtcaccactaatctccacgccgccggtggcattccccaggtgatgaaaatattgctggtcaatggcattctccacggtgacgctttaacgattacaggacagaccattgctgaagttttagccgatattcctgaccaaccccctgccggccaggacgtaatccattcctgggatgaccctgtttatcaagaaggtcacctggcagtgctcaaaggtaacctggccaccgaaggcagtgtggctaaaatcagcggtgttaaaaagccggtgatcactggtcccgccaaagtatttgaatctgaagaagattgcctagaagcgattctagccggcaaaattcaagcaggagatgtggtggtcgtgcgctatgaagggcccaaaggtggccccggtatgcgggaaatgctagcccccacttctgccatcattggggcagggttgggagactccgttggcctaatcaccgatggccgcttttctggtggtacctatggcttagtggtgggtcacgttgcccccgaagcttatgtgggaggggcgatcgccttggtgcaagagggggatcaaatcaccatcgatgctggcaagcggttactgcaactcaacatcagtgaagaggaattggcccaacggcgggcccaatggactcctcctcagccccgctatccccgggggattttagccaagtatgccaagttagtttcctccagcagccttggtgcagtgactgatatagacttgttctaa

SEQ ID NO: 10657 - protein, 561 aa, Synechocystis sp
MSNNPRSQVITQGTQRSPNRAMLRAVGFGDDDFTKPIVGIANGYSTITPCNMGINDLALRAEAGLRTAGAMPQLFGTITISDGISMGTEGMKYSLVSREVIADSIETVCNGQRMDGVLAIGGCDKNMPGAMIAMARLNIPSIFVYGGTIKPGHYAGEDLTVVSAFEAVGQYSAGKIDEETLYGIERNACPGAGSCGGMFTANTMSSAFEAMGMSLPYSSTMAAVDGEKADSTEESAKVLVEAIKKQILPSQILTRKAFENAIAVIMAVGGSTNAVLHLLAIANTIGVPLSLDDFETIRHKVPVLCDLKPSGKYVTTNLHAAGGIPQVMKILLVNGILHGDALTITGQTIAEVLADIPDQPPAGQDVIHSWDDPVYQEGHLAVLKGNLATEGSVAKISGVKKPVITGPAKVFESEEDCLEAILAGKIQAGDVVVVRYEGPKGGPGMREMLAPTSAIIGAGLGDSVGLITDGRFSGGTYGLVVGHVAPEAYVGGAIALVQEGDQITIDAGKRLLQLNISEEELAQRRAQWTPPQPRYPRGILAKYAKLVSSSSLGAVTDIDLF

SEQ ID NO: 10658 - DNA, 1668 bp, Thermus thermophilus
  CDS (1)..(1668): transl_table=11
atgaggtcggaccagatcaagaagggactcaagcaggcccccgcccgcgccatgctccgggcggtgggggtgggggacgaggacttcggaaggcccttcgtgggggtggtgaacaccttcaccgacgggatgccctgcaacttccacctgcgggagctggcccagcacctcaaggccgggctcagggaggcggggcttttcccctttgagttcggggcccccgccatctccgacgggatcagcatgggcaccccgggcatgcgggcgagcctcgtaagccgcgaggtcatcgccgacagcgtggagctcatcgcccagggctacctctacgacggcatggtggggctttccgcctgcgacaagaccatcccgggcacggccatgggggtgatccgcagcggcgtccccggcatggtcctctacggggggacgatcgcccccggggagtggcaaggccggaagctcaccatcgtggaggtctttgaggcggtggggcaaagggccgcggggaagatcagcgaggaggagcttttggagattgaacgccgggccatccccggccccggggcctgtggggggcagtacaccgccaacaccatggccatggccctcgaggccctgggcctctcccccgtgggctacaacgccatccccgccgtccaccccgaaaaggagcgggccaccaaggaggcggggaaaatcctcgcctgggccatcgcccacgactggaagcccaaggacttcctcacccggaaaagcttcctcaacgccgtcgccgccgtggccgccacgggggggagcaccaacgccgtcctccacctcctcgccctggccaaggaggcgggggtggagctcagcctggacgactttgaccagatctcccgcaagaccccggtgatcgcggacctccgcccttggggcacctacaccgcctgggagctgtatgaagccggggggacggccctcgtcttcaagcggcttctggaggcggggctcctctttggggaggagaagaccctcacgggccgcaccctggcggaggaggtggagcgggcctaccgggaacaagaggggcagaaggtggtcttccccgtggagaaggccctcaagccccacggggggctcgtggtgctcaaggggaacctcgcccctcaaggcgccgtcctcaagctcgcggggacggaacgcacctcctttgagggcccggcccgggtctttgactccgaggaggcggccatggagaaggtcctgaagggggagatccggcccggggacgtggtggtcatccgctacgtgggccccaagggggcgccggggatgcccgagatgctctcggtgacgagcgccatcgtgggggagggcctggggccggaggtggccctcctcaccgacggccgcttctccgggggcacccgcggcctcatgatcggccacatcgcccccgaggccttcgtgggcgggcccatcgccctcctggaagagggggaccgcatccggattgacgtggaaggccgccgcctcgaggtcctcctccccgaggaggagctggaaaggcggagggcccgctggcggccccgaccccccgccttcacccacggcctcttcgcccgctacgccgccctggtgcgccaggcggacgagggggcggtgctggaagacccgctctag

SEQ ID NO: 10659 - protein, 555 aa, Thermus thermophilus
MRSDQIKKGLKQAPARAMLRAVGVGDEDFGRPFVGVVNTFTDGMPCNFHLRELAQHLKAGLREAGLFPFEFGAPAISDGISMGTPGMRASLVSREVIADSVELIAQGYLYDGMVGLSACDKTIPGTAMGVIRSGVPGMVLYGGTIAPGEWQGRKLTIVEVFEAVGQRAAGKISEEELLEIERRAIPGPGACGGQYTANTMAMALEALGLSPVGYNAIPAVHPEKERATKEAGKILAWAIAHDWKPKDFLTRKSFLNAVAAVAATGGSTNAVLHLLALAKEAGVELSLDDFDQISRKTPVIADLRPWGTYTAWELYEAGGTALVFKRLLEAGLLFGEEKTLTGRTLAEEVERAYREQEGQKVVFPVEKALKPHGGLVVLKGNLAPQGAVLKLAGTERTSFEGPARVFDSEEAAMEKVLKGEIRPGDVVVIRYVGPKGAPGMPEMLSVTSAIVGEGLGPEVALLTDGRFSGGTRGLMIGHIAPEAFVGGPIALLEEGDRIRIDVEGRRLEVLLPEEELERRRARWRPRPPAFTHGLFARYAALVRQADEGAVLEDPL

SEQ ID NO: 10660 - DNA, 1665 bp, Tremblaya princeps
  CDS (1)..(1665): transl_table=11
atgaacacgaactcaagacgcataacgcatggattcaccaggtctccgaacagggccatgctctgtgccatggggtacgatggcgcagactttgccaagcccatcataggcgtaggaagcggttactccaccataacaccgtgcaatgctggcatacagcgcgtcgtcgatgcggcgaaagccatgctggcaaggcatggagccatgacgcaggttttcggcatccctaccatatccgacggcatatcaatgggcacgccgggcatgaggtactctctcgtgtctcgtgaggtgatcgctgattgtatagaggcatgtgcttgtgggcagagcatggacgggctgctagtcgtagggggctgcgataagaacctgcctggtggcatgatcgggctactacgagccaacatcccagggatttacctgtatggcggcacaatactgccagggtactggggcgccagggagctgactgtggtgagttcattcgaggcagttggcgccatgggtaggcagggcatgtctatagacgctatgcgtgaagtggagcgacacgcctgccccactacaggctcgtgcggcgggatgtacacagcaaacacaatgagcgcatcatttgaggcccttggcatgtccctgctctactcgtccactgctccgagcccaggcatcgagggtgagctatccatctcaacgtcggcacggtctctgatcaacgcagtgcgacggggcataaggccaagggacgtggtaactcacaggtccattcgcaatgccatggcggttgtaatggcagtcggcgggtctacaaacgccgtgctgcactacctggcgatagccgctgcagctcgttctgctctctcactgcacgacgttgagctaataaggaggagggtgcctgtaatatgtaacatgaagccctctggactgcatagcactgcagacctacattcagcaggcggcgttcctcgtgttatgcacgagcttgcgctcgctggtctcattgacgagtcgtgcctcacgataacgggcagaacgataggtgcagagctcctcgcggcgcaccgcaagcgccatggctctaccgttgtgctgcctactaacatggcgttataccgtacaggacgccttgttgtgctgagcggtaatatgtcaaggaacggcgcagttgccaagacttcaggccttagcatactattgcacagcggcactgccagagtgtttcgcagcgaggaggcctgtgttcaggctatactcaacggctgcgtgcgcattggcgacgtagttgtgctgatttacctaggcccaaagggagggcctggcatgcctgagatgctatccccaactgcagcgctagttggcatgggactaggccagtccgcttgcctcattacagatggtaggttctctggaggaacgtggggcctggtggtcgggcatgtatcacccgaggcagccgtgggtggctccatagcgcttgtccgtaacggcgacttcatcacagtagacctgcgcaacaactctcttcacctgcatatagacgcatggtcgcttgctgcacggcgtgcagcatggcggctaccttgcactttgtgtgtagagggactactgagaaagtaccacgatggagttggccagtctcacaatggcgccatcgctgcatag

SEQ ID NO: 10661 - protein, 554 aa, Tremblaya princeps
MNTNSRRITHGFTRSPNRAMLCAMGYDGADFAKPIIGVGSGYSTITPCNAGIQRVVDAAKAMLARHGAMTQVFGIPTISDGISMGTPGMRYSLVSREVIADCIEACACGQSMDGLLVVGGCDKNLPGGMIGLLRANIPGIYLYGGTILPGYWGARELTVVSSFEAVGAMGRQGMSIDAMREVERHACPTTGSCGGMYTANTMSASFEALGMSLLYSSTAPSPGIEGELSISTSARSLINAVRRGIRPRDVVTHRSIRNAMAVVMAVGGSTNAVLHYLAIAAAARSALSLHDVELIRRRVPVICNMKPSGLHSTADLHSAGGVPRVMHELALAGLIDESCLTITGRTIGAELLAAHRKRHGSTVVLPTNMALYRTGRLVVLSGNMSRNGAVAKTSGLSILLHSGTARVFRSEEACVQAILNGCVRIGDVVVLIYLGPKGGPGMPEMLSPTAALVGMGLGQSACLITDGRFSGGTWGLVVGHVSPEAAVGGSIALVRNGDFITVDLRNNSLHLHIDAWSLAARRAAWRLPCTLCVEGLLRKYHDGVGQSHNGAIAA

SEQ ID NO: 10662 - DNA, 1842 bp, Vibrio cholerae
  CDS (1)..(1842): transl_table=11
atgcctaagtaccgttccgccaccaccacacacggacgtaacatggcgggtgcgcgcgcattatggcgcgccaccggcgtcaaagaggaagattttggtaaaccgatcattgcggtggtcaactccttcacccaatttgttcccggccatgtgcatttaaaagatctcggccaactggtcgcacgcgaaattgaagccgcgggcggcattgccaaagaattcaacaccattgcggtcgatgacggcatcgccatgggccacggcggcatgctctactcgctgccatcgcgtgaactgatcgccgattccgtcgaatacatggtcaatgcgcactgcgccgatgccatggtgtgtatctccaactgtgacaaaatcactccaggaatgctgatggcggcgatgcgccttaatattccggcgattttcgtctctggcggcccgatggaagcgggaaaaaccaagctttctgaccaaatcatcaagctcgacttggtcgatgccatgatgcaaggcgctgaccccaaagtatcggatgcccaaagtgagcagattgaacgctcggcctgtcctacttgtggctcttgctcggggatgtttaccgccaactcaatgaactgcttgaccgaagcgctgggtctctctcagccgggtaacggctcactgctcgccacgcatgccgatcgcaaacagctgtttttgactgctgggcaacggattgttgagctgactaaacgttactacgagcaagatgatgcctcagttttgccacgcaacattgccaacaaagcagcgtttgaaaacgccattgcgctggatattgcgatgggcggctccaccaacacggtgttacacctgttggccgctgcgcaggaaggcgaagtggaatttgatatgaccgatatcgatcgcatgtctcgccaagtgccacacttatgtaaagtcgcgccttccactcagaaataccatatggaagatgtacaccgcgcgggcggtgtaatgggcattttgggtgagctacaacgtgcaggtctactcaaggatcaaacccgcaccgtactaggcatctcgctgcaagagcagctggcgcaatacgacgtgaaacaaacccaagatccagcggtacatactatgttccgcgcaggccctgctggcattcgcaccactcaagctttctcacaagattgccgttgggatacgctcgatgacgatcgccaagaggggtgtattcgcgataaagcgcacgcattcagtcaagatggtggccttgccgtactcaaaggcaacttggcgattgacggctgcatcgtaaaaactgctggcgtggatgaaagtatcctcaaattccgtggtcctgctgtggtgtatgaaagtcaggaagacgcggtcaacggcattcttggcggccaagtcaaagccggtgacgtcgtggttattcgttatgaagggccaaaaggcggtccgggcatgcaagagatgctctacccaaccacctacctcaaatcgatgggactgggtaaacagtgcgcgctactgaccgatggccgcttctccggtggtacgtccggcttgtcgattggtcacgcctctccggaagcggcgaatggcggtacgatcggcttggtacgcagtggcgatagcatcgcgattgatattcccaaccgttcgatcacgctcgaagtcagcgaatctgagctagcagctcgccgcgctgaacaagataaactcggctggaaaccagtggatcgccagcgtaccgtttctttggcgctgaaagcttatgccagcatggcaaccagcgccgacaaaggtgcagtgcgcgataagtccaaacttgagggctaa

SEQ ID NO: 10663 - protein, 613 aa, Vibrio cholerae
MPKYRSATTTHGRNMAGARALWRATGVKEEDFGKPIIAVVNSFTQFVPGHVHLKDLGQLVAREIEAAGGIAKEFNTIAVDDGIAMGHGGMLYSLPSRELIADSVEYMVNAHCADAMVCISNCDKITPGMLMAAMRLNIPAIFVSGGPMEAGKTKLSDQIIKLDLVDAMMQGADPKVSDAQSEQIERSACPTCGSCSGMFTANSMNCLTEALGLSQPGNGSLLATHADRKQLFLTAGQRIVELTKRYYEQDDASVLPRNIANKAAFENAIALDIAMGGSTNTVLHLLAAAQEGEVEFDMTDIDRMSRQVPHLCKVAPSTQKYHMEDVHRAGGVMGILGELQRAGLLKDQTRTVLGISLQEQLAQYDVKQTQDPAVHTMFRAGPAGIRTTQAFSQDCRWDTLDDDRQEGCIRDKAHAFSQDGGLAVLKGNLAIDGCIVKTAGVDESILKFRGPAVVYESQEDAVNGILGGQVKAGDVVVIRYEGPKGGPGMQEMLYPTTYLKSMGLGKQCALLTDGRFSGGTSGLSIGHASPEAANGGTIGLVRSGDSIAIDIPNRSITLEVSESELAARRAEQDKLGWKPVDRQRTVSLALKAYASMATSADKGAVRDKSKLEG

SEQ ID NO: 10664 - DNA, 1842 bp, Vibrio parahaemolyticus
  CDS (1)..(1842): transl_table=11
atgccaaaatatagatcagcaaccaccacacatggtcgtaacatggcgggagctcgtgcgctctggcgtgcaaccggtgtaaaagacgaagatttcggtaaaccaatcatagcagtggtgaactcattcactcagttcgtaccaggccacgtacaccttaaagatttgggccaacttgttgctcaagagattgaagcggcaggcggcatcgcaaaagaattcaataccatcgccgtcgatgatggcatcgcaatgggtcacggcggcatgctttactcgttgccatcacgtgaactgattgccgactcggtcgaatacatggttaatgcgcactgtgcagatgcgatggtgtgtatctctaactgtgacaaaatcactccagggatgctgatggcgtcaatgcgtctcaacattccagttatcttcgtatctggcggcccaatggaagcgggcaaaaccaagctttcagaccagatcatcaagttagaccttgtcgatgccatgatccaaggcgccgatcctaaagtgtcagacgaacaaagcgaacagatcgaacgcagtgcatgcccaacgtgtggatcgtgttcaggcatgttcaccgcaaactcaatgaactgtctgacagaagctctgggtctgtctcagccaggcaacggctcgctgttggcaacgcatgccgatcgtaaagaactgtttatcaatgcaggtaaacgcatcgttgaactcaccaaacgctactacgagcaagatgacgaaacggctctaccacgcaatatcgcgaccaaagccgcatttgaaaacgcgatggcactcgacatcgcaatgggcggttcgaccaatacggtgttacaccttttagctgcagcgcaagaaggtgaagtcgattttgatatgacggacatcgaccgcatgtctcgccaagtaccacacctttgtaaagtggctccttcaacgcaaaaataccacatggaagatgtacaccgtgcgggtggcgttgtcggtatccttggtgaactgaaccgtgcaggtctgctgcacaatcagtctaagactgtcctaggactgacttgggaagaacagctagccaaatacgacatcatgctgaccgattcagaagaagtgaaatcattctaccgtgctggccctgcgggtatccgcaccacacaagcattctcgcaagattgtcgctgggatactctcgatgacgaccgtgcggaaggctgtatccgcaccaaagaaaacgccttcagccaagatggcggccttgccgttctgaaaggcaacatcgcgctggatggttgtattgtgaagactgctggtgtggacgaaagcatcctgaaatttactggccctgcggtagtgtttgaaagccaggaagatgcggtagacggcatccttggcggcaaagtgaaagcgggcgatgtggttgtgattcgctacgaaggtccaaaaggtggcccgggcatgcaagaaatgctctacccaaccacttatctaaaatcgatgggcttaggtaaagagtgtgcgttattaactgacggtcgcttctctggtggtacctctggtctgtctatcggccatgcttctccagaagccgccaatggcggtgcgatcggcttggttcaagatggcgatttgattgcgattgatattccaaatcgcagcatctctcttgagatctccgaacaagaacttgcagagcgccgcgtaaaacaagacgaacttggttggaaaccagcaaatcgtcaacgtgaagtttctttcgccctaaaagcgtacgccagcatggcaaccagtgctgacaaaggtgcagtacgagataaatcgaagctagagggctag

SEQ ID NO: 10665 - protein, 613 aa, Vibrio parahaemolyticus
MPKYRSATTTHGRNMAGARALWRATGVKDEDFGKPIIAVVNSFTQFVPGHVHLKDLGQLVAQEIEAAGGIAKEFNTIAVDDGIAMGHGGMLYSLPSRELIADSVEYMVNAHCADAMVCISNCDKITPGMLMASMRLNIPVIFVSGGPMEAGKTKLSDQIIKLDLVDAMIQGADPKVSDEQSEQIERSACPTCGSCSGMFTANSMNCLTEALGLSQPGNGSLLATHADRKELFINAGKRIVELTKRYYEQDDETALPRNIATKAAFENAMALDIAMGGSTNTVLHLLAAAQEGEVDFDMTDIDRMSRQVPHLCKVAPSTQKYHMEDVHRAGGVVGILGELNRAGLLHNQSKTVLGLTWEEQLAKYDIMLTDSEEVKSFYRAGPAGIRTTQAFSQDCRWDTLDDDRAEGCIRTKENAFSQDGGLAVLKGNIALDGCIVKTAGVDESILKFTGPAVVFESQEDAVDGILGGKVKAGDVVVIRYEGPKGGPGMQEMLYPTTYLKSMGLGKECALLTDGRFSGGTSGLSIGHASPEAANGGAIGLVQDGDLIAIDIPNRSISLEISEQELAERRVKQDELGWKPANRQREVSFALKAYASMATSADKGAVRDKSKLEG

SEQ ID NO: 10666 - DNA, 1842 bp, Vibrio vulnificus
  CDS (1)..(1842): transl_table=11
atgcctaaatacagatcagccaccaccactcatggtcgcaacatggccggtgcacgtgcactatggcgtgctacgggcgtaaaagatgaagacttcggcaaaccgattattgccgtggtcaactcctttacccagttcgtaccgggccacgtgcacctgaaagaccttggtcaattggtggcaagagaaattgaagcagcaggcggcattgccaaagaattcaacaccatcgcggtggatgatggtatcgccatgggccacggaggcatgctttattcactgccttctcgtgaattgattgccgactcggtggagtacatggtcaacgcgcactgtgccgatgccatggtgtgtatctccaactgtgacaaaatcaccccgggaatgctgatggcgtcaatgcgccttaatatcccggtgatctttgtctcgggtggaccaatggaagcgggcaaaactaagctttcggatcagatcatcaagctggatctggtcgatgccatgatccaaggcgcggatcctaaagtctcggatgagcagagcgaacagatcgagcgcagtgcttgccctacctgtggatcctgctcaggtatgttcaccgccaactcgatgaactgcctcaccgaagcgcttggcctttctcagccaggtaacggctctttgctcgcaacgcatgccgatcgtaaacaactgtttatcagtgcaggccaacgcattgtcgaactgaccaagcgttactacgagcaagatgatgaaagcgcactgccgcgcaacattgcgaccaaagccgcgtttgaaaacgccatggcgctagacatcgccatgggcggctcaaccaacaccgttttacacctcttagccgcagcgcaagaaggtgaagtggattttgacatgacagacatcgatcgcatgtcacgcatggtgcctcacctatgtaaagtggcgccatcaacccagaaataccacatggaagatgtgcaccgcgcaggtggtgtggtcggtattttgggcgaacttaaccgagcgggcctgctgcacaatcaatcgaaaacggtgcttggcctcacttgggaagaacagcttgcccaatacgacatcatgctgaccgattcggaagaggtgaaacgcttctaccgtgcaggccctgcgggtattcgtaccacccaagcattctcgcaagattgccgctgggataccttggatgacgatcgcgcccaaggctgtattcgcaccaaagaaaacgcctttagccaagatggtggccttgctgtcctcaaaggcaatattgcgctggatggctgtatcgttaagacggcgggtgtggatgaaagcattctaaaattcactggccctgctgtggtttttgaaagccaagaagacgcggtggaaggtatcttgggtggcaaagtcaaagcgggcgatgtggtggtgattcgctacgaaggcccgaaaggcggcccaggcatgcaagagatgctctaccctaccacgtatttgaaatcgatgggtctaggcaaagcgtgcgcgctactgaccgacggacgtttctctggcggcacatcgggtctttccatcggccacgcctcaccagaagcggccaacggcggcgcgatcggtttggtcaaacagggcgacttgattgccatcgacattccaaatcgcacgatttctctgcaagtttccgatcaagaaatggcagagcgccgagcagaacaagacgcgcttggctggaaacccgtctctcgccaacgcgaagtgtcgtttgcactgaaagcctacgccagcatggcaaccagtgccgacaaaggtgcggtaagagacaagtcaaagcttgagggctaa

SEQ ID NO: 10667 - protein, 613 aa, Vibrio vulnificus
MPKYRSATTTHGRNMAGARALWRATGVKDEDFGKPIIAVVNSFTQFVPGHVHLKDLGQLVAREIEAAGGIAKEFNTIAVDDGIAMGHGGMLYSLPSRELIADSVEYMVNAHCADAMVCISNCDKITPGMLMASMRLNIPVIFVSGGPMEAGKTKLSDQIIKLDLVDAMIQGADPKVSDEQSEQIERSACPTCGSCSGMFTANSMNCLTEALGLSQPGNGSLLATHADRKQLFISAGQRIVELTKRYYEQDDESALPRNIATKAAFENAMALDIAMGGSTNTVLHLLAAAQEGEVDFDMTDIDRMSRMVPHLCKVAPSTQKYHMEDVHRAGGVVGILGELNRAGLLHNQSKTVLGLTWEEQLAQYDIMLTDSEEVKRFYRAGPAGIRTTQAFSQDCRWDTLDDDRAQGCIRTKENAFSQDGGLAVLKGNIALDGCIVKTAGVDESILKFTGPAVVFESQEDAVEGILGGKVKAGDVVVIRYEGPKGGPGMQEMLYPTTYLKSMGLGKACALLTDGRFSGGTSGLSIGHASPEAANGGAIGLVKQGDLIAIDIPNRTISLQVSDQEMAERRAEQDALGWKPVSRQREVSFALKAYASMATSADKGAVRDKSKLEG

SEQ ID NO: 10668 - DNA, 1842 bp, Vibrio vulnificus
  CDS (1)..(1842): transl_table=11
atgcctaaatacagatcagccaccaccactcatggtcgcaatatggccggtgcgcgcgcactatggcgtgctacgggcgtaaaagatgaagacttcggcaaaccgattattgccgtggtcaactcctttacccagttcgtaccgggccacgtgcacctgaaagaccttggtcaattggtggcgagagaaattgaagcagcaggcggcattgccaaagaattcaacaccatcgcggtggatgatggtatcgccatgggccacggaggcatgctttattcactgccttctcgtgaattgattgccgactcggtggagtacatggtcaacgcgcactgtgccgatgccatggtgtgtatctccaactgtgacaaaatcaccccgggaatgctgatggcgtcaatgcgccttaatatcccagtaatctttgtctcgggtggaccaatggaagcgggcaaaaccaagctttcggatcagatcatcaagctggatctggtcgatgccatgatccaaggcgcggatcctaaagtctcggatgagcagagcgaacagatcgagcgcagtgcttgccctacctgtggatcctgctcaggcatgttcaccgccaactcgatgaactgtctcaccgaagcacttggcctttctcagccaggtaacggctctttgctcgcaacgcatgccgatcgtaaacaactgtttatcagtgcaggccaacgtatcgtcgaactgaccaagcgttactacgaacaagatgatgaaagcgcactgccacgcaacattgcgaccaaagccgcgtttgaaaacgccatggcgctagacatcgccatgggcggttcaaccaacaccgttttacacctcttagctgcagcgcaagaaggtgaggtggattttgacatgacagacatcgatcgcatgtcacgcatggtgcctcacctatgtaaagtggcgccatcaacccagaaataccatatggaagatgtgcaccgcgcgggtggtgtggtcggtattttgggcgaacttaaccgcgctggcctgctgcacaatcaatcgaaaacggtgcttggcctcacttgggaagaacagcttgcccaatacgacatcatgctgaccgattcggaagaagtgaaacgcttctaccgtgcaggccctgcgggtattcgtaccactcaagcattctcgcaagattgccgctgggataccttggatgacgatcgcgcccaaggctgtattcgcaccaaagaaaacgcctttagccaagatggtggcctcgcggtcctcaaaggcaatattgcgctggatggctgtattgttaagacggcgggtgtggatgaaagcattctaaaattcacgggccctgcagtggtctttgaaagccaagaagacgcggtggaaggtatcttgggtggcaaagtcaaagcgggcgatgtggtggtgattcgctacgaaggcccgaaaggcggcccaggcatgcaagagatgctctaccctaccacgtatttgaaatcgatgggtctaggcaaagcgtgtgcgctactgaccgacggacgtttctctggcggcacgtctggtctttccatcggccacgcctcaccagaagcggccaacggcggcgcgatcggtttggtcaaacagggcgacttgattgccatcgacattccaaatcgcacgatttctctgcaagtttccgagcaagaaatggcagagcgccgtgcggaacaagacgcgcttggctggaaacccgtctctcgccaacgcgaagtgtcgtttgcgctgaaagcctacgccagcatggcaaccagtgccgataaaggcgcggtaagagacaagtcaaagcttgagggctaa

SEQ ID NO: 10669 - protein, 613 aa, Vibrio vulnificus
MPKYRSATTTHGRNMAGARALWRATGVKDEDFGKPIIAVVNSFTQFVPGHVHLKDLGQLVAREIEAAGGIAKEFNTIAVDDGIAMGHGGMLYSLPSRELIADSVEYMVNAHCADAMVCISNCDKITPGMLMASMRLNIPVIFVSGGPMEAGKTKLSDQIIKLDLVDAMIQGADPKVSDEQSEQIERSACPTCGSCSGMFTANSMNCLTEALGLSQPGNGSLLATHADRKQLFISAGQRIVELTKRYYEQDDESALPRNIATKAAFENAMALDIAMGGSTNTVLHLLAAAQEGEVDFDMTDIDRMSRMVPHLCKVAPSTQKYHMEDVHRAGGVVGILGELNRAGLLHNQSKTVLGLTWEEQLAQYDIMLTDSEEVKRFYRAGPAGIRTTQAFSQDCRWDTLDDDRAQGCIRTKENAFSQDGGLAVLKGNIALDGCIVKTAGVDESILKFTGPAVVFESQEDAVEGILGGKVKAGDVVVIRYEGPKGGPGMQEMLYPTTYLKSMGLGKACALLTDGRFSGGTSGLSIGHASPEAANGGAIGLVKQGDLIAIDIPNRTISLQVSEQEMAERRAEQDALGWKPVSRQREVSFALKAYASMATSADKGAVRDKSKLEG

SEQ ID NO: 10670 - DNA, 1680 bp, Wolinella succinogenes
  CDS (1)..(1680): transl_table=11
atgagaagtagcatcattaaagaggggtatcaaaaggcgccacaccgaagcttgctgagggcaacggggctcaaagacgaggattttggtaagccattcattggcgtggccaacagctatattgacatcattccgggtcactttttcttgcaagagtatggccgaatcattaaagaggagattagggccgcgggcggaatcccttttgagtttaacactatcggggtggatgatggaatcgccatggggcatgatggaatgctctatagtttgcccagtcgagagctgattgctgattgtattgagacggtgatgaatgcccataaactggacgccatgatctgtatccctaattgcgacaagattgtccctgggatgcttctgggggcactcagagtgaatgtgcccacggtgtttgtgagtggcggaccgatgaaggcaggtcgcctcaaggatggcaccaaagtggatttggcgagtgcttttgaggcggtgggtaaacgcgcgaggaatcagattagcgatgaagagctccgcgagattgagtgcgccgcctgtccggggggaggaagctgcagtggaatgttcacggcgaactccatgaacacactctgtgaagcgatgggagtggcgcttcccgggaatgggacgattccagccctcaccaaagagcgtgaggagctcatccgaaaagccgcaagaagaatcgtagaaatcgcactagatgagcgctacgccttccgcaatattctcaacaaagaggcgattcacaatgcttttgttgtggatatggcgatggggggaagcaccaataccgtacttcatatgatggccattgccaaagagagagaggcggattttgatttgcgcaaaatcaatgagatcgccaaagaggtgagtcatatcgccaaaatctcccctgcactctacactgtccacatggaagacatcaatagagccgggggcgtgaatgcggtcatgaatgagatcaatcgccgaggcggagtgctcaagacagaggcgctcaccgtgagtggcgagagcatgggtgagaggatcgcgggggcgaagattttagatacgcaaatcattcacacgcttgagaatccctatagcgcggtggggggattgaagattctttatggaaatcttgccgagcagggcgctgtgctcaagaccgctgccatggacgctaagatgagaaaattcactggaaaggcagtctgctttgattctcaagaggaggcgatcgcaggtattgtcgggggcaaggtcaaagagggggatgtggtggtgatccgctacgaaggacccaaggggggaccgggaatgcaggagatgctaagtcccacaagcctcatcatggggatgaatttaggagacaaagtcgcgctcattaccgatggccgtttcagcggcgccacgcgtggcgcttgcatcgggcatgtgagtcccgaagcggccgaagggggaatgatcggactgcttcaagagggcgatcttattcgaatcgatgtcgaagaaggggttttggaggtgttgcttgaggaggcggagatccaaaagcgacgcgcctcctttagtcctaaaactaaaaccgttgcctccaagtggctcaaacgctaccagcttctcgtgagcaatgccgcttcaggcgctattttgaaaacggagctataa

SEQ ID NO: 10671 - protein, 559 aa, Wolinella succinogenes
MRSSIIKEGYQKAPHRSLLRATGLKDEDFGKPFIGVANSYIDIIPGHFFLQEYGRIIKEEIRAAGGIPFEFNTIGVDDGIAMGHDGMLYSLPSRELIADCIETVMNAHKLDAMICIPNCDKIVPGMLLGALRVNVPTVFVSGGPMKAGRLKDGTKVDLASAFEAVGKRARNQISDEELREIECAACPGGGSCSGMFTANSMNTLCEAMGVALPGNGTIPALTKEREELIRKAARRIVEIALDERYAFRNILNKEAIHNAFVVDMAMGGSTNTVLHMMAIAKEREADFDLRKINEIAKEVSHIAKISPALYTVHMEDINRAGGVNAVMNEINRRGGVLKTEALTVSGESMGERIAGAKILDTQIIHTLENPYSAVGGLKILYGNLAEQGAVLKTAAMDAKMRKFTGKAVCFDSQEEAIAGIVGGKVKEGDVVVIRYEGPKGGPGMQEMLSPTSLIMGMNLGDKVALITDGRFSGATRGACIGHVSPEAAEGGMIGLLQEGDLIRIDVEEGVLEVLLEEAEIQKRRASFSPKTKTVASKWLKRYQLLVSNAASGAILKTEL

SEQ ID NO: 10672 - DNA, 1839 bp, Xanthomonas axonopodis pv
  CDS (1)..(1839): transl_table=11
atgcccgagtaccgttccaaaacctccacccacggccgcaacatggccggcgcccgcgccctgtggcgtgccaccggcatgcgcgatggcgacttccacaagcccatcatcgccatcgccaactcgttcacgcagttcgtgcccgggcatgtacacctgaaggatcttggccagctggtcgcgcgcgagatcgaacgcgtcggcggcgtggccaaagagttcgacaccatcgccgtggacgacggcatcgcgatgggccatgacggcatgctgtattcgctgcccagccgcgagatcatcgccgactcggtcgaatacatggtcaacgcgcattgcgccgacgcgctggtgtgcatctccaactgcgacaagatcacccccggcatgttgatggccgcgctgcggctcaatatccccaccgtgttcgtctccggcggcccgatggaagccggcaagaccaagctggccgagcacaagctcgacctgatcgatgcgatggtgattgccgccgacgacagcgcctccgacgaaaaagtggccgagttcgaacgcagcgcctgccccacctgcggctcgtgctcgggcatgttcaccgccaactcgatgaactgcctgaccgaagcgctgggcctgtcgctgccgggcaacggcaccgtggtcgccacgcacgcggaccgcgagcaactgtttctgcgcgccggacgcgtggcggtggaactgtgtcaccgctggtacggcggcgaagatcccaccgccctgccgcgcggcatcgccaccttcgaagccttcgaaaatgcgatgaccctggacatcgccatgggtggctcgaccaataccatcctgcacctgctcgccgccgcgcaggaaggcgaggttgccttcggcatgcaggatatcgaccgcttgtccaagcgcgtgccgcaactgtgcaaggtcgcaccgaatacgcccaagtaccacatcgaagatgtgcatcgcgccggcggcatcatggccattctcggtgaactcgcacgcggcggcctgctgcataccaacgccgccaccgtgcacgcacgcacgctggccgatgccatcgcgcaatgggatgtcacccagaccgacgatgaaaacgtacacacgttctacaaagccggcccggccggcattcccacgcagatcgccttcagccaggcaacgcgttgggacagcctggataccgaccgcagcgacggctgcatccgcgatgtcgcacatgcgttctcgcaggaaggcggcctggccgtgctgtacggcaatatcgcccgcgacggctgcgtggtgaagactgcaggcgtggacgaatccatccacgtgttcgaaggcactgcccgcgtgttcgagagccaggatgctgctgtgaaaggcatcctcgccgatgaggtggtcgcaggtgatgtggtggtcatccgctacgaaggccccaagggcggccccggcatgcaggaaatgctctaccccaccagctatctcaaatccaagggcctgggcaaacaatgcgccctgctcaccgacggccgcttctccggcggcacctcggggttatcgattggtcacgcatcgccggaagccgccgcaggcggcgcgatcggcctggtgcgcgaaggcgacaggatcctgatcgacattcccaatcgttcgatcaacctgctgatttcggacgaggaactcgcgcttcgtcgcgccgagcaggacgccaagggctggaagccggtggaggtgcgcccacgcaaggtcaccaccgcgttgaaggcgtatgcgttgctggcgaccagtgcggacaagggtgcggtccgggataaggcgctgctggacggttag

SEQ ID NO: 10673 - protein, 612 aa, Xanthomonas axonopodis pv
MPEYRSKTSTHGRNMAGARALWRATGMRDGDFHKPIIAIANSFTQFVPGHVHLKDLGQLVAREIERVGGVAKEFDTIAVDDGIAMGHDGMLYSLPSREIIADSVEYMVNAHCADALVCISNCDKITPGMLMAALRLNIPTVFVSGGPMEAGKTKLAEHKLDLIDAMVIAADDSASDEKVAEFERSACPTCGSCSGMFTANSMNCLTEALGLSLPGNGTVVATHADREQLFLRAGRVAVELCHRWYGGEDPTALPRGIATFEAFENAMTLDIAMGGSTNTILHLLAAAQEGEVAFGMQDIDRLSKRVPQLCKVAPNTPKYHIEDVHRAGGIMAILGELARGGLLHTNAATVHARTLADAIAQWDVTQTDDENVHTFYKAGPAGIPTQIAFSQATRWDSLDTDRSDGCIRDVAHAFSQEGGLAVLYGNIARDGCVVKTAGVDESIHVFEGTARVFESQDAAVKGILADEVVAGDVVVIRYEGPKGGPGMQEMLYPTSYLKSKGLGKQCALLTDGRFSGGTSGLSIGHASPEAAAGGAIGLVREGDRILIDIPNRSINLLISDEELALRRAEQDAKGWKPVEVRPRKVTTALKAYALLATSADKGAVRDKALLDG

SEQ ID NO: 10674 - DNA, 1839 bp, Xanthomonas oryzae pv
  CDS (1)..(1839): transl_table=11
atgcccgagtaccgctccaagacctccacccacggccgcaacatggccggcgcccgcgccctgtggcgtgccaccggcatgcaggacggcgacttccagaagcccatcatcgccatcgccaattcgttcacgcagttcgtgcccgggcatgtgcacctgaaggatcttgggcagctggtcgcgcgcgagatcgaacgcgtcggcggcgtggccaaggagttcgacaccattgccgtggacgacggcatcgcgatgggccacgacggcatgctgtattcgttgcccagccgcgagatcatcgccgactcggtcgagtacatggtcaatgcgcattgcgccgatgcgctggtgtgcatttccaattgcgacaagatcacccccggcatgttgatggccgcgctgcggctcaatattcccaccgtgttcgtctccggtggcccgatggaggccggcaagaccgcgttggccgagcacaaactcgacctgatcgacgcgatggtgatcgccgccgacgacagcgcctccgatgaaaaggtggccgagttcgaacgcagcgcctgccccacctgtggctcctgctcgggcatgttcaccgccaactcgatgaactgcctgaccgaagcgctgggcctgtcgctgccgggcaacggcacggttgtcgccacgcacgccgaccgcgagcaactgtttttgcgcgccggacgcgtggcggtggaactgtgtcaccgctggtacggcggcgaagatcccaccgccctgccgcgcggcatcgccaccttcgaagccttcgaaaatgcgatgacgctggatatcgccatgggtggctcgaccaacaccatcctgcatctgctcgctgccgcgcaggaaggcgaagtgccgttcggcatgcaggatatcgaccgcctgtccaagcgcgtgccgcagttgtgcaaggtcgccccgaacacgccgaagtaccacatcgaagacgtgcatcgcgccggcggcatcatggccattctcggcgaactcgcgcgcggcggcctgctgcataccaccgctgccaccgtgcacgcacgcacgctggccgatgccatcgcgcactgggacgtcacccagaccgtcgatgaaaacgtgcacacgttctacaaggccggcccggccggcattcccacgcaaatcgccttcagccaggccacgcgttgggacagcctggataccgaccgcagcgaaggctgcattcgcgatgtcgcgcacgcgttgtcgcaggaaggcggcctggccgtgctgtacggcaatatcgcccgcgatggctgcgtggtgaagactgcaggcgtggacgaatccatccacgtgttcgaaggcaccgcgcgcgtgttcgagagccaggatgctgctgtgaaaagcatcctcgccgatgaagtgaaagccggcgatgtggtggtgattcgctacgaaggccccaagggcggccccggcatgcaggaaatgctctaccccaccagttacctgaaatccaagggcctgggcaaacaatgcgccctgctcaccgacggccgcttctctggcggcacttcgggattatcgatcggccacgcctccccagaagccgccgcaggcggcgcgatcggcctggtgcgcgacggcgacaagatcctgatcgacattcccaatcgtggaatcaacctgctgatttccgatgaagcacttgccagccgccgcgccgagcaggatgccaaaggctggaagccggtcgaagtgcgcccgcgcaaggtgaccactgcgttgaaagcgtatgcgctgctggccaccagtgcggataagggtgcggtgcgggataaggcgttgttggacggctga

SEQ ID NO: 10675 - protein, 612 aa, Xanthomonas oryzae pv
MPEYRSKTSTHGRNMAGARALWRATGMQDGDFQKPIIAIANSFTQFVPGHVHLKDLGQLVAREIERVGGVAKEFDTIAVDDGIAMGHDGMLYSLPSREIIADSVEYMVNAHCADALVCISNCDKITPGMLMAALRLNIPTVFVSGGPMEAGKTALAEHKLDLIDAMVIAADDSASDEKVAEFERSACPTCGSCSGMFTANSMNCLTEALGLSLPGNGTVVATHADREQLFLRAGRVAVELCHRWYGGEDPTALPRGIATFEAFENAMTLDIAMGGSTNTILHLLAAAQEGEVPFGMQDIDRLSKRVPQLCKVAPNTPKYHIEDVHRAGGIMAILGELARGGLLHTTAATVHARTLADAIAHWDVTQTVDENVHTFYKAGPAGIPTQIAFSQATRWDSLDTDRSEGCIRDVAHALSQEGGLAVLYGNIARDGCVVKTAGVDESIHVFEGTARVFESQDAAVKSILADEVKAGDVVVIRYEGPKGGPGMQEMLYPTSYLKSKGLGKQCALLTDGRFSGGTSGLSIGHASPEAAAGGAIGLVRDGDKILIDIPNRGINLLISDEALASRRAEQDAKGWKPVEVRPRKVTTALKAYALLATSADKGAVRDKALLDG

SEQ ID NO: 10676 - DNA, 1833 bp, Xylella fastidiosa
  CDS (1)..(1833): transl_table=11
atgcctgagtaccgatccaagacttccacctacggccgcaatatggctggtgcacgtgcgttatggcgcgctaccggcatgaaggatgacgacttccagaagccgatcatcgcgattgctaattctttcactcaattcgtcccaggacacgttcatctaaaggatcttggccagctagtcgcacgtgaaattgagcgtctcggtggtgtggccaaagaattcaatacgattgcggtagatgacggtatcgcgatggggcacgacggaatgctgtattcgctacccagtcgtgaaatcatcgccgactccgtcgaatacatggcaaacgcgcattgtgctgatgcgctggtatgcatctccaactgcgacaaaatcactcctggcatgctgatggcatcactccgcctgaacatcccaacggtgttcgtctcaggtgggccgatggaagccggaaaaacgaaactgactgatcacaaactcgacctagttgacgcaatggtgctggctgccgaccctcacgcgagtgacgaggaagttgctgccgtggaacgcagtgcctgccccacttgcggttcatgttcgggcatgtttactgccaactcgatgaactgtctcaccgaagcactcggtttatccttgccaggtaacggaactgtcgttgcgacacattctgaccgtaaacaactgtttttgaacgcgggacgcactgtcattgagttatgtcaccgctggtatgggaacgaagatgccaccgcattacctcgaggcattgctacattcgctgcgttcgaaaacgcgataaccctagatatcgcgatgggcggctcgactaatacgattttacacctgcttgcagccgcacaggaggcggaagtgccttttacgatgcaagacattgatcgcttgtcgcggaatgtgccgcaattatgcaaagttgcccccaacacgcagaaataccacattgaggatgtgcaccgcgctggaggcatcttcgggattctagctgaattagcacggggaaacttgttacataccgacgtcgcaaccgtacatagcaaaaccctgggtgaggccatcgccacatgggacattatcgggacgcaggatgaagcggtgcatacgttttataaagcaggtccagcaggcatctcaacccaagtggccttcagtcaaagtacgcgttggccgtcactcgatactgatcgcaccgagggctgcatccgtgacatggaacatgcgttctcgaaggaaggaggcttggcagtgctctatggcaacattgcccaggatggctgcgtcgtaaagaccgccggtgtagacgcatcgatccatgtgttcgagggttcggccctggtgtacgaaagccaggaggcagcggtcaaaggaatccttagcgacgaggtacaaccaggcatgatcgtcgtgattcgctacgaaggccccaagggcggccctggcatgcaggagatgctgtatccaacgtcgtatttgaagtccaaaggtctcgggaagcaatgtgctctattcaccgatggccggttttctggcgggacctcaggtttatcgattggccacgcttcacccgaggccgcagcaggtggtgctattggcctcatccgcgatggcgaccgtatccgcatcgacattccacagcgcgcgatcaatgtgctcatcagcgaagaggagttggcttcacggcgcctcgaacaacatgccatcggctggaagccggcccagtcacggacgcgtaaggtcagcagtgcgctgaaggcgtatgcattacttgcaaccagcgccgacaagggggccgtacgcaacaaaacgctactttga

SEQ ID NO: 10677 - protein, 610 aa, Xylella fastidiosa
MPEYRSKTSTYGRNMAGARALWRATGMKDDDFQKPIIAIANSFTQFVPGHVHLKDLGQLVAREIERLGGVAKEFNTIAVDDGIAMGHDGMLYSLPSREIIADSVEYMANAHCADALVCISNCDKITPGMLMASLRLNIPTVFVSGGPMEAGKTKLTDHKLDLVDAMVLAADPHASDEEVAAVERSACPTCGSCSGMFTANSMNCLTEALGLSLPGNGTVVATHSDRKQLFLNAGRTVIELCHRWYGNEDATALPRGIATFAAFENAITLDIAMGGSTNTILHLLAAAQEAEVPFTMQDIDRLSRNVPQLCKVAPNTQKYHIEDVHRAGGIFGILAELARGNLLHTDVATVHSKTLGEAIATWDIIGTQDEAVHTFYKAGPAGISTQVAFSQSTRWPSLDTDRTEGCIRDMEHAFSKEGGLAVLYGNIAQDGCVVKTAGVDASIHVFEGSALVYESQEAAVKGILSDEVQPGMIVVIRYEGPKGGPGMQEMLYPTSYLKSKGLGKQCALFTDGRFSGGTSGLSIGHASPEAAAGGAIGLIRDGDRIRIDIPQRAINVLISEEELASRRLEQHAIGWKPAQSRTRKVSSALKAYALLATSADKGAVRNKTLL

SEQ ID NO: 10678 - DNA, 1833 bp, Xylella fastidiosa
  CDS (1)..(1833): transl_table=11
atgcctgagtaccgatccaaaacttccacctacggccgcaatatggctggtgcgcgtgcgttatggcgcgctaccggcatgaaggatgacgacttccagaagccgatcatcgcgattgctaattctttcactcaattcgtcccagggcacgttcatctaaaggatcttggccagctagtcgcacgtgaaattgagcgtctcggtggtgtagccaaagaattcaacacgattgcggtagatgacggtatcgcgatggggcacgacggaatgctgtattcgctacctagtcgtgaaatcatcgccgactccgtcgaatacatggcaaacgcgcattgtgctgatgcgctggtatgcatctccaactgcgacaaaatcactcctggcatgctgatggcatcgctccgcctgaacatcccaacggtgttcgtctcaggtgggccgatggaagccggaaaaacgacactggctgatcacaaactcgacctagttgacgcaatggtgctggctgccgaccctcacgcgagtgacgaggaagttgctaccgtggaacgcagtgcctgccccacttgcggttcatgttcgggcatgtttactgccaactcgatgaactgtctcaccgaagcactcggtttatccttgccaggtaacgggactgtcgttgcgacgcattctgaccgtaaacaactgtttttgaacgcaggacgcactgtcattgagttatgtcaccgctggtatggggctgaagatgccaccgcattacctcgaggcattgctacatttgctgcgttcgaaaacgcgataaccctagatatcgcgatgggcggctcgactaatacgattttgcacctacttgcagccgcacaggaggcggaagtgtcttttacgatgcaagacattgatcgcttgtcacggaatgtgccgcaattatgcaaagttgctcccaacacgcagaaataccatattgaggatgtgcaccgcgctggaggcatcttcgggattctagctgaattggcacggggaaacttgttacatactgacgtcgcaaccgtacatagcaaaaccctgggtgaggccatcgccacatgggacattatcgggacgcaggatgaagcggtccatacgttttataaagcaggttcagcaggcatcccaacccaggtggccttcagtcaaagtacgcgttggccgtcactcgatactgatcgtaccgaaggctgcatccgtgacatggagcatgcgttctcgaaggaaggaggcttggcagtgctctatggcaacattgcccaggatggctgcgtcgtaaagaccgccggtgtagacgcatcaatccatgtgttcgaaggttcggccctggtgtacgaaagccaggaggcagcggtcaaaggaatccttagcgacgaggtacaaccaggcatgatcgtcgtgattcgctacgaaggccccaagggcggccctggcatgcaggagatgctgtatccaacgtcgtatttgaagtccaaaggtctcgggaagcaatgtgctctattcaccgatggccggttttctggcgggacctcaggtttatcaattggccacgcttcacccgaagccgcagcaggtggtgctattggcctcatccgggatggcgaccgtatccgcatcgacattccacagcgcgcgatcaatgtgctcatcagcgaagaggagttggcttcacggcgcctcgaacaacatgccatcggctggaagccggcccagtcacggacgcgtaaggtcagcagtgctctgaaggcgtatgcattacttgcaaccagcgccgacaagggggccgtacgcaacaaaacgctactttga

SEQ ID NO: 10679 - protein, 610 aa, Xylella fastidiosa
MPEYRSKTSTYGRNMAGARALWRATGMKDDDFQKPIIAIANSFTQFVPGHVHLKDLGQLVAREIERLGGVAKEFNTIAVDDGIAMGHDGMLYSLPSREIIADSVEYMANAHCADALVCISNCDKITPGMLMASLRLNIPTVFVSGGPMEAGKTTLADHKLDLVDAMVLAADPHASDEEVATVERSACPTCGSCSGMFTANSMNCLTEALGLSLPGNGTVVATHSDRKQLFLNAGRTVIELCHRWYGAEDATALPRGIATFAAFENAITLDIAMGGSTNTILHLLAAAQEAEVSFTMQDIDRLSRNVPQLCKVAPNTQKYHIEDVHRAGGIFGILAELARGNLLHTDVATVHSKTLGEAIATWDIIGTQDEAVHTFYKAGSAGIPTQVAFSQSTRWPSLDTDRTEGCIRDMEHAFSKEGGLAVLYGNIAQDGCVVKTAGVDASIHVFEGSALVYESQEAAVKGILSDEVQPGMIVVIRYEGPKGGPGMQEMLYPTSYLKSKGLGKQCALFTDGRFSGGTSGLSIGHASPEAAAGGAIGLIRDGDRIRIDIPQRAINVLISEEELASRRLEQHAIGWKPAQSRTRKVSSALKAYALLATSADKGAVRNKTLL

SEQ ID NO: 10680 - DNA, 1851 bp, Yersinia pestis
  CDS (1)..(1851): transl_table=11
atgcctaagtaccgttcccataccaccacccatggccgcaatatggccggcgcccgcgcactgtggcgcgcaaccggtatgaccgatgatgacttcggcaaaccgattattgcagtcgttaactcctttacccaatttgtaccgggccacgtacatttgcgcgatttaggcaagctggttgcggagcaaattgtagcttctggcggtgtggctaaagagttcaacaccattgcggtggatgatggtatcgcgatgggccacggtggcatgctctactctctgccatcgcgtgaattgatcgccgactccgttgagtacatggttaacgcccactgtgcggatgccatggtgtgtatctctaactgtgacaaaattaccccagggatgctgatggcgtctctgcgcctgaatattccggtgatctttgtgtctggtggcccgatggaagccggtaagaccaagctgtcagataaaatcatcaagctggatttgatcgatgccatgattcagggtgcgaatcctaatgtgagcgatgaagagagcgcccagattgagcgttctgcttgcccgacctgtggttcttgctccggtatgtttacggctaactcgatgaactgcctgaatgaagcgctgggtctggcgttgccgggtaacggttcattgttggcaacccacgctgaccgtaagcaactgttcttggatgcgggtaaacacattgttgccttgaccaaacgttattatgaacaagatgacgtcagcgccttgccacgcaacatcgcgaataaagcggcctttgaaaacgccatgatattggatatcgccatgggcggttccacgaataccgtattgcatttgctggcggcggcgcaggaaggtgaaattgatttcagcatgaccgatatcgatcacctgtcccgtaaagtcccacatttgtgcaaagtggccccgagtactcagaaataccacatggaagatgtgcaccgtgcggggggggtcattggtattttaggtgagttggatcgcgctggtttgcttaaccgcgatgtcagtaacgtgttggggctgaatctgacacaaacgctggaagcctatgacgtgatgctgactcaggatgaaggcgtgaagcagatgtacgccgcaggcccagccggtattcgcaccactaaagcgttctcacaggattgccgttatccgtcactggataccgatcgcgaagagggttgtatccgtacccgtgaacatgcctacagccaggatggtggtttagcggtgttgtacggcaatattgcggcagacggctgtattgttaaaactgcgggtgttgataaagacagcctgacgttccgtggcccggcgaaagtatttgagagccaggatgaggcggtagaggcgatcctcggtggtaaagttgtggcgggtgatgtggttgttatccgttatgaagggccaaaaggggggccgggtatgcaggaaatgctctatccgaccacttatctgaaatccatggggttgggcaagagttgtgccttactgaccgatggccgtttctctggcgggacatccggtttgtctatcggccatgtgtctccagaagccgccagtggtgggttgattggtttggtacaagatggcgatttcatcaatatcgatattccgaaccgtggcattgtcttggatgttagcgaagctgaactggctgctcgccgtgaaactgaagaagcgcatggtgatgcggcctggtcaccgaagggccgtgagcgccaggtctcttatgccttacgcgcttacgcgatgttagcaaccagcgctgataaaggcgcggtgcgcgataaaagtaagctgggaggctaa

SEQ ID NO: 10681 - protein, 616 aa, Yersinia pestis
MPKYRSHTTTHGRNMAGARALWRATGMTDDDFGKPIIAVVNSFTQFVPGHVHLRDLGKLVAEQIVASGGVAKEFNTIAVDDGIAMGHGGMLYSLPSRELIADSVEYMVNAHCADAMVCISNCDKITPGMLMASLRLNIPVIFVSGGPMEAGKTKLSDKIIKLDLIDAMIQGANPNVSDEESAQIERSACPTCGSCSGMFTANSMNCLNEALGLALPGNGSLLATHADRKQLFLDAGKHIVALTKRYYEQDDVSALPRNIANKAAFENAMILDIAMGGSTNTVLHLLAAAQEGEIDFSMTDIDHLSRKVPHLCKVAPSTQKYHMEDVHRAGGVIGILGELDRAGLLNRDVSNVLGLNLTQTLEAYDVMLTQDEGVKQMYAAGPAGIRTTKAFSQDCRYPSLDTDREEGCIRTREHAYSQDGGLAVLYGNIAADGCIVKTAGVDKDSLTFRGPAKVFESQDEAVEAILGGKVVAGDVVVIRYEGPKGGPGMQEMLYPTTYLKSMGLGKSCALLTDGRFSGGTSGLSIGHVSPEAASGGLIGLVQDGDFINIDIPNRGIVLDVSEAELAARRETEEAHGDAAWSPKGRERQVSYALRAYAMLATSADKGAVRDKSKLGG

SEQ ID NO: 10682 - DNA, 1851 bp, Yersinia pseudotuberculosis
  CDS (1)..(1851): transl_table=11
atgcctaagtaccgttcccataccaccacccatggccgcaatatggccggcgcccgcgcactgtggcgcgcaaccggtatgaccgatgatgacttcggcaaaccgattattgcagtcgttaactcctttacccaatttgtaccgggccacgtacatttgcgcgatttaggcaagctggttgcggagcaaattgtagcttctggcggtgtggctaaagagttcaacaccattgcggtggatgatggtatcgcgatgggccacggtggcatgctctactctctgccatcgcgtgaattgatcgccgactccgttgagtacatggttaacgcccactgtgcggatgccatggtgtgtatctctaactgtgacaaaattaccccagggatgctgatggcgtctctgcgcctgaatattccggtgatctttgtgtctggtggcccgatggaagccggtaagaccaagctgtcagataaaatcatcaagctggatttgatcgatgccatgattcagggtgcgaatcctaatgtgagcgatgaagagagcgcccagattgagcgttctgcttgcccgacctgtggttcttgctccggtatgtttacggctaactcgatgaactgcctgaatgaagcgctgggtctggcgttgccgggtaacggttcattgttggcaacccacgctgaccgtaagcaactgttcttggatgcgggtaaatacattgttgccttgaccaaacgttattatgaacaagatgacgtcagcgccttgccacgcaacatcgcgaataaagcggcctttgaaaacgccatgatattggatatcgccatgggcggttccacgaataccgtattgcatttgctggcggcggcgcaggaaggtgaaattgatttcagcatgaccgatatcgatcgcctgtcccgtaaagtcccacatttgtgcaaagtggccccgagtactcagaaataccacatggaagatgtgcaccgtgcggggggggtcattggtattttaggtgagttggatcgcgctggtttgcttaaccgcgatgtcagtaacgtgttggggctgaatctgacacaaacgctggaagcctatgacgtgatgctgactcaggatgaaggcgtgaagcagatgtacgccgcaggcccagccggtattcgcaccactaaagcgttctcacaggattgccgttatccgtcactggataccgatcgcgaagagggttgtatccgtacccgtgaacatgcctacagccaggatggtggtttagcggtgttgtacggcaatattgcggcagacggctgtattgttaaaactgcgggtgttgataaagacagcctgacgttccgtggcccggcgaaagtatttgagagccaggatgaggcggtagaggcgatcctcggtggtaaagttgtggcgggtgatgtggttgttatccgttatgaagggccaaaaggggggccgggtatgcaggaaatgctctatccgaccacttatctgaaatccatggggttgggcaagagttgtgccttactgaccgatggccgtttctctggcgggacatccggtttgtctatcggccatgtgtctccagaagccgccagtggtgggttgattggtttggtacaagatggcgatttcatcaatatcgatattccgaaccgtggcattgtcttggatgttagcgaagctgaactggctgctcgccgtgaaactgaagaagcgcatggtgatgcggcctggtcaccgaagggccgtgagcgccaggtctcttatgccttacgcgcttacgcgatgttagcaaccagcgctgataaaggcgcggtgcgcgataaaagtaagctgggaggctaa

SEQ ID NO: 10683 - protein, 616 aa, Yersinia pseudotuberculosis
MPKYRSHTTTHGRNMAGARALWRATGMTDDDFGKPIIAVVNSFTQFVPGHVHLRDLGKLVAEQIVASGGVAKEFNTIAVDDGIAMGHGGMLYSLPSRELIADSVEYMVNAHCADAMVCISNCDKITPGMLMASLRLNIPVIFVSGGPMEAGKTKLSDKIIKLDLIDAMIQGANPNVSDEESAQIERSACPTCGSCSGMFTANSMNCLNEALGLALPGNGSLLATHADRKQLFLDAGKYIVALTKRYYEQDDVSALPRNIANKAAFENAMILDIAMGGSTNTVLHLLAAAQEGEIDFSMTDIDRLSRKVPHLCKVAPSTQKYHMEDVHRAGGVIGILGELDRAGLLNRDVSNVLGLNLTQTLEAYDVMLTQDEGVKQMYAAGPAGIRTTKAFSQDCRYPSLDTDREEGCIRTREHAYSQDGGLAVLYGNIAADGCIVKTAGVDKDSLTFRGPAKVFESQDEAVEAILGGKVVAGDVVVIRYEGPKGGPGMQEMLYPTTYLKSMGLGKSCALLTDGRFSGGTSGLSIGHVSPEAASGGLIGLVQDGDFINIDIPNRGIVLDVSEAELAARRETEEAHGDAAWSPKGRERQVSYALRAYAMLATSADKGAVRDKSKLGG

SEQ ID NO: 10684 - DNA, 1857 bp, Zymomonas mobilis
  CDS (1)..(1857): transl_table=11
atgcctccctatcgttccagaaccacgactcatggtcgtaatatggcgggtgccagaagtttatggcgcgcaaccggcgtcaaaaatgaagattttggtaagccgattatcgctgttgccaacagctttacgcaatttgtccccggtcatgtccatttaaaggatatgggacagcttgttgctgaagaaattgaaaaagctggcggtatcgccaaagaattcaatacgattgcgattgatgatggtatcgcgatgggacatggcgggatgctttattccttgccgtctcgggaattgattgccgattccgtcgaatatatggtcaacgcccattgtgctgatgctttggtctgtatttccaactgcgacaagattacgcctggtatgttgatggcttcgatgcgcctgaatatcccgacagttttcgtctctggtggacctatggaagccggtaaagccgaggtcaaaggcgtcaagcgggcgcttgatctgatcgatgctatggtgattgctgccgatgaccattacagcgatggtgaagtcgaagttatcgagcagacggcttgcgctacctgcggttcctgttccggtatgtttacggccaattcgatgaattgcctgaccgaggccttggggctttctttcccaggtaatggttcgatgcttgcgacccatagcgatcgggaacagcttttccgcaaggctgggcataccattgttgatatggcgcgcagctattatgagcaggatgatgccgctgtattaccgcgttcaattgccacgcttgaggcttttgaaaatgcgatgagtcttgatatcgccatgggtggttccaccaatacggttttgcatctgttggcggtcgcgcaggaaggcaacgtgcctttcactatggcggatattgatcgtctttcccgtcatgtcccttgcttatgcaaggtcgcaccggccaaaaatgatgtccatatggaagatgttcatcgggcagggggcgttatggccattttaggccagcttgatcgtgccggattgatcaataccagcttgcgcaccattcattctccgactttaggcgcagcattggacgcatgggatatcagccgtgacagttgttctgaagaagcgcagttattctatcgcgcggctccggggggtgttccgactcaaaaggctttcagccagtcttctcgctatgaagcgctggatactgaccgcgaaaaaggtgtgattcgttctaaaaatcatgctttttcgacggatggtggtctggccgtcttatttggcaatcttgctcctgaaggcagtattgtcaaaactgccggtgtggatgagtctattctgaaattcaccggtaaagccaaggtttacgaaagtcaggaagccgccgttgccggtattcttggcaatgatgtcgaagctggtgaagtggtgatcgttcgctatgaaggtcccaaaggtggccccggtatgcaggaaatgctgtatccgaccagctatctgaaatcgaaaggtttgggtaaactctgcgctctgattaccgatggtcgtttttctggtggtagctctggtttatccatcggccatgtttctcctgaagcggccgagggcggcttgatcgctttggtcgaaaccggtgatacaattgttatcgatattcctgaacggattatccatctggatgttgatgatgctgttattgccgatcgtcatgcccgcatggaagccaagggggcggcagcatggaaaccgcaaaaccgtaatcgtccgatttcttcggctttgaaagcctatgcagctttgacgacaaacgctgcccgtggggcagttcgagatgtcaatcagctcgaacggcgttaa

SEQ ID NO: 10685 - protein, 618 aa, Zymomonas mobilis
MPPYRSRTTTHGRNMAGARSLWRATGVKNEDFGKPIIAVANSFTQFVPGHVHLKDMGQLVAEEIEKAGGIAKEFNTIAIDDGIAMGHGGMLYSLPSRELIADSVEYMVNAHCADALVCISNCDKITPGMLMASMRLNIPTVFVSGGPMEAGKAEVKGVKRALDLIDAMVIAADDHYSDGEVEVIEQTACATCGSCSGMFTANSMNCLTEALGLSFPGNGSMLATHSDREQLFRKAGHTIVDMARSYYEQDDAAVLPRSIATLEAFENAMSLDIAMGGSTNTVLHLLAVAQEGNVPFTMADIDRLSRHVPCLCKVAPAKNDVHMEDVHRAGGVMAILGQLDRAGLINTSLRTIHSPTLGAALDAWDISRDSCSEEAQLFYRAAPGGVPTQKAFSQSSRYEALDTDREKGVIRSKNHAFSTDGGLAVLFGNLAPEGSIVKTAGVDESILKFTGKAKVYESQEAAVAGILGNDVEAGEVVIVRYEGPKGGPGMQEMLYPTSYLKSKGLGKLCALITDGRFSGGSSGLSIGHVSPEAAEGGLIALVETGDTIVIDIPERIIHLDVDDAVIADRHARMEAKGAAAWKPQNRNRPISSALKAYAALTTNAARGAVRDVNQLERR

SEQ ID NO: 10686 - DNA, 1968 bp, Escherichia coli
  CDS (1)..(1968): transl_table=11
atgaccattgagaaaattttcaccccgcaggacgacgcgttttatgcggtgatcacccacgcggcggggccgcagggcgctctgccgctgaccccgcagatgctgatggaatctcccagcggcaacctgttcggcatgacgcagaacgccgggatgggctgggacgccaacaagctcaccggcaaagaggtgctgattatcggcactcagggcggcatccgcgccggagacggacgcccaatcgcgctgggctaccacaccgggcattgggagatcggcatgcagatgcaggcggcggcgaaggagatcacccgcaatggcgggatcccgttcgcggccttcgtcagcgatccgtgcgacgggcgctcgcagggcacgcacggtatgttcgattccctgccgtaccgcaacgacgcggcgatcgtgtttcgccgcctgatccgctccctgccgacgcggcgggcggtgatcggcgtagcgacctgcgataaagggctgcccgccaccatgattgcgctggccgcgatgcacgacctgccgactattctggtgccgggcggggcgacgctgccgccgaccgtcggggaagacgcgggcaaggtgcagaccatcggcgcgcgtttcgccaaccacgaactctccctgcaggaggccgccgaactgggctgtcgcgcctgcgcctcgccgggcggcgggtgtcagttcctcggcacggcgggcacctcgcaggtggtcgcggaggcgctgggtctggcgctgccgcactccgcgctggcgccgtccgggcaggcggtgtggctggagatcgcccgccagtcggcgcgcgcggtcagcgagctggatagccgcggcatcaccacgcgggatatcctctccgataaagccatcgaaaacgcgatggtgatccacgcggcgttcggcggctccaccaatttactgctgcacattccggccatcgcccacgcggcgggctgcacgatcccggacgttgagcactggacgcgcatcaaccgtaaagtgccgcgtctggtgagcgtgctgcccaacggcccggactatcacccgaccgtgcgcgccttcctcgcgggcggcgtgccggaggtgatgctccacctgcgcgacctcggcctgctgcatctggacgccatgaccgtgaccggccagacggtgggcgagaaccttgaatggtggcaggcgtccgagcgccgggcgcgcttccgccagtgcctgcgcgagcaggacggcgtagagccggatgacgtgatcctgccgccggagaaggcaaaagcgaaagggctgacctcgacggtctgcttcccgacgggcaacatcgctccggaaggttcggtgatcaaggccacggcgatcgacccgtcggtggtgggcgaagatggcgtataccaccacaccggccgggtgcgggtgtttgtctcggaagcgcaggcgatcaaggcgatcaagcgggaagagattgtgcagggcgatatcatggtggtgatcggcggcgggccgtccggcaccggcatggaagagacctaccagctcacctccgcgctaaagcatatctcgtggggcaagacggtgtcgctcatcaccgatgcgcgcttctcgggcgtgtcgacgggcgcctgcttcggccacgtgtcgccggaggcgctggcgggcgggccgattggcaagctgcgcgataacgacatcatcgagattgccgtggatcgtctgacgttaactggcagcgtgaacttcatcggcaccgcggacaacccgctgacgccggaagagggcgcgcgcgagctggcgcggcggcagacgcacccggacctgcacgcccacgactttttgccggacgacacccggctgtgggcggcactgcagtcggtgagcggcggcacctggaaaggctgtatttatgacaccgataaaattatcgaggtaattaacgccggtaaaaaagcgctcggaatttaa

SEQ ID NO: 10687 - protein, 655 aa, Escherichia coli
MTIEKIFTPQDDAFYAVITHAAGPQGALPLTPQMLMESPSGNLFGMTQNAGMGWDANKLTGKEVLIIGTQGGIRAGDGRPIALGYHTGHWEIGMQMQAAAKEITRNGGIPFAAFVSDPCDGRSQGTHGMFDSLPYRNDAAIVFRRLIRSLPTRRAVIGVATCDKGLPATMIALAAMHDLPTILVPGGATLPPTVGEDAGKVQTIGARFANHELSLQEAAELGCRACASPGGGCQFLGTAGTSQVVAEALGLALPHSALAPSGQAVWLEIARQSARAVSELDSRGITTRDILSDKAIENAMVIHAAFGGSTNLLLHIPAIAHAAGCTIPDVEHWTRINRKVPRLVSVLPNGPDYHPTVRAFLAGGVPEVMLHLRDLGLLHLDAMTVTGQTVGENLEWWQASERRARFRQCLREQDGVEPDDVILPPEKAKAKGLTSTVCFPTGNIAPEGSVIKATAIDPSVVGEDGVYHHTGRVRVFVSEAQAIKAIKREEIVQGDIMVVIGGGPSGTGMEETYQLTSALKHISWGKTVSLITDARFSGVSTGACFGHVSPEALAGGPIGKLRDNDIIEIAVDRLTLTGSVNFIGTADNPLTPEEGARELARRQTHPDLHAHDFLPDDTRLWAALQSVSGGTWKGCIYDTDKIIEVINAGKKALGI

SEQ ID NO: 10688 - DNA, 1968 bp, Escherichia coli
  CDS (1)..(1968): transl_table=11
atgtctgttcgcaatatttttgctgacgagagccacgatatttacaccgtcagaacgcacgccgatggcccggacggcgaactcccattaaccgcagagatgcttatcaaccgcccgagcggggatctgttcggtatgaccatgaatgccggaatgggttggtctccggacgagctggatcgggacggtattttactgctcagtacactcggtggcttacgcggcgcagacggtaaacccgtggcgctggcgttgcaccaggggcattacgaactggacatccagatgaaagcggcggccgaggttattaaagccaaccatgccctgccctatgccgtgtacgtctccgatccttgtgacgggcgtactcagggtacaacggggatgtttgattcgctaccataccgaaatgacgcatcgatggtaatgcgccgccttattcgctctctgcccgacgcgaaagcagttattggtgtggcgagttgcgataaggggcttccggccaccatgatggcactcgccgcgcagcacaacatcgcaaccgtgctggtccccggcggcgcgacgctgcccgcaaaggatggagaagacaacggcaaggtgcaaaccattggcgcacgcttcgccaatggcgaattatctctacaggacgcacgccgtgcgggctgtaaagcctgtgcctcttccggcggcggctgtcaatttttgggcactgccgggacatctcaggtggtggccgaaggattgggactggcaatcccacattcagccctggccccttccggtgagcctgtgtggcgggagatcgccagagcttccgcgcgagctgcgctgaacctgagtcaaaaaggcatcaccacccgggaaattctcaccgataaagcgatagagaatgcgatgacggtccatgccgcgttcggtggttcaacaaacctgctgttacacatcccggcaattgctcaccaggcaggttgccatatcccgaccgttgatgactggatccgcatcaacaagcgcgtgccccgactggtgagcgtactgcctaatggcccggtttatcatccaacggtcaatgcctttatggcaggtggtgtgccggaagtcatgttgcatctgcgcagcctcggattgttgcatgaagacgttatgacggttaccggcagcacgctgaaagaaaacctcgactggtgggagcactccgaacggcgtcagcggttcaagcaactcctgctcgatcaggaacaaatcaacgctgacgaagtgatcatgtctccgcagcaagcaaaagcgcgcggattaacctcaactatcaccttcccggtgggcaatattgcgccagaaggttcggtgatcaaatccaccgccattgacccctcgatgattgatgagcaaggtatctattaccataaaggtgtggcgaaggtttatctgtccgagaaaagtgcgatttacgatatcaaacatgacaagatcaaggcgggcgatattctggtcattattggcgttggaccttcaggtacagggatggaagaaacctaccaggttaccagtgccctgaagcatctgtcatacggtaagcatgtttcgttaatcaccgatgcacgtttctcgggcgtttctactggcgcgtgcatcggccatgtggggccagaagcgctggccggaggccccatcggtaaattacgcaccggggatttaattgaaattaaaattgattgtcgcgagcttcacggcgaagtcaatttcctcggaacccgtagcgatgaacaattaccttcacaggaggaggcaactgcaatattaaatgccagacccagccatcaggatttacttcccgatcctgaattgccagatgatacccggctatgggcaatgcttcaggccgtgagtggtgggacatggaccggttgtatttatgatgtaaacaaaattggcgcggctttgcgcgattttatgaataaaaactga

SEQ ID NO: 10689 - protein, 655 aa, Escherichia coli [sequence omitted]

SEQ ID NO: 10690 - DNA, 1830 bp, Helianthus annuus
  CDS (1)..(1830)
atgcaaacatccttattctcctcaaccaccaccattctcccgaccaccattgtcggacccaccaccacccgaaaaccctacacactctcagtccgagcctcctcatccacaaccgaaccagccccaccaccaccagttgtacaatctacaacaaaactcaacaagtacagttcaagaatcactgaacccaagtcacagggtgcgtcacaggctgttctgtacggtgtgggcctgtcagatgaggatcttaagaagccccaaattgggatttcgtctgtttggtatgaagggaacacgtgtaacatgcatttgttgagtcttgctgaggctgtgaaacaaggggtgcaagaagctgggatgattgggttcaggtttaatactattggggttagtgatgctatatctatggggactagagggatgtgttatagtcttcagtctagagatttgattgctgatagtattgaaacggttatgtctgctcagtggtatgatgccaatatttctatccctggttgtgacaagaatatgccaggtaccattatggcaatgggccgattgaaccgcccgagtataatgatctatggtgggactattaagcccggtcattttcaaggccacacgtttgacatagtatctgcgttccaggtttatggagaatatgtaagtggttccataaacgatgaacaaaggacaaatgtactaaagaattcatgcccgggagcaggcgcttgtggcggaatgtataccgcaaatacgatggcttccgccattgaagcaatgggaatgtctcttccgtacagctcatcgacaccggctgaagatccgttgaagttggacgagtgccgattagctggaaaatacattcttgatttattaaaaatggacttgaaaccaaaagacataattacccctaaatctttgcgtaatgcgatggttactgttatggctctaggtgggtccaccaatgctgttttacacttgatcgccatagcaaggtcagttggtttgaacttgactctagatgatttccaaaaggttagtgacgaagtaccgtttctcgcggatcttaagcctagtggaaagtacgtcatggaagatgtacacaagattggaggaacgcctgcggttcttcgttatcttttggagctcggatatttagatggagattgtattacagtcacagggaagacattggcagaaaacgcaaagcttttcccttcattgtcagaggggcagcaaataataagaccaccgacaaatcccataaaggaaacgggtcacattcaaatattatatggcaatcttgctcccgatggttcggttgcaaagatcacaggaaaagaagggttatatttttccggtcctgcactcgtgtttgaggaggaggagtccatgatcgcagcaatctccgaagaccccatgagttttaaggggaaggtagttgttattagaggagaaggtcctaaagggggccccggtatgcctgaaatgctcacaccgacaagtgcgataatgggcgctggtctaggcaaggaagttgcgttgttaactgacgggagattttcaggcggttcacatggatatgttgttggacacatttgccctgaagcacaggaaggtggtccgatcggtctagtccaaaacggggatataatcacaatagacatcaccaagaaacgaatggatgtgcacctaaccgacaaagagctagatgagcggcgaaaggcgtggaccccaccaccgtccaaggctgaaagaggtgttctttacaagtacatcaaaaatgttcaatcggcttcaagaggatgtgtaaccgatgagttgtag

SEQ ID NO: 10691 - protein, 609 aa, Helianthus annuus
MQTSLFSSTTTILPTTIVGPTTTRKPYTLSVRASSSTTEPAPPPPVVQSTTKLNKYSSRITEPKSQGASQAVLYGVGLSDEDLKKPQIGISSVWYEGNTCNMHLLSLAEAVKQGVQEAGMIGFRFNTIGVSDAISMGTRGMCYSLQSRDLIADSIETVMSAQWYDANISIPGCDKNMPGTIMAMGRLNRPSIMIYGGTIKPGHFQGHTFDIVSAFQVYGEYVSGSINDEQRTNVLKNSCPGAGACGGMYTANTMASAIEAMGMSLPYSSSTPAEDPLKLDECRLAGKYILDLLKMDLKPKDIITPKSLRNAMVTVMALGGSTNAVLHLIAIARSVGLNLTLDDFQKVSDEVPFLADLKPSGKYVMEDVHKIGGTPAVLRYLLELGYLDGDCITVTGKTLAENAKLFPSLSEGQQIIRPPTNPIKETGHIQILYGNLAPDGSVAKITGKEGLYFSGPALVFEEEESMIAAISEDPMSFKGKVVVIRGEGPKGGPGMPEMLTPTSAIMGAGLGKEVALLTDGRFSGGSHGYVVGHICPEAQEGGPIGLVQNGDIITIDITKKRMDVHLTDKELDERRKAWTPPPSKAERGVLYKYIKNVQSASRGCVTDEL

SEQ ID NO: 10692 - DNA, 1806 bp, Glycine max
  CDS (1)..(1806)
atgcagtccacactcttcaaccccacccattcccttatccccacttcaccacactctatcagatccaattctggtcatgcttctctctccgttcgcgcctccatcgccgtggaaacccccacggagacggtgaagctgaacaagtacagctcccgcatcaccgagcccaaatcgcagggcgcctcccaggccgtgctctacggcgtcggtctctccgaggacgacatggccaagccccaggtcggcgtctcctcggtctggtacgagggcaacacctgcaacatgcacctcctccacctctccgaggccgtgcgtgacggcgttgctgctgctggcatggttcccttccgcttcaacaccgttggcgtcagcgacgccatctccatgggcacccgtggcatgtgctacagcctccagtccagggacctcattgccgacagcatcgagaccgtcatggcagcgcagtggtacgatggcaatatttccatccccggctgtgacaaaaatatgccaggtactatcattgccatggggaggctcaacagacctagcattatggttgatggcgggactataaaacctggtcattttgagggtaacacgtttgacatagtgtctgcctttcagtgctatggagaatatgtgagtggatcaattaatgatgaccaaagacaaaatgttattcgcaactcatgccctggggctggagcctgtggtggaatgtatacagccaataccatggcttctgcaatagaagctatgggaatgtctcttccctatagctcatctacacctgctgaggatccactaaagttggatgagtgtcgattaactgggaaatatcttgttgagttactgaaaatggacttgaagccccgagatatcatcactcgtaaatcactacgtaatgcaatggttatagttatggcactaggtggatctactaatgctgcgcaacatttaattgctattgccaagtctgttggcattgatttgactcttgatgattttcagaaggttagcgatgaggttccttttattgcagatcttaagcctagtgggaaatatgtcatggaagatgttcacaagattggagggactcctgcagttatccgctaccttcttgagcaaggctttttagatggtgactgtatgactgtcactggaaaaaccctagctgaaaatgcagaacttgtccctcctctgtccaacgggcaggaaataataaggccagtagaaaatcccatcaagaagacggctcacattcaaatattatatggaaaccttgcaccacagggttccgttgctaaaattactggaaaagaagggctgtacttctctggtcctgcacttgtctttgaaggagaggaggcaatgattgctgccatttcagaggatccttcgagttttaaggggaaagtggttgtaatcaggggagagggacccaagggtggtccgggaatgcctgagatgttaacaccaacaagtgcaataatgggtgcaggtcttggaaaggaagttgcattattgactgatggaagattttcaggaggttcacatggatttgtggttggccatatatgtcctgaagcacaggaaggtggtccaattggcttgattcaaaatggagacgtaatcaatgttgacatcaagaataggagaattgatgttttggtatcagatgaggagatggaagcacgcaggaaaaagtggactgctcctccatacaaagctaaccgaggagctctgtacaagtatattaaaaatgtgacacctgcttctagtggatgcgtaacagacgagtag

SEQ ID NO: 10693 - protein, 601 aa, Glycine max
MQSTLFNPTHSLIPTSPHSIRSNSGHASLSVRASIAVETPTETVKLNKYSSRITEPKSQGASQAVLYGVGLSEDDMAKPQVGVSSVWYEGNTCNMHLLHLSEAVRDGVAAAGMVPFRFNTVGVSDAISMGTRGMCYSLQSRDLIADSIETVMAAQWYDGNISIPGCDKNMPGTIIAMGRLNRPSIMVDGGTIKPGHFEGNTFDIVSAFQCYGEYVSGSINDDQRQNVIRNSCPGAGACGGMYTANTMASAIEAMGMSLPYSSSTPAEDPLKLDECRLTGKYLVELLKMDLKPRDIITRKSLRNAMVIVMALGGSTNAAQHLIAIAKSVGIDLTLDDFQKVSDEVPFIADLKPSGKYVMEDVHKIGGTPAVIRYLLEQGFLDGDCMTVTGKTLAENAELVPPLSNGQEIIRPVENPIKKTAHIQILYGNLAPQGSVAKITGKEGLYFSGPALVFEGEEAMIAAISEDPSSFKGKVVVIRGEGPKGGPGMPEMLTPTSAIMGAGLGKEVALLTDGRFSGGSHGFVVGHICPEAQEGGPIGLIQNGDVINVDIKNRRIDVLVSDEEMEARRKKWTAPPYKANRGALYKYIKNVTPASSGCVTDE

SEQ ID NO: 10694 - DNA, 1776 bp, Zea mays
  CDS (1)..(1776)
atgcagtccatggcgctcacctccccctcactcccggaggtcggccccgtttccggccgccgtctccagcgcatccgtgccaccgcggtatccgacgagctcaagctgaacaagtacagcgcgcgcatcacggagcccaagtcgcagggcgcctcgcaggccgtgctctatggggtcgggctcactgacgctgacctccgcaagccgcaggtcggcgtctcgtcggtgtggtacgaggggaacacctgcaacatgcacctgctccgcctcgcggaggccgtccgtgacggcgtccgcgaggccggcatggtcggcttccggtttaacaccgtcggtgtcagcgacgccatttccatgggcacccggggcatgtgctacagcctccagtcccgtgacctcatcgccgacagcatcgagaccgtcatgggagcgcagcactacgacgccaacatttccatacctgggtgcgacaagaacatgccaggtacaataatggcaatgggacggcttaatcgacctagcataatgatatatggtggaactattaagcctggtcactttcagggcaattcctatgatatagtatctgctttccagtgctatggagaatatgttagtggttcaatcactgatgagcaaagaaagaacgtcctccgcaattcatgtccaggagcaggtgcctgtggtggtatgtacacagcaaacactatggcatctgctatcgaaactttgggcatgagtcttccatacagttcttcgacacctgctgaggacccactaaaactagaagagtgccgtcttgctgggaagtatcctttagagttgctaaagatggatttgaagcctaaggacattatcactgagaagtcattgcgaaatgcaatggttattgttatggcacttggtggttcgactaatgctgttctgcatttgattgccattgctcggtccgttggtttgcatttgactcttgatgatttccagaaggtcagtgaccaagttcctttccttgcagacctcaagcccagtggcaaatatgtcatggaggatctacataagattggtgggacacctgcagtcattcattaccttttggagcaaggtcttcttgatggtgattgcatgactgttactggtaaaactctagctgagaatgctaaaatcttccctcctctgtctgaggggcagcaaataattcgaccacttgacaatcctatcaaaccaactggccatattcaaatactttatggaaatcttgcaccggaaggttctgtcgcaaaaataactggcaaagagggactgttcttctcaggtcccgcattagtttttgagggtgaagaatccatgatcacagctatctcagaaaacccagcgaatttcaagggaaaggtagtagtaatccgaggagaaggaccaaaaggagggccagggatgcctgaaatgttgactccaacaagtgcaataatgggtgctggtctcggaaaggagtgcgccctgctgacagatggtagattttcaggaggctcacatggatttgttgtcggccacatatgccctgaagcacaggaaggtggcccaattggccttgtccatagtggtgatgtaatcaccatcgatgtaagtaagagggtaatcgacgttgaccttaccgagcagcagctcgaagaaagacggaggaaatggaccccaccgccatacaagtccacctgtggagctctttggaagtacatcaagcttgtggctccagcgtctagaggatgcgtcactgatgagtag

SEQ ID NO: 10695 - protein, 591 aa, Zea mays
MQSMALTSPSLPEVGPVSGRRLQRIRATAVSDELKLNKYSARITEPKSQGASQAVLYGVGLTDADLRKPQVGVSSVWYEGNTCNMHLLRLAEAVRDGVREAGMVGFRFNTVGVSDAISMGTRGMCYSLQSRDLIADSIETVMGAQHYDANISIPGCDKNMPGTIMAMGRLNRPSIMIYGGTIKPGHFQGNSYDIVSAFQCYGEYVSGSITDEQRKNVLRNSCPGAGACGGMYTANTMASAIETLGMSLPYSSSTPAEDPLKLEECRLAGKYPLELLKMDLKPKDIITEKSLRNAMVIVMALGGSTNAVLHLIAIARSVGLHLTLDDFQKVSDQVPFLADLKPSGKYVMEDLHKIGGTPAVIHYLLEQGLLDGDCMTVTGKTLAENAKIFPPLSEGQQIIRPLDNPIKPTGHIQILYGNLAPEGSVAKITGKEGLFFSGPALVFEGEESMITAISENPANFKGKVVVIRGEGPKGGPGMPEMLTPTSAIMGAGLGKECALLTDGRFSGGSHGFVVGHICPEAQEGGPIGLVHSGDVITIDVSKRVIDVDLTEQQLEERRRKWTPPPYKSTCGALWKYIKLVAPASRGCVTDE

SEQ ID NO: 10696 - DNA, 21 bp, Artificial sequence
  primer
atggtcgtaatatggcgggtg

SEQ ID NO: 10697 - DNA, 24 bp, Artificial sequence
  primer
ttaaccccccagtttcgatttatc

SEQ ID NO: 10698 - protein, 691 aa, Artificial sequence
  consensus sequence
  Variant (2)..(5): Xaa in position 2 to 5 is any amino acid
  Variant (6)..(13): Xaa in position 6 to 13 is any or no amino acid
  Variant (15)..(15): Xaa in position 15 is any amino acid
  Variant (16)..(20): Xaa in position 16 to 20 is any or no amino acid
  Variant (22)..(28): Xaa in position 22 to 28 is any amino acid
  Variant (29)..(41): Xaa in position 29 to 41 is any or no amino acid
  Variant (44)..(54): Xaa in position 44 to 54 is any amino acid
  Variant (55)..(66): Xaa in position 55 to 66 is any or no amino acid
  Variant (68)..(71): Xaa in position 68 to 71 is any amino acid
  Variant (73)..(86): Xaa in position 73 to 86 is any amino acid
  Variant (88)..(92): Xaa in position 88 to 92 is any amino acid
  Variant (94)..(94): Xaa in position 94 is any amino acid
  Variant (95)..(95): Xaa in position 95 is any or no amino acid
  Variant (97)..(100): Xaa in position 97 to 100 is any amino acid
  Variant (104)..(104): Xaa in position 104 is any amino acid
  Variant (107)..(108): Xaa in position 107 to 108 is any amino acid
  Variant (111)..(111): Xaa in position 111 is any amino acid
  Variant (115)..(115): Xaa in position 115 is any amino acid
  Variant (118)..(119): Xaa in position 118 to 119 is any amino acid
  Variant (120)..(120): Xaa in position 120 is any or no amino acid
  Variant (124)..(125): Xaa in position 124 to 125 is any amino acid
  Variant (127)..(134): Xaa in position 127 to 134 is any amino acid
  Variant (136)..(141): Xaa in position 136 to 141 is any amino acid
  Variant (142)..(142): Xaa in position 142 is any or no amino acid
  Variant (146)..(147): Xaa in position 146 to 147 is any amino acid
  Variant (150)..(152): Xaa in position 150 to 152 is any amino acid
  Variant (154)..(155): Xaa in position 154 to 155 is any amino acid
  Variant (157)..(157): Xaa in position 157 is any amino acid
  Variant (159)..(159): Xaa in position 159 is any amino acid
  Variant (160)..(160): Xaa in position 160 is any or no amino acid
  Variant (162)..(166): Xaa in position 162 to 166 is any amino acid
  Variant (169)..(172): Xaa in position 169 to 172 is any amino acid
  Variant (174)..(199): Xaa in position 174 to 199 is any amino acid
  Variant (200)..(219): Xaa in position 200 to 219 is any or no amino acid
  Variant (221)..(223): Xaa in position 221 to 223 is any amino acid
  Variant (226)..(227): Xaa in position 226 to 227 is any amino acid
  Variant (229)..(229): Xaa in position 229 is any amino acid
  Variant (230)..(230): Xaa in position 230 is any or no amino acid
  Variant (232)..(232): Xaa in position 232 is any amino acid
  Variant (235)..(235): Xaa in position 235 is any amino acid
  Variant (239)..(239): Xaa in position 239 is any amino acid
  Variant (241)..(244): Xaa in position 241 to 244 is any amino acid
  Variant (246)..(247): Xaa in position 246 to 247 is any amino acid
  Variant (249)..(250): Xaa in position 249 to 250 is any amino acid
  Variant (253)..(258): Xaa in position 253 to 258 is any amino acid
  Variant (260)..(284): Xaa in position 260 to 284 is any amino acid
  Variant (285)..(291): Xaa in position 285 to 291 is any or no amino acid
  Variant (293)..(294): Xaa in position 293 to 294 is any amino acid
  Variant (296)..(298): Xaa in position 296 to 298 is any amino acid
  Variant (299)..(299): Xaa in position 299 is any or no amino acid
  Variant (301)..(302): Xaa in position 301 to 302 is any amino acid
  Variant (305)..(309): Xaa in position 305 to 309 is any amino acid
  Variant (311)..(311): Xaa in position 311 is any amino acid
  Variant (317)..(318): Xaa in position 317 to 318 is any amino acid
  Variant (321)..(322): Xaa in position 321 to 322 is any amino acid
  Variant (324)..(324): Xaa in position 324 is any amino acid
  Variant (326)..(344): Xaa in position 326 to 344 is any amino acid
  Variant (345)..(347): Xaa in position 345 to 347 is any or no amino acid
  Variant (349)..(354): Xaa in position 349 to 354 is any amino acid
  Variant (356)..(361): Xaa in position 356 to 361 is any amino acid
  Variant (362)..(366): Xaa in position 362 to 366 is any or no amino acid
  Variant (368)..(370): Xaa in position 368 to 370 is any amino acid
  Variant (371)..(371): Xaa in position 371 is any or no amino acid
  Variant (375)..(381): Xaa in position 375 to 381 is any amino acid
  Variant (383)..(390): Xaa in position 383 to 390 is any amino acid
  Variant (391)..(403): Xaa in position 391 to 403 is any or no amino acid
  Variant (405)..(424): Xaa in position 405 to 424 is any amino acid
  Variant (425)..(464): Xaa in position 425 to 464 is any or no amino acid
  Variant (466)..(473): Xaa in position 466 to 473 is any amino acid
  Variant (474)..(476): Xaa in position 474 to 476 is any or no amino acid
  Variant (478)..(481): Xaa in position 478 to 481 is any amino acid
  Variant (483)..(483): Xaa in position 483 is any amino acid
  Variant (486)..(486): Xaa in position 486 is any amino acid
  Variant (488)..(489): Xaa in position 488 to 489 is any amino acid
  Variant (491)..(493): Xaa in position 491 to 493 is any amino acid
  Variant (495)..(500): Xaa in position 495 to 500 is any amino acid
  Variant (501)..(506): Xaa in position 501 to 506 is any or no amino acid
  Variant (508)..(508): Xaa in position 508 is any amino acid
  Variant (509)..(519): Xaa in position 509 to 519 is any or no amino acid
  Variant (521)..(539): Xaa in position 521 to 539 is any amino acid
  Variant (540)..(541): Xaa in position 540 to 541 is any or no amino acid
  Variant (543)..(543): Xaa in position 543 is any amino acid
  Variant (544)..(546): Xaa in position 544 to 546 is any or no amino acid
  Variant (548)..(550): Xaa in position 548 to 550 is any amino acid
  Variant (556)..(556): Xaa in position 556 is any amino acid
  Variant (562)..(562): Xaa in position 562 is any amino acid
  Variant (566)..(566): Xaa in position 566 is any amino acid
  Variant (568)..(568): Xaa in position 568 is any amino acid
  Variant (570)..(575): Xaa in position 570 to 575 is any amino acid
  Variant (579)..(580): Xaa in position 579 to 580 is any amino acid
  Variant (581)..(581): Xaa in position 581 is any or no amino acid
  Variant (584)..(584): Xaa in position 584 is any amino acid
  Variant (592)..(594): Xaa in position 592 to 594 is any amino acid
  Variant (596)..(598): Xaa in position 596 to 598 is any amino acid
  Variant (599)..(599): Xaa in position 599 is any or no amino acid
  Variant (602)..(603): Xaa in position 602 to 603 is any amino acid
  Variant (607)..(608): Xaa in position 607 to 608 is any amino acid
  Variant (610)..(610): Xaa in position 610 is any amino acid
  Variant (612)..(612): Xaa in position 612 is any amino acid
  Variant (614)..(614): Xaa in position 614 is any amino acid
  Variant (616)..(618): Xaa in position 616 to 618 is any amino acid
  Variant (621)..(621): Xaa in position 621 is any amino acid
  Variant (623)..(623): Xaa in position 623 is any amino acid
  Variant (626)..(642): Xaa in position 626 to 642 is any amino acid
  Variant (643)..(651): Xaa in position 643 to 651 is any or no amino acid
  Variant (653)..(664): Xaa in position 653 to 664 is any amino acid
  Variant (665)..(677): Xaa in position 665 to 677 is any or no amino acid
  Variant (679)..(680): Xaa in position 679 to 680 is any amino acid
  Variant (682)..(687): Xaa in position 682 to 687 is any amino acid
  Variant (689)..(690): Xaa in position 689 to 690 is any amino acid
SXXXXXXXXXXXXRXXXXXXGXXXXXXXXXXXXXXXXXXXXKPXXXXXXXXXXXXXXXXXXXXXXXPXXXXLXXXXXXXXXXXXXXGXXXXXFXXTXXXXDGIXMGXXGMXYSLXSRXXXIADXXEXXXXXXXXDXXXXXXXCDKXXPGXXXAXXRXNXXPXXXXXGGXXXXGXXXXXXXXXXXXXXXXXXXXXXXXXXXXXXXXXXXXXXXXXXXXXXEXXXCPXXGXXCXGMXTANXMXXXXEXXGXXLPXXXXXXAXXXXXXXXXXXXXXXXXXXXXXXXXXXXXXXXPXXIXXXXAXXNAXXXXXAXGGSTNXXLHXXAXAXXXXXXXXXXXXXXXXXXXXXXPXXXXXXPXXXXXXXXXXXDXXXXAGGXXXXXXXLXXXXXXXXXXXXXXXXXXXXXTXXXXXXXXXXXXXXXXXXXXXXXXXXXXXXXXXXXXXXXXXXXXXXXXXXXXXXXXXXXXIXXXXXXXXXXXGXXXXLXGNXAXXGXXXKXXXXXXXXXXXXGXXXXXXXXXXXXAXXXXXXXXXXXXXXXXXXXXXGXXXXVXXXRYEGPXGGPGMXEMLXPXTXXXXXXGLGXXXALXTDGRFSGXXXGXXXXGHXXPEAXXGXGXIXLXXXGDXIXIDXXXXXXXXXXXXXXXXXXXXXXXXXXRXXXXXXXXXXXXXXXXXXXXXXXXXLXXYXXXXXXAXXG

SEQ ID NO: 10699 - protein, 32 aa, Artificial sequence
  protein pattern
  Variant (2)..(2): Xaa in position 2 is Asp or Glu
  Variant (3)..(3): Xaa in position 3 is Ile, Leu or Val
  Variant (7)..(8): Xaa in position 7 to 8 is any amino acid
  Variant (10)..(13): Xaa in position 10 to 13 is any amino acid
  Variant (14)..(14): Xaa in position 14 is Ala, Cys or Gly
  Variant (15)..(17): Xaa in position 15 to 17 is any amino acid
  Variant (19)..(19): Xaa in position 19 is Ala or Gly
  Variant (20)..(20): Xaa in position 20 is any amino acid
  Variant (21)..(21): Xaa in position 21 is Phe, Ile, Leu or Val
  Variant (22)..(22): Xaa in position 22 is any amino acid
  Variant (23)..(23): Xaa in position 23 is Phe, Ile, Leu or Val
  Variant (24)..(25): Xaa in position 24 to 25 is any amino acid
  Variant (29)..(30): Xaa in position 29 to 30 is any amino acid
RXXIADXXEXXXXXXXXDXXXXXXXCDKXXPG

SEQ ID NO: 10700 - protein, 19 aa, Artificial sequence
  protein pattern
  Variant (4)..(4): Xaa in position 4 is Ser or Thr
  Variant (6)..(6): Xaa in position 6 is Ala, Gly, Asn or Ser
  Variant (7)..(9): Xaa in position 7 to 9 is any amino acid
  Variant (10)..(10): Xaa in position 10 is Glu, Gly or Gln
  Variant (11)..(11): Xaa in position 11 is any amino acid
  Variant (12)..(12): Xaa in position 12 is Phe, Ile, Leu or Met
  Variant (14)..(15): Xaa in position 14 to 15 is any or no amino acid
  Variant (17)..(18): Xaa in position 17 to 18 is any or no amino acid
TANXMXXXXXXXGXXLXXP

SEQ ID NO: 10701 - protein, 11 aa, Artificial sequence
  protein pattern
  Variant (2)..(2): Xaa in position 2 is Ile, Leu or Val
  Variant (10)..(10): Xaa in position 10 is Ala or Gly
  Variant (11)..(11): Xaa in position 11 is Ser or Thr
LXTDGRFSGXX

SEQ ID NO: 10702 - protein, 36 aa, Artificial sequence
  protein pattern
  Variant (2)..(12): Xaa in position 2 to 12 is any amino acid
  Variant (13)..(14): Xaa in position 13 to 14 is any or no amino acid
  Variant (16)..(20): Xaa in position 16 to 20 is any amino acid
  Variant (21)..(22): Xaa in position 21 to 22 is any or no amino acid
  Variant (24)..(24): Xaa in position 24 is Cys or Gly
  Variant (26)..(26): Xaa in position 26 is Ser or Thr
  Variant (28)..(28): Xaa in position 28 is Ala, Gly, Ser or Thr
  Variant (29)..(30): Xaa in position 29 to 30 is any amino acid
  Variant (32)..(33): Xaa in position 32 to 33 is any amino acid
  Variant (35)..(35): Xaa in position 35 is any amino acid
PXXXXXXXXXXXXXAXXXXXXXGXSXNXXXHXXAXA

SEQ ID NO: 10703 - protein, 11 aa, Artificial sequence
  protein pattern
  Variant (2)..(2): Xaa in position 2 is any amino acid
  Variant (3)..(3): Xaa in position 3 is Glu or Thr
  Variant (6)..(6): Xaa in position 6 is any amino acid
RXXGPXGGPGM

SEQ ID NO: 10704 - protein, 11 aa, Artificial sequence
  protein pattern
  Variant (2)..(2): Xaa in position 2 is any amino acid
  Variant (3)..(3): Xaa in position 3 is Gly, Ser or Thr
  Variant (4)..(4): Xaa in position 4 is any amino acid
  Variant (6)..(6): Xaa in position 6 is Ala, Cys or Ser
  Variant (8)..(8): Xaa in position 8 is Ala, Gly or Ser
  Variant (11)..(11): Xaa in position 11 is Phe or Tyr
CXXXGXCXGMX

SEQ ID NO: 10705 - protein, 14 aa, Artificial sequence
  protein pattern
  Variant (2)..(2): Xaa in position 2 is Ala or Gly
  Variant (3)..(3): Xaa in position 3 is Ile or Met
  Variant (4)..(4): Xaa in position 4 is Ala, Ser or Thr
  Variant (7)..(8): Xaa in position 7 to 8 is any amino acid
  Variant (11)..(12): Xaa in position 11 to 12 is any amino acid
DXXXMGXXGMXXSL

SEQ ID NO: 10706 - protein, 14 aa, Artificial sequence
  protein pattern
  Variant (3)..(3): Xaa in position 3 is any amino acid
  Variant (4)..(4): Xaa in position 4 is Ala, Cys, Ser, Thr or Val
  Variant (8)..(9): Xaa in position 8 to 9 is any amino acid
  Variant (12)..(12): Xaa in position 12 is any amino acid
  Variant (14)..(14): Xaa in position 14 is Ala or Gly
GHXXPEAXXGGXIX

SEQ ID NO: 10707 - protein, 14 aa, Artificial sequence
  protein pattern
  Variant (4)..(4): Xaa in position 4 is any amino acid
  Variant (6)..(6): Xaa in position 6 is Ser or Thr
  Variant (7)..(7): Xaa in position 7 is Ala, Gly, Ser or Thr
  Variant (8)..(8): Xaa in position 8 is any amino acid
  Variant (9)..(9): Xaa in position 9 is Ile, Leu or Val
  Variant (10)..(10): Xaa in position 10 is any amino acid
  Variant (11)..(11): Xaa in position 11 is Ala, Gly or Ser
  Variant (12)..(13): Xaa in position 12 to 13 is any amino acid
  Variant (14)..(14): Xaa in position 14 is Ile or Leu
EMLXPXXXXXXXXX

SEQ ID NO: 10708 - DNA, 381 bp, Escherichia coli
  CDS (1)..(381): transl_table=11
atgagtaaggaatatatgaacgatggttcattaagtgaaaaatggaaataccgatttaatttttatgatcaacatggttttcctggattctggggggcaacaccagaatataaagcagcatttaaagcattaaaagtaagacaacgcttaactattcaaatgaatttcattgctttcttctgttcctggatatatttatttgtcctggggttatggaaaaaagcaattatagttctattacttggtattctatctctatttgttggtgcactaattggcgttaacattctgggaattgccgtagcagcctatgttgctgttaacacgaacaaatggttctatgagaaagaggtaaaagggttaaatacctggagcctttaa

SEQ ID NO: 10709 - protein, 126 aa, Escherichia coli
MSKEYMNDGSLSEKWKYRFNFYDQHGFPGFWGATPEYKAAFKALKVRQRLTIQMNFIAFFCSWIYLFVLGLWKKAIIVLLLGILSLFVGALIGVNILGIAVAAYVAVNTNKWFYEKEVKGLNTWSL

SEQ ID NO: 10710 - DNA, 396 bp, Xanthomonas axonopodis pv. citri str. 306
  CDS (1)..(396): transl_table=11
atgaatgacacaacccaagactattcgcagtacagccccaaatggcagttccggttcgatttctacgaccgctacggcgagcccaaatcctccaccttcaaaaccgccatgcgctcgttgccgttcggccagaaggtcaagctcaacatgaacttctatgccttcttctttggcttcatctactacttcatcctcggaatgtggcgcaaggcgctggtcttgatcggcgtgtcgttcacggtcggcatcatctgctccttcttgccggaatacgtgctgcgctcattcggtctggcgtattcccttctggtgggcatgaccgccaactacgcctactacctgcacaagatcaagggcagcaccagctggaatccgctggaaggcgtgcgctggtag

SEQ ID NO: 10711 - protein, 131 aa, Xanthomonas axonopodis pv. citri str. 306
MNDTTQDYSQYSPKWQFRFDFYDRYGEPKSSTFKTAMRSLPFGQKVKLNMNFYAFFFGFIYYFILGMWRKALVLIGVSFTVGIICSFLPEYVLRSFGLAYSLLVGMTANYAYYLHKIKGSTSWNPLEGVRW

SEQ ID NO: 10712 - DNA, 390 bp, Xanthomonas axonopodis pv. citri str. 306
  CDS (1)..(390): transl_table=11
atggataccttcgatcgcacccagctcggccccaagtggcaattccgcttcgccttcttcgaccgtcacggcggccccagggatcctgcctacaaggaggcgctcaagaccttgccgttcggcgagaagctcaaggtgggcatgaacttctacgcattgttcttcggcttcatctatttcttcatcctgggtctgtggcgcaaggcgctgggcctgatcggcatcggcctggtggtcggcatcgtggcctcgttcctgcccgcatcgatcggcaatgcgctgagcattccgctggccctgctgggcggcatgagcgccaactacgcttactacctggacaaggtgaagggcagcaccagcttcaatccgttcgaaggcatgcgctggtag

SEQ ID NO: 10713 - protein, 129 aa, Xanthomonas axonopodis pv. citri str. 306
MDTFDRTQLGPKWQFRFAFFDRHGGPRDPAYKEALKTLPFGEKLKVGMNFYALFFGFIYFFILGLWRKALGLIGIGLVVGIVASFLPASIGNALSIPLALLGGMSANYAYYLDKVKGSTSFNPFEGMRW

SEQ ID NO: 10714 - DNA, 429 bp, Pseudomonas syringae pv. tomato str. DC3000
  CDS (1)..(429): transl_table=11
atgagcacagcagatcagacccaaagcgctggcaattacagtgcaaagtggcaggaacgcttcaaccttttcgagacttacggtgcgccgaacgatccgcgcttcaagcctgcggtcaacgcgctgcccggcttcaagaagaagctgcttatttgcgctaatgtcatcacgtttttctttggcccgatttacttcttcgtgctggggctgtggaagaaaaacctggcgctgatcggcatcatcatcgccgtcaatatcgttatagccgtgcttttcggaatcttcggaatggaggctccaaaggcattggggactggcttgaacgtcatgttttccatgatgtactccctgactgccaattactcctactacctcaaggaagtaaaaggcgagcaaggctggaacccgttcaaaggcatgcgtctctga

SEQ ID NO: 10715 - protein, 142 aa, Pseudomonas syringae pv. tomato str. DC3000
MSTADQTQSAGNYSAKWQERFNLFETYGAPNDPRFKPAVNALPGFKKKLLICANVITFFFGPIYFFVLGLWKKNLALIGIIIAVNIVIAVLFGIFGMEAPKALGTGLNVMFSMMYSLTANYSYYLKEVKGEQGWNPFKGMRL

SEQ ID NO: 10716 - DNA, 414 bp, Photorhabdus luminescens subsp. laumondii TTO1
  CDS (1)..(414): transl_table=11
atggataaaaatcaatattcggaaaaatggcagatgcgctttgcattctttgaacagaatggtgctcctaaaacgcctgagcacaaagctgccatgaaagtagaaccctatatgcgccgtatattgttgaacatgaattttattgccttcttttttggttttatttacttttttgttttaggtttatggcgaaagaacctgactttatttggtgttggtgttggtgttggtgttgtagtgataattatattggagattatggaaagtgtcttgagtatttatattcctcctgctgtcgacatggggattaaatttgcgttttcagcaatatggggaaccactgctaactatgcctattatctgaaagaaaaagtgaatagccagagctggaatccatttgaaggattattttaa

SEQ ID NO: 10717 - protein, 137 aa, Photorhabdus luminescens subsp. laumondii TTO1
MDKNQYSEKWQMRFAFFEQNGAPKTPEHKAAMKVEPYMRRILLNMNFIAFFFGFIYFFVLGLWRKNLTLFGVGVGVGVVVIIILEIMESVLSIYIPPAVDMGIKFAFSAIWGTTANYAYYLKEKVNSQSWNPFEGLF

SEQ ID NO: 10718 - DNA, 426 bp, Pseudomonas syringae pv. syringae B728a
  CDS (1)..(426): transl_table=11
atgaacaagtcagacccggtaaacgcatcaggccaccacagcgacaaatggaaagaacgcttcgccttttttgaagcgcacggcggcccaagcgcaccggggttcagacccgcgctcaagcaactgccctttctgaaaaaagtgaaaatcaacttcaacttcttcgcgttctttttcgggccggtttacctgttcattctggggctgtggaagaagaacctgtgcattatcgcgatcatgatagtggtttctgtcgcgctgaacatcgtgatggacatgtttgagttccgctacgccaaggaggcgagttctgcactggggtttgcgtttaattcgctgtatggccagttgaccaattacgcgtattacctgaaggaagtgaaaggcgagcagggctggaatccgtttgaggggttgcgttggtga

SEQ ID NO: 10719 - protein, 141 aa, Pseudomonas syringae pv. syringae B728a
MNKSDPVNASGHHSDKWKERFAFFEAHGGPSAPGFRPALKQLPFLKKVKINFNFFAFFFGPVYLFILGLWKKNLCIIAIMIVVSVALNIVMDMFEFRYAKEASSALGFAFNSLYGQLTNYAYYLKEVKGEQGWNPFEGLRW

SEQ ID NO: 10720 - DNA, 429 bp, Pseudomonas syringae pv. syringae B728a
  CDS (1)..(429): transl_table=11
atgagcacgacagatcagacacaaagcactggccagcacaatgccaagtggcaagagcgcttcaattttttcgagacgtatggtgcgccgaacgatccacgcttcaagccggcagtgaacgcgctgcctgacttcaagaataagttgcttgtctgcgccaacatcatcgcgtttttcttcggtccgatttacttcttcgtgctgggtctgtggaagaaaaatctggcgctgatcggcgtcattatcgcggtcaacatcgtgatagcgctgcttttcgggatcctcggaatggaggttcccgccgcattgggcaccggcttgaacgtcgtgttttcccttatgtacgccctgacggccaactactcctactacctcaaggaagtgaaaggcgagcaaggctggaacccgttcaaaggcatgcgtctctga

SEQ ID NO: 10721 - protein, 142 aa, Pseudomonas syringae pv. syringae B728a
MSTTDQTQSTGQHNAKWQERFNFFETYGAPNDPRFKPAVNALPDFKNKLLVCANIIAFFFGPIYFFVLGLWKKNLALIGVIIAVNIVIALLFGILGMEVPAALGTGLNVVFSLMYALTANYSYYLKEVKGEQGWNPFKGMRL

SEQ ID NO: 10722 - DNA, 26 bp, Artificial sequence
  primer
atgagtaaggaatatatgaacgatgg

SEQ ID NO: 10723 - DNA, 26 bp, Artificial sequence
  primer
ttaaaggctccaggtatttaaccctt

SEQ ID NO: 10724 - protein, 132 aa, Artificial sequence
  consensus sequence
  Variant (3)..(4): Xaa in position 3 to 4 is any amino acid
  Variant (7)..(7): Xaa in position 7 is any amino acid
  Variant (9)..(12): Xaa in position 9 to 12 is any amino acid
  Variant (14)..(14): Xaa in position 14 is any amino acid
  Variant (16)..(17): Xaa in position 16 to 17 is any amino acid
  Variant (18)..(21): Xaa in position 18 to 21 is any or no amino acid
  Variant (23)..(24): Xaa in position 23 to 24 is any amino acid
  Variant (26)..(26): Xaa in position 26 is any amino acid
  Variant (28)..(30): Xaa in position 28 to 30 is any amino acid
  Variant (33)..(41): Xaa in position 33 to 41 is any amino acid
  Variant (42)..(42): Xaa in position 42 is any or no amino acid
  Variant (44)..(45): Xaa in position 44 to 45 is any amino acid
  Variant (51)..(51): Xaa in position 51 is any amino acid
  Variant (54)..(54): Xaa in position 54 is any amino acid
  Variant (56)..(56): Xaa in position 56 is any amino acid
  Variant (61)..(61): Xaa in position 61 is any amino acid
  Variant (63)..(63): Xaa in position 63 is any amino acid
  Variant (65)..(72): Xaa in position 65 to 72 is any amino acid
  Variant (74)..(97): Xaa in position 74 to 97 is any amino acid
  Variant (98)..(112): Xaa in position 98 to 112 is any or no amino acid
  Variant (115)..(115): Xaa in position 115 is any amino acid
  Variant (119)..(121): Xaa in position 119 to 121 is any amino acid
  Variant (124)..(126): Xaa in position 124 to 126 is any amino acid
  Variant (130)..(131): Xaa in position 130 to 131 is any amino acid
KWXXRFXFXXXXGXPXXXXXXPXXKXAXXXLPXXXXXXXXXXNXXAFFFGXIYXFXLGLWXKXLXXXXXXXXVXXXXXXXXXXXXXXXXXXXXXXXXXXXXXXXXXXXXXXXNYXYYLXXXKGXXXWNPXXG

SEQ ID NO: 10725 - protein, 15 aa, Artificial sequence
  protein pattern
  Variant (3)..(4): Xaa in position 3 to 4 is any amino acid
  Variant (7)..(7): Xaa in position 7 is Ala, Asp or Asn
  Variant (9)..(9): Xaa in position 9 is Phe or Tyr
  Variant (10)..(10): Xaa in position 10 is Asp or Glu
  Variant (11)..(12): Xaa in position 11 to 12 is any amino acid
  Variant (14)..(14): Xaa in position 14 is any amino acid
KWXXRFXFXXXXGXP

SEQ ID NO: 10726 - DNA, 369 bp, Escherichia coli
  CDS (1)..(369): transl_table=11
atgggttaccagatgctacgtggtgcactgaaaaaagaggcggtttctgcacctgcgccacaggtcgagctggcgaaaagtgggcgcagtttcctgaaaggtttactgaccaatctcgctaatccgaaagcgattatctactttggctcggtgttctcattgtttgtcggtgataacgttggcactaccgcgcgctggggcatttttgcgctgatcattgtcgaaacgctggcgtggtttaccgtcgttgccagcctgtttgccctgccgcaaatgcgccgtggttatcaacgtctggcgaagtggattgatggttttgccggggcgttatttgccggatttggcattcatttgattatttcgcggtaa

SEQ ID NO: 10727 - protein, 122 aa, Escherichia coli
MGYQMLRGALKKEAVSAPAPQVELAKSGRSFLKGLLTNLANPKAIIYFGSVFSLFVGDNVGTTARWGIFALIIVETLAWFTVVASLFALPQMRRGYQRLAKWIDGFAGALFAGFGIHLIISR

SEQ ID NO: 10728 - DNA, 369 bp, Shigella flexneri 2a str. 301
  CDS (1)..(369): transl_table=11
atgggttaccagatgctacgcggtgcactgaaaaaagaggctgtatctgcgcctgcaccacaggttgagctggcgaaaagcgggcgcagtttcctgaaaggcttactgaccaatctcgccaatccgaaagcgattatctattttggttcggtattctcattgtttgtcggcgataacgttggcactaccgagcgctggggcattttcgcgttgattattgtcgaaacactggcgtggtttaccgtcgttgccagtctgtttgccctgccgcaaatgcgccgtggttatcaacgtctggcgaagtggattgatggttttgccggggcgttatttgccggatttggcattcatttgattatttcgcggtga

SEQ ID NO: 10729 - protein, 122 aa, Shigella flexneri 2a str. 301
MGYQMLRGALKKEAVSAPAPQVELAKSGRSFLKGLLTNLANPKAIIYFGSVFSLFVGDNVGTTERWGIFALIIVETLAWFTVVASLFALPQMRRGYQRLAKWIDGFAGALFAGFGIHLIISR

SEQ ID NO: 10730 - DNA, 624 bp, Erwinia carotovora subsp. atroseptica SCRI1043
  CDS (1)..(624): transl_table=11
atgttgatgctatttctgacggtggcgctggtgcattttattgcgctgatgagcccggggccggatttcttttttgtttcacaaactgcggctagccgttcacgccgtgaagcgatgatgggcgtgctgggcatttctctgggcgtagtggtctgggcggctatcgcactgctgggactgcacctgctgttgcaaaaaatggcctggctgcatacggcaattaccgtcggtggcggactgtatctgtgctggatgggctggcagatgctgcgttctgcgcggagtaaagcacagttggaaaccacgcaggaaacggctgtggtattgccgcagcgcggtaaaacctttatgcgtggattattgacgaatctggcgaacccaaaagcgctgatctacttcggcagcgtgttttcactgtttgtcggcgacagcgtcggcagcggtgcgcgttggggcttgtttgcgctgatctcgattgaaacgctgttgtggttcagtctggtcgcgatagtgttcgcactacctaccatgcgtcgtggctatcagcgtctggcgaagtgggtggatggcgtggcgggcgtattgtttaccggtttcggcttgcacctgatcttctctcgctaa

SEQ ID NO: 10731 - protein, 207 aa, Erwinia carotovora subsp. atroseptica SCRI1043
MLMLFLTVALVHFIALMSPGPDFFFVSQTAASRSRREAMMGVLGISLGVVVWAAIALLGLHLLLQKMAWLHTAITVGGGLYLCWMGWQMLRSARSKAQLETTQETAVVLPQRGKTFMRGLLTNLANPKALIYFGSVFSLFVGDSVGSGARWGLFALISIETLLWFSLVAIVFALPTMRRGYQRLAKWVDGVAGVLFTGFGLHLIFSR

SEQ ID NO: 10732 - DNA, 621 bp, Yersinia pseudotuberculosis IP 32953
  CDS (1)..(621): transl_table=11
atgttgatgctatttctcaccgttgcgtttattcatctggttgctctgattagtccagggcctgacttcttttttgtatcgcaaactgccgccagccgctcacgtggtgaggcgatgatgggcgtgctggggatctcgctaggaattgttatttgggctggggtagcactgatggggttgaatctcatcttgcagaaaatggcttggctgcatcaaattattatggtcggcggtgggatgtatctgtgttggatggggtggcagctattgaaatcggcccgtgctaaacatgatgtcgccgaagaagaggtacaggtcgtcttgcctgcccgtggccgcacgtttatccgtggtctgctgaccaacctgtcgaacccaaaagccgttatctatttcggtagtgtattctcatggtttgtcggtgatgacgtgggtgcaggtgcgcgctgggggttgtttatcctgattgttggcgaaaccttcttatggttcaccgtggtggcctgcgtatttgcgttacccaccatgcgccgtggttatcagcggctttccaagtggattgatgggctggcaggtgtgttatttgccggttttggtatccaactgatattgtcccgctaa

SEQ ID NO: 10733 - protein, 206 aa, Yersinia pseudotuberculosis IP 32953
MLMLFLTVAFIHLVALISPGPDFFFVSQTAASRSRGEAMMGVLGISLGIVIWAGVALMGLNLILQKMAWLHQIIMVGGGMYLCWMGWQLLKSARAKHDVAEEEVQVVLPARGRTFIRGLLTNLSNPKAVIYFGSVFSWFVGDDVGAGARWGLFILIVGETFLWFTVVACVFALPTMRRGYQRLSKWIDGLAGVLFAGFGIQLILSR

SEQ ID NO: 10734 - DNA, 23 bp, Artificial sequence
  primer
atgggttaccagatgctacgtgg

SEQ ID NO: 10735 - DNA, 27 bp, Artificial sequence
  primer
ttaccgcgaaataatcaaatgaatgcc

SEQ ID NO: 10736 - protein, 123 aa, Artificial sequence
  consensus sequence
  Variant (3)..(3): Xaa in position 3 is any amino acid
  Variant (5)..(5): Xaa in position 5 is any amino acid
  Variant (7)..(8): Xaa in position 7 to 8 is any amino acid
  Variant (10)..(11): Xaa in position 10 to 11 is any amino acid
  Variant (13)..(21): Xaa in position 13 to 21 is any amino acid
  Variant (22)..(22): Xaa in position 22 is any or no amino acid
  Variant (24)..(24): Xaa in position 24 is any amino acid
  Variant (26)..(28): Xaa in position 26 to 28 is any amino acid
  Variant (30)..(31): Xaa in position 30 to 31 is any amino acid
  Variant (33)..(34): Xaa in position 33 to 34 is any amino acid
  Variant (41)..(41): Xaa in position 41 is any amino acid
  Variant (46)..(46): Xaa in position 46 is any amino acid
  Variant (55)..(55): Xaa in position 55 is any amino acid
  Variant (60)..(60): Xaa in position 60 is any amino acid
  Variant (63)..(65): Xaa in position 63 to 65 is any amino acid
  Variant (69)..(69): Xaa in position 69 is any amino acid
  Variant (71)..(71): Xaa in position 71 is any amino acid
  Variant (74)..(75): Xaa in position 74 to 75 is any amino acid
  Variant (78)..(79): Xaa in position 78 to 79 is any amino acid
  Variant (82)..(83): Xaa in position 82 to 83 is any amino acid
  Variant (86)..(87): Xaa in position 86 to 87 is any amino acid
  Variant (92)..(92): Xaa in position 92 is any amino acid
  Variant (101)..(101): Xaa in position 101 is any amino acid
  Variant (104)..(104): Xaa in position 104 is any amino acid
  Variant (107)..(107): Xaa in position 107 is any amino acid
  Variant (110)..(110): Xaa in position 110 is any amino acid
  Variant (113)..(113): Xaa in position 113 is any amino acid
  Variant (117)..(118): Xaa in position 117 to 118 is any amino acid
  Variant (121)..(121): Xaa in position 121 is any amino acid
MGXQXLXXAXXKXXXXXXXXXXVXLXXXGXXFXXGLLTNLXNPKAXIYFGSVFSXFVGDXVGXXXRWGXFXLIXXETXXWFXXVAXXFALPXMRRGYQRLXKWXDGXAGXLFXGFGXXLIXSR

SEQ ID NO: 10737 - protein, 60 aa, Artificial sequence
  protein pattern
  Variant (2)..(2): Xaa in position 2 is any amino acid
  Variant (7)..(7): Xaa in position 7 is any or no amino acid
  Variant (9)..(9): Xaa in position 9 is any or no amino acid
  Variant (17)..(17): Xaa in position 17 is any amino acid
  Variant (22)..(22): Xaa in position 22 is Asp, Asn or Ser
  Variant (25)..(25): Xaa in position 25 is Ala, Ser or Thr
  Variant (26)..(26): Xaa in position 26 is Gly or Thr
  Variant (27)..(27): Xaa in position 27 is Ala or Glu
  Variant (31)..(31): Xaa in position 31 is Ile or Leu
  Variant (33)..(33): Xaa in position 33 is Ala or Ile
  Variant (36)..(36): Xaa in position 36 is any amino acid
  Variant (37)..(37): Xaa in position 37 is Gly, Ile or Val
  Variant (40)..(40): Xaa in position 40 is Phe or Leu
  Variant (41)..(41): Xaa in position 41 is Ala or Leu
  Variant (44)..(44): Xaa in position 44 is Ser or Thr
  Variant (45)..(45): Xaa in position 45 is Leu or Val
  Variant (48)..(48): Xaa in position 48 is any amino acid
  Variant (49)..(49): Xaa in position 49 is Leu or Val
  Variant (54)..(54): Xaa in position 54 is Gln or Thr
LXNPKAXIXYFGSVFSXFVGDXVGXXXRWGXFXLIXXETXXWFXXVAXXFALPXMRRGYQ

SEQ ID NO: 10738 - protein, 21 aa, Artificial sequence
  protein pattern
  Variant (3)..(3): Xaa in position 3 is Ile or Val
  Variant (6)..(6): Xaa in position 6 is Phe, Leu or Val
  Variant (9)..(9): Xaa in position 9 is Ala or Val
  Variant (12)..(12): Xaa in position 12 is Ala or Thr
  Variant (16)..(16): Xaa in position 16 is Ile or Leu
  Variant (17)..(17): Xaa in position 17 is any amino acid
  Variant (20)..(20): Xaa in position 20 is Phe, Ile or Leu
KWXDGXAGXLFXGFGXXLIXS

SEQ ID NO: 10739 - protein, 22 aa, Artificial sequence
  protein pattern
  Variant (3)..(3): Xaa in position 3 is Trp or Tyr
  Variant (5)..(5): Xaa in position 5 is Leu or Met
  Variant (7)..(9): Xaa in position 7 to 9 is any or no amino acid
  Variant (11)..(11): Xaa in position 11 is any or no amino acid
  Variant (13)..(14): Xaa in position 13 to 14 is any amino acid
  Variant (15)..(15): Xaa in position 15 is Asp or Lys
  Variant (16)..(16): Xaa in position 16 is any amino acid
  Variant (17)..(17): Xaa in position 17 is Ala or Gln
  Variant (18)..(18): Xaa in position 18 is any amino acid
  Variant (19)..(19): Xaa in position 19 is Glu or Ser
  Variant (20)..(20): Xaa in position 20 is Ala, Glu or Thr
  Variant (21)..(21): Xaa in position 21 is Pro, Thr or Val
  Variant (22)..(22): Xaa in position 22 is Ala or Gln
MGXQXLXXXRXAXXXXXXXXXX

SEQ ID NO: 10740 - DNA, 2097 bp, Escherichia coli
  CDS (1)..(2097): transl_table=11
atgaaaaaaagacatctgcttagcttactggcgctgggcattagcacagcttgctacggcgaaacatatcctgcgcccattggtccgtcgcagtcggatttcggtggcgtaggattattacaaacgcccaccgcgcgtatggcacgggaaggggagttgagtctgaactatcgcgataacgatcagtaccgttattactcagcttcagtgcaactcttcccgtggctggaaacaacgctgcgctacaccgacgtgcgcacccggcagtacagcagcgtcgaagcgttctctggcgatcaaacgtataaagataaagccttcgatctcaaactgcgtttgtgggaagagagttactggctgccgcaagtggcggttggtgcgcgggatatcggcggtacggggctgtttgatgcggaatatcttgttgccagcaaagcctgggggccgttcgattttacgctcggcctgggctgggggtatttgggcaccagcggtaatgtgaaaaatccgctctgttcagccagtgataaatattgctatcgcgataacagctacaaacaggcgggatctatcgacggtagccagatgttccacggtcctgcctcactgtttggcggcgtggaataccagacgccctggcaaccgctgcgcctgaaactggagtatgaaggcaataattatcagcaggattttgccgggaagctggagcaaaaaagtaagtttaacgtcggtgcgatttatcgcgttaccgattgggccgacgttaaccttagctatgaacgtggcaacacctttatgtttggcgttacgttgcgcaccaactttaacgatctgcgcccgtcttacaacgataacgcccgcccgcaatatcaaccgcagccgcaggatgccattttgcagcattcggtggtggcgaatcagttaacgctgttgaaatacaatgccggacttgccgatccacagatccaggcgaaaggcgatacgctgtatgttaccggcgagcaggtgaaatatcgtgattcgcgcgaagggatcatccgtgcgaatcggatcgtgatgaacgatctgccggatgggatcaaaacgatccgcattacggaaaatcgccttaacatgccgcaggtgacgacggaaaccgatgtcgccagcctgaaaaatcatctcgccggagagccgttgggccacgaaacgacgctggcgcaaaaacgcgtcgagccagtggttccgcagtccaccgagcagggctggtatatcgacaaatcacgctttgatttccatatcgatccggtgctgaaccagtcggtcggtggcccggaaaacttttacatgtatcagctgggcgtgatgggaacggcagatttgtggctgacggaccatctgctgaccaccggcagcctgtttgcaaatcttgccaacaactacgacaagtttaactacactaatcctccgcaggactcgcacttaccgcgcgtgcgtacccatgtgcgcgagtatgtgcagaacgatgtctatgtgaataacctgcaagccaactacttccagcatctgggcaacggcttctacggtcaggtctacggtggttatctcgaaaccatgtttggcggtgcgggggcagaagtgttgtatcgcccgctggacagcaactgggcgtttggtctggatgccaactacgttaaacagcgcgactggcgtagtgcaaaagatatgatgaaattcaccgactacagcgtgaaaaccggacatctgaccgcctactggacgccatctttcgctcaggatgtgttagttaaagccagcgtcgggcagtatctggcaggggataaaggcggcacgctggagatcgccaaacgctttgatagcggcgtggtggtgggtggctatgccacgatcactaatgtttcgaaagaggagtacggcgaaggggacttcaccaaaggcgtgtatgtctcggtaccgttggatctcttctcgtctggcccgacacgcagccgtgcggcgattggctggacgccgctgacgcgtgacggtggtcagcaacttgggcgtaagttccagttgtatgacatgaccagcgaccgtagcgtcaatttccgctaa

SEQ ID NO: 10741 - protein, 698 aa, Escherichia coli
MKKRHLLSLLALGISTACYGETYPAPIGPSQSDFGGVGLLQTPTARMAREGELSLNYRDNDQYRYYSASVQLFPWLETTLRYTDVRTRQYSSVEAFSGDQTYKDKAFDLKLRLWEESYWLPQVAVGARDIGGTGLFDAEYLVASKAWGPFDFTLGLGWGYLGTSGNVKNPLCSASDKYCYRDNSYKQAGSIDGSQMFHGPASLFGGVEYQTPWQPLRLKLEYEGNNYQQDFAGKLEQKSKFNVGAIYRVTDWADVNLSYERGNTFMFGVTLRTNFNDLRPSYNDNARPQYQPQPQDAILQHSVVANQLTLLKYNAGLADPQIQAKGDTLYVTGEQVKYRDSREGIIRANRIVMNDLPDGIKTIRITENRLNMPQVTTETDVASLKNHLAGEPLGHETTLAQKRVEPVVPQSTEQGWYIDKSRFDFHIDPVLNQSVGGPENFYMYQLGVMGTADLWLTDHLLTTGSLFANLANNYDKFNYTNPPQDSHLPRVRTHVREYVQNDVYVNNLQANYFQHLGNGFYGQVYGGYLETMFGGAGAEVLYRPLDSNWAFGLDANYVKQRDWRSAKDMMKFTDYSVKTGHLTAYWTPSFAQDVLVKASVGQYLAGDKGGTLEIAKRFDSGVVVGGYATITNVSKEEYGEGDFTKGVYVSVPLDLFSSGPTRSRAAIGWTPLTRDGGQQLGRKFQLYDMTSDRSVNFR

SEQ ID NO: 10742 - DNA, 2097 bp, Escherichia coli
  CDS (1)..(2097): transl_table=11
atgaagaagaattcttatcttttaagctgcctggccattgccgtctccagtgcctgtcatgctgaagtattaacctacccggatccgctgggttcgtcgcaatcggactttggcggcacaggattgttgcagatgccaaatgcgcgcatcgcaccggaaggtgaattcagcgtcaactaccgggataacgatcaataccgtttctactccacctccgtggcgctgttcccatggctggaaggcaccattcgttatacggatgtgcgcacacgtaaatatagccagtgggaagatttcagcggcgatcagtcatacaaagacaaatcattcgattttaaacttcgcctgtgggaagaaggttactggctaccgcaagtggcgtttggtaaacgtgatattgctggtacgggtctgtttgacggtgagtatctggtggccagcaagcaagcggggccatttgatttcaccctcgggatggcatggggctacgccggtaatgcgggcaatattaccaacccgttttgccgggtgagcgataaatattgtcatcgcgcagagtctcacgatgcgggcgatatcagctttagcgatatctttcgtggcccggcttccatctttggcggcattgagtatcaaacgccgtggaatcccctgcgtctgaaactcgaatacgacggcaacaattaccagaatgatttcgctggcaaactgcctcaggcaagccatttcaacgtcggtgcagtttatcgcgctgccagctgggcagacctcaacctgagttatgaacgcggtaacacgttgatgtttggtttcactttacggaccaatttcaacgatctgcgccctgccctgcgcgatacgccaaaaccggcatatcaacctgcgcctgaatctgaaggattgcagtacaccacggtagcaaaccaacttaccgccctgaagtataacgcgggctttgacgcgccagaaattcagctacgcgataagacgctgtatatgtctggtcagcaatacaaataccgtgactctcgtgaagcggtcgatcgtgccaaccggattctggtgaataacctgccgcaaggcgttgagaagattagcgtgacgcaaaagcgcgagcatatggcgatggtgactaccgaaaccgacgtagccagcctgcgcaaacagctggcaggtacagcgcctggtcaatcagagccactgcaacaacaacgtgttgaagctgaagatctttctgcctttggtcggggctaccgtattcgtgaagatcgctttagctactctttcaacccaacactttcacagtcgctgggcggcccggaagatttctatatgttccagctggggctgatgtccagcgcccgctactggtttaccgaccacctgctgcttgatggcggtattttcaccaatatttacaacaactacgacaagtttaagtcttcgctgttgcccgcggactctaccctgccccgcgtgcgcacgcatatccgtgattacgttcgcaatgacgtttatctcaacaacttgcaagcgaattactttgccgacttaggcaatggtttctatggccaggtgtatggcggttatctggaaacgatgtatgccggtgtcggttccgagctgctttatcgcccgctagatgccagctgggcgctgggtgtggacgttaactacgtgaagcagcgtgactgggacaacatgatgcgcttcaccgattattccacgccaactggtttcgtgacggcttactggaacccgccgacgctcaatggcgtactgatgaaacttagcgttgggcaatatctggcaaaagataaaggggcaacgatcgacgtcgccaaacgctttgacagcggcgtggcggtaggggtatgggcggcaatcagtaacgtatctaaagatgactacggcgaaggcggctttagtaaaggtttttatatctcgattccgttcgacttgatgaccattggacctaaccgcaaccgcgcggtggtttcgtggacaccattgacgcgtgatggtggacaaatgctgtcacgcaaataccagctctatccaatgacggcagagcgagaagtaccggttggacaataa

SEQ ID NO: 10743 - protein, 698 aa, Escherichia coli
MKKNSYLLSCLAIAVSSACHAEVLTYPDPLGSSQSDFGGTGLLQMPNARIAPEGEFSVNYRDNDQYRFYSTSVALFPWLEGTIRYTDVRTRKYSQWEDFSGDQSYKDKSFDFKLRLWEEGYWLPQVAFGKRDIAGTGLFDGEYLVASKQAGPFDFTLGMAWGYAGNAGNITNPFCRVSDKYCHRAESHDAGDISFSDIFRGPASIFGGIEYQTPWNPLRLKLEYDGNNYQNDFAGKLPQASHFNVGAVYRAASWADLNLSYERGNTLMFGFTLRTNFNDLRPALRDTPKPAYQPAPESEGLQYTTVANQLTALKYNAGFDAPEIQLRDKTLYMSGQQYKYRDSREAVDRANRILVNNLPQGVEKISVTQKREHMAMVTTETDVASLRKQLAGTAPGQSEPLQQQRVEAEDLSAFGRGYRIREDRFSYSFNPTLSQSLGGPEDFYMFQLGLMSSARYWFTDHLLLDGGIFTNIYNNYDKFKSSLLPADSTLPRVRTHIRDYVRNDVYLNNLQANYFADLGNGFYGQVYGGYLETMYAGVGSELLYRPLDASWALGVDVNYVKQRDWDNMMRFTDYSTPTGFVTAYWNPPTLNGVLMKLSVGQYLAKDKGATIDVAKRFDSGVAVGVWAAISNVSKDDYGEGGFSKGFYISIPFDLMTIGPNRNRAVVSWTPLTRDGGQMLSRKYQLYPMTAEREVPVGQ

SEQ ID NO: 10744 - DNA, 2097 bp, Escherichia coli
  CDS (1)..(2097): transl_table=11
atgaaaaaaagacatctgcttagcttactggcgctgggcattagcacagcttgctacggcgaaacatatcctgcgcccattggtccgtcgcagtcggatttcggtggcgtaggattattacaaacgcccacggctcgcatggcgcgggaaggggagttgagtctgaactatcgcgataacgatcagtaccgttattactcagcttcagtgcaactcttcccgtggctggaaacaacgctgcgctacaccgacgtgcgcacccggcagtacagcagcgtcgaagcgttctctggcgatcaaacgtataaagataaagccttcgatctcaaactgcgtttgtgggaagagagttactggctgccgcaagtggcggttggtgcgcgggatatcggcggtacggggctgtttgatgcggaatatcttgttgccagcaaagcctgggggccgttcgattttacgcttggcctgggctggggatatttgggcacaagcggtaatgtgaaaaatccgctctgttcagccagtgataaatattgctatcgcgataacagctacaaacaggcgggatctatcgacggtagccagatgttccacggtcctgcctcactgtttggcggcgtggaataccagacgccctggcaaccgctgcgcctgaaactggagtatgaaggcaataattatcagcaggattttgccggtaagctggagcaaaaaagtaagtttaacgtcggggcgatttatcgcgttaccgattgggccgacgttaaccttagctatgaacgtgccaacacctttatgtttggcgtcacgctgcgcaccaactttaacgatctgcgcccgtcttacaacgataacgcccgcccgcaatatcaaccgcagccgcaggatgccattttgcagcattcggtggtggcgaatcagttaacgctgttgaaatacaatgccggacttgccgatccgcagatccaggcgaaaggcgatacgctgtatgttaccggcgagcaggtgaaatatcgtgattcgcgcgaagggatcgttcgtgctaatcggatcgtgatgaatgatctgccggatgggatcaagacgatccgcgttacggaaaatcgccttaacatgccgcaggtgacgacggaaacggatgtcgccagcctgaaaaatcatctcgccggagagccgttgggccacgaaacgaagctggcgcaaaaacgcgtcgagccagtggttccgaagtccaccgagcagggctggtatatcgacaaatcgcgctttgatttccatatcgatccggtgctgaaccagtcggtcggtggcccggaaaacttttacatgtatcagctgggcgtgatgggaacggcagatttgtggctgacggaccatctgctgaccaccggcagcctgtttgcaaatcttgccaacaactacgacaagtttaactacaccaatccgccgcaggactcgcacttaccgcgcgtgcgtacccatgtgcgcgagtatgtgcagaacgatgtctatgtgaataacctgcaagccaactacttccagcatctgggcaacggcttctacggtcaggtctacggaggttatctcgaaaccatgtttggcggtgcgggggcagaagtgttgtatcgcccgctggacagcaactgggcgtttggtctggatgccaactacgttaaacagcgcgactggcgtagtgcaaaggatatgatgaaattcaccgactacagcgtgaaaaccggacatctgaccgcctactggacgccatctttcgctcaggatgtgttagttaaagccagcgtcgggcagtatctggcaggggataaaggcggcacgctggagatcgctaaacgctttgacagcggcgtggtggtgggcggctatgccacgatcaccaacgtttcgaaagaggagtacggcgaaggggacttcaccaaaggcgtgtatgtctctgtaccgttggatctcttctcgtctggcccgacacgcagccgtgcggcgattggctggacgccgctgacgcgtgacggtggtcagcaacttgggcgtaagttccagttgtatgacatgaccagcgaccgtagcgtcaatttccgctaa

SEQ ID NO: 10745 - protein, 698 aa, Escherichia coli
MKKRHLLSLLALGISTACYGETYPAPIGPSQSDFGGVGLLQTPTARMAREGELSLNYRDNDQYRYYSASVQLFPWLETTLRYTDVRTRQYSSVEAFSGDQTYKDKAFDLKLRLWEESYWLPQVAVGARDIGGTGLFDAEYLVASKAWGPFDFTLGLGWGYLGTSGNVKNPLCSASDKYCYRDNSYKQAGSIDGSQMFHGPASLFGGVEYQTPWQPLRLKLEYEGNNYQQDFAGKLEQKSKFNVGAIYRVTDWADVNLSYERANTFMFGVTLRTNFNDLRPSYNDNARPQYQPQPQDAILQHSVVANQLTLLKYNAGLADPQIQAKGDTLYVTGEQVKYRDSREGIVRANRIVMNDLPDGIKTIRVTENRLNMPQVTTETDVASLKNHLAGEPLGHETKLAQKRVEPVVPKSTEQGWYIDKSRFDFHIDPVLNQSVGGPENFYMYQLGVMGTADLWLTDHLLTTGSLFANLANNYDKFNYTNPPQDSHLPRVRTHVREYVQNDVYVNNLQANYFQHLGNGFYGQVYGGYLETMFGGAGAEVLYRPLDSNWAFGLDANYVKQRDWRSAKDMMKFTDYSVKTGHLTAYWTPSFAQDVLVKASVGQYLAGDKGGTLEIAKRFDSGVVVGGYATITNVSKEEYGEGDFTKGVYVSVPLDLFSSGPTRSRAAIGWTPLTRDGGQQLGRKFQLYDMTSDRSVNFR

SEQ ID NO: 10746 - DNA, 2097 bp, Enterobacter cloacae
  CDS (1)..(2097): transl_table=11
ctgatgaacaaactttttttactgagcggccttgctctggcgatctcttctgcctgccacgcggagctgcgtacctggcccgatccgaccggaccgtcacagtccgattttggcggcaccggcctgatgcaaatgcccgacgcgcgctttggccgggaaggggaattcagcgtaaactaccgcgataacaaccagtaccgtttttactcctcttcggtcgtgctcttcccgtggctggaagggacaattcgctataccgacgtccgcacccgtaaatacagcagcaacgaggatttcagcggcgatcaaagctacaaggataagtcgttcgactttaaagttcgtctgtgggaagaggactatagcctgccgcaggtggcgctcggcaagcgtgatattgcaggcaccggcctgttcgatggtgaatatctggttgccagtaaaatggccggaccggtcgattttacctttggaatagcctggggatatcccggtaatagcgacaacgtgggtaacccgctttgccatgacaacaataagtattgcacccgcggcgagtcgcatgatgccggagatatcagctttagcgatatgtttcgtggtccggcgtctctgtttggcggcctccagtatcagacgccctggcagcccctgcgcctgaagcttgagtatgacggcaacaattatgccgatgattttgccggctccattaagcagtcgagccatattaacgtgggggcggtctatcgcgttgccgactgggccgatctcaacctcagctacgagcgcggcaatacgctgatgtttggcttcaccctgcggaccaactttaacgacctgcgccccgcgctgcgtgataacccgaaaccggcctggcaaccggcaccggcaggcgagacgctggactatacctctgcggcgaaccagctcaccgcgcttaagtacaacgcaggcttcgatgcgccggagatccttcagcacggcaataccttatacatgaccggcgaacagtatcgctatcgcgatccgcgcgaagcggtggatcgtgccaaccgtattctgatcaataacctgcccgacggggtcgacacgatcgctatcacccagcagcgtgatcatctgccgctcgtcacgacgcaaaccgatgtcgccagcctgcgcaaacagttggcggggcagccgctcggccaggaggaggcgctcaggcagcagcgcgtcgagcctgtggataccacagcattcgggcgtggctaccgtattcgcgccgatcgcttcagctacagcgttaaaccgacgctggcgcagtcgctgggcggtccggaagatttctatatgttccaggtgggggtgatggccagcgccagctactggctgaccgatcgtctgctgctcgacggcggcgtgttcgccaacctctataacaactacgacaagttcaaatcctcgctacttcccgctgactccagcctgccgcgcgtcagaacccatattcgcgattatgtcagcaatgacgtctacatcaacaacttacaagccaactatgtcgatgcgctggggaacggcttctatgcccagatttatggcggctacctcgaaaccatgtacggcggcgtgggagcagaggcgctctggcgcccgctggatagcgactgggcgctgggcgtggatgcgaattacgtcaagcagcgcgactgggacgacatgatgcgcttcaccgactacagcgtgccaaccggatttatcaccgcctactggaacccggcgaagctcaacagtgtgctaatgaagctgagcgtcgggcagtacctggcgaaggataaaggcgccaccctcgacgtcgcgaagcgattcgacagcggcgtgacggtaggcgtctgggcggcgctgaccaacgtctcgaaagaggattatggcgaaggtggctttagcaaaggcttctacatctcgatcccgcttgatctgatgacgatcggcccaaatcgcaaccgggcggtggtctcttggacgcctctcacgcgtgatggcggccagatgttaggccgtaaatatcagctctatgacatgacgtcagaacgcgaaaccccggtagggcagtag

SEQ ID NO: 10747 - protein, 698 aa, Enterobacter cloacae
LMNKLFLLSGLALAISSACHAELRTWPDPTGPSQSDFGGTGLMQMPDARFGREGEFSVNYRDNNQYRFYSSSVVLFPWLEGTIRYTDVRTRKYSSNEDFSGDQSYKDKSFDFKVRLWEEDYSLPQVALGKRDIAGTGLFDGEYLVASKMAGPVDFTFGIAWGYPGNSDNVGNPLCHDNNKYCTRGESHDAGDISFSDMFRGPASLFGGLQYQTPWQPLRLKLEYDGNNYADDFAGSIKQSSHINVGAVYRVADWADLNLSYERGNTLMFGFTLRTNFNDLRPALRDNPKPAWQPAPAGETLDYTSAANQLTALKYNAGFDAPEILQHGNTLYMTGEQYRYRDPREAVDRANRILINNLPDGVDTIAITQQRDHLPLVTTQTDVASLRKQLAGQPLGQEEALRQQRVEPVDTTAFGRGYRIRADRFSYSVKPTLAQSLGGPEDFYMFQVGVMASASYWLTDRLLLDGGVFANLYNNYDKFKSSLLPADSSLPRVRTHIRDYVSNDVYINNLQANYVDALGNGFYAQIYGGYLETMYGGVGAEALWRPLDSDWALGVDANYVKQRDWDDMMRFTDYSVPTGFITAYWNPAKLNSVLMKLSVGQYLAKDKGATLDVAKRFDSGVTVGVWAALTNVSKEDYGEGGFSKGFYISIPLDLMTIGPNRNRAVVSWTPLTRDGGQMLGRKYQLYDMTSERETPVGQ

SEQ ID NO: 10748 - DNA, 2097 bp, Escherichia coli O157:H7 EDL933
  CDS (1)..(2097): transl_table=11
  misc_feature (679)..(679): r is g or a
atgaagaagaattcttatcttttaagctgcctggccattgccgtctccagtgcctgtcatgctgaagtattaacctacccggatccgctgggttcgtcgcaatcggactttggcggcacaggattgttgcagatgccaaatgcgcgcatcgcaccggaaggtgaattcagcgtcaactaccgggataacgatcaataccgtttctactccacctccgtggcgctgttcccatggctggaaggcaccattcgttatacggatgtgcgcacacgtaaatatagccagtgggaagatttcagcggcgatcagtcatacaaagacaaatcattcgattttaaacttcgcctgtgggaagaaggttactggctaccgcaagtggcgtttggtaaacgtgatattgctggtacgggtctgtttgacggtgagtatctggtggccagcaagcaagcggggccatttgatttcaccctcgggatggcatggggctacgccggtaatgcgggcaatattaccaacccgttttgccgggtgagcgataaatattgtcatcgcgcagagtctcacgatgcgggcgatatcagctttagcgatatctttcgtggcccggcttccatctttggcggcattgagtatcaaacgccgtggaatcccctgcgtctgaaactcgaatacgacggcracaattaccagaatgatttcgctggcaaactgcctcaggcaagccatttcaacgtcggtgcagtttatcgcgctgccagctgggcagacctcaacctgagttatgaacgcggtaacacgttgatgtttggtttcactttacggaccaatttcaacgatctgcgccctgccctgcgcgatacgccaaaaccggcatatcaacctgcgcctgaatctgaaggattgcagtacaccacggtagcaaaccaacttaccgccctgaagtataacgcgggctttgacgcgccagaaattcagctacgcgataagacgctgtatatgtctggtcagcaatacaaataccgtgactctcgtgaagcggtcgatcgtgccaaccggattctggtgaataacctgccgcaaggcgttgagaagattagcgtgacgcaaaagcgcgagcatatggcgatggtgactaccgaaaccgacgtagccagcctgcgcaaacagctggcaggtacagcgcctggtcaatcagagccactgcaacaacaacgtgttgaagctgaagatctttctgcctttggtcggggctaccgtattcgtgaagatcgctttagctactctttcaacccaacactttcacagtcgctgggcggcccggaagatttctatatgttccagctggggctgatgtccagcgcccgctactggtttaccgaccacctgctgcttgatggcggtattttcaccaatatttacaacaactacgacaagtttaagtcttcgctgttgcccgcggactctaccctgccccgcgtgcgcacgcatatccgtgattacgttcgcaatgacgtttatctcaacaacttgcaagcgaattactttgccgacttaggcaatggtttctatggccaggtgtatggcggttatctggaaacgatgtatgccggtgtcggttccgagctgctttatcgcccgctagatgccagctgggcgctgggtgtggacgttaactacgtgaagcagcgtgactgggacaacatgatgcgcttcaccgattattccacgccaactggtttcgtgacggcttactggaacccgccgacgctcaatggcgtactgatgaaacttagcgttgggcaatatctggcaaaagataaaggggcaacgatcgacgtcgccaaacgctttgacagcggcgtggcggtaggggtatgggcggcaatcagtaacgtatctaaagatgactacggcgaaggcggctttagtaaaggtttttatatctcgattccgttcgacttgatgaccattggacctaaccgcaaccgcgcggtggtttcgtggacaccattgacgcgtgatggtggacaaatgctgtcacgcaaataccagctctatccaatgacggcagagcgagaagtaccggttggacaataa

SEQ ID NO: 10749 - protein, 698 aa, Escherichia coli O157:H7 EDL933
MKKNSYLLSCLAIAVSSACHAEVLTYPDPLGSSQSDFGGTGLLQMPNARIAPEGEFSVNYRDNDQYRFYSTSVALFPWLEGTIRYTDVRTRKYSQWEDFSGDQSYKDKSFDFKLRLWEEGYWLPQVAFGKRDIAGTGLFDGEYLVASKQAGPFDFTLGMAWGYAGNAGNITNPFCRVSDKYCHRAESHDAGDISFSDIFRGPASIFGGIEYQTPWNPLRLKLEYDGBNYQNDFAGKLPQASHFNVGAVYRAASWADLNLSYERGNTLMFGFTLRTNFNDLRPALRDTPKPAYQPAPESEGLQYTTVANQLTALKYNAGFDAPEIQLRDKTLYMSGQQYKYRDSREAVDRANRILVNNLPQGVEKISVTQKREHMAMVTTETDVASLRKQLAGTAPGQSEPLQQQRVEAEDLSAFGRGYRIREDRFSYSFNPTLSQSLGGPEDFYMFQLGLMSSARYWFTDHLLLDGGIFTNIYNNYDKFKSSLLPADSTLPRVRTHIRDYVRNDVYLNNLQANYFADLGNGFYGQVYGGYLETMYAGVGSELLYRPLDASWALGVDVNYVKQRDWDNMMRFTDYSTPTGFVTAYWNPPTLNGVLMKLSVGQYLAKDKGATIDVAKRFDSGVAVGVWAAISNVSKDDYGEGGFSKGFYISIPFDLMTIGPNRNRAVVSWTPLTRDGGQMLSRKYQLYPMTAEREVPVGQ

SEQ ID NO: 10750 - DNA, 2097 bp, Escherichia coli O157:H7 EDL933
  CDS (1)..(2097): transl_table=11
  misc_feature (580)..(580): w is a or t
  misc_feature (2024)..(2024): w is a or t
  misc_feature (2094)..(2094): y is t or c
atgaaaaaaagacatctgcttagcttactggcgctgggcattagcacagcttgctacggcgaaacatatcctgcgcccattggtccgtcgcagtcggatttcggtggcgtaggattattacaaacgcccacggctcgcatggcgcgggaaggggagttgagtctgaactatcgcgataacgatcagtaccgttattactcagcttcagtgcaactcttcccgtggctggaaacaacgctgcgctacaccgacgtgcgcacccggcagtacagcagcgtcgaagcgttctctggcgatcaaacgtataaagataaagccttcgatctcaaactgcgtttgtgggaagagagttactggctgccgcaagtggcggttggtgcgcgggatatcggcggtacggggctgtttgatgcggaatatcttgttgccagcaaagcctgggggccgttcgattttacgcttggcctgggctggggatatttgggcacaagcggtaatgtgaaaaatccgctctgttcagccagtgataaatattgctatcgcgataacagctacaaacaggcgggatctatcgacggtwgccagatgttccacggtcctgcctcactgtttggcggcgtggaataccagacgccctggcaaccgctgcgcctgaaactggagtatgaaggcaataattatcagcaggattttgccggtaagctggagcaaaaaagtaagtttaacgtcggggcgatttatcgcgttaccgattgggccgacgttaaccttagctatgaacgtgccaacacctttatgtttggcgtcacgctgcgcaccaactttaacgatctgcgcccgtcttacaacgataacgcccgcccgcaatatcaaccgcagccgcaggatgccattttgcagcattcggtggtggcgaatcagttaacgctgttgaaatacaatgccggacttgccgatccgcagatccaggcgaaaggcgatacgctgtatgttaccggcgagcaggtgaaatatcgtgattcgcgcgaagggatcgttcgtgctaatcggatcgtgatgaatgatctgccggatgggatcaagacgatccgcgttacggaaaatcgccttaacatgccgcaggtgacgacggaaacggatgtcgccagcctgaaaaatcatctcgccggagagccgttgggccacgaaacgaagctggcgcaaaaacgcgtcgagccagtggttccgaagtccaccgagcagggctggtatatcgacaaatcgcgctttgatttccatatcgatccggtgctgaaccagtcggtcggtggcccggaaaacttttacatgtatcagctgggcgtgatgggaacggcagatttgtggctgacggaccatctgctgaccaccggcagcctgtttgcaaatcttgccaacaactacgacaagtttaactacaccaatccgccgcaggactcgcacttaccgcgcgtgcgtacccatgtgcgcgagtatgtgcagaacgatgtctatgtgaataacctgcaagccaactacttccagcatctgggcaacggcttctacggtcaggtctacggaggttatctcgaaaccatgtttggcggtgcgggggcagaagtgttgtatcgcccgctggacagcaactgggcgtttggtctggatgccaactacgttaaacagcgcgactggcgtagtgcaaaggatatgatgaaattcaccgactacagcgtgaaaaccggacatctgaccgcctactggacgccatctttcgctcaggatgtgttagttaaagccagcgtcgggcagtatctggcaggggataaaggcggcacgctggagatcgctaaacgctttgacagcggcgtggtggtgggcggctatgccacgatcaccaacgtttcgaaagaggagtacggcgaaggggacttcaccaaaggcgtgtatgtctctgtaccgttggatctcttctcgtctggcccgacacgcagccgtgcggcgattggctggacgccgctgacgcgtgwcggtggtcagcaacttgggcgtaagttccagttgtatgacatgaccagcgaccgtagcgtcaatttccgytaa

SEQ ID NO: 10751 - protein, 698 aa, Escherichia coli O157:H7 EDL933
  misc_feature (194)..(194): The Xaa at location 194 stands for Cys, or Ser.
  misc_feature (675)..(675): The Xaa at location 675 stands for Asp, or Val.
MKKRHLLSLLALGISTACYGETYPAPIGPSQSDFGGVGLLQTPTARMAREGELSLNYRDNDQYRYYSASVQLFPWLETTLRYTDVRTRQYSSVEAFSGDQTYKDKAFDLKLRLWEESYWLPQVAVGARDIGGTGLFDAEYLVASKAWGPFDFTLGLGWGYLGTSGNVKNPLCSASDKYCYRDNSYKQAGSIDGXQMFHGPASLFGGVEYQTPWQPLRLKLEYEGNNYQQDFAGKLEQKSKFNVGAIYRVTDWADVNLSYERANTFMFGVTLRTNFNDLRPSYNDNARPQYQPQPQDAILQHSVVANQLTLLKYNAGLADPQIQAKGDTLYVTGEQVKYRDSREGIVRANRIVMNDLPDGIKTIRVTENRLNMPQVTTETDVASLKNHLAGEPLGHETKLAQKRVEPVVPKSTEQGWYIDKSRFDFHIDPVLNQSVGGPENFYMYQLGVMGTADLWLTDHLLTTGSLFANLANNYDKFNYTNPPQDSHLPRVRTHVREYVQNDVYVNNLQANYFQHLGNGFYGQVYGGYLETMFGGAGAEVLYRPLDSNWAFGLDANYVKQRDWRSAKDMMKFTDYSVKTGHLTAYWTPSFAQDVLVKASVGQYLAGDKGGTLEIAKRFDSGVVVGGYATITNVSKEEYGEGDFTKGVYVSVPLDLFSSGPTRSRAAIGWTPLTRXGGQQLGRKFQLYDMTSDRSVNFR

SEQ ID NO: 10752 - DNA, 2379 bp, Shewanella oneidensis MR-1
  CDS (1)..(2379): transl_table=11
atgaaaaagtcaactcccactttgcatgcattcgggcgtttatctgcgctgtcattagcattgctacctttattacatgttaacgccgatgaattttcttatcccacactcttaccttcacagtcagatttcggtggcgttggtctcatgcaaatgccaacgggccgtatggcgcccgaaggtgaatttaactttgccaccacttataacgatgactatcagcactttagtgcttcggtacagttatttccgtggtttgagaccaccattcgctatacccaagtacaagatttgctttatagcgatgacccaagctttagcggtaactctaaatacacagacaaaggcattgattttaaggttcgtctactcgaagaaagcaattggctacccgaaacctccattggggtacgggactttggcggcacaggtttatttgatggcgaatttattgccgcgacgaaacgagttggcccactggattttaccctcggcattggctggggttatattggcaatagcggtaatcttacctcggataaaaaagatcttaattacaactgtgacagagatacctcttttggtggttcgggtggcaccgttgattaccagcgctggtttaagggctgcgccgccctctttggcggcgttgaatatcaaaccccttgggaaccgttacgcttgaaagtcgaatatgacggtaacgactatcaatccgactaccctgttattcgtggcgaaagcactatgccacaggacagtaaatttaactacggactgctctatcggtttggtgattggggcgatctgcatttaagttatgagcgtggtaatacttggacgctcggctttagtctgcaaaccaattttaataccctatcgcagattaaaaccgatcctgctgccactaaatataagccgcttccagctgcgccattaacacctacacaaacagaatcctccacgccggtaaacataccaacagtcgcacaagtgactgttagtgctgatacttccgaaacgcataaatcagaagttcaaaatgcagaagtagcaaatctagaacctgtaaacgcatccaatcaggctgttacgaatacccaagtagattggaacaaggtcactcatgacttacaaactatcgcaggttatgcaaacgccaaaatttatctggctcatgacagcattaccgtagtaggtgaacaaacgacattccgcgatagaaatgaagcgcatcaaagagcagccactatccttgctaataacactgatgcaactcatatcaaagagtatcggctaattgaaacccgttataaccagccgataaccgaaactctaatcgatacacaaaagtttgcccaaattgcaagctatagttatctcaatgccaaaataactgacgccagtgttgtaagagttcccagcttacctcagggacaactggtcaatagtactgataaggattggctggataagcttagttttgatgtttcgccgaccatggcccaatcctttggtggttccgaaggtttttatatgttcaacattggggtgacaggcagtgcaaattatcgctttaccgataattttgatttttcaggttccctttatctgaatctttacgataactacgataagtttttatacgatgtgccacccgatggaacagacttaaaacgtgttcgtacacttatccgtcaatatgttcatgaaaatccagtaagggtgaatagcctacaactaacttggatggataatttaaccgataatatctcctaccaagcctatggtggctatctagaaatgatgtatggcggtgtggggacagagttcctctaccgaccacttaatagccaatgggcttttggtattgatgtgaattatgttaagcagcgcgatcccgatagcgtgtttggcttctttgaagatgagcatcaatatgatccaattacaaacagcaactacagagtacagacaggtacagtcacaggtaatgcgactttctactatcaacccgactggttccccaatactttattaagggtaagtgcaggccaatatttgactgaagataaaggtgtaacagttgatttctccaaacaattcgatagcggcgtaattgttggcgcctttgcgactaagactaacctttctgcggaggaatatggtgaaggcagctttaccaagggcttctacatctctatcccatttgatttaatgaccgtaaaatcaacccatagccgagcgacgatcagttggatgccactcacccgcgatggtggccaaatggtcggccgtaaatattatctctttgataatactgatgctcgctcaccttggttcactcgtctcagcactcaaactaagtcagtaaaataa

SEQ ID NO: 10753 - protein, 792 aa, Shewanella oneidensis MR-1
MKKSTPTLHAFGRLSALSLALLPLLHVNADEFSYPTLLPSQSDFGGVGLMQMPTGRMAPEGEFNFATTYNDDYQHFSASVQLFPWFETTIRYTQVQDLLYSDDPSFSGNSKYTDKGIDFKVRLLEESNWLPETSIGVRDFGGTGLFDGEFIAATKRVGPLDFTLGIGWGYIGNSGNLTSDKKDLNYNCDRDTSFGGSGGTVDYQRWFKGCAALFGGVEYQTPWEPLRLKVEYDGNDYQSDYPVIRGESTMPQDSKFNYGLLYRFGDWGDLHLSYERGNTWTLGFSLQTNFNTLSQIKTDPAATKYKPLPAAPLTPTQTESSTPVNIPTVAQVTVSADTSETHKSEVQNAEVANLEPVNASNQAVTNTQVDWNKVTHDLQTIAGYANAKIYLAHDSITVVGEQTTFRDRNEAHQRAATILANNTDATHIKEYRLIETRYNQPITETLIDTQKFAQIASYSYLNAKITDASVVRVPSLPQGQLVNSTDKDWLDKLSFDVSPTMAQSFGGSEGFYMFNIGVTGSANYRFTDNFDFSGSLYLNLYDNYDKFLYDVPPDGTDLKRVRTLIRQYVHENPVRVNSLQLTWMDNLTDNISYQAYGGYLEMMYGGVGTEFLYRPLNSQWAFGIDVNYVKQRDPDSVFGFFEDEHQYDPITNSNYRVQTGTVTGNATFYYQPDWFPNTLLRVSAGQYLTEDKGVTVDFSKQFDSGVIVGAFATKTNLSAEEYGEGSFTKGFYISIPFDLMTVKSTHSRATISWMPLTRDGGQMVGRKYYLFDNTDARSPWFTRLSTQTKSVK

SEQ ID NO: 10754 - DNA, 2097 bp, Escherichia coli CFT073
  CDS (1)..(2097): transl_table=11
atgaaaaaaagacatctgcttagcttactggcgctgggcattagcacagcttgctacggcgaaacatatcctgcgcccattggtccgtcgcaatcggatttcggtggcgtaggattattacaaacgcccaccgcgcgcatggcgcgggaaggggagctgagcctgaactatcgcgataacgatcagtaccgttattactcagcttcagtgcaactcttcccgtggctggaaacaacgctgcgctacaccgacgtgcgcacccggcagtacagcagcgtcgaagcgttctctggcgatcaaacgtataaagataaagccttcgatctcaaactgcgtttgtgggaagagagttattggctgccgcaagtggcggttggtgcgcgggatatcggcggtacggggctgtttgatgcggaatatcttgttgccagcaaagcctggtggccgttcgattttacactcggcctgggctggggatatctgggcaccagcggtaacgtgaaaaatccgctctgttcagccagtgataaatattgctatcgcgataacagctacaaacaagcgggatctatcgacggcagtcagatgttccacggcccggcctcactgtttggcggcgtggaataccagacgccctggcaaccgctgcgcctgaaactggagtatgaaggtaataattatcagcaggattttgccgggaagctggagcaaaaaagtaagtttaacgtcggggcgatttatcgcgttaccgattgggccgacgttaaccttagctatgaacgtggcaacacctttatgtttggcgtcacgctgcgcaccaactttaacgatctgcgcccgtcctacaacgataacgcccgaccgaaataccagccgcaaccgcaggatgccattttgcagcactcggtggtggcgaatcagttaacgctgttgaaatacaatgccggactggccgatccgcagatccaggcgaaaggcgatacgctgtatgtcaccggcgagcaggtgaaatatcgtgattcgcgcgaagggatcatccgtgctaatcggatcgtgatgaacgatctgcctgatgggatcaaaacgatccgcattacggaaaatcgccttaacatgccgcaggtgacgacggaaaccgatgtcgccagcctgaaaaatcatctcgccggagagccgttgggccacgaaacgaagctggcgcaaaaacgcgtcgagccagtggttccgaagtccaccgagcagggctggtatatcgacaaatcgcgctttgattttcatattgatccggtgctgaaccagtcggtcggtggcccggaaaacttttacatgtatcagctgggcgtgatgggaacggcggatttgtggctgacggaccatctgctgaccaccggcagcctgtttgctaaccttgccaacaactacgacaagtttaactacaccaatccaccgcaggactcgcacttaccgcgcgtgcgtacccatgtgcgcgagtatgtgcagaatgatgtctatgtgaataacctgcaagccaactacttccagcatctgggcaacggcttctacggtcaggtctacggaggttatctcgaaaccatgtttggcggcgtgggagcagaagtgttgtatcgcccgctggatagtaactgggcgtttggtctggatgccaactacgttaaacagcgcgactggcgtagcgcaaaagatatgatgaaattcaccgattacagcgtgaaaaccggacatctgaccgcgtactggacgccatctttcgcccaggacgtgttagtgaaagcgagcgtcgggcagtatctggctggggataaaggcggcacgctggagatcgccaaacgctttgatagcggcgtggtggtggggggctatgccacgatcacgaatgtttcgaaagaggagtacggcgaaggggacttcaccaaaggcgtgtatgtctctgtaccgctggatctcttctcgtctggcccgacacgcagccgtgcggcgattggctggacgccgctgacgcgtgacggtggtcagcaacttgggcgtaagttccagttgtatgatatgaccagcgaccgtagcgtcaatttccgctaa

SEQ ID NO: 10755 - protein, 698 aa, Escherichia coli CFT073
MKKRHLLSLLALGISTACYGETYPAPIGPSQSDFGGVGLLQTPTARMAREGELSLNYRDNDQYRYYSASVQLFPWLETTLRYTDVRTRQYSSVEAFSGDQTYKDKAFDLKLRLWEESYWLPQVAVGARDIGGTGLFDAEYLVASKAWWPFDFTLGLGWGYLGTSGNVKNPLCSASDKYCYRDNSYKQAGSIDGSQMFHGPASLFGGVEYQTPWQPLRLKLEYEGNNYQQDFAGKLEQKSKFNVGAIYRVTDWADVNLSYERGNTFMFGVTLRTNFNDLRPSYNDNARPKYQPQPQDAILQHSVVANQLTLLKYNAGLADPQIQAKGDTLYVTGEQVKYRDSREGIIRANRIVMNDLPDGIKTIRITENRLNMPQVTTETDVASLKNHLAGEPLGHETKLAQKRVEPVVPKSTEQGWYIDKSRFDFHIDPVLNQSVGGPENFYMYQLGVMGTADLWLTDHLLTTGSLFANLANNYDKFNYTNPPQDSHLPRVRTHVREYVQNDVYVNNLQANYFQHLGNGFYGQVYGGYLETMFGGVGAEVLYRPLDSNWAFGLDANYVKQRDWRSAKDMMKFTDYSVKTGHLTAYWTPSFAQDVLVKASVGQYLAGDKGGTLEIAKRFDSGVVVGGYATITNVSKEEYGEGDFTKGVYVSVPLDLFSSGPTRSRAAIGWTPLTRDGGQQLGRKFQLYDMTSDRSVNFR

SEQ ID NO: 10756 - DNA, 2250 bp, Vibrio vulnificus CMCP6
  CDS (1)..(2250): transl_table=11
atgacgtacttaaattcctcatcagaaatcccaagcgttggctttcgctctcaaatttccgccgtttgtcttggtgtactctccgcgctcgcaggcgtaacttctttgcattcacaagcctctgagcttgaaaccgtgacacttcgcccctcacaaactgattttggtggcgtgggtttaatgcaaatgccatctggccgtatggcaaaagaaggtgaattcaactttggtgttaacctcaacgacgattatcaacattattacacctcgctgcagttgttcgattggtttgaaaccaccattcgttacacgcgtgtgccggatatgctgtttaacccgaacccagattacagcggcgataatctctataccgataaaggtattgatttcaaaatacgcctttggcaagagagctactggttacctgaaacctcaattggtattcgtgattttggcgggacaggtttatttgatggcgagtttattgccgcgaccaaacggtttggccctatcgactttaccctaggtatgggatggggttatatcggccaaagcggcaattttaccaacccattttgtaaagccagcgacaagttttgtgaaaggccgagtgattataaaggctcaggtggcagcgttgattttgagcgctggtttaaaggccctgctgccctctacggcggcattgaatatcaaacaccgtatcaaccgctgcgcttgaaagtggaatacgatgccaacgattacagccaagatttcccttatgttcaaggtggtaagccaatgccacaacataccccttggaactttggcgtactctatcaacttggggattggggcgatgctaagctaagttatcaacgtggcgatacactgacgtttggttttaatctctacaccaattttgatgatctcaaagccgtttggcgagatgaaccaaagcaagccgttacgggaagaccaagcgaaggcaacaccgattggcaagcagtcgcccagcaactagacagcaacgcgggttatcagcaaagcaccttgtatgaacaaggcgatgctttggtgattgcgggtgagcaggttaaatacagtgatataaaagaagcgcaagatcgcgccgccacgattttagccaataacgcaccagactacatcactacctataagattgttgaaacgcgcaatggcgtggacttaacacaaaccgagtttgatgcagaagcttataaacaagcggcgacgtatcaataccttggtgccaatagccgtgagctaggcagtaccagcgagcccgattaccgtgaaaacgcaaaaccattgacgacacatcgcgagcgctggaacgcaggtatttctcctgtgttggcgcaatcattgggtggccctgaagcgttctacttgttccaccttggttttaataccgaagcgaactattggctaaccaacaacatcgaagcgagcggctctatctacgtcaaccttgccgataactacgacaagttcaactacgtagagaaagatcctcatatttcgaacttcgccgtgccgcgcgtgcgaacgatgttccgctcctacgtgagcgataaccctgttcgtctaaaccatatgcagctcacttggtttgctcaacctacgcagcaagtctatacccagatgtacggcggttatttggaaaccatgtttgctggtgtgggtggtgaagtgctttatcgtccattaggtaaaaactgggcgctgggcttggatgcgaacttaatctcacagcgtgacccagatagctggtttgctacgtttgatgaaccgtttgtttattacgatggctacgatgcctctaactgcaaaccaaacgatgttggctgccaagcttacgtgcttgataaaggcacaacgggtcaactttcggcttactacatgcctcagtggtctttgctagagaacacgttatttaaagtcagcgcgggtaagttcttgggcggtgacaacggggtacgcgtcgatttctccaaacagtttaaatccggcatgattgttggcgcatttgcgaccgtgacggacctgacgacagaggaatatggcgaaggcagttacaacaaaggcttctatatttcgattccatttgatgcgatgacgatcaaaccaagcacggcgcgtggtgtttttgcttggcaaccaatcacgcgagatggcggtcaaacactgagccgcaagtacgagctatttgaagtgaccaacgcgagaagccgttggtattaa

SEQ ID NO: 10757 - protein, 749 aa, Vibrio vulnificus CMCP6
MTYLNSSSEIPSVGFRSQISAVCLGVLSALAGVTSLHSQASELETVTLRPSQTDFGGVGLMQMPSGRMAKEGEFNFGVNLNDDYQHYYTSLQLFDWFETTIRYTRVPDMLFNPNPDYSGDNLYTDKGIDFKIRLWQESYWLPETSIGIRDFGGTGLFDGEFIAATKRFGPIDFTLGMGWGYIGQSGNFTNPFCKASDKFCERPSDYKGSGGSVDFERWFKGPAALYGGIEYQTPYQPLRLKVEYDANDYSQDFPYVQGGKPMPQHTPWNFGVLYQLGDWGDAKLSYQRGDTLTFGFNLYTNFDDLKAVWRDEPKQAVTGRPSEGNTDWQAVAQQLDSNAGYQQSTLYEQGDALVIAGEQVKYSDIKEAQDRAATILANNAPDYITTYKIVETRNGVDLTQTEFDAEAYKQAATYQYLGANSRELGSTSEPDYRENAKPLTTHRERWNAGISPVLAQSLGGPEAFYLFHLGFNTEANYWLTNNIEASGSIYVNLADNYDKFNYVEKDPHISNFAVPRVRTMFRSYVSDNPVRLNHMQLTWFAQPTQQVYTQMYGGYLETMFAGVGGEVLYRPLGKNWALGLDANLISQRDPDSWFATFDEPFVYYDGYDASNCKPNDVGCQAYVLDKGTTGQLSAYYMPQWSLLENTLFKVSAGKFLGGDNGVRVDFSKQFKSGMIVGAFATVTDLTTEEYGEGSYNKGFYISIPFDAMTIKPSTARGVFAWQPITRDGGQTLSRKYELFEVTNARSRWY

SEQ ID NO: 10758 - DNA, 2988 bp, Burkholderia pseudomallei K96243
  CDS (1)..(2988): transl_table=11
atgccgaagcgtgaggcgacgggccgcaagcggcgcggcggcacatggctggccgtcgtgctcgcatgcgcccgtcctttcgacgccgccgcgcacgtcgaagaaacgatcgccgcgccgacgcatctcggcgactggctcgccgcccatcagtcgacgcccgccgtcggaacgccgccgtccggcgcgccttcgccgtacctcggcggcctgagctggcgctcgaaccgcgaagtcgccgcacagcaggcgagcaagcgccgcctgctcgccggcatcgacgcgctgcccgcgctcacgccggccgcgcaggcggcgcgggcacgcctctcggcgatgatcgccgcgcgtgccgcaaccggccgcgtgatcgtcgcgcgaagcgatgcgcgctggctgcaggccaatcccgcccacgatccctatctcgaagccggcgacgtcgtgacgattcccgatcgcccgtcgagcgtcgccgtcgtgcgcgcggacggctcgatctgcacggtcgctcacgtgcaggacgtcgaagcattgccgtacgtgctcgcgtgcgcccccgacgcggcgcccgatctcgcgtggatcgcgcaacccgacggcacggtcagcgaaagcaaggtggcgatgtggaatcgcgacgtgcaggacacgccggcgcccggcagttggatctgggcgcccgatcggggcagccgatggccgccggccctgtcgcgcgccctggcggaattcatggcgacgcagggcgtatccgggctcgcggacgacggctcgccgctgcccgcgcctcccattgcgcccgtccaccagaccgcgtttccgagcggcgcgcccggccggtccgcagcgttcccggtaacgggcggcgactggggcacggcgggcattctgcaaacgccgaccgcgcgaatgaacgacgcgggcgaagcatcgctcagcatgagccacgtgagcccgtacacgcgcctgaacttcacgctgcagccgctcgattggctcgaaatcgggttccgctacaccgacgtcagcaatcagccgtacggccccgtctcgctgagcggcacccagtcgtacaaggacaagagcatcgacgcgaagctcaggctgtggcgcgaatccgcctatctgcccgacgtggccgtcggctttcgcgacatcgccggctcgggcctgttctccggcgagtacctggtggccagcaagcgaaccgggccgttcgactggagcgtcggcctcggctggggttacgtgggcgcgcgcggcaatctgcgcaacccgctggcggtgatcagccggcggttcgacgatcgcacgaacagcgcgacaccgaacggcggcgagctcggctacagctcatggtttcgcggccgcgtctcgccgttcggcggcgtgcaataccagacgccgcacgagcgcctcatcctgaaagccgaatacgacggcaacgactatcggcacgaaccgttcggtcaagtgctgaaggcgcgatcgccattcaacttcggcgccgtctatcgcgcgacgcgcaacatcgacttgagcctcggcttcgagcgaggcgcgcgcgtgatgttcggcgtctcgctgcacggcaatctgaagcgcgcgtcgatgcccaagctcggcaatccgccggctccgccggtgacgcaaccggccgcgaacgccgggccgcccccgccggccgccgatccggcatcgggcgacgcgcaagcggcgaccgcgccggcatcgcgcatcggacgcgcgtcgccgtcgccgttcgatcgcgactggtccggcaccgtcgcgcaattgcaggcgcaaacgcattggcacgtgcgcagcatccgtgcgctcggcatggatctcgtcgtcgagttcgacgacgtcgacgcgttctacctgcaggacccgctcgagcgcatcgcgacgatcctgaaccgtgacgcgccgctcaacgtgcgcacgttccatgtcgtcgcgctcgtgcacggcgtgccggttgccgactatcaggtgcagcgcacgcagtggtttgcgagccgcacccgcgccctcacgccgagcgaggctgcacccgacacggcgctcggccggccgctcacgcgacagtcgatcgacatgctgccctctctattcgagcagcggcccaaggccttcgtggcgtcggtcggcccgggctaccggcaaacccttggcggtccgaacggtttcctgctctaccagatctccgccgatgcatacggcgagctgagactgcccggcggcgcatggctcggcggcgaactgaacgtggggctcgtcgacaactacggcaagttcacctacacggcggacagcaagctgccgcgcgtgcgcacgtatctgcgcgagtacctgacgacgtcgcgcgtcacgctgccgctgctgcaactgacgaagatgggacgcctcggcaacgatcagttctacagcgtatacggcgggctgctcgaaagcatgttcgcgggcgtcggggccgaatggctgtatcgcccggcggatagccgcctcgcgatcggcgtcgacgtgaacgcggtgcggcagcgcggcttccgccaggatttctcgatgcgcgactaccggacgctcaccggacacgtgacggcgtattggaacaccggatggcaaggcgtccagatcaatctgagcgtcggccagtatctggcgaaggacaagggcgcgacgctcgacatctcgcggcgctttcgcaacggcgtcgtgatcggcgcctatgcgacgaagacgaacatatcggcggcccaattcggcgaaggcagcttcgacaagggcatctacctgacgattccgttcgacgcgatgatgacgcgctcgagcggcagcgtggcgaatctgcgctggaaccccgtgacgcgcgacggcggcgcgaagctggatcgcaaatatccgctgtacgatctcaccgacatgggcgagcgccgcagcttgtggtacgcgccgccggatggcgcattgtcgccgtga

SEQ ID NO: 10759 - protein, 995 aa, Burkholderia pseudomallei K96243
MPKREATGRKRRGGTWLAVVLACARPFDAAAHVEETIAAPTHLGDWLAAHQSTPAVGTPPSGAPSPYLGGLSWRSNREVAAQQASKRRLLAGIDALPALTPAAQAARARLSAMIAARAATGRVIVARSDARWLQANPAHDPYLEAGDVVTIPDRPSSVAVVRADGSICTVAHVQDVEALPYVLACAPDAAPDLAWIAQPDGTVSESKVAMWNRDVQDTPAPGSWIWAPDRGSRWPPALSRALAEFMATQGVSGLADDGSPLPAPPIAPVHQTAFPSGAPGRSAAFPVTGGDWGTAGILQTPTARMNDAGEASLSMSHVSPYTRLNFTLQPLDWLEIGFRYTDVSNQPYGPVSLSGTQSYKDKSIDAKLRLWRESAYLPDVAVGFRDIAGSGLFSGEYLVASKRTGPFDWSVGLGWGYVGARGNLRNPLAVISRRFDDRTNSATPNGGELGYSSWFRGRVSPFGGVQYQTPHERLILKAEYDGNDYRHEPFGQVLKARSPFNFGAVYRATRNIDLSLGFERGARVMFGVSLHGNLKRASMPKLGNPPAPPVTQPAANAGPPPPAADPASGDAQAATAPASRIGRASPSPFDRDWSGTVAQLQAQTHWHVRSIRALGMDLVVEFDDVDAFYLQDPLERIATILNRDAPLNVRTFHVVALVHGVPVADYQVQRTQWFASRTRALTPSEAAPDTALGRPLTRQSIDMLPSLFEQRPKAFVASVGPGYRQTLGGPNGFLLYQISADAYGELRLPGGAWLGGELNVGLVDNYGKFTYTADSKLPRVRTYLREYLTTSRVTLPLLQLTKMGRLGNDQFYSVYGGLLESMFAGVGAEWLYRPADSRLAIGVDVNAVRQRGFRQDFSMRDYRTLTGHVTAYWNTGWQGVQINLSVGQYLAKDKGATLDISRRFRNGVVIGAYATKTNISAAQFGEGSFDKGIYLTIPFDAMMTRSSGSVANLRWNPVTRDGGAKLDRKYPLYDLTDMGERRSLWYAPPDGALSP

SEQ ID NO: 10760 - DNA, 2919 bp, Burkholderia thailandensis E264
  CDS (1)..(2919): transl_table=11
gtgcatcctttcgatgccgccgcgcatgtcgaagaaacgatcgccgccccaatgtacctcggcgactggctcgcagcccgtcagccgacgcccgctgtcggcacgtcatcatccgagacgccttcgccgtacctgagcggcctgagctggcgatcgggtcgcgaagtcgcggctcagcaggcgaacaagcgccgcctgatcgccggcatcgaagcgctgcccgcgcccacgccggccgcgcaggcggcgcgagcgcgcttctcggcaatggttgccgcgcgccccgcgaccggacgcgtggtcgtcccccgaaccgacggacgatggttgcaggccaatcccgccagcgatcctcgtctcgaagccggcgacatcgtgacgattcccgatcgctcgtcgaccgtcaccgtcgtgcgcgcggacggctcgacatgcacggtcgcccacgcgcaagacgtcgaagcattgcagtacgtgctcgcgtgcgatcccgccgcgacgcccgatgtcgcgtggatcgcgcaacccgacggcacggtcagcgaaaacaaggtggccgcctggaatcgcgatgcgcaggatacgcccgcacccggcagctggatctgggcacccgatcgcggcagtcgatggacgccggccctgtcgcgcgcattggccgaatttctggcgacgcaaggcgtatcggaaccgaccggcgacggcgcgccgccgcacgcaccccgcattgcgccgcgccatcagaccgagtttctgaccggcgcgccgacccgctccgccgcattcccggtgacgggcggagactggggcacggcgggcatcctgcagacgccgaccgcgcggatgaacgacgccggagaagcgtcgctcagcatgagccacgtcagcccgtacacgcgcctcaatttcgcgttgcagccactcgactggctcgagatcggcttccgatacaccgacgtcagcaatcaaccgtacgggcccgtctcgctgagcggaacccagtcatacaaggacaagagcatcgacgcgaagatccggctatggcgcgaatccgcgtatctgcccgacgtggccgtcggctttcgcgacatcgccggatcggggctcttctccggcgagtacctggtggcgagcaagcggacggggccgttcgactggagcgtcggcctgggctggggctatatgggcgcgcgcggcaatctgcgcaacccgctgtcgatgatcagccgacggttcgacgatcgcgcgaacagcgcgacgccgaacggcggcgagctgggctacggctcgtggtttcgcgggcgcgtatcgcccttcggcggcgtgcagtaccagacgcccgacgagcgcctcatcctgaaggccgaatacgacggcaacgactatcggcacgagccgttcgggcaagtgttgaaggagcgatctccattcaacttcggcgccgtctatcgcgccacgcgcaacatcgacctgagcgtcggcttcgagcgaggcacgcgcgtgatgttcggcgtctcgctgcacggcaatctgaagcgtgcgacgatgcccaaactgggcaatccgccgcccgttccggtgacgcagccggccgcgaacgccgggccgcgcacgcacgccgccggcgcgccgacacgcggcgggcgatcggcggttgcgtcgacaccgcgtatcgaaggtgcatcgccttcgccgttcgatcgcgactggtcggacaccgtcgcgcaactccaggctcaaacgaattggcatgtgcgcagcatccgcgcgctcggcatggatctcgtcatcgagttcgacgacgtcgacgcgttctacctgcaggaccagatcgaccgcatcgcgacgatactgaaccgcgacgcgccgctcaacgtgcgcacgtttcacgtcgtcgcgctcacgcacggcgtgccggttgccgactatcaggtgcagcgcacgcagtggttcgcgagccgcacccgcgccctcgtgccgagcgaagtcgcccccgcgacgacgctcggcaggccgctcacgaatcagtcgatcgacatgctgccgccgctgttcgagcaacggccgagagccttcgtgctgtcggtcgggccgggctaccagcaaacgcttggcgggccgaacggcttcctgctctatcagatctcggccaacgcgtacggcgaattgagaatgcccggcggcgcgtggctcggcggcgaactgaacgtcgggctcgtcgacaactacggcaagttcacctacacggcggacagcaagctgccgcgcgtgcgcacctatctgcgcgagtatctgacgacgtcgcgcgtcacgctgccgctgctgcaactgacgaaaatcggacgtctcggcaacgatcagttctacagcgtctacggcggactgctcgaaagcatgttcgccggggtcggcgtggaatggctgtatcgccctgcgcatagccgtctcgcgatcggcgtcgacgtgaacgcggtgcgccagcgcggcttccgccaggatttttcgatgcgcggctacaagacgctcaccggacacgtgaccgcatactgggataccggttggcaaggcgtccagatcaatctgagcgtcggccagtatctggcgaaggacaagggcgcgacgctcgacatctcgcggcgctttcgcaatggcgtcgtgatcggcgcctatgcgacgaaaacgaacgtatcgccggcgcaattcggcgaaggcagcttcgacaagggcatctacgtgacgatcccgttcgacgcgatgatgacgcgctcgagcagcagcatcgcgaatctgcgttggaaccccgtgacgcgcgacggcggcgcgaagctggaccgcagatatccgctgtacgatctcaccgacatgggcgagcgccggagcttgtggtacgcgcctccggatggcgcggtctcgccgtga

SEQ ID NO: 10761 - protein, 972 aa, Burkholderia thailandensis E264
MHPFDAAAHVEETIAAPMYLGDWLAARQPTPAVGTSSSETPSPYLSGLSWRSGREVAAQQANKRRLIAGIEALPAPTPAAQAARARFSAMVAARPATGRVVVPRTDGRWLQANPASDPRLEAGDIVTIPDRSSTVTVVRADGSTCTVAHAQDVEALQYVLACDPAATPDVAWIAQPDGTVSENKVAAWNRDAQDTPAPGSWIWAPDRGSRWTPALSRALAEFLATQGVSEPTGDGAPPHAPRIAPRHQTEFLTGAPTRSAAFPVTGGDWGTAGILQTPTARMNDAGEASLSMSHVSPYTRLNFALQPLDWLEIGFRYTDVSNQPYGPVSLSGTQSYKDKSIDAKIRLWRESAYLPDVAVGFRDIAGSGLFSGEYLVASKRTGPFDWSVGLGWGYMGARGNLRNPLSMISRRFDDRANSATPNGGELGYGSWFRGRVSPFGGVQYQTPDERLILKAEYDGNDYRHEPFGQVLKERSPFNFGAVYRATRNIDLSVGFERGTRVMFGVSLHGNLKRATMPKLGNPPPVPVTQPAANAGPRTHAAGAPTRGGRSAVASTPRIEGASPSPFDRDWSDTVAQLQAQTNWHVRSIRALGMDLVIEFDDVDAFYLQDQIDRIATILNRDAPLNVRTFHVVALTHGVPVADYQVQRTQWFASRTRALVPSEVAPATTLGRPLTNQSIDMLPPLFEQRPRAFVLSVGPGYQQTLGGPNGFLLYQISANAYGELRMPGGAWLGGELNVGLVDNYGKFTYTADSKLPRVRTYLREYLTTSRVTLPLLQLTKIGRLGNDQFYSVYGGLLESMFAGVGVEWLYRPAHSRLAIGVDVNAVRQRGFRQDFSMRGYKTLTGHVTAYWDTGWQGVQINLSVGQYLAKDKGATLDISRRFRNGVVIGAYATKTNVSPAQFGEGSFDKGIYVTIPFDAMMTRSSSSIANLRWNPVTRDGGAKLDRRYPLYDLTDMGERRSLWYAPPDGAVSP

SEQ ID NO: 10762 - DNA, 2364 bp, Shewanella sp. MR-4
  CDS (1)..(2364): transl_table=11
atgaaaaactcgactcccactttgcatgcgttcgggcgtttatcagcgctgtccttagcactgctacctttattacatgttaacgccgatgaattttcctatcccacactgttaccatcacagtcagattttggtggtgttgggctaatgcagatgccaacaggacgtatggcacctgaaggtgaatttaactttgccactacttacaacgatgactatcaacattttagcgcttcagtgcagctcttcccttggtttgaaaccactattcgctacaccttagtacaagacctgctttacagtagcgatcctagctttagtggtaatactaaatacacggataaagggatcgattttaagattcgtctactcgaagaaagtaactggctccctgaaacctccattggcgtgcgagactttggtggtacaggtttatttgatggtgaatttattgctgcgacaaagcgcgtcggtccactcgattttactctaggtataggttggggctatattggcaatagcggtaatctcacttccgataaaaaagatcttaattacaactgtgatagagatacttcttatgggggtaaaggtggcactgttgattatcagcgttggtttaaaggctgcgcggcactctttggtggcgttgaatatcaaaccccttgggaacctttacgcttgaaagtcgaatacgatggtaacgactatcaatcagatttcccagtggttcgtggtgatatagccatgccacaggacagcaaatttaactatggaatgctttatcgctttggtgattggggcgatctacatttaagttatgagcgcggtaatacgtggacgctcggttttagtctgcaaacaaattttaataccttgtcgcagattaaacgtgatccagaggccgcaaaatataaaccgcttcctgctgcgccattaacgcatagtccgacagaaacatctagacatgcagacatgactaaatccgcacaagatattgaaaatataaaagctttatcagtaaaagatgacgaagtgcaaggctccgacctcttatctacctcatatcaaaccatgcccgatactaaagtggattggaataaagttgctcaggatttacaaactattgctggttacgcaaacgcaaaaatttaccttgataatgaaagcattaccgttgtaggtgaacagacaaaattccgcgatagaaatgaagcgcataaaagagctgccaccattcttgccaacaatactgatgccaactttattaaagagtatcgactaattgagactcgttatagtcaacctataacggaaacccgtattgatgcccagaagtttgcccaagtcgcaagttatggctacctcaatgccaaagtcaccgatgcaactgtagtgagtatcccaagcttacctcatggacaactagtcaataatactgataaagattggttagataagcttagctttgatgtttcgcccaccatgtcccaatccttcggcggttccgaagggttttatatgtttagtattggaatgacaggtagtgcaagttaccgctttaccgataactttgagttttcaagctctctgtatcttaacctctacgataactttgataagtttttatacgaagttccacccgatggcactgacttaaaacgtgttcgcaccctagttcgtcaatatattcatgataatccagttcgggtgaataacctgcaactgacttggatggataatttaaccgacaacatttctttccaagcctacggcggctatttagaaatgatgtatggtggtgtgggcacagaggttctctatcgaccacttaacagtcaatgggcttttggtatcgatgtgaattatgttaagcagcgcgatccagacagcatgctaggcttctttgatgatgagcatcaatttgactcactcactaaccgcccctatcgagtgcaaacgggtacaataacaggtcatgcatctgtctattatcaacctgactggttccccaataccttattaaggatcagtgcaggccagtatttagccgaggataaaggagtaacggttgatttctccaaacaattcgatagcggtgtgattgttggcgctttcgccactaagactaatctttcatcagatgagtatggtgagggcagttttactaaaggcttctacgtgtcgattccatttgacttgatgaccattaaatcaacccatagccgtgcgacaatcagttggatgccgctgacacgcgatggtggtcaaacattaggccgcaagtacagtctatatgatgtaatggatgctagagatccttggttcacacgtgcaagcatcacaagtgagtctgtcaaataa

SEQ ID NO: 10763 - protein, 787 aa, Shewanella sp. MR-4
MKNSTPTLHAFGRLSALSLALLPLLHVNADEFSYPTLLPSQSDFGGVGLMQMPTGRMAPEGEFNFATTYNDDYQHFSASVQLFPWFETTIRYTLVQDLLYSSDPSFSGNTKYTDKGIDFKIRLLEESNWLPETSIGVRDFGGTGLFDGEFIAATKRVGPLDFTLGIGWGYIGNSGNLTSDKKDLNYNCDRDTSYGGKGGTVDYQRWFKGCAALFGGVEYQTPWEPLRLKVEYDGNDYQSDFPVVRGDIAMPQDSKFNYGMLYRFGDWGDLHLSYERGNTWTLGFSLQTNFNTLSQIKRDPEAAKYKPLPAAPLTHSPTETSRHADMTKSAQDIENIKALSVKDDEVQGSDLLSTSYQTMPDTKVDWNKVAQDLQTIAGYANAKIYLDNESITVVGEQTKFRDRNEAHKRAATILANNTDANFIKEYRLIETRYSQPITETRIDAQKFAQVASYGYLNAKVTDATVVSIPSLPHGQLVNNTDKDWLDKLSFDVSPTMSQSFGGSEGFYMFSIGMTGSASYRFTDNFEFSSSLYLNLYDNFDKFLYEVPPDGTDLKRVRTLVRQYIHDNPVRVNNLQLTWMDNLTDNISFQAYGGYLEMMYGGVGTEVLYRPLNSQWAFGIDVNYVKQRDPDSMLGFFDDEHQFDSLTNRPYRVQTGTITGHASVYYQPDWFPNTLLRISAGQYLAEDKGVTVDFSKQFDSGVIVGAFATKTNLSSDEYGEGSFTKGFYVSIPFDLMTIKSTHSRATISWMPLTRDGGQTLGRKYSLYDVMDARDPWFTRASITSESVK

SEQ ID NO: 10764 - DNA, 2160 bp, Vibrio sp. Ex25
  CDS (1)..(2160): transl_table=11
atgggcccagcattggtttgggctcaagaagtaccctttgaggctccctcgttacagccttctcaatctgattttggtggtgttggcttaatgcagatgccaaccggacgtatggctcctgaaggggaattcaacttttctgttaccggtagtgatgagtaccttttttacaacgttactctgcaactaatgccttggttagaaacaaccattcgttatacttcggtgcgagatttgctctatagtaaggatcctagtttctcgggagatacaaactatacagataaaggtattgactttaaaattcgattgctaaaagaatctcagtatattcctgagctatcactgggtgttcgagactttgctggtaccggcttattcgatggagaatacatagcagctacgaagcggtattccaactctgagctagggacctttgattttacttttggtattggttgggggtcgctaggcactcgtgacaacatctctaacccgacttgtaaattgtcagatcgattttgtgaacgcccctctgactatttagatacaggtggcacaactaactttgatagagcatttaaaggaccaactgcattgtttggtggtgttgaatatcagaccttacatgcaccattacgttttaaactcgaatacgatagcaatgattacagcgaagacttccctgtggtaaaaggtggcgtggacatgacaccacatactccgtggaacgctggtatgctgtaccgtatcggaatggccgattttcgtttaagttatgaacgcggagacactttggttgcaggtttaacgctcaacactaacttcaatgacatgccatcattctggcgagatgagcctacgccagaagtcgaagataaccaaccagaagaactgtctaatgttgactgggaacgtgtaacggaagatttagacaaaattgcgggttaccaaaacacgcgcatttatgttgatgacaacaccgtaactgtcgttggtgaacagaagaaatatcgtgaccgtacagaggcacatgaaaaagcggcggctgtacttcataatgaaatgcctgaagatattgatacctatgcgatcaatgaacgtagccgaggcttagtcggcgaacaaacgattatttccaaggagaaatatcgcgactttgcccaagttaattacatcaaccctaaaatagaagatgcaaccgcaaaagctagcaataagccaagtggagaatctgtctatgatggttttgagcgttttgattggggctttgcaccgaagcttgttcaaactctcggtaacgcagaagacttctacctctttagtgtaggactaagcggtaatgcctcatactggctgacggataaccttgaaattggcggctccttatactgggattggtataacaactacgataagtttaactatgtcactccacctgatggtactaccgttcctcgtgttcgcaccatgttccgcgcttaccaaaatgaacatactgtaaccatgtcaaacctacaattgacttggttccaagagtattccaatacgatggaccagcaattctacgctggctatctggagagcatgtttgccggagtcggtaccgagtttctttaccgaccacaaggagctaactgggcgattggcgctgacgtcaacgtaatttctcaacgtgatccacaaagttacttcggtgtttacgatgagaaatggcaaaacgtgccagaatatggacgtccgttccaagttattgataaaggattcactggttttgtatctggttactactaccctcaatgggagttcctgcaagatttgatgatccaagtcgatgttggtcagttcctagctggcgatgttggtacacaaatcaatgtttctaagcagttcaagagtggcgtaattgctggcgcctttgcctcatttacagacttgtctgcggatgaatttggtgaaggtagctttactaaaggtttctacttgtcgattccgtttgacatcatgaccgttaaaccaagtaacaatcgtgcgaactttagttggcagcctcttactcgtgacggagggcagaagctcggccgcaaatacagcttaattgagttaaccgacgaacgaaatccttggtaccaaagacctaaccgttcggatgtggaataa

SEQ ID NO: 10765 - protein, 719 aa, Vibrio sp. Ex25
MGPALVWAQEVPFEAPSLQPSQSDFGGVGLMQMPTGRMAPEGEFNFSVTGSDEYLFYNVTLQLMPWLETTIRYTSVRDLLYSKDPSFSGDTNYTDKGIDFKIRLLKESQYIPELSLGVRDFAGTGLFDGEYIAATKRYSNSELGTFDFTFGIGWGSLGTRDNISNPTCKLSDRFCERPSDYLDTGGTTNFDRAFKGPTALFGGVEYQTLHAPLRFKLEYDSNDYSEDFPVVKGGVDMTPHTPWNAGMLYRIGMADFRLSYERGDTLVAGLTLNTNFNDMPSFWRDEPTPEVEDNQPEELSNVDWERVTEDLDKIAGYQNTRIYVDDNTVTVVGEQKKYRDRTEAHEKAAAVLHNEMPEDIDTYAINERSRGLVGEQTIISKEKYRDFAQVNYINPKIEDATAKASNKPSGESVYDGFERFDWGFAPKLVQTLGNAEDFYLFSVGLSGNASYWLTDNLEIGGSLYWDWYNNYDKFNYVTPPDGTTVPRVRTMFRAYQNEHTVTMSNLQLTWFQEYSNTMDQQFYAGYLESMFAGVGTEFLYRPQGANWAIGADVNVISQRDPQSYFGVYDEKWQNVPEYGRPFQVIDKGFTGFVSGYYYPQWEFLQDLMIQVDVGQFLAGDVGTQINVSKQFKSGVIAGAFASFTDLSADEFGEGSFTKGFYLSIPFDIMTVKPSNNRANFSWQPLTRDGGQKLGRKYSLIELTDERNPWYQRPNRSDVE

SEQ ID NO: 10766 - DNA, 2097 bp, Escherichia coli C str. ATCC 8739
  CDS (1)..(2097): transl_table=11
atgaagaagaattcttatcttttaagctgcctggccattgccgtctccagtgcctgtcatgctgaagtattaacctacccggatccgctgggttcgtcgcaatcagactttggcggcacaggattgttgcagatgccaaatgcgcgcatcgcaccggaaggtgaattcagcgtcaactaccgggataacgatcaataccggttctactccacctccgtggcgctgttcccatggctggaaggcaccattcgttatacggatgtgcgcacacgcaaatatagccagtgggaagatttcagcggcgatcagtcatacaaagacaaatcattcgattttaaacttcgcctgtgggaagaaggttactggctaccgcaagtggcgtttggtaaacgtgatattgctggtacgggtctgtttgacggtgagtatctggtggccagcaagcaagcggggccatttgatttcaccctcgggatggcatggggctacgccggtaatgcgggcaatattaccaacccgttttgccgggtgagcgataaatattgtcatcgcgcagagtctcacgatgcgggcgatatcagctttagcgatatctttcgtggcccggcttccatctttggcggcattgagtatcaaacgccgtggaatcccctgcgtctgaaactcgaatacgatggcaacaattaccagaatgatttcgctggcaaactgcctcaggcaagccatttcaacgtcggcgcagtttatcgcgctgccagctgggcagatctcaacctgagttatgtacgcggtaacacgttgatgtttggcttcacgttacggaccaatttcaacgatctgcgccctgccctgcgcgatacgccaaaaccggcatatcaacctgcgcctgaatctgaaggattgcagtacaccacagtagcgaaccaacttaccgcgctgaagtacaacgcaggttttgaagcaccggaaattcagctgcgcgataagacgctgtatatgtctggtcaacaatacaaataccgtgattctcgcgaagcggtcgatcgtgccaaccggattctggtgaataacctgccgcaaggcgttgagaagattagcgtgacgcaaaagcgcgagcatatggcgatggtgactaccgaaaccgacgtagccagcctgcgcaaacagctggctggtacagcgcctggtcaatcagagcaacttcaacaacaacgtgttgaagcagaagatctttctgcctttggtcggggctaccgtattcgtgaagatcgctttagctactctttcaacccaacactttcacagtcgctgggcggcccggaagatttctatatgttccagctggggctgatgtccagtgcccgctactggtttaccgaccacctgctgcttgatggcggtattttcaccaatatttacaacaactacgacaagtttaagtcttcgctgttgcccgcggactctaccctgccccgcgtgcgcacgcatatccgtgactacgttcgcaatgacgtttatctcaacaacttgcaggcgaactattttgctgacttaggcaatggtttctatggccagatgtatggcggttatctggaaacgatgtatgccggtgtcggttccgagctgctttatcgcccgctagatgccagctgggcgctgggtgtggacgttaactacgtgaagcagcgtgactgggacaacatgatgcgtttcaccgattattccacgccaacaggtttcgtgacggcttactggaacccgccgacgctcaatggcgtactgatgaaacttagcgttgggcaatatctggcaaaagataaaggcgcaacgatcgacgtcgccaaacgctttgacagcggcgtggcggtaggggtatgggcggcaatcagtaacgtatctaaagatgactacggcgaaggcggctttagtaaaggtttttatatctcgattccattcgacttgatgaccattggacctaaccgcaaccgcgcggtggtttcgtggacaccattgacgcgtgatggtggacaaatgctgtcacgcaaataccagctctatccaatgacggcagagcgagaagtaccggttggacaataa

SEQ ID NO: 10767 - protein, 698 aa, Escherichia coli C str. ATCC 8739
MKKNSYLLSCLAIAVSSACHAEVLTYPDPLGSSQSDFGGTGLLQMPNARIAPEGEFSVNYRDNDQYRFYSTSVALFPWLEGTIRYTDVRTRKYSQWEDFSGDQSYKDKSFDFKLRLWEEGYWLPQVAFGKRDIAGTGLFDGEYLVASKQAGPFDFTLGMAWGYAGNAGNITNPFCRVSDKYCHRAESHDAGDISFSDIFRGPASIFGGIEYQTPWNPLRLKLEYDGNNYQNDFAGKLPQASHFNVGAVYRAASWADLNLSYVRGNTLMFGFTLRTNFNDLRPALRDTPKPAYQPAPESEGLQYTTVANQLTALKYNAGFEAPEIQLRDKTLYMSGQQYKYRDSREAVDRANRILVNNLPQGVEKISVTQKREHMAMVTTETDVASLRKQLAGTAPGQSEQLQQQRVEAEDLSAFGRGYRIREDRFSYSFNPTLSQSLGGPEDFYMFQLGLMSSARYWFTDHLLLDGGIFTNIYNNYDKFKSSLLPADSTLPRVRTHIRDYVRNDVYLNNLQANYFADLGNGFYGQMYGGYLETMYAGVGSELLYRPLDASWALGVDVNYVKQRDWDNMMRFTDYSTPTGFVTAYWNPPTLNGVLMKLSVGQYLAKDKGATIDVAKRFDSGVAVGVWAAISNVSKDDYGEGGFSKGFYISIPFDLMTIGPNRNRAVVSWTPLTRDGGQMLSRKYQLYPMTAEREVPVGQ

SEQ ID NO: 10768 - DNA, 2097 bp, Salmonella typhimurium LT2
  CDS (1)..(2097): transl_table=11
atgaaaaaaacacatctgctcagcgtgctggcgctgggtattagcgcggcctgccatgccgaaacatatccagcccctgttgggccttcacaatctgactttggcggcgtgggcctgctgcaaacgccgacagcgcgtatggcgcgtgaaggggagatgagcctgaactatcgcgataacgatcagtaccgctactactcggcttcggttcagcttttcccgtggctggaaaccacgttgcgctataccgatgtccgtacgaaaaagtacagcagcgtggaatcattctccggcgaccagacttacaaagataaagcgtttgatgtgaaactgcggttgtgggaagagagttactggatgccgcaggtggcggttggcgcgcgcgatatcggcgggacggggctgtttgatgcggaatatattgtagcgagtaaggcctgggggccgtttgatttttcattaggtctcggctggggctatcttggcaccagcggcaatgtgtctaatcctttctgttcgtatagtgataaattctgttcgcgtgataacagctacaaagaggcaggttccgtcgacggtagcgatatgtttcacggcccggcctcgctgtttggcggcgtggaataccagaccccgtggcaaccgctacgcctgaagctggagtatgaaggcaataactatcagcaggattttgcgggtaaactggagcagaagagcaagtttaacgtcggcgccatttaccgcgtcaccgattgggccgacgttaacctcagctacgagcgcggcaatacctttatgtttggcgttacgctgcgcaccaatttcaacgatttacgtcccgcgtatcatgacaattcacgcccgcaataccgaccacagccgcaggatgccatcctgcaacattcggtagtggctaatcaattaacgttattgaaatataatgccggtctggcggacccgaaaatccaggtcaaaggcgatacgctatacgttaccggtgaacaggtgaagtaccgcgactcccgtgaagggatcgtgcgcgctaaccggatcgtcatgaacgatctgccggaggggatccgcacgatccgcgtgacggaaaaccgccttaatctgccgcaggtcaccactgaaaccgatgtcgccagcctgaaacgccatctggaaggcgaaccgctgggacatgaaactccgctggcgcaaaaacgcgtggagccgatcgtgccagagagtactgaacagggctggtatatcgacaagtcgcgcgttgattttcatcttgatcccgtgctgaatcagtcggtaggcggcccggaaaacttctatatgtatcagttgggcgtaatgggaactgcggatctgtgggtcacggatcatctgctcaccacgggcagcgtgtttgccaatatcgccaacaactacgacaaatttaactacaccaatccgccgaaggactcgcatctgccgcgggtgcgtacgcatgtccgtgagtatgtgcagaatgatgtttatgtgaataacctacaggccaactacttccagtattttggcaatggtttctatgggcaggtctacggtggttatctggagaccatgtttggcggtgccggggcggaagtcctgtatcgcccggtagacagcaattgggcgtttggcctggatgccaactacgtgaaacagcgtgactggcgtagcgcgcaggatatgatgaagtttaccgattacagcgtgaagaccggacatttgaccgcatactggacgccgtcgttcgcccaggatgtgctggtgaaagccagcgttggtcagtatctggcgggcgataaaggcggtacgctggagatcgccaaacgcttcgatagcggcgtcgttgtcggcggttacgcgacgattaccgatgcgtcgccggatgaatatggggaaggggattttaccaaaggcgtatatgtttccgtgccgctggatatcttctcgtccggcccaacccgaagtcgtgcggcaattggctggacgccgctgacgcgtgacggtggtcaacagcttggccgtaagtttggcctgtatgatatgaccagtgacaggagcgtaaatttccgttaa

SEQ ID NO: 10769 - protein, 698 aa, Salmonella typhimurium LT2
MKKTHLLSVLALGISAACHAETYPAPVGPSQSDFGGVGLLQTPTARMAREGEMSLNYRDNDQYRYYSASVQLFPWLETTLRYTDVRTKKYSSVESFSGDQTYKDKAFDVKLRLWEESYWMPQVAVGARDIGGTGLFDAEYIVASKAWGPFDFSLGLGWGYLGTSGNVSNPFCSYSDKFCSRDNSYKEAGSVDGSDMFHGPASLFGGVEYQTPWQPLRLKLEYEGNNYQQDFAGKLEQKSKFNVGAIYRVTDWADVNLSYERGNTFMFGVTLRTNFNDLRPAYHDNSRPQYRPQPQDAILQHSVVANQLTLLKYNAGLADPKIQVKGDTLYVTGEQVKYRDSREGIVRANRIVMNDLPEGIRTIRVTENRLNLPQVTTETDVASLKRHLEGEPLGHETPLAQKRVEPIVPESTEQGWYIDKSRVDFHLDPVLNQSVGGPENFYMYQLGVMGTADLWVTDHLLTTGSVFANIANNYDKFNYTNPPKDSHLPRVRTHVREYVQNDVYVNNLQANYFQYFGNGFYGQVYGGYLETMFGGAGAEVLYRPVDSNWAFGLDANYVKQRDWRSAQDMMKFTDYSVKTGHLTAYWTPSFAQDVLVKASVGQYLAGDKGGTLEIAKRFDSGVVVGGYATITDASPDEYGEGDFTKGVYVSVPLDIFSSGPTRSRAAIGWTPLTRDGGQQLGRKFGLYDMTSDRSVNFR

SEQ ID NO: 10770 - DNA, 2097 bp, Shigella flexneri 2a str. 301
  CDS (1)..(2097): transl_table=11
atgaagaagaattcttatcttttaagctgcctggccattgccgtctccagtgcctgtcatgctgaagtattaacctacccggatccgctgggttcgtcgcaatcagactttggcggcacaggattgttgcagatgccaaatgcgcgcatcgcaccggaaggtgaattcagcgtcaactaccgggataacgatcaataccggttctactccacctccgtggcgctgttcccatggctggaaggcaccattcgttatacggatgtgcgcacacgcaaatatagccagtgggaagatttcagcggcgatcagtcatacaaagacaaatcattcgattttaaacttcgcctgtgggaagaaggttactggctaccgcaagtggcgtttggtaaacgtgatattgctggtacgggtttgtttgacggtgaatatctggtggccagcaagcaagcggggccatttgatttcaccctcgggatggcatggggctacgccggtaatgcgggcaatattaccaacccgttttgccgggtgagcgataaatattgtcatcgcgcagagtctcacgatgcgggcgatatcagctttagcgatatctttcgtggcccggcttccatctttggcggcattgagtatcaaacgccgtggaatcccctgcgtctgaaactcgaatacgacggcaacaattaccagaatgatttcgctggcaaactgcctcaggcaagccatttcaacgtcggtgcagtttatcgcgctgccagctgggcagacctcaacctcagttatgaacgcggaaacacgttgatgtttggtttcactttacggaccaatttcaacgatctgcgccctgccctacgcgatacgccaaaaccggcctggcagcctgcgccagagtctgaaggtttgcagtacaccacggtagcaaaccaacttaccgccctgaagtataacgcgggctttgacgcgccagaaattcagctacgcgataagacgctgtatatgtctggtcagcaatacaaataccgtgactctcgcgaagcggtcgatcgtgccaaccggattctggtgaataacctgccgcaaggcgttgagaagattagcgtgacgcaaaagcgcgagcatatggcgatggtgactaccgaaaccgacgtagccagcctgcgcaaacagctggccggcacagcgcctggtaaatcagagcaactgcaacaacaacgtgttgaagcagaagatctttctgcctttggtcggtgctaccgtattcgtgaagatcgctttagctactctttcaacccaacactttcacagtcgctgggcggcccggaagatttctatatgttccagctggggctgatgtccagcgcccgctactggtttaccgaccacctgctgcttgatgacggtattttcaccaatatttacaacaactacgacaagtttaagtcttcactgttacccgcggactctaccctgccccgcgtgcgcacgcatatccgtgattacgttcgcaatgacgtttatctcaacaacttgcaagcgaattactttgccgacttaggcaatggtttctatggccaggtgtatggcggttatctggaaacgatgtatgccggtgtcggttccgagcttctttatcgcccgctagatgccagctgggcgctgggtgtggacgttaactacgtgaagcagcgtgactgggacaacatgatgcgcttcaccgattattccacgcccacaggtttcgtgacggcttactggaacccgccgacgctcaatggcgtactgatgaaacttagcgttgggcaatatctggcaaaagataaaggcgcaacgatcgacgtcgccaaactctttgacagcggcgtggcggtaggggtatgggcggcaatcagtaacgtatctaaagatgactacggcgaaggcggctttagtaaaggtttttatatctcgattccgttcgacttgatgaccattggacctaaccgcaaccgcgcggtggtttcgtggacaccattgacgcgtgatggtggacaaatgctgtcacgcaaataccagctcgatccaatgacggcagagcgagaagtaccggttggacaataa

SEQ ID NO: 10771 - protein, 698 aa, Shigella flexneri 2a str. 301
MKKNSYLLSCLAIAVSSACHAEVLTYPDPLGSSQSDFGGTGLLQMPNARIAPEGEFSVNYRDNDQYRFYSTSVALFPWLEGTIRYTDVRTRKYSQWEDFSGDQSYKDKSFDFKLRLWEEGYWLPQVAFGKRDIAGTGLFDGEYLVASKQAGPFDFTLGMAWGYAGNAGNITNPFCRVSDKYCHRAESHDAGDISFSDIFRGPASIFGGIEYQTPWNPLRLKLEYDGNNYQNDFAGKLPQASHFNVGAVYRAASWADLNLSYERGNTLMFGFTLRTNFNDLRPALRDTPKPAWQPAPESEGLQYTTVANQLTALKYNAGFDAPEIQLRDKTLYMSGQQYKYRDSREAVDRANRILVNNLPQGVEKISVTQKREHMAMVTTETDVASLRKQLAGTAPGKSEQLQQQRVEAEDLSAFGRCYRIREDRFSYSFNPTLSQSLGGPEDFYMFQLGLMSSARYWFTDHLLLDDGIFTNIYNNYDKFKSSLLPADSTLPRVRTHIRDYVRNDVYLNNLQANYFADLGNGFYGQVYGGYLETMYAGVGSELLYRPLDASWALGVDVNYVKQRDWDNMMRFTDYSTPTGFVTAYWNPPTLNGVLMKLSVGQYLAKDKGATIDVAKLFDSGVAVGVWAAISNVSKDDYGEGGFSKGFYISIPFDLMTIGPNRNRAVVSWTPLTRDGGQMLSRKYQLDPMTAEREVPVGQ

SEQ ID NO: 10772 - DNA, 2097 bp, Shigella flexneri 2a str. 301
  CDS (1)..(2097): transl_table=11
atgaaaaaaagacatctgcttagcttactggcgctgggcattagcacagcttgctacggcgaaacatatcctgcgcccattggtccgtcgcagtcggatttcggtggcgtaggattattacaaactcccaccgcgcgtatggcacgggaaggggagttgagtctgaactatcgcgataacgatcagtaccgttattactcagcttcagtgcaactcttcccgtggctggaaacaacgctgcgctacaccgacgtgcgcacccggcagtacagcagcgtcgaagcgttctctggcgatcaaacgtataaagataaagccttcgatctcaaactgcgtttgtgggaagagagttactggctgccgcaagtggcggttggtgcgcgggatatcggcggtacggggctgtttgatgcggaatatcttgttgccagcaaagcctgggggccgttcgattttacgctcggcctgggctggggatatctgggcaccagcggtaatgtaaaaaatccgctctgttcagccagtgataaatattgctatcgcgataacagctacaaacaggcgggatctatcgacggtagccagatgttccacggtcctgcctcactgtttggcggcgtggaataccagacgccctggcaaccgctgcgtctgaaactggagtatgaaggtaataattatcagcaggattttgccgggaagctggagcaaaaaagtaagtttaacgtcggggcgatttatcgcgttaccgattgggccgacgttaaccttagctatgaacgtggcaacacctttatgtttggcgtcacgctgcgcaccaactttaacgatctgcgcccgtcctacatcgataacgcccgcccgcaatatcaaccgcagccgcaggatgccattttgcagcattcggtggtggcgaatcagttaacgttgctgaaatacaacgccggacttgccgatccgcagatccaggcgaaaggcgatacgctgtatgttaccggcgagcaggtgaaatatcgtgattcgcgcgaagggatcatccgtgctaatcggatcgtgatgaacgatctgccggatgggatcaaaacgatccgcattacggaaaatcgccttaacatgccgcaagtgacgacggaaaccgatgtcgccagcctgaaaaatcatctcgccggagagccgttgggccacgaaacgacgctggcgcacaaacgcgtcgagccagtggttccgaagtccaccgagcagggctggtatatcgacaaatcacgctttgatttccatatcgatccggtgctgaaccagtcggtcggtggcccggaaaacttttacatgtatcagctgggcgtgatgggaacggcagatttgtggctgacggaccatctactgaccaccggcagcctgtttgcaaatcttgccaacaactacgacaagtttaactacaccaatccaccgcaggactcgcacttaccgcgcgttcgtacccatgtgcgcgagtatgtgcagaacgatgtctatgtgaataacctgcaagccaactacttccagcatctgggcaacggcttctacggtcaggtctatggaggttatctcgaaaccatgtttggcggtgcgggggccgaagtgttgtatcgtccgctggacagtaactgggcgtttggtctggatgccaactacgttaaacagcgcgactggcgtagtgcaaaagatatgatgaaattcaccgactacagcgtgaaaaccggacatctgaccgcctactggacgccatctttcgcccaggacgtgttggtgaaagccagcgtcgggcagtatctggcaggggataaaggcggcacgctggagatcgctaaacgctttgacagcggcgtggtggtgggtggctatgccacgatcaccaacgtttcgaaagaggagtacggcgaaggggacttcaccaaaggcgtgtatgtctcggtaccgttggatctcttctcgtctggcccgacacgcagccgtgcggcgattggctggacgccgctgacgcgtgacggtggtcagcaacttgggcgtaagttccagttgtatgacatgaccagcgaccgtagcgtaaatttccgctaa

SEQ ID NO: 10773 - protein, 698 aa, Shigella flexneri 2a str. 301
MKKRHLLSLLALGISTACYGETYPAPIGPSQSDFGGVGLLQTPTARMAREGELSLNYRDNDQYRYYSASVQLFPWLETTLRYTDVRTRQYSSVEAFSGDQTYKDKAFDLKLRLWEESYWLPQVAVGARDIGGTGLFDAEYLVASKAWGPFDFTLGLGWGYLGTSGNVKNPLCSASDKYCYRDNSYKQAGSIDGSQMFHGPASLFGGVEYQTPWQPLRLKLEYEGNNYQQDFAGKLEQKSKFNVGAIYRVTDWADVNLSYERGNTFMFGVTLRTNFNDLRPSYIDNARPQYQPQPQDAILQHSVVANQLTLLKYNAGLADPQIQAKGDTLYVTGEQVKYRDSREGIIRANRIVMNDLPDGIKTIRITENRLNMPQVTTETDVASLKNHLAGEPLGHETTLAHKRVEPVVPKSTEQGWYIDKSRFDFHIDPVLNQSVGGPENFYMYQLGVMGTADLWLTDHLLTTGSLFANLANNYDKFNYTNPPQDSHLPRVRTHVREYVQNDVYVNNLQANYFQHLGNGFYGQVYGGYLETMFGGAGAEVLYRPLDSNWAFGLDANYVKQRDWRSAKDMMKFTDYSVKTGHLTAYWTPSFAQDVLVKASVGQYLAGDKGGTLEIAKRFDSGVVVGGYATITNVSKEEYGEGDFTKGVYVSVPLDLFSSGPTRSRAAIGWTPLTRDGGQQLGRKFQLYDMTSDRSVNFR

SEQ ID NO: 10774 - DNA, 2199 bp, Vibrio parahaemolyticus RIMD 2210633
  CDS (1)..(2199): transl_table=11
atgaacctgatcagaaccagtttatccctttctttaataggtccagcgttggtgtgggctcaagacatgcctttcgaagcaccaccattgcaaccatcacaaatggactttggtggtgtcggcttaatgcagatgccaaccggtcgtatggcgcctgaaggtgagtttaactttgctattaacaacagtaatgagtacacattttacaatgttactttgcaagtgatgccatggttagaaactactattcgttatactactgcaaaagatgttctttacagcgaagaccccaatttttctggcaacaatgaatacactgataaaggcatcgattttaaagttcgacttttgcaagagtctaagtacttaccagaactttctgttggtgtacgtgactttgcaggcaccggcctttttgatggtgaatttgttgccgcgacaaaacgttactctaacccaaacctcggtacctttgattttacgttaggtattggttggggctacttaggtacgcgcgacaacatcagcaacccagcttgtaagctgtccgatagtttctgtgaacgcccttcagactttaaaggtaatggcggtagtgtggattttgaacgttggttcaaaggccctgctgcactctttggtggtgttgagtatcaaactttgcacgccccactgcgatttaagcttgaatacgacagcaacgattacagcgaagacttccctgttgtacgtggtggtgtagacatgacgcctcatacaccttggaactttggtgttctgtatcgtttaggacatatggcagatttgcgcttgagctacgagcgcggtgacacgttagttgcaggcgtaagcctttacacaaacttcaataatatgccgtctttctggcgtgatacaccaacgccagaagttgaagacaagcaaccagagcaactgtctgatgtagattgggaacgtgttaccgaggagctggataaaattgctggctaccaaaatacccaactctatgttgaagataataccgtttcggttgtcggcgagcagaagaagtatcgcgaccgcaacgaagctcatgaaaaagcagcggcagtcctttataacgaaatgccagacaacattgatacctttactatcaatgaacgcagtagtggtctgatcggcgatcaaacggttatctccaaagagaaataccgtgactttgcagaagttaactacatcaatccaaatatcgaagatgcaacatcaacctcaagcgataaaccgcaaggtaaacctgcttacgatggttttgagcgctttgattggagcttctcaccaaaactggctcaaaccttaggcaacccagaagagttctatctgttcagtgtcggcttaagtggcagcgcctcttactggctgacagataacctagaaattggtggctcgctatactgggattggtacaacaactacgacaagtttaactacgtcaccccaccagacggcacttcgattcctcgtgtacgtaccatgttccgcgcttatcagaatgaacacgcggtaaccatgtccaacctgcagttaacttggttccaagaatactcagataccatggaccaacagttctacgctggttatctagaaagtatgttcgcgggtgtgggtaccgaattcttgtaccgaccgaaaggcgcaaactgggctatcggtgcagatgtaaacttgatctctcaacgtgatccgcaaagctacttcggtgtatacgacgagaaatggcaatacgttccagaatatgggcgtccgttccaagttgtagacaaaggctttactggttttgtgtcgggttattactacccgcaatgggacttcctacaagatttgatgattcaagtcgatgtaggtcaattcctagccggtgatgtcggtacgcaagtgaatgtatctaaacagttcaagagtggtgtcattgcaggtgcattcgcatcaatcagtgatttgtctgctgacgaattcggtgaaggtagctttactaaaggcttctacatttcgattccattcgacatcatgacagtgaaaccaagcaacaaccgcgcgttctttagctggcagccattgactcgcgatggtggtcaaaagctaggtcgtaagtacagcttgattgaacttactgatgaacgtaacccttggtaccagagaccaaacgcgtcaaacgctaaataa

SEQ ID NO: 10775 - protein, 732 aa, Vibrio parahaemolyticus RIMD 2210633
MNLIRTSLSLSLIGPALVWAQDMPFEAPPLQPSQMDFGGVGLMQMPTGRMAPEGEFNFAINNSNEYTFYNVTLQVMPWLETTIRYTTAKDVLYSEDPNFSGNNEYTDKGIDFKVRLLQESKYLPELSVGVRDFAGTGLFDGEFVAATKRYSNPNLGTFDFTLGIGWGYLGTRDNISNPACKLSDSFCERPSDFKGNGGSVDFERWFKGPAALFGGVEYQTLHAPLRFKLEYDSNDYSEDFPVVRGGVDMTPHTPWNFGVLYRLGHMADLRLSYERGDTLVAGVSLYTNFNNMPSFWRDTPTPEVEDKQPEQLSDVDWERVTEELDKIAGYQNTQLYVEDNTVSVVGEQKKYRDRNEAHEKAAAVLYNEMPDNIDTFTINERSSGLIGDQTVISKEKYRDFAEVNYINPNIEDATSTSSDKPQGKPAYDGFERFDWSFSPKLAQTLGNPEEFYLFSVGLSGSASYWLTDNLEIGGSLYWDWYNNYDKFNYVTPPDGTSIPRVRTMFRAYQNEHAVTMSNLQLTWFQEYSDTMDQQFYAGYLESMFAGVGTEFLYRPKGANWAIGADVNLISQRDPQSYFGVYDEKWQYVPEYGRPFQVVDKGFTGFVSGYYYPQWDFLQDLMIQVDVGQFLAGDVGTQVNVSKQFKSGVIAGAFASISDLSADEFGEGSFTKGFYISIPFDIMTVKPSNNRAFFSWQPLTRDGGQKLGRKYSLIELTDERNPWYQRPNASNAK

SEQ ID NO: 10776 - DNA, 2097 bp, Salmonella enterica subsp. enterica serovar Typhi Ty2
  CDS (1)..(2097): transl_table=11
atgaaaaaaacacatctgctcagcgtgctggcgctgggtattagcgcggcctgccatgccgaaacatatccagcccctgttgggccttcacaatctgactttggcggcgtgggcctgctgcaaacgccgacagcgcgtatggcgcgtgaaggggagatgagcctgaactatcgcgataacgatcagtaccgctactactcggcttcggttcagcttttcccgtggctggaaaccacgttgcgctataccgatgtccgtacgaaaaagtacagcagcgtggaatcattctccggcgaccagacttacaaagataaagcgtttgatgtgaaactgcggttgtgggaagagagttactggatgccgcaggtggcggttggcgcgcgcgatatcggcgggacggggctgtttgatgcggaatatattgtagcgagtaaggcttgggggccatttgatttttcattaggtctcggctggggctatcttggcaccagcggcaatgtgtctaatcctttctgttcgtatagtgataaattctgttcgcgtgataacagctataaagaggccggttccgtcgacggtagcgatatgtttcacggcccggcttcgctgtttggcggcgtggaataccagaccccgtggcaaccgctacgcctgaagctggagtatgaaggcaataactatcagcaggattttgcggggaaactggaacagaagagcaagtttaacgtcggcgccatttactgcgtcaccgattgggccgacgttaacctcagctacgagcgcggcaacacctttatgtttggcgttacgctgcgcaccaatttcaacgatttacgtcccgcgtatcatgacaattcacgcccgcaataccgaccacagccgcaggatgccatcctgcaacattcggtagtggctaatcaattaacgttattgaaatataatgccggtctggcggacccgaaaatccaggtcaaaggcgatacgctatacgttaccggtgaacaggtgaagtaccgcgactcccgtgaggggatcgtgcgcgctaaccggatcgtcatgaacgatctgccggaggggatccgcacgatccgcgtgacggaaaaccgccttaatctgccgcaggtcaccactgaaaccgatgtcgccagcctgaaacgccatctggaaggcgaaccgctgggacatgaaactccgctggcgcaaaaacgcgtggagccgatcgtgccagagagtactgaacagggttggtatatcgacaagtcgcgcattgattttcatcttgatcccgtgctgaatcagtcggtaggcggcccggaaaacttctatatgtatcagttgggcgtaatgggaactgcggatctgtgggtcacggatcatctgctcaccacgggcagcgtgtttgccaatatcgccaacaactacgacaaatttaactacaccaatccaccgaaggactcgcatctgccgcgggtgcgtacgcatgtccgtgagtatgtgcagaatgatgtttatgtgaataacctacaggccaactacttccagtattttggcaatggtttctatgggcaggtctatggcggttatctggagaccatgtttggcggtgccggggcggaagtcctgtatcgcccggtagacagcaattgggcgtttggtctggatgccaactacgtgaaacagcgtgactggcgtagcgcgcaggatatgatgaagtttaccgattacagcgtgaagaccggacatttgaccgcatactggacgccgtcgttcgcccaggatgtgctggtgaaagccagcgttggtcagtatctggcgggcgataaaggcggtacgctggagatcgccaaacgcttcgatagcggcgtcgttgtcggcggttacgcgacgattaccgatgcgtcgccggatgaatatggggaaggggattttaccaaaggcgtatatgtttccgtaccgctggatctcttctcgtccggcccaacccgaagtcgtgcggcaattggctggacgccgctgacgcgtgacggtggtcaacagcttggccgtaagtttggcctgtatgatatgaccagtgacaggagcgtaaatttccgttaa

SEQ ID NO: 10777 - protein, 698 aa, Salmonella enterica subsp. enterica serovar Typhi Ty2
MKKTHLLSVLALGISAACHAETYPAPVGPSQSDFGGVGLLQTPTARMAREGEMSLNYRDNDQYRYYSASVQLFPWLETTLRYTDVRTKKYSSVESFSGDQTYKDKAFDVKLRLWEESYWMPQVAVGARDIGGTGLFDAEYIVASKAWGPFDFSLGLGWGYLGTSGNVSNPFCSYSDKFCSRDNSYKEAGSVDGSDMFHGPASLFGGVEYQTPWQPLRLKLEYEGNNYQQDFAGKLEQKSKFNVGAIYCVTDWADVNLSYERGNTFMFGVTLRTNFNDLRPAYHDNSRPQYRPQPQDAILQHSVVANQLTLLKYNAGLADPKIQVKGDTLYVTGEQVKYRDSREGIVRANRIVMNDLPEGIRTIRVTENRLNLPQVTTETDVASLKRHLEGEPLGHETPLAQKRVEPIVPESTEQGWYIDKSRIDFHLDPVLNQSVGGPENFYMYQLGVMGTADLWVTDHLLTTGSVFANIANNYDKFNYTNPPKDSHLPRVRTHVREYVQNDVYVNNLQANYFQYFGNGFYGQVYGGYLETMFGGAGAEVLYRPVDSNWAFGLDANYVKQRDWRSAQDMMKFTDYSVKTGHLTAYWTPSFAQDVLVKASVGQYLAGDKGGTLEIAKRFDSGVVVGGYATITDASPDEYGEGDFTKGVYVSVPLDLFSSGPTRSRAAIGWTPLTRDGGQQLGRKFGLYDMTSDRSVNFR

SEQ ID NO: 10778 - DNA, 2250 bp, Vibrio vulnificus YJ016
  CDS (1)..(2250): transl_table=11
atgacgtacttcaattcctcatcagaaatcccaagcgttggctttcgctctcaaatttccgccgtttgtcttggcgtgctctccgcgcttgcaggcgtaacttctttgcattcacaagcctctgagcttgaaaccgtgacacttcgcccctcacaaactgattttggtggcgtgggtttaatgcaaatgccgtctggccgtatggcaaaagagggtgaattcaactttggtgttaacctcaacgacgactaccaccattattacacctcgctgcagttgtttgattggtttgaaaccaccatccgctatacacgaattcctgacactttatacaatccaaatcctgactacagcggcgataatctaaacacagacaaaggtatagatatcaagtttcgtctctggcaagagagctattggcttcctgaaacctccattggtattcgcgatattggcggaactggtttatttgatggcgagtttattgcgggtacaaaacgctttggccctctcgatgtcacccttggcgttggttggggatatattggtcaaagtggcaatatttctaatcctttctgtaaagtgagtgaagaatattgtgacagagacggcccaacaaaaggaactggagggagtgtcgattttggtcgctggtttaaaggggaggcttcgatttacggtggcattgaatatcaaacaccgtatcaaccactgcgcttgaaagtggaatacgatgccaacgactacactacggattacccagttcgcgctgttaacaaaccgatgccacaacatactccttggaactttggcgtgctctaccaacttggggattggggcgatgccaagttaagttaccaacgtggcgatacactgacctttggttttaatctctacaccaattttgaggatctcaaagcggtttggcgagatgaaccaaagcaagccgtcacgggaagaccaagcgaaggcaataccgattggcaagcagtcgcccagcaactagacagcaacgcgggttatcagcaaagcaccttgtatgaacaaggcgatgctttggtgattgcgggtgagcaggttaaataccgtgatagaaaagaagcgcaagatcgcgccgccgcgattttagccaataacgcaccagactacatcactacctataagattgttgatacgcgcaatggcgtggacttaacacaaaccgagtttgacgcagaagcttataaacaagcggcgacgtatcaataccttggtgccaatagccgtgagctaggcagtaccagcgagcccgattaccgtgaaaacgcaaaaccattgacgacacatcgcgagcgctggaacgcaggtatttctcctgtgttggcgcaatcattaggtggcccggaagcgttctacttgttccaccttggttttaataccgaagcgaactattggctaactgataacatcgaagcgagtggttctatctacgtcaaccttgccgataactacgacaagttcaactacgtagagaaagatcctcatatttcgaacttcgccgtgccgcgcgtgcgaacgatgttccgctcctacgtgagcgataaccctgttcgtctaaaccatatgcagctcacctggtttgctcagcctacgcagcaagtctatacccaaatgtacggcggttatttggaaaccatgtttgctggtgtaggtggtgaagtgctttaccgtccattaggtaaaaactgggctttgggcttggatgcgaacttaatctcacagcgtgacccagatagctggtttgctacctttgatgagccgtttgtttattacgatggctacgacgcctctaactgcaaaccaaacgatgttggctgccaagcttacgtgcttgataaaggcacaacgggtcaactttcggcttactacatgcctcagtggtctttgttggagaacacgttgtttaaagtcagcgcgggtaagttcttgggcggcgacaacggggtacgcgtcgatttctccaaacagtttaaatccggcatgattgttggtgcatttgcgaccgtgacggacctgacgacagaggaatatggcgaaggcagttacaacaaaggcttctatatttcgattccatttgatgcgatgacgatcaaaccaagcacggcgcgtggtgtttttgcttggcaaccaatcacgcgagatggcggtcaaacactgagtcgcaagtacgagctatttgaagtgaccaacgcgagaagccgttggtattaa

SEQ ID NO: 10779 - protein, 749 aa, Vibrio vulnificus YJ016
MTYFNSSSEIPSVGFRSQISAVCLGVLSALAGVTSLHSQASELETVTLRPSQTDFGGVGLMQMPSGRMAKEGEFNFGVNLNDDYHHYYTSLQLFDWFETTIRYTRIPDTLYNPNPDYSGDNLNTDKGIDIKFRLWQESYWLPETSIGIRDIGGTGLFDGEFIAGTKRFGPLDVTLGVGWGYIGQSGNISNPFCKVSEEYCDRDGPTKGTGGSVDFGRWFKGEASIYGGIEYQTPYQPLRLKVEYDANDYTTDYPVRAVNKPMPQHTPWNFGVLYQLGDWGDAKLSYQRGDTLTFGFNLYTNFEDLKAVWRDEPKQAVTGRPSEGNTDWQAVAQQLDSNAGYQQSTLYEQGDALVIAGEQVKYRDRKEAQDRAAAILANNAPDYITTYKIVDTRNGVDLTQTEFDAEAYKQAATYQYLGANSRELGSTSEPDYRENAKPLTTHRERWNAGISPVLAQSLGGPEAFYLFHLGFNTEANYWLTDNIEASGSIYVNLADNYDKFNYVEKDPHISNFAVPRVRTMFRSYVSDNPVRLNHMQLTWFAQPTQQVYTQMYGGYLETMFAGVGGEVLYRPLGKNWALGLDANLISQRDPDSWFATFDEPFVYYDGYDASNCKPNDVGCQAYVLDKGTTGQLSAYYMPQWSLLENTLFKVSAGKFLGGDNGVRVDFSKQFKSGMIVGAFATVTDLTTEEYGEGSYNKGFYISIPFDAMTIKPSTARGVFAWQPITRDGGQTLSRKYELFEVTNARSRWY

SEQ ID NO: 10780 - DNA, 2133 bp, Erwinia carotovora subsp. atroseptica SCRI1043
  CDS (1)..(2133): transl_table=11
atgaccaagaacagaaacgttaaactaggctgtctgtcgttggcaattggcggcattctgagtgcgcaggctatggcggctgaaacagaaaacagccgtactgcgacgaacccgaatctgcgttttcagcctgcgggtgtgtcgcagtctgatttcggtggcacgggcttattgcaaatgccaaccgcacgcatggcggaaacgggtgaatttagccttaactaccgcgacaatgaggattatcgacgttactccgtgtccctccaactctttgactggctggaaacaacggtgcgttataccgatatccgtacccgactttatagcgacgacgcgtctttcagcggtaatcaaacctacaaggacaaagccttcgatctcaaggctcgcttgtggcaggaaagctactggatgccggatgtatcgctggggttgcgcgatattgctggtaccgggttgttcgatagcgaatatctggtagccagcaagcgtatggggccgtttgatttcaccttgggtatggggtggggcaatatggcggagagcgggaatattaaaaacccagcctgttcgctgaaagccagcttctgcaatcgtactcagaatacagaaatcggtcagtttgaggttaagaatttcttacatggtccggcggcactgtttggtggaattgaatatcagacgccatgggatccgctgcgcctgaaactcgagtatgacagcaacgattatagtaatgagactgcagatggtgcgcgaagcgagaaaatcaagcaggattctcctttcaacatcggggcagtttaccgcgtgggcgatatactggataccacgctgtcgtggcagcggggcaataccctgatgtggggctttaccctacgtactaactttaacagtttgaaaccaaactatttagacgatgcaccaccagtctatgcgccggtgcaggatggtaaagggacaaactggcagctagtttcgaaagagctgaatgataaggctggctttaaggacgccgatatctacgcggaccaaaagcaggtcaccattgttgccgatcagacaaaatatcgtgatagtgagcaggccacacagcgtgctgccaccgtattggcgaaccatgtcccaggtagtcttgatgaatatcacattgttcagcgcagccagcgcttaccgattgccagtacggaagtcgatgccaaagccttccatcaggttcaacaggctgctattccgcttggtcaacctgaacctgctacgcatcgcaaagaaccggtatctgacgtgcgtggtcagcaggtgctgctcgcagagcccgatcgtctgacgtattcattagatccgacgctggtacagtctttcggtggtcctgaatccttctatatgtaccaaatcgcgcttaaaggcaatgtggactaccgtctaagcgatcactggagcgtggggggaaccgcgctgctgaatctggtgaataactatgacaagtttaactataaatcaccgccggccgatggcgcggcattgccgcgagtcagaacctgggtgcgtgaatattccacatcttccgatctgttattgaccaatctgcaattgacccgcagggataatcccgcgcaggactggtatacgcaggtctacggcggttatctggaaatgatgtatgctggcgttggctctgaagtgctgtatcgtccgttcggtaaaagctgggcactggggctggatgttaactatgtcaaacagcgtgactggaacgacatcatgagaatggccgattacgatgtagtgacgggccatctgaccgcgtattgggaactgccgtttgtggaaggtgcggtggcgaaagtgagcgtaggtcgttatctggctggtgataaaggggtcacgctcgacctgtctcgccgctttgacagcgggattgttgcgggtgcctttgcaaccaaaactaacgtcagcgctgctgaatacggtgaagggagctttaccaaaggcttctacgtctccataccgtttgacctactgttcactgagcctacggtgaaacgtggggcagtcggttgggtaccgctaacgcgtgatggtggtcaaatgttgcagcgccgtagctcgctgtatggcctcaccgatcactaa

SEQ ID NO: 10781 - protein, 710 aa, Erwinia carotovora subsp. atroseptica SCRI1043
MTKNRNVKLGCLSLAIGGILSAQAMAAETENSRTATNPNLRFQPAGVSQSDFGGTGLLQMPTARMAETGEFSLNYRDNEDYRRYSVSLQLFDWLETTVRYTDIRTRLYSDDASFSGNQTYKDKAFDLKARLWQESYWMPDVSLGLRDIAGTGLFDSEYLVASKRMGPFDFTLGMGWGNMAESGNIKNPACSLKASFCNRTQNTEIGQFEVKNFLHGPAALFGGIEYQTPWDPLRLKLEYDSNDYSNETADGARSEKIKQDSPFNIGAVYRVGDILDTTLSWQRGNTLMWGFTLRTNFNSLKPNYLDDAPPVYAPVQDGKGTNWQLVSKELNDKAGFKDADIYADQKQVTIVADQTKYRDSEQATQRAATVLANHVPGSLDEYHIVQRSQRLPIASTEVDAKAFHQVQQAAIPLGQPEPATHRKEPVSDVRGQQVLLAEPDRLTYSLDPTLVQSFGGPESFYMYQIALKGNVDYRLSDHWSVGGTALLNLVNNYDKFNYKSPPADGAALPRVRTWVREYSTSSDLLLTNLQLTRRDNPAQDWYTQVYGGYLEMMYAGVGSEVLYRPFGKSWALGLDVNYVKQRDWNDIMRMADYDVVTGHLTAYWELPFVEGAVAKVSVGRYLAGDKGVTLDLSRRFDSGIVAGAFATKTNVSAAEYGEGSFTKGFYVSIPFDLLFTEPTVKRGAVGWVPLTRDGGQMLQRRSSLYGLTDH

SEQ ID NO: 10782 - DNA, 2079 bp, Pseudomonas fluorescens PfO-1
  CDS (1)..(2079): transl_table=11
ttgaatttgcgttttgcagctgtgttgttattgccgtgtggcctggtgcatgccgagcctcggattacccagaatgacttcggcggcgtcggtctgttgcagaccccgaccgcgcgcatgtcgcccgccggtgagttgagcgtcaacgccaaccgcaccgaaccgtacagccgatacagcgtttcgttgcagccgctcgactggctggaaggttcgtttcgctacaccgccatcaccaaccgtccgtacggttccgaagcgctgagcggcagccagagctataaggacaaggcggtcgacgccaaggtccggctgtggcaggaaagccactgggcgccggaagtggcgctgggctttcgagacatcggcggtaccggtctgtttgccagtgaattcttcgtggccaacaagcgctgggacaatttcgatttcagcgccggcatcgcctggggttacatcggcaatcgcggcgatgtcgataacccgttgggttcgatcagtgaccgcttcaacactcgccctgatctggaaggcaccggtgacgtcaacgccggctcgtactttcgcggcaagccgtcgtttttcggcggtgtgagttaccagacgccctgggaccgtctcagtctgaagctcgaatacgaaggcaacgactacaagcacgagcccaaggacaacatcatcaagcaggactcgccgatcaacctcggcgcggtgttcaaggtgaccgattcagtcgatgtgagtgcggcctgggaacgcggcaacacggcgatgttcggcatcacgttccacaccaatttcgtcagtcgcaaggccccggccaagacctttgatccgccggccgaaccgctgccggcgaaggcgccgaccgcgtccatggaagaggtcaactgggccgacgtgtcgcgccgtttgcagcagaacgccggctacaaggtcgaacgcatcacccagcgcgattccgaactgatcgtgtacggcgagcagcagcgctatttccattcgccgaaggctgtcggccgcgcgagccggatcctcgacaacagcgtcaacgacgacatcgactggttcaccgtggtcaacaagcgctacgacctgccgctggaagaaaccagcgtgccccggcagacattccgcgaagtgatcaacaacgaagagcctctggagtcgctgcaccgcaccaccgagatcaacccggcgatgccgcgcaacgagaaaaccctctacaccgaggcgccgcagcacttcaattacggcgtcggcctgggcttcaaacagaacgtcggcggccccgatggtttgctctatcagttcacggcggatctggacgccgagtaccgcttcaaccgcaacacctggtggaacggtctgctgagtcagaacctgatcaacaacttcgacaagttcacctacgacgcgcccagcggcctgccgcgtgtgcgcaccgacttgcgtcagtacctgaccacgtcggacaccaccatgccgctgttccaggtcagccacgccgagcaactggacaaggatttgtacggcatggtctacggcggttatctggagtcgatgttcgccggggtcgggggcgaggtgctgtttcgcccgaccggcaagcgctggtcgattggtgcggacctgaactacgtgcgtcagcgtgagttcgaccagggtttcggcctgcgtgattactcggtctggaccggccacatcaccggctacaccgacctgccgttcgacacgctggccgcagtcagcgtcgggcgttacctggcgggcgactttggcggcacggtggatatctcccgcgagttcttcaacggcgtacgctttggcgcctgggcgaccattaccaccgccggcagcgccgagtatggtgagggtagtttcgacaaggggctgtatttgtcgattccgttcgacgaaatgatgagcatgtcgaccatgcgccgcgccaacctggtgtgggcaccgctgacccgtgacggtggcgcgcggctcaaccgaagcttccagctgcattcgatgacggacagtcgggaaggggacatgttctaccgcaacttcgggaagattaccgagtag

SEQ ID NO: 10783 - protein, 692 aa, Pseudomonas fluorescens PfO-1
MNLRFAAVLLLPCGLVHAEPRITQNDFGGVGLLQTPTARMSPAGELSVNANRTEPYSRYSVSLQPLDWLEGSFRYTAITNRPYGSEALSGSQSYKDKAVDAKVRLWQESHWAPEVALGFRDIGGTGLFASEFFVANKRWDNFDFSAGIAWGYIGNRGDVDNPLGSISDRFNTRPDLEGTGDVNAGSYFRGKPSFFGGVSYQTPWDRLSLKLEYEGNDYKHEPKDNIIKQDSPINLGAVFKVTDSVDVSAAWERGNTAMFGITFHTNFVSRKAPAKTFDPPAEPLPAKAPTASMEEVNWADVSRRLQQNAGYKVERITQRDSELIVYGEQQRYFHSPKAVGRASRILDNSVNDDIDWFTVVNKRYDLPLEETSVPRQTFREVINNEEPLESLHRTTEINPAMPRNEKTLYTEAPQHFNYGVGLGFKQNVGGPDGLLYQFTADLDAEYRFNRNTWWNGLLSQNLINNFDKFTYDAPSGLPRVRTDLRQYLTTSDTTMPLFQVSHAEQLDKDLYGMVYGGYLESMFAGVGGEVLFRPTGKRWSIGADLNYVRQREFDQGFGLRDYSVWTGHITGYTDLPFDTLAAVSVGRYLAGDFGGTVDISREFFNGVRFGAWATITTAGSAEYGEGSFDKGLYLSIPFDEMMSMSTMRRANLVWAPLTRDGGARLNRSFQLHSMTDSREGDMFYRNFGKITE

SEQ ID NO: 10784 - DNA, 2364 bp, Shewanella sp. MR-7
  CDS (1)..(2364): transl_table=11
atgaaaaactcgactcccactttgcatgcgttcgggcgtttatcagcgctgtccttagcactgctacctttattacatgttaacgccgatgaattttcctatcccacactgttaccatcacagtcagattttggtggtgttgggctaatgcagatgccaacaggacgtatggcacctgaaggtgaatttaactttgccactacttacaacgatgactatcaacattttagcgcttcagtgcagctcttcccttggtttgaaaccactattcgctacaccttagtacaagacctgctttacagtagcgatcctagctttagtggtaatactaaatacacggataaagggatcgattttaagattcgtctactcgaagaaagtaactggctccctgaaacctccattggcgtgcgagactttggtggtacaggtttatttgatggtgaatttattgctgcgacaaagcgcgtcggtccactcgattttactctaggtataggttggggctatattggcaatagcggtaatctcacttccgataaaaaagatcttaattacaactgtgatagagatacttcttatgggggtaaaggtggcactgttgattatcagcgttggtttaaaggctgcgcggcactctttggtggcgttgaataccaaactccttgggagccacttcgcttaaaagtcgaatacgatggtaacgactatcaatcagatttcccagtggttcgtggtggcatagccatgccacaggacagcaaatttaactatggaatgctttatcgctttggggattggggcgatctacatttaagttatgagcgcggtaatacgtggacgctcggttttagtctgcaaacaaattttaataccttgtcgcagattaaacgtgatccagaggccgcaaaatataaaccgcttcctgctgcgccattaacgcatagtccgacagaaacatctagacaggcagacacgactaaatccgcacaagatattgaaaatgtaaaagctttatcagtaaaagatgacgaagcgcaaggttccgacctcttatctgcctcatatcaaaccatgcctgatactaaagtggattggaataaagttgctcaggatttacaaactattgctggttacgcaaacgcaaaaatttaccttgataatgaaagcattaccgttgtaggtgaacagacaaaattccgcgatagaaatgaagcgcataaaagagctgccaccattcttgccaacaatactgatgccaactttattaaagagtatcgactaattgagactcgttatagtcaacctataacggaaacccgcattgatgcccagaagtttgcccaagtcgcaagttatggctacctcaatgccaaagtcaccgatgcaactgtagtgagtatcccaagcttacctcatggacaactagtaaataatactgataaagattggttagataagcttagttttgatgtttcgcccaccatgtcccaatccttcggcggttccgaagggttttatatgtttagtattggaatgacaggtagtgcaagttaccgctttaccgataactttgagttttcaagctctctgtatcttaacctctacgataactttgataagtttttatacgaagttccacccgatggcactgacttaaaacgtgttcgcaccctagttcgtcaatatattcatgataatccagttcgggtgaataacctgcaactgacttggatggataatttaaccgacaacatttctttccaagcctacggcggctatttagaaatgatgtatggtggtgtgggcacagaggttctctatcgaccacttaacagtcaatgggccttcggtgtcgatatgaattatgtcaaacaacgtgatccagacagcatgctaggcttctttgatgatgagcatcaatttgactcactcactaaccgcccctatcgagtgcaaacgggtacaataacaggtcatgcatctgtctattatcaacctgactggttccccaataccttattaaggatcagtgcaggccagtatttagccgaggataaaggagtaacggttgatttctccaaacaattcgatagcggtgtgattgttggtgctttcgccactaagactaatctttcatcagatgagtatggtgagggcagttttactaaaggcttctacgtgtcgattccatttgacttgatgaccattaaatcaacccatagcagtgcgacaatcagttggatgccgctgacacgcgatggtggtcaaacattaggtcgcaagtacagtctatatgatgtaatggatgctagagatccttggttcacacgtgcaagcatcacaagtgagtctgtcaaataa

SEQ ID NO: 10785 - protein, 787 aa, Shewanella sp. MR-7
MKNSTPTLHAFGRLSALSLALLPLLHVNADEFSYPTLLPSQSDFGGVGLMQMPTGRMAPEGEFNFATTYNDDYQHFSASVQLFPWFETTIRYTLVQDLLYSSDPSFSGNTKYTDKGIDFKIRLLEESNWLPETSIGVRDFGGTGLFDGEFIAATKRVGPLDFTLGIGWGYIGNSGNLTSDKKDLNYNCDRDTSYGGKGGTVDYQRWFKGCAALFGGVEYQTPWEPLRLKVEYDGNDYQSDFPVVRGGIAMPQDSKFNYGMLYRFGDWGDLHLSYERGNTWTLGFSLQTNFNTLSQIKRDPEAAKYKPLPAAPLTHSPTETSRQADTTKSAQDIENVKALSVKDDEAQGSDLLSASYQTMPDTKVDWNKVAQDLQTIAGYANAKIYLDNESITVVGEQTKFRDRNEAHKRAATILANNTDANFIKEYRLIETRYSQPITETRIDAQKFAQVASYGYLNAKVTDATVVSIPSLPHGQLVNNTDKDWLDKLSFDVSPTMSQSFGGSEGFYMFSIGMTGSASYRFTDNFEFSSSLYLNLYDNFDKFLYEVPPDGTDLKRVRTLVRQYIHDNPVRVNNLQLTWMDNLTDNISFQAYGGYLEMMYGGVGTEVLYRPLNSQWAFGVDMNYVKQRDPDSMLGFFDDEHQFDSLTNRPYRVQTGTITGHASVYYQPDWFPNTLLRISAGQYLAEDKGVTVDFSKQFDSGVIVGAFATKTNLSSDEYGEGSFTKGFYVSIPFDLMTIKSTHSSATISWMPLTRDGGQTLGRKYSLYDVMDARDPWFTRASITSESVK

SEQ ID NO: 10786 - DNA, 2376 bp, Shewanella sp. ANA-3
  CDS (1)..(2376): transl_table=11
atgaaaaactcgactcccacttttccctctttcgggcgtttatcagcgctatctttagcactgctaccattattacacgttagcgccgatgaattttcttacccaacatcgttgccttcacagtctgactttggtggtgtaggtttaatgcaaatgccaacaggccgtatgacgcctgaaggtgaatttaactttgccacgacttacaacgatgactatcagcattttagcgcttcagtgcagctcttcccttggtttgaaacaacaatacgctacaccctagtacaagacctgctttacagtagcgaccccaactttagtggtaatactaaatacacggataaaggcatagactttaaagttcgtctactcgaagaaagtaactggctgcctgaaacctctattggggtgagggactttggtggcactggtttatttgatggtgaatttgttgctgcgacaaagcgcgtcggtccactcgattttactctaggtataggttggggctatatcggcaatagcggtaatctcacttccgataaaaaagatcttaattacaactgtgatagagatacttcttatgggggtaaaggtggcactgttgattaccagcgttggtttaagggctgcgcatccctctttggtggcgttgaatatcagactccttgggaacctttacgtttgaaagtcgaatacgatggtaacgactatcaatcagactttcccgttgttcgtggtggtatagatatgcctcaggacagcaagtttaactatggaatgctctatcgttttggagactggggcgatctacatttaagttatgagcgtggcaatacttggacacttggctttagtctgcagaccaattttaataccttgtcacagattaaacgagatccaaaggcagctaaatataagccacttcctgccgcgccattaacccttacgcaaacagaatcctctgctcaagtaaacacactaagagccgaacaagcgactgtgagtacagaaacttcaacgcataaatcagaagtgcaaaatgatgaagtagcaaatctagagcttgtaaatgcatccagtcagactgctgcgaatcccctggtggattggaataaaattgctcaggatttacaaactattgctggttacgcaaacgccaaaatttaccttgataatgacagtattaccgttgtaggtgaacagacaaaattccgcgatagaaatgaagcgcataaaagagctgccaccattctagccaacaatactgatgccaactttattaaagagtatcgactaattgagactcgttatagccaaccaataacggaaacccgtattgatgctcagaagtttgccaaagtcgcaagttatggctatctcaatgccaaagtcactgatgctagtgttgtgagtattccaagcttacctcagggacaactagtcaataatactgataaagattggctagataagcttagttttgatgtttcgcctaccatgtcccaatccttcggcggttccgaagggttttatatgtttagtattggaatgactggcagtgcaagttaccgatttaccgataactttgagttttcaagctctctttatcttaacctctacgataactttgataagtttttatacgaagttccacccgatggcactgacttaaaacgtgttcgcaccctggttcgtcaatatattcatgataatcctgtacgagtgaataacctgcaactaacctggatggataatttaaccgataacatttctttccaagcctacggcggctatttagaaatgatgtatggtggtgtgggcacagaggttctctatcgaccacttaacagccaatgggcttttggggttgatgtgaattatgttaagcagcgcgatccagacagcatgctaggcttctttgaagatgagcatcaatttgactcactcactaaccgcccctatcgagtgcaaacgggtacggtaacaggacacgcatcaatctattatcaacctgactggttccccaatactttactgagaatcagtgccggccagtatttggccgaggataaaggagtaacagttgatttctcaaaacaattcgatagtggggtgattgttggcgctttcgccactaagactaatctttcatcagaggagtatggtgagggcagttttactaaaggcttctacgtgtcgattccatttgacttgatgaccattaaatcaacccatagccgggcgacaatcagttggatgccactgacacgcgatggtggtcaaacattagggcgcaagtacagtctatatgatgtaatggatgctagagatccttggttcacacgcgcaagcatcacaagtgagtctgtcaaataa

SEQ ID NO: 10787 - protein, 791 aa, Shewanella sp. ANA-3
MKNSTPTFPSFGRLSALSLALLPLLHVSADEFSYPTSLPSQSDFGGVGLMQMPTGRMTPEGEFNFATTYNDDYQHFSASVQLFPWFETTIRYTLVQDLLYSSDPNFSGNTKYTDKGIDFKVRLLEESNWLPETSIGVRDFGGTGLFDGEFVAATKRVGPLDFTLGIGWGYIGNSGNLTSDKKDLNYNCDRDTSYGGKGGTVDYQRWFKGCASLFGGVEYQTPWEPLRLKVEYDGNDYQSDFPVVRGGIDMPQDSKFNYGMLYRFGDWGDLHLSYERGNTWTLGFSLQTNFNTLSQIKRDPKAAKYKPLPAAPLTLTQTESSAQVNTLRAEQATVSTETSTHKSEVQNDEVANLELVNASSQTAANPLVDWNKIAQDLQTIAGYANAKIYLDNDSITVVGEQTKFRDRNEAHKRAATILANNTDANFIKEYRLIETRYSQPITETRIDAQKFAKVASYGYLNAKVTDASVVSIPSLPQGQLVNNTDKDWLDKLSFDVSPTMSQSFGGSEGFYMFSIGMTGSASYRFTDNFEFSSSLYLNLYDNFDKFLYEVPPDGTDLKRVRTLVRQYIHDNPVRVNNLQLTWMDNLTDNISFQAYGGYLEMMYGGVGTEVLYRPLNSQWAFGVDVNYVKQRDPDSMLGFFEDEHQFDSLTNRPYRVQTGTVTGHASIYYQPDWFPNTLLRISAGQYLAEDKGVTVDFSKQFDSGVIVGAFATKTNLSSEEYGEGSFTKGFYVSIPFDLMTIKSTHSRATISWMPLTRDGGQTLGRKYSLYDVMDARDPWFTRASITSESVK

SEQ ID NO: 10788 - DNA, 2208 bp, Vibrio anguillarum
  CDS (1)..(2208): transl_table=11
atgaaactgagttatctttcgtcttcgacgattcaaccacctcgcgtcacttgtatggcgtgctgcattgcgtttagtttggcgttaccgagccaagctgacgaattcagctacccgacgctggtgcattctcaaactgattttggtggtacaggcttaatacagatgcccagtgcccgcatgatgccagaaggccaattcagtttaagcgtcacaaacaacgatgattacattcattacgtcagttcactccaactcttcccatggctagaagcgacaattcgttacacgcaagtgcatgagctactttacagcggcgataccagctttagcggtgatacgaaatacacggataaatcgattgatgccaaactgcgtttgctagaagagggatattggctgccagaagtgtcggtagggttacgtgatgttggcggtacaggtttgtttgatggcgaatttattgcagccagtaaacgttttggcccattggatgtcacactcggcgttggctggggttatttgggtaacaacgcgaacttaacgggtgataaatcctcaacaccagattgcggtcgcgatggtagttacagtggtaaaggcggccaatttgatattggacggatgttcacgggttgtacgtcgctgtttggtggggttgaataccaaacaccttggcaaccactgcgtctaaaagtggaatacgatggcaatgattaccgcagtgattttcccgtcacccgtggtgatgcagtaatgcccgtttcaacaccgtggaactttggtgtggtatacgctcttgctgattgggccgatttacgccttagctatgaacgcggtaatacctttaccgcaggcattaccttgggtacgaacttggcgaccatgcaaccggtgtgggttgatgaacccaaacccagttatgctccgaaagcgaaatcacatgagttagacgatgctgaatggcaaacgctacttcatgaccttgatgtaatcgccggttataaacaagcgactttgtaccaagatgatgccaccctcacgattgaagctgaacaatataagtatcgcgatcgcaaagaagcgcatgaacgcgccgcattgctgctggcgaatcaaggcattgatgcacagacatatcgcatcatcgagacggccaataatcagcctctcactgaaaccagaataaaagcgaatgcgtttgcccgtgttgctgaccgtgattaccctaacgctcacatcaccgatgccagtgcgcgcggtaaccccgtcgcgatcaatggcgaagtaaaagcgcagcagtatgatgcgtggcaatttggtttagcgcctgtgttgcagcagtcttttggtggctctgaagacttttatttgtacgcgcttggtgtcagtgccaatgccagcgtacaaacacgagatcattggctactctctggcagcctttatggcaaccttgccgataactacgacaaatacaagtacaccgtaccgccagatggtactgatttgaaacgggttcgtaccttgtctcgacaatattatgaagatgccgttcgccttgatagcctgcaactaacctactttgatactttcggccaaagttggtttggtcaaagctacgcagggtatctcgaaaccatgtttgctggtgtcggcggcgaaatactctatcgtccattaggcaaaaattgggcggttgggattgatggaaactatgtaaaacagcgcgaccctgacaccgctttcggtctgtataaagaagaagtgcattctgatccacaaacgggtcgaaactatcgagtacaaactggcacagtaacaggccatgcaacgctctattggcagcctaagttttggtcattgatagacaataccttactcaaggtcagtgcggggcgttacttaaccgacgatatcggtatgtcggtcgatttttctaagcagtttgatagtggtgtgattgccggggcgtttatttctaaaacgaacctttctgcggaagagtttggtgaaggcagttttaccaaggggttttatgtttcaattcctatggacttgatgaccattcggccaagtacacagcgcgtgaccgtatcttggttaccgattcaacgtgatggtgggcaaatgctgaaccgacaatatcgcttgtacgatatgacggatgcacgctccccttggtatggtcgccctatctcaagcaactag

SEQ ID NO: 10789 - protein, 735 aa, Vibrio anguillarum
MKLSYLSSSTIQPPRVTCMACCIAFSLALPSQADEFSYPTLVHSQTDFGGTGLIQMPSARMMPEGQFSLSVTNNDDYIHYVSSLQLFPWLEATIRYTQVHELLYSGDTSFSGDTKYTDKSIDAKLRLLEEGYWLPEVSVGLRDVGGTGLFDGEFIAASKRFGPLDVTLGVGWGYLGNNANLTGDKSSTPDCGRDGSYSGKGGQFDIGRMFTGCTSLFGGVEYQTPWQPLRLKVEYDGNDYRSDFPVTRGDAVMPVSTPWNFGVVYALADWADLRLSYERGNTFTAGITLGTNLATMQPVWVDEPKPSYAPKAKSHELDDAEWQTLLHDLDVIAGYKQATLYQDDATLTIEAEQYKYRDRKEAHERAALLLANQGIDAQTYRIIETANNQPLTETRIKANAFARVADRDYPNAHITDASARGNPVAINGEVKAQQYDAWQFGLAPVLQQSFGGSEDFYLYALGVSANASVQTRDHWLLSGSLYGNLADNYDKYKYTVPPDGTDLKRVRTLSRQYYEDAVRLDSLQLTYFDTFGQSWFGQSYAGYLETMFAGVGGEILYRPLGKNWAVGIDGNYVKQRDPDTAFGLYKEEVHSDPQTGRNYRVQTGTVTGHATLYWQPKFWSLIDNTLLKVSAGRYLTDDIGMSVDFSKQFDSGVIAGAFISKTNLSAEEFGEGSFTKGFYVSIPMDLMTIRPSTQRVTVSWLPIQRDGGQMLNRQYRLYDMTDARSPWYGRPISSN

SEQ ID NO: 10790 - DNA, 2193 bp, Vibrio cholerae
  CDS (1)..(2193): transl_table=11
atgaaaactggccaccgccctcttttgaatacttcgctgtctttactcggcgtactgataagcagcgcattactcacaccacggcaagcttttgccgatgagtttagctacccacggctgcgccattcacaaactgactttggcggcacagggttaatgcaaatgcccagtgcccggatgttagaggaaggtgagctaaatcttgccatcaccaataatgatgattatctacactatgcaatttcgctgcagctgtttccatggctagaaaccacggtgcgttatacccaagtgcatgaattactgtacagcgatcaagccagtttcagtggtgataccaaatacaccgataaatcaattgatgccaagctgcgcctgtggcaagagagctattggctaccagagctttcgcttggcttgcgtgatatcggcggcaccggattatttgatggtgaatatctggtcgcgactaaacaagtgggaccactcgattttaccttaggttttggctggggctatctaggtaatcgcgccaactttagcggcgataaaatcagcagccaagactgcggacgtgatagtaactacggcggcaacggcggcctacttgatttggggcggatgttcactggttgtactgccctatttggtggcattgaataccaaaccccactcgcgccactgcgcttacagctggaatacgatggtaatgattaccgcagtgattttccggtaacacgcggccagcctgatgcaatgccggtcgccagcccatggaactttgggcttgcttatgcactgaccgactgggctgatttgcgggtcagttatcaacgtggcaataccttaactgcaggtttaacttttggcactaatcttgccaccctcaaacccacctggcttgatagccccgccccaacttaccaaccagtgccgagtaaagcagaactcagtgatgaagagtggcaacgcttaagccaagatgttgctaacattgccggctaccaaccggttgaaatttatcaagagcaagacagcgtggtgattaagggctctcaagtcaaataccgcgaccgcgagcaagctgagcatcgcgccgccacattacttgccaatacgggaattaatgcgcgctactatcgaattattgaaactagccaagatcaacccctaacggaaactcagctcaatagcgctgcattcaaacgtattattgatcatgattatcctaatgctcgattgtcggatgccaaacagcacaccgaccctgcgccgattcatggtgatttaaaagccgcgcgtaccgagcgctggaaatttggtttctcgccagtgttacaacaatcatttggtggcgcagaagatttttacctctatgcgatcggggtcaatgccaatgccagttacaagatgggcgatcattggcagctttccggcaccttgtatggcaacctaatcgacaactacgacaagttcaattataccgtaccgccagatggcaccgatttaaaacgggtaagaaccttatcacgccagtattttgaagagccgctacgcataagccacttgcaactgacctattttgatcgatggcagcatttttatactcaagcatatgctggatatcttgaaaccatgtttgccggtgtgggcagtgagctattgtaccggccattgggcaaaaattgggcggtggggattgatggtaactatgttaaacaacgtgacccaagctcagcctttggcttgtatgagcacgagcatcaatacgatgtagaaacagatgataattatcgcgtgcaaactggcacccttaccggtcatgccacgctgtattggcaaccgcaattttggtcgcttctggataatacgctactcaaagtcagcgctgggcgttatttgaccgaggatattggctttacggttgatttctcaaaacagtttgctagcggcgttgtcgccggtgcatttgccaccaaaaccgacctctcagcagaagagtttggcgaaggcagcttcacgaaaggcttctatatttctattccattggatttgatgacggttcgcccaagcactgagcgggttaatatttcttggctaccactgcaacgcgatggcggacaaatgctttcccgtcagtatggattatataaaatgaccgatgctagaagcccttggtatgaaaggttctag

SEQ ID NO: 10791 - protein, 730 aa, Vibrio cholerae
MKTGHRPLLNTSLSLLGVLISSALLTPRQAFADEFSYPRLRHSQTDFGGTGLMQMPSARMLEEGELNLAITNNDDYLHYAISLQLFPWLETTVRYTQVHELLYSDQASFSGDTKYTDKSIDAKLRLWQESYWLPELSLGLRDIGGTGLFDGEYLVATKQVGPLDFTLGFGWGYLGNRANFSGDKISSQDCGRDSNYGGNGGLLDLGRMFTGCTALFGGIEYQTPLAPLRLQLEYDGNDYRSDFPVTRGQPDAMPVASPWNFGLAYALTDWADLRVSYQRGNTLTAGLTFGTNLATLKPTWLDSPAPTYQPVPSKAELSDEEWQRLSQDVANIAGYQPVEIYQEQDSVVIKGSQVKYRDREQAEHRAATLLANTGINARYYRIIETSQDQPLTETQLNSAAFKRIIDHDYPNARLSDAKQHTDPAPIHGDLKAARTERWKFGFSPVLQQSFGGAEDFYLYAIGVNANASYKMGDHWQLSGTLYGNLIDNYDKFNYTVPPDGTDLKRVRTLSRQYFEEPLRISHLQLTYFDRWQHFYTQAYAGYLETMFAGVGSELLYRPLGKNWAVGIDGNYVKQRDPSSAFGLYEHEHQYDVETDDNYRVQTGTLTGHATLYWQPQFWSLLDNTLLKVSAGRYLTEDIGFTVDFSKQFASGVVAGAFATKTDLSAEEFGEGSFTKGFYISIPLDLMTVRPSTERVNISWLPLQRDGGQMLSRQYGLYKMTDARSPWYERF

SEQ ID NO: 10792 - DNA, 2208 bp, Vibrio cholerae
  CDS (1)..(2208): transl_table=11
atgaaaactggccgctgtcctcaacttaatacttctctctcactgcttgctgttgtagtcagcagtgcgttgttggtgccaaggtatgccaacgccgatgaattcagctatccgcaactgcaccattcgcaaacggattttggcggcgcggggctgattcaaatgccgagtgcgcgcatgatgcccgaaggcgagctgagcctcgcggtgaccaacaatgatgattacattcactacgcggtttcgctgcaactgttcccgtggctagaaacaacggtacgttacacccaagtgcatgagctgctgtacagtaacgattctgggtttagcggtgacactaagtacacggataaatcgattgatgccaaattgcgcctatgggaagagagctactggctacctgagatttcgctgggtctacgcgatgtcggcggtactggcctatttgatggtgagtacttggtggcaagcaaaaattttggctcgctcgattttactttgggtgttggctggggttatttaggtaatcgcgccaatctcactggcgataaatccaaaacacccgactgtgggcgtgatggtagctacggcggcaaaggcgggatgtttgatctcggccgaatgtttacggggtgtactgcgctgtttggtggcgtggaatatcaaacgccttttgaaccactacgcctaaaggtggaatacgatggcaatgactaccgcagtgattttccggtcacattcggcaagcagtcgatgcccgtcgatacgccttggaactttggggtggtttacgcgctcactgactgggcagatttgcgcctgagttatgaacgcggcaatacgtttactgcaggggtgactttcggtactaacgtcgcagctcttacacccacatgggtcgattctcccgcgccggcttaccagccagcaccaagcaaaaccgaactcacagatgaagaatggcaacgcttaagccaagatttggcgacggtggctggctatcaatcggtggaagtgtatcaagcggcagatagcgttacggtgaaaggggcacaggtgaaataccgtgaccgccaagaagcagagcaaagagccgccactttgattgccaatacggggattgatgccagaacttatcgcattattgaaacgggtgaagatcagccattaaccgagactcgcttaaacagtgccgccttcaagcgcattgccgatcgcgattatccggatgccaaattggatgatgccaaacaaaccggtaacccggccccgatttcgggtgacctaaaagccgcgcaaatcgagcgttggagttttggtttttctcctgtgttacagcagtcgttcggtggttcagaagatttctacctcttcgcgattggggtgaatgcaaatgcccgttataaagccggcgatcactggctattttcaggcacgctttatggcaacctgaccgataactacgacaagtacaaatacacggtgccgcccgatggtacggatttgaaacgtgtgcgtacgttgtctcgccaatactatgaagaagtggtacgggtggataatttgcagctgacttactttgaccaatggaaccaattctatggtcaggcgtatgccggctatctggaaaccatgtttgctggtgtaggtagcgagattttgtatcgtccacttggtaagaattgggcgatcggagtggacggtaactatgttaagcagcgcgatcctagctcgacttttggtctgtatgagcaagagcgtcagtacgatccacaaactggtcgctattatcgagtgcaaacgggtacggtgactgggcatgcgaccctctattggcagccgcaattttggtcattgctggataacaccttgcttaaactgagtgcgggacggtatttgacagaggatatcggctttacgatcgatttctctaagcagttcgccagcggtgtcgtagccggagcctttgcgactaagacggatctctccgctgaagagtttggtgaagggagtttctccaaaggtttctatatttcgattccgttggatttgatgaccattcgcccaagtaccgagcgcgtgaacatttcttggctaccactgcaacgcgatggcggacagatgttaggacgtcaacatactctgtttgatatgaccgatgctcgcgcaccttggtttacccgccctattcagccaattgccgagtaa

SEQ ID NO: 10793 - protein, 735 aa, Vibrio cholerae
MKTGRCPQLNTSLSLLAVVVSSALLVPRYANADEFSYPQLHHSQTDFGGAGLIQMPSARMMPEGELSLAVTNNDDYIHYAVSLQLFPWLETTVRYTQVHELLYSNDSGFSGDTKYTDKSIDAKLRLWEESYWLPEISLGLRDVGGTGLFDGEYLVASKNFGSLDFTLGVGWGYLGNRANLTGDKSKTPDCGRDGSYGGKGGMFDLGRMFTGCTALFGGVEYQTPFEPLRLKVEYDGNDYRSDFPVTFGKQSMPVDTPWNFGVVYALTDWADLRLSYERGNTFTAGVTFGTNVAALTPTWVDSPAPAYQPAPSKTELTDEEWQRLSQDLATVAGYQSVEVYQAADSVTVKGAQVKYRDRQEAEQRAATLIANTGIDARTYRIIETGEDQPLTETRLNSAAFKRIADRDYPDAKLDDAKQTGNPAPISGDLKAAQIERWSFGFSPVLQQSFGGSEDFYLFAIGVNANARYKAGDHWLFSGTLYGNLTDNYDKYKYTVPPDGTDLKRVRTLSRQYYEEVVRVDNLQLTYFDQWNQFYGQAYAGYLETMFAGVGSEILYRPLGKNWAIGVDGNYVKQRDPSSTFGLYEQERQYDPQTGRYYRVQTGTVTGHATLYWQPQFWSLLDNTLLKLSAGRYLTEDIGFTIDFSKQFASGVVAGAFATKTDLSAEEFGEGSFSKGFYISIPLDLMTIRPSTERVNISWLPLQRDGGQMLGRQHTLFDMTDARAPWFTRPIQPIAE

SEQ ID NO: 10794 - DNA, 2097 bp, Escherichia coli
  CDS (1)..(2097): transl_table=11
atgaagaagaattcttatcttttaagctgcctggccattgccgtctccagtgcctgtcatgctgaagtattaacctacccggatccgctgggttcgtcgcaatcagactttggcggcacaggattgttgcagatgccaaatgcgcgcatcgcaccggaaggtgaattcagcgtcaactaccgggataacgatcaataccggttctactccacctccgtggcgctgttcccatggctggaaggcaccattcgttatacggatgtgcgcacacgcaaatatagccagtgggaagatttcagcggcgatcagtcatacaaagacaaatcattcgattttaaacttcgcctgtgggaagaaggttactggctaccgcaagtggcgtttggtaaacgtgatattgctggtacgggtctgtttgacggtgagtatctggtggccagcaagcaagcggggccatttgatttcaccctcgggatggcatggggctacgccggtaatgcgggcaatattaccaacccgttttgccgggtgagcgataaatattgtcatcgcgcagagtctcacgatgcgggcgatatcagctttagcgatatctttcgtggcccggcttccatctttggcggcattgagtatcaaacgccgtggaatcccctgcgtctgaaactcgaatacgatggaaacaattaccagaatgatttcgctggcaaactgcctcaggcaagccatttcaacgtcggcgcagtttatcgcgctgccagctgggcagatctcaacctgagttatgaacgcggtaacacgttgatgtttggcttcacgttacggaccaatttcaacgatctgcgccctgccctgcgcgatacgccaaaaccggcatatcaacctgcgcctgaatctgaaggattgcagtacaccacggtagcaaaccaacttaccgccctgaagtataacgcgggctttgacgcgccagaaattcagctacgcgataagacactgtatatgtctggtcagcaatacaaataccgtgactctcgtgaagcggtcgatcgtgccaaccggattctggtgaataacctgccgcaaggcgttgagaagattagcgtgacgcaaaagcgcgagcatatggcgatggtgactaccgaaaccgacgtagccagcctgcgcaaacagctggcaggtacagcgcctggtcaatcagagccactgcaacaacaacgtgttgaagctgaagatctttctgcctttggtcggggctaccgtattcgtgaagatcgctttagctactctttcaacccaacactttcacagtcgctgggcggcccggaagatttctatatgttccagctggggctgatgtccagtgcccgctactggtttaccgaccacctgctgcttgatggcggtattttcaccaatatttacaacaactacgacaagtttaagtcttcgctgttgcccgcggactctaccctgccccgcgtgcgcacgcatatccgtgactacgttcgcaatgacgtttatctcaacaacttgcaggcgaactattttgctgacttaggcaatggtttctatggccaggtgtatggcggttatctggaaacgatgtacgccggtgtcggttccgagctgctttatcgcccgctagatgcctgctgggcgctgggtgtggacgttaactacgtgaagcaacgtgactgggacaacatgatgcgtttcaccgattattccacgccaacaggtttcgtgacggcttactggaacccgccgacgctcaatggcgtactgatgaaacttagcgttgggcaatatctggcaaaagataaaggcgcaacgatcgacgtcgccaaacgctttgacagcggcgtggcggtaggggtatgggcggcaatcagtaacgtatctaaagatgactacggcgaaggcggctttagtaaaggtttttatatctcgattccattcgacttgatgaccattggacctaaccgcaaccgcgcggtggtttcgtggacaccattgacgcgtgatggtggacaaatgctgtcacgcaaataccagctctatccaatgacggcagagcgagaagtaccggttggacaataa

SEQ ID NO: 10795 - protein, 698 aa, Escherichia coli
MKKNSYLLSCLAIAVSSACHAEVLTYPDPLGSSQSDFGGTGLLQMPNARIAPEGEFSVNYRDNDQYRFYSTSVALFPWLEGTIRYTDVRTRKYSQWEDFSGDQSYKDKSFDFKLRLWEEGYWLPQVAFGKRDIAGTGLFDGEYLVASKQAGPFDFTLGMAWGYAGNAGNITNPFCRVSDKYCHRAESHDAGDISFSDIFRGPASIFGGIEYQTPWNPLRLKLEYDGNNYQNDFAGKLPQASHFNVGAVYRAASWADLNLSYERGNTLMFGFTLRTNFNDLRPALRDTPKPAYQPAPESEGLQYTTVANQLTALKYNAGFDAPEIQLRDKTLYMSGQQYKYRDSREAVDRANRILVNNLPQGVEKISVTQKREHMAMVTTETDVASLRKQLAGTAPGQSEPLQQQRVEAEDLSAFGRGYRIREDRFSYSFNPTLSQSLGGPEDFYMFQLGLMSSARYWFTDHLLLDGGIFTNIYNNYDKFKSSLLPADSTLPRVRTHIRDYVRNDVYLNNLQANYFADLGNGFYGQVYGGYLETMYAGVGSELLYRPLDACWALGVDVNYVKQRDWDNMMRFTDYSTPTGFVTAYWNPPTLNGVLMKLSVGQYLAKDKGATIDVAKRFDSGVAVGVWAAISNVSKDDYGEGGFSKGFYISIPFDLMTIGPNRNRAVVSWTPLTRDGGQMLSRKYQLYPMTAEREVPVGQ

SEQ ID NO: 10796 - DNA, 26 bp, Artificial sequence
  primer
atgaaaaaaagacatctgcttagctt

SEQ ID NO: 10797 - DNA, 23 bp, Artificial sequence
  primer
ttagcggaaattgacgctacggt

SEQ ID NO: 10798 - protein, 791 aa, Artificial sequence
  consensus sequence
  Variant (3)..(3): Xaa in position 3 is any amino acid
  Variant (8)..(8): Xaa in position 8 is any amino acid
  Variant (11)..(11): Xaa in position 11 is any amino acid
  Variant (13)..(13): Xaa in position 13 is any amino acid
  Variant (15)..(16): Xaa in position 15 to 16 is any amino acid
  Variant (18)..(20): Xaa in position 18 to 20 is any amino acid
  Variant (24)..(30): Xaa in position 24 to 30 is any amino acid
  Variant (32)..(33): Xaa in position 32 to 33 is any amino acid
  Variant (35)..(39): Xaa in position 35 to 39 is any amino acid
  Variant (41)..(42): Xaa in position 41 to 42 is any amino acid
  Variant (45)..(45): Xaa in position 45 is any amino acid
  Variant (47)..(47): Xaa in position 47 is any amino acid
  Variant (49)..(49): Xaa in position 49 is any amino acid
  Variant (51)..(51): Xaa in position 51 is any amino acid
  Variant (55)..(55): Xaa in position 55 is any amino acid
  Variant (57)..(60): Xaa in position 57 to 60 is any amino acid
  Variant (63)..(65): Xaa in position 63 to 65 is any amino acid
  Variant (66)..(66): Xaa in position 66 is any or no amino acid
  Variant (70)..(72): Xaa in position 70 to 72 is any amino acid
  Variant (74)..(74): Xaa in position 74 is any amino acid
  Variant (77)..(78): Xaa in position 77 to 78 is any amino acid
  Variant (80)..(80): Xaa in position 80 is any amino acid
  Variant (82)..(82): Xaa in position 82 is any amino acid
  Variant (85)..(86): Xaa in position 85 to 86 is any amino acid
  Variant (88)..(89): Xaa in position 88 to 89 is any amino acid
  Variant (93)..(96): Xaa in position 93 to 96 is any amino acid
  Variant (98)..(98): Xaa in position 98 is any amino acid
  Variant (101)..(102): Xaa in position 101 to 102 is any amino acid
  Variant (109)..(109): Xaa in position 109 is any amino acid
  Variant (111)..(113): Xaa in position 111 to 113 is any amino acid
  Variant (115)..(115): Xaa in position 115 is any amino acid
  Variant (117)..(118): Xaa in position 117 to 118 is any amino acid
  Variant (119)..(123): Xaa in position 119 to 123 is any or no amino acid
  Variant (126)..(126): Xaa in position 126 is any amino acid
  Variant (132)..(133): Xaa in position 132 to 133 is any amino acid
  Variant (137)..(137): Xaa in position 137 is any amino acid
  Variant (139)..(141): Xaa in position 139 to 141 is any amino acid
  Variant (143)..(152): Xaa in position 143 to 152 is any amino acid
  Variant (153)..(154): Xaa in position 153 to 154 is any or no amino acid
  Variant (156)..(156): Xaa in position 156 is any amino acid
  Variant (158)..(163): Xaa in position 158 to 163 is any amino acid
  Variant (164)..(165): Xaa in position 164 to 165 is any or no amino acid
  Variant (167)..(173): Xaa in position 167 to 173 is any amino acid
  Variant (175)..(175): Xaa in position 175 is any amino acid
  Variant (177)..(180): Xaa in position 177 to 180 is any amino acid
  Variant (184)..(184): Xaa in position 184 is any amino acid
  Variant (190)..(191): Xaa in position 190 to 191 is any amino acid
  Variant (197)..(197): Xaa in position 197 is any amino acid
  Variant (200)..(200): Xaa in position 200 is any amino acid
  Variant (203)..(203): Xaa in position 203 is any amino acid
  Variant (205)..(206): Xaa in position 205 to 206 is any amino acid
  Variant (208)..(218): Xaa in position 208 to 218 is any amino acid
  Variant (219)..(224): Xaa in position 219 to 224 is any or no amino acid
  Variant (226)..(226): Xaa in position 226 is any amino acid
  Variant (228)..(229): Xaa in position 228 to 229 is any amino acid
  Variant (231)..(235): Xaa in position 231 to 235 is any amino acid
  Variant (236)..(236): Xaa in position 236 is any or no amino acid
  Variant (238)..(239): Xaa in position 238 to 239 is any amino acid
  Variant (246)..(246): Xaa in position 246 is any amino acid
  Variant (248)..(250): Xaa in position 248 to 250 is any amino acid
  Variant (252)..(253): Xaa in position 252 to 253 is any amino acid
  Variant (255)..(255): Xaa in position 255 is any amino acid
  Variant (259)..(266): Xaa in position 259 to 266 is any amino acid
  Variant (268)..(274): Xaa in position 268 to 274 is any amino acid
  Variant (275)..(300): Xaa in position 275 to 300 is any or no amino acid
  Variant (302)..(316): Xaa in position 302 to 316 is any amino acid
  Variant (317)..(371): Xaa in position 317 to 371 is any or no amino acid
  Variant (373)..(375): Xaa in position 373 to 375 is any amino acid
  Variant (378)..(382): Xaa in position 378 to 382 is any amino acid
  Variant (384)..(393): Xaa in position 384 to 393 is any amino acid
  Variant (395)..(395): Xaa in position 395 is any amino acid
  Variant (397)..(397): Xaa in position 397 is any amino acid
  Variant (399)..(399): Xaa in position 399 is any amino acid
  Variant (402)..(403): Xaa in position 402 to 403 is any amino acid
  Variant (405)..(407): Xaa in position 405 to 407 is any amino acid
  Variant (410)..(414): Xaa in position 410 to 414 is any amino acid
  Variant (416)..(436): Xaa in position 416 to 436 is any amino acid
  Variant (437)..(438): Xaa in position 437 to 438 is any or no amino acid
  Variant (440)..(487): Xaa in position 440 to 487 is any amino acid
  Variant (488)..(493): Xaa in position 488 to 493 is any or no amino acid
  Variant (495)..(497): Xaa in position 495 to 497 is any amino acid
  Variant (500)..(500): Xaa in position 500 is any amino acid
  Variant (503)..(503): Xaa in position 503 is any amino acid
  Variant (505)..(505): Xaa in position 505 is any amino acid
  Variant (508)..(511): Xaa in position 508 to 511 is any amino acid
  Variant (513)..(516): Xaa in position 513 to 516 is any amino acid
  Variant (518)..(522): Xaa in position 518 to 522 is any amino acid
  Variant (524)..(528): Xaa in position 524 to 528 is any amino acid
  Variant (530)..(533): Xaa in position 530 to 533 is any amino acid
  Variant (535)..(537): Xaa in position 535 to 537 is any amino acid
  Variant (543)..(547): Xaa in position 543 to 547 is any amino acid
  Variant (549)..(549): Xaa in position 549 is any amino acid
  Variant (550)..(555): Xaa in position 550 to 555 is any or no amino acid
  Variant (557)..(557): Xaa in position 557 is any amino acid
  Variant (562)..(563): Xaa in position 562 to 563 is any amino acid
  Variant (565)..(565): Xaa in position 565 is any amino acid
  Variant (567)..(570): Xaa in position 567 to 570 is any amino acid
  Variant (571)..(571): Xaa in position 571 is any or no amino acid
  Variant (573)..(576): Xaa in position 573 to 576 is any amino acid
  Variant (579)..(590): Xaa in position 579 to 590 is any amino acid
  Variant (591)..(591): Xaa in position 591 is any or no amino acid
  Variant (593)..(593): Xaa in position 593 is any amino acid
  Variant (600)..(600): Xaa in position 600 is any amino acid
  Variant (602)..(603): Xaa in position 602 to 603 is any amino acid
  Variant (605)..(605): Xaa in position 605 is any amino acid
  Variant (607)..(607): Xaa in position 607 is any amino acid
  Variant (609)..(609): Xaa in position 609 is any amino acid
  Variant (614)..(617): Xaa in position 614 to 617 is any amino acid
  Variant (620)..(620): Xaa in position 620 is any amino acid
  Variant (622)..(622): Xaa in position 622 is any amino acid
  Variant (624)..(624): Xaa in position 624 is any amino acid
  Variant (626)..(626): Xaa in position 626 is any amino acid
  Variant (628)..(628): Xaa in position 628 is any amino acid
  Variant (632)..(644): Xaa in position 632 to 644 is any amino acid
  Variant (645)..(670): Xaa in position 645 to 670 is any or no amino acid
  Variant (673)..(676): Xaa in position 673 to 676 is any amino acid
  Variant (678)..(679): Xaa in position 678 to 679 is any amino acid
  Variant (681)..(684): Xaa in position 681 to 684 is any amino acid
  Variant (685)..(689): Xaa in position 685 to 689 is any or no amino acid
  Variant (691)..(693): Xaa in position 691 to 693 is any amino acid
  Variant (695)..(695): Xaa in position 695 is any amino acid
  Variant (697)..(697): Xaa in position 697 is any amino acid
  Variant (700)..(701): Xaa in position 700 to 701 is any amino acid
  Variant (703)..(703): Xaa in position 703 is any amino acid
  Variant (705)..(705): Xaa in position 705 is any amino acid
  Variant (707)..(710): Xaa in position 707 to 710 is any amino acid
  Variant (712)..(712): Xaa in position 712 is any amino acid
  Variant (714)..(714): Xaa in position 714 is any amino acid
  Variant (718)..(719): Xaa in position 718 to 719 is any amino acid
  Variant (721)..(722): Xaa in position 721 to 722 is any amino acid
  Variant (724)..(728): Xaa in position 724 to 728 is any amino acid
  Variant (730)..(733): Xaa in position 730 to 733 is any amino acid
  Variant (737)..(737): Xaa in position 737 is any amino acid
  Variant (739)..(739): Xaa in position 739 is any amino acid
  Variant (742)..(742): Xaa in position 742 is any amino acid
  Variant (744)..(744): Xaa in position 744 is any amino acid
  Variant (746)..(746): Xaa in position 746 is any amino acid
  Variant (748)..(748): Xaa in position 748 is any amino acid
  Variant (750)..(758): Xaa in position 750 to 758 is any amino acid
  Variant (760)..(763): Xaa in position 760 to 763 is any amino acid
  Variant (765)..(765): Xaa in position 765 is any amino acid
  Variant (774)..(774): Xaa in position 774 is any amino acid
  Variant (776)..(776): Xaa in position 776 is any amino acid
  Variant (778)..(780): Xaa in position 778 to 780 is any amino acid
  Variant (782)..(784): Xaa in position 782 to 784 is any amino acid
  Variant (786)..(787): Xaa in position 786 to 787 is any amino acid
  Variant (788)..(790): Xaa in position 788 to 790 is any or no amino acid
SQXDFGGXGLXQXPXXRXXXEGEXXXXXXXNXXYXXXXXSXXLFXWXEXTXRYTXVXXXXYSXXXXFSGXXXYXDKXXDXKXRLXXEXXWLPXXXXGXRDXXGTGLFDXEXXXAXKXXXXXXXGPXDFTLGXXWGYXGXXXNXXXXXXXXXXXXCXRXXXXXXXXGXXXXXXXFXGXXXXFGGXEYQTPXXPLRLKXEYXGNXYXXDXXXXXXXXXXXXXXXXXNXGXXYXXXXXXDXXLSYERGXTXXXGXXLXTNFXXXXXXXXDXXXXXXXXXXXXXXXXXXXXXXXXXXXXXXXXXPXXXXXXXXXXXXXXXXXXXXXXXXXXXXXXXXXXXXXXXXXXXXXXXXXXXXXXXXXXXXXXXXXXXXXXLXXXAGXXXXXIXXXXXXXXXXGXQXKXRDXXEXXXRAXXXXXNXXXXXXXXXXXXXXXXXXXXXXXTXXXXXXXXXXXXXXXXXXXXXXXXXXXXXXXXXXXXXXXXXXXXXXXXXXXXXXPXXXQSXGGXEXFYXXXXGXXXXAXXXXXDXXXXXGXXXXNXXXNYDKFXXXXXPXXXXXXXLXRVRTXXRXYXXXXXVXXXXLQXXXXXXXXXXXXXQXYGGYLEXMXXGXGXEXLYRPXXXXWAXGXDXNXVXQRDXXXXXXXXXXXXXXXXXXXXXXXXXXXXXXXXXXXXXXXTGXXXXYXXPXXXXXXXXXLXXXSXGXYLXXDXGXTXXXXKXFXSGVXXGXXAXXXXXSXXXXGEGXFXKGXYXSXPXDXXXXXXXXXRXXXXWXPLTRDGGQXLXRXXXLXXXTXXXXXR

SEQ ID NO: 10799 - protein, 44 aa, Artificial sequence
  protein pattern
  Variant (2)..(2): Xaa in position 2 is any amino acid
  Variant (5)..(5): Xaa in position 5 is Ala, Gly or Ser
  Variant (6)..(6): Xaa in position 6 is Phe or Ile
  Variant (8)..(8): Xaa in position 8 is any amino acid
  Variant (10)..(10): Xaa in position 10 is Ile, Leu or Val
  Variant (13)..(14): Xaa in position 13 to 14 is any amino acid
  Variant (16)..(16): Xaa in position 16 is Asp, Gly or Ser
  Variant (17)..(18): Xaa in position 17 to 18 is any amino acid
  Variant (19)..(19): Xaa in position 19 is Ile, Leu or Met
  Variant (21)..(21): Xaa in position 21 is Glu or Gln
  Variant (22)..(22): Xaa in position 22 is any amino acid
  Variant (23)..(23): Xaa in position 23 is Ala or Ser
  Variant (24)..(24): Xaa in position 24 is Phe, Ile, Leu or Val
  Variant (26)..(26): Xaa in position 26 is any amino acid
  Variant (29)..(29): Xaa in position 29 is Phe, Ile or Val
  Variant (30)..(30): Xaa in position 30 is Ala or Gly
  Variant (37)..(37): Xaa in position 37 is Ala or Gly
  Variant (39)..(39): Xaa in position 39 is Phe or Tyr
  Variant (40)..(40): Xaa in position 40 is Ile, Leu or Val
  Variant (41)..(41): Xaa in position 41 is Ala or Val
  Variant (43)..(43): Xaa in position 43 is Ser or Thr
YXDKXXDXKXRLXXEXXXXPXXXXGXRDXXGTGLFDXEXXXAXK

SEQ ID NO: 10800 - protein, 59 aa, Artificial sequence
  protein pattern
  Variant (2)..(2): Xaa in position 2 is any amino acid
  Variant (4)..(4): Xaa in position 4 is Gln or Arg
  Variant (7)..(7): Xaa in position 7 is Ala or Thr
  Variant (8)..(8): Xaa in position 8 is any amino acid
  Variant (10)..(10): Xaa in position 10 is any amino acid
  Variant (12)..(12): Xaa in position 12 is any amino acid
  Variant (14)..(14): Xaa in position 14 is Ile, Leu or Val
  Variant (15)..(15): Xaa in position 15 is Asp or Glu
  Variant (16)..(16): Xaa in position 16 is Phe, Ile, Leu or Val
  Variant (17)..(17): Xaa in position 17 is Ala or Ser
  Variant (18)..(18): Xaa in position 18 is Lys or Arg
  Variant (19)..(19): Xaa in position 19 is any amino acid
  Variant (21)..(21): Xaa in position 21 is any amino acid
  Variant (22)..(22): Xaa in position 22 is Asn or Ser
  Variant (24)..(24): Xaa in position 24 is any or no amino acid
  Variant (26)..(26): Xaa in position 26 is any amino acid
  Variant (27)..(27): Xaa in position 27 is any or no amino acid
  Variant (29)..(29): Xaa in position 29 is Ala, Gly or Val
  Variant (30)..(30): Xaa in position 30 is Phe, Trp or Tyr
  Variant (32)..(32): Xaa in position 32 is Ala or Thr
  Variant (33)..(33): Xaa in position 33 is any amino acid
  Variant (34)..(34): Xaa in position 34 is Ser or Thr
  Variant (35)..(35): Xaa in position 35 is Asp, Asn or Thr
  Variant (36)..(36): Xaa in position 36 is Ala, Ile, Leu or Val
  Variant (37)..(37): Xaa in position 37 is Gly or Ser
  Variant (38)..(38): Xaa in position 38 is any amino acid
  Variant (39)..(39): Xaa in position 39 is Ala, Asp or Glu
  Variant (40)..(40): Xaa in position 40 is Asp, Glu or Gln
  Variant (41)..(41): Xaa in position 41 is Phe or Tyr
  Variant (45)..(45): Xaa in position 45 is Asp, Gly or Ser
  Variant (47)..(47): Xaa in position 47 is Asp, Ser or Thr
  Variant (50)..(50): Xaa in position 50 is Phe, Ile, Leu or Val
  Variant (52)..(52): Xaa in position 52 is Ile, Leu or Val
  Variant (53)..(53): Xaa in position 53 is Ser or Thr
  Variant (54)..(54): Xaa in position 54 is Ile or Val
  Variant (56)..(56): Xaa in position 56 is Phe or Leu
  Variant (58)..(58): Xaa in position 58 is any amino acid
  Variant (59)..(59): Xaa in position 59 is Phe, Leu or Met
SXGXYLXXDXGXTXXXXXXFXXGXVXXGXXAXXXXXXXXXXGEGXFXKGXYXXXPXDXX

SEQ ID NO: 10801 - protein, 58 aa, Artificial sequence
  protein pattern
  Variant (2)..(2): Xaa in position 2 is any amino acid
  Variant (5)..(5): Xaa in position 5 is Ala, Thr or Val
  Variant (8)..(8): Xaa in position 8 is Ile, Leu or Met
  Variant (10)..(10): Xaa in position 10 is any amino acid
  Variant (12)..(12): Xaa in position 12 is Asp, Asn, Ser or Thr
  Variant (13)..(13): Xaa in position 13 is Ala or Gly
  Variant (15)..(15): Xaa in position 15 is Phe, Ile or Met
  Variant (16)..(17): Xaa in position 16 to 17 is any amino acid
  Variant (21)..(21): Xaa in position 21 is Phe, Leu or Met
  Variant (22)..(22): Xaa in position 22 is Asn or Ser
  Variant (23)..(23): Xaa in position 23 is Phe, Leu or Val
  Variant (24)..(24): Xaa in position 24 is Ala, Gly, Asn or Ser
  Variant (25)..(27): Xaa in position 25 to 27 is any amino acid
  Variant (28)..(28): Xaa in position 28 is Asn or Ser
  Variant (29)..(29): Xaa in position 29 is Asp or Asn
  Variant (30)..(30): Xaa in position 30 is Asp, Glu or Gln
  Variant (32)..(32): Xaa in position 32 is any amino acid
  Variant (33)..(33): Xaa in position 33 is Phe, His or Tyr
  Variant (34)..(34): Xaa in position 34 is Phe or Tyr
  Variant (35)..(36): Xaa in position 35 to 36 is any amino acid
  Variant (37)..(37): Xaa in position 37 is Ser or Thr
  Variant (38)..(38): Xaa in position 38 is Leu or Val
  Variant (39)..(39): Xaa in position 39 is any amino acid
  Variant (40)..(40): Xaa in position 40 is Leu or Val
  Variant (41)..(41): Xaa in position 41 is Phe or Met
  Variant (42)..(42): Xaa in position 42 is Asp or Pro
  Variant (44)..(44): Xaa in position 44 is Phe or Leu
  Variant (46)..(46): Xaa in position 46 is Gly or Thr
  Variant (48)..(48): Xaa in position 48 is Ile, Leu or Val
  Variant (52)..(52): Xaa in position 52 is any amino acid
  Variant (53)..(53): Xaa in position 53 is Ala, Ile or Val
  Variant (54)..(54): Xaa in position 54 is any amino acid
  Variant (55)..(55): Xaa in position 55 is Asp, Glu or Thr
  Variant (56)..(57): Xaa in position 56 to 57 is any amino acid
  Variant (58)..(58): Xaa in position 58 is Phe or Tyr
DXGGXGLXQXPXXRXXXEGEXXXXXXXXXXYXXXXXXXXXXXWXEXTXRYTXXXXXXX

SEQ ID NO: 10802 - protein, 41 aa, Artificial sequence
  protein pattern
  Variant (2)..(2): Xaa in position 2 is any amino acid
  Variant (4)..(4): Xaa in position 4 is Ala or Gly
  Variant (9)..(9): Xaa in position 9 is any amino acid
  Variant (11)..(11): Xaa in position 11 is Phe or Tyr
  Variant (12)..(12): Xaa in position 12 is Ala or Gly
  Variant (14)..(14): Xaa in position 14 is Ala or Val
  Variant (16)..(16): Xaa in position 16 is Ala, Gly, Ser or Thr
  Variant (18)..(18): Xaa in position 18 is any or no amino acid
  Variant (20)..(20): Xaa in position 20 is any or no amino acid
  Variant (24)..(24): Xaa in position 24 is any amino acid
  Variant (25)..(25): Xaa in position 25 is Asp, Gly or Asn
  Variant (26)..(26): Xaa in position 26 is any amino acid
  Variant (27)..(27): Xaa in position 27 is Asn, Gln or Ser
  Variant (30)..(30): Xaa in position 30 is Phe, Ile, Leu or Val
  Variant (32)..(32): Xaa in position 32 is Ala, Ile, Leu or Val
  Variant (34)..(34): Xaa in position 34 is any amino acid
  Variant (36)..(36): Xaa in position 36 is any amino acid
  Variant (37)..(37): Xaa in position 37 is Ile or Val
  Variant (38)..(38): Xaa in position 38 is any amino acid
QXYXGYLEXMXXGXGXEXLXYRPXXXXWAXGXDXNXXXQRD

SEQ ID NO: 10803 - protein, 44 aa, Artificial sequence
  protein pattern
  Variant (2)..(3): Xaa in position 2 to 3 is any or no amino acid
  Variant (5)..(8): Xaa in position 5 to 8 is any amino acid
  Variant (9)..(10): Xaa in position 9 to 10 is any or no amino acid
  Variant (12)..(12): Xaa in position 12 is any amino acid
  Variant (14)..(14): Xaa in position 14 is any amino acid
  Variant (15)..(15): Xaa in position 15 is Ala, Pro or Thr
  Variant (16)..(16): Xaa in position 16 is Ala or Ser
  Variant (17)..(17): Xaa in position 17 is Phe, Ile or Leu
  Variant (18)..(18): Xaa in position 18 is Phe or Tyr
  Variant (21)..(21): Xaa in position 21 is Ile, Leu or Val
  Variant (22)..(22): Xaa in position 22 is Glu, Gln or Ser
  Variant (27)..(27): Xaa in position 27 is any amino acid
  Variant (28)..(28): Xaa in position 28 is Ala, Asp, Glu, Asn or Gln
  Variant (29)..(29): Xaa in position 29 is any amino acid
  Variant (31)..(31): Xaa in position 31 is Arg or Ser
  Variant (33)..(33): Xaa in position 33 is any amino acid
  Variant (34)..(34): Xaa in position 34 is Leu or Val
  Variant (37)..(37): Xaa in position 37 is Asp or Glu
  Variant (38)..(38): Xaa in position 38 is Ala or Gly
  Variant (39)..(39): Xaa in position 39 is any amino acid
  Variant (40)..(40): Xaa in position 40 is Asp or Asn
  Variant (42)..(43): Xaa in position 42 to 43 is any amino acid
  Variant (44)..(44): Xaa in position 44 is Asp or Glu
GXXDXXXXXXFXGXXXXXGGXXYQTPXXXLXLXXEYXXXXYXXX

SEQ ID NO: 10804 - protein, 28 aa, Artificial sequence
  protein pattern
  Variant (2)..(5): Xaa in position 2 to 5 is any amino acid
  Variant (7)..(7): Xaa in position 7 is any amino acid
  Variant (9)..(9): Xaa in position 9 is Ile or Leu
  Variant (10)..(10): Xaa in position 10 is Gln or Thr
  Variant (16)..(16): Xaa in position 16 is any amino acid
  Variant (17)..(17): Xaa in position 17 is Leu or Val
  Variant (18)..(18): Xaa in position 18 is Gly, Asn, Gln or Ser
  Variant (20)..(22): Xaa in position 20 to 22 is any amino acid
  Variant (24)..(27): Xaa in position 24 to 27 is any amino acid
  Variant (28)..(28): Xaa in position 28 is Ala, Asp, Asn or Ser
RXXXXWXPXXRDGGQXXXRXXXLXXXXX

SEQ ID NO: 10805 - protein, 25 aa, Artificial sequence
  protein pattern
  Variant (2)..(3): Xaa in position 2 to 3 is any or no amino acid
  Variant (5)..(6): Xaa in position 5 to 6 is any or no amino acid
  Variant (9)..(9): Xaa in position 9 is Glu or Gln
  Variant (11)..(11): Xaa in position 11 is Ala or Gly
  Variant (12)..(12): Xaa in position 12 is Asp or Asn
  Variant (14)..(16): Xaa in position 14 to 16 is any amino acid
  Variant (18)..(18): Xaa in position 18 is Phe, Ile, Leu or Val
  Variant (19)..(19): Xaa in position 19 is Asn, Ser or Thr
  Variant (20)..(20): Xaa in position 20 is Phe or Leu
  Variant (21)..(21): Xaa in position 21 is any amino acid
  Variant (24)..(24): Xaa in position 24 is Phe, Leu or Val
  Variant (25)..(25): Xaa in position 25 is Ala, Asp, Glu or Asn
DXXLXXSYXRXXTXXXGXXXXTNXX

SEQ ID NO: 10806 - protein, 17 aa, Artificial sequence
  protein pattern
  Variant (3)..(4): Xaa in position 3 to 4 is any or no amino acid
  Variant (8)..(8): Xaa in position 8 is Ala, Ile, Leu or Val
  Variant (10)..(10): Xaa in position 10 is Ala, Asn, Gln or Thr
  Variant (11)..(11): Xaa in position 11 is any amino acid
  Variant (12)..(12): Xaa in position 12 is Ala, Asp or Gly
  Variant (14)..(14): Xaa in position 14 is Phe, Ile, Leu or Val
  Variant (15)..(15): Xaa in position 15 is any amino acid
  Variant (16)..(16): Xaa in position 16 is Gly, Asn or Ser
  Variant (17)..(17): Xaa in position 17 is Asp or Pro
LGXXWGYXGXXXNXXXX

SEQ ID NO: 10807 - protein, 14 aa, Artificial sequence
  protein pattern
  Variant (2)..(2): Xaa in position 2 is Glu, Gly, Ser or Thr
  Variant (3)..(3): Xaa in position 3 is Ala, Ile, Leu or Val
  Variant (4)..(5): Xaa in position 4 to 5 is any amino acid
  Variant (6)..(6): Xaa in position 6 is Asp, Gly or Asn
  Variant (7)..(8): Xaa in position 7 to 8 is any amino acid
  Variant (9)..(9): Xaa in position 9 is Asp or Asn
  Variant (12)..(12): Xaa in position 12 is Asp or Gly
  Variant (14)..(14): Xaa in position 14 is Phe or Tyr
GXXXXXXXXNYXKX

SEQ ID NO: 10808 - protein, 44 aa, Artificial sequence
  protein pattern
  Variant (3)..(3): Xaa in position 3 is any amino acid
  Variant (4)..(4): Xaa in position 4 is Ala, Asp, Glu or Gln
  Variant (5)..(7): Xaa in position 5 to 7 is any amino acid
  Variant (8)..(8): Xaa in position 8 is Ile, Leu or Val
  Variant (9)..(13): Xaa in position 9 to 13 is any amino acid
  Variant (14)..(14): Xaa in position 14 is Ala, Ser or Thr
  Variant (15)..(15): Xaa in position 15 is Ile, Leu or Val
  Variant (16)..(16): Xaa in position 16 is any amino acid
  Variant (17)..(17): Xaa in position 17 is Ile, Met or Val
  Variant (18)..(18): Xaa in position 18 is any amino acid
  Variant (20)..(20): Xaa in position 20 is Ala, Glu, Gln or Ser
  Variant (22)..(23): Xaa in position 22 to 23 is any amino acid
  Variant (24)..(24): Xaa in position 24 is Phe or Tyr
  Variant (25)..(25): Xaa in position 25 is Arg or Ser
  Variant (27)..(28): Xaa in position 27 to 28 is any amino acid
  Variant (29)..(29): Xaa in position 29 is Glu or Gln
  Variant (30)..(30): Xaa in position 30 is Ala or Gly
  Variant (31)..(32): Xaa in position 31 to 32 is any amino acid
  Variant (33)..(33): Xaa in position 33 is Lys or Arg
  Variant (35)..(35): Xaa in position 35 is Ala or Asn
  Variant (36)..(36): Xaa in position 36 is any amino acid
  Variant (37)..(38): Xaa in position 37 to 38 is Ile, Leu or Val
  Variant (39)..(39): Xaa in position 39 is any amino acid
  Variant (41)..(41): Xaa in position 41 is Asp, Glu, Asn or Thr
  Variant (42)..(43): Xaa in position 42 to 43 is any amino acid
  Variant (44)..(44): Xaa in position 44 is Ala, Asp, Glu, Asn or Gln
AGXXXXXXXXXXXXXXXXGXQXXXXDXXXXXXXAXXXXXNXXXX

SEQ ID NO: 10809 - protein, 12 aa, Artificial sequence
  protein pattern
  Variant (2)..(2): Xaa in position 2 is Thr or Val
  Variant (3)..(3): Xaa in position 3 is Leu or Met
  Variant (4)..(4): Xaa in position 4 is any amino acid
  Variant (7)..(7): Xaa in position 7 is Phe, Leu or Val
  Variant (10)..(10): Xaa in position 10 is Ala, Pro or Ser
  Variant (12)..(12): Xaa in position 12 is Ala, Asp, Gly, Asn or Ser
PXXXQSXGGXEX

SEQ ID NO: 10810 - protein, 18 aa, Artificial sequence
  protein pattern
  Variant (2)..(3): Xaa in position 2 to 3 is any amino acid
  Variant (4)..(4): Xaa in position 4 is any or no amino acid
  Variant (6)..(6): Xaa in position 6 is any amino acid
  Variant (11)..(12): Xaa in position 11 to 12 is any amino acid
  Variant (14)..(14): Xaa in position 14 is Asp, Glu or Gln
  Variant (16)..(17): Xaa in position 16 to 17 is any amino acid
  Variant (18)..(18): Xaa in position 18 is Asp, Glu, Asn, Ser or Thr
DXXXLXRVRTXXRXYXXX

SEQ ID NO: 10811 - DNA, 309 bp, Glycine max
  CDS (1)..(309)
atggatagagttaaggacttggcatcaaagaaggctgctgttatatttaccaagagttcatgttgcatgtgtcacagcataaagcaacttttctatgagcttggagcaagcccagcagttcatgagcttgacaatgattcctatgggaaggaaatggagtgggctttgaggggtatgggctgtaacccttcagtcccagcagtgttcattggtggaaaatttgtgggctcatccaaagatgtcatatcccttcatgttgatggctctctcaaacaattgctcatggatgcaaaagccatctggttttag

SEQ ID NO: 10812 - protein, 102 aa, Glycine max
MDRVKDLASKKAAVIFTKSSCCMCHSIKQLFYELGASPAVHELDNDSYGKEMEWALRGMGCNPSVPAVFIGGKFVGSSKDVISLHVDGSLKQLLMDAKAIWF

SEQ ID NO: 10813 - DNA, 309 bp, Glycine max; identical to SEQ ID NO: 3656
  CDS (1)..(309)

SEQ ID NO: 10814 - protein, 102 aa, Glycine max; identical to SEQ ID NO: 2906

SEQ ID NO: 10815 - DNA, 603 bp, Glycine max; identical to SEQ ID NO: 2937
  CDS (114)..(419)

SEQ ID NO: 10816 - protein, 101 aa, Glycine max; identical to SEQ ID NO: 2904

SEQ ID NO: 10817 - DNA, 511 bp, Glycine max; identical to SEQ ID NO: 2575
  CDS (108)..(416)

SEQ ID NO: 10818 - protein, 102 aa, Glycine max; identical to SEQ ID NO: 2576

SEQ ID NO: 10819 - DNA, 309 bp, Glycine max; identical to SEQ ID NO: 2577
  CDS (1)..(309)

SEQ ID NO: 10820 - protein, 102 aa, Glycine max; identical to SEQ ID NO: 2578

SEQ ID NO: 10821 - DNA, 309 bp, Glycine max; identical to SEQ ID NO: 2579
  CDS (1)..(309)

SEQ ID NO: 10822 - protein, 102 aa, Glycine max; identical to SEQ ID NO: 2580

SEQ ID NO: 10823 - DNA, 312 bp, Sorghum bicolor; identical to SEQ ID NO: 2581
  CDS (1)..(312)

SEQ ID NO: 10824 - protein, 103 aa, Sorghum bicolor; identical to SEQ ID NO: 2582

SEQ ID NO: 10825 - DNA, 315 bp, Zea mays; identical to SEQ ID NO: 3668
  CDS (1)..(315)

SEQ ID NO: 10826 - protein, 104 aa, Zea mays; identical to SEQ ID NO: 3669

SEQ ID NO: 10827 - DNA, 315 bp, Zea mays; identical to SEQ ID NO: 2583
  CDS (1)..(315)

SEQ ID NO: 10828 - protein, 104 aa, Zea mays; identical to SEQ ID NO: 2584

SEQ ID NO: 10829 - DNA, 312 bp, Zea mays; identical to SEQ ID NO: 2585
  CDS (1)..(312)

SEQ ID NO: 10830 - protein, 103 aa, Zea mays; identical to SEQ ID NO: 2586

SEQ ID NO: 10831 - DNA, 315 bp, Zea mays; identical to SEQ ID NO: 2587
  CDS (1)..(315)

SEQ ID NO: 10832 - protein, 104 aa, Zea mays; identical to SEQ ID NO: 2588

SEQ ID NO: 10833 - DNA, 340 bp, Arabidopsis thaliana
  CDS (19)..(309)
atggatatgataacgaagatggtgatggagagaccggtggtgatttacagcaagagctcttgctgtatgtctcacacgatcaagactttgctctgcgatttcggagcaaatccagcggtttacgagctggatgagatatctagagggagggagatcgagcaggcgttgttgcggctcgggtgtagccccgcagttccgggcgttttcattggtggagagttggtcggtggagccaacgaggtcatgagtctacatcttaacggatccttgattcccatgcttaagcgggctggtgcattgtgggtttgacttatcatgtttttaactagtttacttaaca

SEQ ID NO: 10834 - protein, 96 aa, Arabidopsis thaliana
MVMERPVVIYSKSSCCMSHTIKTLLCDFGANPAVYELDEISRGREIEQALLRLGCSPAVPGVFIGGELVGGANEVMSLHLNGSLIPMLKRAGALWV

SEQ ID NO: 10835 - DNA, 366 bp, Triticum aestivum
  CDS (1)..(366)
atggcggaggcggaggaggcggcggtgtacgagcgggtggctcgcatggccagcggcaacgcggtggtcgtcttcagcgccagcggctgctgcatgtgccacgtcgtcaagcgcctcctgcttggcctgggggtcggccccaccgtctacgagttggaccagatgggcggcgccgggcgagagatccaggcggcgctggcgcagctgctgccccccggacccggcgccggccaccaccagcagccgccagtgcccgtggtgttcgtcggcgggaggctcctgggcggcgtggagaaggtgatggcgtgccacatcaacggcacgctcgtcccgctcctcaaggacgccggcgcgctctggctctga

SEQ ID NO: 10836 - protein, 121 aa, Triticum aestivum
MAEAEEAAVYERVARMASGNAVVVFSASGCCMCHVVKRLLLGLGVGPTVYELDQMGGAGREIQAALAQLLPPGPGAGHHQQPPVPVVFVGGRLLGGVEKVMACHINGTLVPLLKDAGALWL

SEQ ID NO: 10837 - DNA, 414 bp, Zea mays subsp. mays
  CDS (1)..(414)
atgcagtacggcgcggcggcggcggagcaggcgtggtcgtacatgccggtggtggcaccgtcgtcggccgtggagacggcggcggagcgcgtggagcggctggcgtcggagagcgcggtggtggtgttcagcgtgagcacctgctgcatgtgccacgccgtgaagcgcctcttctgcggcatgggcgtgcacccgacggtgcacgagctggaccacgacccgcggggccgcgagctggagcgcgccctcgcctgcctcctcggcgcctccggagcctcggcggcgggcgcgccggtcgtgcccgtcgtgttcatcggcggcaggctggtcggcgccatggaccgcgtcatggccgcgcacatcaacggcaccctcgtgccgctgctcaaggacgccggcgcgctctggctgtga

SEQ ID NO: 10838 - protein, 137 aa, Zea mays subsp. mays; identical to SEQ ID NO: 2828

SEQ ID NO: 10839 - DNA, 372 bp, Zea mays subsp. mays
  CDS (1)..(372)
atgccggtggtggcaccgtcgtcggccgtggagacggcggcggagcgcgtggagcggctggcgtcggagagcgcggtggtggtgttcagcgtgagcacctgctgcatgtgccacgccgtgaagcgcctcttctgcggcatgggcgtgcacccgacggtgcacgagctggaccacgacccgcggggccgcgagctggagcgcgccctcgcctgcctcctcggcgcctccggagcctcggcggcgggcgcgccggtcgtgcccgtcgtgttcatcggcggcaggctggtcggcgccatggaccgcgtcatggccgcgcacatcaacggcaccctcgtgccgctgctcaaggacgccggcgcgctctggctgtga

SEQ ID NO: 10840 - protein, 123 aa, Zea mays subsp. mays
MPVVAPSSAVETAAERVERLASESAVVVFSVSTCCMCHAVKRLFCGMGVHPTVHELDHDPRGRELERALACLLGASGASAAGAPVVPVVFIGGRLVGAMDRVMAAHINGTLVPLLKDAGALWL

SEQ ID NO: 10841 - DNA, 378 bp, Arabidopsis thaliana
  CDS (1)..(378)
atgtcaaggcccataacctatttcatcctcctcaagtcacttttcaaacacactttcaaattaacaaaaatggagaagctacagaagatgacctcggagaagtcgttagtgatatttagcaaaaactcatgctgcatgtcgcacacaatcaagactctcttcttagaccttggcgtaaatccgacgatttatgagctagatgagatcaacagaggaaaagagatagagcaagcattggctcagcttggctgcagcccgaccgtgccagtggtgttcataggagggcagcttgtcggtggagccaatcaagtcatgagtctccatctcaaccgttctctcattccaatgcttaaacgcgttggggcgttatggctttga

SEQ ID NO: 10842 - protein, 125 aa, Arabidopsis thaliana
MSRPITYFILLKSLFKHTFKLTKMEKLQKMTSEKSLVIFSKNSCCMSHTIKTLFLDLGVNPTIYELDEINRGKEIEQALAQLGCSPTVPVVFIGGQLVGGANQVMSLHLNRSLIPMLKRVGALWL

SEQ ID NO: 10843 - DNA, 339 bp, Aedes aegypti; identical to SEQ ID NO: 3283
  CDS (1)..(339)

SEQ ID NO: 10844 - protein, 112 aa, Aedes aegypti; identical to SEQ ID NO: 3284

SEQ ID NO: 10845 - DNA, 303 bp, Aedes aegypti; identical to SEQ ID NO: 3285
  CDS (1)..(303)

SEQ ID NO: 10846 - protein, 100 aa, Aedes aegypti; identical to SEQ ID NO: 3286

SEQ ID NO: 10847 - DNA, 255 bp, Xanthobacter autotrophicus Py2; identical to SEQ ID NO: 2955
  CDS (1)..(255): transl_table=11

SEQ ID NO: 10848 - protein, 84 aa, Xanthobacter autotrophicus Py2; identical to SEQ ID NO: 2956

SEQ ID NO: 10849 - DNA, 351 bp, Bombyx mori; identical to SEQ ID NO: 2591
  CDS (1)..(351)

SEQ ID NO: 10850 - protein, 116 aa, Bombyx mori; identical to SEQ ID NO: 2592

SEQ ID NO: 10851 - DNA, 405 bp, Oryza sativa (japonica cultivar-group); identical to SEQ ID NO: 2593
  CDS (1)..(405)

SEQ ID NO: 10852 - protein, 134 aa, Oryza sativa (japonica cultivar-group); identical to SEQ ID NO: 2594

SEQ ID NO: 10853 - DNA, 477 bp, Oryza sativa (japonica cultivar-group); identical to SEQ ID NO: 2595
  CDS (1)..(477)

SEQ ID NO: 10854 - protein, 158 aa, Oryza sativa (japonica cultivar-group); identical to SEQ ID NO: 2596

SEQ ID NO: 10855 - DNA, 309 bp, Arabidopsis thaliana; identical to SEQ ID NO: 2597
  CDS (1)..(309)

SEQ ID NO: 10856 - protein, 102 aa, Arabidopsis thaliana; identical to SEQ ID NO: 2598

SEQ ID NO: 10857 - DNA, 351 bp, Drosophila melanogaster; identical to SEQ ID NO: 2599
  CDS (1)..(351)

SEQ ID NO: 10858 - protein, 116 aa, Drosophila melanogaster; identical to SEQ ID NO: 2600

SEQ ID NO: 10859 - DNA, 345 bp, Drosophila melanogaster; identical to SEQ ID NO: 2967
  CDS (1)..(345)

SEQ ID NO: 10860 - protein, 114 aa, Drosophila melanogaster; identical to SEQ ID NO: 2968

SEQ ID NO: 10861 - DNA, 252 bp, Shigella flexneri 2a str. 301
  CDS (1)..(252): transl_table=11
atggccaatgttgaaatctataccaaagaaacctgcccgtattgccatcgtgcaaaagcactgctgagcagcaagggcgtgagtttccaggagttgccgatcgatggcaatgccgccaagcgtgaagagatgatcaaacgcagcggttgcaccacggttccccagatttttattgacgcacagcacattggcggctgtgatgacttgtatgcattggatgcacgtggtggactggatcccctgctgaaataa

SEQ ID NO: 10862 - protein, 83 aa, Shigella flexneri 2a str. 301
MANVEIYTKETCPYCHRAKALLSSKGVSFQELPIDGNAAKREEMIKRSGCTTVPQIFIDAQHIGGCDDLYALDARGGLDPLLK

SEQ ID NO: 10863 - DNA, 297 bp, Apis mellifera; identical to SEQ ID NO: 2601
  CDS (1)..(297)

SEQ ID NO: 10864 - protein, 98 aa, Apis mellifera; identical to SEQ ID NO: 2602

SEQ ID NO: 10865 - DNA, 312 bp, Strongylocentrotus purpuratus; identical to SEQ ID NO: 2603
  CDS (1)..(312)

SEQ ID NO: 10866 - protein, 103 aa, Strongylocentrotus purpuratus; identical to SEQ ID NO: 2604

SEQ ID NO: 10867 - DNA, 381 bp, Strongylocentrotus purpuratus; identical to SEQ ID NO: 2605
  CDS (1)..(381)

SEQ ID NO: 10868 - protein, 126 aa, Strongylocentrotus purpuratus; identical to SEQ ID NO: 2606

SEQ ID NO: 10869 - DNA, 321 bp, Strongylocentrotus purpuratus; identical to SEQ ID NO: 2607
  CDS (1)..(321)

SEQ ID NO: 10870 - protein, 106 aa, Strongylocentrotus purpuratus; identical to SEQ ID NO: 2608

SEQ ID NO: 10871 - DNA, 297 bp, Nasonia vitripennis; identical to SEQ ID NO: 2609
  CDS (1)..(297)

SEQ ID NO: 10872 - protein, 98 aa, Nasonia vitripennis; identical to SEQ ID NO: 2610

SEQ ID NO: 10873 - DNA, 339 bp, Anopheles gambiae str. PEST; identical to SEQ ID NO: 2611
  CDS (1)..(339)

SEQ ID NO: 10874 - protein, 112 aa, Anopheles gambiae str. PEST; identical to SEQ ID NO: 2612

SEQ ID NO: 10875 - DNA, 309 bp, Magnaporthe grisea 70-15; identical to SEQ ID NO: 2613
  CDS (1)..(309)

SEQ ID NO: 10876 - protein, 102 aa, Magnaporthe grisea 70-15; identical to SEQ ID NO: 2614

SEQ ID NO: 10877 - DNA, 321 bp, Gibberella zeae PH-1; identical to SEQ ID NO: 2617
  CDS (1)..(321)

SEQ ID NO: 10878 - protein, 106 aa, Gibberella zeae PH-1; identical to SEQ ID NO: 2618

SEQ ID NO: 10879 - DNA, 324 bp, Kluyveromyces lactis NRRL Y-1140; identical to SEQ ID NO: 3321
  CDS (1)..(324)

SEQ ID NO: 10880 - protein, 107 aa, Kluyveromyces lactis NRRL Y-1140; identical to SEQ ID NO: 3322

SEQ ID NO: 10881 - DNA, 636 bp, Kluyveromyces lactis NRRL Y-1140; identical to SEQ ID NO: 2619
  CDS (1)..(636)

SEQ ID NO: 10882 - protein, 211 aa, Kluyveromyces lactis NRRL Y-1140; identical to SEQ ID NO: 2620

SEQ ID NO: 10883 - DNA, 342 bp, Debaryomyces hansenii CBS767; identical to SEQ ID NO: 2621
  CDS (1)..(342)

SEQ ID NO: 10884 - protein, 113 aa, Debaryomyces hansenii CBS767; identical to SEQ ID NO: 2622

SEQ ID NO: 10885 - DNA, 666 bp, Debaryomyces hansenii CBS767; identical to SEQ ID NO: 4120
  CDS (1)..(666)

SEQ ID NO: 10886 - protein, 221 aa, Debaryomyces hansenii CBS767; identical to SEQ ID NO: 4121

SEQ ID NO: 10887 - DNA, 315 bp, Debaryomyces hansenii CBS767; identical to SEQ ID NO: 2623
  CDS (1)..(315)

SEQ ID NO: 10888 - protein, 104 aa, Debaryomyces hansenii CBS767; identical to SEQ ID NO: 2624

SEQ ID NO: 10889 - DNA, 318 bp, Yarrowia lipolytica CLIB122; identical to SEQ ID NO: 2625
  CDS (1)..(318)

SEQ ID NO: 10890 - protein, 105 aa, Yarrowia lipolytica CLIB122; identical to SEQ ID NO: 2626

SEQ ID NO: 10891 - DNA, 309 bp, Aspergillus nidulans FGSC A4; identical to SEQ ID NO: 2629
  CDS (1)..(309)

SEQ ID NO: 10892 - protein, 102 aa, Aspergillus nidulans FGSC A4; identical to SEQ ID NO: 2630

SEQ ID NO: 10893 - DNA, 690 bp, Candida albicans SC5314; identical to SEQ ID NO: 2631
  CDS (1)..(690): transl_table=12

SEQ ID NO: 10894 - protein, 229 aa, Candida albicans SC5314; identical to SEQ ID NO: 2632

SEQ ID NO: 10895 - DNA, 360 bp, Candida albicans SC5314; identical to SEQ ID NO: 2633
  CDS (1)..(360): transl_table=12

SEQ ID NO: 10896 - protein, 119 aa, Candida albicans SC5314; identical to SEQ ID NO: 2634

SEQ ID NO: 10897 - DNA, 309 bp, Ustilago maydis 521; identical to SEQ ID NO: 2635
  CDS (1)..(309)

SEQ ID NO: 10898 - protein, 102 aa, Ustilago maydis 521; identical to SEQ ID NO: 2636

SEQ ID NO: 10899 - DNA, 441 bp, Cryptococcus neoformans var. neoformans B-3501A; identical to SEQ ID NO: 2637
  CDS (1)..(441)

SEQ ID NO: 10900 - protein, 146 aa, Cryptococcus neoformans var. neoformans B-3501A; identical to SEQ ID NO: 2638

SEQ ID NO: 10901 - DNA, 471 bp, Candida albicans SC5314; identical to SEQ ID NO: 2639
  CDS (1)..(471): transl_table=12

SEQ ID NO: 10902 - protein, 156 aa, Candida albicans SC5314; identical to SEQ ID NO: 2640

SEQ ID NO: 10903 - DNA, 1116 bp, Tribolium castaneum
  CDS (1)..(1116)
atgagtttgaaagacacggtggaaaagtactttcacgaccacaataatccagtagttaagacggaatcgttcggtgcgaaattatttttgtctcctttgagtgacgatgaagaggggcgaaaaaatcgctgtctttcgggaatagagactgttttaagacacacacgtgttgaaagaagagttgctagaagtgtggctgaatggctccctaatcgaaatgtggcccaagtgaccaaagtaaccggttctttgaaaggaggcttcggtgcgcaaacgaaagacgggaaaattttgagccccgaagagacattatttctcctagaagctaacaaaatagaattaaggctagataaagtaccgctgagtattcaagaagcttataaaacaattcagctaaatcacgctaaatatcatgcgtacaaaaaactagttttgcaaggtttcaaagtcaaaccattaacaacaataaatcaagaggagacaacgaaacggaaattagaaagcgacgatggaccttcggcaaaggttgccaaaacaaacgacgaacaaatggcccccattttcgagaagttgagagaaatggggccccaacccttcaacgggcaaggtcaccacagtacagctgattatacagtcaagtcgtcgacaaattctgattgttttaatctcgtctttaagtccagtgacgaatttacgagtattgacccgaatcagcccgactcaactctttacagtgtgtgttccgacgataacgtcgcattttataatttctgtaacgcgtcgttaccaaatttttccaaattgcccatagacatgtcttcccctaaagtcgaagtggtcaaggatttgatcaaaagtgacaccgttgtcattttctcaaaaacctattgcccctactgcaagttggccaaggaggtgttcaacaacctcaagaagacgttcacaaccattgagttggacaagagggacgatggggaggagattcaggggattttgggcgaactgacgggggccaaaactgtccctagagtgtttgttaaaggacagtgcctgggcggcggctccgacgttaaagctttgtacgacaagggagagttgcagaagtacttcgactag

SEQ ID NO: 10904 - protein, 371 aa, Tribolium castaneum
MSLKDTVEKYFHDHNNPVVKTESFGAKLFLSPLSDDEEGRKNRCLSGIETVLRHTRVERRVARSVAEWLPNRNVAQVTKVTGSLKGGFGAQTKDGKILSPEETLFLLEANKIELRLDKVPLSIQEAYKTIQLNHAKYHAYKKLVLQGFKVKPLTTINQEETTKRKLESDDGPSAKVAKTNDEQMAPIFEKLREMGPQPFNGQGHHSTADYTVKSSTNSDCFNLVFKSSDEFTSIDPNQPDSTLYSVCSDDNVAFYNFCNASLPNFSKLPIDMSSPKVEVVKDLIKSDTVVIFSKTYCPYCKLAKEVFNNLKKTFTTIELDKRDDGEEIQGILGELTGAKTVPRVFVKGQCLGGGSDVKALYDKGELQKYFD

SEQ ID NO: 10905 - DNA, 309 bp, Tribolium castaneum; identical to SEQ ID NO: 2641
  CDS (1)..(309)

SEQ ID NO: 10906 - protein, 102 aa, Tribolium castaneum; identical to SEQ ID NO: 2642

SEQ ID NO: 10907 - DNA, 261 bp, Silicibacter pomeroyi DSS-3; identical to SEQ ID NO: 5010
  CDS (1)..(261): transl_table=11

SEQ ID NO: 10908 - protein, 86 aa, Silicibacter pomeroyi DSS-3; identical to SEQ ID NO: 5011

SEQ ID NO: 10909 - DNA, 384 bp, Medicago truncatula; identical to SEQ ID NO: 2643
  CDS (1)..(384)

SEQ ID NO: 10910 - protein, 127 aa, Medicago truncatula; identical to SEQ ID NO: 2644

SEQ ID NO: 10911 - DNA, 384 bp, Oryza sativa subsp; identical to SEQ ID NO: 3343
  CDS (1)..(384)

SEQ ID NO: 10912 - protein, 127 aa, Oryza sativa subsp; identical to SEQ ID NO: 3344

SEQ ID NO: 10913 - DNA, 315 bp, Oryza sativa subsp; identical to SEQ ID NO: 3345
  CDS (1)..(315)

SEQ ID NO: 10914 - protein, 104 aa, Oryza sativa subsp; identical to SEQ ID NO: 3346

SEQ ID NO: 10915 - DNA, 393 bp, Oryza sativa subsp; identical to SEQ ID NO: 3347
  CDS (1)..(393)

SEQ ID NO: 10916 - protein, 130 aa, Oryza sativa subsp; identical to SEQ ID NO: 3348

SEQ ID NO: 10917 - DNA, 306 bp, Vitis vinifera; identical to SEQ ID NO: 2645
  CDS (1)..(306)
  misc_feature (225)..(225): r is g or a
  misc_feature (273)..(273): y is t or c

SEQ ID NO: 10918 - protein, 101 aa, Vitis vinifera; identical to SEQ ID NO: 2646

SEQ ID NO: 10919 - DNA, 324 bp, Vitis vinifera; identical to SEQ ID NO: 2647
  CDS (1)..(324)

SEQ ID NO: 10920 - protein, 107 aa, Vitis vinifera; identical to SEQ ID NO: 2648

SEQ ID NO: 10921 - DNA, 321 bp, Vitis vinifera; identical to SEQ ID NO: 2649
  CDS (1)..(321)

SEQ ID NO: 10922 - protein, 106 aa, Vitis vinifera; identical to SEQ ID NO: 2650

SEQ ID NO: 10923 - DNA, 345 bp, Vitis vinifera; identical to SEQ ID NO: 2651
  CDS (1)..(345)

SEQ ID NO: 10924 - protein, 114 aa, Vitis vinifera; identical to SEQ ID NO: 2652

SEQ ID NO: 10925 - DNA, 414 bp, Vitis vinifera; identical to SEQ ID NO: 2653
  CDS (1)..(414)
  misc_feature (18)..(18): y is t or c
  misc_feature (63)..(63): m is a or c

SEQ ID NO: 10926 - protein, 137 aa, Vitis vinifera; identical to SEQ ID NO: 2654

SEQ ID NO: 10927 - DNA, 315 bp, Fritillaria agrestis; identical to SEQ ID NO: 2655
  CDS (1)..(315)

SEQ ID NO: 10928 - protein, 104 aa, Fritillaria agrestis; identical to SEQ ID NO: 2656

SEQ ID NO: 10929 - DNA, 405 bp, Mesembryanthemum crystallinum; identical to SEQ ID NO: 3017
  CDS (1)..(405)

SEQ ID NO: 10930 - protein, 134 aa, Mesembryanthemum crystallinum; identical to SEQ ID NO: 3018

SEQ ID NO: 10931 - DNA, 309 bp, Plantago major; identical to SEQ ID NO: 2659
  CDS (1)..(309)

SEQ ID NO: 10932 - protein, 102 aa, Plantago major; identical to SEQ ID NO: 2660

SEQ ID NO: 10933 - DNA, 312 bp, Musa acuminata; identical to SEQ ID NO: 3023
  CDS (1)..(312)

SEQ ID NO: 10934 - protein, 103 aa, Musa acuminata; identical to SEQ ID NO: 3024

SEQ ID NO: 10935 - DNA, 312 bp, Musa acuminata; identical to SEQ ID NO: 2661
  CDS (1)..(312)

SEQ ID NO: 10936 - protein, 103 aa, Musa acuminata; identical to SEQ ID NO: 2662

SEQ ID NO: 10937 - DNA, 450 bp, Medicago truncatula; identical to SEQ ID NO: 2663
  CDS (1)..(450)

SEQ ID NO: 10938 - protein, 149 aa, Medicago truncatula; identical to SEQ ID NO: 2664

SEQ ID NO: 10939 - DNA, 357 bp, Medicago truncatula; identical to SEQ ID NO: 2665
  CDS (1)..(357)

SEQ ID NO: 10940 - protein, 118 aa, Medicago truncatula; identical to SEQ ID NO: 2666

SEQ ID NO: 10941 - DNA, 384 bp, Medicago truncatula; identical to SEQ ID NO: 2667
  CDS (1)..(384)

SEQ ID NO: 10942 - protein, 127 aa, Medicago truncatula; identical to SEQ ID NO: 2668

SEQ ID NO: 10943 - DNA, 366 bp, Medicago truncatula; identical to SEQ ID NO: 2669
  CDS (1)..(366)

SEQ ID NO: 10944 - protein, 121 aa, Medicago truncatula; identical to SEQ ID NO: 2670

SEQ ID NO: 10945 - DNA, 399 bp, Beta vulgaris; identical to SEQ ID NO: 2671
  CDS (1)..(399)

SEQ ID NO: 10946 - protein, 132 aa, Beta vulgaris; identical to SEQ ID NO: 2672

SEQ ID NO: 10947 - DNA, 321 bp, Beta vulgaris; identical to SEQ ID NO: 2673
  CDS (1)..(321)

SEQ ID NO: 10948 - protein, 106 aa, Beta vulgaris; identical to SEQ ID NO: 2674

SEQ ID NO: 10949 - DNA, 309 bp, Beta vulgaris; identical to SEQ ID NO: 2675
  CDS (1)..(309)

SEQ ID NO: 10950 - protein, 102 aa, Beta vulgaris; identical to SEQ ID NO: 2676

SEQ ID NO: 10951 - DNA, 309 bp, Beta vulgaris; identical to SEQ ID NO: 2677
  CDS (1)..(309)

SEQ ID NO: 10952 - protein, 102 aa, Beta vulgaris; identical to SEQ ID NO: 2678

SEQ ID NO: 10953 - DNA, 309 bp, Beta vulgaris; identical to SEQ ID NO: 2679
  CDS (1)..(309)

SEQ ID NO: 10954 - protein, 102 aa, Beta vulgaris; identical to SEQ ID NO: 2680

SEQ ID NO: 10955 - DNA, 309 bp, Aspergillus oryzae; identical to SEQ ID NO: 2683
  CDS (1)..(309)

SEQ ID NO: 10956 - protein, 102 aa, Aspergillus oryzae; identical to SEQ ID NO: 2684

SEQ ID NO: 10957 - DNA, 381 bp, Populus tremula x Populus tremuloides; identical to SEQ ID NO: 2685
  CDS (1)..(381)

SEQ ID NO: 10958 - protein, 126 aa, Populus tremula x Populus tremuloides; identical to SEQ ID NO: 2686

SEQ ID NO: 10959 - DNA, 318 bp, Plantago major; identical to SEQ ID NO: 2687
  CDS (1)..(318)

SEQ ID NO: 10960 - protein, 105 aa, Plantago major; identical to SEQ ID NO: 2688

SEQ ID NO: 10961 - DNA, 342 bp, Triticum aestivum; identical to SEQ ID NO: 2689
  CDS (1)..(342)

SEQ ID NO: 10962 - protein, 113 aa, Triticum aestivum; identical to SEQ ID NO: 2690

SEQ ID NO: 10963 - DNA, 249 bp, Serratia marcescens; identical to SEQ ID NO: 3053
  CDS (1)..(249): transl_table=11

SEQ ID NO: 10964 - protein, 82 aa, Serratia marcescens; identical to SEQ ID NO: 3054

SEQ ID NO: 10965 - DNA, 420 bp, Populus tremula x Populus tremuloides; identical to SEQ ID NO: 2691
  CDS (1)..(420)

SEQ ID NO: 10966 - protein, 139 aa, Populus tremula x Populus tremuloides; identical to SEQ ID NO: 2692

SEQ ID NO: 10967 - DNA, 348 bp, Tilia platyphyllos; identical to SEQ ID NO: 2693
  CDS (1)..(348)

SEQ ID NO: 10968 - protein, 115 aa, Tilia platyphyllos; identical to SEQ ID NO: 2694

SEQ ID NO: 10969 - DNA, 342 bp, Deschampsia antarctica; identical to SEQ ID NO: 2695
  CDS (1)..(342)

SEQ ID NO: 10970 - protein, 113 aa, Deschampsia antarctica; identical to SEQ ID NO: 2696

SEQ ID NO: 10971 - DNA, 333 bp, Saccharomyces cerevisiae; identical to SEQ ID NO: 3792
  CDS (1)..(333)

SEQ ID NO: 10972 - protein, 110 aa, Saccharomyces cerevisiae; identical to SEQ ID NO: 3793

SEQ ID NO: 10973 - DNA, 327 bp, Solanum lycopersicum; identical to SEQ ID NO: 2701
  CDS (1)..(327)

SEQ ID NO: 10974 - protein, 108 aa, Solanum lycopersicum; identical to SEQ ID NO: 2702

SEQ ID NO: 10975 - DNA, 315 bp, Vernicia fordii; identical to SEQ ID NO: 2703
  CDS (1)..(315)

SEQ ID NO: 10976 - protein, 104 aa, Vernicia fordii; identical to SEQ ID NO: 2704

SEQ ID NO: 10977 - DNA, 447 bp, Arabidopsis thaliana; identical to SEQ ID NO: 2705
  CDS (1)..(447)

SEQ ID NO: 10978 - protein, 148 aa, Arabidopsis thaliana; identical to SEQ ID NO: 2706

SEQ ID NO: 10979 - DNA, 312 bp, Arabidopsis thaliana; identical to SEQ ID NO: 2707
  CDS (1)..(312)

SEQ ID NO: 10980 - protein, 103 aa, Arabidopsis thaliana; identical to SEQ ID NO: 2708

SEQ ID NO: 10981 - DNA, 312 bp, Arabidopsis thaliana; identical to SEQ ID NO: 2709
  CDS (1)..(312)

SEQ ID NO: 10982 - protein, 103 aa, Arabidopsis thaliana; identical to SEQ ID NO: 2710

SEQ ID NO: 10983 - DNA, 309 bp, Arabidopsis thaliana; identical to SEQ ID NO: 2711
  CDS (1)..(309)

SEQ ID NO: 10984 - protein, 102 aa, Arabidopsis thaliana; identical to SEQ ID NO: 2712

SEQ ID NO: 10985 - DNA, 309 bp, Arabidopsis thaliana; identical to SEQ ID NO: 2713
  CDS (1)..(309)

SEQ ID NO: 10986 - protein, 102 aa, Arabidopsis thaliana; identical to SEQ ID NO: 2714

SEQ ID NO: 10987 - DNA, 300 bp, Arabidopsis thaliana; identical to SEQ ID NO: 2715
  CDS (1)..(300)

SEQ ID NO: 10988 - protein, 99 aa, Arabidopsis thaliana; identical to SEQ ID NO: 2716

SEQ ID NO: 10989 - DNA, 540 bp, Arabidopsis thaliana; identical to SEQ ID NO: 2717
  CDS (1)..(540)

SEQ ID NO: 10990 - protein, 179 aa, Arabidopsis thaliana; identical to SEQ ID NO: 2718

SEQ ID NO: 10991 - DNA, 453 bp, Arabidopsis thaliana; identical to SEQ ID NO: 2719
  CDS (1)..(453)

SEQ ID NO: 10992 - protein, 150 aa, Arabidopsis thaliana; identical to SEQ ID NO: 2720

SEQ ID NO: 10993 - DNA, 378 bp, Arabidopsis thaliana; identical to SEQ ID NO: 2721
  CDS (1)..(378)

SEQ ID NO: 10994 - protein, 125 aa, Arabidopsis thaliana; identical to SEQ ID NO: 2722

SEQ ID NO: 10995 - DNA, 336 bp, Arabidopsis thaliana; identical to SEQ ID NO: 2723
  CDS (1)..(336)

SEQ ID NO: 10996 - protein, 111 aa, Arabidopsis thaliana; identical to SEQ ID NO: 2724

SEQ ID NO: 10997 - DNA, 393 bp, Arabidopsis thaliana; identical to SEQ ID NO: 2725
  CDS (1)..(393)

SEQ ID NO: 10998 - protein, 130 aa, Arabidopsis thaliana; identical to SEQ ID NO: 2726

SEQ ID NO: 10999 - DNA, 408 bp, Arabidopsis thaliana; identical to SEQ ID NO: 2727
  CDS (1)..(408)

SEQ ID NO: 11000 - protein, 135 aa, Arabidopsis thaliana; identical to SEQ ID NO: 2728

SEQ ID NO: 11001 - DNA, 435 bp, Arabidopsis thaliana; identical to SEQ ID NO: 2731
  CDS (1)..(435)

SEQ ID NO: 11002 - protein, 144 aa, Arabidopsis thaliana; identical to SEQ ID NO: 2732

SEQ ID NO: 11003 - DNA, 411 bp, Arabidopsis thaliana; identical to SEQ ID NO: 2733
  CDS (1)..(411)

SEQ ID NO: 11004 - protein, 136 aa, Arabidopsis thaliana; identical to SEQ ID NO: 2734

SEQ ID NO: 11005 - DNA, 423 bp, Arabidopsis thaliana; identical to SEQ ID NO: 2735
  CDS (1)..(423)

SEQ ID NO: 11006 - protein, 140 aa, Arabidopsis thaliana; identical to SEQ ID NO: 2736

SEQ ID NO: 11007 - DNA, 414 bp, Arabidopsis thaliana; identical to SEQ ID NO: 2737
  CDS (1)..(414)

SEQ ID NO: 11008 - protein, 137 aa, Arabidopsis thaliana; identical to SEQ ID NO: 2738

SEQ ID NO: 11009 - DNA, 309 bp, Arabidopsis thaliana; identical to SEQ ID NO: 2739
  CDS (1)..(309)

SEQ ID NO: 11010 - protein, 102 aa, Arabidopsis thaliana; identical to SEQ ID NO: 2740

SEQ ID NO: 11011 - DNA, 309 bp, Arabidopsis thaliana; identical to SEQ ID NO: 2741
  CDS (1)..(309)

SEQ ID NO: 11012 - protein, 102 aa, Arabidopsis thaliana; identical to SEQ ID NO: 2742

SEQ ID NO: 11013 - DNA, 309 bp, Arabidopsis thaliana; identical to SEQ ID NO: 2743
  CDS (1)..(309)

SEQ ID NO: 11014 - protein, 102 aa, Arabidopsis thaliana; identical to SEQ ID NO: 2744

SEQ ID NO: 11015 - DNA, 309 bp, Arabidopsis thaliana; identical to SEQ ID NO: 2745
  CDS (1)..(309)

SEQ ID NO: 11016 - protein, 102 aa, Arabidopsis thaliana; identical to SEQ ID NO: 2746

SEQ ID NO: 11017 - DNA, 309 bp, Arabidopsis thaliana; identical to SEQ ID NO: 2573
  CDS (1)..(309)

SEQ ID NO: 11018 - protein, 102 aa, Arabidopsis thaliana; identical to SEQ ID NO: 2574

SEQ ID NO: 11019 - DNA, 396 bp, Oryza sativa subsp; identical to SEQ ID NO: 3111
  CDS (1)..(396)

SEQ ID NO: 11020 - protein, 131 aa, Oryza sativa subsp; identical to SEQ ID NO: 3112

SEQ ID NO: 11021 - DNA, 309 bp, Arabidopsis thaliana; identical to SEQ ID NO: 2747
  CDS (1)..(309)

SEQ ID NO: 11022 - protein, 102 aa, Arabidopsis thaliana; identical to SEQ ID NO: 2748

SEQ ID NO: 11023 - DNA, 309 bp, Arabidopsis thaliana; identical to SEQ ID NO: 2749
  CDS (1)..(309)

SEQ ID NO: 11024 - protein, 102 aa, Arabidopsis thaliana; identical to SEQ ID NO: 2750

SEQ ID NO: 11025 - DNA, 309 bp, Arabidopsis thaliana; identical to SEQ ID NO: 2751
  CDS (1)..(309)

SEQ ID NO: 11026 - protein, 102 aa, Arabidopsis thaliana; identical to SEQ ID NO: 2752

SEQ ID NO: 11027 - DNA, 378 bp, Oryza sativa; identical to SEQ ID NO: 2753
  CDS (1)..(378)

SEQ ID NO: 11028 - protein, 125 aa, Oryza sativa; identical to SEQ ID NO: 2754

SEQ ID NO: 11029 - DNA, 411 bp, Oryza sativa; identical to SEQ ID NO: 3119
  CDS (1)..(411)

SEQ ID NO: 11030 - protein, 136 aa, Oryza sativa; identical to SEQ ID NO: 3120

SEQ ID NO: 11031 - DNA, 312 bp, Oryza sativa; identical to SEQ ID NO: 2755
  CDS (1)..(312)

SEQ ID NO: 11032 - protein, 103 aa, Oryza sativa; identical to SEQ ID NO: 2756

SEQ ID NO: 11033 - DNA, 444 bp, Oryza sativa; identical to SEQ ID NO: 2757
  CDS (1)..(444)

SEQ ID NO: 11034 - protein, 147 aa, Oryza sativa; identical to SEQ ID NO: 2758

SEQ ID NO: 11035 - DNA, 378 bp, Oryza sativa; identical to SEQ ID NO: 2759
  CDS (1)..(378)

SEQ ID NO: 11036 - protein, 125 aa, Oryza sativa; identical to SEQ ID NO: 2760

SEQ ID NO: 11037 - DNA, 408 bp, Oryza sativa; identical to SEQ ID NO: 2761
  CDS (1)..(408)

SEQ ID NO: 11038 - protein, 135 aa, Oryza sativa; identical to SEQ ID NO: 2762

SEQ ID NO: 11039 - DNA, 402 bp, Oryza sativa; identical to SEQ ID NO: 2763
  CDS (1)..(402)

SEQ ID NO: 11040 - protein, 133 aa, Oryza sativa; identical to SEQ ID NO: 2764

SEQ ID NO: 11041 - DNA, 408 bp, Oryza sativa; identical to SEQ ID NO: 2765
  CDS (1)..(408)

SEQ ID NO: 11042 - protein, 135 aa, Oryza sativa; identical to SEQ ID NO: 2766

SEQ ID NO: 11043 - DNA, 384 bp, Oryza sativa; identical to SEQ ID NO: 2767
  CDS (1)..(384)

SEQ ID NO: 11044 - protein, 127 aa, Oryza sativa; identical to SEQ ID NO: 2768

SEQ ID NO: 11045 - DNA, 345 bp, Oryza sativa; identical to SEQ ID NO: 2769
  CDS (1)..(345)

SEQ ID NO: 11046 - protein, 114 aa, Oryza sativa; identical to SEQ ID NO: 2770

SEQ ID NO: 11047 - DNA, 417 bp, Oryza sativa; identical to SEQ ID NO: 2771
  CDS (1)..(417)

SEQ ID NO: 11048 - protein, 138 aa, Oryza sativa; identical to SEQ ID NO: 2772

SEQ ID NO: 11049 - DNA, 399 bp, Oryza sativa; identical to SEQ ID NO: 2773
  CDS (1)..(399)

SEQ ID NO: 11050 - protein, 132 aa, Oryza sativa; identical to SEQ ID NO: 2774

SEQ ID NO: 11051 - DNA, 411 bp, Oryza sativa; identical to SEQ ID NO: 2775
  CDS (1)..(411)

SEQ ID NO: 11052 - protein, 136 aa, Oryza sativa; identical to SEQ ID NO: 2776

SEQ ID NO: 11053 - DNA, 579 bp, Oryza sativa; identical to SEQ ID NO: 2777
  CDS (1)..(579)

SEQ ID NO: 11054 - protein, 192 aa, Oryza sativa; identical to SEQ ID NO: 2778

SEQ ID NO: 11055 - DNA, 495 bp, Oryza sativa; identical to SEQ ID NO: 2779
  CDS (1)..(495)

SEQ ID NO: 11056 - protein, 164 aa, Oryza sativa; identical to SEQ ID NO: 2780

SEQ ID NO: 11057 - DNA, 327 bp, Oryza sativa; identical to SEQ ID NO: 2781
  CDS (1)..(327)

SEQ ID NO: 11058 - protein, 108 aa, Oryza sativa; identical to SEQ ID NO: 2782

SEQ ID NO: 11059 - DNA, 330 bp, Oryza sativa; identical to SEQ ID NO: 2783
  CDS (1)..(330)

SEQ ID NO: 11060 - protein, 109 aa, Oryza sativa; identical to SEQ ID NO: 2784

SEQ ID NO: 11061 - DNA, 330 bp, Oryza sativa; identical to SEQ ID NO: 2785
  CDS (1)..(330)

SEQ ID NO: 11062 - protein, 109 aa, Oryza sativa; identical to SEQ ID NO: 2786

SEQ ID NO: 11063 - DNA, 330 bp, Oryza sativa; identical to SEQ ID NO: 2787
  CDS (1)..(330)

SEQ ID NO: 11064 - protein, 109 aa, Oryza sativa; identical to SEQ ID NO: 2788

SEQ ID NO: 11065 - DNA, 312 bp, Oryza sativa; identical to SEQ ID NO: 2789
  CDS (1)..(312)

SEQ ID NO: 11066 - protein, 103 aa, Oryza sativa; identical to SEQ ID NO: 2790

SEQ ID NO: 11067 - DNA, 315 bp, Oryza sativa; identical to SEQ ID NO: 2791
  CDS (1)..(315)

SEQ ID NO: 11068 - protein, 104 aa, Oryza sativa; identical to SEQ ID NO: 2792

SEQ ID NO: 11069 - DNA, 309 bp, Brassica napus; identical to SEQ ID NO: 2793
  CDS (1)..(309)

SEQ ID NO: 11070 - protein, 102 aa, Brassica napus; identical to SEQ ID NO: 2794

SEQ ID NO: 11071 - DNA, 537 bp, Brassica napus; identical to SEQ ID NO: 3157
  CDS (1)..(537)

SEQ ID NO: 11072 - protein, 178 aa, Brassica napus; identical to SEQ ID NO: 3158

SEQ ID NO: 11073 - DNA, 309 bp, Brassica napus; identical to SEQ ID NO: 2795
  CDS (1)..(309)

SEQ ID NO: 11074 - protein, 102 aa, Brassica napus; identical to SEQ ID NO: 2796

SEQ ID NO: 11075 - DNA, 309 bp, Brassica napus; identical to SEQ ID NO: 2797
  CDS (1)..(309)

SEQ ID NO: 11076 - protein, 102 aa, Brassica napus; identical to SEQ ID NO: 2798

SEQ ID NO: 11077 - DNA, 309 bp, Brassica napus; identical to SEQ ID NO: 2799
  CDS (1)..(309)

SEQ ID NO: 11078 - protein, 102 aa, Brassica napus; identical to SEQ ID NO: 2800

SEQ ID NO: 11079 - DNA, 309 bp, Brassica napus; identical to SEQ ID NO: 2801
  CDS (1)..(309)

SEQ ID NO: 11080 - protein, 102 aa, Brassica napus; identical to SEQ ID NO: 2802

SEQ ID NO: 11081 - DNA, 318 bp, Brassica napus; identical to SEQ ID NO: 2803
  CDS (1)..(318)

SEQ ID NO: 11082 - protein, 105 aa, Brassica napus; identical to SEQ ID NO: 2804

SEQ ID NO: 11083 - DNA, 300 bp, Brassica napus; identical to SEQ ID NO: 2805
  CDS (1)..(300)

SEQ ID NO: 11084 - protein, 99 aa, Brassica napus; identical to SEQ ID NO: 2806

SEQ ID NO: 11085 - DNA, 309 bp, Brassica napus; identical to SEQ ID NO: 2807
  CDS (1)..(309)

SEQ ID NO: 11086 - protein, 102 aa, Brassica napus; identical to SEQ ID NO: 2808

SEQ ID NO: 11087 - DNA, 519 bp, Brassica napus; identical to SEQ ID NO: 2809
  CDS (1)..(519)

SEQ ID NO: 11088 - protein, 172 aa, Brassica napus; identical to SEQ ID NO: 2810

SEQ ID NO: 11089 - DNA, 306 bp, Glycine max; identical to SEQ ID NO: 2811
  CDS (1)..(306)

SEQ ID NO: 11090 - protein, 101 aa, Glycine max; identical to SEQ ID NO: 2812

SEQ ID NO: 11091 - DNA, 315 bp, Triticum aestivum; identical to SEQ ID NO: 2813
  CDS (1)..(315)

SEQ ID NO: 11092 - protein, 104 aa, Triticum aestivum; identical to SEQ ID NO: 2814

SEQ ID NO: 11093 - DNA, 306 bp, Glycine max; identical to SEQ ID NO: 2815
  CDS (1)..(306)

SEQ ID NO: 11094 - protein, 101 aa, Glycine max; identical to SEQ ID NO: 2816

SEQ ID NO: 11095 - DNA, 309 bp, Brassica napus; identical to SEQ ID NO: 2817
  CDS (1)..(309)

SEQ ID NO: 11096 - protein, 102 aa, Brassica napus; identical to SEQ ID NO: 2818

SEQ ID NO: 11097 - DNA, 309 bp, Brassica napus; identical to SEQ ID NO: 2819
  CDS (1)..(309)

SEQ ID NO: 11098 - protein, 102 aa, Brassica napus; identical to SEQ ID NO: 2820

SEQ ID NO: 11099 - DNA, 399 bp, Glycine max; identical to SEQ ID NO: 2821
  CDS (1)..(399)

SEQ ID NO: 11100 - protein, 132 aa, Glycine max; identical to SEQ ID NO: 2822

SEQ ID NO: 11101 - DNA, 312 bp, Triticum aestivum; identical to SEQ ID NO: 2823
  CDS (1)..(312)

SEQ ID NO: 11102 - protein, 103 aa, Triticum aestivum; identical to SEQ ID NO: 2824

SEQ ID NO: 11103 - DNA, 414 bp, Triticum aestivum; identical to SEQ ID NO: 2825
  CDS (1)..(414)

SEQ ID NO: 11104 - protein, 137 aa, Triticum aestivum; identical to SEQ ID NO: 2826

SEQ ID NO: 11105 - DNA, 468 bp, Zea mays; identical to SEQ ID NO: 2829
  CDS (1)..(468)

SEQ ID NO: 11106 - protein, 155 aa, Zea mays; identical to SEQ ID NO: 2830

SEQ ID NO: 11107 - DNA, 504 bp, Zea mays; identical to SEQ ID NO: 2831
  CDS (1)..(504)

SEQ ID NO: 11108 - protein, 167 aa, Zea mays; identical to SEQ ID NO: 2832

SEQ ID NO: 11109 - DNA, 312 bp, Hordeum vulgare; identical to SEQ ID NO: 2833
  CDS (1)..(312)

SEQ ID NO: 11110 - protein, 103 aa, Hordeum vulgare; identical to SEQ ID NO: 2834

SEQ ID NO: 11111 - DNA, 393 bp, Hordeum vulgare; identical to SEQ ID NO: 2835
  CDS (1)..(393)

SEQ ID NO: 11112 - protein, 130 aa, Hordeum vulgare; identical to SEQ ID NO: 2836

SEQ ID NO: 11113 - DNA, 399 bp, Brassica napus; identical to SEQ ID NO: 3938
  CDS (1)..(399)

SEQ ID NO: 11114 - protein, 132 aa, Brassica napus; identical to SEQ ID NO: 3939

SEQ ID NO: 11115 - DNA, 402 bp, Brassica napus; identical to SEQ ID NO: 3940
  CDS (1)..(402)

SEQ ID NO: 11116 - protein, 133 aa, Brassica napus; identical to SEQ ID NO: 3941

SEQ ID NO: 11117 - DNA, 378 bp, Brassica napus; identical to SEQ ID NO: 2837
  CDS (1)..(378)

SEQ ID NO: 11118 - protein, 125 aa, Brassica napus; identical to SEQ ID NO: 2838

SEQ ID NO: 11119 - DNA, 402 bp, Brassica napus; identical to SEQ ID NO: 3946
  CDS (1)..(402)

SEQ ID NO: 11120 - protein, 133 aa, Brassica napus; identical to SEQ ID NO: 3947

SEQ ID NO: 11121 - DNA, 399 bp, Brassica napus; identical to SEQ ID NO: 3950
  CDS (1)..(399)

SEQ ID NO: 11122 - protein, 132 aa, Brassica napus; identical to SEQ ID NO: 3951

SEQ ID NO: 11123 - DNA, 309 bp, Brassica napus; identical to SEQ ID NO: 2843
  CDS (1)..(309)

SEQ ID NO: 11124 - protein, 102 aa, Brassica napus; identical to SEQ ID NO: 2844

SEQ ID NO: 11125 - DNA, 309 bp, Brassica napus; identical to SEQ ID NO: 2845
  CDS (1)..(309)

SEQ ID NO: 11126 - protein, 102 aa, Brassica napus; identical to SEQ ID NO: 2846

SEQ ID NO: 11127 - DNA, 522 bp, Brassica napus; identical to SEQ ID NO: 2847
  CDS (1)..(522)

SEQ ID NO: 11128 - protein, 173 aa, Brassica napus; identical to SEQ ID NO: 2848

SEQ ID NO: 11129 - DNA, 435 bp, Brassica napus; identical to SEQ ID NO: 2849
  CDS (1)..(435)

SEQ ID NO: 11130 - protein, 144 aa, Brassica napus; identical to SEQ ID NO: 2850

SEQ ID NO: 11131 - DNA, 435 bp, Brassica napus; identical to SEQ ID NO: 2851
  CDS (1)..(435)

SEQ ID NO: 11132 - protein, 144 aa, Brassica napus; identical to SEQ ID NO: 2852

SEQ ID NO: 11133 - DNA, 309 bp, Brassica napus; identical to SEQ ID NO: 2853
  CDS (1)..(309)

SEQ ID NO: 11134 - protein, 102 aa, Brassica napus; identical to SEQ ID NO: 2854

SEQ ID NO: 11135 - DNA, 300 bp, Brassica napus; identical to SEQ ID NO: 2855
  CDS (1)..(300)

SEQ ID NO: 11136 - protein, 99 aa, Brassica napus; identical to SEQ ID NO: 2856

SEQ ID NO: 11137 - DNA, 363 bp, Brassica napus; identical to SEQ ID NO: 2857
  CDS (1)..(363)

SEQ ID NO: 11138 - protein, 120 aa, Brassica napus; identical to SEQ ID NO: 2858

SEQ ID NO: 11139 - DNA, 336 bp, Brassica napus; identical to SEQ ID NO: 2859
  CDS (1)..(336)

SEQ ID NO: 11140 - protein, 111 aa, Brassica napus; identical to SEQ ID NO: 2860

SEQ ID NO: 11141 - DNA, 309 bp, Brassica napus; identical to SEQ ID NO: 2861
  CDS (1)..(309)

SEQ ID NO: 11142 - protein, 102 aa, Brassica napus; identical to SEQ ID NO: 2862

SEQ ID NO: 11143 - DNA, 522 bp, Brassica napus; identical to SEQ ID NO: 2863
  CDS (1)..(522)

SEQ ID NO: 11144 - protein, 173 aa, Brassica napus; identical to SEQ ID NO: 2864

SEQ ID NO: 11145 - DNA, 309 bp, Brassica napus; identical to SEQ ID NO: 2865
  CDS (1)..(309)

SEQ ID NO: 11146 - protein, 102 aa, Brassica napus; identical to SEQ ID NO: 2866

SEQ ID NO: 11147 - DNA, 300 bp, Brassica napus; identical to SEQ ID NO: 2867
  CDS (1)..(300)

SEQ ID NO: 11148 - protein, 99 aa, Brassica napus; identical to SEQ ID NO: 2868

SEQ ID NO: 11149 - DNA, 309 bp, Brassica napus; identical to SEQ ID NO: 2869
  CDS (1)..(309)

SEQ ID NO: 11150 - protein, 102 aa, Brassica napus; identical to SEQ ID NO: 2870

SEQ ID NO: 11151 - DNA, 309 bp, Brassica napus; identical to SEQ ID NO: 2871
  CDS (1)..(309)

SEQ ID NO: 11152 - protein, 102 aa, Brassica napus; identical to SEQ ID NO: 2872

SEQ ID NO: 11153 - DNA, 309 bp, Brassica napus; identical to SEQ ID NO: 2873
  CDS (1)..(309)

SEQ ID NO: 11154 - protein, 102 aa, Brassica napus; identical to SEQ ID NO: 2874

SEQ ID NO: 11155 - DNA, 312 bp, Brassica napus; identical to SEQ ID NO: 2875
  CDS (1)..(312)

SEQ ID NO: 11156 - protein, 103 aa, Brassica napus; identical to SEQ ID NO: 2876

SEQ ID NO: 11157 - DNA, 426 bp, Brassica napus; identical to SEQ ID NO: 2877
  CDS (1)..(426)

SEQ ID NO: 11158 - protein, 141 aa, Brassica napus; identical to SEQ ID NO: 2878

SEQ ID NO: 11159 - DNA, 309 bp, Brassica napus; identical to SEQ ID NO: 2879
  CDS (1)..(309)

SEQ ID NO: 11160 - protein, 102 aa, Brassica napus; identical to SEQ ID NO: 2880

SEQ ID NO: 11161 - DNA, 333 bp, Glycine max; identical to SEQ ID NO: 2881
  CDS (1)..(333)

SEQ ID NO: 11162 - protein, 110 aa, Glycine max; identical to SEQ ID NO: 2882

SEQ ID NO: 11163 - DNA, 324 bp, Glycine max; identical to SEQ ID NO: 2883
  CDS (1)..(324)

SEQ ID NO: 11164 - protein, 107 aa, Glycine max; identical to SEQ ID NO: 2884

SEQ ID NO: 11165 - DNA, 501 bp, Glycine max; identical to SEQ ID NO: 2885
  CDS (1)..(501)

SEQ ID NO: 11166 - protein, 166 aa, Glycine max; identical to SEQ ID NO: 2886

SEQ ID NO: 11167 - DNA, 399 bp, Glycine max; identical to SEQ ID NO: 2887
  CDS (1)..(399)

SEQ ID NO: 11168 - protein, 132 aa, Glycine max; identical to SEQ ID NO: 2888

SEQ ID NO: 11169 - DNA, 309 bp, Glycine max; identical to SEQ ID NO: 2889
  CDS (1)..(309)

SEQ ID NO: 11170 - protein, 102 aa, Glycine max; identical to SEQ ID NO: 2890

SEQ ID NO: 11171 - DNA, 525 bp, Glycine max; identical to SEQ ID NO: 2891
  CDS (1)..(525)

SEQ ID NO: 11172 - protein, 174 aa, Glycine max; identical to SEQ ID NO: 2892

SEQ ID NO: 11173 - DNA, 483 bp, Glycine max; identical to SEQ ID NO: 2893
  CDS (1)..(483)

SEQ ID NO: 11174 - protein, 160 aa, Glycine max; identical to SEQ ID NO: 2894

SEQ ID NO: 11175 - DNA, 522 bp, Glycine max; identical to SEQ ID NO: 2895
  CDS (1)..(522)

SEQ ID NO: 11176 - protein, 173 aa, Glycine max; identical to SEQ ID NO: 2896

SEQ ID NO: 11177 - DNA, 411 bp, Glycine max; identical to SEQ ID NO: 2897
  CDS (1)..(411)

SEQ ID NO: 11178 - protein, 136 aa, Glycine max; identical to SEQ ID NO: 2898

SEQ ID NO: 11179 - DNA, 309 bp, Glycine max; identical to SEQ ID NO: 2899
  CDS (1)..(309)

SEQ ID NO: 11180 - protein, 102 aa, Glycine max; identical to SEQ ID NO: 2900

SEQ ID NO: 11181 - DNA, 423 bp, Glycine max; identical to SEQ ID NO: 2901
  CDS (1)..(423)

SEQ ID NO: 11182 - protein, 140 aa, Glycine max; identical to SEQ ID NO: 2902

SEQ ID NO: 11183 - DNA, 318 bp, Glycine max; identical to SEQ ID NO: 2907
  CDS (1)..(318)

SEQ ID NO: 11184 - protein, 105 aa, Glycine max; identical to SEQ ID NO: 2908

SEQ ID NO: 11185 - DNA, 402 bp, Glycine max; identical to SEQ ID NO: 2909
  CDS (1)..(402)

SEQ ID NO: 11186 - protein, 133 aa, Glycine max; identical to SEQ ID NO: 2910

SEQ ID NO: 11187 - DNA, 309 bp, Glycine max; identical to SEQ ID NO: 2911
  CDS (1)..(309)

SEQ ID NO: 11188 - protein, 102 aa, Glycine max; identical to SEQ ID NO: 2912

SEQ ID NO: 11189 - DNA, 402 bp, Glycine max; identical to SEQ ID NO: 2913
  CDS (1)..(402)

SEQ ID NO: 11190 - protein, 133 aa, Glycine max; identical to SEQ ID NO: 2914

SEQ ID NO: 11191 - DNA, 480 bp, Zea mays; identical to SEQ ID NO: 2915
  CDS (1)..(480)

SEQ ID NO: 11192 - protein, 159 aa, Zea mays; identical to SEQ ID NO: 2916

SEQ ID NO: 11193 - DNA, 393 bp, Zea mays; identical to SEQ ID NO: 2917
  CDS (1)..(393)

SEQ ID NO: 11194 - protein, 130 aa, Zea mays; identical to SEQ ID NO: 2918

SEQ ID NO: 11195 - DNA, 345 bp, Zea mays; identical to SEQ ID NO: 2919
  CDS (1)..(345)

SEQ ID NO: 11196 - protein, 114 aa, Zea mays; identical to SEQ ID NO: 2920

SEQ ID NO: 11197 - DNA, 312 bp, Zea mays; identical to SEQ ID NO: 2921
  CDS (1)..(312)

SEQ ID NO: 11198 - protein, 103 aa, Zea mays; identical to SEQ ID NO: 2922

SEQ ID NO: 11199 - DNA, 342 bp, Zea mays; identical to SEQ ID NO: 2923
  CDS (1)..(342)

SEQ ID NO: 11200 - protein, 113 aa, Zea mays; identical to SEQ ID NO: 2924

SEQ ID NO: 11201 - DNA, 537 bp, Zea mays; identical to SEQ ID NO: 2925
  CDS (1)..(537)

SEQ ID NO: 11202 - protein, 178 aa, Zea mays; identical to SEQ ID NO: 2926

SEQ ID NO: 11203 - DNA, 399 bp, Zea mays; identical to SEQ ID NO: 2927
  CDS (1)..(399)

SEQ ID NO: 11204 - protein, 132 aa, Zea mays; identical to SEQ ID NO: 2928

SEQ ID NO: 11205 - DNA, 315 bp, Zea mays; identical to SEQ ID NO: 2929
  CDS (1)..(315)

SEQ ID NO: 11206 - protein, 104 aa, Zea mays; identical to SEQ ID NO: 2930

SEQ ID NO: 11207 - DNA, 21 bp, Artificial sequence
  primer
atggatagagttaaggacttg

SEQ ID NO: 11208 - DNA, 20 bp, Artificial sequence
  primer
ctaaaaccagatggcttttg

SEQ ID NO: 11209 - protein, 106 aa, Artificial sequence
  consensus sequence
  Variant (2)..(8): Xaa in position 2 to 8 is any amino acid
  Variant (9)..(9): Xaa in position 9 is any or no amino acid
  Variant (11)..(18): Xaa in position 11 to 18 is any amino acid
  Variant (20)..(28): Xaa in position 20 to 28 is any amino acid
  Variant (29)..(34): Xaa in position 29 to 34 is any or no amino acid
  Variant (36)..(36): Xaa in position 36 is any amino acid
  Variant (38)..(45): Xaa in position 38 to 45 is any amino acid
  Variant (46)..(49): Xaa in position 46 to 49 is any or no amino acid
  Variant (51)..(53): Xaa in position 51 to 53 is any amino acid
  Variant (54)..(74): Xaa in position 54 to 74 is any or no amino acid
  Variant (77)..(77): Xaa in position 77 is any amino acid
  Variant (80)..(81): Xaa in position 80 to 81 is any amino acid
  Variant (83)..(85): Xaa in position 83 to 85 is any amino acid
  Variant (86)..(87): Xaa in position 86 to 87 is any or no amino acid
  Variant (89)..(98): Xaa in position 89 to 98 is any amino acid
  Variant (99)..(99): Xaa in position 99 is any or no amino acid
  Variant (101)..(101): Xaa in position 101 is any amino acid
  Variant (103)..(105): Xaa in position 103 to 105 is any amino acid
VXXXXXXXXCXXXXXXXXLXXXXXXXXXXXXXXXEXDXXXXXXXXXXXXLXXXXXXXXXXXXXXXXXXXXXXXXVPXVFXXGXXXXXGXXXXXXXXXXXGXLXXXL

SEQ ID NO: 11210 - protein, 29 aa, Artificial sequence
  protein pattern
  Variant (2)..(2): Xaa in position 2 is any amino acid
  Variant (3)..(3): Xaa in position 3 is Ala, Ile, Leu or Val
  Variant (4)..(4): Xaa in position 4 is Phe or Tyr
  Variant (5)..(5): Xaa in position 5 is Ile, Leu or Val
  Variant (6)..(9): Xaa in position 6 to 9 is any amino acid
  Variant (10)..(10): Xaa in position 10 is Phe, Ile, Leu, Met or Val
  Variant (12)..(12): Xaa in position 12 is Ala, Gly, Pro, Ser or Thr
  Variant (13)..(22): Xaa in position 13 to 22 is any amino acid
  Variant (24)..(24): Xaa in position 24 is any amino acid
  Variant (26)..(27): Xaa in position 26 to 27 is any amino acid
  Variant (28)..(28): Xaa in position 28 is any or no amino acid
PXXXXXXXXXGXXXXXXXXXXXGXLXXXL

SEQ ID NO: 11211 - DNA, 828 bp, Synechocystis sp.
  CDS (1)..(828): transl_table=11
atgaccccatccccggtcctcaatctccttgtcagtaacgatgacggcattttttcccaaggggtacgtaccttggccaacaccctagtcgccgcaggccatgaagtcacagtggtctgtcctgaccgggaaagatccgccaccggccatggtctgaccctccatcgacccattcgagcgggcattgtggaggatgtttttgatcctcgcatcaaggcttggtcctgttccggtacccccgctgactgtgtgaagtttgccctccatgcggtgatgccccgttatccggattttgtcctttccggagttaaccacggtgctaacctcggcactgatgttttatattccggtacagtttccgccgccatggaagggttgatcgagggcattcctagcattgctttgagtttggtcagttttaccgccaccgattttcagcccgccgccgactttgccaattgctttgtccaacacctctggcgatcgccattgacggaaccgaccttatttagcatcaatattccagcggtaccagcggagcagattgccggagttagactcacccgccagggactgcaacgctatagcgaaacctttgaagaaaggtatgatccccggggaaaacgctactactggctagcgggggaaagggtaaaagaaattccccaaccagactatctccgtctcaaccgccgcattcccactgatgtccaggctagccaagataacttcatcaccattaccccattgcaatataatcttacggatatcaacggagttaacattattgaaaaaactaattggctagatcatctaaactttgattaa

SEQ ID NO: 11212 - protein, 275 aa, Synechocystis sp.
MTPSPVLNLLVSNDDGIFSQGVRTLANTLVAAGHEVTVVCPDRERSATGHGLTLHRPIRAGIVEDVFDPRIKAWSCSGTPADCVKFALHAVMPRYPDFVLSGVNHGANLGTDVLYSGTVSAAMEGLIEGIPSIALSLVSFTATDFQPAADFANCFVQHLWRSPLTEPTLFSINIPAVPAEQIAGVRLTRQGLQRYSETFEERYDPRGKRYYWLAGERVKEIPQPDYLRLNRRIPTDVQASQDNFITITPLQYNLTDINGVNIIEKTNWLDHLNFD

SEQ ID NO: 11213 - DNA, 798 bp, Nostoc punctiforme
  CDS (1)..(798): transl_table=11
atgagattactaattagcaacgacgacggcgtttctgctttggggattcgtaccctagccaactacttggcagaagcaggtcatgatgttagtgtagtttgcccagatcgagagcgatcggcaactggacatggattaactctccaccaacccattcgtgccgaaattgtagagtcaatttttcatcctgctgtcaaagcttgggcttgcgatggtacgccttcagattgcgtcaaattggcgctgtgggctttgctagatactcctcccgatttggttctctctggcattaatcaaggtgcaaatttgggaactgaaatcttgtattctggaactgtttcggcggcaatggaaggtctaattgaaggtattcccagcgtagccctaagtcttattagtcacacatctaaagactttcaacctgctgctaagtttgccaaagttctcgtagaccagttagcccaaaaacctctaccagatttaatgttgctcaacgttaatattcctgctgtgaagtgggaagaaattgctggagtgacacttacccgtcaaggagtacggcgttacattgatgtgtttgataaacgagttgatcctcgtggaaaaacgtactattggttaactggagaagtagttgaggatgtggaacctccaactggattaaatctgcctcaaaatgtaccaacagatgtgcaggttgtacgtaaaaattacatcagtataactccgttacaatacaatctaacttacgcaactgtactagagaaattgtctgattgggaattcaattttacctga

SEQ ID NO: 11214 - protein, 265 aa, Nostoc punctiforme
MRLLISNDDGVSALGIRTLANYLAEAGHDVSVVCPDRERSATGHGLTLHQPIRAEIVESIFHPAVKAWACDGTPSDCVKLALWALLDTPPDLVLSGINQGANLGTEILYSGTVSAAMEGLIEGIPSVALSLISHTSKDFQPAAKFAKVLVDQLAQKPLPDLMLLNVNIPAVKWEEIAGVTLTRQGVRRYIDVFDKRVDPRGKTYYWLTGEVVEDVEPPTGLNLPQNVPTDVQVVRKNYISITPLQYNLTYATVLEKLSDWEFNFT

SEQ ID NO: 11215 - DNA, 798 bp, Dehalococcoides sp. BAV1
  CDS (1)..(798): transl_table=11
atgagaatactggtaagcaatgacgatggtatttattcacccggcctgtgggcattggtgaaaaggcttaaagaagttggcgaagtgatagtggtggcgcctgaccgtgagcaaagtgccaccggtactcaggtgaccctgcgccagccgctcagggtgcagaagactcacccgcttattccggggattgaggcttatgcggtagaaggcagcccctgtgactgtgtaatactgggtttagccaagctaataaccgaaccggtagatctagtggtttcaggtatcaatcacggtctgaacttgggggatgatgtgcttatctcaggtacggtgggtgccgcccttcagggttatttgcgtaacataccttcaatagccgtctccatacccgttaccatggaagaaccggaaaatctggatagtgccgcctgtattacggcggaggtatcacgccggatacaaaacggagatattacaaagaattcttttctaaatataaatatacctgacctgccgctttcccaaattgaagaacttagggttaccccgctggcacataaaacccatatagaaacggttgaagagggacatgatggcaggaaacggtatttttggcttagacgccgccagttaagttcggcggataataaaaaaaccgatatctgggctatagaaaatgggtatatcactataagcgctctccatgaaaggcttttccaacaacccgtgtttactcttaaagatgctgaaactgccgggatattggcagctgccagatcctgccaggataaaatctag

SEQ ID NO: 11216 - protein, 265 aa, Dehalococcoides sp. BAV1
MRILVSNDDGIYSPGLWALVKRLKEVGEVIVVAPDREQSATGTQVTLRQPLRVQKTHPLIPGIEAYAVEGSPCDCVILGLAKLITEPVDLVVSGINHGLNLGDDVLISGTVGAALQGYLRNIPSIAVSIPVTMEEPENLDSAACITAEVSRRIQNGDITKNSFLNINIPDLPLSQIEELRVTPLAHKTHIETVEEGHDGRKRYFWLRRRQLSSADNKKTDIWAIENGYITISALHERLFQQPVFTLKDAETAGILAAARSCQDKI

SEQ ID NO: 11217 - DNA, 918 bp, Oryza sativa (japonica cultivar-group)
  CDS (1)..(918)
atggactcctccgcggcgtcggcggcggctgcggcggcggcgccggtggtgctggtgacgaacgacgacggcatcgacgcgccgggactccgcttcctcgtcggccagctcgtcgccgcccgccgctaccgcgtcctcgtctgcgcgcccgacacagacaggtcaggtgttagccactccatcacatggcgccctgcactccgctgtaaacgagttgatatagatggtgctacagcatttgcagcctcagggactcctgctgactgtgcttctttaggcatatctgggaagctctttgatggtttggttcctgatctggcaatcagtggaatcaatgttggcaacaattgtggatgccatgttatctattctggaacagttggcggtgctagggaggcattcttgtacgggattccttcattagccatgtcatatgattgggtcgcaagtcagagcagtgttaacgacctcaaagtagctgcagaggttgttatgcctctgataaataatgtgatggctgagataaagaatgggacatatcctcaaggatcattcttgaatatagatataccaactgatgctgcacaccacaagggatacaaaattacaaagcaaggaaggtatatggccagaattggttgggagcaaacagtttataagaagcctgcggtagaaagttaccagacagcaaacatggatgttgacagtgaaaaggacagtgaagtagatacttcatcagagaatgacctattgtttaaaagagtgcttgtgaggcgaagttatgatgaagaggaaggggatgatatcgaccacaagtgccttgtagatggatatattactgttacccctttgggagctctatcccgcgcagaagctgatgtcataccatactacaaagcttgcttgtcacgtctgtga

SEQ ID NO: 11218 - protein, 305 aa, Oryza sativa (japonica cultivar-group)
MDSSAASAAAAAAAPVVLVTNDDGIDAPGLRFLVGQLVAARRYRVLVCAPDTDRSGVSHSITWRPALRCKRVDIDGATAFAASGTPADCASLGISGKLFDGLVPDLAISGINVGNNCGCHVIYSGTVGGAREAFLYGIPSLAMSYDWVASQSSVNDLKVAAEVVMPLINNVMAEIKNGTYPQGSFLNIDIPTDAAHHKGYKITKQGRYMARIGWEQTVYKKPAVESYQTANMDVDSEKDSEVDTSSENDLLFKRVLVRRSYDEEEGDDIDHKCLVDGYITVTPLGALSRAEADVIPYYKACLSRL

SEQ ID NO: 11219 - DNA, 1158 bp, Arabidopsis thaliana
  CDS (1)..(1158)
atgacctcgaagaacaatggtttgtcagctgcgctcgtttcgaatctccaagatgtgctttcgaagagaaaagtaggaaatgaggaaaaagttggaagcgatggatcggcggaggaggctccgtctacatctgattccgttgatgttgcgtcggtggaggaagagatcgatgattctagacctattgttttagttacgaatggtgatgggattgattcgccagggcttgtttctctcgttgaggctttggttctcgaagggctttacaatgttcatgtttgtgctcctcaaacggacaaatcagcctctgctcattctactactccaggagaaacaatcgctgtaagctctgtaaaactcaaaggtgccacagcctttgaagtttcagggactcctgtggactgcatctcattaggattatctggagcgctttttgcttggtcaaaacctatactggtaattagtggaattaatcagggatcaagctgtggccatcaaatgttctattcaggtgcagttgctggaggcagggaggctttgatttctggggtaccctctttgtcaatatcgttgaattggaagaaaaatgaaagccaagaaagtcactttaaggatgctgttggtgtctgcttacctttgataaacgcaactatcagagacattgcgaaaggagttttccctaaagactgctctctcaacatagaaattccaacatcaccctcatcaaacaagggtttcaaggtaacaaagcaaagcatgtggaggcagtatcctagttggcaagctgtttcagctaatcgtcaccctggtgctgggaatttcatgtccaaccaacaaagtttaggggctcagcttgcccagcttggcagggatgcttcagcggctggggcggctcgtcgttttaccactcagaagaagagtattgtagaaattgaatcagttggtgttgctggtaaaactgatacccgtgttaagaaattctttcgtctagagtttcttgctaaagaacaagaacacacagatgaagatttggatgtcaaggctctagaagatggtttcgtttccgtgactccattttctctccttccaaaaacggattcagaaactcaagccgcagcatcagaatggatctccaaagcccttaactctgatcaatga

SEQ ID NO: 11220 - protein, 385 aa, Arabidopsis thaliana
MTSKNNGLSAALVSNLQDVLSKRKVGNEEKVGSDGSAEEAPSTSDSVDVASVEEEIDDSRPIVLVTNGDGIDSPGLVSLVEALVLEGLYNVHVCAPQTDKSASAHSTTPGETIAVSSVKLKGATAFEVSGTPVDCISLGLSGALFAWSKPILVISGINQGSSCGHQMFYSGAVAGGREALISGVPSLSISLNWKKNESQESHFKDAVGVCLPLINATIRDIAKGVFPKDCSLNIEIPTSPSSNKGFKVTKQSMWRQYPSWQAVSANRHPGAGNFMSNQQSLGAQLAQLGRDASAAGAARRFTTQKKSIVEIESVGVAGKTDTRVKKFFRLEFLAKEQEHTDEDLDVKALEDGFVSVTPFSLLPKTDSETQAAASEWISKALNSDQ

SEQ ID NO: 11221 - DNA, 876 bp, Chlamydia muridarum Nigg
  CDS (1)..(876): transl_table=11
atgaaactatataaaagagggctcatgactaaggaaccaagatttaaaattcttattactaatgacgatggcatcaaagctaagggaattagcctattagtttccttgcttcgcgacgctaattttgccgatctctatgttgtagctcctttggaagaacagtctggaagaagtatggctttttcgctaataggaccgaccgctgtagaaccttttgattatcctcaaaaagtccaagaggcttgggctgtagtagggactcctgttgattgtgtcaaattagccattggagaactctttaaagataacccgccagacctagtcttatcaggtatcaataacgggaaaaattctggtcgcaacctctattactctgctaccgtaggtgctataagggaagcgaaccttcacggaattcctgccatagccctttctcaatgtgaaaatatttcttttttccaagaagctcaaatgtcctctttgattcgcgctttatgtgagttcacagtttcccataaacatgccaatccactaggatttaatgtaaccttccctgctagctctgataattctccttggaaaggaatccgctttaccctttctggagatgaatttttatttggaattccaagattgatccgcaccgaaggaaatcgacgttactacacgctatacgatatgcaagataaggtgtctgaagatctttctgacgaatacttagccttagccaataactatattactgctgtcccactaatttccaaaaacactcctttggcaacactttctgaagaagaactagccttccttaaagaatcctttgaacaatctgttcaatgggattcttctttaaatttcgaagaagatctagcttaa

SEQ ID NO: 11222 - protein, 291 aa, Chlamydia muridarum Nigg
MKLYKRGLMTKEPRFKILITNDDGIKAKGISLLVSLLRDANFADLYVVAPLEEQSGRSMAFSLIGPTAVEPFDYPQKVQEAWAVVGTPVDCVKLAIGELFKDNPPDLVLSGINNGKNSGRNLYYSATVGAIREANLHGIPAIALSQCENISFFQEAQMSSLIRALCEFTVSHKHANPLGFNVTFPASSDNSPWKGIRFTLSGDEFLFGIPRLIRTEGNRRYYTLYDMQDKVSEDLSDEYLALANNYITAVPLISKNTPLATLSEEELAFLKESFEQSVQWDSSLNFEEDLA

SEQ ID NO: 11223 - DNA, 801 bp, Brucella melitensis 16M
  CDS (1)..(801): transl_table=11
gtgtcttatccatttcggcgaaggagtgacaaattgcgtattctgctgacgaacgatgacggtatccacgctgaaggcctcgctgttctggagcgaattgcacgcaagctctccgacgatgtgtgggtggtggcccctgaaacggaccagagcgggcttgcccactcactgacactgtcggagccgcttcgccttcgccagatcgatgcccgtcattttgccctgcgcggcactccgaccgattgcgtcatcatgggggtgcgccatgtattgccgggcgcgcccgatctcgtcctctccggcgtcaattccggggcgaacatggccgacgatgtgacctattcgggcacggttgccggtgcgatggaggggacattgcttggtgtgcgagccatcgctttgtcgcaggaatatgaatatgcgggcgatcgccggatcgtgccgtgggaaacggcggaagctcatgcgcctgagcttatcgggaggctgatggaggcgggctggccggaaggcgtgctgttgaacctcaatttcccgaattgcgctccggaagaagtgaagggcgtgcgcgtcacggcacaaggcaagcttagccatgatgcgcgccttgacgagcgccgcgatggacgtggtttcccttatttctggctgcatttcggtcgcggcaaggctccggttgccgacgacagcgatattgctgccatccgttcgggttgcatttcagtgaccccactccaccttgatctgaccgctcataaggttcgtgcagaactgggcgcggcgcttggagtggaagcatga

SEQ ID NO: 11224 - protein, 266 aa, Brucella melitensis 16M
MSYPFRRRSDKLRILLTNDDGIHAEGLAVLERIARKLSDDVWVVAPETDQSGLAHSLTLSEPLRLRQIDARHFALRGTPTDCVIMGVRHVLPGAPDLVLSGVNSGANMADDVTYSGTVAGAMEGTLLGVRAIALSQEYEYAGDRRIVPWETAEAHAPELIGRLMEAGWPEGVLLNLNFPNCAPEEVKGVRVTAQGKLSHDARLDERRDGRGFPYFWLHFGRGKAPVADDSDIAAIRSGCISVTPLHLDLTAHKVRAELGAALGVEA

SEQ ID NO: 11225 - DNA, 948 bp, Arabidopsis thaliana
  CDS (1)..(948)
atggagattgacggtggagatcgtatttccggtgaacgaccgatcattatggtcaccaacgacgacggaatagacgcgcctggccttcgttctcttgttcgtgtcctcgtctccactaacctctacgatgttcgcgtttgcgctcctgattcggagaaatctgctgttagtcacagtataatatggagtagaccactcactgcaaaacgagtagagatcgatggagctactgcttattctgttgatggaactcctgcggattgcactggtttgggcttatcggaagcactctttccttctcgtcctgacctggttctgagtggtataaacgtgggtagcaactgcggttataacatcgtctattctggaactgttgctggcgctcgtgaagccttcctttatgatgtgccttctgcctccatatcatatgattttgattggaaacgtggagagatgaatgctaatgattttgccctttctgcccaagcctgcttgcccattatcaacggcatactcggtgcaatcaagaacaaaactcaccctatgcaatgctttctgaatatcgatttgccgactgatattgctaaccacaagggatacaaactaactagacaaggtaaaagcatgggtaaaatgggatggagacaagtggaagaggaagcacaagggccgaagatgttatcaacaatgacaatggatacagagtcaggagtagtctcatcagagaacgacacatctgctcatgcgggaaaagatagccgtttattcaaaagagagttaagggcaagcatcagtgaagaagggagtgattctcattacctaaaagaaggatttattacggtgacgccgcttggagctctatctcagactgatgtggattgccaaaactactacaaagaatggcttcccaagattacaaaccagtcatgctcctcctcatccctttga

SEQ ID NO: 11226 - protein, 315 aa, Arabidopsis thaliana
MEIDGGDRISGERPIIMVTNDDGIDAPGLRSLVRVLVSTNLYDVRVCAPDSEKSAVSHSIIWSRPLTAKRVEIDGATAYSVDGTPADCTGLGLSEALFPSRPDLVLSGINVGSNCGYNIVYSGTVAGAREAFLYDVPSASISYDFDWKRGEMNANDFALSAQACLPIINGILGAIKNKTHPMQCFLNIDLPTDIANHKGYKLTRQGKSMGKMGWRQVEEEAQGPKMLSTMTMDTESGVVSSENDTSAHAGKDSRLFKRELRASISEEGSDSHYLKEGFITVTPLGALSQTDVDCQNYYKEWLPKITNQSCSSSSL

SEQ ID NO: 11227 - DNA, 807 bp, Escherichia coli CFT073
  CDS (1)..(807): transl_table=11
ttgcaaccagcgttgtcagggaacttatcaacacaacaggtgattatgcgcatattgctgagtaatgatgacggggtacatgcacccggtatacaaacgctggcgaaagccttgcgtgagtttgctgacgttcaggtggtcgcccccgatcgtaaccgcagcggcgcttctaattctctgacactggaatcctccctgcgcacgtttacctttgaaaatggtgatattgctgtgcaaatgggaaccccgaccgattgcgtctatcttggcgtaaatgctctgatgcgcccgcgcccggacattgttgtgtccggaattaacgccgggccgaatctgggggatgatgttatttattccggtacggtagcggccgcgatggaaggccgtcatttaggttttccggcgcttgccgtctcgcttgacgggcataaacattacgacactgccgcggcggtaacctgctcaattttgcgcgcactgtgtaaagagccgctgcgcaccgggcgtattcttaatattaacgttccggatttaccattggatcaaatcaaaggtattcgcgtgacgcgctgcggtacacgacatccggcagatcaggtgatcccgcagcaagatccgcgcggcaatacgctgtactggattggcccgccgggcggtaaatgtgatgccggtccggggaccgattttgctgcggtagatgagggctatgtttccatcacgccgctgcatgtggatttaactgcgcatagcgcgcaagatgtggtttcagactggttaaacagcgtgggagttggcacgcaatggtaa

SEQ ID NO: 11228 - protein, 268 aa, Escherichia coli CFT073
MQPALSGNLSTQQVIMRILLSNDDGVHAPGIQTLAKALREFADVQVVAPDRNRSGASNSLTLESSLRTFTFENGDIAVQMGTPTDCVYLGVNALMRPRPDIVVSGINAGPNLGDDVIYSGTVAAAMEGRHLGFPALAVSLDGHKHYDTAAAVTCSILRALCKEPLRTGRILNINVPDLPLDQIKGIRVTRCGTRHPADQVIPQQDPRGNTLYWIGPPGGKCDAGPGTDFAAVDEGYVSITPLHVDLTAHSAQDVVSDWLNSVGVGTQW

SEQ ID NO: 11229 - DNA, 810 bp, Prochlorococcus marinus str. MIT 9515
  CDS (1)..(810): transl_table=11
atggaatcgttaaatatattaataagtaatgatgatggagtttttgctgaaggaataagagcattagcaagatctgctttaaaaaaaggacataaagtaactgtagtttgtccagaccaagaaagatcggcaactggacatggcctcactttgcaatctcctttgagagtcgagagagcagatgaattatttgaaccgggtattaaagcgtggggatgttcaggtactcctgctgattgtgttaagttagccctatcagaattattagacaaaaagcctgatttgattctttctggagtaaatcatgggccaaatttaggaacggatattttttgttcaggaacagttgctgcagcgatggaagggactttagaaaatgttccatctatggcaattagtgttgcgagtttcaaatggaaaaactttgaattcgctagtgaaatcgcaatgaatattgcagagcaagcaatcaaggataattggccaaacgcacttcttttaaatttgaatataccgccatgtgaaaagaataaaataaaggaattatcttggacaagattatcaataagaaaatataaaaaccaattttccaaaagagaagacccaagaggagatgattattattggttagctggtgaggctgttttagatctcaaatcaaaaggttatgggcctaagaattggcctagtgacgtttctcaaatagaagaaaacaaaatttctcttacacctgtagaaacagatttattttggagaggcagtttagacgttttgccaaaaatcaatgcttcatttataaatgcttcttaa

SEQ ID NO: 11230 - protein, 269 aa, Prochlorococcus marinus str. MIT 9515
MESLNILISNDDGVFAEGIRALARSALKKGHKVTVVCPDQERSATGHGLTLQSPLRVERADELFEPGIKAWGCSGTPADCVKLALSELLDKKPDLILSGVNHGPNLGTDIFCSGTVAAAMEGTLENVPSMAISVASFKWKNFEFASEIAMNIAEQAIKDNWPNALLLNLNIPPCEKNKIKELSWTRLSIRKYKNQFSKREDPRGDDYYWLAGEAVLDLKSKGYGPKNWPSDVSQIEENKISLTPVETDLFWRGSLDVLPKINASFINAS

SEQ ID NO: 11231 - DNA, 789 bp, Prochlorococcus marinus str. NATL1A
  CDS (1)..(789): transl_table=11
atgaaaccattgaaaattttaattagtaatgatgatggtgtttttgcagaaggaataagaacacttgccacatctgcagcgagcagaggacataaagttactgttgtttgtccagatcaagaaagatccgcaactggtcatggattaactttacattcgcccatacgcgctgaaaaggcagacgaattatttgggggaggtattaaagcttggggatgtactggaacccctgctgattgcgtaaaactcgcacttaatgaacttcttgatcaaaagccagacttaattctttctggaattaatcatgggcctaatcttggtacggatattttttgctcagggactgttgctgctgctcttgaggggaccttagatgggattccatctattgcggtgagcgttgcaagttttcaatggaaaaattttagtttcgctgggaaactttccttagatattgcagagaaagcaattcaacaaaattggcccaagaacttactcctaaatttaaatattcccccttgtgaagaaaaagaaatgggtgatttggtttggacaagactttcaatcagacaatacgaagaacaattcattcgaagagtcgatccaagaggtaatacctatttttggatggctggggaagcagtaacagatcttcaatctgctggagaagggcctaagggatggccaagtgatgtctctcaaatcgctatatgctctccctcattaacgccaattcaacctgatcttttttggagaggaaatttagatgatttgccaaacttaatataa

SEQ ID NO: 11232 - protein, 262 aa, Prochlorococcus marinus str. NATL1A
MKPLKILISNDDGVFAEGIRTLATSAASRGHKVTVVCPDQERSATGHGLTLHSPIRAEKADELFGGGIKAWGCTGTPADCVKLALNELLDQKPDLILSGINHGPNLGTDIFCSGTVAAALEGTLDGIPSIAVSVASFQWKNFSFAGKLSLDIAEKAIQQNWPKNLLLNLNIPPCEEKEMGDLVWTRLSIRQYEEQFIRRVDPRGNTYFWMAGEAVTDLQSAGEGPKGWPSDVSQIAICSPSLTPIQPDLFWRGNLDDLPNLI

SEQ ID NO: 11233 - DNA, 819 bp, Mannheimia succiniciproducens MBEL55E
  CDS (1)..(819): transl_table=11
atgctgttttttatggggtttatgcagaatataccgcataaaatactaataattataaaagaaaaaaacaggaaaataatgaacattcttctttctaacgacgacggttatcatgccgaaggtattcaaattctcgccagagagttacgtaaattcgccgatgtgactattgtggcgcccgatcgtaaccgtagcgccgcctccggctcgttaactttggttgaaccgttgcgaccccgccacctggacgatggcgattattgcgtaaacggcacgccggcggactgtgtgcatttggcgttaaacggctttttatccgggcgcatggatcttgtggtttcgggcattaatgccggtgttaatttaggcgacgacgttatttattccggcactgttgcggcggcgctggaagggcgccatttaggtctgccttcaattgccgtctcattagacgggcgccgatattatgaaactgcggcacgggtggtttgcgatttaattcctaaattgcacacccgcttattgaatccgcgggaaattatcaatatcaatgtgccggatattccttatgatcaaataaaaggcattaaggtttgccggctggggcatcgagccgcttcggcggaagtgataaaacagcaagaccctcggggcgaaagcatttattggattggtcctgccgcgttaccggaagatgatgaagagggcacggattttcacgcggtgaataacggttatgtggcgattaccccgattcaggtggatatgacctcttataattcaatgagtgctttacaagattggttagaaagtgaataa

SEQ ID NO: 11234 - protein, 272 aa, Mannheimia succiniciproducens MBEL55E
MLFFMGFMQNIPHKILIIIKEKNRKIMNILLSNDDGYHAEGIQILARELRKFADVTIVAPDRNRSAASGSLTLVEPLRPRHLDDGDYCVNGTPADCVHLALNGFLSGRMDLVVSGINAGVNLGDDVIYSGTVAAALEGRHLGLPSIAVSLDGRRYYETAARVVCDLIPKLHTRLLNPREIININVPDIPYDQIKGIKVCRLGHRAASAEVIKQQDPRGESIYWIGPAALPEDDEEGTDFHAVNNGYVAITPIQVDMTSYNSMSALQDWLESE

SEQ ID NO: 11235 - DNA, 783 bp, Colwellia psychrerythraea 34H
  CDS (1)..(783): transl_table=11
atggatgaacaaaacttaacgagtaaaatgaaaatattattgagcaatgatgatggcgtgcatgcattaggtattaaagtgctttttgatgaactcgttaaacatttttctgtaaacgtagtcgccccagatcgaaattgcagtggtgctagtaactcattaacattgcttaatcctttacgggcagagcatttggataatggttttatctcggtaaacggtacaccaacagattcagtgcacttaggcagtagccagctttttactgattgtgacttagtggttgcaggtataaataaaggcgcgaatttaggtgatgatactctctattcaggcactgtggcagcggcaactgaaggacgtcatatgggtatgcctgcagttgcagtatccttggcgggaaataatgagcaacattatcaaacggcagcgattgtcactgcaaaaataatcaaacgtctacgcactcatccattaccagcagatcaaattttaaatattaatgtccctgatattccattagctgagctaaaagggataaaagtcacacgcttaggtcaccgtcaccaagctgaacgtatgcaaaaaatgcaagatccatggcagcgtgatatttattggtatggcgtgctaggacaggaactcgatggaggagaaggaaccgatttccatgctattgccaatggatatgcgtctgtaacaccactaaccgttgatatgactgctcatcgtagtatagaaaatattaaaagttggcttacagcgcttaacttatcagattaa

SEQ ID NO: 11236 - protein, 260 aa, Colwellia psychrerythraea 34H
MDEQNLTSKMKILLSNDDGVHALGIKVLFDELVKHFSVNVVAPDRNCSGASNSLTLLNPLRAEHLDNGFISVNGTPTDSVHLGSSQLFTDCDLVVAGINKGANLGDDTLYSGTVAAATEGRHMGMPAVAVSLAGNNEQHYQTAAIVTAKIIKRLRTHPLPADQILNINVPDIPLAELKGIKVTRLGHRHQAERMQKMQDPWQRDIYWYGVLGQELDGGEGTDFHAIANGYASVTPLTVDMTAHRSIENIKSWLTALNLSD

SEQ ID NO: 11237 - DNA, 765 bp, Neorickettsia sennetsu str. Miyayama
  CDS (1)..(765): transl_table=11
atgcgtgcacttataacaaatgacgatggatttgactcaccgggactgacactgctcagggaatttgtcctaagcattggcttcctggaagctatcacggtcgcacctaaaacaaataggactgcatctagtcatgctgtaagtctggataaaaaactgagaatcgaagaaattgctgaaaacgtattctcagttgatggaaccccggcagattgtgttataacagctttccatgattctagacttacgaaaaatggtgtaccggatgtggtattctccggtgtaaatattggtgcaaacttgggaatagacactatatactcaggaacgatagccgcggccatgcaaggcatgctatctggaacagtttcatttgcttttagccagttttattcttcgagtccccatactataacctggaacatagatagccctcacataaaaaaatacatactttcaatgcttgaaaaagttgacatcctgaaaaattgcgtactgaacataaacatccctgaatgccaagttataggagtgaaacacgtgccgcagtatggtaacaccgacatcccaaacaagagaaaatccgcaattagagctaggccacatgaagaagacaatgaaaaatatattacgatcgaaggaacatcttctccgcagttttgcgaatttcttagaagtggctatgtaacagtaaccccggtcggttgtgacctcacacactacgcggcactgaaatttctcgatagctcatttagccttgtgtag

SEQ ID NO: 11238 - protein, 254 aa, Neorickettsia sennetsu str. Miyayama
MRALITNDDGFDSPGLTLLREFVLSIGFLEAITVAPKTNRTASSHAVSLDKKLRIEEIAENVFSVDGTPADCVITAFHDSRLTKNGVPDVVFSGVNIGANLGIDTIYSGTIAAAMQGMLSGTVSFAFSQFYSSSPHTITWNIDSPHIKKYILSMLEKVDILKNCVLNINIPECQVIGVKHVPQYGNTDIPNKRKSAIRARPHEEDNEKYITIEGTSSPQFCEFLRSGYVTVTPVGCDLTHYAALKFLDSSFSLV

SEQ ID NO: 11239 - DNA, 756 bp, Desulfitobacterium hafniense Y51
  CDS (1)..(756): transl_table=11
atgcatattctattgacaaatgatgacggatattttgcccctgggctgcaaaccctctatacaaccttagctgaagcaggatacgatgtcttcattgtggcaccggatagtcaaaaatcggcaacaggccattcgatcactttgtttgaacctttgtttattacgaagcactcgttagatcgcggcaccggctatgcggtcagtgggaaaccggccgactgtgttaaattggcgatacaaggcagtattattcccaaacctgatttagtcatctccggaattaataacggccccaatttggggaccgatgtcttttattcggggacagtatccgcagctatggaaggggtgcttttgggagtccccgccatagcagtatccttagcttccttttctgccgtcgactataagccggccgcccaatttgtggccctatcgttgccgaaactccgcctggggccgggattaatcaatatcaatattccacccttgccggagaaggagtggaaaggtgtccgtgtcacgaagctgggcaaagcagtctatgagaatgtcttcgaacatcggcaagctccctatggccgtgactactactggcaggcaggcaccgtatcaccggaagtcgaccaggaaacggacctctatgctgtgcaggaaggctatgtatccataacgcccatgcacagtgatttaaccgattatatcaaacttaaggaattacgacagagcttatcccttgagaatccaaataaatag

SEQ ID NO: 11240 - protein, 251 aa, Desulfitobacterium hafniense Y51
MHILLTNDDGYFAPGLQTLYTTLAEAGYDVFIVAPDSQKSATGHSITLFEPLFITKHSLDRGTGYAVSGKPADCVKLAIQGSIIPKPDLVISGINNGPNLGTDVFYSGTVSAAMEGVLLGVPAIAVSLASFSAVDYKPAAQFVALSLPKLRLGPGLININIPPLPEKEWKGVRVTKLGKAVYENVFEHRQAPYGRDYYWQAGTVSPEVDQETDLYAVQEGYVSITPMHSDLTDYIKLKELRQSLSLENPNK

SEQ ID NO: 11241 - DNA, 786 bp, Methanococcoides burtonii DSM 6242
  CDS (1)..(786): transl_table=11
atgtcaaaacgaatacttcttaccaatgatgatggtgtgtatgctgccggtatcagagcagcttaccgcagcgtgtccgaccttggtgatgttactgtctcagcaccagctcagcagcaaagtggtgtgggtcgttccatatccatattcgaaccactgcgtattactcgtactaccattgacggtattgaggtacatgcgatcggtgggactcctactgattctgttattctgggtatctttactatcatgaaggaattgcccgacctgatcctttctggcttcaatataggtgagaacatcagcacagacactattacgacctccgggaccatcggagctgcactggaaggtgcaagttatggtgttcctgccattgccgcatccttgcaggtgaccgaagagggattgaaattcgatgacctccgggatttccagcatgacttcgatgttggtatcaaatttgtgaacggtgttgcaaaaaaagtccttaaaaacggtctgcctgaaaatgtcgatcttttgaacattaacattcctcattttgtagaagaggactctgaagttgaaataacaaggcttgctcgcaagttcttccgtacgggtgtggaggaacgccgcgatccaaggggaaggccatattactggatagcaggtgaccttatccacacagccgaaaaaggcactgatgtcaatgccatagaaaaaggtcacatctcagtgacacctatatcactggatgcaacatctcccatcaacttttcagaaattgaacatctgatgtga

SEQ ID NO: 11242 - protein, 261 aa, Methanococcoides burtonii DSM 6242
MSKRILLTNDDGVYAAGIRAAYRSVSDLGDVTVSAPAQQQSGVGRSISIFEPLRITRTTIDGIEVHAIGGTPTDSVILGIFTIMKELPDLILSGFNIGENISTDTITTSGTIGAALEGASYGVPAIAASLQVTEEGLKFDDLRDFQHDFDVGIKFVNGVAKKVLKNGLPENVDLLNINIPHFVEEDSEVEITRLARKFFRTGVEERRDPRGRPYYWIAGDLIHTAEKGTDVNAIEKGHISVTPISLDATSPINFSEIEHLM

SEQ ID NO: 11243 - DNA, 783 bp, Silicibacter sp. TM1040
  CDS (1)..(783): transl_table=11
atgcgcattctggtcaccaatgacgacggcatcagcgcgccggggctggcggtccttgaacagatcgcaacagagctggccggccccgagggcgaagtctggatcgtcgcacccgccttcgaacaatccggcgttggccattgcatcagctacacccacccctcgatcctctccgagcttggaccccgccgatttgccgccgagggctcgccggccgactgtgttctcgcggcccttcatgtggtgatgaaggacaccccgccggacctgatcctatcgggggtaaaccggggcaacaactctgccgaaaacgccctgtattcaggcacccttggcggcgcgatggagggcgcccttcagggcgtgcccgcaatggcgctttcgcaatattacggcagcggcaatcgcgacctggagaacccctttgaggccgcgcgtgcacatggcgcggaggtggtgcgcaaactcctgtccgccacgccgcagaacgacagcccctaccggctcttttacaacatcaacttccctcccgtggccgccggggatgtgaagggcatcaaagtcaccacccagggctgccgcagtggcaagcgcttctccgcagaagagcagttctcccccaacggcaagcgcttcatctgggtgaagggcggcgaccagcaggtatccaccgcgccggaaacggacgcggcggcaaacctcgacgggttcatctctgtcactcccatgcgcgcggatctcactgcgcatgacgctgtggaggccttgaaggcgatcgaatga

SEQ ID NO: 11244 - protein, 260 aa, Silicibacter sp. TM1040
MRILVTNDDGISAPGLAVLEQIATELAGPEGEVWIVAPAFEQSGVGHCISYTHPSILSELGPRRFAAEGSPADCVLAALHVVMKDTPPDLILSGVNRGNNSAENALYSGTLGGAMEGALQGVPAMALSQYYGSGNRDLENPFEAARAHGAEVVRKLLSATPQNDSPYRLFYNINFPPVAAGDVKGIKVTTQGCRSGKRFSAEEQFSPNGKRFIWVKGGDQQVSTAPETDAAANLDGFISVTPMRADLTAHDAVEALKAIE

SEQ ID NO: 11245 - DNA, 789 bp, Myxococcus xanthus DK 1622
  CDS (1)..(789): transl_table=11
gtgagcaacaagcccaagcgcatcctggtttccaacgacgacggctatttctcagaggggcttcaggcgctggtcgaggccgtgagccccctgggggaggtgtgggtggtggctcccgaccgggagcagagcgccgcctcccacgccatctccctgcaccggccgctgcgcatcaaggaggtgcgggagcggtggttcgccgtcgacggaacccccgcggactgcgcttatctggcgatcaaccatctcctgaaggatgatcgcccggtactcatggtttccggcatcaaccacggcgcgaatctggccgaagacatcatgtactccggcacggtggccgcggcgatggagggtgcgctcctgggcgtgcccgccatcgccttcagcctggtggcccggcggaacttcgacttcgcgccgggggcccggttcgctcgttcgctggtgtccagcgccctgtcgcgtcctctcccgccgcggatgctcctcaacgtgaacatccctgggggcgtggaaccggagggctacgtcgtcacccgccagggccgtcactcgtacggcttcgaggtggtggagaacgaagaccctcgtggccggaagtactactggattggcggtagcgactaccagcacgaggacatcccgggcagcgactgcaatgccgtgtttcgggacaagcgcgtctccgtcactccgctgcacttcgagctgacggaccatggccggcttccggacctctccgggtggcaggtcgatggcttcaaccggcatgaaccggacggtgcctag

SEQ ID NO: 11246 - protein, 262 aa, Myxococcus xanthus DK 1622
MSNKPKRILVSNDDGYFSEGLQALVEAVSPLGEVWVVAPDREQSAASHAISLHRPLRIKEVRERWFAVDGTPADCAYLAINHLLKDDRPVLMVSGINHGANLAEDIMYSGTVAAAMEGALLGVPAIAFSLVARRNFDFAPGARFARSLVSSALSRPLPPRMLLNVNIPGGVEPEGYVVTRQGRHSYGFEVVENEDPRGRKYYWIGGSDYQHEDIPGSDCNAVFRDKRVSVTPLHFELTDHGRLPDLSGWQVDGFNRHEPDGA

SEQ ID NO: 11247 - DNA, 840 bp, Rubrobacter xylanophilus DSM 9941
  CDS (1)..(840): transl_table=11
ttgccggagtttatattcgccttctggaagagggtttttgggatgcgcatcgtactgacaaacgacgacggcatagaggccccggggcttttggcggcccggcgggcgctggaggaggtcggggaggtgatcacggtcgcccccgaccgcaaccgctccggggtgggccggagcattacgttcggcgcggagctgtacgtggaggagcgccggatggccgacggcggcgtggggtacgcgtgcagcggcacgccggtggactgcgtgcggctcgtggcgctcgggatggtagagggcttcaggccggacatcgtggtctcggggataaaccacggggagaacctgggcgacgacatcacctactccgggacggtggccggggcgctggaggcgatcgtcatcggggtgcccggtatagcggtttcgctgagcaccggccggccctggcacggggcggacggccgggaggagctgcacttcgagccggtggcccgcttcacggcccggctggccgggctggcgctccgcgacctgccgcccgggcgcatcctgaacgtgaacgcccccaacctccccgaggaggagctggagggggcgagggtgacccggctcgggcggcgcttctaccaggacgagctcatagaggtgcgcgacaagaacgggagggtcggctacaacatctacaacaacccgcccggccaccacgacgaggagggcaccgactttgcggcgctgcagagccgccggatcagcgtgacccccgtgcacctggacctcaccgacaccgccgggctgaaggagctcgagagctgggacatcgggaggctggtggtccggtga

SEQ ID NO: 11248 - protein, 279 aa, Rubrobacter xylanophilus DSM 9941
MPEFIFAFWKRVFGMRIVLTNDDGIEAPGLLAARRALEEVGEVITVAPDRNRSGVGRSITFGAELYVEERRMADGGVGYACSGTPVDCVRLVALGMVEGFRPDIVVSGINHGENLGDDITYSGTVAGALEAIVIGVPGIAVSLSTGRPWHGADGREELHFEPVARFTARLAGLALRDLPPGRILNVNAPNLPEEELEGARVTRLGRRFYQDELIEVRDKNGRVGYNIYNNPPGHHDEEGTDFAALQSRRISVTPVHLDLTDTAGLKELESWDIGRLVVR

SEQ ID NO: 11249 - DNA, 780 bp, Cytophaga hutchinsonii ATCC 33406
  CDS (1)..(780): transl_table=11
atgtccaaaccattaatacttgtttgtaatgatgacggcattttttctgtaggtatccgcaccttaattgaagtaatgtctgaactgggtgaagttgtggtggtagcgccggattcgcctcagtctggcatgggacatgcgattacgattggtaatacactccggcttgaagcgagcgatctgtttccgggtattgtagcatatgaatgttcgggaacacctgctgattgtgtaaagctggccaagcaccatgtattgaaaggccgcaaaccggacctggttgtaagcggaataaaccacggaagcaattcatctataagtgtattatattccggtaccatgtcggccgcaattgaggccgcattggaagggttgcccgctatcggtttttcgttgtgtgattataacgcgcatgctgatttttcacacgtaaaagcattcgtaaaacaaattgcatcagaagtattaaccaacggtattgctaaaggcattacattgaatgttaattttcctgccgttataaatgctccgttaaaaggaattaaaatctgcagacaggcacatgcccgctgggaagaaaagtttgacgaacgttttgatccctacggcagaaggtatttctggatggcaggaagttttgaaaataaagatgccggtgaagatacagacgaatgggcactggccaacggatatgtttcagtagtaccttgcagttatgatctgacagcgcatcagttattgggccaattaaacagagactggaaattcattcacgaataa

SEQ ID NO: 11250 - protein, 259 aa, Cytophaga hutchinsonii ATCC 33406
MSKPLILVCNDDGIFSVGIRTLIEVMSELGEVVVVAPDSPQSGMGHAITIGNTLRLEASDLFPGIVAYECSGTPADCVKLAKHHVLKGRKPDLVVSGINHGSNSSISVLYSGTMSAAIEAALEGLPAIGFSLCDYNAHADFSHVKAFVKQIASEVLTNGIAKGITLNVNFPAVINAPLKGIKICRQAHARWEEKFDERFDPYGRRYFWMAGSFENKDAGEDTDEWALANGYVSVVPCSYDLTAHQLLGQLNRDWKFIHE

SEQ ID NO: 11251 - DNA, 807 bp, Trichodesmium erythraeum IMS101
  CDS (1)..(807): transl_table=11
atgaaaatattggttagtaacgacgacggcatttttgctgaaggtatccggagcttagctaatggtttagcagcagtaggccatgaagtttttgtggtttgtcctgataaagaacgttcagctacaggtcatggcttaacattacatcaacctattcgggctgaaattgtcaaatcaatttttgatgatcggataacagcttgggcttgttctggcactcctgctgactgtgtaaaattagccctatttagcttattagaaactcaaccagacttagtattagcaggaattaatcatggcccaaatttaggcactgatatattctattctggtactgtttctgcagccatggaagggatagttgaaaatattcctagcattgcctttagtcttggcagttacacttctagggagtttgaagttgctgtcaattttgctcaaagtctagtgcagaaaatagaaagccaacctttagataatttaatgttactgaatgtaaacattccagcagttaaggaaacagaaatagcaggagtaaaaattacccgtcaaggagtttgtcgatacatagatatatttaaaaaacgggttgacccgcgaggtaaaacttactattggctagctggagaattattggaagaaactgaagaaactaaggatcaagcaatacccgacaaatataatacggatgttgaagcaatgcgtgaaaaatatatcacaattactcccttgcaatacaatctaacttatggtaggcaattaacctatctacaaaagtggaaaattgataattttagttacaattaa

SEQ ID NO: 11252 - protein, 268 aa, Trichodesmium erythraeum IMS101
MKILVSNDDGIFAEGIRSLANGLAAVGHEVFVVCPDKERSATGHGLTLHQPIRAEIVKSIFDDRITAWACSGTPADCVKLALFSLLETQPDLVLAGINHGPNLGTDIFYSGTVSAAMEGIVENIPSIAFSLGSYTSREFEVAVNFAQSLVQKIESQPLDNLMLLNVNIPAVKETEIAGVKITRQGVCRYIDIFKKRVDPRGKTYYWLAGELLEETEETKDQAIPDKYNTDVEAMREKYITITPLQYNLTYGRQLTYLQKWKIDNFSYN

SEQ ID NO: 11253 - DNA, 798 bp, Synechococcus sp. CC9311
  CDS (1)..(798): transl_table=11
atgactcccctgcggatcctgatcagcaacgacgacggcgtgtttgccgacggcatccgcaccctggcggcagcggccgcagcagccgggcatcaggtcacggtggtgtgtcccgaccaagagcgatccgccactggccacgggctaaccctccaaacacctatccgtgccgagcgggccgatgaactgtttgaacctggaatcaaggcctgggcctgcagcggcaccccggcggattgcatgaaattggccctgtttgagttgcttcctgaaaagccagacctagtgctttcagggattaaccatggccccaacctcggcaccgatgtgttttgctccggcaccgtggcagccgcgatggagggcacgctggagggcctaccggcgatggccgtgagcagtgcctgttttcagtggagagaattccaagccgccgcacacttggccatccaggtagccgaagcagcccttgccgatcaatggccagaaaacctattgctcaatctcaacgttcccccctgcaagcaagaggccatggggaaactgagctggacccgcctttcgatccgccgctatgacgagcaattcagccctcgggtcgacccccgtggccgcacctattactggctcgccggtgaagctgtcgaggattttgaatcgggcggtgatggtccccgcgactggcccactgacgtggcccaaatccaagcagatgcaccctcactcacacccatccaaccggagcttttctggcgaggaggtctctcctccctaccccaactaaacatcgatcaatag

SEQ ID NO: 11254 - protein, 265 aa, Synechococcus sp. CC9311
MTPLRILISNDDGVFADGIRTLAAAAAAAGHQVTVVCPDQERSATGHGLTLQTPIRAERADELFEPGIKAWACSGTPADCMKLALFELLPEKPDLVLSGINHGPNLGTDVFCSGTVAAAMEGTLEGLPAMAVSSACFQWREFQAAAHLAIQVAEAALADQWPENLLLNLNVPPCKQEAMGKLSWTRLSIRRYDEQFSPRVDPRGRTYYWLAGEAVEDFESGGDGPRDWPTDVAQIQADAPSLTPIQPELFWRGGLSSLPQLNIDQ

SEQ ID NO: 11255 - DNA, 774 bp, Alkalilimnicola ehrlichei MLHE-1
  CDS (1)..(774): transl_table=11
atgatgcacattctggtcagcaatgacgatggttaccaggcgcccggcatactcgccctggccgaggccctgtccgagatggcgcgggtgaccgtggtggccccggagcgggaccgtagcggcgcgagcaattcgctcaccctggactatccattgcgcgtgcatggcaccggcccgcaccgctaccgggtggaggggacccccaccgactgcgtccacctggccatcaccgggctgctcagcgaggagccggatatggtggtctccgggatcaacgccggggccaacatgggcgacgatgtcctctacagcggcaccgtggccgcggccaccgaggggcgtttcctgggcctgccggccattgccatctccctcaatgccttcgagccccggcacctggccacggcagcccgggtggcgcagctcatcgttcagcgcctgagccgtgacccgttgccctccgacaccatcctcaatatcaacgtccccgacctgccctggcatgaggtacagggctgggaggcgacgcgcctgggtcggcgccaccgggccgagccagtggtgcgtgacgaggacccgcgcggccgggcgatctactggatcggcccgccgggtagtgaggaggacgccggccccgggaccgacttctatgccgtacgcaacggctatgtctcggtgaccccgattcaggtggacctgacgcgctataccgcgttggaccaggtggccggctgggtcagcggtctgggccggccggccgaggaggggcactga

SEQ ID NO: 11256 - protein, 257 aa, Alkalilimnicola ehrlichei MLHE-1
MMHILVSNDDGYQAPGILALAEALSEMARVTVVAPERDRSGASNSLTLDYPLRVHGTGPHRYRVEGTPTDCVHLAITGLLSEEPDMVVSGINAGANMGDDVLYSGTVAAATEGRFLGLPAIAISLNAFEPRHLATAARVAQLIVQRLSRDPLPSDTILNINVPDLPWHEVQGWEATRLGRRHRAEPVVRDEDPRGRAIYWIGPPGSEEDAGPGTDFYAVRNGYVSVTPIQVDLTRYTALDQVAGWVSGLGRPAEEGH

SEQ ID NO: 11257 - DNA, 774 bp, Rhizobium leguminosarum bv. viciae 3841
  CDS (1)..(774): transl_table=11
atgcgcatcctgcttacgaatgacgacggcattcacgccgaaggtcttgccgcgctggagcggatcgcgcgcacgctgtccgacgatgtctggatcgtggcgcccgagaccgaccagagcggcctggcccattcgctgagcctctccgaacctttacggctgcgcaagatttccgacaagcatttcgccctgcgcggcacgccgaccgattgcgtcatcatgggcatcaggcaggtgatggacatcaagccggatctcgtcctgtcaggcgtcaattcaggttcgaacgttgccgacgacgtgacctattccggcacgatcgccggcgccatcgagggcacgatgcagggcgtgcgctccttcgcgttgagccaggcctatctctatgaggacggtgcacgcatcgtgccctgggaggtctgcgagaagcatgcgccggctcttctggaaaagctgatggtcctggacctgccggagggcacgttcctcaatctcaacttcccgaactgccgtcccgacgaggtcgacggcgccgaggtgaccatgcagggcaagctcgccttcaatctgcaggtcgatgcccgctccgacggccggggctttccctactactggctgaagttcggcgagcgcgccggcgccttcgtcgaaggcaccgatattcacgctctgaagcataataagatctcggtaacgcctttgaaactggatctgaccgattattccgtgacggaccgcgtggcgcgggccttgggatacggagcacaagtttga

SEQ ID NO: 11258 - protein, 257 aa, Rhizobium leguminosarum bv. viciae 3841
MRILLTNDDGIHAEGLAALERIARTLSDDVWIVAPETDQSGLAHSLSLSEPLRLRKISDKHFALRGTPTDCVIMGIRQVMDIKPDLVLSGVNSGSNVADDVTYSGTIAGAIEGTMQGVRSFALSQAYLYEDGARIVPWEVCEKHAPALLEKLMVLDLPEGTFLNLNFPNCRPDEVDGAEVTMQGKLAFNLQVDARSDGRGFPYYWLKFGERAGAFVEGTDIHALKHNKISVTPLKLDLTDYSVTDRVARALGYGAQV

SEQ ID NO: 11259 - DNA, 744 bp, Azoarcus sp. BH72
  CDS (1)..(744): transl_table=11
atgcgtatcctggtcagcaacgacgatggctatttcgcccccggcattgctgcgcttgccgcggcgctcggtgaactcggtgacgtgaccgtggttgcgcctgaacgcgatcgaagcggcgcgagtaattcgctgacgctggatcgtccgctttccctgcgccgtgccgccaacgggttcttcttcgttaacgggacgccgaccgattgcgtgcatctggcggtgacgggaatgctcgatcagctcccggacatggtggtttcaggggtcaatcatggcgctaacatgggcgatgacaccctgtactccgggaccgtcgcggctgccaccgaggggtatctgctgggaatcccgtcgatcgcggtgtcgctcgcgagttggtcggcaaccgatttctccgttgctgcgcaggttgcccgcgacgtcgcggcgcggttgatgcgctcgccgcttcccgccccggtgctgctcaatgtcaatgtgcccgattgcgccggtggagcgcccaagggcacgcgggtcacacgactgggcaagcggcacaaggccgagccggtgatccggagccagacgccgcgcggcgaaaccgtctattgggtgggcgccgctggcgccgccgcggacgcgggcgaaggcaccgattttcacgcggtggccaacggcttcgtgtcggttacgccgctgcaggtcgatttgacccacacgggtcagatcgccgcggtggatacgtggttgtcggcatga

SEQ ID NO: 11260 - protein, 247 aa, Azoarcus sp. BH72
MRILVSNDDGYFAPGIAALAAALGELGDVTVVAPERDRSGASNSLTLDRPLSLRRAANGFFFVNGTPTDCVHLAVTGMLDQLPDMVVSGVNHGANMGDDTLYSGTVAAATEGYLLGIPSIAVSLASWSATDFSVAAQVARDVAARLMRSPLPAPVLLNVNVPDCAGGAPKGTRVTRLGKRHKAEPVIRSQTPRGETVYWVGAAGAAADAGEGTDFHAVANGFVSVTPLQVDLTHTGQIAAVDTWLSA

SEQ ID NO: 11261 - DNA, 843 bp, Acidovorax sp. JS42
  CDS (1)..(843): transl_table=11
gtgaccagcgacagcgtgtgtgctcgctcctacaatgccagccgttccgccttccagaccatgaaaatcctcatctccaacgacgacggctaccaggcgcctggcatcgtggcgctgcatgacgcccttaagaccattgctgatgtggaagtggtggctcccgaacacaacaatagcgcgaagtcgaacgccctgacgctgcattcgccgttgtatgtgcaaaccgcgcacaacggctttcgctatgtcaatggcacgcctgccgattgcgtgcacattgcgctgacgggcctgctgggttaccggcccgatctggtggtctccggcatcaacaacggtgccaacatgggcgacgacacaatttattccggcacggtgggtgctgcgatggaaggctatcttttcgggatcccgtccatcgccttttcgcaggtggacaaggggtggggcgagatcgagtcggctgcgcgcaaggcgcgcgagatcgttcagcagatggatcgccaaaacctggtcggcgaagccccctggctgttgaatgtcaacattcccaatatgccgtatgacgcattgcggcccttgcgcatgtgccgcctgggccggcgccatgcggcagagcgtgtcattgagcagcagagcccgcgtggggaactgatgtactggatcggtggcgctggcgccgccaaggacgcggcggagggcaccgattttcatgccacggcccacggccatgtatccgtcacgccattgaaggtggacctgaccgattacgacggactggggtattgggcgcagacggtggcccgtctcgtaccagcgcaggcgtccggcgaggtggcttga

SEQ ID NO: 11262 - protein, 280 aa, Acidovorax sp. JS42
MTSDSVCARSYNASRSAFQTMKILISNDDGYQAPGIVALHDALKTIADVEVVAPEHNNSAKSNALTLHSPLYVQTAHNGFRYVNGTPADCVHIALTGLLGYRPDLVVSGINNGANMGDDTIYSGTVGAAMEGYLFGIPSIAFSQVDKGWGEIESAARKAREIVQQMDRQNLVGEAPWLLNVNIPNMPYDALRPLRMCRLGRRHAAERVIEQQSPRGELMYWIGGAGAAKDAAEGTDFHATAHGHVSVTPLKVDLTDYDGLGYWAQTVARLVPAQASGEVA

SEQ ID NO: 11263 - DNA, 804 bp, Nostoc punctiforme PCC 73102
  CDS (1)..(804): transl_table=11
atgactatgagattactaattagcaacgacgacggcgtttctgctttggggattcgtaccctagccaactacttggcagaagcaggtcatgatgttagtgtagtttgcccagatcgagagcgatcggcaactggacatggattaactctccaccaacccattcgtgccgaaattgtagagtcaatttttcatcctgctgtcaaagcttgggcttgcgatggtacgccttcagattgcgtcaaattggcgctgtgggctttgctagatactcctcccgatttggttctctctggcattaatcaaggtgcaaatttgggaactgaaatcttgtattctggaactgtttcggcggcaatggaaggtctaattgaaggtattcccagcgtagccctaagtcttattagtcacacatctaaagactttcaacctgctgctaagtttgccaaagttctcgtagaccagttagcccaaaaacctctaccagatttaatgttgctcaacgttaatattcctgctgtgaagtgggaagaaattgctggagtgacacttacccgtcaaggagtacggcgttacattgatgtgtttgataaacgagttgatcctcgtggaaaaacgtactattggttaactggagaagtagttgaggatgtggaacctccaactggattaaatctgcctcaaaatgtaccaacagatgtgcaggttgtacgtaaaaattacatcagtataactccgttacaatacaatctaacttacgcaactgtactagagaaattgtctgattgggaattcaattttacctga

SEQ ID NO: 11264 - protein, 267 aa, Nostoc punctiforme PCC 73102
MTMRLLISNDDGVSALGIRTLANYLAEAGHDVSVVCPDRERSATGHGLTLHQPIRAEIVESIFHPAVKAWACDGTPSDCVKLALWALLDTPPDLVLSGINQGANLGTEILYSGTVSAAMEGLIEGIPSVALSLISHTSKDFQPAAKFAKVLVDQLAQKPLPDLMLLNVNIPAVKWEEIAGVTLTRQGVRRYIDVFDKRVDPRGKTYYWLTGEVVEDVEPPTGLNLPQNVPTDVQVVRKNYISITPLQYNLTYATVLEKLSDWEFNFT

SEQ ID NO: 11265 - DNA, 750 bp, Magnetospirillum magnetotacticum MS-1
  CDS (1)..(750): transl_table=11
ttgcgcatcctgatctccaacgatgacggcatcagtgcgccgggcatcaaggtgctggagcgcatcgcccggacgctgtccaaggatgtctgggtggtggcgcccgagaccgaacaaagcgctgcaggccactcgctgaccatccgccgcccgcttcgggtccgcaaggtctcggcccggcgttacgccgtggacggcacccccaccgatgcggtgctgttgggcgtcaatcatgtgctgaagggcaagaagccccatctggtgctgtcgggcatcaaccggggctccaatctgggcgaggacgtgacctattcaggcacggtggcggcggccatggaaggcaccatcctcggcattccctccatcgcgttgtcccagttcatcaatcatccccatccggtgaaatggggcaccgccgagcattgggcgccgggcgtgatccgcaaattgctggccaagggctggagccgtaacgttctgatcaacgtcaactttcccgacgtgatcgcctcctcggtgaccggaatcgagatcacgcgccaaggcaagcgcaagatcggcgacgaaatcgtcgagcgcgaggatcccaggggcgaatcctatgtctggatcggcgctcagcgggccgaggaccgctccacccccggcaccgatatcgaggcggtctgccgtggggccatcaccattacgccgctctgcttcgatcttacccatccgggtgacatgaaggcgctggggacggttttttga

SEQ ID NO: 11266 - protein, 249 aa, Magnetospirillum magnetotacticum MS-1
MRILISNDDGISAPGIKVLERIARTLSKDVWVVAPETEQSAAGHSLTIRRPLRVRKVSARRYAVDGTPTDAVLLGVNHVLKGKKPHLVLSGINRGSNLGEDVTYSGTVAAAMEGTILGIPSIALSQFINHPHPVKWGTAEHWAPGVIRKLLAKGWSRNVLINVNFPDVIASSVTGIEITRQGKRKIGDEIVEREDPRGESYVWIGAQRAEDRSTPGTDIEAVCRGAITITPLCFDLTHPGDMKALGTVF

SEQ ID NO: 11267 - DNA, 804 bp, Crocosphaera watsonii WH 8501
  CDS (1)..(804): transl_table=11
atgaagatattaatcagtaatgatgatggcatctttgccttgggggttcgcaccctagccaataccttagcccaagccggttatgatatcactgtggtttgtcccgatcgcgaacgttcagccacaggtcacggtttaacccttcatcagcccattcgtgctgaaatagtagaagacttttttgaccccaagatcaccgcttggtcttgttcagggactccttcagactgtgttaagttggctataagtacccttgtagaaaccccacctgattttatcgtttcagggatcaatcatggttctaacttaggaacagatgtgctgtattcagggacggtttcagcagcaatggaaggtattatctacagtatccccagtattgctatgagtttagccagtttttcttcccgtcaattccaaccgggggctgattttgccgttcgcttgctgcaacaattacaggataaacctcttccagagagtaccctgcttaatatcaatattccccctgtagctgccgatgcgatcgcaggagtgatgttaacccgtcaagggttacgtcgctatatcgaaaactttgaaaaacggcttgatcccagaggaaaaagctattattggttagccggagaattggtgacagaagtagaacaaccggatcatattcatctaccggccaatattcccaccgatgtacaagccattcaacaaaattatataactatgactcccttgcagtacaatctgacggatgtggctagttttgagtatttgcaacaaaataaatggttagatggggagctttaa

SEQ ID NO: 11268 - protein, 267 aa, Crocosphaera watsonii WH 8501
MKILISNDDGIFALGVRTLANTLAQAGYDITVVCPDRERSATGHGLTLHQPIRAEIVEDFFDPKITAWSCSGTPSDCVKLAISTLVETPPDFIVSGINHGSNLGTDVLYSGTVSAAMEGIIYSIPSIAMSLASFSSRQFQPGADFAVRLLQQLQDKPLPESTLLNINIPPVAADAIAGVMLTRQGLRRYIENFEKRLDPRGKSYYWLAGELVTEVEQPDHIHLPANIPTDVQAIQQNYITMTPLQYNLTDVASFEYLQQNKWLDGEL

SEQ ID NO: 11269 - DNA, 774 bp, Prosthecochloris aestuarii DSM 271
  CDS (1)..(774): transl_table=11
ttgactgacaacagacctcatatccttgtatgcaatgatgacggtatcgatgccgaagggctccacgctctggcggtatcgatgaaaaaaatcggtcgggtaaccgttgttgcccccgctgaaccgcacagcggcatgggccacgccatgaccctcggtgttccgctgagaataaagagctatgaaaaaaacaaccgtttcttcggccataccgtctccggaacgcctgtcgactgcatcaaagcggcactgagccatattctgaaggaaaaacctgacatcatcgtcagcggcatcaactatggcagcaataccgcaacaaacaccctctattcgggtaccgtcggcgcagccctggagggaaggattcagcatattccgtcactggcattctcgctgaccacctatgaaaacgcaaatttcacctatgcggccaagtttgccagaaaactcgtgcgcaaggtccttcgtgaaggccttcccgaagacaccatcctttcggtcaatatcccgaatgtggatgaaaaggatatccagggagtagccatcacccgtcaggggaagtcccgttgggcggaagataccatagaacgcgacgatatgtatggaaacccctactactggctgagcggccggctccagcttatggatgacgacatgcagcaggatgaatatgcggtgcggcagaactatgtcgccattacgccaatcgcagtcgacatgaccaaccatcaggcgctgcaaccgcttaaacaatggaaattaaaaaagtaa

SEQ ID NO: 11270 - protein, 257 aa, Prosthecochloris aestuarii DSM 271
MTDNRPHILVCNDDGIDAEGLHALAVSMKKIGRVTVVAPAEPHSGMGHAMTLGVPLRIKSYEKNNRFFGHTVSGTPVDCIKAALSHILKEKPDIIVSGINYGSNTATNTLYSGTVGAALEGRIQHIPSLAFSLTTYENANFTYAAKFARKLVRKVLREGLPEDTILSVNIPNVDEKDIQGVAITRQGKSRWAEDTIERDDMYGNPYYWLSGRLQLMDDDMQQDEYAVRQNYVAITPIAVDMTNHQALQPLKQWKLKK

SEQ ID NO: 11271 - DNA, 783 bp, Croceibacter atlanticus HTCC2559
  CDS (1)..(783): transl_table=11
atggctaacaaaaaacctttaatattagttaccaatgatgacggtataacagcacctggaatacgagctcttatatctgtcatgaaagacataggaaacgtagtggttgttgcaccagatagcccacaaagtgctatgggacacgcaataacaattaacgacaccctatattgcgaccccgttaaaatgacagaagatgctgaccataaggaatatagctgctctggaactcctgcagactgtgttaaattagcaacacaagaaattttacacagaaagccagatttatgtgtaagcggtgtaaatcacggctcaaactcatcaatcaacgttatttatagcggaacaatgagtgctgctgttgaagctggtgtagaaggtattccggcaattggattttctttattagattattcgttagaagcagactttgaaccgtgtaaaaaatacataaaagcgattactgaacatgtcttagacaaaggcctacccaaaggtgttgttttaaatgtaaaccttccaaaactaaaagagaaagaaattaagggcattaaagtatgccgccaggccaaagcgcattgggtagaagattttgataaacgaaaaagccctcaaggcagagattactattggcttactggagaatttattaacgaagataaaggtgaagatacagatgaatgggcacttagcaacggctacgtgagcgtagtacctgttcaatttgatttaactgcacatcactttattcaagatttaaatagctgggaattaaatgactag

SEQ ID NO: 11272 - protein, 260 aa, Croceibacter atlanticus HTCC2559
MANKKPLILVTNDDGITAPGIRALISVMKDIGNVVVVAPDSPQSAMGHAITINDTLYCDPVKMTEDADHKEYSCSGTPADCVKLATQEILHRKPDLCVSGVNHGSNSSINVIYSGTMSAAVEAGVEGIPAIGFSLLDYSLEADFEPCKKYIKAITEHVLDKGLPKGVVLNVNLPKLKEKEIKGIKVCRQAKAHWVEDFDKRKSPQGRDYYWLTGEFINEDKGEDTDEWALSNGYVSVVPVQFDLTAHHFIQDLNSWELND

SEQ ID NO: 11273 - DNA, 786 bp, Sulfitobacter sp. EE-36
  CDS (1)..(786): transl_table=11
atgcgcattctgatcaccaacgacgacggtattcacgctccgggtctgaagaccctgcagggcattgccactgacctggccggacccgatggcgaggtctggatcgtggcccccgcctatgaacaatccggcgtcgggcattgcatcagctacaccaagccgatgatggtcgaaaaggtcagcgaccggcgcttttcagtcgagggcagcccggccgattgtgtgatggcggcactgcatgactgtatgctggatgcccgccctgatctggtgctgtcgggtgtgaaccgcggcaacaacgcggctgaaaacacgctctattccggcacgatcggtggcgcgatggaggcggcgctgcaaggcatccccgccgtggcgctgtcgcaatattacggccctgccaaccgcgatctggatgacccgttcgaggccgccgccggccacggggccgatgtgatccgccgtattctggatgcgacaccggcgcatggggatggctaccgtctgttctataacgtgaatttcccgcccgtcgcagcggcagaggttcagggcatccgtttggccccccaaggaatgcgccgcgataccagcttttccacgatcccgcagttgtcgccctcggggcgtcggttcttgtggatcaagggcgcggaccagcagatcccgacggacgacggcaccgacgccgcgctgaaccttgacggctatatctcggtcacgcccatgcgcgccgacctcaccgctcatgatacatttgacgcgctaaaagccatcaatacatga

SEQ ID NO: 11274 - protein, 261 aa, Sulfitobacter sp. EE-36
MRILITNDDGIHAPGLKTLQGIATDLAGPDGEVWIVAPAYEQSGVGHCISYTKPMMVEKVSDRRFSVEGSPADCVMAALHDCMLDARPDLVLSGVNRGNNAAENTLYSGTIGGAMEAALQGIPAVALSQYYGPANRDLDDPFEAAAGHGADVIRRILDATPAHGDGYRLFYNVNFPPVAAAEVQGIRLAPQGMRRDTSFSTIPQLSPSGRRFLWIKGADQQIPTDDGTDAALNLDGYISVTPMRADLTAHDTFDALKAINT

SEQ ID NO: 11275 - DNA, 783 bp, Oceanicola batsensis HTCC2597
  CDS (1)..(783): transl_table=11
atgcgcattcttgtaaccaatgatgacggcatcaacgcgcccggcctgcaaatcctcgaagcgatcgccgccgaacttgcgggcgccgagggcgaggtctgggtcgtcgctccggcgttcgagcaatccggcgtggcgcacaagatctcctacacccaccccacgatgatctcggaaatgggagagcggcgctacgcggccgaaggctcgcccgccgattgcgtgatggcggggctgcatgacgtgctgaacgggcaggagatcgacctcgtcctctccggcgtgaaccgcggcaacaattcggccgagaacgcgctctattccggcacgctcggcggcgcgatggagggggcgctacagggctgccgggccatcgccctgtcgcagtacctcggacccgacaacttcaacctggacaacccgttcgaggccgcagccgtccacggcgccgaggtgatccgaaagataatcgcggccgagccgccgaacgacgatccctacgggctcttctacaacgtgaacttcccgccctgccccgcggacgaagtggcgggcgtccgggtcgcgccgcagggcatccgcccctacacccgcttttcggtcgaggcgcatctgtcgccctccgggcgccgcttcctctgggcccggggaaccgaccagcgccagggatcggccgcgggcaccgatgcggcggtcaatctcgagaactacatttcggtcacgccgatgcgcgccgacctgaccgcccatgacatgctggagccgctgaaagccatcgaatga

SEQ ID NO: 11276 - protein, 260 aa, Oceanicola batsensis HTCC2597
MRILVTNDDGINAPGLQILEAIAAELAGAEGEVWVVAPAFEQSGVAHKISYTHPTMISEMGERRYAAEGSPADCVMAGLHDVLNGQEIDLVLSGVNRGNNSAENALYSGTLGGAMEGALQGCRAIALSQYLGPDNFNLDNPFEAAAVHGAEVIRKIIAAEPPNDDPYGLFYNVNFPPCPADEVAGVRVAPQGIRPYTRFSVEAHLSPSGRRFLWARGTDQRQGSAAGTDAAVNLENYISVTPMRADLTAHDMLEPLKAIE

SEQ ID NO: 11277 - DNA, 765 bp, Erythrobacter sp. NAP1
  CDS (1)..(765): transl_table=11
atgcgtatcctcctgacgaacgatgatggcatacgcgcgccggggctcgaagtgcttgaggcgatcgcgcgcgagtttaccgacgacatctggatttgcgctcctgacgaagagcaatcgggcatgggccacgcgcttacgctcacgcgccccgtgcgcctgcgcaagcatggcgagcggcgcttctcggtcacgggcacgccaaccgacagcgtcaccatgggtcttcgcaaggtcgtcgatgcagcgcccgacctcatcctgtcaggcgtcaatcgcggcgcgaaccttggcgatgacatcacctattcgggcaccgcttcggcagcgatggaaggcgcgcttgcgggcattcgctcgatcgcgctgagccaggtctatgcccgcaacggagcagcggacgaggacaccttccgcgctgcgcttgcttggggcaagcgtgtgatcgagccgctgctcgatgcgccgatgccggatcgttcgctcatcaacgtcaacttcccgccgctcgccgcagaggacgtcaagggcatccgcgtcgtgcgtcaaggcttccacgactatgcccgcggcacggttgtcgaaggacgcgacccgcgcggcttccagtactactggttcggcctcgacccgatcgaacacacgctcgaccacggcaccgatcttgaggcaatcgacgacggcttcgtctcggtcacgccgctgcatctcgacctgacgcattacagcagcctcgacactcttgcatcgcggttcgagggctga

SEQ ID NO: 11278 - protein, 254 aa, Erythrobacter sp. NAP1
MRILLTNDDGIRAPGLEVLEAIAREFTDDIWICAPDEEQSGMGHALTLTRPVRLRKHGERRFSVTGTPTDSVTMGLRKVVDAAPDLILSGVNRGANLGDDITYSGTASAAMEGALAGIRSIALSQVYARNGAADEDTFRAALAWGKRVIEPLLDAPMPDRSLINVNFPPLAAEDVKGIRVVRQGFHDYARGTVVEGRDPRGFQYYWFGLDPIEHTLDHGTDLEAIDDGFVSVTPLHLDLTHYSSLDTLASRFEG

SEQ ID NO: 11279 - DNA, 810 bp, Synechococcus sp. RS9917
  CDS (1)..(810): transl_table=11
atgtccccgctgcggatcctgatcagcaatgacgacggcgtcttcgcagcgggcattcgcgctctggccgccgcggcggccagtcgcggccacagcgtcaccgtggtctgtcccgaccaggagcgctccgccaccggccacggcctcaccctgcagacgccgattcgggcggaacgggccgatgaactgtttgagcacgacatcaccgcctgggcctgcagcggcacccccgccgactgcatgaaactggccctgttcgaattactcgacaatccgcccgatctggtgctgtcgggaatcaaccacgggcccaacctgggcacggatgtgttctgctccggcaccgtggccgccgccatggagggcaccctggaaggactgccggcgatggcgatcagcagcgcctgcttccagtggcgtgatttcacgggtgccggagagctggccctggcggtggccgaggccgccctcgccgatggctggccagaccaactgctgctgaatctcaacatccccccctgccatccggaggcgatgggagcgctgcgctggacccggctctcgatccggcgctacgacgagcagttcagcccccgcgtcgatccccgcggccgctcctattactggctggccggtgaagcggtggacgatctggaatccggcggcgacggcccccgcgactggcccaccgatgtggcccagattcaggccaatgctccgtcattgacgccgatccagccggaactgttctggcgtggtggcctgagcagcctgccccggttgcaactggccgatcagctggtgcgctga

SEQ ID NO: 11280 - protein, 269 aa, Synechococcus sp. RS9917
MSPLRILISNDDGVFAAGIRALAAAAASRGHSVTVVCPDQERSATGHGLTLQTPIRAERADELFEHDITAWACSGTPADCMKLALFELLDNPPDLVLSGINHGPNLGTDVFCSGTVAAAMEGTLEGLPAMAISSACFQWRDFTGAGELALAVAEAALADGWPDQLLLNLNIPPCHPEAMGALRWTRLSIRRYDEQFSPRVDPRGRSYYWLAGEAVDDLESGGDGPRDWPTDVAQIQANAPSLTPIQPELFWRGGLSSLPRLQLADQLVR

SEQ ID NO: 11281 - DNA, 771 bp, Pseudoalteromonas tunicata D2
  CDS (1)..(771): transl_table=11
atgagaattttattaagtaatgatgatggggttcatgccaaagggattgcggtgttatatcaagcgttatcacaaatagcggaagttgtgctggtagcacccgatcgcaattgcagtggcgcaagtaattcgctgacgctacttaacccacttcgtgctactacgttagagaatggttttatctctataaatggtacgccaaccgattgtgtgcatattgctttgaatgaactgctcgattttgcgcctgatttagtggttgcaggtataaataacggcgccaatttaggcgatgataccttatattcgggcacagtcgctgcagcaacagaagggcgccatatgggcttgcctgcggttgcggtatcgttatgctctaaagatgagcaatattacgaaacggctgcagccgttgctgtgaaaattatttcgtctttagcgtctcatcctctgccaaaagatcaaattattaatattaatgtgccggatattccattagcagagctaaaggggattcaagtaacacgtcttggcgcgcgtcataaagctgaaactatgaccaaacaactagacccttggggccgtgatatttattggtatggcagtttaggaagtgagtcggatgcaggccccggtactgacttttatgctgtaaaacaaggttatgcctcagttactcctttaaccgttgatatgacagcaaaagagagtttagtggcaatgagtgaatgggtcggtaacttggagtttcctagtgctcagcaattatga

SEQ ID NO: 11282 - protein, 256 aa, Pseudoalteromonas tunicata D2
MRILLSNDDGVHAKGIAVLYQALSQIAEVVLVAPDRNCSGASNSLTLLNPLRATTLENGFISINGTPTDCVHIALNELLDFAPDLVVAGINNGANLGDDTLYSGTVAAATEGRHMGLPAVAVSLCSKDEQYYETAAAVAVKIISSLASHPLPKDQIININVPDIPLAELKGIQVTRLGARHKAETMTKQLDPWGRDIYWYGSLGSESDAGPGTDFYAVKQGYASVTPLTVDMTAKESLVAMSEWVGNLEFPSAQQL

SEQ ID NO: 11283 - DNA, 783 bp, Flavobacteria bacterium BBFL7
  CDS (1)..(783): transl_table=11
atggaaaacattaaaaaacctcttatcctcgttactaatgatgatggcatcacagcaccaggaataagaatgcttatagaaattgcaaaagaattaggtgaggtcgttgtcgtagcgccagatagtccgcaaagtgctatgggacacgcaattactattaataataccttgcatgttaaagagtttaaagaacataatcacgaccataaagaattcactactagtggaacacctgtagattgtgttaaaatggcaagccacgaaatcttagataggaaacccgatttatgtcttagtggtatcaatcatggtagtaatagtgctattaatgttatctacagtggtacgatgagcgcggctgtagaggcaggaatagaaggaatacctgctatagggttttcattatgtgattatgatcatgatgcagattttaatgctgcccgaccttatgtaaaaaaaataattgaaaatgttattcaaaatggaatggcaagaggtgttgtttttaacgtcaacattcctaaagcaagtagggaagaaataaaaggtgttaagatatgtagacaggcaaatgcatattgggtagaagagtttgataaacgtactaacccatatggtaaggattattactggctaactggtaaatttgttaatgatgataaaggagaagatacagatgaatgggcgctagcacataattacatttctattgtacctacgcaatatgatctgacagctcatcattatataagtgaacttaatacatgggattttggtaattaa

SEQ ID NO: 11284 - protein, 260 aa, Flavobacteria bacterium BBFL7
MENIKKPLILVTNDDGITAPGIRMLIEIAKELGEVVVVAPDSPQSAMGHAITINNTLHVKEFKEHNHDHKEFTTSGTPVDCVKMASHEILDRKPDLCLSGINHGSNSAINVIYSGTMSAAVEAGIEGIPAIGFSLCDYDHDADFNAARPYVKKIIENVIQNGMARGVVFNVNIPKASREEIKGVKICRQANAYWVEEFDKRTNPYGKDYYWLTGKFVNDDKGEDTDEWALAHNYISIVPTQYDLTAHHYISELNTWDFGN

SEQ ID NO: 11285 - DNA, 747 bp, delta proteobacterium MLMS-1
  CDS (1)..(747): transl_table=11
atgccactttttctattgaccaacgacgacggggtggacgccccggggctgcgggccctggccgtcgagctgggccgcctgggccgggtggtgatcatcgctcccgaccgggataattccgccgccagccattccttgaccatgcgccggccccttaatgtccggcaactggaagatgatgtttatgccatcgacggtacccctgccgactgcgtcctcatcggtttgcgtaaaatcctgagcacgcggccggacctggtgctttcggggatcaaccccggccccaatctgggtgatgatatcaactattccggcaccgtctccgccgcccgcgagggcaccctgctgcggatcccgtcgctggctgtctccctggtcgccgataacggccagccgtgccgttttgcggaggccgccgcccaggccgcggagctggccgccgaggtgctgcaaagcggtatgccgccggataccctgtttaatatcaatgtccccaatcgtccccggcaggaactaaagggggtgcgctacacccgccagggccggcgggtgtacgaaaacgccatccaggagaccttcgatccctggggccggcgccattactggatcggtggtggcaccccccgctggagcgagcagccggagaccgatgtccaggcggtgctggccggttacgtgtcggtgaccccgctgcatctcgatatgaccaaccatcaggcgctggtaactctgcgggaagatcggtaa

SEQ ID NO: 11286 - protein, 248 aa, delta proteobacterium MLMS-1
MPLFLLTNDDGVDAPGLRALAVELGRLGRVVIIAPDRDNSAASHSLTMRRPLNVRQLEDDVYAIDGTPADCVLIGLRKILSTRPDLVLSGINPGPNLGDDINYSGTVSAAREGTLLRIPSLAVSLVADNGQPCRFAEAAAQAAELAAEVLQSGMPPDTLFNINVPNRPRQELKGVRYTRQGRRVYENAIQETFDPWGRRHYWIGGGTPRWSEQPETDVQAVLAGYVSVTPLHLDMTNHQALVTLREDR

SEQ ID NO: 11287 - DNA, 765 bp, Rickettsiella grylli
  CDS (1)..(765): transl_table=11
atgaaggttctcatcagcaatgacgatggtgtacatgcaccgggtctatctattttagcgaaggctttaagccaaattgcagaagtgactgtcgttgctccggatagggatcgcagcggggccagtaattcgctgactttgcagcaaccgttacgattaagatatttagataaagggatgattagtgttcaaggaacaccgaccgattgcgttcatcttgcgttaacgggcttactgactgacgataaattgccggatatggttgtatcagggattaatgccggcgctaatttaggcgaagatgttttttattccgggactgtggcggctgcgatggaaggtcgttttttagggttacccgcgattgcgttttcaatcactggaaacgaaccgatgtattattctacagcagcagaggttgcaaaaagactggtcactcttttgcatgaaaaaccgattccatctaaaactattttgaatgtaaatattcctgacgttgcatttgacgatttaaaagggtatgaagtgacgcgtttagggacacgacataacgcagatagaatgcgtccgagtaaagatccaagaggacatactatttattggataggaagttcgggaaaagaaaatgatgcgggaaaaggcaccgatttttatgcactgagtcaacagcaagtaagtattacaccgttacagctcgatttaacgcatcatactgtgcgaagtcaaattgaaaattggattgcgaatagggacgctaagctttaa

SEQ ID NO: 11288 - protein, 254 aa, Rickettsiella grylli
MKVLISNDDGVHAPGLSILAKALSQIAEVTVVAPDRDRSGASNSLTLQQPLRLRYLDKGMISVQGTPTDCVHLALTGLLTDDKLPDMVVSGINAGANLGEDVFYSGTVAAAMEGRFLGLPAIAFSITGNEPMYYSTAAEVAKRLVTLLHEKPIPSKTILNVNIPDVAFDDLKGYEVTRLGTRHNADRMRPSKDPRGHTIYWIGSSGKENDAGKGTDFYALSQQQVSITPLQLDLTHHTVRSQIENWIANRDAKL

SEQ ID NO: 11289 - DNA, 810 bp, Synechococcus sp. RS9916
  CDS (1)..(810): transl_table=11
atggccccgctgcggatcctgattagcaatgacgacggcgtgtttgccgatggcatcaaagctttggccctggcagcggctgctcgcggccatcaggtgtccgttgtctgcccggatcaggaacgctccgccaccggccatggcctcaccctgcagcaaccgattcgggctgaacgggcggatcagttgtttggccagggggtgacggcctgggcctgcagcggcacgccagccgattgcatgaagctggccctgttcgagctgatggagactccacctgatctggtgctctcgggcatcaatcatggtcccaatctcggcacggatgtgttctgctcgggcacggtggccgcggcgatggagggaacattggagggactccctgccatggcggtgagtagcgcctgttttcagtggcgacagttcgaaggtgctggtgaattggctctggatgtggccgaatcagcgctgcgtgacggttggccggagaacctgctgctcaatctcaacctgcccccctgcaagcccgacaccatggggccgctgcgttggacgcgcttgtcggttcgtcgctacgacgaacagttcagccctcgccaggacccccgcggccgcacctactactggctcgcgggtgaggccgtggtggatttggaatcaggaggcgatggacctcgggactggcccaccgatgtggcccagatcgagaccaatgctccgtcgctcacaccgattcagccggaattgttctggcgggggccactgagtggactccctcaactcaaacttaacgatcagttggtgcgctaa

SEQ ID NO: 11290 - protein, 269 aa, Synechococcus sp. RS9916
MAPLRILISNDDGVFADGIKALALAAAARGHQVSVVCPDQERSATGHGLTLQQPIRAERADQLFGQGVTAWACSGTPADCMKLALFELMETPPDLVLSGINHGPNLGTDVFCSGTVAAAMEGTLEGLPAMAVSSACFQWRQFEGAGELALDVAESALRDGWPENLLLNLNLPPCKPDTMGPLRWTRLSVRRYDEQFSPRQDPRGRTYYWLAGEAVVDLESGGDGPRDWPTDVAQIETNAPSLTPIQPELFWRGPLSGLPQLKLNDQLVR

SEQ ID NO: 11291 - DNA, 750 bp, Pseudomonas putida GB-1
  CDS (1)..(750): transl_table=11
atgcgtattctgatttcgaacgacgacggtgttaccgcacccggcatcgccgcgttgcacgctgcgctggcggattacgccgagtgcgcggtgatcgccccggatcaagacaagagcggcgccagcagttcgctgacgctggaccggccactgcacccgcagaccctggccaacggcttcatcagcctcaacggcacgccaaccgactgtgtgcacctgggcctcaatgggttgttgccacaggcgccagacatggtcgtgtcggggatcaacctcggtgccaacctgggcgacgacgtgctgtattcgggtacggtcgctgcggcgttggaaggccgtttcctcggcggtacctcgctggcgttctcgctgttgtcgcgccagccggacaacctgccgaccgctgcctatatcgcccgtcgattggtcgaggcacagtcgcgcctggcgctgccgccccgcaccgtactcaacgtcaatatccccaacttgccgctggagcacatccgtggcatccagctcacccgcctcggtcatcgggcgcgggcggcggcgccgaccaaggtggtcaacccgcgcggcaaggaaggctactggattgccgtggccggtgatgccgaggatggggggccgggcaccgacttccacgcggtcatgcagggctacgtatcgatcaccccgctgcaactcgatcgcaccttcaatgatgccttcgagcagctcgacggttggctggagggcctgctctga

SEQ ID NO: 11292 - protein, 249 aa, Pseudomonas putida GB-1
MRILISNDDGVTAPGIAALHAALADYAECAVIAPDQDKSGASSSLTLDRPLHPQTLANGFISLNGTPTDCVHLGLNGLLPQAPDMVVSGINLGANLGDDVLYSGTVAAALEGRFLGGTSLAFSLLSRQPDNLPTAAYIARRLVEAQSRLALPPRTVLNVNIPNLPLEHIRGIQLTRLGHRARAAAPTKVVNPRGKEGYWIAVAGDAEDGGPGTDFHAVMQGYVSITPLQLDRTFNDAFEQLDGWLEGLL

SEQ ID NO: 11293 - DNA, 783 bp, Magnetospirillum gryphiswaldense
  CDS (1)..(783): transl_table=11
atgtatccgcccgtcgccgatttgtctcgtgcccgcatcctcatcagcaatgatgacggcatcaacgcgcccggtatcaaggtgctggaacgggtagcccgcaccctctccgatgacgtttgggtggttgcccccgacaccgagcaatcggccgccggccattcgctgaccatccgccggcccttacgcatccgtcaggtgtcggaacggcatttttccgtcgacggcacccccaccgacgcggtgctgttgggcgtcaacaaggtgctggccgacaaaaaacccgatctggtgctgtcgggcatcaatcgcggcgccaatatgggtgacgacgtcacctattccggcacggtggcggcggcgatggaggcgaccatcctgggcataccctccattgccctgtcgcaattcctgcgcccggatcagccggtgcattggtccaccgccgaacattgggcgccgcaagtgatccgcacggtctgttcggtcggctggggtaagaacgtgctgatgaacatcaacttccccgacgttttgccggctcaggtcggtggtgtcgaggtggtgcgccagggcaagcgcaagatcggcgaccagttgatcgagcgccacgacccgcgcggcgaaccctatgtatggatcggcgcccagcgggccgaagacccgggcgaaaagggcaccgatatcgaggcggtgctgcgcggccaagtcaccgtcacccccttgtgcgtcgatctcacccatggccagaccatggcggcgctcaagtccttgtttggctga

SEQ ID NO: 11294 - protein, 260 aa, Magnetospirillum gryphiswaldense
MYPPVADLSRARILISNDDGINAPGIKVLERVARTLSDDVWVVAPDTEQSAAGHSLTIRRPLRIRQVSERHFSVDGTPTDAVLLGVNKVLADKKPDLVLSGINRGANMGDDVTYSGTVAAAMEATILGIPSIALSQFLRPDQPVHWSTAEHWAPQVIRTVCSVGWGKNVLMNINFPDVLPAQVGGVEVVRQGKRKIGDQLIERHDPRGEPYVWIGAQRAEDPGEKGTDIEAVLRGQVTVTPLCVDLTHGQTMAALKSLFG

SEQ ID NO: 11295 - DNA, 924 bp, Medicago truncatula
  CDS (1)..(924)
atggaagagggtaataataagagaggaagaattctaataacaaacgacgacggaatcgacgctcctggcttaagaggtttggtatcatcattagtgaatacgaatcttttcaatatatttgtatgtgctcctgatagtgagaaatcagcagttagtcacagcatcacatggcttcatcctatatctgccaaacaagttcatattcatggaaccattgcttccttctctgtttctggaactcccgctgattgtacttctctcggaatttccaaatcactctttccttccgtccctcatcttgtagtgagcggcataaataggggtagcaactgcggctatcatattgtttactcaggcactgtagctggagctcgagaggccttcttcaacaatatcccttctatctccatttcatatgactgggttgaaggaaagagtaatccacaggactttgcacttgctgcacaagtttgcattccaatcataaacgcagtactggttgcgataaagaaacaaagctaccctggaagatgttttttgaatatagacgtgccaaccaatgttgctaaccataagggttacaagctaacgaggcagggtaaaagtatctttaagatgggatggaggaaagttacctctgagacagaaggacgaagaatgttgtctgatatgaccaacacaaatacagatatgcctaaaaaaattggcacgtcatctgcatcacctgaacatcttttatttgcgagagaggtaagaggtgccctacctgattatgatgatgatacagatcacaaatctttgaaggcgggctatattactgtaacatctcttgctggtctctctcacgcggatgtagattgtcagacctattttgaggattggctacaaagtatccctaaacacctcttgtcagcagctttataa

SEQ ID NO: 11296 - protein, 307 aa, Medicago truncatula
MEEGNNKRGRILITNDDGIDAPGLRGLVSSLVNTNLFNIFVCAPDSEKSAVSHSITWLHPISAKQVHIHGTIASFSVSGTPADCTSLGISKSLFPSVPHLVVSGINRGSNCGYHIVYSGTVAGAREAFFNNIPSISISYDWVEGKSNPQDFALAAQVCIPIINAVLVAIKKQSYPGRCFLNIDVPTNVANHKGYKLTRQGKSIFKMGWRKVTSETEGRRMLSDMTNTNTDMPKKIGTSSASPEHLLFAREVRGALPDYDDDTDHKSLKAGYITVTSLAGLSHADVDCQTYFEDWLQSIPKHLLSAAL

SEQ ID NO: 11297 - DNA, 840 bp, Chlamydophila caviae
  CDS (1)..(840): transl_table=11
atgagcaaaagattaaagattctattaactaatgacgatggtatttcagcaaaagggatgagtcttttagtctctaacttgctaaaggctgattttgctgatctgtatgtagtggctcccagcacagaacagtcagggaaaagcatgtccttttcctatacccaacctgtatctatcgaaagcgttgattatccacaggaggttgcaggtgcttgggcagtctccgggagccctgtagattgtgttaaacttgccctaggggatttgttttatgattccttccctgatcttgtattgtcaggaatcaatcatggatctaatgcgggaagaaatatcttttactctggaaccgccggtgccgctatggaagccattttatctggcgtcccttctatagctttttctcaggagcaacacatttctttctttcaaacagattctgctcctgagctgcttagaaagctatccttctatgctttatcaaatcctttccctgttgtcacgggttttaacgtgaatttccctgctagcgaacgcaatgaaccatggaaaggtatgcggcttgttgctacaggaaaagagtttgcttgtggtttgcctaaacttttaagtagtgatgggaaacgcaaaagtttttccttaagtgattgtcaggtcgtcatggatgaagatatttctgaggaatgccgttgtcttttagacaactatattaccgttgttcctttgttagtaagaaactccccattagctttaactagcgaatcagaatttcaacaactacaagaaactttccaagaatttatgtgctctgaagctgataccaggttgtttgacgtttaa

SEQ ID NO: 11298 - protein, 279 aa, Chlamydophila caviae
MSKRLKILLTNDDGISAKGMSLLVSNLLKADFADLYVVAPSTEQSGKSMSFSYTQPVSIESVDYPQEVAGAWAVSGSPVDCVKLALGDLFYDSFPDLVLSGINHGSNAGRNIFYSGTAGAAMEAILSGVPSIAFSQEQHISFFQTDSAPELLRKLSFYALSNPFPVVTGFNVNFPASERNEPWKGMRLVATGKEFACGLPKLLSSDGKRKSFSLSDCQVVMDEDISEECRCLLDNYITVVPLLVRNSPLALTSESEFQQLQETFQEFMCSEADTRLFDV

SEQ ID NO: 11299 - DNA, 801 bp, Pyrobaculum aerophilum
  CDS (1)..(801): transl_table=11
gtgaagatcttggtcactaatgacgacggcgttcacagcccggggctgaggcttctctaccaattcgccttatctctgggagacgtggacgtagttgcccccgagtcgccaaaatcagccacagggctcggcatcactctccacaaacccctcaggatgtacgaagtagatttatgcggctttagggcaattgccacgtcgggcactccctccgacacggtttaccttgccaccttcggcctagggcggaagtacgacatagtcctctccggcattaatcttggggacaacacttcactccaggttatactgtcatcgggcactctaggcgccgccttccaagcggcgcttctgggaatccccgctttggcttattcggcgtatttagagaactggaacgaacttttaaataataaagaggccgttgaaataatgggcgccgtggtctcctccacagccagttacgtcttaaaaaacggcatgccccagggagttgacgttataagcgttaactttcccagaaggctggggagaggagttagggcgaagttggtcaaggcggcaaaactacgctacgcccagcaagtagtggagcgggtggatccccggggggtgaggtactattggctatacggcagggacctcgccccagagcccgaaacagacgtatatgtggtgttaaaagagggcggtatcgccatcacccccctgactttaaacctcaacgcggtggatgcccacagggaagtggacatggattccctaaaccgcatggtggagtacattaacgcgtcgctatga

SEQ ID NO: 11300 - protein, 266 aa, Pyrobaculum aerophilum
MKILVTNDDGVHSPGLRLLYQFALSLGDVDVVAPESPKSATGLGITLHKPLRMYEVDLCGFRAIATSGTPSDTVYLATFGLGRKYDIVLSGINLGDNTSLQVILSSGTLGAAFQAALLGIPALAYSAYLENWNELLNNKEAVEIMGAVVSSTASYVLKNGMPQGVDVISVNFPRRLGRGVRAKLVKAAKLRYAQQVVERVDPRGVRYYWLYGRDLAPEPETDVYVVLKEGGIAITPLTLNLNAVDAHREVDMDSLNRMVEYINASL

SEQ ID NO: 11301 - DNA, 771 bp, Agrobacterium tumefaciens
  CDS (1)..(771): transl_table=11
atgcggattttgctgaccaatgacgacggtgtccatgccgaggggctggcggtgctggagcgtattgctcgcacgctgtccgacgacgtctggatcgttgcgccggaaaccgaccagagcggtctcgcacactcgctcacgctttccgagccgctcaggctgcgtaaggtttccgacaaacatttcgcgctgcgtggcacgccgaccgattgcgtcatcatgggtattcgcgaagtcctgccggaaaagcccgatctcgtgctctcaggcgtcaatgccggtgccaacatggccgatgacgtgacctattccggcacgattgccggcgccatcgaaggcacgctgcagggcgtgcgctccttcgcgctcagccaggccttcagccacggcgaaggccgcgtcgtgccgtgggaggttgccgagacctatgcgccggatcttctgcgcaagctgatgaatgtcgatctgcctgacggcaccttcctcaacctcaatttccccaattgtgcgccaaaggatatgcagggcgtttccgtcaccgggcagggcaagctcgatttcggcctgacggtggaagaacgccaggatggtcgtggtcttccttattactggttacgcttcggcgaacgccttggcaccttccgcgagggcacggatatccacgccttgaaacacggcaagatttcggtcacaccgcttaagcttgacctgacggactacacggtcaaggatcgggttgcgcaagcacttggattcggagtcgccgattga

SEQ ID NO: 11302 - protein, 256 aa, Agrobacterium tumefaciens
MRILLTNDDGVHAEGLAVLERIARTLSDDVWIVAPETDQSGLAHSLTLSEPLRLRKVSDKHFALRGTPTDCVIMGIREVLPEKPDLVLSGVNAGANMADDVTYSGTIAGAIEGTLQGVRSFALSQAFSHGEGRVVPWEVAETYAPDLLRKLMNVDLPDGTFLNLNFPNCAPKDMQGVSVTGQGKLDFGLTVEERQDGRGLPYYWLRFGERLGTFREGTDIHALKHGKISVTPLKLDLTDYTVKDRVAQALGFGVAD

SEQ ID NO: 11303 - DNA, 786 bp, Anaplasma marginale
  CDS (1)..(786): transl_table=11
atgagagtattactcacaaacgacgatggctttgactccgtaggcatgcgggttttgagggatgtcgtgtctgggcatttcgctgaggtgtgggtgtctgcacctgcacgcgattgcagtgctgcaagcagggcactaagcgttcggactcccattaaaacacatatgaggggagaacgggaatttgtggtgcacggcacccccgctgacagcgcggtgattggtatatgtgagatgactagtacgggtaagcggccggatttggtgatctctggcatcaactacggagccaataccgggttcacggtaccgtactccggcactattgctgcagctgctgccgcattcgatatcggcgttccagcaattgcgatcagccagcaatacaatggcaagcgctgtgacaacaatgtcgaaacgtcgtggcagaattctagaaaatcggttatggctctggttagtcggctgttgcgcgatacaatgtggcatgggaagtgcgtcatgagcataaatgttccgtactcggatgtgcagggagtcaagtttgccggacatagctgcgacgatggtcatataaaatgggatgggccatcgatggaacggcgcgagatcacaagtggcgacgggcgctgtgtatcgtacgtatttgacgacatgagatcaccgaatagtaatgataatgcgagtgacacacaacttttggagcaagggtatatagtggtgacccctatcggtcacagtatgactgatcacgcaattctagataagtattgtgggttacaatag

SEQ ID NO: 11304 - protein, 261 aa, Anaplasma marginale
MRVLLTNDDGFDSVGMRVLRDVVSGHFAEVWVSAPARDCSAASRALSVRTPIKTHMRGEREFVVHGTPADSAVIGICEMTSTGKRPDLVISGINYGANTGFTVPYSGTIAAAAAAFDIGVPAIAISQQYNGKRCDNNVETSWQNSRKSVMALVSRLLRDTMWHGKCVMSINVPYSDVQGVKFAGHSCDDGHIKWDGPSMERREITSGDGRCVSYVFDDMRSPNSNDNASDTQLLEQGYIVVTPIGHSMTDHAILDKYCGLQ

SEQ ID NO: 11305 - DNA, 798 bp, Anabaena variabilis
  CDS (1)..(798): transl_table=11
atgaaattactgattagcaatgatgacggcatttccgccttaggtattcgtaccttggctaacgccttagccgaggttggccatgatgtaactgtagtttgtccagatagggagcgatcggctactggtcatggactgactttacatcaaccgattcgcgccgaaattgtcgagtcaatttttcaccccgcgattaaagcttgggcttgtgatggtactccctcggattgcgtaaaactggcactttgggctttattagattctccacccgatttagtcctctctggaattaatcaaggtgctaatttaggcacagaaattttgtattctggtacggtttctgcggcgatggagggaatgatcgaaggtattcccagcatcgcttttagcctaactagccacatttcccgaaattttcagcctgcggcaaagtttgccaccattctagtagagcaactcgctgccaaacccataccagatttgatgttactcaatgttaatatcccccctgtggaatgggaagaaatcgccggcgttaaactcacccgtcaaggggtacggcgctacgtcgatgttttcgacaagcgcaccgatcctcgtggcaaaacctactactggttaactggggaagttttagaggaagtggaacccccagaaggtttaaatttgccccaaaatgtacccattgatgttcatgcagtcaaagataactacatcagcatcaccccactgcaatacaacctcacctatgccaccgcattagataaattatctaattggaattttcctatgtcttaa

SEQ ID NO: 11306 - protein, 265 aa, Anabaena variabilis
MKLLISNDDGISALGIRTLANALAEVGHDVTVVCPDRERSATGHGLTLHQPIRAEIVESIFHPAIKAWACDGTPSDCVKLALWALLDSPPDLVLSGINQGANLGTEILYSGTVSAAMEGMIEGIPSIAFSLTSHISRNFQPAAKFATILVEQLAAKPIPDLMLLNVNIPPVEWEEIAGVKLTRQGVRRYVDVFDKRTDPRGKTYYWLTGEVLEEVEPPEGLNLPQNVPIDVHAVKDNYISITPLQYNLTYATALDKLSNWNFPMS

SEQ ID NO: 11307 - DNA, 756 bp, Aquifex aeolicus
  CDS (1)..(756): transl_table=11
atgcctacgtttttattggtaaacgacgatggttacttttctcccggaataaacgccctcagggaagctttgaaatcccttgggagagtagttgtagtcgctcccgacaggaacttaagcggcgttggacactccctcacctttacggaacccctgaagatgaggaaaatagacacggatttttacaccgttatagacggaactcctgcggactgcgttcaccttggttacagagttatccttgaagaaaagaaacccgatcttgtactttcgggaataaacgaaggacctaacctcggagaagatataacttactccggaactgtttcgggagcaatggaaggaaggatactgggaataccttctatagccttttctgcttttggcagagaaaatataatgttcgaagaaatagcaaaagtgtgcgtggacatagttaagaaagtcctaaacgaaggtatacccgaagatacatacctcaacgtaaacatccctaacctcaggtacgaagagataaagggcataaaagtaacgaggcagggaaaaagggcttacaaagaaagggtttttaagtacatagacccatacggtaagcccttttactggatcgcggctgaagaattcggctggcacgcggaagaagggacagactactgggcagttttgaatggatacgtttccgtcacacccctgcaccttgaccttacaaattacaaagtaatgaaaagcataaagtacttagaggattccccttag

SEQ ID NO: 11308 - protein, 251 aa, Aquifex aeolicus
MPTFLLVNDDGYFSPGINALREALKSLGRVVVVAPDRNLSGVGHSLTFTEPLKMRKIDTDFYTVIDGTPADCVHLGYRVILEEKKPDLVLSGINEGPNLGEDITYSGTVSGAMEGRILGIPSIAFSAFGRENIMFEEIAKVCVDIVKKVLNEGIPEDTYLNVNIPNLRYEEIKGIKVTRQGKRAYKERVFKYIDPYGKPFYWIAAEEFGWHAEEGTDYWAVLNGYVSVTPLHLDLTNYKVMKSIKYLEDSP

SEQ ID NO: 11309 - DNA, 759 bp, Bordetella bronchiseptica
  CDS (1)..(759): transl_table=11
atgcgtattctggtttcaaacgacgatggttacaacgcccccgggctggaagcgctggtcgaggcgctgtccgggctgggcgaactgaccgtggtcgcgccggagacgaatcacagcggcgcctcgaattccctgaccctgaaccggccgctgacggtgcgcaccgcttccaacggcttcatctacgtcaacggcacgccgtccgattgcgtgcacgtcgccctgaccggcctgatggatgcgcgccccgacctggtggtgtccggcatcaacaatggcgccaacatgggcgacgacacgctttattccggcacggtggccgcggccagcgagggctacctgttcggcattccctcgatcgccttctcgctgatcgaaaaaggctggcagcacatcgaatcggccgcgcgcgccgcccgccaggtggtcgagcgccagatcgcgcagccgctggccgcgccggtcctgctcaacgtcaatatccccaatcgccgctacgaagacatgaaaggctacgccgtcacgcggttgggcaagcgccatccgtccgagccggtggtgcgtaccaccacgccttatggcgacacggtgtactggatcggcccggtcggcctggccgccgacgccacgccggggacggacttccacgccacggcgcaggggcaggtctcggtgacgccgctgcgcctggacctgacccagcacagccagcttgacgatgtgcgcaactgggcggagccgctatgcgtaaacgcgtag

SEQ ID NO: 11310 - protein, 252 aa, Bordetella bronchiseptica
MRILVSNDDGYNAPGLEALVEALSGLGELTVVAPETNHSGASNSLTLNRPLTVRTASNGFIYVNGTPSDCVHVALTGLMDARPDLVVSGINNGANMGDDTLYSGTVAAASEGYLFGIPSIAFSLIEKGWQHIESAARAARQVVERQIAQPLAAPVLLNVNIPNRRYEDMKGYAVTRLGKRHPSEPVVRTTTPYGDTVYWIGPVGLAADATPGTDFHATAQGQVSVTPLRLDLTQHSQLDDVRNWAEPLCVNA

SEQ ID NO: 11311 - DNA, 852 bp, Bradyrhizobium japonicum
  CDS (85)..(852): transl_table=11
atgagatctgcgcggtggccggtttgcctgatcggtcccagccggataagacggctcagaccccttcaggaatcgacctttcgcatgcgcattctctgcaccaatgacgacggcattcacgctcccggcctcaaggtcgtggaggagatcgcgcgggcattgtccgacgacgtctgggtggtggcgcccgagctcgaccagtccggcgtgtcgcattcgctgtcgctgaacgatcccttgcgcctgcgcgaggtcgggccgcggcacttcgccgtgcgtggcaccccgaccgactgcgtcatcatgggcgcgcgccatatcctgggcaccaagccgcccgatctcgtgctgtcgggcgtcaacaagggccgcaacgtcgccgaggacgtcgtctattccggcaccatcgccggcgcgctggagggcaccatcctggggctgccgtcgttcgcgctgtcgcaggagttcagcgtcgagacccgcgagcggccgccgtgggacaccgcgcgcacgttcggccccgacatcctgcgcaaggtgatggccgccggcatcccgaaggagaccgtcatcaacgtcaacttcccgtcctgcgcgcctgaggatgtgctcggcattcgcgtcacccgccagggcaagcgcaatctcggcttcctcaggatcgacgagcgcagggacggccgcaacaatccctatttctggatcggcttcgagcgcgcggcgatgatggatacgcccgccgagggcactgatctggcggcgctgcgcgagcgctatgtctcggtcacgccgctcaggctcgaccgcaccaacgaagcgttttccgaagcactgggtgcggccctgaagtag

SEQ ID NO: 11312 - protein, 255 aa, Bradyrhizobium japonicum
MRILCTNDDGIHAPGLKVVEEIARALSDDVWVVAPELDQSGVSHSLSLNDPLRLREVGPRHFAVRGTPTDCVIMGARHILGTKPPDLVLSGVNKGRNVAEDVVYSGTIAGALEGTILGLPSFALSQEFSVETRERPPWDTARTFGPDILRKVMAAGIPKETVINVNFPSCAPEDVLGIRVTRQGKRNLGFLRIDERRDGRNNPYFWIGFERAAMMDTPAEGTDLAALRERYVSVTPLRLDRTNEAFSEALGAALK

SEQ ID NO: 11313 - DNA, 777 bp, Campylobacter jejuni
  CDS (1)..(777): transl_table=11
atgaaagaaattcttatcactaatgacgatggttatgaaagcgaaggacttaaaaaactcattaagatgttaacaaaagaatttaaagccaagatcaccatagtagctcctgctagtgaaaaatcagcttgttcgcactctataaccctaaccaaacctttgcgttttgttaaagtgggaaaaagattttacaaacttgatgatggcactccagcagattgtgtttatcttgctttgcatgctttatacaaaaagcgtttgcctgatcttgtaataagtgggattaataaaggtgctaatgtaggcgaggatattacctactcaggaacttgcgcaggagctatggaggcggttttacaaggaattcctgctatcgctctttctcaattttataaaaaaagcgaaaaagaactagactataaaaatgctttacaaattaccaaaaaaatcattcaaaatatttttgataaaggttttcctttggaaaaaaaagaatttttaaatatcaattttcctgcaaaatcaaaaatcaaaggcattaaaatttgtaaagcaggcaaaagggtttataattttgaagcccattcaaatgtcaatccgagaggagtagagtactattggcttgcagcggcgaatttagactttgaagatgagaaaaatagcgatattgccttacttaaaaaaggctacgctacaataacacctataatgctggatcttacagcttatgaaagaatgaaaaaagttaaaaaatggttaaaggcaaatgatgaatga

SEQ ID NO: 11314 - protein, 258 aa, Campylobacter jejuni
MKEILITNDDGYESEGLKKLIKMLTKEFKAKITIVAPASEKSACSHSITLTKPLRFVKVGKRFYKLDDGTPADCVYLALHALYKKRLPDLVISGINKGANVGEDITYSGTCAGAMEAVLQGIPAIALSQFYKKSEKELDYKNALQITKKIIQNIFDKGFPLEKKEFLNINFPAKSKIKGIKICKAGKRVYNFEAHSNVNPRGVEYYWLAAANLDFEDEKNSDIALLKKGYATITPIMLDLTAYERMKKVKKWLKANDE

SEQ ID NO: 11315 - DNA, 792 bp, Caulobacter crescentus
  CDS (1)..(792): transl_table=11
gtgaggattctcctcaccaacgacgacggcatccatgcgccgggcctccaggctctggagaagatcgcccgcgccctgagcgacgatgtctggatctgcgcgcccgagtacgaacagtcgggcgccagccgcgccctgaccctggccgacccgatccgcgtgcgaaagctcgactcgcgccgcttcgccgtcgagggcacgcccaccgactgcgtgatgatggcggtgcagcacctgatcgagggcggcaggccggacctggtgttgtcgggcgtcaatcgcggccagaacatcgccgaggatgtgaccctgtcgggcacggtggccggcgcgatcgagggcatggcgatgggcatcccgtcgatcgccctgtcgcagtcgatgaactatttccacgacgagatcgtcgcccactgggagacggccgaggcgttcgcgccgggcatcatccagcgcctgctggaagtgggctggcccgccgacgtggtcatgaacgtcaacttcccggccctgccgccggagagcgtcaaggcggtcgaggtgacccggcagggcttccgcgacggccatatgcgccacatggacaagcgtaccgacctgcgcggccgcgactattactggatgggcttcaccgccaaggcgtcccagcctgcggaaggcaccgacttgcgggccgtctacgaggggcggatttctgtgacgccgctgcacatcgacctcacgcacaacgaaaccgtccatacgctgaagggcgtcttgggcggcgcgccgccccggaaggtgggcgcatga

SEQ ID NO: 11316 - protein, 263 aa, Caulobacter crescentus
MRILLTNDDGIHAPGLQALEKIARALSDDVWICAPEYEQSGASRALTLADPIRVRKLDSRRFAVEGTPTDCVMMAVQHLIEGGRPDLVLSGVNRGQNIAEDVTLSGTVAGAIEGMAMGIPSIALSQSMNYFHDEIVAHWETAEAFAPGIIQRLLEVGWPADVVMNVNFPALPPESVKAVEVTRQGFRDGHMRHMDKRTDLRGRDYYWMGFTAKASQPAEGTDLRAVYEGRISVTPLHIDLTHNETVHTLKGVLGGAPPRKVGA

SEQ ID NO: 11317 - DNA, 837 bp, Chlamydophila abortus
  CDS (1)..(837): transl_table=11
atgcacagaagattaaaaattctgttaactaatgatgacggcatttccgctaaaggaatgagtcttttagttgcaaatttattaaaagcagactttgctgatctctatatagttgctcctgctacggaacaatcagggaaaagcatgtcgttttcctacacacaaccggtctctatagaaaaggtcgactatcctcagcctgttgctggcgcctgggctgtttctggtagcccggtagattgcgttaagctagctttaggtgatctattccgcaatgctctgcctgatcttgtactgtctggaatcaatcatggatctaatgcaggaagaaatatcttttattctggcactgctggagctgctatggaagccattttatcaggtgtcccctccatagctttttctcaagaacaacacatttctttctttcaggaagtccatgcccctgaaatactaaagaaactctctttatatgctttatcgatgcccttccccattttatcaggctttaatgtaaatttccctgctagtgaacgtaacgaagagtggaaaggcatgcgccttgtgactacaggaaaagaatatgcctgcggcatgcccaagcttctcgtcgatgatggaaaacgtaagttcttttctttaagtgattgtcaaatagtcatggatgaagatatttctgatgagtgccgaactcttttagaaaattacatcaccgtggttcctttacttgtaagaaattctcccttagctttgattagcgaaacaaagtttcaacagttacaagaagcctttgataattttattagctctgcatcaggtgccacactcttggattaa

SEQ ID NO: 11318 - protein, 278 aa, Chlamydophila abortus
MHRRLKILLTNDDGISAKGMSLLVANLLKADFADLYIVAPATEQSGKSMSFSYTQPVSIEKVDYPQPVAGAWAVSGSPVDCVKLALGDLFRNALPDLVLSGINHGSNAGRNIFYSGTAGAAMEAILSGVPSIAFSQEQHISFFQEVHAPEILKKLSLYALSMPFPILSGFNVNFPASERNEEWKGMRLVTTGKEYACGMPKLLVDDGKRKFFSLSDCQIVMDEDISDECRTLLENYITVVPLLVRNSPLALISETKFQQLQEAFDNFISSASGATLLD

SEQ ID NO: 11319 - DNA, 792 bp, Chlorobium tepidum
  CDS (1)..(792): transl_table=11
ttgacgacaaaaccgcagaaaccgcacattcttgtctgtaatgacgacggtatcgaaggccttggcctgcacgcgctggctgcctcgatgaaaaagctcggctccgtgacggtggtcgcacccgccgaacctcaaagcggcaaaagccacggcatgacccttggcgaaccgctacgcatcaggaggtaccagaaaaacaaccgtttttttggctataccgtctccggcacgcccgtagactgcatcaaggtggcgctgagccacatcctcgacgcgaaacctgacctcatcgtttcgggcatcaactatggcagcaacaccgccatgaacagcctctattccggaacggttgccgccgcccgcgagggcgcgatccagaatgtgccatcacttgccttttcgctgaccacctacgaaaacgccgacttcacctacgcagccaaattcgcccggcaactggctcgcgaggtactccggcgcggaatgccacccgacaccatcctgtcggccaacattcccaacgtgcccgaaaaagagattcgcggcatcctgttcacgcggcaggggcgatcgcgatgggaggagtcaaccatcgagcggcacgacatgtacggcaacccctactactggctcgccggctcgctccagttgcacgacaatgatctcgcggaggacgaatacgctgtgcggcacaactatgtggctgtcacacccatcacctgtgacatgaccgatcatcgcttcagaagcgaactcgaaacctggggcctccagaacaccatcaagaagtaa

SEQ ID NO: 11320 - protein, 263 aa, Chlorobium tepidum
MTTKPQKPHILVCNDDGIEGLGLHALAASMKKLGSVTVVAPAEPQSGKSHGMTLGEPLRIRRYQKNNRFFGYTVSGTPVDCIKVALSHILDAKPDLIVSGINYGSNTAMNSLYSGTVAAAREGAIQNVPSLAFSLTTYENADFTYAAKFARQLAREVLRRGMPPDTILSANIPNVPEKEIRGILFTRQGRSRWEESTIERHDMYGNPYYWLAGSLQLHDNDLAEDEYAVRHNYVAVTPITCDMTDHRFRSELETWGLQNTIKK

SEQ ID NO: 11321 - DNA, 852 bp, Chlamydia trachomatis
  CDS (1)..(852): transl_table=11
atgacagagacacgacgacttcgcattcttattaccaatgatgacggtatcaaagccaaaggaatcagtctgctgatttctctactccgtgaagctgacttcgccgatctttatgtagtagcccctttagaagaacagtctgggagaagtatggctttctcattagtagagccaactgcccttgagccttttgattatcctcaaagagtccaagaagcttgggctgtcaccggcactcctgttgactgtgtgaaattagctataggagaactctttaaagagaacgctctggatcttattttatcgggtattaataatgggaaaaattccggacgctgcctttattactctgccactgtaggagctataagagaagcgaatctccatggaattcctgcgatagctctttctcaaagtgagaatatcgcttttttccaaaaagctcatatggcctccctaattcgttccttatgcgagtttaccgttgcctataagcacaccgatcccttaggacttaatgtaaatttccctgctagcacggacgattctccatggaaaggaattcgtttcacactttctggaaatgaattcttattcggtatcccaagattagtccgtacggaaggaaatcgtcgttactatacgctctatgatatgcgagataaagtatccgaagagttctctgaagagtatcttgctttagcaaataactatattagtgcggctccactagtttctaaaaatacccctcgagcaaccctttccgaagaagaactagctttcctaaaagactctttcgaacaatctgtgttgtggaaagcttctttaaacttagaagaagatctggcttag

SEQ ID NO: 11322 - protein, 283 aa, Chlamydia trachomatis
MTETRRLRILITNDDGIKAKGISLLISLLREADFADLYVVAPLEEQSGRSMAFSLVEPTALEPFDYPQRVQEAWAVTGTPVDCVKLAIGELFKENALDLILSGINNGKNSGRCLYYSATVGAIREANLHGIPAIALSQSENIAFFQKAHMASLIRSLCEFTVAYKHTDPLGLNVNFPASTDDSPWKGIRFTLSGNEFLFGIPRLVRTEGNRRYYTLYDMRDKVSEEFSEEYLALANNYISAAPLVSKNTPRATLSEEELAFLKDSFEQSVLWKASLNLEEDLA

SEQ ID NO: 11323 - DNA, 777 bp, Coxiella burnetii
  CDS (1)..(777): transl_table=11
atgaaaaaaacggctactccaaaattacgattattgctttctaatgatgacggcgtgtatgccaaaggattagctattttggcgaaaacactggcggatttaggggaagttgatgtagtagcgcccgatcgcaatcgcagtggcgctagtaattcattaaccttgaacgcgccgttacatattaaaaatttagaaaacggcatgatcagtgtggaaggtaccccgacggactgtgttcatttagcgatcaccggtgtattgccggaaatgcctgacatggtcgttgcaggaattaatgcgggtcctaacttaggtgatgatgtttggtattccggcacggtcgccgctgcgatggaggggcggtttttgggattgccagcgctagcggtttcattgggcggcgaattgttccgttactacgaaacagccgccaaggtcgtttatcaattaatccagcggattgaaaaagaccctttgccaccgagcacgatattaaatattaatgtgccggatcttccttatgaggaattaaaaggctttgaggtcacgcggctcggcacccgtcaccgggccgagcccacgattcggcagattgaccctcgaggccacccgatttattgggtgggtgcggcgggtcccgagcaagattctggtccaggcaccgattttttcgccatgaatcaccattgtgtatccatcacgccgcttcgcgtggacctcacccattacgaggcttttgaccaactggcgagttgggtaaaacggctggaaatgtga

SEQ ID NO: 11324 - protein, 258 aa, Coxiella burnetii
MKKTATPKLRLLLSNDDGVYAKGLAILAKTLADLGEVDVVAPDRNRSGASNSLTLNAPLHIKNLENGMISVEGTPTDCVHLAITGVLPEMPDMVVAGINAGPNLGDDVWYSGTVAAAMEGRFLGLPALAVSLGGELFRYYETAAKVVYQLIQRIEKDPLPPSTILNINVPDLPYEELKGFEVTRLGTRHRAEPTIRQIDPRGHPIYWVGAAGPEQDSGPGTDFFAMNHHCVSITPLRVDLTHYEAFDQLASWVKRLEM

SEQ ID NO: 11325 - DNA, 798 bp, Dehalococcoides ethenogenes
  CDS (1)..(798): transl_table=11
atgagaatacttgtgagcaatgatgacggtatttattcatcaggcctgtgggcactggtgaaaaggctcaaagaagttggcgaagtagtggtggtagcacctgaccgtgagcaaagtgctaccggcacccaggtaaccctgcgccagcccctccgggtgcagaaaacccacccgcttattccgggcatagaggcttattcggtagaaggcagcccatgtgactgtgtaataatgggtttagccaagctgataaccgaaccggtggatttggtggtatcaggcataaaccatggcctgaatctgggtgatgatgtgcttatttcaggaacggtgggtgccgccctgcagggatacctgcgtaacataccctcaatagccatctcaatacccgtcacggcggaagagcccgaaaatctggatagtgccgcctgtattacagcggagatagcacgccggatacagagcgggcatatcagtaaaaattcttttctgaatataaatacccctgacctgccgctttgccggattaatgagttacgggttaccccgcttgcccataaaacccacatagaaacagtggaagaagggcatgatggcaggaagcgttatttctggctcaggcgacgccagctaagcccggcagacaataacgaaacggatatctgggcggtggaaaacggcctaatctctataagtgcactccatgaaaggcttttccagcagccgccctttatgcttgaagatactgaaactgccggcatactggcttcagccagagcccttcaggatataatctag

SEQ ID NO: 11326 - protein, 265 aa, Dehalococcoides ethenogenes
MRILVSNDDGIYSSGLWALVKRLKEVGEVVVVAPDREQSATGTQVTLRQPLRVQKTHPLIPGIEAYSVEGSPCDCVIMGLAKLITEPVDLVVSGINHGLNLGDDVLISGTVGAALQGYLRNIPSIAISIPVTAEEPENLDSAACITAEIARRIQSGHISKNSFLNINTPDLPLCRINELRVTPLAHKTHIETVEEGHDGRKRYFWLRRRQLSPADNNETDIWAVENGLISISALHERLFQQPPFMLEDTETAGILASARALQDII

SEQ ID NO: 11327 - DNA, 798 bp, Dehalococcoides sp
  CDS (1)..(798): transl_table=11
atgagaatactggtaagtaatgacgatggtatttattcacccggcctgtgggcattggtgaaaaggcttaaagaagttggcgaagtgatagtggtggcacctgaccgtgagcaaagtgccaccggtactcaggtgaccctgcgccagccgctcagggtgcagaagactcaccctcttattccggggattgaggcttatgcggtagaaggcagcccctgtgactgtgtaatactgggtttagccaagctaataaccgaaccggtagatctagtggtttcgggtatcaatcacggtctgaacttgggggatgatgtgcttatctcgggtacagtgggtgccgctcttcagggttatttgcgtaacataccttcaatagccatctccatacccgttaccatggaagaacctgaaaatctggatagtgccgcctgtattacagcggaggtagcacgccggatacaaaacggagatattacaaagaattcttttctaaatataaatatacctgacctgccgctttcccaaattgaagaacttagggttaccccgctggcacataaaacccatatagaaacggttgaagagggacatgatggcaggaaacggtatttttggcttagacgccgccagttaagttcggcggataataaaaaaaccgatatctgggctatagaaaatgggtatatcactataagcgctctccatgaaaggcttttccaacaacccgtgtttactcttaaagatgctgaaactgccgggatattggcagctgccagatcctgccaggataaaatctag

SEQ ID NO: 11328 - protein, 265 aa, Dehalococcoides sp
MRILVSNDDGIYSPGLWALVKRLKEVGEVIVVAPDREQSATGTQVTLRQPLRVQKTHPLIPGIEAYAVEGSPCDCVILGLAKLITEPVDLVVSGINHGLNLGDDVLISGTVGAALQGYLRNIPSIAISIPVTMEEPENLDSAACITAEVARRIQNGDITKNSFLNINIPDLPLSQIEELRVTPLAHKTHIETVEEGHDGRKRYFWLRRRQLSSADNKKTDIWAIENGYITISALHERLFQQPVFTLKDAETAGILAAARSCQDKI

SEQ ID NO: 11329 - DNA, 807 bp, Deinococcus radiodurans
  CDS (1)..(807): transl_table=11
atgactgtgcctgaccctgcccggcccgccgcgtccccgtccgctcgtccccgcgtcctggtcgccaacgacgacggcattttcgcgcccggcatcaaggcgctggggctggcgctgagcgagtgggccgacgtggtggtcgtcgcgcccgacgtggagcagtcggcggtggggcacggcatcaccattcgccgcccgctgcgcttcaagcacacggcggcggcgggcttcggtgacattccggcctaccgggtggacggcacccccgccgactgcgtggtgctgggcgtgcatctgctggggcggcccgacctggtcgtcagcggcatcaacatcggccccaatctcggcgaggacctcacgcactcgggcacggtggcggcggccatcgagggactcaccctggggctgccctccatcgccttcagccagtttgccaacgaagcgggcgaatacgactttgggccctcggcggcctacgcttcccggttggcgcgcgaggtctgctgccgggggctgccgccgcgtgtgctgctcaacgtcaattttccccgcgtctctccgcgtggggtgcgcgtgaccgaggtgggcctccaccgctgggaagacagcgtggtgacccgccaggaccccgagggccgcgactaccactgggtcgccggggtcagcaccgcgcacgacggtcacgacgaacagaccgactacggcgcggtgcaggcggggtttatcagcgtgtcgccggtgcggctcgacctcacggcgcgggacctgatcggcgagttgacgcaggcgttgccacccctgtaa

SEQ ID NO: 11330 - protein, 268 aa, Deinococcus radiodurans
MTVPDPARPAASPSARPRVLVANDDGIFAPGIKALGLALSEWADVVVVAPDVEQSAVGHGITIRRPLRFKHTAAAGFGDIPAYRVDGTPADCVVLGVHLLGRPDLVVSGINIGPNLGEDLTHSGTVAAAIEGLTLGLPSIAFSQFANEAGEYDFGPSAAYASRLAREVCCRGLPPRVLLNVNFPRVSPRGVRVTEVGLHRWEDSVVTRQDPEGRDYHWVAGVSTAHDGHDEQTDYGAVQAGFISVSPVRLDLTARDLIGELTQALPPL

SEQ ID NO: 11331 - DNA, 762 bp, Escherichia coli O157
  CDS (1)..(762): transl_table=11
atgcgcatattgctgagtaatgatgacggggtacatgcacccggtatacaaacgctggcgaaagccttgcgtgagtttgctgacgttcaggtggtcgcccccgatcgtaaccgcagcggcgcttcaaattctctgacactggaatcctccctgcgcacgtttacctttgaaaatggtgatattgctgtgcaaatgggaaccccgaccgattgcgtctatcttggcgtgaatgctctgatgcgtccgcgcccggacattgttgtgtccggaattaacgccgggccgaatctgggggatgatgttatttattccggtacggtagccgccgcgatggaaggccgtcatttaggttttccggcgcttgccgtctcgcttgacgggcataaacattacgacactgccgcggcggtaacctgttcaattttgcgcgcactgtgtaaagagccgctgcgcaccgggcgtattcttaatattaatgttccggatttacccttggatcaaatcaaaggtattcgcgtgacgcgctgcggtacacgacatccggcagatcaggtgatcccgcagcaagatccgcgcggcaatacgctgtactggattggcccgccgggcggtaaatgtgatgccggtccggggaccgattttgctgcggtagatgagggctatgtctccatcacgccgctgcatgtggatttaactgcgcatagcgcgcaagatgtggtttcagactggttaaacagcgtgggagttggcacgcaatggtaa

SEQ ID NO: 11332 - protein, 253 aa, Escherichia coli O157
MRILLSNDDGVHAPGIQTLAKALREFADVQVVAPDRNRSGASNSLTLESSLRTFTFENGDIAVQMGTPTDCVYLGVNALMRPRPDIVVSGINAGPNLGDDVIYSGTVAAAMEGRHLGFPALAVSLDGHKHYDTAAAVTCSILRALCKEPLRTGRILNINVPDLPLDQIKGIRVTRCGTRHPADQVIPQQDPRGNTLYWIGPPGGKCDAGPGTDFAAVDEGYVSITPLHVDLTAHSAQDVVSDWLNSVGVGTQW

SEQ ID NO: 11333 - DNA, 771 bp, Ehrlichia canis
  CDS (1)..(771): transl_table=11
atgaaggtattattgactaatgatgatggattccatgcaactggtattaaagttctgaaagaaataataatagaatctggtattgcatcagaagtatggatcgctgctccagcaagcaactgtagtggttatggaagatcaataggtgtaaaaactgcaactgatgtataccaaataggtgacactgagtttattgttaacagtactccatctactagtgcttttcttggattgagagagattactggtaagaaaccagatttggttttatctggtataaatagcgggattaatgttggaaatgatataggatactctggtacaataggtgctgcagcggaaggtgctatgatgaatattccatcaattgctataagtcaagaatacgatggtaagcatggagaaataaattggataaatccacagaaattcttaaaaaagattataaatatgttattggaagttcctttttggaataagtctactataatgaatgtgaactttcctttagttccagcaaagggtattaaatttacaagtcaaggggagtatattccatctaataaaatagaaaagaaaagaaatgttagtggtagtatatcttatacagtacatagaattgcacctgataaaggtaataggggttactctgatgatagtattaaggcaatagatgatggttatattacaattacaccactaaagcttgatatgacagattttgatgcgttagaatctttaattgcactttataaggactgtacgatatga

SEQ ID NO: 11334 - protein, 256 aa, Ehrlichia canis
MKVLLTNDDGFHATGIKVLKEIIIESGIASEVWIAAPASNCSGYGRSIGVKTATDVYQIGDTEFIVNSTPSTSAFLGLREITGKKPDLVLSGINSGINVGNDIGYSGTIGAAAEGAMMNIPSIAISQEYDGKHGEINWINPQKFLKKIINMLLEVPFWNKSTIMNVNFPLVPAKGIKFTSQGEYIPSNKIEKKRNVSGSISYTVHRIAPDKGNRGYSDDSIKAIDDGYITITPLKLDMTDFDALESLIALYKDCTI

SEQ ID NO: 11335 - DNA, 759 bp, Geobacter metallireducens
  CDS (1)..(759): transl_table=11
atgaaaattcttgttacgaatgacgacggagttcgcgctccggggatacggtcgcttgcagaggcattgcggaacatcggtgatgtggttgttgttgcgcccgaccgcgaacggagtgccgttgggcacgccttgacactgcaccatcctttacgggcctctgagatacgccctgcggtttttgccgtggatggaacccctacagattgcgttaacctcggcatccatacgctcctcggttcaagacccgatatagtcgtatcgggggtcaactgcggtggcaacatgggagatgatatcacctattcggggacggtttccgctgccatggaagcaacgctcatggggatccccgcgctggcggtctcgctcgccacctctggccgcggggataactatgcggttgcctccgctttcgctgccaggcttgttcggattgtgtccgaaagggggctccccccggataccctgttaaatgtcaatgtgccagacctccccctggaaaagctcggaggagctgttgtgaccattcaagggaaaagggactacgaggggaaaattgttacaaaaactgatccccgcggtcgcaactattattggatcgggaatggttcattgcagttccgcgatctggagggtaccgattattacgctgtgaagcgcggtttggtctcgataacgccactgcacctcgacctcaccaattatgcttccctcaccacgctgaaaacatgggattttgcagaaatgactttgtga

SEQ ID NO: 11336 - protein, 252 aa, Geobacter metallireducens
MKILVTNDDGVRAPGIRSLAEALRNIGDVVVVAPDRERSAVGHALTLHHPLRASEIRPAVFAVDGTPTDCVNLGIHTLLGSRPDIVVSGVNCGGNMGDDITYSGTVSAAMEATLMGIPALAVSLATSGRGDNYAVASAFAARLVRIVSERGLPPDTLLNVNVPDLPLEKLGGAVVTIQGKRDYEGKIVTKTDPRGRNYYWIGNGSLQFRDLEGTDYYAVKRGLVSITPLHLDLTNYASLTTLKTWDFAEMTL

SEQ ID NO: 11337 - DNA, 789 bp, Geobacter sulfurreducens
  CDS (1)..(789): transl_table=11
atgaatattctcgttaccaatgatgatggtgttcacgccccgggaattgtggctctggccgaggccctcagactcgtgggcacagttaccgtggtagctcccgaccgtgagcgaagcgcggtgggccatgcccttacgctccatcacccactcagggttacggagatcatggcaggtatctttgccgttgatggaacccccaccgactgcgtaaatctcggaattcacacccttctggccgaagcgcccgatatcgtggtgtccggcgtcaatcgcggcgggaacctgggcgacgacattacgtactccgggaccgtctccgcagccttggaggcgaccctcatgggaattcccgccattgccgtttctcttgcaacaaacggacatgggagcaactaccgcgcggcggctgcctttgcagcacagctggcaagggaagtgctcgaccggggcctcccccgggatacgttcctgaatgtcaatgtccccgacctgcctgccgaagagcttggtggtccggttataacttcgcagggaaagcgtgattacggtggtgacatcgttaccaaggtagatccgcgcggcaggaactactactggatcggcggcaacgagccggtctttcgcgatatcgagggaaccgactttcacgccgtcaagcgcggcaggatctcggttaccccgcttcacctggatctgacgaattacgcatcgctctcgattttgcagtcgtgggacctttcggcatgccgcccggaggctggacagccgtcgggagctctgctatag

SEQ ID NO: 11338 - protein, 262 aa, Geobacter sulfurreducens
MNILVTNDDGVHAPGIVALAEALRLVGTVTVVAPDRERSAVGHALTLHHPLRVTEIMAGIFAVDGTPTDCVNLGIHTLLAEAPDIVVSGVNRGGNLGDDITYSGTVSAALEATLMGIPAIAVSLATNGHGSNYRAAAAFAAQLAREVLDRGLPRDTFLNVNVPDLPAEELGGPVITSQGKRDYGGDIVTKVDPRGRNYYWIGGNEPVFRDIEGTDFHAVKRGRISVTPLHLDLTNYASLSILQSWDLSACRPEAGQPSGALL

SEQ ID NO: 11339 - DNA, 792 bp, Gloeobacter violaceus
  CDS (1)..(792): transl_table=11
atgcgcattcttgtcagcaacgacgacggcatcctcgcccagggtatccgcaccctggccaataccctccatcgtgccggtcataccgtgacggtggtctgcccggatcgcgagcgctcggccacgggccacgccctcacgatgcacaagcccctgcgcgccgaagcggtcgaaaacctcttcgagccgggactggcggcctgggcaatcaacggcaccccctccgactcggtgaagctgggtcttgacgcgctgctgggcgaacggcccgatctggtggtctcggggatcaactgcggagcgaatttgggttcggatgtcctgtactcgggcacggtctcggcggccatggaagggacgatcgaaggcttgccgagcattgccgtttcgctcgcaagccgcgtccgctgcgactttcagccggcggccgattttttggtgcgctttgtgcgggctctggaggtgcagccgctgccggaggcgttcttgctcaacgtcaatgtgccggcccttccggaaagtgagatcctcggcgcgcgcgtctgccgtctgggaatgcgccgctaccgcgaccagttcgtcaagcgcgtcgatccgcgcggggtcaactattactggttggccggagaagtgatcgaatcggaggaagcccccgacagcgacgtggtcgccgtgggcgaggggtgtatcgcgatcaccccgctcaagtacgacctcacctacgaaccggggatcggattactgggcgcccggcagtgggagaaaatctttgatcccctggcgggcggctaa

SEQ ID NO: 11340 - protein, 263 aa, Gloeobacter violaceus
MRILVSNDDGILAQGIRTLANTLHRAGHTVTVVCPDRERSATGHALTMHKPLRAEAVENLFEPGLAAWAINGTPSDSVKLGLDALLGERPDLVVSGINCGANLGSDVLYSGTVSAAMEGTIEGLPSIAVSLASRVRCDFQPAADFLVRFVRALEVQPLPEAFLLNVNVPALPESEILGARVCRLGMRRYRDQFVKRVDPRGVNYYWLAGEVIESEEAPDSDVVAVGEGCIAITPLKYDLTYEPGIGLLGARQWEKIFDPLAGG

SEQ ID NO: 11341 - DNA, 762 bp, Haemophilus ducreyi
  CDS (1)..(762): transl_table=11
atgaatattttactcagtaatgatgatggttatcacgcagaaggcattcaaacgcttgcgacaagattgcgtgaagcggggcattgtgtaaccgtcattgctcccgatcgtaaccgtagtgctgcctctagttgtttaacactgatggagccaatccgtgttcatcagttgggtacgtttgattatagtgtgattgcgggcacgccagctgattgtgtacatttggctttaaatggtttatttgagacgtcgtttgatttagtggtgtctggcattaatcacggtgcgaatttaggcgatgatgtggtctattcaggtacggttgcggcagcattagaagggcgtcatttgcggttgcctagtttagcggtgtcgttagttggtaaacaatcggaagggcatttatttggtaataatcactttgaaactgccgcacaggtggtgcttgatgtattgccaaaattagttgatatggcgttaccacgtcaaattttgaatattaatgtgcctgatttgccttattctgcgattaagggcatgctggtcacgcgtttaggtcaacgttcgccgtctgctgagattttaaaaagccaagatcctcgtggttcgactatttattggttgggtgaaaacggttcagccatagacaatggcgagggtaccgatttttatgcattagcgcatgattatgtatccattacgcctatccatgctgatatgacagcccatcatgcaataaaagtgttgtctgagatgctataa

SEQ ID NO: 11342 - protein, 253 aa, Haemophilus ducreyi
MNILLSNDDGYHAEGIQTLATRLREAGHCVTVIAPDRNRSAASSCLTLMEPIRVHQLGTFDYSVIAGTPADCVHLALNGLFETSFDLVVSGINHGANLGDDVVYSGTVAAALEGRHLRLPSLAVSLVGKQSEGHLFGNNHFETAAQVVLDVLPKLVDMALPRQILNINVPDLPYSAIKGMLVTRLGQRSPSAEILKSQDPRGSTIYWLGENGSAIDNGEGTDFYALAHDYVSITPIHADMTAHHAIKVLSEML

SEQ ID NO: 11343 - DNA, 804 bp, Helicobacter pylori J99
  CDS (1)..(804): transl_table=11
atgaaaaaaattctactcaccaacgatgacggctaccatgcaaaaggcattaaagctttagaacaagctttagaaaacatggcagaaatctatgtggtcgcccccaagcatgaaaaaagtgcatgctcgcaatgcatcacgatcaccgcgcctttaagagcggagaaaattaaaggcaaagaaggccggcattacaggattgatgatggcacgccaagcgattgcgtgtatctggctattaatgagctttttaaacatgtttgttttgatttagtgatttcagggatcaatcttggctctaacatgggcgaagacacgatttattcgggaacggtggccggagcgattgaaggcacgattcagggtgtgccttccattgcgatttctcaaatcctttctaacaaaaacaaaaacactcccttaagttttgatctggctcaaaagatcatccaggatttagtccaaaatgttttcaccaaaggctaccctttaaagggacgcaaactcctaaacgtgaacgtccctaattgctccttacaagaatataagggcgaacgcatcacccctaagggctataggctgtataaaaaagaagtgcataaacgaacagaccccaagaatgaaagctatttttggctagggctgcaccctttaaaatggcaaaagcgcgaaaatgaagacagactctctgattttgacgctatcgcttcaaaccatgcctctatcacgcctttaaatttagacttaaccagttatgatgatctaaaaagcttggaatcttggcatgagggaatgttaaagtga

SEQ ID NO: 11344 - protein, 267 aa, Helicobacter pylori J99
MKKILLTNDDGYHAKGIKALEQALENMAEIYVVAPKHEKSACSQCITITAPLRAEKIKGKEGRHYRIDDGTPSDCVYLAINELFKHVCFDLVISGINLGSNMGEDTIYSGTVAGAIEGTIQGVPSIAISQILSNKNKNTPLSFDLAQKIIQDLVQNVFTKGYPLKGRKLLNVNVPNCSLQEYKGERITPKGYRLYKKEVHKRTDPKNESYFWLGLHPLKWQKRENEDRLSDFDAIASNHASITPLNLDLTSYDDLKSLESWHEGMLK

SEQ ID NO: 11345 - DNA, 753 bp, Idiomarina loihiensis
  CDS (1)..(753): transl_table=11
atgatgaaaattttattaagtaatgatgacggcgtgcatgcgccgggtattctcgcgttgtaccaggctttaaaagaagtggcagatgtacgagtgatagctccggaccgtaactgcagtggtgccagtaattcgttaaccttacataatcctttgcgggtgcgtcggctggataatggtttctattctgttaatggtacgcccacagactgtgttcatttaggcactaactcgccgatggctgaagacgtagatttagtcgtgtcgggtattaatgacagccctaatatgggtgacgatgtgttgtactcaggcacggtggcggccgcgatggaagggcgctttatgggactgcctgccattgcagtatcgatgggtggtcgtggacacgactactatgataccgccgggcgggtcgtggcagaaattgtcgcaaatatggaaaacgatccgctgcggcttgatactgtactgaatatcaatgtgccttacacgacctacgataagttaaaaggtacccgggtgactaaattgggacgtcggcatcgcgcagagactatggttcacgaccgtgacccttttggcagcgaaatcttttggtatggacccattgggcatcatgcaagtgatgagcctaataccgactttaccgcgattcatgaaggttatatctcaattacaccgttaagcctggatatgacggctcaacgccacaccgatacactgacagactggttagaacaacaaaaatga

SEQ ID NO: 11346 - protein, 250 aa, Idiomarina loihiensis
MMKILLSNDDGVHAPGILALYQALKEVADVRVIAPDRNCSGASNSLTLHNPLRVRRLDNGFYSVNGTPTDCVHLGTNSPMAEDVDLVVSGINDSPNMGDDVLYSGTVAAAMEGRFMGLPAIAVSMGGRGHDYYDTAGRVVAEIVANMENDPLRLDTVLNINVPYTTYDKLKGTRVTKLGRRHRAETMVHDRDPFGSEIFWYGPIGHHASDEPNTDFTAIHEGYISITPLSLDMTAQRHTDTLTDWLEQQK

SEQ ID NO: 11347 - DNA, 756 bp, Legionella pneumophila subsp
  CDS (1)..(756): transl_table=11
atgaaaatattagtaagcaatgacgacggggttttggcgcccggtatcaaaattttagctaatgagctgtccactttaggagaagttaaagtggttgcgcctgatagaaatagaagtggcgccagtaactctttgactttaacacaacctttaagagttaaacaattggacaatggttattatagtgtggatggaacacctactgattgcgtccatctggcgttaaccggatttttagagcctacagacatagttgtttcagggattaatgagggtgccaatttaggggatgatgtactttactcaggtacagtggcagcggctatggaaggtcgttatttagggttgcctgctattgcaatctcaatggtaggggacaacatacaacattatgaaacagctgcaattattgccaaacaattggttataaaattaagtgctaacaaattaccttctcaaactatattaaatgttaatgttcctgatttacctttgaatcaaataagaggattgcaggttacgcgattgggaactcgccatagcgctgagcctattattaaagaatatgatcccagaggaaggccaatttattgggttggtccaccgggtatagaagcagatgctggtgctggtactgatttttttgcaattaaaacaggtcatgtttcgataacaccgcttcatttagacatgactcattataagctatttgatcatttatctaacttacttaacgaaatttgcatagaaaattaa

SEQ ID NO: 11348 - protein, 251 aa, Legionella pneumophila subsp
MKILVSNDDGVLAPGIKILANELSTLGEVKVVAPDRNRSGASNSLTLTQPLRVKQLDNGYYSVDGTPTDCVHLALTGFLEPTDIVVSGINEGANLGDDVLYSGTVAAAMEGRYLGLPAIAISMVGDNIQHYETAAIIAKQLVIKLSANKLPSQTILNVNVPDLPLNQIRGLQVTRLGTRHSAEPIIKEYDPRGRPIYWVGPPGIEADAGAGTDFFAIKTGHVSITPLHLDMTHYKLFDHLSNLLNEICIEN

SEQ ID NO: 11349 - DNA, 753 bp, Leptospira interrogans serogroup Icterohaemorrhagiae serovar
  CDS (1)..(753): transl_table=11
atgaatattctaattacaaacgatgatggaatcgcctcttctggaatcaaagcgttagaaacgatccttcagaaagaacacaatacatatttaatcgctcctttgcgggaaagatccgccacttccatggccttgtcgatttacgactccatgagagtagaaagaatcaacgacaatcattatatcgtagacggttatccggcggattgtgtgaatataggtttgcacggagaaatttttccaaaaattgatctggttttatccggaatcaatcgaggagtcaacatgggtcacgacgttcattattccggaaccgtcggagcggccagacatggagcgatacataagaaactttccttagcggtcagctctggaaatattgctaaagattatgattatattagagaagctgaattcgttcgaaagttcattaacgaatattcttctcaattgaaagtgggagtagtttacaatatgaatattccctctgattttatatcctcaatggagaatttaagagttacaaaattaggcaaacgcacttacgaagatacctactcccaaaaaaatattatcggaggaatcgctgatttctacttaggtggttcagaactcggacattctaccgaagaaggaacggatttcactgcattcttttcgggaaaaatttccttaactcccttatccctagatcaaaccgatttttctatcttaacgcaactttcggattccttaagtaaaaacatttcttaa

SEQ ID NO: 11350 - protein, 250 aa, Leptospira interrogans serogroup Icterohaemorrhagiae serovar
MNILITNDDGIASSGIKALETILQKEHNTYLIAPLRERSATSMALSIYDSMRVERINDNHYIVDGYPADCVNIGLHGEIFPKIDLVLSGINRGVNMGHDVHYSGTVGAARHGAIHKKLSLAVSSGNIAKDYDYIREAEFVRKFINEYSSQLKVGVVYNMNIPSDFISSMENLRVTKLGKRTYEDTYSQKNIIGGIADFYLGGSELGHSTEEGTDFTAFFSGKISLTPLSLDQTDFSILTQLSDSLSKNIS

SEQ ID NO: 11351 - DNA, 819 bp, Mannheimia succiniciproducens; identical to SEQ ID NO: 11233
  CDS (79)..(819): transl_table=11

SEQ ID NO: 11352 - protein, 246 aa, Mannheimia succiniciproducens
MNILLSNDDGYHAEGIQILARELRKFADVTIVAPDRNRSAASGSLTLVEPLRPRHLDDGDYCVNGTPADCVHLALNGFLSGRMDLVVSGINAGVNLGDDVIYSGTVAAALEGRHLGLPSIAVSLDGRRYYETAARVVCDLIPKLHTRLLNPREIININVPDIPYDQIKGIKVCRLGHRAASAEVIKQQDPRGESIYWIGPAALPEDDEEGTDFHAVNNGYVAITPIQVDMTSYNSMSALQDWLESE

SEQ ID NO: 11353 - DNA, 804 bp, Methanosarcina barkeri
  CDS (1)..(804): transl_table=11
atgggaaaactcatggctccaaaaattcttgttaccaatgatgatggtgtatattctacaggtttgaaagctgcttttgacagtgtttcggacctcggggaagttacgatttcggctcctgctgtccagcagagtggagttgggcgttcaatttctatctttgagcctctgcggataacgaaaacaaatgctggaggcatacctgcatactctgtgggaggaacccctacggacgctgtaattctgggcatatttacgatcctcaaagaaatgcctgacctggtgctttctggctttaacattggagaaaatataagcacagataccatcactacctcagggacaataggtggagcacttgaagctgcaagctacggcgtgcctgcaattgctgcctccatgcaggtgcttgatgaaggccagaaattcgatgatcccagagactaccatagagagcgtttcgaggctggaattaaggtagtaaacagagtggctcaaaacgtcctgaactatggcatgccggaaaatgtggatcttctgaacataaatatcccctatcacgctgaagaagatacccctatagagataacccgccttgcacgaaaaatctttaaaacggatgttgaggaaaggcgtgacccaaggggcaggccctattactggattgcaggcgaccttatccgggaagaagaagaagggaccgatgtgcacgccattatgcagaagggacacgtttcaataaccccgatttctctggattcaactgccaggatagagttctcagaaatcgaaaaatatctctaa

SEQ ID NO: 11354 - protein, 267 aa, Methanosarcina barkeri
MGKLMAPKILVTNDDGVYSTGLKAAFDSVSDLGEVTISAPAVQQSGVGRSISIFEPLRITKTNAGGIPAYSVGGTPTDAVILGIFTILKEMPDLVLSGFNIGENISTDTITTSGTIGGALEAASYGVPAIAASMQVLDEGQKFDDPRDYHRERFEAGIKVVNRVAQNVLNYGMPENVDLLNINIPYHAEEDTPIEITRLARKIFKTDVEERRDPRGRPYYWIAGDLIREEEEGTDVHAIMQKGHVSITPISLDSTARIEFSEIEKYL

SEQ ID NO: 11355 - DNA, 756 bp, Methylococcus capsulatus
  CDS (1)..(756): transl_table=11
atgcacatactccttagcaacgacgacggctacgccgcccccggtcttcgcgccctggccgccgccctttcgccgttggccaagatcaccgtcgtcgcccccgaacgcaaccgcagcggtgccagcaactccctgaccctggaacggcccttgcgtgccacccgcgccgagaatggcttcatccgggtcgatggcacgcctacggactgcgtccacctggccatcactggcctgctcgacagcgaaccggacatggtgttcgccggcatcaaccacggcgccaatctgggcgacgacgtcatctattccggtaccgtcgccgcggctaccgaaggccgtttcctcggcctgccggccgtggcgatctcgttggccgcccataacccggagcactttgaaaccgccgcccaagtcgccatcgagcttctggagcgcatccgggaaaacccgctgccggcggacaccatattgaacgtcaacgttcccgacattcccccggatgagctcagaggctatcgggccacgcggctcggcgcccgccacaaagcggaagcggtcgtccgcacccgcgacccgcgcgggcgggagattttctgggtgggctgcgccggccccgaggccgatgcgggccccggcaccgatttccacgccatccgtcagaactgtgtttcggtcaccccgctgcagatcgatctcacccgctacgagcggctcgatcaactgggcgcatggctgcccggcagagtcaccgcatga

SEQ ID NO: 11356 - protein, 251 aa, Methylococcus capsulatus
MHILLSNDDGYAAPGLRALAAALSPLAKITVVAPERNRSGASNSLTLERPLRATRAENGFIRVDGTPTDCVHLAITGLLDSEPDMVFAGINHGANLGDDVIYSGTVAAATEGRFLGLPAVAISLAAHNPEHFETAAQVAIELLERIRENPLPADTILNVNVPDIPPDELRGYRATRLGARHKAEAVVRTRDPRGREIFWVGCAGPEADAGPGTDFHAIRQNCVSVTPLQIDLTRYERLDQLGAWLPGRVTA

SEQ ID NO: 11357 - DNA, 831 bp, Methanococcus jannaschii
  CDS (31)..(831): transl_table=11
atgttaaagataactttaattggtgatattatggaaatattaatagttaatgatgatgggatttattcaccctcattgatagcattatacaatgctttaaaagagaagtttagtgatgcaaacataaccatagttgctccaacaaatcagcagagtgggattggtagggctataagcctatttgaaccgctgaggatgacaaaggttaagttagcaaaggacattgtcggttatgcagtttctggaacgcctactgattgtgtaatcttaggaatatatcaaatattaaaaaaagttccagatttggttatttctgggataaatattggagagaatttagggacagagataatgacttctggaacattaggggctgcgtttgaagctgctcatcatggagctaaatctatagcttcttcattacaaataacttcagaccacttaaaatttaaagagttggatataccaataaactttgaaatcccagcaaaaataactgcaaaaattgctgagaaatatttagattatgacatgccttgtgatgttttaaatataaacattccagaaaacgcaactttagaaacccctatagaaattacaagattagcaagaaagatgtatacaacacatgttgaagagagaatagacccaagagggaggagttattactggattgatggctatccgatatttgaagaggaggaagatacagatgtttatgttctaagaaaaaagagacatatctcaataactcctctaactttagatacaactatcaagaatttagatgaatttaaggaaaaatatgggaagattctttgtgagatgtag

SEQ ID NO: 11358 - protein, 266 aa, Methanococcus jannaschii
MEILIVNDDGIYSPSLIALYNALKEKFSDANITIVAPTNQQSGIGRAISLFEPLRMTKVKLAKDIVGYAVSGTPTDCVILGIYQILKKVPDLVISGINIGENLGTEIMTSGTLGAAFEAAHHGAKSIASSLQITSDHLKFKELDIPINFEIPAKITAKIAEKYLDYDMPCDVLNINIPENATLETPIEITRLARKMYTTHVEERIDPRGRSYYWIDGYPIFEEEEDTDVYVLRKKRHISITPLTLDTTIKNLDEFKEKYGKILCEM

SEQ ID NO: 11359 - DNA, 786 bp, Methanopyrus kandleri
  CDS (1)..(786): transl_table=11
gtgagaatactgatcaccaacgacgacggcatagcctctcccggtctccgagcggccgtccgcgcctgcaggagtgtcggtgaagttaccgtagtagctcccgcgacgcagcaaagtggtgtagggcgcagtatctctttactcgagccagtgcgggtggaagagatagaggtagaaggcgtcgacgcgctcgcgatctccggtacgccggcggacgccgtcctcatcggagcgttctctatcatggatgagccacccgatttggtggtctcggggatcaacctcggagagaacgtcagcgctgacgtcacgacctcggggaccgtcggcgcagcgctggaagcttacgggaacggcattccggccatagcgatctcgcaagaggtccgtgacgccagagcacgcgtggacaacaacgccaagaacgtcgacttcaccttggccatcagagtcttgaaggccctgctcgaagcgattcgaggggcgaattgggaaggtgtcttgaacgtcaacgtgccggatccggatcgctggaacggcgaaattaaagtggttccattagctttcacgatgtaccggcccagaatagaaaaacgatacgatccgcgtgggcgtcgatactactggatcgacggcgagattatccaagatccgcccgagggaaccgacctgtacgaactccagcggggctccatagtaatcacacctctgacgaccgacgtcaccggagacttggacgctgcggaaaacgttatcaaggagctccggcgtgccctgcggggataa

SEQ ID NO: 11360 - protein, 261 aa, Methanopyrus kandleri
MRILITNDDGIASPGLRAAVRACRSVGEVTVVAPATQQSGVGRSISLLEPVRVEEIEVEGVDALAISGTPADAVLIGAFSIMDEPPDLVVSGINLGENVSADVTTSGTVGAALEAYGNGIPAIAISQEVRDARARVDNNAKNVDFTLAIRVLKALLEAIRGANWEGVLNVNVPDPDRWNGEIKVVPLAFTMYRPRIEKRYDPRGRRYYWIDGEIIQDPPEGTDLYELQRGSIVITPLTTDVTGDLDAAENVIKELRRALRG

SEQ ID NO: 11361 - DNA, 804 bp, Methanosarcina mazei
  CDS (1)..(804): transl_table=11
atgggaaagctgatggtcccaaaaattcttgttacaaatgatgatggtgtttattcgacaggcctgaaagccgcttttgacagcgtttctgacctcggggaagttacaatttcggctcctgccgtccagcagagcggagtaggacgctctatttctatctttgagcctctcaggatcacaaaaacagacgtcggaggcatacctgcctatgctgtgggaggcactcctacggactctgttattctcggcgtttttactatcctgaaggcaatgcctgacctggtattatcgggtttcaatattggagaaaatataagcacggatactatcaccacttcgggaacaattggaggagcccttgaagctgcaagctatggcgttcctgcaattgctgcctcaatgcaggttcttgatgaagggcagaaattcgatgatcccagggactatcagagggaacgcttcgaagccgggataaaggtcgttaacaggattgcccgcaatgtgctgaagaggggaatgccggaaaatgttgatctgctgaatatcaatattcccttccatgcggaagaagatactcctatagagattacccgccttgcgaggaagatctttaaaaccgatgtcgaagagaggcgtgacccaaggggaaggccctattactggattgcaggagaccttatacgggaagaagaggaagggactgatgtgcacgccatcatgcagaaagggcatgtctcaataacccccatctccctggactcgacggcaaggattgatttttctgaaatcgaaagatatctctga

SEQ ID NO: 11362 - protein, 267 aa, Methanosarcina mazei
MGKLMVPKILVTNDDGVYSTGLKAAFDSVSDLGEVTISAPAVQQSGVGRSISIFEPLRITKTDVGGIPAYAVGGTPTDSVILGVFTILKAMPDLVLSGFNIGENISTDTITTSGTIGGALEAASYGVPAIAASMQVLDEGQKFDDPRDYQRERFEAGIKVVNRIARNVLKRGMPENVDLLNINIPFHAEEDTPIEITRLARKIFKTDVEERRDPRGRPYYWIAGDLIREEEEGTDVHAIMQKGHVSITPISLDSTARIDFSEIERYL

SEQ ID NO: 11363 - DNA, 744 bp, Nitrosomonas europaea
  CDS (1)..(744): transl_table=11
atgcgcattttgctcagtaatgatgatgggtattttgcgccaggtattgccaatctcgcaaaagtgctccttgagattgcagatgtgacggttgttgcgccagagcgtgatcgtagcggggcaagcaattcgcttacgctggatcgtccgctcagcttgcataagtcacataatggtttttattacgtaaatggtacaccgacagattgtgtccatctcgctgtaaccggcatgctggatgaattgccggatatggtgatctcagggatcaacgatggcgctaatatgggggatgatacggtttattcagggactgtagcagctgcaaccgagggctttctgttaggattgccttcaattgctgtatccctggtgagtatgtcgcgcggcaattttccaacagcagccaggatcgttgttgatcttgtcaagcggttcacagaaaacagattccatattccgattctgctcaatgtgaatgtcccggatgtgccgtacgatgagttgcagggagtggaagttacgcggttaggtcgtcgtcataaagcggaatctgtgattaaatatcaaactcctcgaggagagacagtatattgggtgggtgccgcaggtgcagcccaggatgcaggtgagggaactgatttctttgctcttcaaaataaccgggtatcaataacaccactacaaatagatctgacacgttacgaccagattggttatgtcaagaactggcttacactttag

SEQ ID NO: 11364 - protein, 247 aa, Nitrosomonas europaea
MRILLSNDDGYFAPGIANLAKVLLEIADVTVVAPERDRSGASNSLTLDRPLSLHKSHNGFYYVNGTPTDCVHLAVTGMLDELPDMVISGINDGANMGDDTVYSGTVAAATEGFLLGLPSIAVSLVSMSRGNFPTAARIVVDLVKRFTENRFHIPILLNVNVPDVPYDELQGVEVTRLGRRHKAESVIKYQTPRGETVYWVGAAGAAQDAGEGTDFFALQNNRVSITPLQIDLTRYDQIGYVKNWLTL

SEQ ID NO: 11365 - DNA, 750 bp, Photobacterium profundum
  CDS (1)..(750): transl_table=11
atgcgaatattgatcagtaatgatgatggcatttttgccgagggcattaacacgctagcgacagtgttaagtgaactgggagaagtgactattgttgcgcctgatcgaaaccgctctggcgcatcgaattcattgactctcgattaccctcttcgtattcgcgaagagggagataggcgtatttctgtcgatggcactccgacagattgcgtgcattttgccttgaatgaatggctagattatcgaccagatatcgtggtggctggcattaaccatggcgctaatttgggcgatgatgtgttgtattccggtacggttgcagctgctacagaagggcacttcttaggagtacctgctattgcgatttcattggtgggttcaacgcattttgataccgcagcacaagtggtaaaaagtattgttgtgaacttgctagagaagccattacctaaaaataaaatattgaatatcaatgtacctgacattccttttgctgagttaaaggggtggaaagtgacgcgtttaggtgcccgtcatcgtgcagaacagatggttaaagatgtggatcctagagggaaagtattatattggttaggtcctccaggggcatgccaagatgctggacctggcactgattttcatgctgtagagcaaaacttggtgtcgattactccgttgcaggttgatttaacggcgcatgatgctcttgagagtgttgagttatggatgaatgaagtggggaaaaaatag

SEQ ID NO: 11366 - protein, 249 aa, Photobacterium profundum
MRILISNDDGIFAEGINTLATVLSELGEVTIVAPDRNRSGASNSLTLDYPLRIREEGDRRISVDGTPTDCVHFALNEWLDYRPDIVVAGINHGANLGDDVLYSGTVAAATEGHFLGVPAIAISLVGSTHFDTAAQVVKSIVVNLLEKPLPKNKILNINVPDIPFAELKGWKVTRLGARHRAEQMVKDVDPRGKVLYWLGPPGACQDAGPGTDFHAVEQNLVSITPLQVDLTAHDALESVELWMNEVGKK

SEQ ID NO: 11367 - DNA, 771 bp, Porphyromonas gingivalis
  CDS (1)..(771): transl_table=11
atgaaagccgatccgattgaaattttagtttcgaatgacgatggttttcgagcacagggtatccgcgagctggcagaagccctgcgcccattagggaatgtcacgatcgtagctcccgacgggccacgatccggggcttcggctgccattacctctactctccccatcaagctcaagcttcggcacagagaggaaggctatacggtatacagctgtacggggacgccggtagattgtgtgaagttggcgatgaacacagtcttcaaggagcgcaagcccgatttgctggtcacgggtgtgaatcacggcaacaatgccggcatctgcgtaatctattccggcacggtgggtgctgcgatggaaggatgtgtgtgtgatgtgccggctctggccgtttcgctggacgaccatagcgagatttgcgatatgagtcatgccacggcctatgccgtgcatgtcagtcgtatgatcctgaagaatggcttgcctcaggacacgatgctaagcatgaatgttccgaagggaaaacctttggggctaaagccttgcgccgttacggacggtcgttttgtcgacgaatacatggcttccgaagatgcacggggcaatgctgtgtattggatgacaggacgtcagatcaataaaggcaccatagagggtgatttggaactgatgcatgcgggctacgttacactatctcccatcaaactgaatatgacttcgagacgttatctacctgtcttggaggaacttctcaagaggagcgtctga

SEQ ID NO: 11368 - protein, 256 aa, Porphyromonas gingivalis
MKADPIEILVSNDDGFRAQGIRELAEALRPLGNVTIVAPDGPRSGASAAITSTLPIKLKLRHREEGYTVYSCTGTPVDCVKLAMNTVFKERKPDLLVTGVNHGNNAGICVIYSGTVGAAMEGCVCDVPALAVSLDDHSEICDMSHATAYAVHVSRMILKNGLPQDTMLSMNVPKGKPLGLKPCAVTDGRFVDEYMASEDARGNAVYWMTGRQINKGTIEGDLELMHAGYVTLSPIKLNMTSRRYLPVLEELLKRSV

SEQ ID NO: 11369 - DNA, 810 bp, Prochlorococcus marinus
  CDS (1)..(810): transl_table=11
atggaatcgttaaatatattaattagtaatgatgatggtgtttttgcagagggattaagagctttagccaaatcagcacagaagagaggtcataaggtaacagtagtatgtcctgaccaagaaagatcagctactggtcatggtcttactttgcaatctccactaagagtggaaagggcagacgaattatttgagagagggatcaaagcttggggatgttcgggcacgcctgctgattgcgtcaaattagcattatctgagctcttggataataaacctgatctagttctatctggaataaatcacgggccaaatttagggacagatattttttgttcaggcactgttgcagcagccatggagggaactttagaaaatgttccctccatggcaataagtgttgcgagttttaaatggaagaattttgaatttgctggagaaatggcaataaatattgcagaacaagcaattaaggatagttggccaccttcacttctactaaatttgaatattcctccctgcgagaaaaataaaataaaagaattatcctggacaagattatcaatcagaaaatataaaaatcaattttctaaacgggaagacccaaggggtgatgattattattggttagcaggtgaggtagttttagatcttaaatcaaaaggttacggtccaaaaaattggcccagtgatgtatctcaaatacaagaaaataaaatatcgcttacacccgttgaaccagatttattttggagaggtggtttggagttattgcctaagataaataattcatttgtaaatccttcttaa

SEQ ID NO: 11370 - protein, 269 aa, Prochlorococcus marinus
MESLNILISNDDGVFAEGLRALAKSAQKRGHKVTVVCPDQERSATGHGLTLQSPLRVERADELFERGIKAWGCSGTPADCVKLALSELLDNKPDLVLSGINHGPNLGTDIFCSGTVAAAMEGTLENVPSMAISVASFKWKNFEFAGEMAINIAEQAIKDSWPPSLLLNLNIPPCEKNKIKELSWTRLSIRKYKNQFSKREDPRGDDYYWLAGEVVLDLKSKGYGPKNWPSDVSQIQENKISLTPVEPDLFWRGGLELLPKINNSFVNPS

SEQ ID NO: 11371 - DNA, 810 bp, Prochlorococcus marinus
  CDS (1)..(810): transl_table=11
atgactccgttgcaaattctgattagcaatgatgacggagttttagctgaaggcgtccgctgcctagccgctgccgccgccagccgcggccatagggtcacagtggtctgtcccgaccatgagcgctctgctaccggccatggcctcaccatccatacccccatccgagccgaacgcgtcgatgagctctatgggccaggtgtgaaggcttggtcctgcagtggcacgccggcagattgcgtaaaactggccctctcggaactcttggcagagaagcccgatctagtgctctctggggtcaatcatggccccaacttaggaactgatgtgttctgttcaggcacggtggccgcagccatggaaggcacccttgagggattgccggcgcttgcggtcagcgtcgcctgcttccaatggagggatttccaggctgctgcccaattagcgatggatgttgcagagaatgcattggcagaccactggcccaacaacctgctccttaacctcaacattcccccctgccatctagagcagatgggatcactgcgctggactcgcctttcaatacgccactacgaggaacagttcagtcgacgtgtcgatccgcacagccgcacctacttctggttagcaggagaagtggtgaaagatcttgagaccgccggtgatggtccacgcgactggcccagcgacgtggcccaaatcgaaacaaattccccctccttgacacccatccaacccgatctgttttggcgtggtgatctttctgctctaccagcagcatgcgtagccaatcaaccagtgcgataa

SEQ ID NO: 11372 - protein, 269 aa, Prochlorococcus marinus
MTPLQILISNDDGVLAEGVRCLAAAAASRGHRVTVVCPDHERSATGHGLTIHTPIRAERVDELYGPGVKAWSCSGTPADCVKLALSELLAEKPDLVLSGVNHGPNLGTDVFCSGTVAAAMEGTLEGLPALAVSVACFQWRDFQAAAQLAMDVAENALADHWPNNLLLNLNIPPCHLEQMGSLRWTRLSIRHYEEQFSRRVDPHSRTYFWLAGEVVKDLETAGDGPRDWPSDVAQIETNSPSLTPIQPDLFWRGDLSALPAACVANQPVR

SEQ ID NO: 11373 - DNA, 750 bp, Pseudomonas syringae pv
  CDS (1)..(750): transl_table=11
atgcgtattctgatatcaaatgatgacggggtgaacgcgcccggtcttgtcgcgctccatgcggcgctggcggactatgccgagtgcgtggtgatcgcccctgatcaggacaaaagcggtgccagcagttccctgacactcgaccggcccttgcacccacatacactggccaatggcttcatcagtctcaatggtacgccgaccgactgcgtgcatctggggattcatgggttattggagaatcaaccggacatggtggtttcaggtatcaacctgggtgccaatctgggcgacgatgtactgtattccggaacggtcgctgcagcgcttgaagggcgttttctgcagcgtccgtcgtttgccttttcgtttttgtcacgtcagccggataatctggcgacggcggcgcattatgcgcgtttgctggttgaggcccatgagcaactcgacctgccaccccgcacggtactgaacgtgaatattccgaacctgccgcttgagcatatccgcggcattcaactgacccgactggggcaccgtgcccgtgctgcggcaccggtaaaggttgtcgacccgcgtggtcgtgccggctactggattgccgctgccggcgatgtcgaggacggcggtgctggcaccgacttccatgcggtcatacagggttatgtatcgattacgccgttgcagctggatcgaacttatcaggacggattcagcagcctgaatacctggctggagggtcttcgttga

SEQ ID NO: 11374 - protein, 249 aa, Pseudomonas syringae pv
MRILISNDDGVNAPGLVALHAALADYAECVVIAPDQDKSGASSSLTLDRPLHPHTLANGFISLNGTPTDCVHLGIHGLLENQPDMVVSGINLGANLGDDVLYSGTVAAALEGRFLQRPSFAFSFLSRQPDNLATAAHYARLLVEAHEQLDLPPRTVLNVNIPNLPLEHIRGIQLTRLGHRARAAAPVKVVDPRGRAGYWIAAAGDVEDGGAGTDFHAVIQGYVSITPLQLDRTYQDGFSSLNTWLEGLR

SEQ ID NO: 11375 - DNA, 750 bp, Pseudomonas fluorescens
  CDS (1)..(750): transl_table=11
atgcgtattctgatttctaacgacgatggggtgactgcgcccggtcttgccgcgctatatgctgcgctggcggattacaccgagtgcgtggttatcgccccggaacaggacaagagcggtgccagcagttcgctgacactcgaccgtccgctgcacccgcagtacctggccaacggctttatcagcctcaatggcacaccgaccgactgcgtccatctggggctcaacggtttgctcgaacgcgagccggacatggtggtttcgggtatcaaccttggcgccaacctgggtgatgacgtgctgtattccggaacggtggcagccgccctcgagggccgctttctcaagcgcccgtcgtttgccttctcgctggtttcgcggcaggtcgacaacttgcccacggccgcctactttgcgcgcaaactggtcgaggcccacgccgggctcgatctgccaccgcgcacggtgttgaacgtgaacattcctaatctgccgatcgatcacattcgcggcattcaactgacccgtctcggccatcgcgcccgtgcggcggcaccgatgaaagtcgtggacccgcgcggcaaggccggttactggatcgcagcggcaggtgatgcggaagacggcgggccgggcaccgatttccatgcggtgatgcagggttacgtatccatcactccgttgcagctcgatcgcaccttcaatgatgccttcagaagtctcgacggctggctggaggggctcaactga

SEQ ID NO: 11376 - protein, 249 aa, Pseudomonas fluorescens
MRILISNDDGVTAPGLAALYAALADYTECVVIAPEQDKSGASSSLTLDRPLHPQYLANGFISLNGTPTDCVHLGLNGLLEREPDMVVSGINLGANLGDDVLYSGTVAAALEGRFLKRPSFAFSLVSRQVDNLPTAAYFARKLVEAHAGLDLPPRTVLNVNIPNLPIDHIRGIQLTRLGHRARAAAPMKVVDPRGKAGYWIAAAGDAEDGGPGTDFHAVMQGYVSITPLQLDRTFNDAFRSLDGWLEGLN

SEQ ID NO: 11377 - DNA, 750 bp, Pseudomonas syringae pv
  CDS (1)..(750): transl_table=11
atgcgtattctgatatcaaatgatgacggggtgaatgcgcccggtcttgtcgcgctccatgcggcgttggcggactacgccgactgcgtggtgattgcgcctgatcaggacaaaagtggtgccagcagttctctgacactcgaccggcccctgcatccgcacaccctggaaaatggcttcatcagtgtcaacggtacgcccaccgactgcgtgcatctgggcattcacgggctactggagcgtcaaccggacatggtggtttcaggcatcaacctgggggccaatctgggcgacgatgtactgtattccggaacggtcgctgcagccctggaagggcgttttctgcagcgcccgtcgtttgccttttcgtttctgtcacgtcagccggataatctggcgacggcggcgcattacgcgcgtttgctggtcgaggcccatgagcaactcgacctgccaccccgcacggtattgaacgtgaatattcccaacctgccgctcgagcatatccgcggcattcaattgacccgattggggcatcgtgcccgcgctgcagcaccgatcagggtcgtcgacccgcgtggccgtgcaggctactggatcgcggctgccggcgatgtcgaggacggcggtgccgggaccgactttcatgcggtcgtacaaggctacgtatcgatcacgccgttgcaactggatagaacctgtcaggacggattcagcagcctgaacacctggctggagggacttcgttga

SEQ ID NO: 11378 - protein, 249 aa, Pseudomonas syringae pv
MRILISNDDGVNAPGLVALHAALADYADCVVIAPDQDKSGASSSLTLDRPLHPHTLENGFISVNGTPTDCVHLGIHGLLERQPDMVVSGINLGANLGDDVLYSGTVAAALEGRFLQRPSFAFSFLSRQPDNLATAAHYARLLVEAHEQLDLPPRTVLNVNIPNLPLEHIRGIQLTRLGHRARAAAPIRVVDPRGRAGYWIAAAGDVEDGGAGTDFHAVVQGYVSITPLQLDRTCQDGFSSLNTWLEGLR

SEQ ID NO: 11379 - DNA, 780 bp, Pyrococcus kodakaraensis
  CDS (1)..(780): transl_table=11
atgcgaatcctcgtaacaaacgacgacgggatatattcaaacggcattcgtgctgccgtaaaagcgctctcaagtcttggagaagtctatgtggttgccccgctcttccagagaagcgccagtggaagggccatgactctccacaggcctataagagcaaggctcgtggacgtccctggggcaaaggttgcctacgggatagacggaactcccacggacagcgttatatttgccctggccaggtttggggactttgatttagctgtcagcggtataaaccttggcgagaacctcagcaccgagataacggtttcagggactgcatcggcagctatcgaagcggcaacccatgaggtcccaagtatagctataagccttgaggtagactggaaaaagaccctcggggaaggagagggcattgacttctcagttgcttcacatttccttaaaaggataacaagggcagtacttgagaagggtctcccagagggagtcgacatgcttaacgtcaacgtaccaagcaacgcaactccagagacggaaattgcaataacccgcctagcaaggaagcgctactgtccaacgattgaagaaagggtagatcccagagggcatccctactactggatagttggacagaagagggaagagtttgagcccggaaccgacgcttacgctcttaagatcgagagaaaggtcagcgtaacaccgataaacattgatatgactgccagggtgaatttcgaggaagtaagaaaggtgctgtttgcacaaccgtga

SEQ ID NO: 11380 - protein, 259 aa, Pyrococcus kodakaraensis
MRILVTNDDGIYSNGIRAAVKALSSLGEVYVVAPLFQRSASGRAMTLHRPIRARLVDVPGAKVAYGIDGTPTDSVIFALARFGDFDLAVSGINLGENLSTEITVSGTASAAIEAATHEVPSIAISLEVDWKKTLGEGEGIDFSVASHFLKRITRAVLEKGLPEGVDMLNVNVPSNATPETEIAITRLARKRYCPTIEERVDPRGHPYYWIVGQKREEFEPGTDAYALKIERKVSVTPINIDMTARVNFEEVRKVLFAQP

SEQ ID NO: 11381 - DNA, 759 bp, Rhizobium loti
  CDS (1)..(759): transl_table=11
atgcgcattcttctgaccaatgacgacggcattcacgccgagggcctggcgtcgctcgaacgcgtcgcgcgtacactctccgacgatgtctgggtggtggcgccggagcaggaccagtccggctatgcgcattcgctgtcgatctcggagccgctgcggctgcgcaagatcggcgagaagcatttcgccgtgcgcgggacgccgaccgattgcgtcatcatgggcgtgaagaagatcctgcctggcgcgcccgacgtgatcctgtccggcatcaattcgggcgccaacatagccgacgacgtgacctattcgggaaccgtcgccggcgccatggaaggcgcgctgctcggcattcgctcgatcgcgcttagccagggctactcttatgtcggcgaggatcgcatcgttccctatgagaccaccgaggcgctggcgccggcgctgctgaagaagctcgtcgcgacgccgctgccggacggcgtgctgctcaacgtcaattttcccaactgccttcccgaagaagtcgttggcacggtggtcaccatgcaaggcaaactcgtgcatagcctgtgggtcgatgagcgccgtgacgggcgcggcctgccttactactggctgcgcttcggccgcgagccggtcgagggcaagcaaggcaccgacctccatgcgctgcgcaaccgtctggtgtcggtgacgccgctgcagctcgaccttaccgcgcatgagatccgtgaccagctgagcaaggcgcttgcatga

SEQ ID NO: 11382 - protein, 252 aa, Rhizobium loti
MRILLTNDDGIHAEGLASLERVARTLSDDVWVVAPEQDQSGYAHSLSISEPLRLRKIGEKHFAVRGTPTDCVIMGVKKILPGAPDVILSGINSGANIADDVTYSGTVAGAMEGALLGIRSIALSQGYSYVGEDRIVPYETTEALAPALLKKLVATPLPDGVLLNVNFPNCLPEEVVGTVVTMQGKLVHSLWVDERRDGRGLPYYWLRFGREPVEGKQGTDLHALRNRLVSVTPLQLDLTAHEIRDQLSKALA

SEQ ID NO: 11383 - DNA, 771 bp, Rhizobium meliloti
  CDS (1)..(771): transl_table=11
atgcgcatcctgctgacgaatgacgatggcattcacgccgagggcctctccgtgctggaacggatcgcccggacgatatcggacgacgtctgggtggtggcgccggaagtggaccagagcgggcttgctcattctctgacgctttcggagccgctgcgtctgcgcccggtttccgaacggcggttcgcgctccggggcacgccgaccgattgcgtgatcatggcggtcaagaagatccttgatcgcaagcccgacctcgtcctttccggcgtcaatgtcggcgccaatcttgctgacgatgtcacttattccggaacggtggccggcgccatcgagggaacgctgcagggcattcgttcgatcgcgctcagccaggcctatcaacatgccgtcggccgcgacgttccctgggatgtagccgagacgcacgcaccggcgctcatccgcacattgatgggtgtcgacttgccggacggaacgctcatcaacctgaactttccgaactgcgccgtcgatgccgttgcgggcgttgaagtcacatcgcagggcaagctcgaattcggtctcagcatcgacgagcgcacggacggacgcggctttccctatttctggctccgtttcggcgagcgtgccggcgatttccgttcaggcaccgacatcagggctctccgcgacaacaggatttcggtaaccccgcttaaactggacatgaccgatcatgccgctcaggaacgcatcgcgcaggcattgcgggaaggaagtgtcgcttga

SEQ ID NO: 11384 - protein, 256 aa, Rhizobium meliloti
MRILLTNDDGIHAEGLSVLERIARTISDDVWVVAPEVDQSGLAHSLTLSEPLRLRPVSERRFALRGTPTDCVIMAVKKILDRKPDLVLSGVNVGANLADDVTYSGTVAGAIEGTLQGIRSIALSQAYQHAVGRDVPWDVAETHAPALIRTLMGVDLPDGTLINLNFPNCAVDAVAGVEVTSQGKLEFGLSIDERTDGRGFPYFWLRFGERAGDFRSGTDIRALRDNRISVTPLKLDMTDHAAQERIAQALREGSVA

SEQ ID NO: 11385 - DNA, 768 bp, Rhodocyclus gelatinosus
  CDS (1)..(768): transl_table=11
atgcgcatcctgatcgccaacgacgacggttacctcgcccccggcatcgccgcgctggtcaaggcctgcgagggcctgggcacgatcgacgtcatcgccccggagcagaacgccagcggcacctccaacgcgctgacgctgaaccggccgctgtcggtcttcgaggcgcgtggcgagccggtgcagggcttccgcgtcgtcaacggcacgccgtccgactcggtgcacgtcgcgctgaccggcctcttgccgcacaagcccgacctggtgctctcgggcatcaaccagggcgcgaacatgggcgacgacacgctgtactcgggcaccgtcgccgcggcgatggaaggctatctgttcggcgtcccggcgatcgccttctcgcaggccgagaagggctggacgcacctggacgccgccgcggccacggcgcgcgccatcgtcgagcaggtgctcgccggcggcccgcccaccgggccctggctgctcaacgtgaacatccccaaccgggccgatgccgcgtcgctgccgcgcctggtgacgcgcctgggccgccgccacgccagcgagccggtgatccgccagaccaacccgcgcggcgagccgatctactggatcggcccggccggcgacgcgcgcgacgccggcgaaggcaccgacttccacgccgtcgcgcacggcgcggtgtcgatcacgccgctgcaggtggacctcaccgaccacgcgatgcgcggcgcctgggcgtcgcggctgggcgttccgctcgcatga

SEQ ID NO: 11386 - protein, 255 aa, Rhodocyclus gelatinosus
MRILIANDDGYLAPGIAALVKACEGLGTIDVIAPEQNASGTSNALTLNRPLSVFEARGEPVQGFRVVNGTPSDSVHVALTGLLPHKPDLVLSGINQGANMGDDTLYSGTVAAAMEGYLFGVPAIAFSQAEKGWTHLDAAAATARAIVEQVLAGGPPTGPWLLNVNIPNRADAASLPRLVTRLGRRHASEPVIRQTNPRGEPIYWIGPAGDARDAGEGTDFHAVAHGAVSITPLQVDLTDHAMRGAWASRLGVPLA

SEQ ID NO: 11387 - DNA, 786 bp, Rhodospirillum rubrum
  CDS (1)..(786): transl_table=11
atgttttcgccgctgaccgatctttcccgcgcgcgcatcctgctgtccaatgacgacggcttcgaagccgaaggtctggccgtgctcgaacgggtggcgcgcaccttgtccgacgacgtgtggatcgtcgccccggaaaccgaacaaagcggcgccggccacgccctgaccatccatgatcccttgcgcttccgggcgcgcggcgagaagcgcttttcggtgcgcggcacccccaccgactgcgtgctggtggcggtcaaccacctgatggaccggccgcccgatctggtggtgtcggggatcaatcgcggcggcaatctgggcgaggatgtccattactcgggcaccgtcgccgcggcgatggaggggaccttgcttggcctgcgcgccatcgccctgtcgcaggtgtttgaaaccaacggcacgggcatcgccgatcccttccaggtggcggcgacccatgccagcgacgtgatccgccgggtctgcgggcggccgtggaaccgtcaggtgctgatcaacgtcaatttccccgattgtccgctcgacgcggtgacggggatcgaactgaagcgccaggggcggcgcaagatgggcgatgatatcgaagagcgccgcgatccgcgcgatcgcccctatctgtggatcggcgcccagcgcaaggaagaccgcaagacggcggggaccgatatggaggcgatctctcgcggcgccatcaccgtgaccccgctgtgtgtcgatatgaccgatctgccgacgatcgaggcgttgacgggggccttttga

SEQ ID NO: 11388 - protein, 261 aa, Rhodospirillum rubrum
MFSPLTDLSRARILLSNDDGFEAEGLAVLERVARTLSDDVWIVAPETEQSGAGHALTIHDPLRFRARGEKRFSVRGTPTDCVLVAVNHLMDRPPDLVVSGINRGGNLGEDVHYSGTVAAAMEGTLLGLRAIALSQVFETNGTGIADPFQVAATHASDVIRRVCGRPWNRQVLINVNFPDCPLDAVTGIELKRQGRRKMGDDIEERRDPRDRPYLWIGAQRKEDRKTAGTDMEAISRGAITVTPLCVDMTDLPTIEALTGAF

SEQ ID NO: 11389 - DNA, 786 bp, Rhodobacter sphaeroides
  CDS (1)..(786): transl_table=11
atgcgcatcctgatcacgaacgacgacggcatcaacgctcccggcctcgaggtgctcgagcagatcgccctcgaactggccggccccgagggcgaggtctggaccgtcgctcccgccttcgagcagtccggcgtctcgcacgcgatcagctacacgcatccgatgatgatcgccaagctcggtccgcgccgctacgcagcggagggcagccccgccgactgcgtgctcgccgcgctctacgacgtgctgcagggcgcccgccccgacctcgtgctctcgggcgtgaaccggggcaacaactccgccgagaacgtgctctattccggcacggtgggcggcgcgctcgaggcggcgctgcagggcctgcccgccatcgccctgtcccagttcctcggccccgaaacggaggggctggccgatccgttcgaatgcgcccgcacccatggcgcgcgcatcgtacgcctcctgctcgagcgcgggctctgggacggcgaggactaccggctgttctacaacgtgaacttcccgcccgtgccggctgcgaacctgcgcggccaccgcgtggcggcgcagggcttccggcgcgacacctccttcggggtcgagccgcacatgtcgccctcgggtcgccgcttcctctggatccggggcggcgcccagcagagcccgacgctgcccggcaccgatgcggccgtgaacctcgaagggttcgtctcgatcacgccgctgcgcgcggatctgactgcgcatgaccggctggccgagctggaggcgctcatcggatga

SEQ ID NO: 11390 - protein, 261 aa, Rhodobacter sphaeroides
MRILITNDDGINAPGLEVLEQIALELAGPEGEVWTVAPAFEQSGVSHAISYTHPMMIAKLGPRRYAAEGSPADCVLAALYDVLQGARPDLVLSGVNRGNNSAENVLYSGTVGGALEAALQGLPAIALSQFLGPETEGLADPFECARTHGARIVRLLLERGLWDGEDYRLFYNVNFPPVPAANLRGHRVAAQGFRRDTSFGVEPHMSPSGRRFLWIRGGAQQSPTLPGTDAAVNLEGFVSITPLRADLTAHDRLAELEALIG

SEQ ID NO: 11391 - DNA, 762 bp, Salmonella choleraesuis
  CDS (1)..(762): transl_table=11
atgcgcatattgctgagtaacgatgacggggttcacgcgcccggtatacaaacgctggcgaaagcgctgcgtgagtttgctgatgtacaggtcgtagccccggatcgtaaccgcagcggcgcgtctaattccctcacgctggaatcttcgcttcgtacttttacctttgataatggcgatatcgctgtacagatggggacgccgaccgattgcgtctatctgggcgttaatgccttaatgcgtccgcgtccggatattgtcgtttccggtattaacgcgggtccgaatctgggcgatgatgtgatctattccggtactgtcgccgcggcgatggaaggtcgtcatctcggctttccggcattagcggtctcccttaacggctatcagcattatgatacggctgcggccgtgacttgcgcgcttttgcgagggttaagccgggagccgttgcgtaccgggcgtattctcaacgtgaatgtcccggatctaccgttagcgcaggttaaaggcattcgcgtgactcgctgtggtagccgccatccagcggataaagtaatcccgcaggaagatccgcgcggtaatacattgtactggattggcccgccgggcgataaatacgatgccgggccggataccgatttcgcggcggtggatgaaggctacgtctccgtcacgccgttgcatgtggatttaaccgcgcacagcgcgcatgatgtggtttcagactggttagacagcgtgggagttggcacgcaatggtaa

SEQ ID NO: 11392 - protein, 253 aa, Salmonella choleraesuis
MRILLSNDDGVHAPGIQTLAKALREFADVQVVAPDRNRSGASNSLTLESSLRTFTFDNGDIAVQMGTPTDCVYLGVNALMRPRPDIVVSGINAGPNLGDDVIYSGTVAAAMEGRHLGFPALAVSLNGYQHYDTAAAVTCALLRGLSREPLRTGRILNVNVPDLPLAQVKGIRVTRCGSRHPADKVIPQEDPRGNTLYWIGPPGDKYDAGPDTDFAAVDEGYVSVTPLHVDLTAHSAHDVVSDWLDSVGVGTQW

SEQ ID NO: 11393 - DNA, 771 bp, Symbiobacterium thermophilum
  CDS (1)..(771): transl_table=11
atggcgctggtccttctcaccaacgacgacggcattttcgctcccggcatcaacgcactgcgcgcccgcatggagcagatccccggcctggaagtgtgggccgtggcacccgaccgggagcggtcggccagcgggcacgcgatcaccacgtaccgcccgttgttcccggtgcgggtggagatccccggagccgtggcgccgtgcatctccgtgaccggcacaccggccgactcggccaagctggcgatcgaggcgatcctgccccggcggccggacctggtcatctcgggcatcaaccggggcgcgaacctgggcaccgatatcttctattccggcacggttgcggcggcgctggagggacccatcctgggcatccccgccctcgccgtctccctggactcgatgacatcgtccgactactcggcggccgccgacttcgccgcccagctcgccctgaaggtgctggaggaggggctgccggagggaacgctgctgaacgtcaacgtccccgccctgccccgtgaggcgatcaagggcgtgcgggtgaccaaggtcggccggaggatctaccgcgaccagtgggtgcgccgcatgcacccgcgcggccaggagtactactggctggccggcgaactggccgagattcacaacgaccgcgagtccgacgtatcggcggtggaggcggggtacatctccgtgacgccggtgcacctcgacctcacccgctacgaccagatggaccggctccgtcagtggaacctgaccttctga

SEQ ID NO: 11394 - protein, 256 aa, Symbiobacterium thermophilum
MALVLLTNDDGIFAPGINALRARMEQIPGLEVWAVAPDRERSASGHAITTYRPLFPVRVEIPGAVAPCISVTGTPADSAKLAIEAILPRRPDLVISGINRGANLGTDIFYSGTVAAALEGPILGIPALAVSLDSMTSSDYSAAADFAAQLALKVLEEGLPEGTLLNVNVPALPREAIKGVRVTKVGRRIYRDQWVRRMHPRGQEYYWLAGELAEIHNDRESDVSAVEAGYISVTPVHLDLTRYDQMDRLRQWNLTF

SEQ ID NO: 11395 - DNA, 744 bp, Thermotoga maritima
  CDS (1)..(744): transl_table=11
atgagaattctggtaaccaacgacgacgggatacagtctaaggggatcatcgtcctcgcagagcttctttccgaggaacacgaggtgttcgtggtggctcccgataaagagaggagcgcaactggtcacagcatcaccatacacgttccgctctggatgaagaaggttttcatctcagagagggtggttgcgtactccactacaggaacgcccgcggactgtgtgaaactcgcctacaacgtggtcatggataaaagggtcgatctcatcgtgagtggtgtgaacagggggcccaacatgggcatggatattctccactctgggacggtctcgggtgcgatggaaggtgccatgatgaacattccttcgattgccatatcgagtgctaactacgagagtcccgatttcgaaggagcggcacgttttttgatcgactttctgaaagaattcgacttctcactcctcgatcctttcaccatgctgaacataaacgtgcctgctggtgagataaagggatggagattcacaaggcagagcagaagaaggtggaacgattacttcgaagagagagtctcaccctttggggagaagtactactggatgatgggagaggtcatcgaagacgacgatagagacgatgttgactacaaggcggttagagaagggtacgtctccatcactccgatacatccctttctcacgaacgaacagtgtctgaagaagttaagggaggtgtacgactga

SEQ ID NO: 11396 - protein, 247 aa, Thermotoga maritima
MRILVTNDDGIQSKGIIVLAELLSEEHEVFVVAPDKERSATGHSITIHVPLWMKKVFISERVVAYSTTGTPADCVKLAYNVVMDKRVDLIVSGVNRGPNMGMDILHSGTVSGAMEGAMMNIPSIAISSANYESPDFEGAARFLIDFLKEFDFSLLDPFTMLNINVPAGEIKGWRFTRQSRRRWNDYFEERVSPFGEKYYWMMGEVIEDDDRDDVDYKAVREGYVSITPIHPFLTNEQCLKKLREVYD

SEQ ID NO: 11397 - DNA, 768 bp, Thermoanaerobacter tengcongensis
  CDS (1)..(768): transl_table=11
atgggaaaaacctcagtactgctcacaaatgacgatggagtacaggcaaaggggatactctacttagcagaatatttgaaagaaaacggatttgatgtagtagttgtagctccagaaaaagaaagaagtgccataagtcatgcaataacgcttcacaaacctttgagactaaaacccgttagagaagaagaaaatttacgcatatatgcgataaatggaaccccttccgattgcgtcaagatggggattgaagttgtgatggagaaaaatcctgatatcataatttctggaataaacaatggactaaacatgggcacagacatattgtactctggcacagtttctgctgctatagagggggcactttatggcatacctgctcttgccgtatctttagaagaagacggagactttgaagaacagcgcatgtacatttttttaaaaaaattgatagagaaagtcttggaagaaggattgccaaaaaacactttattaaatgttaacatcccagattttagaaaaggaattaatggaataagaattacaattttaggaaaaagaatttacacagagacttttcaaaagaactacgaccctaggggaaaagagtattattggatggccggtaaaatttcggaaattgacaatgacgaaagaacagatattgtttcagtcaaaaaaggttacatttcgattactcccattcattttgaccttacagactatgaggcagttaagaaattgagttcctggaaaattgacatataa

SEQ ID NO: 11398 - protein, 255 aa, Thermoanaerobacter tengcongensis
MGKTSVLLTNDDGVQAKGILYLAEYLKENGFDVVVVAPEKERSAISHAITLHKPLRLKPVREEENLRIYAINGTPSDCVKMGIEVVMEKNPDIIISGINNGLNMGTDILYSGTVSAAIEGALYGIPALAVSLEEDGDFEEQRMYIFLKKLIEKVLEEGLPKNTLLNVNIPDFRKGINGIRITILGKRIYTETFQKNYDPRGKEYYWMAGKISEIDNDERTDIVSVKKGYISITPIHFDLTDYEAVKKLSSWKIDI

SEQ ID NO: 11399 - DNA, 744 bp, Thiobacillus denitrificans
  CDS (1)..(744): transl_table=11
atgcgcatcctgctttccaacgacgacggttatttcgccccgggcctggcggcgctggccgaggcgctggcgccactcgccgaggtcacggtcgtcgcgcccgagcgcgaccgcagcggcgcgtccaattcgctcacgctcgatcgtccgctcatgctgcggcaggccccgagcggtttctattacgtcaacggtacgccgaccgattgcgtccacctcgccgtcaccggcatgctcgaccatctgcccgacatggtgatctcgggcatcaatcacggcgcgaacatgggcgacgacacgatttattcgggcacggtcgccgcggcgaccgagggctatctgctcggcatcccgtcgatcgccgtctcgctcgcgaaccacaacgccctgtatttcgacacggccgcgcgcgtcgtcagcgacctcgtgcggcgtctgcagaacaatccgccgaccgagccgacgctgctcaatgtcaacgttcccgatcgcgcctgggatgcggtcagggggatcagcgtgacgcggctcggcaagcggcacaaggccgagtccgtcgtcaagacgtccaatccccgcgggcagaccgtctactgggtcggcgcggccggcgccgcgcaggacgccggcgagggcacggacttccatgccgtcgccaacggctatgtttcgatcaccccgctgcaaatggacctcacccgtttcagccagatggaaagcgtgacggcgtggctgaaaccctga

SEQ ID NO: 11400 - protein, 247 aa, Thiobacillus denitrificans
MRILLSNDDGYFAPGLAALAEALAPLAEVTVVAPERDRSGASNSLTLDRPLMLRQAPSGFYYVNGTPTDCVHLAVTGMLDHLPDMVISGINHGANMGDDTIYSGTVAAATEGYLLGIPSIAVSLANHNALYFDTAARVVSDLVRRLQNNPPTEPTLLNVNVPDRAWDAVRGISVTRLGKRHKAESVVKTSNPRGQTVYWVGAAGAAQDAGEGTDFHAVANGYVSITPLQMDLTRFSQMESVTAWLKP

SEQ ID NO: 11401 - DNA, 792 bp, Vibrio cholerae
  CDS (40)..(792): transl_table=11
atgaacaagagagccgcgattcagagagcgaagattaagatgaagattctactcagtaacgatgatggcgtttacgcacaaggcattcatgctttggcggatgcattgcgtgatttagcggagattgtgattgtcgcgccggatcgtaaccgcagtggtgcctcgaattcactgaccttagagcatccattacgagtgtcgcaaattgccgagaatacctattccgtgcaaggtaccccgactgattgcgtgcactttgcgcttaatgaactgatgaaagacgcgctaccggatctggtactgagcggaatcaatcacggagctaacttgggtgatgatgtgctctattccggtacggtggcggcggcaatggaagggcattttcttggcgtgcagtcgatcgccttttctctggcgggaactactcattttgctagtgctgctcactttgtgcgtcaattggtcgagcaacatctggctaacccgattccgaccaatcgcttacttaacgtgaatattccggatcgacctttagaactcattcaaggtattgaagtcacacgcttaggtgcgcggcatcacgccgaaagcatgataaagcagaaagatccgcgtgggcatgatatttattggcttggtcctccgggtaaagagcaagatgccggtccgggaacggattttcatgcgattgaacgtggctgggtgtcactcacgccgctacaagttgacctaacggcacatgagtcactgcgtagcatggatcattggttaaaggaaaaggtgaatggctaa

SEQ ID NO: 11402 - protein, 250 aa, Vibrio cholerae
MKILLSNDDGVYAQGIHALADALRDLAEIVIVAPDRNRSGASNSLTLEHPLRVSQIAENTYSVQGTPTDCVHFALNELMKDALPDLVLSGINHGANLGDDVLYSGTVAAAMEGHFLGVQSIAFSLAGTTHFASAAHFVRQLVEQHLANPIPTNRLLNVNIPDRPLELIQGIEVTRLGARHHAESMIKQKDPRGHDIYWLGPPGKEQDAGPGTDFHAIERGWVSLTPLQVDLTAHESLRSMDHWLKEKVNG

SEQ ID NO: 11403 - DNA, 777 bp, Vibrio parahaemolyticus
  CDS (1)..(777): transl_table=11
atggaactggattcactaaatacaaaacctttaagaattctaattagtaatgacgacggtgtgcatgctcaaggaattcacgcgttagcggatgagctgagaagcatcgcggaagtgatcattgttgccccagaccgaaatcgttctggtgcatcaaactcattgactttggaacagcctctgcgagtctcagaaattgcccctaatacttattcggttcaagggacaccgacagattgcgttcattttgctctaaatgagctgatgaaagatgacctgccagatcttgtattatctggcattaatcatggtgcaaatctgggggatgacgttctgtactctggtaccgtcgctgcagcaatggaagggcactttcttggcgtgcaagccattgcgttttcactggttggtaaacgtcattttgagtcggctgctaaaattgctcgacagttggttgagcaacacttggcagcgccaatcccaaccaaccgtttgttgaacgtaaacgtacctgatttgcctctcgagagtcttggtgaaatcgaagtgacccgtttaggtgctcgtcatcacgcagagaatatgatcaagcagaaagatccgcgtgggcatgatatctattggttagggcctccggggaaagaacaagatgcgggtgaaggtaccgacttctatgcgattgagcacggtcgagtttctattaccccactgcaagtagatctcacggctcatgagtctctgcgtgcgatggatagttggttgaaggaagagaagtaa

SEQ ID NO: 11404 - protein, 258 aa, Vibrio parahaemolyticus
MELDSLNTKPLRILISNDDGVHAQGIHALADELRSIAEVIIVAPDRNRSGASNSLTLEQPLRVSEIAPNTYSVQGTPTDCVHFALNELMKDDLPDLVLSGINHGANLGDDVLYSGTVAAAMEGHFLGVQAIAFSLVGKRHFESAAKIARQLVEQHLAAPIPTNRLLNVNVPDLPLESLGEIEVTRLGARHHAENMIKQKDPRGHDIYWLGPPGKEQDAGEGTDFYAIEHGRVSITPLQVDLTAHESLRAMDSWLKEEK

SEQ ID NO: 11405 - DNA, 768 bp, Vibrio vulnificus
  CDS (1)..(768): transl_table=11
atggaagataagcaagctaaaccgctgcgcattttgctgagtaatgacgatggcgttttcgcagaaggtattcgcacgttagccagtgagctaagaacattggcagaagtgatcatcgttgctccggatcgcaatcgctcaggagcgtcgaactcgttaacactggaacagccgctgcgagtgacctgtgttgaagaaaatgtgtattcagtgcaaggcacgccgacagattgtgtccattttgctttaaacgaactactgaaaaatgatctcccagacttagtgttaagtggcatcaatcatggcgccaatctgggggatgacgtgctttattcgggcacggtcgccgcagcgatggaagggcattttcttggcgtgcagtcgatcgctttttctttggttggcaaaacccactttaaaaccgcagcaaccattgccaagcggatcgttgagcaacatttagcgaaacctattccgaccaatcgtttattgaatatcaatattccggatctgccgctcgaacagctagaagagatacgagtgactcgtttaggcgcgcgccatcatgcagagaatatgatcaagcagcttgatccccgtggtcatgaaatctattggttaggccctccgggtaaagagcaagatgcgggggagggaaccgattttcatgcgattgaacaaggctatgtgtccattacaccactgcaagttgatttaactgcccatgaatcgctccgagcgatggatacttggctaaaggaaaagtaa

SEQ ID NO: 11406 - protein, 255 aa, Vibrio vulnificus
MEDKQAKPLRILLSNDDGVFAEGIRTLASELRTLAEVIIVAPDRNRSGASNSLTLEQPLRVTCVEENVYSVQGTPTDCVHFALNELLKNDLPDLVLSGINHGANLGDDVLYSGTVAAAMEGHFLGVQSIAFSLVGKTHFKTAATIAKRIVEQHLAKPIPTNRLLNINIPDLPLEQLEEIRVTRLGARHHAENMIKQLDPRGHEIYWLGPPGKEQDAGEGTDFHAIEQGYVSITPLQVDLTAHESLRAMDTWLKEK

SEQ ID NO: 11407 - DNA, 780 bp, Wolinella succinogenes
  CDS (1)..(780): transl_table=11
gtgcttaaacggattcttatcaccaatgacgatggctttgattcccctggacttctagcgcttaaagaggcgctttgtgatgtggctcacctcaccgtggtggctcctgcgaatgaaaaatcggcctgcgggcatgggctcacgctcactagccccttgcgattcattaagcttgatgatgatgtttataagctacgcgatggaaccccgacagattgcatctatttggcgctcaacgctctttacgaggagcatagcaagcctgatttgatcatcagtggaatcaatttaggttccaatatgggagaggatatcacctactcaggcacggctagtggagcgatggagggggtgatccatgggattccctcagttgccttctcgcaacttttgcacgataaaaacacctttggctttgactttgcgctagccaaaaaagtggtgcgcgagcttacattgaagattctctcgggcggatttcctttgggggatcgaaaatttctcaatgtcaatattccctatgtgggaattgaggagtttaaaggttacaaggtcaccgagatgggctatcgactctatggaaatgatgcgcatctgcaccgaaacccaaggggcgaggagcactactggttgggacttcaccctctagcttggaatgagcgcaataatgcaagagaatcggacttcaaagtggccactgaggggtatgtctccatcacgcccattaagcttgatctcaccagctatgaggatattaaggagcttgaagcgtggatttag

SEQ ID NO: 11408 - protein, 259 aa, Wolinella succinogenes
MLKRILITNDDGFDSPGLLALKEALCDVAHLTVVAPANEKSACGHGLTLTSPLRFIKLDDDVYKLRDGTPTDCIYLALNALYEEHSKPDLIISGINLGSNMGEDITYSGTASGAMEGVIHGIPSVAFSQLLHDKNTFGFDFALAKKVVRELTLKILSGGFPLGDRKFLNVNIPYVGIEEFKGYKVTEMGYRLYGNDAHLHRNPRGEEHYWLGLHPLAWNERNNARESDFKVATEGYVSITPIKLDLTSYEDIKELEAWI

SEQ ID NO: 11409 - DNA, 789 bp, Xylella fastidiosa
  CDS (1)..(789): transl_table=11
atgcgcgttcttgtcagtaacgacgacggtgtcgacgctcccggcatcaagattttggcggacgccctacgcaatgccggacacgaagtgatggttgttgccccggatcgggaccgttccggcgccagcaactcacttacattggacacaccgatcagagccaaacaaatcgacatgcatacttacagtgtcgccggcacacccaccgactgcgtgcatctggcactcaccggcctgctgaactacgacccagacatcgtcgtctccggaatcaacaacaccggcaacctcggagacgacgtgatttattccgggacagtatcggcagccatggaaggacgcttcctcggactccctgcagtcgccgtatcgttggtcactctctgccgcgaaggacagcaagcacctcaatatgaaaccgccgcacacgcagcaataaatattgtggcgcaactaaaaaccgacccgctcccagccgataccatcctcaacgtcaacgtgccagatgtgacttggcaacagatgcgcggcttcaaagtcacccggcttggcaatcgtcaccgctccgccccctgtctcacccaaaccgatccgcgcggacataccatctattggattggccccgcaggccctgaacaggacgccggcccaggaactgacttcgacgcagtacgtaacacatacatctccattaccccgattcacgtcgatctgacccgttaccaagccctggaaaatgtcacccgatggacggacagactcaccgcacacatggactggcccacatga

SEQ ID NO: 11410 - protein, 262 aa, Xylella fastidiosa
MRVLVSNDDGVDAPGIKILADALRNAGHEVMVVAPDRDRSGASNSLTLDTPIRAKQIDMHTYSVAGTPTDCVHLALTGLLNYDPDIVVSGINNTGNLGDDVIYSGTVSAAMEGRFLGLPAVAVSLVTLCREGQQAPQYETAAHAAINIVAQLKTDPLPADTILNVNVPDVTWQQMRGFKVTRLGNRHRSAPCLTQTDPRGHTIYWIGPAGPEQDAGPGTDFDAVRNTYISITPIHVDLTRYQALENVTRWTDRLTAHMDWPT

SEQ ID NO: 11411 - DNA, 765 bp, Yersinia pestis
  CDS (1)..(765): transl_table=11
atgatacggatattattgagtaacgatgatggtatttctgcgccagggatccagacgctggccagtgcattgcggggatttgctcaggtgcaaattgtggcacccgatcgtaaccgtagtggcgcttccaatgcattgactctggatagtgcattgcggatcactaccttatctaatggtgatattgcggtgcagcaagggacccccaccgattgcgtctatctgggtgtgaatgcgctgatgcgcccacggcctgacatcgttgtctctggtattaatgctggccctaatttaggggatgatgttatctattcgggtaccgtagcagcggcgatggaagggcgtcatttgggatacccagccttggctgtctcgctcaacggtcatcagcattacgatacggcggcggcagtgacttgccgtttattacgtgcgttacagcgcaaaccactgcgtaccggcaagatcctcaatataaatgttcctgatttgcctttagcggaaattaaagggattcgggtgacgcgttgtggtagccgccatccggcagagcaggtattttgtcagcaagatcccagagggcaagatctttattggatcgggccgccgggtgaaaagtatgatgcagggccagatactgactttgcggcggttgaacaaggttatgtatcaataacgccgcttcaagtcgatttaacggcttatatggcacaagaagtggttgaaagttggttagccaatactgaggttgacggggaatggtaa

SEQ ID NO: 11412 - protein, 254 aa, Yersinia pestis
MIRILLSNDDGISAPGIQTLASALRGFAQVQIVAPDRNRSGASNALTLDSALRITTLSNGDIAVQQGTPTDCVYLGVNALMRPRPDIVVSGINAGPNLGDDVIYSGTVAAAMEGRHLGYPALAVSLNGHQHYDTAAAVTCRLLRALQRKPLRTGKILNINVPDLPLAEIKGIRVTRCGSRHPAEQVFCQQDPRGQDLYWIGPPGEKYDAGPDTDFAAVEQGYVSITPLQVDLTAYMAQEVVESWLANTEVDGEW

SEQ ID NO: 11413 - DNA, 765 bp, Yersinia pseudotuberculosis
  CDS (1)..(765): transl_table=11
atgatacggatattattgagtaacgatgatggcatctctgcgccagggatccagacgctggccagtgcattgcgggaatttgctcaggtgcaaattgtggcacccgatcgtaaccgcagtggcgcttccaatgcattgactctggatagtgcattgcggatcaccaccttatctaatggtgatattgcggtgcagcaagggactcccaccgattgcgtctatctgggcgtgaatgcgctgatgcgcccacgacctgacatcgttgtctctggcattaatgctggccctaatttaggggatgatgttatctattcgggtaccgtagcggcggcgatggaagggcgtcatttgggctacccagccttggctgtctcgctcaacggtcatcagcattacgatacggcggcggcagtgacttgccgtttattacgtgcgttacagcgcaaaccactgcgtaccggcaagatcctcaatataaatgtgcctgatttgcctttatcggaaattaaagggattcgggtgacgcgttgtggtagccgccatccggcagagcaggtattttgtcagcaagatcccagagggcaagatctttattggatcgggccgccgggtgaaaagtatgatgctgggccagatactgactttgcggcggttgaacaaggttatgtatcgataacgccgcttcaagtcgatttaacagcttatacggcacaagaagtggttgaaagttggttagccaatactgaggttgacggggaatggtaa

SEQ ID NO: 11414 - protein, 254 aa, Yersinia pseudotuberculosis
MIRILLSNDDGISAPGIQTLASALREFAQVQIVAPDRNRSGASNALTLDSALRITTLSNGDIAVQQGTPTDCVYLGVNALMRPRPDIVVSGINAGPNLGDDVIYSGTVAAAMEGRHLGYPALAVSLNGHQHYDTAAAVTCRLLRALQRKPLRTGKILNINVPDLPLSEIKGIRVTRCGSRHPAEQVFCQQDPRGQDLYWIGPPGEKYDAGPDTDFAAVEQGYVSITPLQVDLTAYTAQEVVESWLANTEVDGEW

SEQ ID NO: 11415 - DNA, 768 bp, Zymomonas mobilis
  CDS (1)..(768): transl_table=11
atgcgtattctgatcaccaatgacgacggtatcgccgcacagggtatcaagattctggaagaaatcgctcataaaatttcagacgatgtaacggttgtcgcgccggacaaagaacgttccggcatggcacattctttgaccttaagcctgcccagccgtctctataaacatgatgaccgccattattcggtatcaggcacgccatctgactcggtggtgatgggcattaaagagattatgaaagataatccgcctgacctcgtcttgtctgggatcaatcatggtgccaatctggccgaagatgtcacctattccggtacggtatccgctgcaatggaaggtgccattgcaggcatccgttccatcggtctcagtcaggtttattcgcctgatttcaaaaatggcgcactttcttttgatacagccgtcagttggggcgaaaaagtcatcagacaactgattgactccactttgccgaaccggacattttacaatgtcaatttcccagcttgtgaaaatgacgatgtcaaaggtattcgggttgttgcccaaggtcatcgtgactatggccgcctgaatgttgaaaaaggcgtcgatcctcgcgggaaagactggtattggctggccttgggggaagcgatcagcaaagacaatctgaatggcgatcttgatctttcctatcaaaattatgtcaccgtcacaccgcttgcgcctaatttgacggatgtcgcttcgctgcaaccgctgacggatatactcgccaaatga

SEQ ID NO: 11416 - protein, 255 aa, Zymomonas mobilis
MRILITNDDGIAAQGIKILEEIAHKISDDVTVVAPDKERSGMAHSLTLSLPSRLYKHDDRHYSVSGTPSDSVVMGIKEIMKDNPPDLVLSGINHGANLAEDVTYSGTVSAAMEGAIAGIRSIGLSQVYSPDFKNGALSFDTAVSWGEKVIRQLIDSTLPNRTFYNVNFPACENDDVKGIRVVAQGHRDYGRLNVEKGVDPRGKDWYWLALGEAISKDNLNGDLDLSYQNYVTVTPLAPNLTDVASLQPLTDILAK

SEQ ID NO: 11417 - DNA, 966 bp, Zea mays
  CDS (1)..(966)
atggactccaccactgctgctgctaccgcggcggcggcgccggcaccggtgctgctggtgacgaacgacgacggaatcgacgcgccggggctccgcttccttgtcgaccgtctcgtcgccgcagggcgataccgcgtactcgtctgcgcgcccgacacagacaaatcgggtgtgagccactgcatcacatggcgccctgcactccgctgtaaacgtgttgatataataggtgctacagcatttggagtttcaggaactcctgctgactgtgcttctttaggcatctctggaaaactatttgatggtttggttcctgatctggtacttagtggaatcaacattggaaataattgtgggtaccatgtcatttattctggaacagttgctggtgctagggaggcattcttatatgggattcctgcaatagctatgtcatatgattgggttgcgggtcggagcagtgttaatgacctcaaggtgtctgcagaggtctgcatgcctctgataaatgctatcgtgactgagatcaagaatgggacttaccctcaaggatcattcttgaatgtagatgtacctacagatgctgcgcaccacaagggctacaaaattacaaaacaaggaacatatatggccagaattagttgggagcagacggtttacaagaagcctgcagtagaaagttaccagacagcaaacatggatgttgatggtgaaaaggatagcgaactagttacttcagaaaatgacctactgtttaagagagtgattgtagggagaagttccaatggagtggaaggagaggaaacggaccacaattccctagttgatggatatatcactgttactcctttgggtgctctttcccgcacagaaccagacgccataccctatttcaaagcttgtgtctcacgtctggttgataatttctcttctcctggctcttctttttctagaagcagaggatga

SEQ ID NO: 11418 - protein, 321 aa, Zea mays
MDSTTAAATAAAAPAPVLLVTNDDGIDAPGLRFLVDRLVAAGRYRVLVCAPDTDKSGVSHCITWRPALRCKRVDIIGATAFGVSGTPADCASLGISGKLFDGLVPDLVLSGINIGNNCGYHVIYSGTVAGAREAFLYGIPAIAMSYDWVAGRSSVNDLKVSAEVCMPLINAIVTEIKNGTYPQGSFLNVDVPTDAAHHKGYKITKQGTYMARISWEQTVYKKPAVESYQTANMDVDGEKDSELVTSENDLLFKRVIVGRSSNGVEGEETDHNSLVDGYITVTPLGALSRTEPDAIPYFKACVSRLVDNFSSPGSSFSRSRG

SEQ ID NO: 11419 - DNA, 21 bp, Artificial sequence
  primer
atgaccccatccccggtcctc

SEQ ID NO: 11420 - DNA, 21 bp, Artificial sequence
  primer
ttaatcaaagtttagatgatc

SEQ ID NO: 11421 - protein, 316 aa, Artificial sequence
  consensus sequence
  Variant (3)..(4): Xaa in position 3 to 4 is any amino acid
  Variant (9)..(12): Xaa in position 9 to 12 is any amino acid
  Variant (14)..(16): Xaa in position 14 to 16 is any amino acid
  Variant (18)..(30): Xaa in position 18 to 30 is any amino acid
  Variant (31)..(34): Xaa in position 31 to 34 is any or no amino acid
  Variant (37)..(40): Xaa in position 37 to 40 is any amino acid
  Variant (42)..(51): Xaa in position 42 to 51 is any amino acid
  Variant (53)..(66): Xaa in position 53 to 66 is any amino acid
  Variant (67)..(72): Xaa in position 67 to 72 is any or no amino acid
  Variant (76)..(76): Xaa in position 76 is any amino acid
  Variant (80)..(89): Xaa in position 80 to 89 is any amino acid
  Variant (90)..(94): Xaa in position 90 to 94 is any or no amino acid
  Variant (96)..(96): Xaa in position 96 is any amino acid
  Variant (98)..(98): Xaa in position 98 is any amino acid
  Variant (101)..(101): Xaa in position 101 is any amino acid
  Variant (103)..(103): Xaa in position 103 is any amino acid
  Variant (105)..(105): Xaa in position 105 is any amino acid
  Variant (107)..(111): Xaa in position 107 to 111 is any amino acid
  Variant (112)..(112): Xaa in position 112 is any or no amino acid
  Variant (114)..(114): Xaa in position 114 is any amino acid
  Variant (118)..(120): Xaa in position 118 to 120 is any amino acid
  Variant (122)..(122): Xaa in position 122 is any amino acid
  Variant (124)..(129): Xaa in position 124 to 129 is any amino acid
  Variant (131)..(132): Xaa in position 131 to 132 is any amino acid
  Variant (134)..(134): Xaa in position 134 is any amino acid
  Variant (136)..(165): Xaa in position 136 to 165 is any amino acid
  Variant (166)..(182): Xaa in position 166 to 182 is any or no amino acid
  Variant (184)..(184): Xaa in position 184 is any amino acid
  Variant (186)..(186): Xaa in position 186 is any amino acid
  Variant (188)..(215): Xaa in position 188 to 215 is any amino acid
  Variant (216)..(220): Xaa in position 216 to 220 is any or no amino acid
  Variant (222)..(222): Xaa in position 222 is any amino acid
  Variant (223)..(225): Xaa in position 223 to 225 is any or no amino acid
  Variant (227)..(251): Xaa in position 227 to 251 is any amino acid
  Variant (252)..(308): Xaa in position 252 to 308 is any or no amino acid
  Variant (311)..(315): Xaa in position 311 to 315 is any amino acid
ILXXNDDGXXXXGXXXLXXXXXXXXXXXXXXXXXAPXXXXSXXXXXXXXXXPXXXXXXXXXXXXXXXXXXXXGTPXDCVXXXXXXXXXXXXXXXDXVXSGXNXGXNXXXXXXYXSGTXXXAXEXXXXXXPXXAXSXXXXXXXXXXXXXXXXXXXXXXXXXXXXXXXXXXXXXXXXXXXXXXXNXNXPXXXXXXXXXXXXXXXXXXXXXXXXXXXXXXXXXGXXXXWXXXXXXXXXXXXXXXXXXXXXXXXXXXXXXXXXXXXXXXXXXXXXXXXXXXXXXXXXXXXXXXXXXXXXXXXXXXXXXXXXXTPXXXXXT

SEQ ID NO: 11422 - protein, 29 aa, Artificial sequence
  protein pattern
  Variant (3)..(3): Xaa in position 3 is Phe, Ile, Leu, Met or Val
  Variant (4)..(4): Xaa in position 4 is any amino acid
  Variant (5)..(5): Xaa in position 5 is Phe, Ile, Leu or Val
  Variant (6)..(6): Xaa in position 6 is Ala, Ser or Thr
  Variant (8)..(8): Xaa in position 8 is Phe, Ile or Val
  Variant (10)..(10): Xaa in position 10 is any amino acid
  Variant (11)..(11): Xaa in position 11 is any or no amino acid
  Variant (13)..(13): Xaa in position 13 is any or no amino acid
  Variant (15)..(21): Xaa in position 15 to 21 is any amino acid
  Variant (22)..(22): Xaa in position 22 is any or no amino acid
  Variant (24)..(24): Xaa in position 24 is Ala or Gly
  Variant (26)..(26): Xaa in position 26 is any amino acid
  Variant (27)..(27): Xaa in position 27 is Ala, Gly or Ser
  Variant (28)..(28): Xaa in position 28 is Ala or Gly
  Variant (29)..(29): Xaa in position 29 is Ala or Ile
PDXXXXGXNXXGXNXXXXXXXXSXTXXXX

SEQ ID NO: 11423 - DNA, 816 bp, Synechocystis sp.
  CDS (1)..(816): transl_table=11
atgcttgagcttcatcagtttgaactgtcccaatattcggaaaaagtccgcctgattctcgactttaaagggttggattatcggacagtggaagtggtgccgggggttggtcagctcgatttgctccgtctttctggacaaacaaaggttccagtgctcaaggatggggacattgtcattgcagattcgacggaaattgccctctacctagaccgtaaataccccgaaaattcccttttaccccacgatccggtgcaacggggacaatgcttgctgatggaagaatgggccgacgaatccattggtctgaagggtcgggttgccatggtgggggcgttgaaccaaaatcctggtctgcgggcttctattttgcccaaacaaaccccaggcattttcaaaaatttagtcagtgcagtacccccggctatgttagacctattgggcagtggcgttggttttggtggtgatgcggtcaaggaagccatgcggggcttgcatcaggacttggaggctttaactctgattctgcaacatcagccctacctaattggcgatcgcccaacgttggcagatttaacggtggcggcattgagtatggtgatcaaaatccccggcggaaattacttaaacattgcccaggagttgaagggtaagggcattcctggcttggcggataacagtgcctacagtgcattttttgaatggcgcgatcgcctttatcgggaatatcgccgcagtcatcaacaggacaataatcagaacaacggcagcggtagcagtaacaatagttcccccaccacaatcaccattgagtaa

SEQ ID NO: 11424 - protein, 271 aa, Synechocystis sp.
MLELHQFELSQYSEKVRLILDFKGLDYRTVEVVPGVGQLDLLRLSGQTKVPVLKDGDIVIADSTEIALYLDRKYPENSLLPHDPVQRGQCLLMEEWADESIGLKGRVAMVGALNQNPGLRASILPKQTPGIFKNLVSAVPPAMLDLLGSGVGFGGDAVKEAMRGLHQDLEALTLILQHQPYLIGDRPTLADLTVAALSMVIKIPGGNYLNIAQELKGKGIPGLADNSAYSAFFEWRDRLYREYRRSHQQDNNQNNGSGSSNNSSPTTITIE

SEQ ID NO: 11425 - DNA, 726 bp, Prochlorococcus marinus str. MIT 9301
  CDS (1)..(726): transl_table=11
atgattacattatatcaatttaggcatagtgctttttgtttaaaaacaagaatggctcttcatgcaaaaaaactacaatatcgagttgaagaagtaacacctggaataggccaatttgaaatctttaaattatcaggtcaaaaacaagtacctataatcgtcgatagtaatgatcaaattattaatgactcttcaactatttgtgaatatttagataaaaaaaatgaaaacaatccactctttccggaggatccaatattatttgcacaatgcaaactaattgaagactgggcagatactacaatggctacaacttgtagaaaagctttaataaaatctgcaattgaaaatccacaactaaggactgcattacttccagatgaaataccttcttcagttaaaagtattgttgataaattaccttttaaaaatcttagcaaaatttctaatgtagttttgtcttctaaagataatttagaactccaaaaattactagaagctttatcaaaatccttgatcaacaagaaatatttagttggagatagtttatcaatcgcagatatttcaattgctgctcaattatcccttctaaaatttccaaagtctgcaggaccaattctttcaggagagggaagccaagaatacataaacaacccttacttagaaaatcttttcatttggagaaacaacttagaagaatacctttttagtgctaactctcaataa

SEQ ID NO: 11426 - protein, 241 aa, Prochlorococcus marinus str. MIT 9301
MITLYQFRHSAFCLKTRMALHAKKLQYRVEEVTPGIGQFEIFKLSGQKQVPIIVDSNDQIINDSSTICEYLDKKNENNPLFPEDPILFAQCKLIEDWADTTMATTCRKALIKSAIENPQLRTALLPDEIPSSVKSIVDKLPFKNLSKISNVVLSSKDNLELQKLLEALSKSLINKKYLVGDSLSIADISIAAQLSLLKFPKSAGPILSGEGSQEYINNPYLENLFIWRNNLEEYLFSANSQ

SEQ ID NO: 11427 - DNA, 792 bp, Nostoc sp. PCC 7120
  CDS (1)..(792): transl_table=11
atgttaaaattataccaatgggaattatctcaatactcagaaaaagtgcggctaattctcgattacaaaggattggaataccgcaaaattgaggttacaccaggaattggacaagtagaattattcaggttaactggacaaaaacaagtaccagtattgaaagatggtaacagatatattgccgattcgacagcgatcgccaagtatttagacttagaatatccagaccgtcccctcataccacaagaccccaaacaaaggggtttaactttattaatagaagaatgggctgatgagtccatcggtattaaagggagaaaagcactattttctgctatcagtcaagaccaaagtttccgcaaagccttattacctacctcaacaccagacgttcttaaaaccttagttgaaggcgtacccaccgattttctgacagtgttgggttttggtgttggttacagtccagatgcggttaagtcagcgatcgcagatttaaaacaagacctagaagcacttacactattgttagcagacagtccttatttaactggagacgaacccactctagctgatttagccgtagctggtttatcaatactgttaaaattcccagagggttcttatttagacctacccgccagtattgcaggtaaaggtgtaccatcattagccgataaccctgattatgcagccttttttgcctggcgcgatcgcatctacacccaattccgcaaaccattaattggtaaatcacccatcggtggcgcgccaacctctattcaaattgattag

SEQ ID NO: 11428 - protein, 263 aa, Nostoc sp. PCC 7120
MLKLYQWELSQYSEKVRLILDYKGLEYRKIEVTPGIGQVELFRLTGQKQVPVLKDGNRYIADSTAIAKYLDLEYPDRPLIPQDPKQRGLTLLIEEWADESIGIKGRKALFSAISQDQSFRKALLPTSTPDVLKTLVEGVPTDFLTVLGFGVGYSPDAVKSAIADLKQDLEALTLLLADSPYLTGDEPTLADLAVAGLSILLKFPEGSYLDLPASIAGKGVPSLADNPDYAAFFAWRDRIYTQFRKPLIGKSPIGGAPTSIQID

SEQ ID NO: 11429 - DNA, 726 bp, Prochlorococcus marinus subsp. marinus str. CCMP1375
  CDS (1)..(726): transl_table=11
atgttggaactctatcaatttgagcattcagcattttgtctgaaggtccggttgttcttgcaagccaaaaacctgcaatacaaagtcgttgaaatcactcctggaatcggccaaattaatgtatttaaactttctggtcaaaggcaggtgcctgttttaaaagatggtgaaactattgtctctgactcaagtgaaattattcaatatatagaaactatcacaaatgaacctgagcttttacctaaaaaacctcacgaagcagcaatggctcatcttatcgaagattgggcagatacaaccttggcaaaagcggctcgtttggaactcatcaaagcagcagcaatagacccatcattaagaaaagcgctattacctaatgatttaccaaactcatttaaaggtttaattgacaacttgccttgtgaatttatgaatggtttaacagaagttctgaatcaagggcaaagtactgcattactcaacagtcttgaaaaactatcaaattctgtttcttcacaaccatggctggttggagattctctaagtattgcagatatagcagtagcagctcaattgtccttactaagatttcctttttcatcaggagaatctctttttggcaaaggatgtcttggttttgcagacaatcctcgattagatcctttatttacttggcgtgatcagcttgaaaagaaattaatagagactgatccagcaattttataa

SEQ ID NO: 11430 - protein, 241 aa, Prochlorococcus marinus subsp. marinus str. CCMP1375
MLELYQFEHSAFCLKVRLFLQAKNLQYKVVEITPGIGQINVFKLSGQRQVPVLKDGETIVSDSSEIIQYIETITNEPELLPKKPHEAAMAHLIEDWADTTLAKAARLELIKAAAIDPSLRKALLPNDLPNSFKGLIDNLPCEFMNGLTEVLNQGQSTALLNSLEKLSNSVSSQPWLVGDSLSIADIAVAAQLSLLRFPFSSGESLFGKGCLGFADNPRLDPLFTWRDQLEKKLIETDPAIL

SEQ ID NO: 11431 - DNA, 726 bp, Prochlorococcus marinus subsp. pastoris str. CCMP1986
  CDS (1)..(726): transl_table=11
atgattacattatatcaatttagacatagcgctttttgcttaaagacaagaatggctcttcacgcaaagaaattgcaatatagagttgaagaagttacaccaggcttaggtcaatttgaaatctttaagatatcaggtcaaaaacaagtcccaataattgttgatgataatgatcaaattattagtgactctacaattatttgcgaatatataaataaaaaaaatgataataatccactttttccaaaagatcctttattgtttgcacaatgcaaattaatagaagattgggctgacactactatggcttcaacttgtagaaaagctctgattaaatcagcaatagagaatccacaactacgcactgctttacttccagacgaaataccatcttcagtaaaaggtttagttgataaattaccttttaaaaatcttagtaaaatttctaatgtagttttttctaccaaagacaatttagaactgcaaaaaatattagaggctttatctaaagccctaattaataaaaaatatttgataggcgataatttatcaatagctgatattgcaattagtgcacaattatctcttcttaaatttccaaaatcatcgggaccaattctttcaggggaaggttgtcaagaatacataaataatccttatttagaaaatatatttatttggagaaacaacatagaagaatatctttttagtgctaactctcaataa

SEQ ID NO: 11432 - protein, 241 aa, Prochlorococcus marinus subsp. pastoris str. CCMP1986
MITLYQFRHSAFCLKTRMALHAKKLQYRVEEVTPGLGQFEIFKISGQKQVPIIVDDNDQIISDSTIICEYINKKNDNNPLFPKDPLLFAQCKLIEDWADTTMASTCRKALIKSAIENPQLRTALLPDEIPSSVKGLVDKLPFKNLSKISNVVFSTKDNLELQKILEALSKALINKKYLIGDNLSIADIAISAQLSLLKFPKSSGPILSGEGCQEYINNPYLENIFIWRNNIEEYLFSANSQ

SEQ ID NO: 11433 - DNA, 726 bp, Prochlorococcus marinus str. MIT 9313
  CDS (1)..(726): transl_table=11
atgatggaactgcatcaattccgccattccgccttctgtctcaaggtgcggatggtcttgcaggccaagggtttgacttaccaggtggtggaagttacccccgggttaggacagctcaacgtgtttcgcttgtcaggtcagcgtcaggtcccggtacttgtcgatggcgatgttgttttggcagattccagcactattgctcgacatctagaggctaagcagccggaaccacccctcattccggttgatccacagcaggccgcgcaggtgtacttgattgaagattgggctgatacgacattggcgcgggcaggccggtcagctttgttgcaggctgctgccttggattctgagttgcgtttagctcttcttccagaagatttgccaactcccttgcgtcaggtcatgggagatctccctggggggttgttgaacggtgcctctgagatcattggcaaggcagagagggttgagttattaacgagcctcgaacaattggctgatttgatgcagaaaaggtcctggctagtaggagatgcgatgagcttggctgatttagctgtagccgctcagatttctttaatgcgtttcccagcctcggctggggcagcacttgccggtaaaggtgtgttcggcctgagtgatcacccgcggctgcagcccttattccactggagggatcagcttgagttgtcattgcttgagaaggatgactcagcccgatga

SEQ ID NO: 11434 - protein, 241 aa, Prochlorococcus marinus str. MIT 9313
MMELHQFRHSAFCLKVRMVLQAKGLTYQVVEVTPGLGQLNVFRLSGQRQVPVLVDGDVVLADSSTIARHLEAKQPEPPLIPVDPQQAAQVYLIEDWADTTLARAGRSALLQAAALDSELRLALLPEDLPTPLRQVMGDLPGGLLNGASEIIGKAERVELLTSLEQLADLMQKRSWLVGDAMSLADLAVAAQISLMRFPASAGAALAGKGVFGLSDHPRLQPLFHWRDQLELSLLEKDDSAR

SEQ ID NO: 11435 - DNA, 726 bp, Synechococcus sp. WH 8102
  CDS (1)..(726): transl_table=11
atgctggagctccatcaattcagccactccgccttctgcctaaaggtgcggatggtgctgcaggccaaagggctcagcttccgcaccgtggaggtgacgccgggcatcggtcaggtggcggtgttccgcctttcgggacaacggcaggtgccggtgctcgttgatggcgaccaggtgattgccgattcttctgcagttgcccgtcatctggaacagcgcgaagccgatccggcgctgattcctgccgatccgcgtcaggcggctcagatgcatctgatcgaagactgggctgacaccaccctggccatggccggtcgcacggccctggtgcaggcggcggcgctggatccagagctgcgggtggcgctgcttcccgatgacctgcccgaccccgtgcggtcggtgatgggagccatccccggcggctgggtgaacaacgtcaccgaactggtgaaccaaggggagcgtgctgatctgctggcgagcctggaccagttggcggcctcggttgaggtgtccccctggctggtgggcgaaagcatgaccctggcagatatcgctgtggctgctcagctgtcgttgctgcgcttcccctcatccgccggtgcggctcttgctggcaagggggttccgggcctgagcgatcaccccaagctgcagccgctgttccagtggcgtgatcagatcgaactcaaattgatggagcggaccctggaagaagtgtga

SEQ ID NO: 11436 - protein, 241 aa, Synechococcus sp. WH 8102
MLELHQFSHSAFCLKVRMVLQAKGLSFRTVEVTPGIGQVAVFRLSGQRQVPVLVDGDQVIADSSAVARHLEQREADPALIPADPRQAAQMHLIEDWADTTLAMAGRTALVQAAALDPELRVALLPDDLPDPVRSVMGAIPGGWVNNVTELVNQGERADLLASLDQLAASVEVSPWLVGESMTLADIAVAAQLSLLRFPSSAGAALAGKGVPGLSDHPKLQPLFQWRDQIELKLMERTLEEV

SEQ ID NO: 11437 - DNA, 726 bp, Prochlorococcus marinus str. AS9601
  CDS (1)..(726): transl_table=11
atgattacattatatcaatttaggcatagtgctttttgtttaaaaacaagaatggctcttcatgcaaaaaaaatacaatatcgagttgaagaagtaacacctggaataggccaatttgaaatctttaaattatcaggtcaaaaacaagtacctgtaatagttgatagtaatgatcaagttattaatgactcttcaactatttgcgaatatatagataaaaaaaatgataacaatccactatttccagaggacccaatattatttgcacaatgcaaactaattgaagactgggcagatactacaatggctacaacttgtagaaaagcattaataaaatctgcaatagaaaatccacagctaagaacagcattacttccagatgaactaccttctacagttaaaagtattgttgataaattacctcttgaaaatcttagtaaaatttctaatgtagttttgtcttctaaagataatttagaactccaaaaattactggaagctttatcaaaatccttgatcaacaagaaatatttagttggagatcgtttatcaattgcagatatttcaattgctgctcaattatcccttcttaaatttccaaagtctgcaggaccaattctttcaggagaggggagccaagaatatataaacaacccttatttagaaaatcttttcatttggaggaacaacttagaggaatatctatttagtgctaactctcaataa

SEQ ID NO: 11438 - protein, 241 aa, Prochlorococcus marinus str. AS9601
MITLYQFRHSAFCLKTRMALHAKKIQYRVEEVTPGIGQFEIFKLSGQKQVPVIVDSNDQVINDSSTICEYIDKKNDNNPLFPEDPILFAQCKLIEDWADTTMATTCRKALIKSAIENPQLRTALLPDELPSTVKSIVDKLPLENLSKISNVVLSSKDNLELQKLLEALSKSLINKKYLVGDRLSIADISIAAQLSLLKFPKSAGPILSGEGSQEYINNPYLENLFIWRNNLEEYLFSANSQ

SEQ ID NO: 11439 - DNA, 726 bp, Prochlorococcus marinus str. MIT 9515
  CDS (1)..(726): transl_table=11
atgattacattatatcaatttagacatagccctttttgcttaaagacaagaatggctcttcacgccaagaaattacaatatagagttgaagaagttacaccaggcataggccagtttgaaatctttaagttatcaggtcaaaaacaagtccctgtaatcattgatgataacgatcaaattattagtgattcttcacttatttgcgaatatattaataagaaaaatgatcacaatccacttttccccgaagatcctttactgtttgcacaatgcaaattagtagaaaattgggctgatactacaatggcctcaacttgtaaaaaagctcttattaaatcagcaatagagaatccaaaactgcgtactgctttacttccagatgaaatcccatcctcattaaaaggattagttgataaattaccttttaaaaatcttagtaaaatttctaatgttgttttatcttctaaagacaatttagaactgcagaaaatattagaggcaatatcaaaatccctaattaacaaaaaatatttaataggtgataacttctcaatagctgatattgcaattgctgcacaattatctcttcttaaatttccaaaatcatcaggacccattctttcaggagaaggttgtcaagaatatataaataatccgtatttagaaaatatatttatctggaggaataatatagaagaatatatttttagtgctaactctcaataa

SEQ ID NO: 11440 - protein, 241 aa, Prochlorococcus marinus str. MIT 9515
MITLYQFRHSPFCLKTRMALHAKKLQYRVEEVTPGIGQFEIFKLSGQKQVPVIIDDNDQIISDSSLICEYINKKNDHNPLFPEDPLLFAQCKLVENWADTTMASTCKKALIKSAIENPKLRTALLPDEIPSSLKGLVDKLPFKNLSKISNVVLSSKDNLELQKILEAISKSLINKKYLIGDNFSIADIAIAAQLSLLKFPKSSGPILSGEGCQEYINNPYLENIFIWRNNIEEYIFSANSQ

SEQ ID NO: 11441 - DNA, 726 bp, Prochlorococcus marinus str. MIT 9303
  CDS (1)..(726): transl_table=11
atgatggaactgcatcaattccgccattccgccttctgtctcaaggtgcggatggtcttgcaggccaagggtttgacttaccaggtggtggaagttacccccgggttaggacagctcaacgtgtttcgcttgtcaggtcagcgtcaggtcccggtacttgtcgatggcgatgttgttttggcagattccagcaccattgctcgacatctcgaggctaagcagccggaaccacccctcattccggttgatccacagcaggccgcgcaggtgtacttgattgaagattgggctgatacgacattggcgcgggcaggccggtcagctttgttgcaggctgcagccttggactctgagttgcgtttagctcttcttccagaagatctgccaactcccttgcgtcaggtcatgggagatctcccgggggggttgttgaacggtgcctctgagatcattggccaggcagagagggttgagttattaaagagcctcgaacaattggctgatttgatgcagaaaaggtcctggctagtaggagatgcgatgagcttggctgatttagctgtagccgctcagatttctttaatgcgttttccagcctcggctggggcagcacttgccggtagaggtgtgttcggcctgagtgatcacccgcggctgcagcccttattccactggagggatcagcttgagttgtcattgcttgagacggatgactcagcccgatga

SEQ ID NO: 11442 - protein, 241 aa, Prochlorococcus marinus str. MIT 9303
MMELHQFRHSAFCLKVRMVLQAKGLTYQVVEVTPGLGQLNVFRLSGQRQVPVLVDGDVVLADSSTIARHLEAKQPEPPLIPVDPQQAAQVYLIEDWADTTLARAGRSALLQAAALDSELRLALLPEDLPTPLRQVMGDLPGGLLNGASEIIGQAERVELLKSLEQLADLMQKRSWLVGDAMSLADLAVAAQISLMRFPASAGAALAGRGVFGLSDHPRLQPLFHWRDQLELSLLETDDSAR

SEQ ID NO: 11443 - DNA, 792 bp, Anabaena variabilis ATCC 29413
  CDS (1)..(792): transl_table=11
atgttagaattataccaatgggagttctcccaatactcagaaaaagtacggctaattctcgattacaaaggattagaatatcgcaaaattgaggttaccccaggaattggacaggtagagttattcaggttaactggacaaaaacaagtgccagtcttgaaagatggtaacagatatatttccgactcaacagcgatcgccaaatatttagacttagaatatccagaccgtcctcttttaccaacagaccccaaacaaagaggtttaactttattaatagaagaatgggctgatgagtccatcggtattaaaggaagaaaagcactattttcagctatcagtcaagaccaaagtttccgcaaagctttattacccacctccacaccagacgtactcaaaaccttagttgaaggcgtacccacagatttgctgacagttttgggatttggtgttggttatagtccagatgtggttaagtcagcgatcgcagatttaaaacaagacctagaagcacttacactattgttagcagatagtccttatttaaccggggacgaacccactttggctgatttagccgtagctggtttatcaatactgttaaaattcccagagggttcttatttagacttacccgccagtattgcaggtaaaggtgtaccatcattagccgataaccctgattatgcagccttttttgcctggcgcgatcgcatctacacccaattccgcaaacccctaattggtaaaccacccaccggtggcgcgcctacgtctattcaaattgattag

SEQ ID NO: 11444 - protein, 263 aa, Anabaena variabilis ATCC 29413
MLELYQWEFSQYSEKVRLILDYKGLEYRKIEVTPGIGQVELFRLTGQKQVPVLKDGNRYISDSTAIAKYLDLEYPDRPLLPTDPKQRGLTLLIEEWADESIGIKGRKALFSAISQDQSFRKALLPTSTPDVLKTLVEGVPTDLLTVLGFGVGYSPDVVKSAIADLKQDLEALTLLLADSPYLTGDEPTLADLAVAGLSILLKFPEGSYLDLPASIAGKGVPSLADNPDYAAFFAWRDRIYTQFRKPLIGKPPTGGAPTSIQID

SEQ ID NO: 11445 - DNA, 741 bp, Synechococcus sp. CC9605
  CDS (1)..(741): transl_table=11
atggctgttttggacatgttggagctgcatcaattccgccattccgcgttttgtctcaaggtgcggatggtgttacaggccaagggactgagtttccgcaccgtggaggtgacccctggcgtcggccaggtggccgtgttccgcctgtccggccaacgccaagttcccgtgcttgtggatggggatcaggtgattgccgactccaccgccattgctttgcacctggttcagcgggagcccgatcccgccctaattcctaacgacccacgtcaggcagcccaggtgtatctgttggaggactgggccgacaccaccctcgcgatggctggccgttcctccttggtgcaggccgccgcgctggatcctgagctgcgggttgccctgctccccgacgatctaccggaccccgtgcgttcggtcatgggtgtgatccccggcggttgggtcagcaacatcaccgaactggtcaaccagaaggagcgcactgagctgctggccagcctggagcagctcgccacatcagtgcaggccagtccctggttggtgggcgacagcatgaccctggccgatatcgccgttgctgctcagttgtcactgcttcgcttcccctcctcagcaggttcgcccctggctggcaaaggggtgcctgggctgagcgaccaccccaagctccagccgctgttccagtggcgcgaccagatcgaactcaaattgatggagcggaccctggaagaggtgtga

SEQ ID NO: 11446 - protein, 246 aa, Synechococcus sp. CC9605
MAVLDMLELHQFRHSAFCLKVRMVLQAKGLSFRTVEVTPGVGQVAVFRLSGQRQVPVLVDGDQVIADSTAIALHLVQREPDPALIPNDPRQAAQVYLLEDWADTTLAMAGRSSLVQAAALDPELRVALLPDDLPDPVRSVMGVIPGGWVSNITELVNQKERTELLASLEQLATSVQASPWLVGDSMTLADIAVAAQLSLLRFPSSAGSPLAGKGVPGLSDHPKLQPLFQWRDQIELKLMERTLEEV

SEQ ID NO: 11447 - DNA, 726 bp, Prochlorococcus marinus str. MIT 9312
  CDS (1)..(726): transl_table=11
atgattacattatatcaatttaggcatagtgctttttgtttaaaaacaagaatggctcttcatgcaaaaaaactacaatatcgagtggaagaagtaacacctggaataggtcaatttgcaattttcaaattatcaggtcaaaaacaagtccctgtaatagtcgatagtaatgatcaaattattaatgactcttcaaatatttgcgaatatatagataaaaaaaatgataacaatcaactctttcctgaagacccaatattatttgcgcaatgcaaactaattgaagactgggcagatactacaatggctacaacttgtagaaaaactttaataaaatctgcgatagagaatccacagctaagagctgcattacttccagatgaaataccttcttcagttaaaagtatttttgataaattaccttttaaaaatcttagtaaaatctctaatgtagttttgtcttctaaagataatttagaactccaaaaattactagaagctttatctaaatcgttgatcaacaaaaaatatttagttggagatagtttatcaattgcagatatttcaattgcagctcaattatcccttcttaaattcccaaagtcagcagggccaattctttcaggagaaggaagtcaagaatacataaataacccttatctagaaaatcttttcatatggaggaataatctagaagaatatcttttcagtgctaactctcaataa

SEQ ID NO: 11448 - protein, 241 aa, Prochlorococcus marinus str. MIT 9312
MITLYQFRHSAFCLKTRMALHAKKLQYRVEEVTPGIGQFAIFKLSGQKQVPVIVDSNDQIINDSSNICEYIDKKNDNNQLFPEDPILFAQCKLIEDWADTTMATTCRKTLIKSAIENPQLRAALLPDEIPSSVKSIFDKLPFKNLSKISNVVLSSKDNLELQKLLEALSKSLINKKYLVGDSLSIADISIAAQLSLLKFPKSAGPILSGEGSQEYINNPYLENLFIWRNNLEEYLFSANSQ

SEQ ID NO: 11449 - DNA, 795 bp, Synechococcus elongatus PCC 7942
  CDS (1)..(795): transl_table=11
atgctggagctttaccagtttgagctatcaccctacagcgaaaaggttcggctgattctcgacttcaagggtctggagtatcgcaaacaggaagtgaccccgggcattggtcaattcgaggtctttcgcctgtcgggacagcgccaagtcccagttttgaaagatggcagcgaagcgatcgctgattccaccgcgatcgcgcagtacctcgatcaaaagtttccagagccgccattgactttggctgatccgcagcagcaagccctgaatgtcttgctcgaagattgggccgatcgcagttttgcgacggatgtccgcaccgtactcctcggcgctctcggctgggatcctagtctgcgggaagcagcattgccaaaccaggtgccgggtccgctgcgcaacttggtcagcgctgtcccgagtgaggtttttagcgtccttggcagtggcgtaggtctcagccccgaaaccctccgcactgctcgtctcaaccttgagcagggcctacaggcactctgtcagcgcctacagaaccaaccctatctcttaggcgatcgccccgtgctggcagatttagcgatcgcagcgcacagtctcttcctgaagtttccgaccactgccgcgatcgatattcccgctggtctgcgcgggcgtgggattcctggcctcgtcgataaccctgactatacggtcttcttcgagtggcgcgatcgcctctatcgcgatttccgccgtggtgcagctgtcaccccgcccagcagcggaaatggccccaccaaaatctcgatcgactag

SEQ ID NO: 11450 - protein, 264 aa, Synechococcus elongatus PCC 7942
MLELYQFELSPYSEKVRLILDFKGLEYRKQEVTPGIGQFEVFRLSGQRQVPVLKDGSEAIADSTAIAQYLDQKFPEPPLTLADPQQQALNVLLEDWADRSFATDVRTVLLGALGWDPSLREAALPNQVPGPLRNLVSAVPSEVFSVLGSGVGLSPETLRTARLNLEQGLQALCQRLQNQPYLLGDRPVLADLAIAAHSLFLKFPTTAAIDIPAGLRGRGIPGLVDNPDYTVFFEWRDRLYRDFRRGAAVTPPSSGNGPTKISID

SEQ ID NO: 11451 - DNA, 726 bp, Synechococcus sp. CC9311
  CDS (1)..(726): transl_table=11
atgctggagctgcatcaattccgtcattccgccttctgcctcaaggtgaggatggcattgcatgccaagggtttgagctttcgagaagtggaggtcacacctggaatcgggcaactcgccgtgttccgtttgtcagggcaaagacaagttccggtgctcgtggatggcgacacggtggtggcagattccagcgcgatctgtcgttatttggatgagctgcagcccgaaccaccgctcttcccgaaggaccctcgatctgtggcccagattcatttgattgaagactgggctgatacaacgcttgccggatccgtccgcgcggctctgcttcaagcggcggtggatgatcctgatttgcgtgcggccctcttgcctgatgacgtacctggcccaattaggcaggtgatgaccggagtgccgacgggttggctgagtggggtgaatgagctgtttggccaggaggagcgttccgccatgctccacaacctgatcgcgattgctgatggcctgactccagacagcgtcttggttggcgattccctcagccttgcggatttggcagtagcggcgcagctctccctgttgcgctttcccgcttcatcagggtcccaattggctggtcgaggcgttgccgggctcagtgatcatcctcgccttcagcctttgtttgagtggcgcgatcgactggaggctcgtgtgttcaagcaggatcctgcagccgtgtga

SEQ ID NO: 11452 - protein, 241 aa, Synechococcus sp. CC9311
MLELHQFRHSAFCLKVRMALHAKGLSFREVEVTPGIGQLAVFRLSGQRQVPVLVDGDTVVADSSAICRYLDELQPEPPLFPKDPRSVAQIHLIEDWADTTLAGSVRAALLQAAVDDPDLRAALLPDDVPGPIRQVMTGVPTGWLSGVNELFGQEERSAMLHNLIAIADGLTPDSVLVGDSLSLADLAVAAQLSLLRFPASSGSQLAGRGVAGLSDHPRLQPLFEWRDRLEARVFKQDPAAV

SEQ ID NO: 11453 - DNA, 795 bp, Nostoc punctiforme PCC 73102
  CDS (1)..(795): transl_table=11
atgctggaattataccaatgggaactatctcaatactcagaaaaagtgcgcctaattctagattttaaaggactagattaccgcaaaatagaagttacgcctgggattggacaagtagaactgttccggctgactggtcagaaacaagtcccagtattaaaggatcgtaataaatatattgcggattctacggaaatagctaagtatttagacttagagtatcccgatcgccccataataccccaagatcccaaaaaacggggtttaactttattgatagaagaatgggcggatgaatctataggtatcaaaggtaggaaagcgctatttgcagctgtaagtcaagatcaaaatttccgcaagtctttattacccacctcaacaccagatatatttaaaagtctggttggaggagtacctactgacttactgacagtgttgggttttggggtaggttatagtccagatgtgatccagtcagcgatcgcatctttaaaacaagacttggaagctctaacgttattattggcagatagtccttatttaactggagatgagccgactttagctgacttgtcagtggctggcttatcgatattactcaagttccctcctggaccctatctggatttaccagcttctattagaggaaaaggattgccaatcttttcagagaatatagattatgaaccattctttacctggcgcgatcgcatttacgctcaattccgtaaaccattaatcagtaccacctcagccgcagggggtgcgccaacttcgattcagattgattag

SEQ ID NO: 11454 - protein, 264 aa, Nostoc punctiforme PCC 73102
MLELYQWELSQYSEKVRLILDFKGLDYRKIEVTPGIGQVELFRLTGQKQVPVLKDRNKYIADSTEIAKYLDLEYPDRPIIPQDPKKRGLTLLIEEWADESIGIKGRKALFAAVSQDQNFRKSLLPTSTPDIFKSLVGGVPTDLLTVLGFGVGYSPDVIQSAIASLKQDLEALTLLLADSPYLTGDEPTLADLSVAGLSILLKFPPGPYLDLPASIRGKGLPIFSENIDYEPFFTWRDRIYAQFRKPLISTTSAAGGAPTSIQID

SEQ ID NO: 11455 - DNA, 792 bp, Crocosphaera watsonii WH 8501
  CDS (1)..(792): transl_table=11
atgttagaactgtatcaatttgaggtttctcaatattctgagaaagtgcgcttaattcttgattacaaaggattagaatatcgtaaaatcgaagttactccaggtgtgggacaactggacttgtataaaatgtcgggacaaagacaagttcctgtcttaaaggatggagaaactattgttgctgattccactgagatagccttttatttagatagaaaatacccagaaaaaccaattatccctgcagatcctcttaaacgaggacaatgtttactgatagaagaatgggctgatgaatctatcggaatcaaaggaagatttgctttagtcggagcattaaatcaaaaccccaattttcgtagttctgttttaccaaaagaagtacctgacgtagtaaaaaatattattagtgcggttcctggggatcttttgagtgctttaggaacaggggttggggttggaccagatacagttaaagaagccactaaagccctgaaacaagacctagaagctcttagtcttattttagagcatcaaccctatttagttggggatgaaatcaccttagctgatttagccgtggcaggattaagtattattttaaaacaacctggcggtgactatttagatattcctgataacctcaaaggaaaaggtattcctgggttagcagataacactgcttatgatgctttcttcctctggcgcgatcgcctttacatggactatcgaaaacccctttcttctcaaccctctgaagaagagtcaccgactagcattgagatagaatag

SEQ ID NO: 11456 - protein, 263 aa, Crocosphaera watsonii WH 8501
MLELYQFEVSQYSEKVRLILDYKGLEYRKIEVTPGVGQLDLYKMSGQRQVPVLKDGETIVADSTEIAFYLDRKYPEKPIIPADPLKRGQCLLIEEWADESIGIKGRFALVGALNQNPNFRSSVLPKEVPDVVKNIISAVPGDLLSALGTGVGVGPDTVKEATKALKQDLEALSLILEHQPYLVGDEITLADLAVAGLSIILKQPGGDYLDIPDNLKGKGIPGLADNTAYDAFFLWRDRLYMDYRKPLSSQPSEEESPTSIEIE

SEQ ID NO: 11457 - DNA, 726 bp, Synechococcus sp. RS9917
  CDS (1)..(726): transl_table=11
atgctggagctccatcagttccgccattccgccttctgcctgaaggtgcgcatggtgctgcaggccaaagccctgagttatcgcgtggtggaggtcaccccgggcgtgggtcagctggctgtttttcgcctctcgggccagcgtcagctgcccgttctggtggatggcgacacggtgatcgctgattcctcggcgatcgcccgccacctcgagtcggtcgaacccgacccttccctgatccctcaggacgcgcgcgacgcggctcaggtgcctctgatcgaagactgggccgacaccaccctggcccatgccgcccgcctcgccctggtgcaggcggcggcgagtgatccggagctgcgggtggcactgctgcctgatgacctgccggaaccgctgcggcgcacactggccggtttgcccggcggttggctgcaggggcttggcgaggtgctcgatcagggggagcgtgccgccatgttcaccagcctgcagcggctggctgcggctgtggagaccacgccctggttggtcggagatcagctttccatggccgatctggcggtggcggcccagctttcgctgctgcgttttcccgcgtccgccggagatggcctggcgggtcggggcgtgccaggactcagtgatcacccccagctgcagccgctgttcgcctggcgggatcgtttggagacccgtctgtttcaggttgatccggcagccgtgtga

SEQ ID NO: 11458 - protein, 241 aa, Synechococcus sp. RS9917
MLELHQFRHSAFCLKVRMVLQAKALSYRVVEVTPGVGQLAVFRLSGQRQLPVLVDGDTVIADSSAIARHLESVEPDPSLIPQDARDAAQVPLIEDWADTTLAHAARLALVQAAASDPELRVALLPDDLPEPLRRTLAGLPGGWLQGLGEVLDQGERAAMFTSLQRLAAAVETTPWLVGDQLSMADLAVAAQLSLLRFPASAGDGLAGRGVPGLSDHPQLQPLFAWRDRLETRLFQVDPAAV

SEQ ID NO: 11459 - DNA, 744 bp, Synechococcus sp. WH 5701
  CDS (1)..(744): transl_table=11
atgctcgagctccaccagttccgccattcctccttctgcgagaaggtgaggttgatcctggccgccaaggggctggagtacagcatcatcgaggtcacccccgggttggggcagctggagctgttccgtctttccggtcagcggcaggtgccggtactggtggatggcggagaggtgatcgccgattccagcgccattgcccagcatctggagagccaggtgccgacccctcccctgattcccgaggatccggccgatcgggcccgggtgcttctgctcgaagactgggccgacaccgccctggcttctggggtgcgtcaggccctgttgcaggcggccggttcggattcggtgatgcgcggtgccctgctgcctgaggccacccccgcgctgcttcgttcgctgttgggggctctgcccaccgatctgctcacccccctgggcgacaccatcggccagacggagcggcgccaactccaggcgaacctcgagcagctggcggtgctgctggcgccgggccgctttctcgtgggtgatcggctctccctggccgatctggccgtggctgcccagttgtcgcttctgctcttcccagccagcgctggtgcccccctggctggccgcggcgtgcccggcctggccgaccatcccctgctcaccagcctgttcgcctggagggatggcctctacctctccctcggccgaggcgccgtcagcgagccggtttcccagccaccgctttga

SEQ ID NO: 11460 - protein, 247 aa, Synechococcus sp. WH 5701
MLELHQFRHSSFCEKVRLILAAKGLEYSIIEVTPGLGQLELFRLSGQRQVPVLVDGGEVIADSSAIAQHLESQVPTPPLIPEDPADRARVLLLEDWADTALASGVRQALLQAAGSDSVMRGALLPEATPALLRSLLGALPTDLLTPLGDTIGQTERRQLQANLEQLAVLLAPGRFLVGDRLSLADLAVAAQLSLLLFPASAGAPLAGRGVPGLADHPLLTSLFAWRDGLYLSLGRGAVSEPVSQPPL

SEQ ID NO: 11461 - DNA, 729 bp, Synechococcus sp. WH 7805
  CDS (1)..(729): transl_table=11
atgctggagctccaccagttccgccactccgccttctgcatgaaggtgcggatgacgctccacgccaaagacctgagttttcgtgaggtggaggtcactccggggctgggtcaactgtctgtttttcggatctcgggtcagcgacaggtcccggttctggttgacggtgatcaggtgttcgctgattccagcgccatctgccggtatctcgaaacgctgcaacccgagcccgtcctgcttccttccgatccgctccagagagcccaggtggaactgattgaagattgggctgacaccaccctggccgcgtcagcccgggcagcgcttctgcaggctgcagctgacgacacccagctcaggtcggctcttctgcctgatgatctgccggcacccttgcgacaggtcatgtctgtggttccaggtgggtggttgagcaacttgggggatttgctcggtcaggagcagagggcgtccatgctttccagtctcatggctctggccgaaggcctcgacaagaacgagcacctggtaggcaacacactcaccttggcggatcttgctgtggccgctcagctctccttgctgcgtttccctggctcctcaggagattctttagctggccgcggcgttcctggtctcagcgatcatccccgccttcagtccctattccattggcgcgatcagttggaggcccagctcattcagcgggatcctgcggcagccgagtga

SEQ ID NO: 11462 - protein, 242 aa, Synechococcus sp. WH 7805
MLELHQFRHSAFCMKVRMTLHAKDLSFREVEVTPGLGQLSVFRISGQRQVPVLVDGDQVFADSSAICRYLETLQPEPVLLPSDPLQRAQVELIEDWADTTLAASARAALLQAAADDTQLRSALLPDDLPAPLRQVMSVVPGGWLSNLGDLLGQEQRASMLSSLMALAEGLDKNEHLVGNTLTLADLAVAAQLSLLRFPGSSGDSLAGRGVPGLSDHPRLQSLFHWRDQLEAQLIQRDPAAAE

SEQ ID NO: 11463 - DNA, 771 bp, Synechococcus sp. RS9916
  CDS (1)..(771): transl_table=11
ttggaatctgatggctactctgccggtcgcaaggcaggtctggccatgttggagctccatcagttccgtcactccgccttttgcttgaaggtgcggatgattcttcaggccaaatccctgagttatcgggtggtggaagtcgttcccggtgtggggcagatcgatgtgttccggttgtcgggccagcgccaggtgcccgtgttggtcgatggcgacacggtggtggccgactccagtgccatcgcccgccatctcgagaccctggaacctgatccggccctccttccctccgatccctggcaccgggcccaagcgcaactgatcgaagattgggcggacaccaccttggccgctgctgcccgaatggccctggcccaggcagcggtgggtgataacgctctgcgggaggccttactgcccgatgggttgccgtcgcccgtgcgtcagaccgtcgcggctctgccgggtgggtggttacaggggcttggcgaggtggtcgaccagggggggcgcgctgagatgctcgccagcctgatcgcaatcgcggattccgtggcgctgaagccctggttggtgggtgacacccttagccttgcggatatcgccgtggcggctcaggtgtcgttgctgcgtttcccggcgtcttccggagagctgctcgccggtcagggagtggcaggtctcagtgatcacccccgcttgcagcctttgttccactggcgcgatcagctggaaacgcagttgatgcagtcggatccggctgccgtttga

SEQ ID NO: 11464 - protein, 256 aa, Synechococcus sp. RS9916
MESDGYSAGRKAGLAMLELHQFRHSAFCLKVRMILQAKSLSYRVVEVVPGVGQIDVFRLSGQRQVPVLVDGDTVVADSSAIARHLETLEPDPALLPSDPWHRAQAQLIEDWADTTLAAAARMALAQAAVGDNALREALLPDGLPSPVRQTVAALPGGWLQGLGEVVDQGGRAEMLASLIAIADSVALKPWLVGDTLSLADIAVAAQVSLLRFPASSGELLAGQGVAGLSDHPRLQPLFHWRDQLETQLMQSDPAAV

SEQ ID NO: 11465 - DNA, 22 bp, Artificial sequence
  primer
atgcttgagcttcatcagtttg

SEQ ID NO: 11466 - DNA, 20 bp, Artificial sequence
  primer
ttactcaatggtgattgtgg

SEQ ID NO: 11467 - protein, 237 aa, Artificial sequence
  consensus sequence
  Variant (2)..(3): Xaa in position 2 to 3 is any amino acid
  Variant (5)..(5): Xaa in position 5 is any amino acid
  Variant (8)..(9): Xaa in position 8 to 9 is any amino acid
  Variant (11)..(14): Xaa in position 11 to 14 is any amino acid
  Variant (16)..(16): Xaa in position 16 is any amino acid
  Variant (18)..(19): Xaa in position 18 to 19 is any amino acid
  Variant (21)..(22): Xaa in position 21 to 22 is any amino acid
  Variant (24)..(24): Xaa in position 24 is any amino acid
  Variant (26)..(26): Xaa in position 26 is any amino acid
  Variant (29)..(30): Xaa in position 29 to 30 is any amino acid
  Variant (36)..(36): Xaa in position 36 is any amino acid
  Variant (39)..(41): Xaa in position 39 to 41 is any amino acid
  Variant (43)..(43): Xaa in position 43 is any amino acid
  Variant (48)..(48): Xaa in position 48 is any amino acid
  Variant (53)..(54): Xaa in position 53 to 54 is any amino acid
  Variant (56)..(61): Xaa in position 56 to 61 is any amino acid
  Variant (62)..(62): Xaa in position 62 is any or no amino acid
  Variant (65)..(66): Xaa in position 65 to 66 is any amino acid
  Variant (68)..(79): Xaa in position 68 to 79 is any amino acid
  Variant (81)..(81): Xaa in position 81 is any amino acid
  Variant (83)..(83): Xaa in position 83 is any amino acid
  Variant (86)..(92): Xaa in position 86 to 92 is any amino acid
  Variant (94)..(94): Xaa in position 94 is any amino acid
  Variant (96)..(96): Xaa in position 96 is any amino acid
  Variant (100)..(106): Xaa in position 100 to 106 is any amino acid
  Variant (108)..(108): Xaa in position 108 is any amino acid
  Variant (111)..(120): Xaa in position 111 to 120 is any amino acid
  Variant (122)..(122): Xaa in position 122 is any amino acid
  Variant (127)..(129): Xaa in position 127 to 129 is any amino acid
  Variant (131)..(140): Xaa in position 131 to 140 is any amino acid
  Variant (142)..(144): Xaa in position 142 to 144 is any amino acid
  Variant (146)..(159): Xaa in position 146 to 159 is any amino acid
  Variant (160)..(165): Xaa in position 160 to 165 is any or no amino acid
  Variant (167)..(169): Xaa in position 167 to 169 is any amino acid
  Variant (171)..(172): Xaa in position 171 to 172 is any amino acid
  Variant (174)..(182): Xaa in position 174 to 182 is any amino acid
  Variant (184)..(184): Xaa in position 184 is any amino acid
  Variant (187)..(190): Xaa in position 187 to 190 is any amino acid
  Variant (193)..(195): Xaa in position 193 to 195 is any amino acid
  Variant (198)..(200): Xaa in position 198 to 200 is any amino acid
  Variant (203)..(203): Xaa in position 203 is any amino acid
  Variant (206)..(211): Xaa in position 206 to 211 is any amino acid
  Variant (212)..(215): Xaa in position 212 to 215 is any or no amino acid
  Variant (217)..(217): Xaa in position 217 is any amino acid
  Variant (219)..(219): Xaa in position 219 is any amino acid
  Variant (221)..(227): Xaa in position 221 to 227 is any amino acid
  Variant (229)..(233): Xaa in position 229 to 233 is any amino acid
  Variant (235)..(235): Xaa in position 235 is any amino acid
MXXLXQFXXSXXXXKXRXXLXXKXLXYRXXEVTPGXGQXXXFXLSGQXQVPVXXDXXXXXXXDSXXIXXXXXXXXXXXXLXPXDPXXXXXXXLXEXWADXXXXXXXRXALXXXXXXXXXXRXALLPXXXPXXXXXXXXXXPXXXLXXXXXXXXXXXXXXXXXXXXLXXXLXXLXXXXXXXXXLXGDXXXXADXXXAAXXXLLXFPXXXXXXXXXXLXGXGXXXXXXXPXXXXXFXWR

SEQ ID NO: 11468 - protein, 48 aa, Artificial sequence
  protein pattern
  Variant (3)..(3): Xaa in position 3 is Ser or Thr
  Variant (4)..(4): Xaa in position 4 is any amino acid
  Variant (6)..(7): Xaa in position 6 to 7 is any amino acid
  Variant (8)..(8): Xaa in position 8 is His or Tyr
  Variant (9)..(9): Xaa in position 9 is Ile or Leu
  Variant (10)..(13): Xaa in position 10 to 13 is any amino acid
  Variant (14)..(14): Xaa in position 14 is Asp, Glu, Asn or Pro
  Variant (15)..(17): Xaa in position 15 to 17 is any amino acid
  Variant (19)..(19): Xaa in position 19 is Phe, Ile or Leu
  Variant (21)..(21): Xaa in position 21 is any amino acid
  Variant (22)..(22): Xaa in position 22 is Asp or Lys
  Variant (23)..(23): Xaa in position 23 is Ala or Pro
  Variant (24)..(26): Xaa in position 24 to 26 is any amino acid
  Variant (27)..(27): Xaa in position 27 is Ala or Gly
  Variant (28)..(30): Xaa in position 28 to 30 is any amino acid
  Variant (32)..(32): Xaa in position 32 is Ile, Leu, Met or Val
  Variant (34)..(34): Xaa in position 34 is Asp, Glu or Asn
  Variant (38)..(38): Xaa in position 38 is Glu or Thr
  Variant (39)..(39): Xaa in position 39 is Ala, Ser or Thr
  Variant (40)..(40): Xaa in position 40 is Ile, Leu or Met
  Variant (41)..(41): Xaa in position 41 is Ala or Gly
  Variant (42)..(43): Xaa in position 42 to 43 is any amino acid
  Variant (44)..(44): Xaa in position 44 is Ala, Cys, Gly or Val
  Variant (45)..(45): Xaa in position 45 is Lys or Arg
  Variant (46)..(46): Xaa in position 46 is any amino acid
  Variant (47)..(47): Xaa in position 47 is Ala, Glu, Ser or Thr
  Variant (48)..(48): Xaa in position 48 is Leu or Met
DSXXIXXXXXXXXXXXXLXPXXXXXXXXXXLXEXWADXXXXXXXXXXX

SEQ ID NO: 11469 - protein, 25 aa, Artificial sequence
  protein pattern
  Variant (2)..(2): Xaa in position 2 is any amino acid
  Variant (4)..(4): Xaa in position 4 is Glu, Lys or Arg
  Variant (6)..(7): Xaa in position 6 to 7 is any amino acid
  Variant (8)..(8): Xaa in position 8 is Glu or Gly
  Variant (9)..(10): Xaa in position 9 to 10 is any amino acid
  Variant (11)..(11): Xaa in position 11 is Asp or Asn
  Variant (12)..(12): Xaa in position 12 is any amino acid
  Variant (13)..(13): Xaa in position 13 is Pro, Ser or Thr
  Variant (14)..(15): Xaa in position 14 to 15 is any amino acid
  Variant (16)..(16): Xaa in position 16 is Asp, Glu, Gln, Ser or Thr
  Variant (17)..(17): Xaa in position 17 is any amino acid
  Variant (18)..(18): Xaa in position 18 is Phe, Ile or Leu
  Variant (20)..(20): Xaa in position 20 is any amino acid
  Variant (23)..(23): Xaa in position 23 is Asp or Asn
  Variant (24)..(24): Xaa in position 24 is any amino acid
  Variant (25)..(25): Xaa in position 25 is Ile or Leu
LXGXGXXXXXXXXXXXXXFXWRXXX

SEQ ID NO: 11470 - protein, 41 aa, Artificial sequence
  protein pattern
  Variant (2)..(3): Xaa in position 2 to 3 is any amino acid
  Variant (4)..(4): Xaa in position 4 is Ile or Leu
  Variant (5)..(5): Xaa in position 5 is Ala, Cys, Ser or Thr
  Variant (6)..(7): Xaa in position 6 to 7 is any amino acid
  Variant (8)..(8): Xaa in position 8 is Leu, Met or Val
  Variant (9)..(13): Xaa in position 9 to 13 is any amino acid
  Variant (15)..(15): Xaa in position 15 is any amino acid
  Variant (18)..(18): Xaa in position 18 is any amino acid
  Variant (19)..(20): Xaa in position 19 to 20 is any or no amino acid
  Variant (22)..(23): Xaa in position 22 to 23 is any or no amino acid
  Variant (26)..(26): Xaa in position 26 is Ile or Leu
  Variant (27)..(27): Xaa in position 27 is Ala, Ser or Thr
  Variant (28)..(28): Xaa in position 28 is Ile or Val
  Variant (30)..(30): Xaa in position 30 is Ala or Gly
  Variant (31)..(33): Xaa in position 31 to 33 is any amino acid
  Variant (34)..(34): Xaa in position 34 is Phe, Ile, Leu or Val
  Variant (35)..(35): Xaa in position 35 is Ile, Leu or Met
  Variant (36)..(37): Xaa in position 36 to 37 is any amino acid
  Variant (39)..(39): Xaa in position 39 is any amino acid
  Variant (40)..(40): Xaa in position 40 is Gly, Ser or Thr
  Variant (41)..(41): Xaa in position 41 is Ala, Asp, Asn, Pro or Ser
LXXXXXXXXXXXXLXGDXXXLXXADXXXAXXXXXXXXPXXX

SEQ ID NO: 11471 - DNA, 1239 bp, Synechocystis sp.
  CDS (1)..(1239): transl_table=11
atgaatacaggtacatatttaatgcccactgccgcctacattcacattcccttttgtcgccaacgctgtttttattgtgattttcctattgctgtgacgggtttccagtctttaaccctggacggttgggtgggggaatatgtggaagcagtatgcagagaaattgcggggcaacaacaccaaggccagcctttacaaacagttttttttggtggaggcaccccttctttattgccgatcaccggtttggaaaaaattttgctggcggttgatcaatatctgggcattgccccggacgctgagataagcattgaaattgatcctggcacctttgaccaagttcaattgcaaggctataaaaatttgggcattaaccgctttagcttgggcgtacaggctttccaagacaatttactggccctttgtggccgccaccaccgtcgccgggacatcgatcaagccctcacggcgatcgccaaggagaatattgaaaattggagcttggatttgattacggggctaccggagcaaacggcagcagattggcacagttccctaaccttggctctagccgcagggcctaagcatatttcctgctatgacttagtgttggaaccccaaaccgttttcgacaaatgggaacagcgggggaaattggctgtacctccccccgaacgcagtgctgatttttatcgccatggccaagaagtattaacccaagccggtttccaccattacgaaatttccaactatggccgccccggccaccaatgtcgccataaccaaatctattggcgtaatttgccctactacggtttaggcatgggggccaccagttacattgacggtaagcgttttggccggccccgtacgagaaatggctattaccaatggctagaatcttggctcaatcaaggctgtcccattccgggggaaagggtttctccgttggaaaatttgttagaaagcttgatgttaggactaaggctgaccgctggggtaacgtgggcccaactgccttcggttaatcagacagaaaaggcaaaaatccttgctaccctaacttcctttggcgatcgccgttggctggaattttatggcgaggataaccaaatgctagccccgaaccagaccacaacggaaacggtgcagaggttttgcttcactgatccggagggaattttatactccaaccagatccttagcgctctgtttgcggctctggaagaagatttttaa

SEQ ID NO: 11472 - protein, 412 aa, Synechocystis sp.
MNTGTYLMPTAAYIHIPFCRQRCFYCDFPIAVTGFQSLTLDGWVGEYVEAVCREIAGQQHQGQPLQTVFFGGGTPSLLPITGLEKILLAVDQYLGIAPDAEISIEIDPGTFDQVQLQGYKNLGINRFSLGVQAFQDNLLALCGRHHRRRDIDQALTAIAKENIENWSLDLITGLPEQTAADWHSSLTLALAAGPKHISCYDLVLEPQTVFDKWEQRGKLAVPPPERSADFYRHGQEVLTQAGFHHYEISNYGRPGHQCRHNQIYWRNLPYYGLGMGATSYIDGKRFGRPRTRNGYYQWLESWLNQGCPIPGERVSPLENLLESLMLGLRLTAGVTWAQLPSVNQTEKAKILATLTSFGDRRWLEFYGEDNQMLAPNQTTTETVQRFCFTDPEGILYSNQILSALFAALEEDF

SEQ ID NO: 11473 - DNA, 1482 bp, Zea mays
  CDS (1)..(1482)
atgcccatcccaagtcacgaattcctatccggcaggtacgccacagcttccataatgctccggctggccttcccgctcgtctcccatctcccacgccggaaaccgtccgcaatccgcccacgccctccacccgctcgacgatatgcctccgcggccgccgtcaccgcctcctccttctccccacctcactctcccttgctaccgccgctacccccggcctccgcctacgtccaccttcccttctgccgcaagcgctgccactactgcgacttccccatcatcgccctcggctcatcgtcagccccctcccgtggcgaggccgcggaagaccccaggatcgttgactacgtgaacctcttgctccgcgaggtctccgccacgcgcccggtttccgacgatggcgtgccgctcgagaccgtcttcttcggtgggggcacgccgtcgctcgtcccgccgcgcctggtcgccacggtcctcgacgcgctgcgcgccaggttcggcctgtcggcgcgccccgaggtctccatcgagatggaccccggcacgttcgatgccgccaggctcaaggagctcgtgggcgtgggcgtcaaccgcgtctcgctcggcgtgcaggcgttccaggaggacctgctgcgggcgtgcggacgcgcgcacggcgtgaaggaggtgcacgaggccgtcgcgatcgtgacggcgtgcgaggggctgcagaactggagcatggacctcatctcctcgctgccgaatcaaaccgaggagatgtgggaggaaagcttgaggtgcacggtggatgcaaggcccactcacgtttctgtgtatgatctgcaaattgagcagggcaccaagtttgggcagatgtatactcctggtgtctttcctctgccgagtgacaccgaatctgcaaacttctacaggattgcttcgaagcgactttctgaagcaggttataaccactatgagatcagtagctactgcaagcctggatacgagtgcaagcacaacctaacatactggcaaaaccgacccttctatgcctttggtcttggatctgcgagctacattaacggtgtgaggtactccaggcccagaagaacaaaggagtatgcagaatgggttcagaagttagaggatggaacgtggagacatgagtctagaagctctgatctgaaggacatggcactggatgtggttatgctatcgctgagaacagcttgggggcttgatttgcaaagtttcagtaaatcctttgggaaaagcctggcgctatcactgtgtaacacatttaagccttttgtggagagtgggcatgtaattgcaatggatatggatcgacaagccttgccacatactgattttgagttggacctgcaaaatgaagatggttttggaagcagaattgcattcatccgtctcagcgacccagatggatttttgttgtccaacgagttgatttcacttgcttttgggattatctcaccttga

SEQ ID NO: 11474 - protein, 493 aa, Zea mays
MPIPSHEFLSGRYATASIMLRLAFPLVSHLPRRKPSAIRPRPPPARRYASAAAVTASSFSPPHSPLLPPLPPASAYVHLPFCRKRCHYCDFPIIALGSSSAPSRGEAAEDPRIVDYVNLLLREVSATRPVSDDGVPLETVFFGGGTPSLVPPRLVATVLDALRARFGLSARPEVSIEMDPGTFDAARLKELVGVGVNRVSLGVQAFQEDLLRACGRAHGVKEVHEAVAIVTACEGLQNWSMDLISSLPNQTEEMWEESLRCTVDARPTHVSVYDLQIEQGTKFGQMYTPGVFPLPSDTESANFYRIASKRLSEAGYNHYEISSYCKPGYECKHNLTYWQNRPFYAFGLGSASYINGVRYSRPRRTKEYAEWVQKLEDGTWRHESRSSDLKDMALDVVMLSLRTAWGLDLQSFSKSFGKSLALSLCNTFKPFVESGHVIAMDMDRQALPHTDFELDLQNEDGFGSRIAFIRLSDPDGFLLSNELISLAFGIISP

SEQ ID NO: 11475 - DNA, 1404 bp, Oryza sativa (japonica cultivar-group)
  CDS (1)..(1404)
atgctaaggtcaaccttcccgctcgtctcccacctcccatcccgcaaaccacccccaatccgcccacgcccaccacctgttcggccctatgcctcttccgccgcctcgcctcctcctcctcctccgccgccggcgtccgcttacgtccacctccccttctgccgcaagcgctgccactactgcgacttccccatcgtcgccctcggcacctcctcgcccccgacatccccacacggcggggacggcgacgacccgaggatcgccgactacgtccgcctcctcctccgcgaggtcgccgccacgcgccccgtgtccgacgacggggtgcccctcgagaccgtcttcttcggtggcggcacgccgtcgctggtcccgccgaggctcgtcgccgcggtgctcgacgcgctgcggaccaggttcgggctgtcggcgtccccggaggtgtccatcgagatggaccccgggacgttcgacgccgccaagctgagggagctggtggggctgggcgtcaaccgggtgtccctcggcgtgcaggcgttccaggaggacctgctccgtgcgtgcggccgcgcgcacggcctgcgggaggtgcacgacgcggtcggcatcgtgacggcgtgcgaggggctgcagaactggagcatggacctcatctcgtcgctgcccaaccagacagaggagatgtgggaggagagcttgaggtgcacggtggatgcccgtcccacgcatgtgtctgtctatgacttgcagatcgagcagggaactaagtttgggcaactatatacacctggtgtttatccgcttccaaatgagaaagattctgcaaacttctataagatagcttcgaaacgtctttctgaagcaggatataaccattatgaaatcagtagctattgcaagactgggtatgagtgcaagcacaatgtaacatattggcaaaaccggtcattctatgcatttggtcttggatccgctagctacatcaatggtatcaggttctccaggcccagaagaatgaaggaatatgcagagtgggttcagaaattggaaaatggagtgtggagccatgagtctggcaattctgggataaaggacatggcaatggacgtggtgatgctatcactgagaacagcatggggcctagatgtgcaaagtttcagtaaaaccttcggaaggagtctgacagagtcattgtgcaacacatttaggccttttgtggagagtgggcttgtaattgccatggatatggaacggcgagctttgcaaccaagtgaatttgagttggacttgcaacatgatggtgagaatggaagcagagttgccttcatccgtctgagtgacccagatggttttttgttgtccaatgagttgatttcacttgcatttggaattatttcaccataa

SEQ ID NO: 11476 - protein, 467 aa, Oryza sativa (japonica cultivar-group)
MLRSTFPLVSHLPSRKPPPIRPRPPPVRPYASSAASPPPPPPPPASAYVHLPFCRKRCHYCDFPIVALGTSSPPTSPHGGDGDDPRIADYVRLLLREVAATRPVSDDGVPLETVFFGGGTPSLVPPRLVAAVLDALRTRFGLSASPEVSIEMDPGTFDAAKLRELVGLGVNRVSLGVQAFQEDLLRACGRAHGLREVHDAVGIVTACEGLQNWSMDLISSLPNQTEEMWEESLRCTVDARPTHVSVYDLQIEQGTKFGQLYTPGVYPLPNEKDSANFYKIASKRLSEAGYNHYEISSYCKTGYECKHNVTYWQNRSFYAFGLGSASYINGIRFSRPRRMKEYAEWVQKLENGVWSHESGNSGIKDMAMDVVMLSLRTAWGLDVQSFSKTFGRSLTESLCNTFRPFVESGLVIAMDMERRALQPSEFELDLQHDGENGSRVAFIRLSDPDGFLLSNELISLAFGIISP

SEQ ID NO: 11477 - DNA, 1179 bp, Mesorhizobium loti MAFF303099
  CDS (1)..(1179): transl_table=11
atgactggacctggcatgaccatgccgctcgaccgcagccccggctttggcgtctacatccattggccgttctgcgcggccaagtgcccctattgcgacttcaacagccatgtccgccaccagccggtggaccaggagcgctttgccgccgccttcgaggcggaactggcgacgatgcgtgagcgcaccgggccgcgcgaggtgaccagcattttcctcggcggcggcacgccgtcgctgatgaagccggaaaccgtggccagggtcctggacgccgtggcgaagaactggacggtaccggacggcatcgaggtgacgcttgaagctaacccgtcctcggtcgaagccgaacgctttcgcggctatcgggcggcgggcgtcaaccgcgtctcgctcggcgtgcaggcgctcaacgacaaggatttgcgcttcctcggccgcctgcacaatgtcgaagaggcgctgcacgccatcgggctcgcgcgcgaaatctttccgcgcctgtccttcgacctgatctacgcccggcccggccagacgccggaggcctgggcagccgagctcgaacaggcgatcggccacgctgccgaccatctctcgctctaccagctgaccatcgaggaaggcacgcccttccacgcgctgcatgcggcgaagaaattcatcatccctgacaacgaccacgccgccgacctctatgcgttgacgcaggagactacgtccgcgcatggcctgccggcctatgagatttccaaccacgccaggcctggcgccgaaagccggcacaatctgacctactggcgctatggcgaatatgtcggcgtcggccccggcgcgcatgggcgcttcgtcgagcatggccgccgcacggtgacgatcgccgaaaggatgccggaaacctgggccaacctcgtcgaggccaagggccatggtgtcaccgggggcgagatcctgacgcgctcggaagaggccgacgaattcctgctgatggggctgaggctggccgagggcatcgaccttgcgcgctacgaggccttttccggccgcggcctgtcgagcgcccggctgtcggtgctgcagggcgagggtctggtggcgccgatcggcaatgcgcggctgcgcgccacaccggccggcatgatcgttctcgacgccgtggtggcggatctggcgcgctaa

SEQ ID NO: 11478 - protein, 392 aa, Mesorhizobium loti MAFF303099
MTGPGMTMPLDRSPGFGVYIHWPFCAAKCPYCDFNSHVRHQPVDQERFAAAFEAELATMRERTGPREVTSIFLGGGTPSLMKPETVARVLDAVAKNWTVPDGIEVTLEANPSSVEAERFRGYRAAGVNRVSLGVQALNDKDLRFLGRLHNVEEALHAIGLAREIFPRLSFDLIYARPGQTPEAWAAELEQAIGHAADHLSLYQLTIEEGTPFHALHAAKKFIIPDNDHAADLYALTQETTSAHGLPAYEISNHARPGAESRHNLTYWRYGEYVGVGPGAHGRFVEHGRRTVTIAERMPETWANLVEAKGHGVTGGEILTRSEEADEFLLMGLRLAEGIDLARYEAFSGRGLSSARLSVLQGEGLVAPIGNARLRATPAGMIVLDAVVADLAR

SEQ ID NO: 11479 - DNA, 1455 bp, Arabidopsis thaliana
  CDS (1)..(1455)
atgctgaaaacaacgatttctccaattttctcatcgtttacaggtaaacccaagtgctcatcgaagttgttttttcgagcttttagtaaggttgttctacaagatactccaccaagtgctcgacgaaatgcgtcaaccaatcttactacgttacacaaaggtccaccaacctcagcctacgttcatcttccgttttgtcgcaaacgctgtcattattgtgactttcctatcttagctctaggcatgtcttcttcttcagccagaccgtctaatgtctacgaggaaggaaaagaagatgacccgagaatcacgaactatgtgaatttgcttgttagagagataaaagcgacaaggacggattttgatacgaacccgaatctagaaacggtgtttttcggtggtgggacgccttctcttgttcctccgaagcttgtttctttgattctggaaacattgagtttgaatttcgggctgagtccagatgctgagatatcaatggagatggatccaggcacgtttgatggtcagaagctgaaggatttgatgaaattgggagttaacagagtgtctttaggagttcaagcttttcaagatgagcttttgaaagcttgtggaagagctcatggtgtctctcaagtgtatgaagcaatagagtttgttaaagaatgtggagttgagaattggagtatggatcttatttcttctctgcctcaccagactttggagatgtgggaagagagtttgagattagctatcgaatcacagcccaatcatgtttctgtatatgatctgcaagtcgaacaaggcacaaagtttggaaatttgtacactccaggacagtcccctcttccttcagaaacacagtctgcagagttttataaaacagcatcatcgatgctccgtggtgcaggttatgaacattatgaagtcagcagttactcgagagacggtttcaagtgcaaacacaacttgatatactggaagaacaagccattctatgctttcggtttaggttcagcgagttatgttggagggttgaggttttcaaggccaaggaggctaaaggaatacacaaactatgtcgctgacttggagaatggcgcagcaaactggtgtggaaatggtgatgttgatcttaaggatgttgcaacagacatcttaatgctatctttcagaacatctaaagggcttgaacttaaggagtttggagaagcttttggcagtgaggtagtgaaatcaatctgtaaagtttatgagccttatgtggagagtgggcacattgtttgtttggatgatatgagaagcgaagtgatgattgatgaattcaaaaccttagttgcaaatgatgaagtgaagattgaggatcatgtgaggtaccttagactgaaagatccagatggttttctcctctctaatgagttgatatctctatcgtttggcgtggtagctccttaa

SEQ ID NO: 11480 - protein, 484 aa, Arabidopsis thaliana
MLKTTISPIFSSFTGKPKCSSKLFFRAFSKVVLQDTPPSARRNASTNLTTLHKGPPTSAYVHLPFCRKRCHYCDFPILALGMSSSSARPSNVYEEGKEDDPRITNYVNLLVREIKATRTDFDTNPNLETVFFGGGTPSLVPPKLVSLILETLSLNFGLSPDAEISMEMDPGTFDGQKLKDLMKLGVNRVSLGVQAFQDELLKACGRAHGVSQVYEAIEFVKECGVENWSMDLISSLPHQTLEMWEESLRLAIESQPNHVSVYDLQVEQGTKFGNLYTPGQSPLPSETQSAEFYKTASSMLRGAGYEHYEVSSYSRDGFKCKHNLIYWKNKPFYAFGLGSASYVGGLRFSRPRRLKEYTNYVADLENGAANWCGNGDVDLKDVATDILMLSFRTSKGLELKEFGEAFGSEVVKSICKVYEPYVESGHIVCLDDMRSEVMIDEFKTLVANDEVKIEDHVRYLRLKDPDGFLLSNELISLSFGVVAP

SEQ ID NO: 11481 - DNA, 1059 bp, Helicobacter pylori 26695
  CDS (1)..(1059): transl_table=11
gtgaaaatgagagaaataaatatgattttatacattcatatccccttttgtgaaaataaatgcggctattgcgctttcaattcctatgaaaacaagcatgggttaaaagaagaatacactcaagcgttatgcctggatttaaagcatgcgttaagtcaaactgacgaaccaattgaaagcgtttttattggtggcggcacgcctaacactttaagcgtgaaggcttttgaaaggatttttgaaagcatttatcaacatgcgagcttgagcttggattgtgagatcaccactgaagctaaccccgaattgattactaaagcttggtgtcaaggcttaaaaggtttagggatcaaccgcttgagtttaggggtgcaaagttttagggaagataaattattgtttttagagcgccaacattccaaaaatatcgctcctgcgatagaaactattttaaaaagcgggattgaaaatatcagcattgatttgatttataacaccccattagacaatgaaaactctctaaaagaagaattaaaactcgctaaagaactccctatcaaccacttgagcgcttacgctttgagcgttgaaaaaaacacgaatttagaaaaaaacgccaaaaaaccctcatgcgctcattttgacaatgtggtgagagagattttagagggcttttctttcaagcaatacgaagtgtctaattacgctagaaattatcaagtcaaacacaacttggcttactggggggctaaagattatttagggtgcggggctggggctgtgggctgcgtggcgaatgagcgcttttttgcaaaaaaactcatagaaaactacatcaaagaccccctacaacgccaagttgagacgcttaataaacaagacaaacgcttagaaaagctgtttttaggcttgaggtgcgtgcttggggttgagcttagtttcttagatgaaaataaagtaaagtttttgattgaagagaacaaggctttcattaaaaataaccgcttgatagcgagcgattttttcatggccgatgaaatggctttgtggctgttatga

SEQ ID NO: 11482 - protein, 352 aa, Helicobacter pylori 26695
MKMREINMILYIHIPFCENKCGYCAFNSYENKHGLKEEYTQALCLDLKHALSQTDEPIESVFIGGGTPNTLSVKAFERIFESIYQHASLSLDCEITTEANPELITKAWCQGLKGLGINRLSLGVQSFREDKLLFLERQHSKNIAPAIETILKSGIENISIDLIYNTPLDNENSLKEELKLAKELPINHLSAYALSVEKNTNLEKNAKKPSCAHFDNVVREILEGFSFKQYEVSNYARNYQVKHNLAYWGAKDYLGCGAGAVGCVANERFFAKKLIENYIKDPLQRQVETLNKQDKRLEKLFLGLRCVLGVELSFLDENKVKFLIEENKAFIKNNRLIASDFFMADEMALWLL

SEQ ID NO: 11483 - DNA, 1113 bp, Aquifex aeolicus VF5
  CDS (1)..(1113): transl_table=11
atgataaaagccctttacgtgcacgtacctttctgctcttacaagtgtccttactgcgactttttgtcccttgtaaactctcccgtaagcgttagggattacctgagtgctctaaagagagaaataaatttgtacagagaacttgacgtaaaacttgaaactctttacttcggcggtggaacgcccacgttattaaaaccagaagaactcggtgaaattattgaggaaattgacaaggttttcgggctctcgggtgtcaaggagataacagttgagtgcaatcccgaaacttaccgcaaaaaggagtttgaggagttaaaaaaactcggtgtaaacaggataagcgtgggtgttcagagcttcacggaaaaagggttaagggttctcggaaggaaacacacggtaaaggacagtcttgagtgtcttgagagtttatttgaggcgggaattgaaaacgtgaacgtcgacctcatatggggctggcccactcagagcctgaaagatctggaagtagaactcgaacacctgaaaaagtttcccgtaaagcacgtgtccgcatacctcctcactctttacgaggacacacctatgggtcttgctttcaaaaggggtgagtttaagcctctggaagaagaggaagtggtagaacttcataaaatgctttcggaaggtttgagggagctcggttttaaaaggtatgagatttccaactgggctaaggagggttttgagtgcaggcataacctcgtttactggaaaatggaggagtttttaggggtaggcgtttctgcatggggcttttacgaaaatgtaaggtacgggaacacgaaaaatataagcaagtatgtaaaatttctaaaggaagacaaaaagcccgttgagtttagggtgcaacttgacgaaacggaactggaaaaggaaaggattatgctgggactgagaaccaccgaaggtattgaagaaaagtacttaaaatttgtaccagaatacttgagggatttctttgaagtaaaaggaggaaggctgaggataaaggaagagcaccttttaatatccaacgaattaataaccgaagttttgagaaaatacgagtcaagtcttaataaggtttaa

SEQ ID NO: 11484 - protein, 370 aa, Aquifex aeolicus VF5
MIKALYVHVPFCSYKCPYCDFLSLVNSPVSVRDYLSALKREINLYRELDVKLETLYFGGGTPTLLKPEELGEIIEEIDKVFGLSGVKEITVECNPETYRKKEFEELKKLGVNRISVGVQSFTEKGLRVLGRKHTVKDSLECLESLFEAGIENVNVDLIWGWPTQSLKDLEVELEHLKKFPVKHVSAYLLTLYEDTPMGLAFKRGEFKPLEEEEVVELHKMLSEGLRELGFKRYEISNWAKEGFECRHNLVYWKMEEFLGVGVSAWGFYENVRYGNTKNISKYVKFLKEDKKPVEFRVQLDETELEKERIMLGLRTTEGIEEKYLKFVPEYLRDFFEVKGGRLRIKEEHLLISNELITEVLRKYESSLNKV

SEQ ID NO: 11485 - DNA, 1182 bp, Treponema pallidum subsp. pallidum str. Nichols
  CDS (1)..(1182): transl_table=11
atgtcttctgaggtcggtgcgtctttgtacgtgcacatccccttctgtgcgcaacgctgtgcttactgcgatttttactccctggtgcgttcaacctattttaggcctcatcagccttgtccgcattttatcgatcggctgctacaggatgtggcattgcagcgggagtgctttggggtccaggggtggcagacagtgtatatgggtggaggtaccccttcgctattggcaccgcaggacattcgtcatttttgcgtagcgttacgcgccgcgcagcggtatccgattcaggagttcactcttgaggtgaatcctgaggatgtgaccgaagagtttttgtgtgcgtgtgcagaaggcggagtaaaccgtttatcccttggggtacaaagtctgcgtgatgaggtgttgcgtgcggagcgtcgtgcagcctctgctgaatgtgctcgtaccgcgctccgcgtgatgacggcaaatgcgcgctttttctctggcggggtgcgtatttcagcagatctcatcgctggattgcgcgggcaaacggcgcgaatggtgcgtgaggatatagatgagcttttgtcttttgggctgagacacgtgtcgctatatgggttgtgtgtaccgcatccgactgaaacgcaagaggagcgaattgcagcgctttgggcacacggcagcgcgtatctggtgcgtgcaggatttaaccggtatgagctttcgaattttgcacgtactgcggcggacgagagcgcgcacaacagagcatattggcggatggcaccgcacgcaggggtggggcctggcgcagttggcacgcgttttgtcaacctttctttatcaaaggagggggcgtgggcgatccgcagcacggtgcggaaacatcttggccaatacttagcagaagtgtgtcgggaaaatgtgtatgagcacgaattccttacagaacatatgtgtgtgcaagaagcattgttaatgggattacgtcttgaacagggactggatgtggttacatttcgtgcgcggttcgggaagggaattgaagcgtacattggcaaaacaatcgcgcggtggcagtgtcatggccgaatgcagcggacggcgacgtcattgcgtttgagtgcgcaggcacgggtatttctggacagttttttgcgagaggcgtttgcagaacttgcgcgcacgtga

SEQ ID NO: 11486 - protein, 393 aa, Treponema pallidum subsp. pallidum str. Nichols
MSSEVGASLYVHIPFCAQRCAYCDFYSLVRSTYFRPHQPCPHFIDRLLQDVALQRECFGVQGWQTVYMGGGTPSLLAPQDIRHFCVALRAAQRYPIQEFTLEVNPEDVTEEFLCACAEGGVNRLSLGVQSLRDEVLRAERRAASAECARTALRVMTANARFFSGGVRISADLIAGLRGQTARMVREDIDELLSFGLRHVSLYGLCVPHPTETQEERIAALWAHGSAYLVRAGFNRYELSNFARTAADESAHNRAYWRMAPHAGVGPGAVGTRFVNLSLSKEGAWAIRSTVRKHLGQYLAEVCRENVYEHEFLTEHMCVQEALLMGLRLEQGLDVVTFRARFGKGIEAYIGKTIARWQCHGRMQRTATSLRLSAQARVFLDSFLREAFAELART

SEQ ID NO: 11487 - DNA, 1137 bp, Chlamydia trachomatis D/UW-3/CX
  CDS (1)..(1137): transl_table=11
atgaatggtaagactcccttagctctttacatacatatccctttctgctcgaagaaatgtcattattgtagtttctatacgatcccgtataaagaagagttaatgcgctcttattgtgaagctgtcattaaagaggggctaaaaaaactagcccctctacgttgttctcactatattgatacagtattctttggaggagggactccttctttagttccccctgctttgattcaagatattctcgtagctctagaagctcagcatgccacagaaatcactcttgaagcaaaccctgaaaatctttctctggagtatatccaggctctcgccttgacctcgatcaatcgcattagcattggcgtacaaacattcaatgatcccctacttaagctactaggacgcacacactcttcatctaaagcgattgaagcctttatgctctgctcccaatacggattttctaatgtgtctgcagaccttatttatggcctccctacacagtcgattagtgattttattgttgatcttcaccaagctatttctctcccaatccaacacatctctatttataatctaactatagaccctcacacctccttttacaaacaccgtaaacgtattcttccatccatagcagatgacgactccctagctgagatggcactagcagccgaagagctactagagaatcaaggatttactcgctatgaacttgcttcctatgcaaaaaaccaagcggcttctaaacacaatacctactactggacagctaagcctttcttaggattaggagtttctgcctcacaatatctccatggcattcgatccaaaaacctttctaggatctcgcattacttacgagctgcgcatcaacatctaccgactttagagtctatggaagagctccctccaaacgaacgcattaaagagactctagctttgcgcctccgtctctgcgaccccatcccctttggagttttccctcaggaactcatagacgaaatattaatgcacccgtctataggttctctatttactaaggatgacaaagctttttcattaaataaaaaagggcgtctttttcatgattctatagcagaagaaatcatggcttcttctttttcattttcaaaataa

SEQ ID NO: 11488 - protein, 378 aa, Chlamydia trachomatis D/UW-3/CX
MNGKTPLALYIHIPFCSKKCHYCSFYTIPYKEELMRSYCEAVIKEGLKKLAPLRCSHYIDTVFFGGGTPSLVPPALIQDILVALEAQHATEITLEANPENLSLEYIQALALTSINRISIGVQTFNDPLLKLLGRTHSSSKAIEAFMLCSQYGFSNVSADLIYGLPTQSISDFIVDLHQAISLPIQHISIYNLTIDPHTSFYKHRKRILPSIADDDSLAEMALAAEELLENQGFTRYELASYAKNQAASKHNTYYWTAKPFLGLGVSASQYLHGIRSKNLSRISHYLRAAHQHLPTLESMEELPPNERIKETLALRLRLCDPIPFGVFPQELIDEILMHPSIGSLFTKDDKAFSLNKKGRLFHDSIAEEIMASSFSFSK

SEQ ID NO: 11489 - DNA, 1200 bp, Rickettsia prowazekii str. Madrid E
  CDS (1)..(1200): transl_table=11
atgtccagagcatctaaacttagcattagaacaaaaaatatgagagttatggctaatgatttaagtatttacattcattggccgttttgtttgtcaaaatgtccgtattgtgattttaattctcatatagtaagtactatagattataatcagtggcttaagtcttatgaaaaggaaattgagtattttaagtttattattcaaaataaatatataaaatctattttttttggtggcggcactccttcactaatgcagcctttaatagttgaagtgataataaataaaataaataatctaggaattattgataataaaactgagataactctagaaactaatcctacatcctttgaaactgagaagcttaaagcgtttaaatctgctggcattaatcgtgtttctattggagtacaatccttaaaagaagacgatttaaaaaaattaggtagaactcatgattctatgcaagccataaaaacaattgaggcagcaaatacaattgttccaagagtatcgtttgatttgatatatgcacgtaatggtcagacattaaaagattgggaaaaagagttaaagcaagctatgtacctggctacctcacatattgcactgtatcaattaactattgaaaaaggtacaccattttataaattatttaaaaacggtaatttaattttgcctacttcggatgaagcagctgagatgtatgagtggacaaatcattatctagaatctaaaaagtattttagatatgaaatatccaattatgctaggctagggcatgaatgtttgcataatttaacttattggaattataatagttatttaggtataggtcctggagcgcatagtagaataattgaaaattcaaattcagtattagcaattatgatgttgcataatcctgcacaatggttagatgctgttagcacaaaaaatgtcggtattcaaactcattctaagttaacaaataaagaaataatagaagaaatcttaatgatgggtttacgtcttagaaagggtataaagatttccaaattagagcagagattgagcacagcattagaaaatattttagacataaataacctgcaacattatcaaaaccaaggattaattaagttagatgaacatatctatcttactgataaaggtttaatgctgcataattacatagttcctagattgattagataa

SEQ ID NO: 11490 - protein, 399 aa, Rickettsia prowazekii str. Madrid E
MSRASKLSIRTKNMRVMANDLSIYIHWPFCLSKCPYCDFNSHIVSTIDYNQWLKSYEKEIEYFKFIIQNKYIKSIFFGGGTPSLMQPLIVEVIINKINNLGIIDNKTEITLETNPTSFETEKLKAFKSAGINRVSIGVQSLKEDDLKKLGRTHDSMQAIKTIEAANTIVPRVSFDLIYARNGQTLKDWEKELKQAMYLATSHIALYQLTIEKGTPFYKLFKNGNLILPTSDEAAEMYEWTNHYLESKKYFRYEISNYARLGHECLHNLTYWNYNSYLGIGPGAHSRIIENSNSVLAIMMLHNPAQWLDAVSTKNVGIQTHSKLTNKEIIEEILMMGLRLRKGIKISKLEQRLSTALENILDINNLQHYQNQGLIKLDEHIYLTDKGLMLHNYIVPRLIR

SEQ ID NO: 11491 - DNA, 1038 bp, Helicobacter pylori J99
  CDS (1)..(1038): transl_table=11
atgatattatacattcatatccccttttgtgaaaataaatgcggttattgcgctttcaattcctatgaaaacaagcatgggttaaaagaagaatacattcaagcgttgtgcctggatttaaagcatgcgttaagccaaactgacgaaccaattgaaagtatttttattggcggcggcacgcccaacactttgagcgtgaaggcttttgaaaggatttttgaaagcattcatcaacatgcgagcttgagcatggattgtgaaatcaccactgaagctaaccctgaattgatttctaaagcttggtgtcaaggcttaaaagatttagggatcaaccgcttgagtttaggggtgcaaagttttagggaggataaattgttgtttttagagcgccagcattccaaaaatatcgcccctgtgatagaaattatttttaaaagcgggattgaaaatatcagcattgatttgatttataacaccccactagacaatgaaacctccttaaaagaagaattgaaactcgctaaagaactccccataaaccacttgagcgcttatgctttgagtattgaaaaaaacacgaatttagaaaaaaacgccaaaaaaccctcaagcgtggattttgacaatgtggtgagagaggttttagagggcttttttttcaagcaatacgaagtgtctaattacgctagaaattatcaagtcaaacacaacttagcttactggggggctaaagattatttagggtgtggggctggggctgtgggctgcgtggcgaatgagcgcttttatgcgaaaaaactcatagaaaactacattaaagaccccctaaaacgccaagttgagacgcttaataaacaagacaagtgcttagaaaagctgtttttaggcttgaggtgtgaattgggggttgagcttagcttgttagatgaaaataaagtaaagtttttgattgaagagaataaggctttcattaaaaataaccgattgatagcgagcgattttttcatggccgatgaaatggctttgtggctgttgtga

SEQ ID NO: 11492 - protein, 345 aa, Helicobacter pylori J99
MILYIHIPFCENKCGYCAFNSYENKHGLKEEYIQALCLDLKHALSQTDEPIESIFIGGGTPNTLSVKAFERIFESIHQHASLSMDCEITTEANPELISKAWCQGLKDLGINRLSLGVQSFREDKLLFLERQHSKNIAPVIEIIFKSGIENISIDLIYNTPLDNETSLKEELKLAKELPINHLSAYALSIEKNTNLEKNAKKPSSVDFDNVVREVLEGFFFKQYEVSNYARNYQVKHNLAYWGAKDYLGCGAGAVGCVANERFYAKKLIENYIKDPLKRQVETLNKQDKCLEKLFLGLRCELGVELSLLDENKVKFLIEENKAFIKNNRLIASDFFMADEMALWLL

SEQ ID NO: 11493 - DNA, 1122 bp, Chlamydophila pneumoniae CWL029
  CDS (1)..(1122): transl_table=11
atgaatggtaaggctcccctagctctttatattcatattcccttctgcacaaaaaaatgtcgctattgcagtttttatacaatcccctacaaaagtgaatctgtatcgctctattgtaatgctgtaattcaagaggggctaagaaagctagcccccatccaagagacgcatttcatagagactgtgttttttggagggggaacaccttcattagtttctcctcttgatcttaagcgcatcctcaaagagctagccccccatgcccgggaaattactttagaggccaaccccgaaaatctcaccgtaagctatctacgtcaactacaagagactccaataaatagaattagcgttggcgtacaaaccttcgacgactctatcctacagctcctcggaagaacgcattcttcatctgcggcaatcacagcactgcaagaatgccagaatcacggattctctaatctttctatagacctaatctacggactgcccacacagtctttggagatattcctaagcgacctacatcaagctctgactctccctatcactcacatttctctatacaacctcactatagatccccacacctccttctataaacaccgcaaaattctagtccccacaattgcccaagaagaaattctagctgagatgagcctccttgctgaaaatctcctactctcccaagggttccaacgctatgaacttgcttcatatgccaagccagattaccccgcaaagcacaacctctattactggacagatcgccctttcttaggcttaggagtttcagcttcgcaataccttcacggagagcggtcaaaaaattatagtcatatttctcactatctacgtgctgtacgtaagaatctccctacccaagagacctcagaaattctcccaaaaaaagaacgaatcaaagaagccttagccctgcgactccgactccttgaaggagcagacctcgcggagttcccctccacacttatctccatgcttacgcaagatgtaaaattacaaaacctattcagtgtgcatggacaatgtcttgccctaaatagacagggccgtctcttccacgatacaatagcggaagagattatgggatattccttctaa

SEQ ID NO: 11494 - protein, 373 aa, Chlamydophila pneumoniae CWL029
MNGKAPLALYIHIPFCTKKCRYCSFYTIPYKSESVSLYCNAVIQEGLRKLAPIQETHFIETVFFGGGTPSLVSPLDLKRILKELAPHAREITLEANPENLTVSYLRQLQETPINRISVGVQTFDDSILQLLGRTHSSSAAITALQECQNHGFSNLSIDLIYGLPTQSLEIFLSDLHQALTLPITHISLYNLTIDPHTSFYKHRKILVPTIAQEEILAEMSLLAENLLLSQGFQRYELASYAKPDYPAKHNLYYWTDRPFLGLGVSASQYLHGERSKNYSHISHYLRAVRKNLPTQETSEILPKKERIKEALALRLRLLEGADLAEFPSTLISMLTQDVKLQNLFSVHGQCLALNRQGRLFHDTIAEEIMGYSF

SEQ ID NO: 11495 - DNA, 1176 bp, Vibrio cholerae O1 biovar eltor str. N16961
  CDS (1)..(1176): transl_table=11
atgctaacgcctccatcgcttagcctatacattcatattccgtggtgcgtgcagaaatgcccgtattgcgatttcaactcgcacgcacagaaaggcgagattcctgagcaagagtatctggatgcgctgctgcaagatctggatcgcgacatcgaacgttaccagctcaagggagatccgcgcctgctgcactcgatctttattggcggtggcacaccgagccttatctcagcagaagggatcgcgcgtttgctgcaaggcgttgccgagcgtattgcgtttaagccagagattgaaatcaccatggaagccaaccccggcacgattgaagcgcagcgttttgctggctatcgcaccgctggggtaacacgtatttcgattggtgtacagagttttgagccagaaaaattagcgcgtttagggcgcattcacggtcaacaagaagcggtacgcgccgctcagctcgcccatcaaattggcctcaacagctttaatttggatttgatgcacggcttaccggatcaaacgccagagcaagcactggctgacttggatcaggcgatcgcgctcaatccgccgcatctctcttggtatcaactgaccattgaacccaacacgctgttttactcgaaaccgcctaagctgccggatgaagatgcactatgggatattttcgagttaggacatcaaaagctcagtgatgcagggtatgtgcagtatgagatttctggctacagcaagccgggctatcagtgccagcacaacctcaactattggcgctttggtgactacctcgggattggctgtggcgcgcacggcaaactgagttttgctgatgggcgcattgtccgcaccaccaaaaccaagcacccgcgcggctacttggcagcgttgaacaatctggccaaagcttatttggatagcgagcagttggttgccgatcaagacaagccgtttgagttttttatgaaccgctttcgcttgattgagccctgcccgaaagccgattttaccgccaccacgggacttacgattgacgtgatccgcccgaccttagattgggcgctcagtgaaggctatctcagtgaagatgatcagcactggcaaatcacggaaaagggcaaactgttcctcaatgatctgctcgaagcctttatggccgatgaagaagaataa

SEQ ID NO: 11496 - protein, 391 aa, Vibrio cholerae O1 biovar eltor str. N16961
MLTPPSLSLYIHIPWCVQKCPYCDFNSHAQKGEIPEQEYLDALLQDLDRDIERYQLKGDPRLLHSIFIGGGTPSLISAEGIARLLQGVAERIAFKPEIEITMEANPGTIEAQRFAGYRTAGVTRISIGVQSFEPEKLARLGRIHGQQEAVRAAQLAHQIGLNSFNLDLMHGLPDQTPEQALADLDQAIALNPPHLSWYQLTIEPNTLFYSKPPKLPDEDALWDIFELGHQKLSDAGYVQYEISGYSKPGYQCQHNLNYWRFGDYLGIGCGAHGKLSFADGRIVRTTKTKHPRGYLAALNNLAKAYLDSEQLVADQDKPFEFFMNRFRLIEPCPKADFTATTGLTIDVIRPTLDWALSEGYLSEDDQHWQITEKGKLFLNDLLEAFMADEEE

SEQ ID NO: 11497 - DNA, 1158 bp, Bacillus halodurans C-125
  CDS (1)..(1158): transl_table=11
atgccaaaagcagcttatattcatatcccattttgtgagcatatttgttactactgtgatttcaataaattttatttgaaaaaccagccggtaaatgagtatttacaagctttagaaacagaaatggcgatggttgttgcagaacagccgactaaatcattgcaaaccctctatgtcggtggcggtacaccgaccgctttaacggctgatcagttagctcagctgctagcgagtattaaacggacgttgcctttaagcgatttggaggaattcacctttgaggtgaaccctgacagcattgatgaggaaaagctcgacgttcttcgctcgtacggtgtggatcgtttgagcataggggttcaagcctttcaaccattgcttttaaaagagattggcagaacgcatgatcaaaagagtgtggagcaagccgttgagaagagtcggcaagccgggtttgcgaatctatccctcgatttgatgctcggtttaccaaagcaaacacctgagatgtttgcggaaaccttaaaagaagcatttgccctcgaggtagaacatttgtcctgttattcattaaaagtggaggcaaagacggttttctacaatcgtcaacgccaaggacgactgacgctcccgcctgaagacgatgaagtgaaaatgtacaggcagttgtgttatgagacggaaaaacatggatttaagcaatatgaaataagcaattttgcgaaaaagggatatgaaagtcggcataatctcgtgtattggaacaatgatgaatattacgggtttggcgcaggggcccacggatatgtaggcggtgttcgttatatgaaccatggccctctgccaaaatatttgcaagccatggaagaaggaaggcggcctgtttttgagtcccatcatgtatcgagagttgaacaaatggaggagcaaatgtttcttggcttgcgaaaacgatcaggtgtagaggagcgtgtatttgttgagcgctttggcgtctcgatgttctccttgtatgagaagcaaatcgcccaattggtcgcacgctgtttgctcgagcgtacagatgaccgtgtccgcttaaccgacgaggggctattattaggaaatgaagtattcgaacaattcttagctgtattagacgaaggaaagcagcaatga

SEQ ID NO: 11498 - protein, 385 aa, Bacillus halodurans C-125
MPKAAYIHIPFCEHICYYCDFNKFYLKNQPVNEYLQALETEMAMVVAEQPTKSLQTLYVGGGTPTALTADQLAQLLASIKRTLPLSDLEEFTFEVNPDSIDEEKLDVLRSYGVDRLSIGVQAFQPLLLKEIGRTHDQKSVEQAVEKSRQAGFANLSLDLMLGLPKQTPEMFAETLKEAFALEVEHLSCYSLKVEAKTVFYNRQRQGRLTLPPEDDEVKMYRQLCYETEKHGFKQYEISNFAKKGYESRHNLVYWNNDEYYGFGAGAHGYVGGVRYMNHGPLPKYLQAMEEGRRPVFESHHVSRVEQMEEQMFLGLRKRSGVEERVFVERFGVSMFSLYEKQIAQLVARCLLERTDDRVRLTDEGLLLGNEVFEQFLAVLDEGKQQ

SEQ ID NO: 11499 - DNA, 1155 bp, Pasteurella multocida subsp. multocida str. Pm70
  CDS (1)..(1155): transl_table=11
gtgaatataaaccgccttcccccactaagcctgtatattcatattccttggtgtgtacaaaaatgcccttattgtgattttaattctcatgcacaaaaaggacatattcctgaacaagactatattgcccacttattgcaagatctacatcaagatcggcaacgttttcaagacagtattcaagatcgttctctccattcgatttttattgggggaggaacacctagtctattttctgcggaaggaattcatacgctcttatctggcgttgcacaatgtctcccttttcaacccgacattgaaattacgcttgaagctaatcccggtacagccgaagcagaacgtttcaaaggttatgtccaagcaggtgtcacccgcatttcaatgggtattcaaagcttcaatgatgataaattagtacgtttaggtcgcatccataatgcacaagaagccaaaagtgcggttggttttgccaaactttctgggctaaaaagttttaatttagatctgatgcacgggctacctaaccagaccttagaagaagcgctctctgatttacaacaagcgattgcactcgagcctccccacctttcttggtatcaactcactattgaacctaatacgatgtttgcctatcgtccgcccgttttgcctgatgatgacgcactctgggatatttttgaacaaggtcatcaactattaacggaggcaggttatgtgcaatatgaaacctctgcttatgcgaaacccgcttttcaatgtcggcataacctgaattattggcgttttggtgattatttagcaattggttgtggtgcacatggtaaaatcacacaaccaaacggcgaaattaaacgttattcaaaaaccaaacatccaaaaggttatatgcgtggggactatttgtacgaagaaaaaaccgttgccacagaagatctggcttttgaattttttatgaaccgttttcgtttattagaagcggtccccaaaacagatttcacccgactcactggactgtgtgaagaaagtattcagccacaaattcaatgggcattagccaaaaaatatcttgttgaaacggaagttgcatggcaagtgaccgaacaaggcaagttatttttaaatgaattgttagcagaatttttaccaaaatag

SEQ ID NO: 11500 - protein, 384 aa, Pasteurella multocida subsp. multocida str. Pm70
MNINRLPPLSLYIHIPWCVQKCPYCDFNSHAQKGHIPEQDYIAHLLQDLHQDRQRFQDSIQDRSLHSIFIGGGTPSLFSAEGIHTLLSGVAQCLPFQPDIEITLEANPGTAEAERFKGYVQAGVTRISMGIQSFNDDKLVRLGRIHNAQEAKSAVGFAKLSGLKSFNLDLMHGLPNQTLEEALSDLQQAIALEPPHLSWYQLTIEPNTMFAYRPPVLPDDDALWDIFEQGHQLLTEAGYVQYETSAYAKPAFQCRHNLNYWRFGDYLAIGCGAHGKITQPNGEIKRYSKTKHPKGYMRGDYLYEEKTVATEDLAFEFFMNRFRLLEAVPKTDFTRLTGLCEESIQPQIQWALAKKYLVETEVAWQVTEQGKLFLNELLAEFLPK

SEQ ID NO: 11501 - DNA, 1155 bp, Pseudomonas aeruginosa PAO1
  CDS (1)..(1155): transl_table=11
gtgacccaagccaccccgttccagctcccgcccctggccctgtacgtgcacatcccgtggtgcgtgcgcaagtgcccgtattgcgacttcaactcccacgccgctggcccggagctgcccgaagaggcctatgtcgacgccctgctcgccgacctggagcaagacctgcgccatgtccacggccggcgcctgggttcgatcttcttcggcggcggcacgcccagcctgttctcggccaaggccctgggccggctactggaaggcgtcgagcgcagggtcggcttcgccgacggcatcgagatcaccctggaagccaatcccggcaccttcgaacaggtcaagttcgccgactaccggcgcctcggcatcaatcgcctgtccatcggcgtgcagagcttccaggccgacaagctgcaggccctggggcgcatccacgacggcgccgaggcagtgcgcgccgccgacatggcgcgccaggccggcttcgacaacttcaacctcgacctgatgcacggcctgcccgggcagagcctcgacgacgccctggccgacctgcgccaggccctcgccctggcccccacgcacctctcctggtaccaactgaccatggagccgaacacggtgttctggagccagccgccggagctgcccgaggacgacatcctctgggacatccaggaagccggccaggccctgctcgacgagcacggctaccgccagtacgagacctccgcctacgcccgcgacggcctgcgcgcccggcacaacctgaactactggagcttcggcgacttcctcggcatcggcgccggcgcccacgccaagctgagcgcgccggacggacgcatcgtgcggacctggaagacccgcctgccgaaggactacctcaacccgcaaaaggccttccaggccggcgagcgcccgctggaagcggccgacctgccattcgagttcatgatgaacgtgctgcgcctggtcgacggcgtccccgccgcgctctacccgcagcgcaccggccagccactggcggcgatcgccgatgcctgcgccgccgcgcgcgacgccgggctgctcgccgacgacccgcagcacctgcgtcccagcgaacgcggccagctgttcctcaacgacctgctgcaacatttcctgccgtga

SEQ ID NO: 11502 - protein, 384 aa, Pseudomonas aeruginosa PAO1
MTQATPFQLPPLALYVHIPWCVRKCPYCDFNSHAAGPELPEEAYVDALLADLEQDLRHVHGRRLGSIFFGGGTPSLFSAKALGRLLEGVERRVGFADGIEITLEANPGTFEQVKFADYRRLGINRLSIGVQSFQADKLQALGRIHDGAEAVRAADMARQAGFDNFNLDLMHGLPGQSLDDALADLRQALALAPTHLSWYQLTMEPNTVFWSQPPELPEDDILWDIQEAGQALLDEHGYRQYETSAYARDGLRARHNLNYWSFGDFLGIGAGAHAKLSAPDGRIVRTWKTRLPKDYLNPQKAFQAGERPLEAADLPFEFMMNVLRLVDGVPAALYPQRTGQPLAAIADACAAARDAGLLADDPQHLRPSERGQLFLNDLLQHFLP

SEQ ID NO: 11503 - DNA, 1140 bp, Lactococcus lactis subsp. lactis Il1403
  CDS (1)..(1140): transl_table=11
atgttgcaaaaacctaattcggcttattttcacattcctttttgttctcatatttgttattattgcgattttgctaaagtactgatgacaggacagccgattgatgcttatattgaatcgctcatagaagaatttcaaagttttgagatagaaaaattaagaacaatctatattggtggtggaacgcccagcgttttatcagcccaacaacttgaacgtttactgacagcgattgctgaacagttagatttagaagttttggaagaatttactgttgaagcaaatccgggggatttatcagatgaggttattaaagttttggctgattcagcagtaaatcgaatttcattaggtgtccaaacttttaataatgctttgctcaaaaaaatcgggcggacacatacagaagttcaagtctatgattcagttgaaagactgaaaaaagctggatttgaaaatattacgattgatttaatctatgctttacctgggcaaacgatggagatggttaagtcagatgttgaaaaatttttagaattaaaactaccacatgtggcattatatagtcttattttagaggaccatacagtttttatgaatcgacaacgtcgtggtcttttacgcctaccaagtgaagataaaaatgcggacatgtatgaatatatcatggatattttagctaaaaatggttataatcactatgaagtttcaaattttggcttaccaggatttgagagcaaacataatataacttattgggataatgaggaatattatggaattggcgctggagcgtcaggatatttagcagggattcgttataaaaatcttggtccagttcatcattaccttaaagctgctccaactgaaaaaaggataaatgaagaagttttaagtaaaaaatctcaaatagaagaagaaatgttcttaggtcttcggaaaaaatcgggagttttggttgagaagtttgaaaataaattcaagtgttcatttgaaaaattatacggtgaacaaatcacagaacttattaatcaaaaattattatataatgatagacaaagaatccatatgacagacaaaggttttgagttggggaataatgtctttgagaaatttttgctcgatgatattaatttttaa

SEQ ID NO: 11504 - protein, 379 aa, Lactococcus lactis subsp. lactis Il1403
MLQKPNSAYFHIPFCSHICYYCDFAKVLMTGQPIDAYIESLIEEFQSFEIEKLRTIYIGGGTPSVLSAQQLERLLTAIAEQLDLEVLEEFTVEANPGDLSDEVIKVLADSAVNRISLGVQTFNNALLKKIGRTHTEVQVYDSVERLKKAGFENITIDLIYALPGQTMEMVKSDVEKFLELKLPHVALYSLILEDHTVFMNRQRRGLLRLPSEDKNADMYEYIMDILAKNGYNHYEVSNFGLPGFESKHNITYWDNEEYYGIGAGASGYLAGIRYKNLGPVHHYLKAAPTEKRINEEVLSKKSQIEEEMFLGLRKKSGVLVEKFENKFKCSFEKLYGEQITELINQKLLYNDRQRIHMTDKGFELGNNVFEKFLLDDINF

SEQ ID NO: 11505 - DNA, 1131 bp, Streptococcus pyogenes M1 GAS
  CDS (1)..(1131): transl_table=11
atgtcaaaaaaacctacttcagcctatgtgcacattcctttttgcacacaaatttgttattattgcgatttttcaaaagtctttatccaaaatcaacctgttgatgcttatttgaaagccttgattcaagaatttgactcttatggcattcgagacctaaaaaccctttatattggaggaggtacgcctacagctatcactgctaaacagttggagtatctcctaaatcaccttgaacgaaacctcaatttagatgatcttgaagaattcacaattgaggcaaatcctggtgatttgacgccagaaaaaattgcggtgcttcagaggtcagctgtcaatcggatttccttgggggtgcagacttttaataacaagcaattaaagcagattggccgtagccataatgaagaacaaatttatagcaccattgccaatttaaaaactgcaggctttcacaatatttccattgatttaatttatgccttgccaggtcaaaccttagatcaagtcaaggaaaatgttgctaaagctttggcacttgatattccccaccttagtctttatagccttattttggaacatcacactgtttttatgaacaaaatgcgacgtggtaaacttaacttaccaacggaagacttggaagcggaaatgtttgagtacattatttcagaaatggaagctaatggttttgagcattatgaaatttccaattttaccaaaccaggttttgaaagtcgccataacttgatgtattgggataatgtggagtattttggatgtggtgcaggggcttcaggttaccttaatggcattcgttatcagaatcgggtgcccatccagcattatcttaaagcggttgaagcagggaatgctagactaaatgaagaagtgctgcgcaaagaggaaatgatggaagaggaactctttttgggcttacgtaaaaagacaggagtctccatccagcggttccaagaaaaatttggtatgtcttttgaggagcgttatggaaatattgttagggagcttcaaaaccaaggactgcttgtcaaagatgacgcctttgtcagaatgactaaaaagggtcttttcttaggtgattctgttgctgagcggtttatattagattag

SEQ ID NO: 11506 - protein, 376 aa, Streptococcus pyogenes M1 GAS
MSKKPTSAYVHIPFCTQICYYCDFSKVFIQNQPVDAYLKALIQEFDSYGIRDLKTLYIGGGTPTAITAKQLEYLLNHLERNLNLDDLEEFTIEANPGDLTPEKIAVLQRSAVNRISLGVQTFNNKQLKQIGRSHNEEQIYSTIANLKTAGFHNISIDLIYALPGQTLDQVKENVAKALALDIPHLSLYSLILEHHTVFMNKMRRGKLNLPTEDLEAEMFEYIISEMEANGFEHYEISNFTKPGFESRHNLMYWDNVEYFGCGAGASGYLNGIRYQNRVPIQHYLKAVEAGNARLNEEVLRKEEMMEEELFLGLRKKTGVSIQRFQEKFGMSFEERYGNIVRELQNQGLLVKDDAFVRMTKKGLFLGDSVAERFILD

SEQ ID NO: 11507 - DNA, 1176 bp, Neisseria meningitidis MC58
  CDS (1)..(1176): transl_table=11
atgcacaccatttcctttccaaaccgcacccgactcaccgccctgccgcccctgtcgctttacatccacatcccgtggtgcatcaaaaaatgcccgtattgcgacttcaattcccacagcctgaaaaacggattgcccgaagccgcctatatcgacgcgctgctgaccgatttgcagcttgaattgcccaatatttggggcaggccggtggaaacgatctttttcggcggcggtacgcccagcctgtttcaggcggaatcgattgaccgtttgttaagcggcgtgcgttcgctgttgcgcttgcagccggaagcggaaattaccttggaagccaatccggggacatttgaaatcgagaagtttcaaggatttaaagacgcgggtattacgcggctttctatcggcgtacagagtttcaacgacgatatgctctcaaggctggggcgcgtccacaacggtaaggaagccttaaccgctatcgataccgccttgaaattatttgataaagtcaatatcgacttgatgtatgccctgccgaaccaaaccgttcagacggcattggacgacgtacaaaccgctatcgctacgggcgcaacccacatcagcgcgtatcacctgacgatggaaccgaacacgccgttcggtcatacgccgccgaaaggtttgccgcaagacgaagccgccctcgacatcgaagacgcggtacacggcgcgctggaaggcgcgggttttgtccactacgaaacatcggcttttgcgaaaccagccatgcagtgccgccacaatttgaactactggcagttcggcgattatttaggcataggcgcgggcgcgcacggcaaaatttcctatcccgaccgcatcgagcgcaccgtccgccgccgccaccccaacgactacctcgccttaatgcaaagccaaccgagtgaagccgtcgaacgcaaaaccgtcgctgccgaagatttgccgttcgaattcatgatgaacgccctgcgcctgaccgacggcgtacccgccgcgatgttgcaggagcgcacgggcgtaccgagtgccaaaatcatggcgcaaatcgaaacggcaaggcaaaaaggcctgctggaaaccgaccctgccgtattccgcccgaccgaaaaaggacgcttgtttttaaacgatttgctgcagtgttttttatag

SEQ ID NO: 11508 - protein, 391 aa, Neisseria meningitidis MC58
MHTISFPNRTRLTALPPLSLYIHIPWCIKKCPYCDFNSHSLKNGLPEAAYIDALLTDLQLELPNIWGRPVETIFFGGGTPSLFQAESIDRLLSGVRSLLRLQPEAEITLEANPGTFEIEKFQGFKDAGITRLSIGVQSFNDDMLSRLGRVHNGKEALTAIDTALKLFDKVNIDLMYALPNQTVQTALDDVQTAIATGATHISAYHLTMEPNTPFGHTPPKGLPQDEAALDIEDAVHGALEGAGFVHYETSAFAKPAMQCRHNLNYWQFGDYLGIGAGAHGKISYPDRIERTVRRRHPNDYLALMQSQPSEAVERKTVAAEDLPFEFMMNALRLTDGVPAAMLQERTGVPSAKIMAQIETARQKGLLETDPAVFRPTEKGRLFLNDLLQCFL

SEQ ID NO: 11509 - DNA, 1068 bp, Campylobacter jejuni subsp. jejuni NCTC 11168
  CDS (1)..(1068): transl_table=11
atgcatttttatatccatattccattttgtgaaagcaaatgtaattattgcgcttttacaagtttgaaaaaaaatgattatgaaaaagcctattttaaggctttaaaagaagatattgtttttcaattaaaacaatttaacattcaatcaaatcaaattaaaaccttattcataggcggaggaacaccaagttgtgttaatgcgtataattatgaagatatttttaaaattttatatcccttactagataaaaatgtagaaatttcatgcgaagctaatcccaactcagcaacattaaattggcttaaaaatatgaaaaatctaggagttaatcgcatttcttttggagttcaaagttttcatcctaaaaaacttcactttcttggaagaattcacaatcaagaaatgattatcaaaacattagaaaacgcaaataaagtaggttttaaaaatatcaatttagatcttatttatgatacgaaattagacaataaaaaaatgcttgaatttgaactcttacacttaaaacaaatcaaggatttaatcacacaccttagtgcttataatttaaccatagaatcaaacacagcctttgctaaaaaagaacatttcaaaaaaaatgctcctaatttaatgaaatttttcatcaaacaacttctagagcttgacttttttcaatatgaaatcagtaatttttcaaaaaccaaagcccaaatttgcaaacataatcttgcttattggcaaggaaaaaactacctagcttgtggattaagtgcagtaggattttatgaaaataagcgtttttatacagcaaaaaatttaaaaaattacatagaaaatcctacttttagatctatagagcaactaagttccaaagacttgaatttagagcacctatttttaggacttagaagtatagtagggattgatgaaacaaaactcaatcaatggcaaaaagacaaaataaatatattattaaaagaaaaaaaacttttttacaaaaataaaagatattttaatcctaattttctcattagcgatgaacttgctttatatctctcatcttaa

SEQ ID NO: 11510 - protein, 355 aa, Campylobacter jejuni subsp. jejuni NCTC 11168
MHFYIHIPFCESKCNYCAFTSLKKNDYEKAYFKALKEDIVFQLKQFNIQSNQIKTLFIGGGTPSCVNAYNYEDIFKILYPLLDKNVEISCEANPNSATLNWLKNMKNLGVNRISFGVQSFHPKKLHFLGRIHNQEMIIKTLENANKVGFKNINLDLIYDTKLDNKKMLEFELLHLKQIKDLITHLSAYNLTIESNTAFAKKEHFKKNAPNLMKFFIKQLLELDFFQYEISNFSKTKAQICKHNLAYWQGKNYLACGLSAVGFYENKRFYTAKNLKNYIENPTFRSIEQLSSKDLNLEHLFLGLRSIVGIDETKLNQWQKDKINILLKEKKLFYKNKRYFNPNFLISDELALYLSS

SEQ ID NO: 11511 - DNA, 1200 bp, Neisseria meningitidis Z2491
  CDS (1)..(1200): transl_table=11
ttgtccacttttccgaaccacaccatgcacaccatttcctttccaaaccgcacccgactcaccgccctgccgcccctgtcgctttacatccacatcccgtggtgcatcaaaaaatgcccgtattgcgacttcaattcccacagcctgaaaaacggattgcccgaagccgcctatatcgacgcgctgctgaccgacttgcagcttgaattgcccaatatttggggcagaccggtggaaacgatctttttcggcggcggtacgcccagcctgtttcaggcggaatcgattgaccgtttgttgagcggcgtgcgttcgctgttgcgcttgcagccggaagcggaaattacgttggaagccaatccggggacgtttgaaatcgagaagtttcaaggatttaaagacgcaggcatcacgcggctttctattggcgtacagagtttcaacgacgatatgctctcaaggctggggcgcgtccacaacggtaaggaagccttaaccgctatcgataccgccttgaaattatttgataaagtcaatatcgacttgatgtatgccctgccgaaccaaaccgttcagacggcattggacgacgtacaaaccgccatcgctacgggtgcgacccacatcagcgcgtatcatctgacgatggaaccgaacacgccgttcggtcatacgccgccgaaaggtttgccgcaagacgaagccgccctcgacatcgaagacgcggtacacggcgcgctggaaagcgcgggttttgtccactacgaaacatcggcttttgcgaaaccagccatgcagtgccgccacaatttgaactactggcagttcggcgattatttaggcataggcgcgggcgcgcacggcaaaatttcctatcccgaccgcatcgagcgcaccgtccgccgccgccaccccaacgactacctcgccttaatgcaaaaccgaccgagcgaagccgtcgaacgcaaaaccgtcgccgccgaagatttgccgttcgaattcatgatgaacgccctgcgcctgaccgacggcgtacccaccgcgatgttgcaggagcgcacgggcgtaccgagtgccaaaatcatggcgcaaatcgaaacggcaaggcaaaaaggcctgctggaaaccgaccccgccgtattccgcccgaccgaaaaaggacgcttgtttttaaacgatttgctgcagtgttttttatag

SEQ ID NO: 11512 - protein, 399 aa, Neisseria meningitidis Z2491
MSTFPNHTMHTISFPNRTRLTALPPLSLYIHIPWCIKKCPYCDFNSHSLKNGLPEAAYIDALLTDLQLELPNIWGRPVETIFFGGGTPSLFQAESIDRLLSGVRSLLRLQPEAEITLEANPGTFEIEKFQGFKDAGITRLSIGVQSFNDDMLSRLGRVHNGKEALTAIDTALKLFDKVNIDLMYALPNQTVQTALDDVQTAIATGATHISAYHLTMEPNTPFGHTPPKGLPQDEAALDIEDAVHGALESAGFVHYETSAFAKPAMQCRHNLNYWQFGDYLGIGAGAHGKISYPDRIERTVRRRHPNDYLALMQNRPSEAVERKTVAAEDLPFEFMMNALRLTDGVPTAMLQERTGVPSAKIMAQIETARQKGLLETDPAVFRPTEKGRLFLNDLLQCFL

SEQ ID NO: 11513 - DNA, 1137 bp, Escherichia coli O157:H7 EDL933
  CDS (1)..(1137): transl_table=11
  misc_feature (23)..(23): r is g or a
atggttaaattaccgccgctgartctctacattcacatcccgtggtgcgtgcagaaatgcccgtactgcgatttcaactctcacgcgttgaaaggagaagtgccgcacgacgattacgttcagcatctgcttaacgatctggacaacgatgtggcttacgctcagggccgtgaagtaaagacaatctttattggcggtggtacgccgagcctgctttccggctcggcgatgcaaacgctgctggacggcgtgcgtgcgcgtttgccgctggcagcggatgcagaaattaccatggaagcgaaccccggtacggtagaagccgatcgctttgttgattatcagcgtgccggtgtaaatcgtatctctattggggtacagagttttagcgaagaaaagctgaaacggctgggacgtattcatggcccgcaagaagcgaaacgagcggcaaagctggcgagcggtttagggttacgtagctttaaccttgatttgatgcatgggctaccggatcaatcgctggaagaggcgcttggcgatctgcgccaggctattgaactgaatccgccgcatctttcctggtatcaactgaccatcgaacctaatacgctgtttggttcacgcccgccggtactgccggacgacgacgcgctgtgggatattttcgaacaggggcatcagttattaaccgcagcgggttatcagcaatatgaaacttccgcttacgccaaacccggttatcagtgccagcacaatctcaactactggcgctttggtgactacatcggtattggctgcggcgcgcacggcaaagtgaccttcccggatgggcgcattctgcgtaccaccaaaacgcgtcatccgcgtggttttatgcaaggaaggtatctggaaagccagcgtgatgtcgaagccgcagataagccgtttgagttctttatgaatcgcttccggttgctggaacctgcgccgcgcgtggagtttagtgcgtataccgggctttgcgaagatgtgattcgcccacagttagacgaggcgattgcccagggttatctcaccgaatgtgcggattactggcagattacggaacatgggaagctgtttttaaattcgctgctggagctttttctggctgagtaa

SEQ ID NO: 11514 - protein, 378 aa, Escherichia coli O157:H7 EDL933
  misc_feature (8)..(8): The Xaa at location 8 stands for Asn, or Ser.
MVKLPPLXLYIHIPWCVQKCPYCDFNSHALKGEVPHDDYVQHLLNDLDNDVAYAQGREVKTIFIGGGTPSLLSGSAMQTLLDGVRARLPLAADAEITMEANPGTVEADRFVDYQRAGVNRISIGVQSFSEEKLKRLGRIHGPQEAKRAAKLASGLGLRSFNLDLMHGLPDQSLEEALGDLRQAIELNPPHLSWYQLTIEPNTLFGSRPPVLPDDDALWDIFEQGHQLLTAAGYQQYETSAYAKPGYQCQHNLNYWRFGDYIGIGCGAHGKVTFPDGRILRTTKTRHPRGFMQGRYLESQRDVEAADKPFEFFMNRFRLLEPAPRVEFSAYTGLCEDVIRPQLDEAIAQGYLTECADYWQITEHGKLFLNSLLELFLAE

SEQ ID NO: 11515 - DNA, 1338 bp, Escherichia coli O157:H7 EDL933
  CDS (1)..(1338): transl_table=11
atgaacgcaaataacaccctggatctcacgccacattttgctttagacggtgatcagccatttaaagacaggcgcgccatgatgccgtttcgtggagccattccggttgccaaagagcaactggcacagacctggcaagagatgatcaatcaaacggcatcacctcgtaagcgactggtttacctacacattcctttttgtgcgacacactgcacgttttgtggtttttatcagaaccgttttaatgaagatgcgtgtgctcattataccgacgccctgattcgtgaaatagaaatggaagcggacagcgtattgcatcagtctgcccccatccacgcggtctatttcggtggcggtacgccttccgcactttcggcacacgatttggccagaatcatcaccacattacgagaaaagctgccactggcccctgattgtgaaatcactatcgaaggacgggtattgaattttgacgctgagcgaatcgatgcttgccttgatgcaggagcaaaccgcttctcaattggtatccagtcgtttaacagcaaaatccgcaagaaaatggcccgcacctcggatggcccaaccgctattgcgtttatggaaagcctggtcaaacgtgaccgtgctgcggtggtctgtgacctgctgtttggcctgccgggtcaggatgcgcaaacctggggagaagatctggctattgcccgcgatatcggtctcgacggcgtcgatctctatgcgctcaatgtcctgtccaatacaccgctgggcaaggccgtggaaaatgggcgtactaccgtaccctcaccggcagaacgtcgcgatctttatctgcaaggatgtgattttatggacgatgccggttggcgctgcatcagtaacagccactggggccgtaccacacgcgaacgcaatctctataacctgctgattaaacaaggtgccgattgtctggcctttggttccggagccggcggttcgattaatggttactcctggatgaacgaacgcaatcttcagacctggcatgaatccgtcgcggcaggcaaaaaaccgctgatgttgatcatgcgtaacgccgaacgtaatgcgcaatggcgtcataccttgcagtcaggtgttgaaacagcgcgcgtaccgctggatgaacttacgccacatgccgaaaaactcgcgccgttactggctcaatggcaccaaaaaggcttaagtcgcgatgcttcaacttgcctgcggctgactaatgaaggtcgtttctgggcaagcaatattttgcagtctcttaatgaactaattcaggtacttaatgcgccagcgattatgcgtgaaaaaccataa

SEQ ID NO: 11516 - protein, 445 aa, Escherichia coli O157:H7 EDL933
MNANNTLDLTPHFALDGDQPFKDRRAMMPFRGAIPVAKEQLAQTWQEMINQTASPRKRLVYLHIPFCATHCTFCGFYQNRFNEDACAHYTDALIREIEMEADSVLHQSAPIHAVYFGGGTPSALSAHDLARIITTLREKLPLAPDCEITIEGRVLNFDAERIDACLDAGANRFSIGIQSFNSKIRKKMARTSDGPTAIAFMESLVKRDRAAVVCDLLFGLPGQDAQTWGEDLAIARDIGLDGVDLYALNVLSNTPLGKAVENGRTTVPSPAERRDLYLQGCDFMDDAGWRCISNSHWGRTTRERNLYNLLIKQGADCLAFGSGAGGSINGYSWMNERNLQTWHESVAAGKKPLMLIMRNAERNAQWRHTLQSGVETARVPLDELTPHAEKLAPLLAQWHQKGLSRDASTCLRLTNEGRFWASNILQSLNELIQVLNAPAIMREKP

SEQ ID NO: 11517 - DNA, 1167 bp, Deinococcus radiodurans R1
  CDS (1)..(1167): transl_table=11
gtgactttctctgcgcctgcgccgacccagctcgacccggtggtgcggcacctgtacgtacacgtgccgttttgccccagcatctgcccctactgcgatttccatgtgctgacgcggcaagccgggctggtcgagcgctatctagaacggctcgagcaggaagcggcggagctggcggcggcctacgcggtggacctcgacaccgtctacctcggcggcggcacccccagttttctgcgcgaccacgagctgcgggcgctggtggaaagcgtgcagcggcacctcggctggggccgggcggaaaacacgctggaaatcaaccctggcaccgtcagcacagagcgggccgccctctggcgttcgctcggcttcgaccgcgcctcggtgggcgtgcagagcctcgacgacgccacgctgaaatttctgggccgccgccacgacgcccggcaggcgcgggacgccgtgtcccggctcatcgcgcaggacttccgggtgagcggcgacctgattacggcggtgccggggcaaccgctcgacagcgacattcacggcctcgtcgagctcggcgtggggcacgtcagcgcctacaccctgaccatcgagcccggcaccgagttcgcccgccggggcgtacaggtggacgaggacgccgagcgcgagggcttcgaacgcaccgaggaactgctcgccgggcacggcttttcccgctacgaggtcagcaactacgcccgcgccggtcaggagtcgcgccacaacctctcctactggcagggcaaaacctatctggggctggggccgggggccgccgggcactaccccgtgcccacgccgggagccgacgctctcaccctgcggcgcaccaatccgcacctccacgactggctggtcgggcagcaaggcgagaccttgctcgtcgacccgcacgagtacgtcaccgacgccctgttcatggggctgcgattgcgcaggggcctcgacctcgccgacctcacgcgccgcagcggggtggacgtggcggggcgttacggcctggtcatcgaacggcaggtgcggctgggcctgctcgaacacagcggaacgaacctgcgggcgactgcccagggctggtgggtgctcaaccgtatcgtcagagagtttatggaagtggatgcggcagagacggcctaa

SEQ ID NO: 11518 - protein, 388 aa, Deinococcus radiodurans R1
MTFSAPAPTQLDPVVRHLYVHVPFCPSICPYCDFHVLTRQAGLVERYLERLEQEAAELAAAYAVDLDTVYLGGGTPSFLRDHELRALVESVQRHLGWGRAENTLEINPGTVSTERAALWRSLGFDRASVGVQSLDDATLKFLGRRHDARQARDAVSRLIAQDFRVSGDLITAVPGQPLDSDIHGLVELGVGHVSAYTLTIEPGTEFARRGVQVDEDAEREGFERTEELLAGHGFSRYEVSNYARAGQESRHNLSYWQGKTYLGLGPGAAGHYPVPTPGADALTLRRTNPHLHDWLVGQQGETLLVDPHEYVTDALFMGLRLRRGLDLADLTRRSGVDVAGRYGLVIERQVRLGLLEHSGTNLRATAQGWWVLNRIVREFMEVDAAETA

SEQ ID NO: 11519 - DNA, 1131 bp, Chlamydia muridarum Nigg
  CDS (1)..(1131): transl_table=11
atgaatggtaagactcctttagctctttacatacacgttcctttttgctcaaaaaaatgtcattattgcagtttttacacgatcccatacaaagaagagttagtacgctcttactgtgaagctgtgattaaagagggattaagaaagctagctcctttgcgttgtcattactatatcgacactgtattttttggaggagggacgccttcattagtcccgccttcccttattcaggatattctcacaacgctggaagctcattctgcgacagaggtcacccttgaagccaaccccgaaaatctttctcaagaatatatccgagatctgtcccagaccgcggttaatcgcataagcattggtatacaaacctttaacgatcccttgcttaaattacttggacgaacccattcctcatctaaagcgattgagacattcttactctgctctcaatacggcttttctaacttgtctgccgaccttatttatggactccccacgcaatctattagcgattttattaccgaccttcatcaagcaattactctccccatccagcatatctccgtctataatcttaccgtagatcctcatacctctttttacaaacatcgcaagagcattcttccttccatagcggatgaggattctttggcagaaatggcactaaaagccgaagaacttttagagaatcatggatttaatcgatatgaactagcctcttatgcaaaaaaccatgcagaatctaaacacaatacctactactggactgataaaccttttttaggattgggagtctcagcttcgcaatatcttaacggcatccgatctaaaaatttttctcggatttcccattatctaagagccgcgcatcaccatcaaccaactgcagaatctatggaagagctccctccctgcgagcgcattaaagaagctctagccttacgtcttcgtctctgtgatcccattcctttttgcatgtttcctgaagagctggttaatgaaattttaatgaacccatctatacgtcctctatttgcaataaatgcccaaacattttcattgaataaacaaggccgactttttcatgattctatagcagaagaaatcatgtgttcttctttttcattttaa

SEQ ID NO: 11520 - protein, 376 aa, Chlamydia muridarum Nigg
MNGKTPLALYIHVPFCSKKCHYCSFYTIPYKEELVRSYCEAVIKEGLRKLAPLRCHYYIDTVFFGGGTPSLVPPSLIQDILTTLEAHSATEVTLEANPENLSQEYIRDLSQTAVNRISIGIQTFNDPLLKLLGRTHSSSKAIETFLLCSQYGFSNLSADLIYGLPTQSISDFITDLHQAITLPIQHISVYNLTVDPHTSFYKHRKSILPSIADEDSLAEMALKAEELLENHGFNRYELASYAKNHAESKHNTYYWTDKPFLGLGVSASQYLNGIRSKNFSRISHYLRAAHHHQPTAESMEELPPCERIKEALALRLRLCDPIPFCMFPEELVNEILMNPSIRPLFAINAQTFSLNKQGRLFHDSIAEEIMCSSFSF

SEQ ID NO: 11521 - DNA, 1152 bp, Xylella fastidiosa 9a5c
  CDS (1)..(1152): transl_table=11
atgttgatcccgccgccactttcgctatatgtgcatttgccttggtgcgtgcgtaagtgcccgtactgtgatttcaactctcaccaagccaagggtgcactcccgttcgatgcttatgtcaacgcattactgcgtgacctggagtacgacttacctttggtgtggggccgtgttgtgcacagtgtgttcttgggtggcggcacgcccagcctatttcccccggaagcgattgaccgttttttgcagatcgctgcggcgcggctgcgtcttgctccggatgctgaaatcaccctggaaaccaatccggggactgccgagtatggtcgttttgatcgttatcttgccgctggcatcaatcggctgagctttggtatccaaagttttaatgatgttgcactgcggcgattggggcgtattcatgacagccttcaggctgagcacgctgtgaaactggcacaagatgccggcttcactaacatcaacttagatctaatgtatgcgctgccagaacaaaccttgcttgaagccgagcacgacttacagcgtgcatttgccctggcgcctacccatctttcctattatcagctcacccttgaacccaataccgtcttctacgctcgcccgccgcagggcattcccgatgacgatgccgcgtgggagatgcaggagcatacccaacgcctgcttgctgaggctggttaccagcattatgaggtcagcgcttacgcccgtgagggctggcagtgcctgcataatctgaactattggcgctttggagactaccttggtatcggtgccggggcacatggcaagatcacttccggagtgtcacagcatgtgttacgccgctggaaatgtaagcatccgtacacgtacttggacaatgctggtactgtctctgcgatcggtggtgatgagatcgtgccaacggcacgcttgccattcgaatatatgctcaatctattacgcctgcgcgcaggattccgattacaggattttgctgtacgtacaggactgaccgttgaatcaatccatgcagcattgagtgaggctgttgcacgcggttggttacgatgtgaacttgaacgcgtcatcccgaccgaattagggttgcgttttgctaatgatgtcatcaacttattcaatgaataa

SEQ ID NO: 11522 - protein, 383 aa, Xylella fastidiosa 9a5c
MLIPPPLSLYVHLPWCVRKCPYCDFNSHQAKGALPFDAYVNALLRDLEYDLPLVWGRVVHSVFLGGGTPSLFPPEAIDRFLQIAAARLRLAPDAEITLETNPGTAEYGRFDRYLAAGINRLSFGIQSFNDVALRRLGRIHDSLQAEHAVKLAQDAGFTNINLDLMYALPEQTLLEAEHDLQRAFALAPTHLSYYQLTLEPNTVFYARPPQGIPDDDAAWEMQEHTQRLLAEAGYQHYEVSAYAREGWQCLHNLNYWRFGDYLGIGAGAHGKITSGVSQHVLRRWKCKHPYTYLDNAGTVSAIGGDEIVPTARLPFEYMLNLLRLRAGFRLQDFAVRTGLTVESIHAALSEAVARGWLRCELERVIPTELGLRFANDVINLFNE

SEQ ID NO: 11523 - DNA, 1173 bp, Mycobacterium tuberculosis CDC1551
  CDS (1)..(1173): transl_table=11
atggtatttcggcaggcaccagttgagctgcccggcctggcgcccatgcccggacaaccgttcggggtctacctgcacgtcccgttctgcctgacccgttgcgggtactgcgacttcaatacctacaccccggcccagctgggtggcgtcagcccggaccgttggctgctggcgctgcgggcggagctcgaactggcggccgccaagctggacgcaccgacggtgcataccgtgtatgtgggtggcgggacgccatcgctgctcgggggggagcgcctggccacgttgctggacatggtgcgggaccactttgtgctggcgcccgacgccgaagtcagcaccgaggccaaccccgagtcgacgtggccggagttcttcgccacgatccgcgcggccggttacacgcgggtgtcgctcggcatgcagtcggtggccccgagggtgctggcaaccttggaccgggtgcactcgccgggccgggcggcggccgcggccaccgaggcgatagcggagggcttcacacacgtcaacctcgacctgatctatggaaccccgggggagtccgacgacgacctggtgcgctcagtggacgccgcggtgcaggccggtgtggatcatgtgtccgcgtatgccttggtcgtcgagcacggcacggcactggctcgccgggttcggcgtggtgagctggccgcgcccgatgacgacgtgctggcgcatcgctacgagttggtcgatgctcggctgtcggcggccgggtttgcctggtacgaggtgtccaattggtgtcgaccgggcggcgagtgccggcacaacctgggttattgggacggtggccagtggtggggcgcaggtccgggcgcgcacggctacattggcgtgacacgctggtggaatgtcaagcaccccaacacttacgccgagatactggccggggcgacgttgccggtagcgggcttcgagcagctgggcgccgacgctttgcacaccgaagacgtgttgctgaaggtccggctgcgccaggggctaccgctcgcccggctaggggctgccgaacgggaacgtgccgaggcggtgttggccgacggattgctggactaccacggcgaccgactggtcctcaccggccgggggcgattgctggccgacgcggtggtgcgcactctgctgggctaa

SEQ ID NO: 11524 - protein, 390 aa, Mycobacterium tuberculosis CDC1551
MVFRQAPVELPGLAPMPGQPFGVYLHVPFCLTRCGYCDFNTYTPAQLGGVSPDRWLLALRAELELAAAKLDAPTVHTVYVGGGTPSLLGGERLATLLDMVRDHFVLAPDAEVSTEANPESTWPEFFATIRAAGYTRVSLGMQSVAPRVLATLDRVHSPGRAAAAATEAIAEGFTHVNLDLIYGTPGESDDDLVRSVDAAVQAGVDHVSAYALVVEHGTALARRVRRGELAAPDDDVLAHRYELVDARLSAAGFAWYEVSNWCRPGGECRHNLGYWDGGQWWGAGPGAHGYIGVTRWWNVKHPNTYAEILAGATLPVAGFEQLGADALHTEDVLLKVRLRQGLPLARLGAAERERAEAVLADGLLDYHGDRLVLTGRGRLLADAVVRTLLG

SEQ ID NO: 11525 - DNA, 1131 bp, Streptococcus pneumoniae TIGR4
  CDS (1)..(1131): transl_table=11
atgcagaaaaaaccaacgtcagcctatgtgcacatcccattttgtacccagatttgttattattgtgatttttcaaaggtcttcatcaaaaatcagccagtcgacagctatttagagcatctgctggaagagtttcgttcttatgatattgaaaagttgtcaaccctttatatcggtggtggaacaccgacagccctgtcggctccgcaactggaggtgttactgaatggcttgactaaaaacttggatttgtctgtcttggaagagttgaccattgaagccaatccaggcgatttggatgcggataagatagctgttttgaaaaattcggctgtcaatcgtgtttcgctaggtgtccagacctttgatgataagatgttgaaaaagattgggcgcagtcatttggagaaggatatttatgaaaatatcgatcgcctgaaactggctggttttgacaatatctccattgatttgatttatgctctgcctggtcagaccatggagcaagtaaaggaaaatgtggctaaagccattggattggatattccccacatgagtttgtatagtttgattttagaaaaccatacggtctttatgaaccggatgcgacgtgggaaattgcctctgcctaaggaggaactagaagcggagatgtttgagtacatcattgcagagctggagcgagcgggttttgagcattatgagatttctaatttctccaaacccggttttgaaagtcgtcataatctcatgtactgggacaatgctgaatactatggtattggtgcaggggcatctggttatgtcaatggagtacgctataaaaatcatggtcccattcgtcattatctcagtgcggttgaggaaggcaatgcttgtattacagaagatcacctgagtcaaaaggagcaaatggaagaagaaatgttcttgggactccgcaagaaatccggggtttccatggcgcgatttgaggaaaaatttggacagtcttttgctggactttatggagaaattgtcagagatttggttcaacaaggcctcatgcagattgagggtgaccacgttcgcatgacaaagagaggtctctttttgggagatactgtagcagaacgatttattttggagtag

SEQ ID NO: 11526 - protein, 376 aa, Streptococcus pneumoniae TIGR4
MQKKPTSAYVHIPFCTQICYYCDFSKVFIKNQPVDSYLEHLLEEFRSYDIEKLSTLYIGGGTPTALSAPQLEVLLNGLTKNLDLSVLEELTIEANPGDLDADKIAVLKNSAVNRVSLGVQTFDDKMLKKIGRSHLEKDIYENIDRLKLAGFDNISIDLIYALPGQTMEQVKENVAKAIGLDIPHMSLYSLILENHTVFMNRMRRGKLPLPKEELEAEMFEYIIAELERAGFEHYEISNFSKPGFESRHNLMYWDNAEYYGIGAGASGYVNGVRYKNHGPIRHYLSAVEEGNACITEDHLSQKEQMEEEMFLGLRKKSGVSMARFEEKFGQSFAGLYGEIVRDLVQQGLMQIEGDHVRMTKRGLFLGDTVAERFILE

SEQ ID NO: 11527 - DNA, 1125 bp, Clostridium acetobutylicum ATCC 824
  CDS (1)..(1125): transl_table=11
atgaacaaattaggtctttatatacatatcccattttgtaagagcaaatgcctttattgtgattttccatcctatgcatgtatagaagattacatgataccatatgcaaaagcattatgtacagaaattgaaaaggctagcataaataaagtttttagcagtatttttattggaggaggtactcctagttttctatcaatagaagctttaaatatattatgtgatgccttaaagaaggttagaaaaactaaagatgttgagtttacagtagaaggtaatcctaattcatttacagaaaaaaagctcatggtatttaaggatatgggagtaaatagattaagtataggtcttcaagcgtgtcaagatagacttttaaaaaagcttggtagaatacatacgttaaaggagtttacagttgcttttaaaagagctagaaatttaggttttaataatataaatgtggatttaatgtttggaattccagatcagactttagaagattttaaggagtcattggagtttataacaaaattaaagcctgaacatatttcttcatatagtctaatagttgaggaaggaacaccttattttaaaatgaatgagggtggtaagttaaagcttccaaatgaggatgaagaaagagatatgtattcttttgcgcgtacttttcttgaagaaaaaggatataatcaatatgaaatttctaactttgcggttaaagataaagagtgtagacacaatcttatttactgggagcttgataactatataggttgtggggcatcagcgcattcgtattttaatggagtaaggtatagaaatataaataatgtgaaaaaatatatagaacaaatttcaaagggtaatagcgtagtagaagagaatcataggaatttacttaaagaagatatggaagaattcatgtttttaggacttagaaaaactcggggagtatcaattgaggaatttaagttgaaatttaataaggatatacaagaggtttatggagatgttataaaaaaatatgaaacaattggtatgataattttgaatgaacaccgagtattcttgactgagagaggcatgcagatatctaattctataatgtgtgattttctattatag

SEQ ID NO: 11528 - protein, 374 aa, Clostridium acetobutylicum ATCC 824
MNKLGLYIHIPFCKSKCLYCDFPSYACIEDYMIPYAKALCTEIEKASINKVFSSIFIGGGTPSFLSIEALNILCDALKKVRKTKDVEFTVEGNPNSFTEKKLMVFKDMGVNRLSIGLQACQDRLLKKLGRIHTLKEFTVAFKRARNLGFNNINVDLMFGIPDQTLEDFKESLEFITKLKPEHISSYSLIVEEGTPYFKMNEGGKLKLPNEDEERDMYSFARTFLEEKGYNQYEISNFAVKDKECRHNLIYWELDNYIGCGASAHSYFNGVRYRNINNVKKYIEQISKGNSVVEENHRNLLKEDMEEFMFLGLRKTRGVSIEEFKLKFNKDIQEVYGDVIKKYETIGMIILNEHRVFLTERGMQISNSIMCDFLL

SEQ ID NO: 11529 - DNA, 1209 bp, Agrobacterium tumefaciens str. C58
  CDS (1)..(1209): transl_table=11
atgaacccgatggtcggggagcaccaactttctgcccccggcgcatcgcttctgccggatacgggcgatcccggtttcgggatctatctgcactggcccttctgcgcggccaaatgcccctattgcgatttcaacagccatgtccgccaccggccggtggatcaggaacggtttacggcggctttcctgcgtgaaatggaacatatgcggacgctgagcggcccgcgcgtcgtcaccagcattttcatgggcggcggtacgccttcgctgatggacccacagacggtcggtgcgctactggatggcatctcgcgtttctggcatgtgcctgatggtatcgagatcaccatggaggctaatccttccagcgtcgaggcagaacggtttcggggttatcgggcggcaggcgtcaatcgtgtctcgctcggcgtgcaggcactgaatgaccgcgacctgaaattcctcggccgcctgcatgatgtcgccgatgccttgaaagccattcggttggcgcgggagatttttccgcgtatgtccttcgatctcatctatgcccgcccgaaccagacggtggccgaatgggacgccgaactgaaggaggctgtctcctatgccgtcgaccatctgtcgctctatcagctgacgatcgaggaaggcacacccttttatggcctgcacaaggccggcaagctcatcgttccggatggcgaacattcggccgtgctttatgaggcgacgcaggaaatcaccgagcgttacggcatgccggcctatgaggtttccaatcacgcccggcccggcgccgaaagccgccataacctcacctactggcgatatggcgattatgccggcatcggccccggtgcgcatggacgcctgacgcgtggcgcttccaagctcgccaccgctaccgagcggcaccccgagacctggctcgaaaccgttgagcgggaaggccatggcatggtcgaccaggaattgctcggtgtcgatgaacaggctgatgaattgctgctgatgggccttcgcctgcgcgaaggcatcgatctcgcccgttggagcgatctctccggccgcgacctcgacccggaaaaggaggagtttctccttcagcacggtttcgtggaaaggctcggcaattcccgcctgcgctgcacaccctccggcatgcttattctggatgccgtggtggccgatctcgcctgctga

SEQ ID NO: 11530 - protein, 402 aa, Agrobacterium tumefaciens str. C58
MNPMVGEHQLSAPGASLLPDTGDPGFGIYLHWPFCAAKCPYCDFNSHVRHRPVDQERFTAAFLREMEHMRTLSGPRVVTSIFMGGGTPSLMDPQTVGALLDGISRFWHVPDGIEITMEANPSSVEAERFRGYRAAGVNRVSLGVQALNDRDLKFLGRLHDVADALKAIRLAREIFPRMSFDLIYARPNQTVAEWDAELKEAVSYAVDHLSLYQLTIEEGTPFYGLHKAGKLIVPDGEHSAVLYEATQEITERYGMPAYEVSNHARPGAESRHNLTYWRYGDYAGIGPGAHGRLTRGASKLATATERHPETWLETVEREGHGMVDQELLGVDEQADELLLMGLRLREGIDLARWSDLSGRDLDPEKEEFLLQHGFVERLGNSRLRCTPSGMLILDAVVADLAC

SEQ ID NO: 11531 - DNA, 1203 bp, Rickettsia conorii str. Malish 7
  CDS (1)..(1203): transl_table=11
atgtccacaaaacctaagttagcactagcaaaaatacaaaatatgagagttatggctaatgatttaagtatttatattcattggcctttttgtgtgtccaaatgtccgtattgtgattttaattctcatgtagcaagtactatagatcataatcagtggcttaaatcttatgaaactgaaattgaatattttaaggatattattcaaaataaatatataaaatctattttttttgggggcggtactccctctttaatgaatcctgtaatagttgaaggcataataaataaaatcagtactctagcaattattgataatcaaaccgagataactctagaaactaatcccacatcatttgaaactgaaaaatttaaagcattcaaagccgtcggaattaatcgtatttcaataggagtgcaatccttaaaagaggacgatttaaaaaaattaggtagaactcatgattgtatgcaggccattaaaacaattgaggcggcaaatacgatttttctacgagtgtcatttgatttaatatatgcacgtagcggtcagacattaaaagactggcaagaagaattaaaacaagctatgcagctcgctacctcacatatttctctttatcaattgactatcgaaaaaggtacgccgtgttataaattatttaaggagggtaatctgattttgccgcattcagatgcggcagctgaaatgtatgaatggactaatcattatctagaatctaaaaagtattttagatatgaaatatccaattatgctatgatagggtatgaatgtttgcataatttaacttattggaattataatagctatttaggtataggccccggagctcatagtagaatcattgaatcctcaagttcggtatcggcaattatgatgtggcataaacctgaaaaatggttagatgcggttaaaacaaaaaatgttggtattcaaactaatactaagttaacacatcaagagattattgaagaaatgctaatgatgggtttacgccttagcaaaggtataaatatttctacattagagcagaaattaaacacgaaattagagaatattttagatatgaataatcttaagcattatcaagcgttagacttaattagactagatgaaaatatctatcttaccgacaaaggtttaatgctgtatagctacatagtacctagattgattatatga

SEQ ID NO: 11532 - protein, 400 aa, Rickettsia conorii str. Malish 7
MSTKPKLALAKIQNMRVMANDLSIYIHWPFCVSKCPYCDFNSHVASTIDHNQWLKSYETEIEYFKDIIQNKYIKSIFFGGGTPSLMNPVIVEGIINKISTLAIIDNQTEITLETNPTSFETEKFKAFKAVGINRISIGVQSLKEDDLKKLGRTHDCMQAIKTIEAANTIFLRVSFDLIYARSGQTLKDWQEELKQAMQLATSHISLYQLTIEKGTPCYKLFKEGNLILPHSDAAAEMYEWTNHYLESKKYFRYEISNYAMIGYECLHNLTYWNYNSYLGIGPGAHSRIIESSSSVSAIMMWHKPEKWLDAVKTKNVGIQTNTKLTHQEIIEEMLMMGLRLSKGINISTLEQKLNTKLENILDMNNLKHYQALDLIRLDENIYLTDKGLMLYSYIVPRLII

SEQ ID NO: 11533 - DNA, 1182 bp, Sinorhizobium meliloti 1021
  CDS (1)..(1182): transl_table=11
atgcagatagccccgctttcagcgatcggtgacggcatggaccccggtttcggggtctatgtgcactggcccttctgcgcggcgaaatgcccctattgcgacttcaatagccatgtgcgccatcagccggtggatcagcctcgcttcgtcgccgcattcctgaaggaaatggccgcggtgcgcgcgctttccggtccgagaaccgtcaccagcattttcatgggcgggggtaccccgtctctgatggaccctcggacggtggaggcgatcctcgacggcattgcccggcagtggcacgtgcctgatggcatcgagatcaccatggaggcgaacccgtccagcgtcgaggcgacgcgcttccgcggctatcgggcggccggcgtcaaccgcgtctcgctcggcgtacaggctctcaacgaccgtgacctcaaatttctcggacggctgcacgatgtcgagaatgcgctgaaggcgatacggctcgcgcgcgagatctttccgcgcatgtccttcgaccttatctatgcgcggccgaaccagacggtcgaggaatgggagcgggagctgaaggaggcggtttcctacgccgtcgatcatctgtcgctctaccagcttaccatcgaggaagggacgcccttctacggcctgcacaaggcagggaaactcgtcgttccggatggcgagcagtcggcggttctctacgaggccacgcaggagatcaccgctgatatcggcatgccggcctatgaggtctccaatcatgcccggccgggggccgagagccggcacaacctcacctattggcgctacggcgactatgcgggcatcggccccggcgcccacgggcggctggcgatcggatcaggcaagatcgcgaccgcaaccgagcgcaacccggaggcatggctgcaacgcgtcgaagagtgcggcgaaggcctggtcgagcgggaactgctcgatttcgaggcgcaggccgatgagcttttgctgatggggttgaggctgcgcgaaggcgtcgatctcgcccgctggcagaccctctcgggccgcgatccggatccggcccgggaagaattcctgatcgagcatggtttcatcgagcggatcggcaattctcggctgcgctgcacgcccgccggaatgctgatcctcgacgccgtggtggccgacctcgcctgctga

SEQ ID NO: 11534 - protein, 393 aa, Sinorhizobium meliloti 1021
MQIAPLSAIGDGMDPGFGVYVHWPFCAAKCPYCDFNSHVRHQPVDQPRFVAAFLKEMAAVRALSGPRTVTSIFMGGGTPSLMDPRTVEAILDGIARQWHVPDGIEITMEANPSSVEATRFRGYRAAGVNRVSLGVQALNDRDLKFLGRLHDVENALKAIRLAREIFPRMSFDLIYARPNQTVEEWERELKEAVSYAVDHLSLYQLTIEEGTPFYGLHKAGKLVVPDGEQSAVLYEATQEITADIGMPAYEVSNHARPGAESRHNLTYWRYGDYAGIGPGAHGRLAIGSGKIATATERNPEAWLQRVEECGEGLVERELLDFEAQADELLLMGLRLREGVDLARWQTLSGRDPDPAREEFLIEHGFIERIGNSRLRCTPAGMLILDAVVADLAC

SEQ ID NO: 11535 - DNA, 1131 bp, Yersinia pestis CO92
  CDS (1)..(1131): transl_table=11
atgcttaaattacccccgctcagtctctacatccatatcccttggtgcgtccagaaatgcccttattgtgatttcaactcacatgcgttgaaaggcgatgtccctcatcaggaatatgtagagcacgtactggcggatttggatgctgacgtgcctctggtgagtggccgtgaaatcagcactatttttattggtggcggcacacccagcttgctgagtgcagaggccatgcagcaactacttgatggtgtccgcgcgcgtttgccggttgccagtgacgcagagatcaccatggaagccaaccccggagcggtcgaagccgatcgctttagcggctatcagcgagcgggtattaaccgcatatccattggcgtccagagctttagcgcacagaaattaacgcggctggggcggatacatgggccagatgaagcaaggcgggcagcagagctggcaacctcactgcaattacgtagctttaatctagatttgatgcacggtctgcctgatcaaacactggaagaagcattggatgatttgcgtcaggctatcgccttaaatccaccacacttatcttggtatcagctgactattgagccgaatactggctttagttcccggcccccaatcctgcccgatgacgatgcgttatgggatattttccagcaaggtcatcagctactcagtgccgctggttatctgcaatatgaaacctcggcctatgccaagccaggttaccaatgccagcataatcttaactactggcgctttggtgattatctggggattggctgtggggcgcatggcaagatcacatttaacgatgggcgtattttacggaccataaaaaccaaacatccacgtggttttatgcagggaaaatacttggataaacaatatgaagtggcagcagtcgaccggccttttgagttctttatgaaccgcttccgtttgttggaagctgcccctcgggctgatttctatcacttcaccgggttaactgagagtactattcgcccacagttagatgaggcaatagcaaaagagtatttaatcgaaacaacagaatactggcagattaccgaaaaaggaaaattgttccttaactcgctactggagctatttttatag

SEQ ID NO: 11536 - protein, 376 aa, Yersinia pestis CO92
MLKLPPLSLYIHIPWCVQKCPYCDFNSHALKGDVPHQEYVEHVLADLDADVPLVSGREISTIFIGGGTPSLLSAEAMQQLLDGVRARLPVASDAEITMEANPGAVEADRFSGYQRAGINRISIGVQSFSAQKLTRLGRIHGPDEARRAAELATSLQLRSFNLDLMHGLPDQTLEEALDDLRQAIALNPPHLSWYQLTIEPNTGFSSRPPILPDDDALWDIFQQGHQLLSAAGYLQYETSAYAKPGYQCQHNLNYWRFGDYLGIGCGAHGKITFNDGRILRTIKTKHPRGFMQGKYLDKQYEVAAVDRPFEFFMNRFRLLEAAPRADFYHFTGLTESTIRPQLDEAIAKEYLIETTEYWQITEKGKLFLNSLLELFL

SEQ ID NO: 11537 - DNA, 1155 bp, Caulobacter crescentus CB15
  CDS (1)..(1155): transl_table=11
ttgactgatccccgcgccgaggccgtggggatctatgtccactggccctactgcgcgcgaatctgcccctattgcgacttcaatgtcgtgcgcgatcgcgggcggaccgacgagcagcgggccctggccgacgccatcgtcgcggacctggaagcccagcgcgccctgaccggcgagcgtcgtctgctgtcgatcttcttcggcggcggcacaccctcgctgatggacccggcgcaggtggcgcgggtgatcgagaccgccaagcgcctgtggtcgccggcagacgatctggagatcagcctggaagccaaccccaccgacgccgagaccgatcgcttcgcggccctcgccgccgccggggttcagcgcctgtcgctgggcgtgcaggcgctggatgacgcttctctcaaggcgctgggccgtaaccacgacgccggcgcggcgcggcgagccatagccgcagcagcccgggcctttccccgcctgtcgatcgacctgatctacgcccgcccgggccagaccgatgcggcctggcgcgccgagctctccgaagcgatcgctctgggccccgagcacgtctcgccctaccagctgaccatcgagcccggcaccgcctttgaccgggcggtcgggcgcggaaccctggtcacgcccgacgaggacctggccgccaccctgttcgagaccacccaggaaatcttcgaggccgccggcttcgacgcctacgaggtctccaaccacgcccggggcgaagccgcccgcgcgcggcacaatctcgtctactggcggggcgtcgactatgtcggcgtcgggccgggggcgcatggccgcctggccctgcccgagggccgcgccgccaccaccgcccatcgcgccatcaaggactacatcgccgccgtcggcgatcacggcgtcggctttcagtcggagatcctcacgcccgaggacgcggccctggagcgactggttctggggatgcggatcgacgccggggtcggctttgacgaggtcgcggtcctgggccttgacccggacgtcgccaaggtccgcgatctggtcgagaccggccttctggtcgaggatcgcgcgcggctgagggcgacgcgcgcgggccggctggtgctggatcggctgacaggcgcgctcgcaacctga

SEQ ID NO: 11538 - protein, 384 aa, Caulobacter crescentus CB15
MTDPRAEAVGIYVHWPYCARICPYCDFNVVRDRGRTDEQRALADAIVADLEAQRALTGERRLLSIFFGGGTPSLMDPAQVARVIETAKRLWSPADDLEISLEANPTDAETDRFAALAAAGVQRLSLGVQALDDASLKALGRNHDAGAARRAIAAAARAFPRLSIDLIYARPGQTDAAWRAELSEAIALGPEHVSPYQLTIEPGTAFDRAVGRGTLVTPDEDLAATLFETTQEIFEAAGFDAYEVSNHARGEAARARHNLVYWRGVDYVGVGPGAHGRLALPEGRAATTAHRAIKDYIAAVGDHGVGFQSEILTPEDAALERLVLGMRIDAGVGFDEVAVLGLDPDVAKVRDLVETGLLVEDRARLRATRAGRLVLDRLTGALAT

SEQ ID NO: 11539 - DNA, 1185 bp, Chlamydophila pneumoniae AR39
  CDS (1)..(1185): transl_table=11
atgaagaccctttcagcgatcgcaatcgctggagacgcggtggtatcattgatcccgatgctaatgaatggtaaggctcccctagctctttatattcatattcccttctgcacaaaaaaatgtcgctattgcagtttttatacaatcccctacaaaagtgaatctgtatcgctctattgtaatgctgtaattcaagaggggctaagaaagctagcccccatccaagagacgcatttcatagagactgtgttttttggagggggaacaccttcattagtttctcctcttgatcttaagcgcatcctcaaagagctagccccccatgcccgggaaattactttagaggccaaccccgaaaatctcaccgtaagctatctacgtcaactacaagagactccaataaatagaattagcgttggcgtacaaaccttcgacgactctatcctacagctcctcggaagaacgcattcttcatctgcggcaatcacagcactgcaagaatgccagaatcacggattctctaatctttctatagacctaatctacggactgcccacacagtctttggagatattcctaagcgacctacatcaagctctgactctccctatcactcacatttctctatacaacctcactatagatccccacacctccttctataaacaccgcaaaattctagtccccacaattgcccaagaagaaattctagctgagatgagcctccttgctgaaaatctcctactctcccaagggttccaacgctatgaacttgcttcatatgccaagccagattaccccgcaaagcacaacctctattactggacagatcgccctttcttaggcttaggagtttcagcttcgcaataccttcacggagagcggtcaaaaaattatagtcatatttctcactatctacgtgctgtacgtaagaatctccctacccaagagacctcagaaattctcccaaaaaaagaacgaatcaaagaagccttagccctgcgactccgactccttgaaggagcagacctcgcggagttcccctccacacttatctccatgcttacgcaagatgtaaaattacaaaacctattcagtgtgcatggacaatgtcttgccctaaatagacagggccgtctcttccacgatacaatagcggaagagattatgggatattccttctaa

SEQ ID NO: 11540 - protein, 394 aa, Chlamydophila pneumoniae AR39
MKTLSAIAIAGDAVVSLIPMLMNGKAPLALYIHIPFCTKKCRYCSFYTIPYKSESVSLYCNAVIQEGLRKLAPIQETHFIETVFFGGGTPSLVSPLDLKRILKELAPHAREITLEANPENLTVSYLRQLQETPINRISVGVQTFDDSILQLLGRTHSSSAAITALQECQNHGFSNLSIDLIYGLPTQSLEIFLSDLHQALTLPITHISLYNLTIDPHTSFYKHRKILVPTIAQEEILAEMSLLAENLLLSQGFQRYELASYAKPDYPAKHNLYYWTDRPFLGLGVSASQYLHGERSKNYSHISHYLRAVRKNLPTQETSEILPKKERIKEALALRLRLLEGADLAEFPSTLISMLTQDVKLQNLFSVHGQCLALNRQGRLFHDTIAEEIMGYSF

SEQ ID NO: 11541 - DNA, 1137 bp, Salmonella typhimurium LT2
  CDS (1)..(1137): transl_table=11
atggctaaactaccgccgctcagtctttatattcatattccctggtgtgtacaaaaatgtccatattgcgacttcaattcccatgcgttgaagggcgaggtgccacatgacgactacgtccagcatctgttaaacgatctggatgccgacgtcgcttgggcgcaagggcgtgaagtaaagaccatttttattggcggcggtacgccaagcctgctttccgggccggcgatgcaaacgctgctggacggcgtgcgtgcgcgcctgaatctggcggcggatgcggaaattactatggaagcgaaccccggcacggtcgaagccgaccgcttcatcgactatcagcgcgccggcgtaaaccggatctccattggcgtgcagagctttagtgagcctaagctgaaacgtcttggccgtattcacggtccacaagaggcgaagcgggcagcaagactggcaaatgggcttgggctacgcagctttaacctcgacttgatgcatggattgccggaccaaacgctggaagaggcgctgaacgatttgcgacaggcaattgcgcttaatccgccgcatctctcatggtatcaattgacgattgaacccaacactctgttcggttcgcgtccgccggttttaccggacgatgacgctctgtgggatatctttgagcagggccaccagttattaaccgccgcgggctatcagcaatacgaaacgtcggcctatgccaaacccggttatcagtgccagcataatctgaactactggcgctttggcgactatctggggattggctgcggcgcccacggtaaagtcaccttcccggacggcaggatcctgcgcaccaccaaaacccgtcacccacgcggttatatgcagggacgttacctggaaagccagcgtgacgtgagtgatgacgataaaccctttgaattctttatgaaccgttttcggttgctggagcgcgcgcctcgcgccgaatttgtcgattataccgggcttacggaagcggttattcgtcagccaatcgacgaggctattgcccagggctacctgaccgaatgcgagcaatactggcagattacccggcacggtaaactgtttttaaactctcttcttgagttgtttctcgcggaataa

SEQ ID NO: 11542 - protein, 378 aa, Salmonella typhimurium LT2
MAKLPPLSLYIHIPWCVQKCPYCDFNSHALKGEVPHDDYVQHLLNDLDADVAWAQGREVKTIFIGGGTPSLLSGPAMQTLLDGVRARLNLAADAEITMEANPGTVEADRFIDYQRAGVNRISIGVQSFSEPKLKRLGRIHGPQEAKRAARLANGLGLRSFNLDLMHGLPDQTLEEALNDLRQAIALNPPHLSWYQLTIEPNTLFGSRPPVLPDDDALWDIFEQGHQLLTAAGYQQYETSAYAKPGYQCQHNLNYWRFGDYLGIGCGAHGKVTFPDGRILRTTKTRHPRGYMQGRYLESQRDVSDDDKPFEFFMNRFRLLERAPRAEFVDYTGLTEAVIRQPIDEAIAQGYLTECEQYWQITRHGKLFLNSLLELFLAE

SEQ ID NO: 11543 - DNA, 1158 bp, Listeria monocytogenes EGD-e
  CDS (1)..(1158): transl_table=11
atgataaatacaaacctatcgagtaatgaaagttccgcggtatatatccatattccgttttgcgaacatatttgctattactgcgattttaataaagtattcttagaaggacaaccggtcgacgaatacgtagatttactgattaaagaaatggaattaacagtcgcaaaaggaccaatagcgccagtcgacacggtatttgtcggtggaggcacacctacaaccttaaacgaagcgcaaattgcgagactctgcaccgccattcataacactctgccgctcaaaaaagatatcgaattttcgtttgaagccaacccaggagatctttcgctatctaaactacaagcaatgcaagatcacggagttaatcgtattagcatgggtgttcaaagcttcaacaatgaacttctcaaaaaaattggtcgcattcatactgtaaaagatgtttatcaatccgtcgaaaatatgcgcaaaatcggatttgaaaatgtaagcattgatttaatttttagcttgccaggacaaacagaagccgatttccaagatacattaaaacaagcgcttgaccttgatttaccgcattactctgcgtattcactgatcatcgaaccaaaaacgattttttacaaccttatgcaaaagggaaaacttttccttcctggtcaggatgccgaggcaaatatgtacgatttacttctcaacgaaatggaaaagcacggtcgtaaacaatatgagattagtaattttgctaaagaaggatttcagagtaaacacaatatcacttattggagcaatgaacattactacggatttggcgccggagcacatggctatgtaggcaatacacgctatagcaatttcggcccaatcaaaaaatacatggaacctttgcaagagaatatactcccaacatttcaacaaaaagaacttacattaaaagaaaaaatggaagaagaaatgtttttaggacttagaaaagtggacggcgtggataaaaaacatttcaaacaaaaattcggccaagatttagatgcaacatttgcgaatgcaattcaaaaaacaaccgcaaaaggctggctcgaaaataacgaagaaaatgtggcgcttacaagaagtggaagatttttgggaaataatgtattccaagaattcctctaa

SEQ ID NO: 11544 - protein, 385 aa, Listeria monocytogenes EGD-e
MINTNLSSNESSAVYIHIPFCEHICYYCDFNKVFLEGQPVDEYVDLLIKEMELTVAKGPIAPVDTVFVGGGTPTTLNEAQIARLCTAIHNTLPLKKDIEFSFEANPGDLSLSKLQAMQDHGVNRISMGVQSFNNELLKKIGRIHTVKDVYQSVENMRKIGFENVSIDLIFSLPGQTEADFQDTLKQALDLDLPHYSAYSLIIEPKTIFYNLMQKGKLFLPGQDAEANMYDLLLNEMEKHGRKQYEISNFAKEGFQSKHNITYWSNEHYYGFGAGAHGYVGNTRYSNFGPIKKYMEPLQENILPTFQQKELTLKEKMEEEMFLGLRKVDGVDKKHFKQKFGQDLDATFANAIQKTTAKGWLENNEENVALTRSGRFLGNNVFQEFL

SEQ ID NO: 11545 - DNA, 1158 bp, Listeria innocua Clip11262
  CDS (1)..(1158): transl_table=11
atgataaatacgaatctatcgagtaatgaaagttcagcggtatatatccatattccgttttgcgaacacatttgctattactgcgattttaataaagtattcttagaagggcaaccagtcgatgaatacgtagatttactaataaaagaaatggaaatgactgctgcaaaaggtcccatcgctccggttgacacggtttttgtgggcggcggaacacctacgaccttaaatgaggcgcaaattgcaagactttgcacagctatccgagaaatattaccactcaaaaatgaaattgagttttcctttgaagcaaatccaggagatctttctatatccaaattacaagcgatgcaagatcatggtgtcaatcgcattagtatgggcgttcaaagtttcaataacgagcttcttaaaaaaattggtcgcattcataccgtgaaagatgtataccaatctgttgaaaacatgcgcaaagttggttttgaaaatgtaagtattgatttgatttttagcttgccaggtcaaaccgaggctgactttaaagacactttaaaacaagcacttgatttagacttacctcactattcagcatactcactaattattgaaccaaaaacgattttttacaaccttatgcaaaaaggaaaactattcctacctggccaagatgccgaagcaaacatgtatgatttattactaacagaaatggaaaaacacggtcggaaacaatatgagattagtaatttcgcgaaagaaggctttcaaagcaaacacaatattacttactggagcaatgagcattattacgggtttggcgccggagcacatggatatgtcggcaacacccgttatagcaattttggtccaataaaaaaatacatggaaccattacaagaaaataaacttcctacattccaacaaaaagaacttaccttaaaagaaaaaatggaagaagaaatgtttttaggtcttagaaaagtagacggagttaataaaattcacttcaagcaaaaattcggtcaagatttagatacgacttttgcgcatgctattcaaaaaactactgcaaaaggctggcttgaaaataacgaagaaaatgtggcacttacaagaagcggaagatttttaggaaataatgtttttcaagaatttctctaa

SEQ ID NO: 11546 - protein, 385 aa, Listeria innocua Clip11262
MINTNLSSNESSAVYIHIPFCEHICYYCDFNKVFLEGQPVDEYVDLLIKEMEMTAAKGPIAPVDTVFVGGGTPTTLNEAQIARLCTAIREILPLKNEIEFSFEANPGDLSISKLQAMQDHGVNRISMGVQSFNNELLKKIGRIHTVKDVYQSVENMRKVGFENVSIDLIFSLPGQTEADFKDTLKQALDLDLPHYSAYSLIIEPKTIFYNLMQKGKLFLPGQDAEANMYDLLLTEMEKHGRKQYEISNFAKEGFQSKHNITYWSNEHYYGFGAGAHGYVGNTRYSNFGPIKKYMEPLQENKLPTFQQKELTLKEKMEEEMFLGLRKVDGVNKIHFKQKFGQDLDTTFAHAIQKTTAKGWLENNEENVALTRSGRFLGNNVFQEFL

SEQ ID NO: 11547 - DNA, 1191 bp, Nostoc sp. PCC 7120
  CDS (1)..(1191): transl_table=11
atgcaaaaagttaatgttcctagcctcgctagttctgcttatgtacatattcccttttgcagaaggcggtgcttttattgtgatttcccgatatttgttgttggcgatcgccaacgtggtgaaacatctgttaccatctccgggtatgtcgatgttctctgtgaagaaatcgccattacaccagcctttggtcaacccctcaagaccgtatttttcggcggtggtacgccttcgctgttatctacagagcaattagcacaaatactagtaacgctagataagcagtttgggattgcgcctgacgcagaaatatctatggaggtagatccaggcacatttgatctagcacatatccaaggctatcgtagtgttggtgtaaatcgggtcagtttgggtgtacaagcgtttcaagaagaattgttaaaagtagctgggcgatcgcactcgcttaaagatatttttgcagctatagacttgattcaccaagtcgagattcccgaatttagcatagacttaatttctggcttaccgcatcagtctttagatcaatggcaagattccctagacacagccgttaacatcgcacccacccacatatctatatatgatttgacaattgagccaggaacagcttttggtcgttattacaaacctggggataatcccttacctaccgatgaaaccacggtaaaaatgtatcagatgggtcagaagattttgactggtggcgattatgaacattacgaaatttccaactacgccaagccaggacaccagtgtagacataaccgagtttattgggaaaaccgcccttattacggctttggtatgggtgcggcgagctatgtagaaggtaaacgctttacccgtccccggaaaacaaaggagtattatcaatgggtgcaagagttgattgctaatcacggtgtgattgattgggaaattacaccaaaagcagatgtattgttagaaacgttaatgttggggttacgcttggctgatggtgtgagtttagcagcactgacggaggaatttggcaaggagaaaatacaagaactgcatcaatgtctgcaaccttattttactcaaggttgggtacaagttgtgggtgataggttgcggttaagtgatcccgatggttttttattttccaatgtggtgttagccgatttgtttagtcagttggggtaa

SEQ ID NO: 11548 - protein, 396 aa, Nostoc sp. PCC 7120
MQKVNVPSLASSAYVHIPFCRRRCFYCDFPIFVVGDRQRGETSVTISGYVDVLCEEIAITPAFGQPLKTVFFGGGTPSLLSTEQLAQILVTLDKQFGIAPDAEISMEVDPGTFDLAHIQGYRSVGVNRVSLGVQAFQEELLKVAGRSHSLKDIFAAIDLIHQVEIPEFSIDLISGLPHQSLDQWQDSLDTAVNIAPTHISIYDLTIEPGTAFGRYYKPGDNPLPTDETTVKMYQMGQKILTGGDYEHYEISNYAKPGHQCRHNRVYWENRPYYGFGMGAASYVEGKRFTRPRKTKEYYQWVQELIANHGVIDWEITPKADVLLETLMLGLRLADGVSLAALTEEFGKEKIQELHQCLQPYFTQGWVQVVGDRLRLSDPDGFLFSNVVLADLFSQLG

SEQ ID NO: 11549 - DNA, 1275 bp, Ralstonia solanacearum GMI1000
  CDS (1)..(1275): transl_table=11
atgattccgatccaccccgtgggcgggagccagacgcccgcttcttccaccgccgcagccgggaccggcgatgccgtcacgtcggtcttcctgcagccgggcaggatcagcctgccggcctcgccgccgctgtcgctctatgtgcatgtgccgtggtgcgtgcgcaaatgcccctattgcgatttcaactcgcatgcggagccggaggcgggcatcccggaagaccgcttcctcgcggccatccggcaggacctggaggccgcgctgccgatggtgtggggccgacgcgtgcatacgatcttcatcggcggcggcacgccgagcctgctgtcggcgcgggggctggatacgctgctgtcggacatccgcatgctgctgccggtcgatgcggatgccgagatcaccatggaggccaatcccggcaccttcgaggccgagcgcttccgcagctatcgggccagcggcgtgaaccggctgtcgatcggcatccagagcttcaacgacacgcacctgcaggcgctgggccgcatccacagcgccgccgaggcacgggcggccatcgacatcgcccgcgcgcacttcgacaacatcaacctcgacctgatgttcgccctgcccggccagaccctggccgaatgcgaggccgatgtggaagccgcgctgtcgttcggcaccagccacgtctcgctgtaccacctgacgctggagcccaacacctactttgccaagcacccgcccgcgctgccggacgacgacaccgcgttcgccatgcaggactggatccacgcacggctggccgcggccggctacgagcactacgaggtgtcggcctacgccaggccgggcaagcgctgcaagcacaacctgaactactggcagttcggcgattacctcggcatcgggccgggcgcgcacggcaagctgagctttccgcaccgggtgatccgggacatgcgccacaagcaccccgagacctacctgcgccaggcggaaacggccggcggcgcgacggtggtgcaggagcagcgcgaagtcgacgcggccgacctgccgttcgagttcatgctcaacgcgctgcggctgaccgacggcttccccgtcacgctgttccaggagcgcaccggcctgccgctgcgcggcatcgagcgcgaactcgatgccgccgagcggcgcggcctgctcgtgcacgaccacgcaacgatccggccgaccgaactgggccagcgctttctcaacgatctgcaggcgctgttcctcgccgacgacgaaaactga

SEQ ID NO: 11550 - protein, 424 aa, Ralstonia solanacearum GMI1000
MIPIHPVGGSQTPASSTAAAGTGDAVTSVFLQPGRISLPASPPLSLYVHVPWCVRKCPYCDFNSHAEPEAGIPEDRFLAAIRQDLEAALPMVWGRRVHTIFIGGGTPSLLSARGLDTLLSDIRMLLPVDADAEITMEANPGTFEAERFRSYRASGVNRLSIGIQSFNDTHLQALGRIHSAAEARAAIDIARAHFDNINLDLMFALPGQTLAECEADVEAALSFGTSHVSLYHLTLEPNTYFAKHPPALPDDDTAFAMQDWIHARLAAAGYEHYEVSAYARPGKRCKHNLNYWQFGDYLGIGPGAHGKLSFPHRVIRDMRHKHPETYLRQAETAGGATVVQEQREVDAADLPFEFMLNALRLTDGFPVTLFQERTGLPLRGIERELDAAERRGLLVHDHATIRPTELGQRFLNDLQALFLADDEN

SEQ ID NO: 11551 - DNA, 1200 bp, Agrobacterium tumefaciens str. C58
  CDS (1)..(1200): transl_table=11
atggtcggggagcaccaactttctgcccccggcgcatcgcttctgccggatacgggcgatcccggtttcgggatctatctgcactggcccttctgcgcggccaaatgcccctattgcgatttcaacagccatgtccgccaccggccggtggatcaggaacggtttacggcggctttcctgcgtgaaatggaacatatgcggacgctgagcggcccgcgcgtcgtcaccagcattttcatgggcggcggtacgccttcgctgatggacccacagacggtcggtgcgctactggatggcatctcgcgtttctggcatgtgcctgatggtatcgagatcaccatggaggctaatccttccagcgtcgaggcagaacggtttcggggttatcgggcggcaggcgtcaatcgtgtctcgctcggcgtgcaggcactgaatgaccgcgacctgaaattcctcggccgcctgcatgatgtcgccgatgccttgaaagccattcggttggcgcgggagatttttccgcgtatgtccttcgatctcatctatgcccgcccgaaccagacggtggccgaatgggacgccgaactgaaggaggctgtctcctatgccgtcgaccatctgtcgctctatcagctgacgatcgaggaaggcacacccttttatggcctgcacaaggccggcaagctcatcgttccggatggcgaacattcggccgtgctttatgaggcgacgcaggaaatcaccgagcgttacggcatgccggcctatgaggtttccaatcacgcccggcccggcgccgaaagccgccataacctcacctactggcgatatggcgattatgccggcatcggccccggtgcgcatggacgcctgacgcgtggcgcttccaagctcgccaccgctaccgagcggcaccccgagacctggctcgaaaccgttgagcgggaaggccatggcatggtcgaccaggaattgctcggtgtcgatgaacaggctgatgaattgctgctgatgggccttcgcctgcgcgaaggcatcgatctcgcccgttggagcgatctctccggccgcgacctcgacccggaaaaggaggagtttctccttcagcacggtttcgtggaaaggctcggcaattcccgcctgcgctgcacaccctccggcatgcttattctggatgccgtggtggccgatctcgcctgctga

SEQ ID NO: 11552 - protein, 399 aa, Agrobacterium tumefaciens str. C58
MVGEHQLSAPGASLLPDTGDPGFGIYLHWPFCAAKCPYCDFNSHVRHRPVDQERFTAAFLREMEHMRTLSGPRVVTSIFMGGGTPSLMDPQTVGALLDGISRFWHVPDGIEITMEANPSSVEAERFRGYRAAGVNRVSLGVQALNDRDLKFLGRLHDVADALKAIRLAREIFPRMSFDLIYARPNQTVAEWDAELKEAVSYAVDHLSLYQLTIEEGTPFYGLHKAGKLIVPDGEHSAVLYEATQEITERYGMPAYEVSNHARPGAESRHNLTYWRYGDYAGIGPGAHGRLTRGASKLATATERHPETWLETVEREGHGMVDQELLGVDEQADELLLMGLRLREGIDLARWSDLSGRDLDPEKEEFLLQHGFVERLGNSRLRCTPSGMLILDAVVADLAC

SEQ ID NO: 11553 - DNA, 1215 bp, Brucella melitensis 16M
  CDS (1)..(1215): transl_table=11
atgaacaagctgtttccccctttgcaggccaaaaatgctgccagcacctatcccgtcatgcatgctgatggggaaaccgcctttggcatttatgtgcactggccgttctgtctggccaaatgcccttattgcgatttcaacagccatgtccgccacaagccggtggatcaggcgcgctatggcgcggctttccggcgcgagatggaaaccttgcgtgagcgcacaggcccgcgcaccgtcaccagcattttcctgggcggcggcacaccatcgctgatgcagccggaaaccgtgggcgctctgctggatggcatcgcatcgtattggtctgtggcgccggacattgaaatgacgctggaagccaatccgacaagcgttgaggccgaccgttttcgcggctatcgtgcggcaggcgttaaccgggtgtcgcttggtattcaggcgttgaacgatcccgatctgcgccgccttggccggatgcattcggttgcagaggcaaaggccgcgatccggctggcacgcgagattttcccgcgcctttccttcgaccttatctatgcgcggccggaccagacaatcgaggcctggcgcgaggaattgaaggaggcgatcggccttgctgccgaccatctgtcgctctaccagcttaccatcgaggaaggcacgcagttctataatctctggaaggcgggcaagctcaccacgccggagccggaccttgcagccgcgctctatgaggaaacgcagcgtgtgaccgccgaacatggccttccggcctatgagatttccaaccatgcggtgccggggcgggaatcgcagcacaatctcgtctattggcgttatggccaatatgctggcatcgggcccggcgcacatggccgtttcgtggaaaatgacgtgcgcaccgtgaccatgactgaaaagcatcctgaaacatggcttgaccatgtggagcggcgcggccacggaattatcgaggaagaatatctcgatggcgggcaggagggcgatgaattcctgatgatgggcctgcgcctgcgcgaaggcatcgaccttgcccgttacgcgcggctttccggccatgcgatcgacgacaaacggctggcaaagctgatcgcggaaggcatgatcgagccgatgggcggcagcctgatccgcgcaacgccggatggcgcgctggtgctggatgcactggttgccgatctggcggcataa

SEQ ID NO: 11554 - protein, 404 aa, Brucella melitensis 16M
MNKLFPPLQAKNAASTYPVMHADGETAFGIYVHWPFCLAKCPYCDFNSHVRHKPVDQARYGAAFRREMETLRERTGPRTVTSIFLGGGTPSLMQPETVGALLDGIASYWSVAPDIEMTLEANPTSVEADRFRGYRAAGVNRVSLGIQALNDPDLRRLGRMHSVAEAKAAIRLAREIFPRLSFDLIYARPDQTIEAWREELKEAIGLAADHLSLYQLTIEEGTQFYNLWKAGKLTTPEPDLAAALYEETQRVTAEHGLPAYEISNHAVPGRESQHNLVYWRYGQYAGIGPGAHGRFVENDVRTVTMTEKHPETWLDHVERRGHGIIEEEYLDGGQEGDEFLMMGLRLREGIDLARYARLSGHAIDDKRLAKLIAEGMIEPMGGSLIRATPDGALVLDALVADLAA

SEQ ID NO: 11555 - DNA, 1134 bp, Clostridium perfringens str. 13
  CDS (1)..(1134): transl_table=11
atggacaaaatttctttatatatacacattcctttttgtgcacaaaagtgtctttattgtgattttccttcttttgctaggaaagatcatttaagaaaggcctacatagaagctttaaataaggaaataataagtttaagagagaaacataataatctagaaataaacactatatttattggagggggaacaccaagtgttttagaggctgatgagttagaatgtttattaaaagaagtagctaaacttaatatggcgaaagatatagagtactctatggagtgtaatccaggaaacttaacagaagaaaagctagaagtcatgaaaaagtatggtgtaaatagaatcagcatggggcttcaagctaagcaggataatcttcttaaaggactgggaagaatacataactataaaacctttaaagaaaattttttattagccaaaaaggttggttttaataacataaatgttgatttaatgtttggattaccaaatcagagattaaatgaatgggaagagactttaagagagataatatctttagagccagcacatatatcagcatatagtctaattatagaagaaggaactgctttttataatttatatgaaaatgataagttaaagctaccaacagaagaagaagagagaaaaatgtaccacctagcaaagaaaattttagaggaaaatggatttaatcaatatgagatttctaattatgctaaagagggaaaagaatgtagacataatttagcatattggaatatggataactggataggagtagggtcagcagcagcttcttatattaatgggaaaagaattaaaaacataagtagtgttgagaaatatataaattctattaatgagaagagagaagccgtagaagaaataataaataattcaaaaaatgataatatggaagaatttatgtttatgggacttagaaaaattaatggaatagatgaaaatgaatttaaaaatagatttagcatgaatataaatgatgtttatggagaaatactaaataagtatatagatgaagggcttttaataagggagtcaggaaggatatttctaagtgaaaaaggcatagaaatatcaaatataataatggctgattttttattataa

SEQ ID NO: 11556 - protein, 377 aa, Clostridium perfringens str. 13
MDKISLYIHIPFCAQKCLYCDFPSFARKDHLRKAYIEALNKEIISLREKHNNLEINTIFIGGGTPSVLEADELECLLKEVAKLNMAKDIEYSMECNPGNLTEEKLEVMKKYGVNRISMGLQAKQDNLLKGLGRIHNYKTFKENFLLAKKVGFNNINVDLMFGLPNQRLNEWEETLREIISLEPAHISAYSLIIEEGTAFYNLYENDKLKLPTEEEERKMYHLAKKILEENGFNQYEISNYAKEGKECRHNLAYWNMDNWIGVGSAAASYINGKRIKNISSVEKYINSINEKREAVEEIINNSKNDNMEEFMFMGLRKINGIDENEFKNRFSMNINDVYGEILNKYIDEGLLIRESGRIFLSEKGIEISNIIMADFLL

SEQ ID NO: 11557 - DNA, 1098 bp, Fusobacterium nucleatum subsp. nucleatum ATCC 25586
  CDS (1)..(1098): transl_table=11
atgctgaaaatctataatacatatatacatattcctttttgtgaaagaaaatgtaactattgtgatttcacttcattaaaagggactgatagtcagattgaaaaatatataaattatcttttaaaagaaatagaaatttacagtaaagaatatgatttatcagagaaacaagatacaatatactttggtggagggactccttccctcctaccaataaatagtttagaaaaaattttatctaagttttcttatgataaaaacaccgaaattactattgaagtcaatcctaaaacagttgatactaataaattgaaagaatatagaaaattgggaattaatagattaagtataggaatacaaacttttaatgatgataatttaaaagttctagggagaatacatagttcacaagaagctattgaagtatataatttagctagggaatgtggatttgataatatcagtttagatattatgttttctttaccctatcaaactttatctatgcttcaaaatgatttagaaaagttagttagtttaaatcctaatcatatatcaatttattctttaatttgggaagaaggaactaagttttttagagatttaaaatctggaaaactgaaagaaactgataatgatttagaagccagtatgtatgaatatataattgaatttttaaagtcaaaagactatattcattatgaaatttcaaatttttctaaaaaagactttgaatcaagacataactctacatattgggagaataaaaaatatttaggtgtaggtctatcagctgctggatatttaaataatgttaggtataagaatttttttaatttaaaagattattataataatttagatagaaatattttacctattgatgagaaggaaattcttacagaagaagatattgaacaatatagatatttagttggttttagacttttaaataagattattattcctagtgaaaaatatttagaaaaatgtatgtccttatgtaaagaaggatatttattagaaaaagaaaatggatatattttaagccataaagggttaatgttatttaatgattttatttcaaattttttgtaa

SEQ ID NO: 11558 - protein, 365 aa, Fusobacterium nucleatum subsp. nucleatum ATCC 25586
MLKIYNTYIHIPFCERKCNYCDFTSLKGTDSQIEKYINYLLKEIEIYSKEYDLSEKQDTIYFGGGTPSLLPINSLEKILSKFSYDKNTEITIEVNPKTVDTNKLKEYRKLGINRLSIGIQTFNDDNLKVLGRIHSSQEAIEVYNLARECGFDNISLDIMFSLPYQTLSMLQNDLEKLVSLNPNHISIYSLIWEEGTKFFRDLKSGKLKETDNDLEASMYEYIIEFLKSKDYIHYEISNFSKKDFESRHNSTYWENKKYLGVGLSAAGYLNNVRYKNFFNLKDYYNNLDRNILPIDEKEILTEEDIEQYRYLVGFRLLNKIIIPSEKYLEKCMSLCKEGYLLEKENGYILSHKGLMLFNDFISNFL

SEQ ID NO: 11559 - DNA, 1131 bp, Streptococcus pyogenes MGAS8232
  CDS (1)..(1131): transl_table=11
atgtcaaaaaaacctacttcagcctatgtgcacattcctttttgcacacaaatttgttattattgcgatttttcaaaagtctttatccaaaatcaacctgttgatgcttatttgaaagccttgattcaagaattcgaatcctatgacattcatgacttaaagactctttatattggaggaggtacgcctacagctatcactgctaaacagttggagtatctcctaaatcaccttgaacgaaacctcaatttagatgatcttgaagaattcacaattgaggcaaatcctggtgatttgacgccagaaaaaattgcggtgcttcagaggtcagctgtcaatcggatttccttgggggtgcagacttttaataacaagcaattaaagcagattggccgtagccataatgaagaacaaatttatagcaccattgccaatttaaaaactgcaggctttcacaatatttccattgatttaatttatgccttgccaggtcaaaccttagatcaagtcaaggaaaatgttgctaaagctctggcacttgatattccccaccttagtctttatagccttattttggaacatcacactgtttttatgaacaaaatgcgacgtggtaaacttaacttaccaacggaagacttggaagcggaaatgtttgagtatattatttcagaaatggaagctaatggctttgagcattatgaaatttccaattttaccaaacctggttttgaaagtcgccataacttgatgtattgggataatgtggagtattttggatgtggtgcaggggcttcaggttaccttaatggcattcgttatcaaaatcgggtgcccatccagcattatcttaaagcggttgaagcagggaatgctagactaaatgaagaagtgctgcgcaaagaggaaatgatggaagaggaactctttttgggcttacgtaaaaagacaggagtctccatccagcggttccaagaaaaatttggtatttcttttgaggagtgttatggaaatattgttagggagcttcaaaaccaaggactgcttgtcaaagatgacgcttttgtcagaatgactaaaaagggtcttttcttaggtgattctgttgctgagcggtttatattagattag

SEQ ID NO: 11560 - protein, 376 aa, Streptococcus pyogenes MGAS8232
MSKKPTSAYVHIPFCTQICYYCDFSKVFIQNQPVDAYLKALIQEFESYDIHDLKTLYIGGGTPTAITAKQLEYLLNHLERNLNLDDLEEFTIEANPGDLTPEKIAVLQRSAVNRISLGVQTFNNKQLKQIGRSHNEEQIYSTIANLKTAGFHNISIDLIYALPGQTLDQVKENVAKALALDIPHLSLYSLILEHHTVFMNKMRRGKLNLPTEDLEAEMFEYIISEMEANGFEHYEISNFTKPGFESRHNLMYWDNVEYFGCGAGASGYLNGIRYQNRVPIQHYLKAVEAGNARLNEEVLRKEEMMEEELFLGLRKKTGVSIQRFQEKFGISFEECYGNIVRELQNQGLLVKDDAFVRMTKKGLFLGDSVAERFILD

SEQ ID NO: 11561 - DNA, 1128 bp, Thermoanaerobacter tengcongensis MB4
  CDS (1)..(1128): transl_table=11
atgagggaaataggtatatacattcacattcctttttgcaagaaaaaatgctattactgtgattttaattcttacgccggctatgaacacttgatggaggactatttaaaggctttgcttgaagaggttaaaacatattccgacagaagctttagggttatttctgtgtatataggaggaggtactcccaatttcctccctccttcccatgtagaaagagtgctaagtgaagttcacaaagactataatgtatcgagggatgctgagattacaattgaagtaaatcccgggcttttgacagaggataaattaaaaatttacaagataaacggcataaaccgaataagcatgggacttcaggcttttcagaatcgccttcttgagtatatcggtcgaatccacacagcagaagactttcttgaaaactacgctcttgtgagaaaatattttgacaatgtgaatgttgatttaatttacgccctgccaacgcaaagttttgaagagtggcaggaaactttgacaaaagttgtagaattaaaacctgaacacatctctacttacagcctcattttggaagaaaataccctctttggaagactttataaggaaaataggcttcctgtggtgggagaagaagaggaacttaagatgtaccactggggaatagagtttttaaaaagcaagggatactgccattatgagatttcaaattttgctcttttaggataccagtgcagacacaacattttgtactgggagtgcagagaatatttaggctttggagcaggtgctcactcttactttgaaggtacaaggtggaacaatgtagaaagaatagagaaatatattgaagccattttgaaaagaaaagatgctagagaagagattataaacttaagctttgaagacaaaatgtcagaatttatgtttttgggcttaagaatgagaaaaggggtgtgcgaagaggaattcagaaaaaggtttggaatcagtatgtttgaaaggtacgaggagattttcattaagtatgagaagatgggacttatcgagaaagataaagattgtgtgaggctgacagagaaagggatagatgtttcaaatgtgatttttgaagatttcttgccctaa

SEQ ID NO: 11562 - protein, 375 aa, Thermoanaerobacter tengcongensis MB4
MREIGIYIHIPFCKKKCYYCDFNSYAGYEHLMEDYLKALLEEVKTYSDRSFRVISVYIGGGTPNFLPPSHVERVLSEVHKDYNVSRDAEITIEVNPGLLTEDKLKIYKINGINRISMGLQAFQNRLLEYIGRIHTAEDFLENYALVRKYFDNVNVDLIYALPTQSFEEWQETLTKVVELKPEHISTYSLILEENTLFGRLYKENRLPVVGEEEELKMYHWGIEFLKSKGYCHYEISNFALLGYQCRHNILYWECREYLGFGAGAHSYFEGTRWNNVERIEKYIEAILKRKDAREEIINLSFEDKMSEFMFLGLRMRKGVCEEEFRKRFGISMFERYEEIFIKYEKMGLIEKDKDCVRLTEKGIDVSNVIFEDFLP

SEQ ID NO: 11563 - DNA, 1308 bp, Streptomyces coelicolor A3(2)
  CDS (1)..(1308): transl_table=11
gtgaacgggcgcagggaacgggcgcagggaacggagtgggcaggggatccggccgggtgcgggacaatggaacgcatgccctccgcactccccgacggcgagcccgtccccgccgacggcgccctgcccgcgtccgcgctcgccggggccgccgaccgccccctcggcttctacctgcacgtgccgtactgcgcgacccgctgcggctactgcgacttcaacacctacaccgccaccgaactgcgcggcaccggcggcgtcctcgcctcccgcgacaactacgccgacaccctcgtcgacgaggtccgcctggcccgcaaggtgctcggcgacgacccccgcgaggtccgcacggtcttcgtcggcggcggtacgcccaccctgctggccgccggcgacctggtgcggatgctgggcgcgatccgcgacgagttcggcctggcaccggacgcggagatcaccacggaggccaacccggagtccgtcgacccggcgtatctcgccaccctccgcgcgggcggcttcaaccggatctccttcggcatgcagagcgccaagcagcacgtcctgaagatcctggaccgcacccacaccccgggacgccccgaggcctgtgtcgccgaggcccgcgcggccggcttcgaccacgtcaacctcgacctgatctacggcacccccggcgagtccgacgacgactggcgggcctccctggacgccgcgctcggcgccggacccgaccacgtctcggcgtacgccctgatcgtcgaggagggcacccagctcgcccgccgcatccggcgcggcgaggtcccgatgaccgacgacgacgtgcacgccgaccggtacctgatcgccgaggaggcactgtccgcggccggttacgactggtacgaggtgtccaactgggccacctccgacgcggggcgctgcctgcacaacgagctgtactggcggggcgccgactggtggggcgcgggaccgggcgcgcactcccacgtggggggcgtgcggtggtggaacgtgaagcacccgggggcgtacgcgggggcgctggcggcgggcaagtcgccgggcgcggggcgcgagatcctcacggacgaggaccggcgcgtggagcgcatcctgctggagctgcgcctgcgggagggcgtcccgctgtcgctgctgcgggaggcggggctcgcggcgtcgcggcgggcactgtcggaggggctgctccaggaggggccgtacgaggccgggagcgcggtgctgacgctgcgcgggcggctgctggcggacgcggtggtacgggacctggtggactga

SEQ ID NO: 11564 - protein, 435 aa, Streptomyces coelicolor A3(2)
MNGRRERAQGTEWAGDPAGCGTMERMPSALPDGEPVPADGALPASALAGAADRPLGFYLHVPYCATRCGYCDFNTYTATELRGTGGVLASRDNYADTLVDEVRLARKVLGDDPREVRTVFVGGGTPTLLAAGDLVRMLGAIRDEFGLAPDAEITTEANPESVDPAYLATLRAGGFNRISFGMQSAKQHVLKILDRTHTPGRPEACVAEARAAGFDHVNLDLIYGTPGESDDDWRASLDAALGAGPDHVSAYALIVEEGTQLARRIRRGEVPMTDDDVHADRYLIAEEALSAAGYDWYEVSNWATSDAGRCLHNELYWRGADWWGAGPGAHSHVGGVRWWNVKHPGAYAGALAAGKSPGAGREILTDEDRRVERILLELRLREGVPLSLLREAGLAASRRALSEGLLQEGPYEAGSAVLTLRGRLLADAVVRDLVD

SEQ ID NO: 11565 - DNA, 1158 bp, Xanthomonas campestris pv. campestris str. ATCC 33913
  CDS (1)..(1158): transl_table=11
gtgcccgacctgatcccgccgccgctcgcgctgtacgtgcacctgccctggtgcgtgcgcaaatgcccgtactgcgatttcaattcgcatgcggccaagggcgcgccgccgttcgacgactacgtggatgcgctgatccgcgacctggatgcggacctgccgctggtgtggggccgcgtggtgcactcggtgttctttggcggcggcacgcccagcctgtttccgcccgaagcgatcgatcgcttcctgcaggccgccgccgcgcgcctgcgctttgcgcccaatctggaaatcaccctggaaaccaatcccgggaccgccgagcacgggcgtttcgacgggtaccgtgcggccggggtcaaccggttgagcttcggcgtgcagagtttcgacgacgccgccttgcagcgcctggggcgcatccatgacagcgccgaagccgagcgcgcgatcaagctggcgcaggacgccggctacgacaacttcaacatcgacctgatgtacgcgctgcccgagcagacgctggcgcaggccgagcacgatctggaacgcgccttcgccctgcaacctacgcacctgtcgcattaccagctcacgctggaacccaacacggtgttcttcgcgcgcccgccgcaaggcattcccgacgacgacgacgcctgggacatgcaggagcactgccagcgcctgctcgctgcggccggctatgcgcagtacgaagtcagcgcctacgcccggcccgggcggcagtgcgcgcacaacctcaattactggcggtttggcgactatctgggcattggtgccggcgcgcacggcaagatcagttccggtgccgagcaacaggtgttgcggcgctggaagcacaagcatccgcagagttatctggccagtgccggcagcgcggcagcgatcggcggcgatgagcacgtgcctgccgcgcggctgccgttcgaatacatgctcaacctgctgcgcttgcatgaaggcttccggctgagcgatttcgaagcctgcaccggtctgccggcgcaggtgctgcaggcaccgctggcacgcgcaatggcgcagggctggctggtcgaacagcatggccgcatcgtgccgaccgagctgggccggcgcttcaccaacgacgtggtggagctgttcctgccctga

SEQ ID NO: 11566 - protein, 385 aa, Xanthomonas campestris pv. campestris str. ATCC 33913
MPDLIPPPLALYVHLPWCVRKCPYCDFNSHAAKGAPPFDDYVDALIRDLDADLPLVWGRVVHSVFFGGGTPSLFPPEAIDRFLQAAAARLRFAPNLEITLETNPGTAEHGRFDGYRAAGVNRLSFGVQSFDDAALQRLGRIHDSAEAERAIKLAQDAGYDNFNIDLMYALPEQTLAQAEHDLERAFALQPTHLSHYQLTLEPNTVFFARPPQGIPDDDDAWDMQEHCQRLLAAAGYAQYEVSAYARPGRQCAHNLNYWRFGDYLGIGAGAHGKISSGAEQQVLRRWKHKHPQSYLASAGSAAAIGGDEHVPAARLPFEYMLNLLRLHEGFRLSDFEACTGLPAQVLQAPLARAMAQGWLVEQHGRIVPTELGRRFTNDVVELFLP

SEQ ID NO: 11567 - DNA, 1158 bp, Xanthomonas axonopodis pv. citri str. 306
  CDS (1)..(1158): transl_table=11
atgccccagctgattccaccgccgctgtcgctctacgtgcacctgccctggtgcgtgcgcaaatgcccgtactgcgatttcaactcgcatgcggcaaagggcgcattgccgttcgaggcgtacgtggacgcgctgatccgcgacctggatgcggacctgccgttggtctggggccgcgtggtgcattcggtgttcttcggcggcggcacgcccagcctgtttccgccgcaggcgatcgaccgctttctgcaggcagcagcggcgcggctgcgttttgccccgaatcttgagatcaccctggaaaccaatcccggtaccgccgagcatggccgtttcgagcattaccgcgctgctggcgtgaatcgcctgagcttcggtgtgcagaccttcgacgatgtggcgctgcagcgactcggccgtattcacgacagcgccgaagccgagcgcgcgatcaaactggcgcaggacgccggctacgataatttcaacatcgacctgatgtacgcactgcccgagcagacgctgatgcaggccgagcacgatctggagcgcgccttcgcgctgcagccggcgcacctgtcgcattaccagctcacgctggagccgaacacggtgttcttcgcgcggccgcccaagggcattcccgacgacgatgccgcctgggatatccaggaacactgccaaggcctgctggccgacgccggctacgcccagtacgaagtcagcgcatatgccaagccggggcggcagtgcgcgcacaacctcaactactggcggttcggcgattacctgggcatcggcgcgggcgcgcacggcaagatcagctccggtgccgaagcgcacgtgctgcggcgctggaagcacaagcatccgcagagctatctggccagcgccggcactgctgcatccatcggcggcgatgaaatcgtaccgggcgaacggctgccgttcgaatacatgctcaatctgctgcgcctgcatgagggcttccggctaagcgatttcgaggcgtcgactggccttgcggcctgcgccatcgaggcgccgctggcgcgcgcagtggcaaagggctggatgaggcagcaagacgggcgcgtggtgccgaccgagctgggacggcgtttcaccaatgatgtggtcgagttgttcctggtctag

SEQ ID NO: 11568 - protein, 385 aa, Xanthomonas axonopodis pv. citri str. 306
MPQLIPPPLSLYVHLPWCVRKCPYCDFNSHAAKGALPFEAYVDALIRDLDADLPLVWGRVVHSVFFGGGTPSLFPPQAIDRFLQAAAARLRFAPNLEITLETNPGTAEHGRFEHYRAAGVNRLSFGVQTFDDVALQRLGRIHDSAEAERAIKLAQDAGYDNFNIDLMYALPEQTLMQAEHDLERAFALQPAHLSHYQLTLEPNTVFFARPPKGIPDDDAAWDIQEHCQGLLADAGYAQYEVSAYAKPGRQCAHNLNYWRFGDYLGIGAGAHGKISSGAEAHVLRRWKHKHPQSYLASAGTAASIGGDEIVPGERLPFEYMLNLLRLHEGFRLSDFEASTGLAACAIEAPLARAVAKGWMRQQDGRVVPTELGRRFTNDVVELFLV

SEQ ID NO: 11569 - DNA, 1128 bp, Chlorobium tepidum TLS
  CDS (1)..(1128): transl_table=11
atgatttgcctgtatttgcacattcctttctgccgggagcgttgcccttactgcgacttttttctggtcacgcggcccggcttcgtcgagcgctttttcgaggcgcttgccgttgagacggcggcgaaggcggcgctcttcgcgggacagtcgatcaaggcgattcacttcggcggcggcacgccttctctggttccgccctccttcatcgacggctggctgtcgcaaatctccggtattgcccgaatctccgctgaaaccgaaatcacgctcgaagccaatcccgaggatctcttgccagcctcgctcgatgcgctgcaatcggtcggcgtcaaccggctctctattggtgtgcagtcttttgctgaccgcaagctccgggcgctcggacgggcgcattcggctgccgacgcccgccgtgttgttttggaagcgctcgaacgctttccgtcggtcagcatcgatctgatgtgcggcgcggagggggagatgctcgccgagtgggagggcgaccttcgtgcggcgctcgatctttgtccgcagcacatctcgatctatatgctcacgctcgaagagaagacccggctgtggcgcgatgtgcggaaaggtctccgtgacctgcctggcgaagaggcgcaggcggcgatgtaccggatggcggcggagttgcttggcaatgcggggtacggccactacgaaatttccaacttcgcgctcgaagggcatcactcgcgctacaacctcgcgagctggatgcgcgagccgtacctcggtttcggcccggcggcacacagctttcttgtcgatggcgacgccgagacgcgcttctcgaacgtgagcagcctgacgcgctacctcactgatcctgtcggcgcggtcgattttcgcgaggtgttgaccgaagcgcagcgcttcgacgaagaggtttttctctccctgagaatccgcaaaccgctgtctgttgggtttttgcgaaaagggcataaattagggcatcagcatctcgatgacatccttgttacgctacaggaaaaagggtggatcggtgtcaaaaagggcacggtgacgctgaccgaagaaggctttctttttgccgatcatgtggccgccgaactgctttcggagtga

SEQ ID NO: 11570 - protein, 375 aa, Chlorobium tepidum TLS
MICLYLHIPFCRERCPYCDFFLVTRPGFVERFFEALAVETAAKAALFAGQSIKAIHFGGGTPSLVPPSFIDGWLSQISGIARISAETEITLEANPEDLLPASLDALQSVGVNRLSIGVQSFADRKLRALGRAHSAADARRVVLEALERFPSVSIDLMCGAEGEMLAEWEGDLRAALDLCPQHISIYMLTLEEKTRLWRDVRKGLRDLPGEEAQAAMYRMAAELLGNAGYGHYEISNFALEGHHSRYNLASWMREPYLGFGPAAHSFLVDGDAETRFSNVSSLTRYLTDPVGAVDFREVLTEAQRFDEEVFLSLRIRKPLSVGFLRKGHKLGHQHLDDILVTLQEKGWIGVKKGTVTLTEEGFLFADHVAAELLSE

SEQ ID NO: 11571 - DNA, 1227 bp, Streptococcus pyogenes MGAS315
  CDS (1)..(1227): transl_table=11
ttgtcagctcgtaaaatacttttccaagccatgaagaatcaagggaaatggtttattcatagaaacattttatcatcaaagtggtataataagaccatgtcaaaaaaacctacttcagcctatgtgcacgttcctttttgcacacaaatttgttattattgcgatttttcaaaagtctttatccaaaatcaacctgttgatgcttatttgaaagccttgattcaagaatttgactcttatggcattcgagacctaaaaaccctttatattggaggaggtacgcctacagctatcactgctaaacagttggagtatctcctaaatcaccttgaacgaaacctcaatttagatgatcttgaagaattcacaattgaggcaaatcctggtgatttgacgccagaaaaaattgcggtgcttcagaggtcagctgtcaatcggatttccttgggggtgcagacctttaataacaagcaattaaagcagattggccgtagccataatgaagaacaaatttatagcaccatcactaatttaaaagctgcaggctttcacaatatttccattgatttaatttatgccttgccaggtcaaaccttagatcaagtcaaggaaaatgttgctaaagctttggcacttgatattccccaccttagtctttatagccttattttggaacatcacactgtttttatgaacaaaatgcgacgtggtaaacttaacttaccaacggaagacttggaagcagaaatgtttgagtatattatttcagaaatggaagctaatggctttgaacattatgaaatctccaattttaccaaacctggttttgaaagtcgtcataacttgatgtattgggataatgtggaatattttggatgtggtgcaggggcttcaggttaccttaatggcattcgttatcaaaatcgggtgcccatccagcattatcttaaagcggttgaagcaggaaacgctagactaaatgaagaagtgctgcgcaaagaggaaatgatggaagaggaactctttttgggcttacgtaaaaagacaggagtctccatccagcggttccaagaaaaatttggtatttcttttgaggagcgttatggaaatattgttagggagcttcaaaaccaaggactgcttgtcaaagatgacgcttttgtcagaatgactaaaaagggtcttttcttaggtgattctgttgctgagcggtttatattagattag

SEQ ID NO: 11572 - protein, 408 aa, Streptococcus pyogenes MGAS315
MSARKILFQAMKNQGKWFIHRNILSSKWYNKTMSKKPTSAYVHVPFCTQICYYCDFSKVFIQNQPVDAYLKALIQEFDSYGIRDLKTLYIGGGTPTAITAKQLEYLLNHLERNLNLDDLEEFTIEANPGDLTPEKIAVLQRSAVNRISLGVQTFNNKQLKQIGRSHNEEQIYSTITNLKAAGFHNISIDLIYALPGQTLDQVKENVAKALALDIPHLSLYSLILEHHTVFMNKMRRGKLNLPTEDLEAEMFEYIISEMEANGFEHYEISNFTKPGFESRHNLMYWDNVEYFGCGAGASGYLNGIRYQNRVPIQHYLKAVEAGNARLNEEVLRKEEMMEEELFLGLRKKTGVSIQRFQEKFGISFEERYGNIVRELQNQGLLVKDDAFVRMTKKGLFLGDSVAERFILD

SEQ ID NO: 11573 - DNA, 1143 bp, Yersinia pestis KIM
  CDS (1)..(1143): transl_table=11
atgcgctgcgcgatgcttaaattacccccgctcagtctctacatccatatcccttggtgcgtccagaaatgcccttattgtgatttcaactcacatgcgttgaaaggcgatgtccctcatcaggaatatgtagagcacgtactggcggatttggatgctgacgtgcctctggtgagtggccgtgaaatcagcactatttttattggtggcggcacacccagcttgctgagtgcagaggccatgcagcaactacttgatggtgtccgcgcgcgtttgccggttgccagtgacgcagagatcaccatggaagccaaccccggagcggtcgaagccgatcgctttagcggctatcagcgagcgggtattaaccgcatatccattggcgtccagagctttagcgcacagaaattaacgcggctggggcggatacatgggccagatgaagcaaggcgggcagcagagctggcaacctcactgcaattacgtagctttaatctagatttgatgcacggtctgcctgatcaaacactggaagaagcattggatgatttgcgtcaggctatcgccttaaatccaccacacttatcttggtatcagctgactattgagccgaatactggctttagttcccggcccccaatcctgcccgatgacgatgcgttatgggatattttccagcaaggtcatcagctactcagtgccgctggttatctgcaatatgaaacctcggcctatgccaagccaggttaccaatgccagcataatcttaactactggcgctttggtgattatctggggattggctgtggggcgcatggcaagatcacatttaacgatgggcgtattttacggaccataaaaaccaaacatccacgtggttttatgcagggaaaatacttggataaacaatatgaagtggcagcagtcgaccggccttttgagttctttatgaaccgcttccgtttgttggaagctgcccctcgggctgatttctatcacttcaccgggttaactgagagtactattcgcccacagttagatgaggcaatagcaaaagagtatttaatcgaaacaacagaatactggcagattaccgaaaaaggaaaattgttccttaactcgctactggagctatttttatag

SEQ ID NO: 11574 - protein, 380 aa, Yersinia pestis KIM
MRCAMLKLPPLSLYIHIPWCVQKCPYCDFNSHALKGDVPHQEYVEHVLADLDADVPLVSGREISTIFIGGGTPSLLSAEAMQQLLDGVRARLPVASDAEITMEANPGAVEADRFSGYQRAGINRISIGVQSFSAQKLTRLGRIHGPDEARRAAELATSLQLRSFNLDLMHGLPDQTLEEALDDLRQAIALNPPHLSWYQLTIEPNTGFSSRPPILPDDDALWDIFQQGHQLLSAAGYLQYETSAYAKPGYQCQHNLNYWRFGDYLGIGCGAHGKITFNDGRILRTIKTKHPRGFMQGKYLDKQYEVAAVDRPFEFFMNRFRLLEAAPRADFYHFTGLTESTIRPQLDEAIAKEYLIETTEYWQITEKGKLFLNSLLELFL

SEQ ID NO: 11575 - DNA, 1200 bp, Thermosynechococcus elongatus BP-1
  CDS (1)..(1200): transl_table=11
atgactatcgctgcatacatccatttgcccttttgtcggcgccgctgcttctactgtgactttccaattacggtggtgggagagtcgccaacgctggcacagtccctgattcaagagtatgtggctgcactgtgtcaagaaattgcccacacccccacggaggggcaaccgctgcaaactatcttctttggtggcggaacgccttctctagtcccgcctccataccttggccagctgctggaggccctcgatcgccagctgggtattgccctcgaagccgaaatttccatggaaatggatccggggacatttgacttagaacaattgcaggactatctcaggctaggggtaaatcgtgtcagtttgggcgtacaggcctttgacgatgagctattgcggctgtgtggccgcagtcacgatgtggccgatgttgagcgggcagttgagataattcagagggcgggggtagcaaactggagcatggatctgatttcgggcctgccccaacaatccttggcggactggcaatgttccctagagcaagcgatcgccttcaagccaacgcatctgtctatctatgacctaatcattgagccaaagaccgtcttcagcaaacgctatcaacccgaagcagcccccctacctagccaggagcaggctgccgccgcctatcaccttgcccatgagatgttaacagcagcgggctacgatcactacgaaatttctaactatgcccaaggggggtttgcctgtcgtcataatcaagtctattggcgcaatcaatcctactatggctttggcatgggcgccaccagttatctccagcatcgtcgtctcagccgtccgcggacccgccgtgaatactatcaatggctgcaagccttaccagagagcctccaccaaggaagtccagactccctgtgggatcgctggttggaaacactgatgttgggcttgcgcctcagggatggcctctctttgccggctttggcggatgaatttccggcgtcctgggttgaggccctacaggcagcagcggcaaaaatatcgccagcgttgctttctttggcgggcgatcgcctgcacttaacacagccagagggatttctcgtggctaatcacgtcattgtcagcctttggcaagcattggagggatcggttttccgccaacaggaagggcagcccctaccgatacactag

SEQ ID NO: 11576 - protein, 399 aa, Thermosynechococcus elongatus BP-1
MTIAAYIHLPFCRRRCFYCDFPITVVGESPTLAQSLIQEYVAALCQEIAHTPTEGQPLQTIFFGGGTPSLVPPPYLGQLLEALDRQLGIALEAEISMEMDPGTFDLEQLQDYLRLGVNRVSLGVQAFDDELLRLCGRSHDVADVERAVEIIQRAGVANWSMDLISGLPQQSLADWQCSLEQAIAFKPTHLSIYDLIIEPKTVFSKRYQPEAAPLPSQEQAAAAYHLAHEMLTAAGYDHYEISNYAQGGFACRHNQVYWRNQSYYGFGMGATSYLQHRRLSRPRTRREYYQWLQALPESLHQGSPDSLWDRWLETLMLGLRLRDGLSLPALADEFPASWVEALQAAAAKISPALLSLAGDRLHLTQPEGFLVANHVIVSLWQALEGSVFRQQEGQPLPIH

SEQ ID NO: 11577 - DNA, 1176 bp, Oceanobacillus iheyensis HTE831
  CDS (1)..(1176): transl_table=11
ttggattcaataaaagcagtatatatacacattccattttgtaaacaaatatgtcattactgcaattttgttaaatatttttatatggaaaacaaagctgacgattatattgaagcgctaatccatgagatagattgcactgtaattggatataatgttcatgtggataccatttatatgggtggaggtacacctaccgctttaaatatacaacaactcaaaaaactatttaattttttaggtagaaaatttaatttagaatcttgtaaagagtttacgattgaaataaatcccggtgacatcgatcatgaaaaagctcagctactttcttcgtatggggttaacagagtttcatttggtgtacaagtaatggacgatgacatgctacgaaaaattggaagaatgcattgtgtaaaagacgtctatgaaacagtagacttattaaccaaaaatgattttcgaaatattagtctcgatttaatctatgcattaccaaaccaaacagtagaacactttgaaaaaacattacacgatgcgcttcaatttggattaccacattattcaacctatgcattgcaaattgaaccgaagacagtgtttttccataagcagaataaaggtcagctacagcgccctccagaagatgcagaagtggaaatgtatcggatattacaacacgagatgaaaaaacgtggcataaggcagtatgaaataagtaattttgcaaaaccaggatatgaaagtaaacataatcttacttattggaataatgattattattacggttttggtgcaggtgcgcatggatacattccaggtaagcgtacttccaatagtaagccacttggtacatatatgcgtgctgctaaagaagaaggaagtgcaattgacgaaatcgaagaaatcactaaaaaagatcaaattgaagaagagctatttttgcaactacgtaaaacatctggaattgataagaagatgtttgagcaaaaatacggggtatctcttgagcaattgtatgaaaaagaattacaggatttattagaacaaggtttactaagattgatagatgggaattaccgtttaacggatagaggaatgctattgggggatcaagtattttccaaattcttaatgctacaatctgctggtgataaaattattcaattggaaagctaa

SEQ ID NO: 11578 - protein, 391 aa, Oceanobacillus iheyensis HTE831
MDSIKAVYIHIPFCKQICHYCNFVKYFYMENKADDYIEALIHEIDCTVIGYNVHVDTIYMGGGTPTALNIQQLKKLFNFLGRKFNLESCKEFTIEINPGDIDHEKAQLLSSYGVNRVSFGVQVMDDDMLRKIGRMHCVKDVYETVDLLTKNDFRNISLDLIYALPNQTVEHFEKTLHDALQFGLPHYSTYALQIEPKTVFFHKQNKGQLQRPPEDAEVEMYRILQHEMKKRGIRQYEISNFAKPGYESKHNLTYWNNDYYYGFGAGAHGYIPGKRTSNSKPLGTYMRAAKEEGSAIDEIEEITKKDQIEEELFLQLRKTSGIDKKMFEQKYGVSLEQLYEKELQDLLEQGLLRLIDGNYRLTDRGMLLGDQVFSKFLMLQSAGDKIIQLES

SEQ ID NO: 11579 - DNA, 1158 bp, Brucella suis 1330
  CDS (1)..(1158): transl_table=11
atgcatgctgatggggaaaccgcctttggcatttatgtgcactggccgttctgtctggccaaatgcccttattgcgatttcaacagccatgtccgccacaagccggtggatcaggcgcgctatggcgcggctttccggcgcgagatggaaaccttgcgtgagcgcacaggcccgcgcaccgtcaccagcattttcctgggcggcggcacaccatcgctgatgcagccggaaaccgtgggcgctctgctggatggcatcgcatcgtattggtctgtggcgccggacattgaagtgacgctggaagccaatccgacaagcgttgaggccgaccgttttcgcggctatcgtgcggcaggcgttaaccgggtgtcgcttggtattcaggcgttgaacgatcccgatctgcgccgccttggccggatgcattcggttgcagaggcaaaggccgcgatccggctggcacgcgagattttcccgcgcctttccttcgaccttatctatgcgcggccggaccagacaatcgaggcctggcgcgaggaattgaaggaggcgatcggccttgctgccgaccatctgtcgctctaccagcttaccatcgaggaaggcacgcagttctataatctctggaaggcgggcaagctcaccacgccggagccggaccttgcagccgcgctctatgaggaaacgcagcgtgtgaccgccgaacatggccttccggcctatgagatttccaaccatgcggtgccggggcgggaatcgcagcacaatctcgtctattggcgttatggccaatatgctggcatcgggcccggcgcacatggccgtttcgtggaaaatgacgtgcgcaccgtgaccatgactgaaaagcatcctgaaacatggcttgaccatgtggagcggcgcggccacggaattatcgaggaagaatatctcgatggcgggcaggagggcgatgaattcctgatgatgggcctgcgcctgcgcgaaggcatcgaccttgcccgttacgcgcggctttccggccatgcgatcgacgacaaacggctggcaaagctgatcgcggaaggcatgatcgagccgatgggcggcagcctgatccgcgcaacgccggatggcgcgctggtgctggatgcactggttgccgatctggcggcataa

SEQ ID NO: 11580 - protein, 385 aa, Brucella suis 1330
MHADGETAFGIYVHWPFCLAKCPYCDFNSHVRHKPVDQARYGAAFRREMETLRERTGPRTVTSIFLGGGTPSLMQPETVGALLDGIASYWSVAPDIEVTLEANPTSVEADRFRGYRAAGVNRVSLGIQALNDPDLRRLGRMHSVAEAKAAIRLAREIFPRLSFDLIYARPDQTIEAWREELKEAIGLAADHLSLYQLTIEEGTQFYNLWKAGKLTTPEPDLAAALYEETQRVTAEHGLPAYEISNHAVPGRESQHNLVYWRYGQYAGIGPGAHGRFVENDVRTVTMTEKHPETWLDHVERRGHGIIEEEYLDGGQEGDEFLMMGLRLREGIDLARYARLSGHAIDDKRLAKLIAEGMIEPMGGSLIRATPDGALVLDALVADLAA

SEQ ID NO: 11581 - DNA, 1137 bp, Shigella flexneri 2a str. 301
  CDS (1)..(1137): transl_table=11
atggttaaattaccgccgctgagtctctacattcacatcccgtggtgcgtgcagaaatgcccgtactgcgatttcaactctcacgcgttgaaaggagaagtgccgcacgacgattatgttcagcatctgctttgcgatctggacaatgatgtggcttacgctcagggccgtgaagtaaagacaatctttattggcggtggtacgccgagcctgctttccggcccggcgatgcaaacgctgctagacggcgtgcgtgcgcgtttgccgctggcagcggatgcagaaattactatggaagcgaacccaggcacggtagaagcggatcgctttgtcgattatcagcgtgctggtgtaaaccgcatctctattggtgtgcagagttttagcgaagaaaagctgaaacgacttgggcgtattcatggcccgcaagaagcgaaacgagcggcaaagctggcgagcggtttagggttacgtagctttaaccttgatttgatgcatggactaccggatcaatcactggaagaggcgcttggcgatctacgccaggccattgaactgaatccgccgcatctttcctggtatcaactgactatcgaacctaatacgctgtttggctcgcgaccgccggtgctgccggacgatgacgcgctgtgggatattttcgaacaggggcatcagttattaaccgcagcgggttatcagcaatatgaaacttccgcttacgccaaacccggttatcagtgccagcacaatctcaactactggcgctttggtgactacatcggtattggctgcggcgcgcacggcaaagtgaccttcccggatgggcgcattctgcgtaccactaaaacgcgtcatcctcgtggttttatgcaaggaaggtatctggaaagccagcgtgatgtcgaagccgcagataagccgtttgagttctttatgaatcgcttccgtctgctggaggccgcgccgcgcgtggagtttattgcgtataccgggctttgcgaagatgtgattcgcccacagttagacgaggcgattgcccagggttatctcaccgaatgtgcggattactggcagataacggaacatggtaaattattcttaaactcacttcttgaattattcctcgctgagtaa

SEQ ID NO: 11582 - protein, 378 aa, Shigella flexneri 2a str. 301
MVKLPPLSLYIHIPWCVQKCPYCDFNSHALKGEVPHDDYVQHLLCDLDNDVAYAQGREVKTIFIGGGTPSLLSGPAMQTLLDGVRARLPLAADAEITMEANPGTVEADRFVDYQRAGVNRISIGVQSFSEEKLKRLGRIHGPQEAKRAAKLASGLGLRSFNLDLMHGLPDQSLEEALGDLRQAIELNPPHLSWYQLTIEPNTLFGSRPPVLPDDDALWDIFEQGHQLLTAAGYQQYETSAYAKPGYQCQHNLNYWRFGDYIGIGCGAHGKVTFPDGRILRTTKTRHPRGFMQGRYLESQRDVEAADKPFEFFMNRFRLLEAAPRVEFIAYTGLCEDVIRPQLDEAIAQGYLTECADYWQITEHGKLFLNSLLELFLAE

SEQ ID NO: 11583 - DNA, 1158 bp, Shewanella oneidensis MR-1
  CDS (1)..(1158): transl_table=11
atgtctgtgaatgtgtcacctcagctaaccttaccgccattgagcttgtacattcatatcccatggtgtgtacaaaaatgtccttactgcgactttaactcccatgggcaaaatggtgaattaccccagcaagcctatgtggatgctctgctggcggacttacgccaagacttgcacttagtacaaggccgtaagctacacaccatttttattggtggtggaacgccgtctctgtttgatgccaatcaaatcaaacggatattggatgatgccaatgctctcattccctttagtgatggcattgaaatcaccatggaagccaaccctggcaccttagagcacgatgactttagcgcctaccgcgccgctggcgtaacgcgtttatccattggggtgcaaagtttctccaaggataagcttaatctcttaggccgtattcacgatcaaaatgaagcccaaactgccgctcaaaaagcccgtcaagcggactatttaagttttaatttggatctgatgcacggacttcctaaccaaagttttgaagaagcgatggcggatatagataccgctgcatccctcaatccaccgcatttgtcttggtatcaactaacgattgagcccaataccttgttccactctaagccaccacaacttcccgatgatgaagatctctggcagatctatgaacaagggcaacaaaagctagcggctttaggttatgagcagtatgaaatctcggcctatgccaaacccggttatcaatgccagcataaccttaattattggcaatttggcgattatttaggcataggctgtggcgcccacggcaaagtcaccttacccgaagaaaatcgtattattcgcacggttaaaatcaagcatccgaagggctatttaactgccgataattacaccttcgaacaaacagaagtcgcgcaagaagatcgcgcactcgaatatttgatgaatcgtttacgcctaatgacgccaatccctaagcaagagtttgaagatagaacggggttgcctcgagatgtcttgaaggatgggatggaaaaggccaaacaacggggtttactcaccgaatcggccgaacactggcaattaaccaataaaggtcacatgtttgtgaatgatttattgacacaattctgctaa

SEQ ID NO: 11584 - protein, 385 aa, Shewanella oneidensis MR-1
MSVNVSPQLTLPPLSLYIHIPWCVQKCPYCDFNSHGQNGELPQQAYVDALLADLRQDLHLVQGRKLHTIFIGGGTPSLFDANQIKRILDDANALIPFSDGIEITMEANPGTLEHDDFSAYRAAGVTRLSIGVQSFSKDKLNLLGRIHDQNEAQTAAQKARQADYLSFNLDLMHGLPNQSFEEAMADIDTAASLNPPHLSWYQLTIEPNTLFHSKPPQLPDDEDLWQIYEQGQQKLAALGYEQYEISAYAKPGYQCQHNLNYWQFGDYLGIGCGAHGKVTLPEENRIIRTVKIKHPKGYLTADNYTFEQTEVAQEDRALEYLMNRLRLMTPIPKQEFEDRTGLPRDVLKDGMEKAKQRGLLTESAEHWQLTNKGHMFVNDLLTQFC

SEQ ID NO: 11585 - DNA, 1143 bp, Streptococcus mutans UA159
  CDS (1)..(1143): transl_table=11
atgtctaaaaaacctacgtcagcctatgtgcatattcctttttgtacacagatttgctattattgcgatttttcaaaagtttttattaaaaatcagcctgtagatgcttatttggaggccctgattaaggagtttaatgattactatcagattaaggacttgcaaaccctctatattggcggcggtacaccaacagccatttctggggagcaattggattacctgctgactaatctgtcgaaaaatctcaatcttaatatgttggaagaatttaccattgaagcaaatccgggagatttgacaccggataaagtagcagtgttgaagcaatcagctgttaatcgtgtttctttaggtgtacagacttttaataataagcatctgaaacaaattggacgcggacataatgaagctcagatttatgaaagtattgacagtttaaaaagtgctggttttgataatatttctattgacttgatttatgccctgcccaatcaaaccataactgatgtcaaagaaaatgtagctaaagcgctggccttggatattccgcatctgagcctttacaatttgattttggaacatcatacggtttttatgaataaaatgcgacgcgggaaactcaatctgccagcagaagatttggaggcggaaatgtttgactatatcatttctgaaatggaagatcatggttttgagcattatgaaatttctaactttaccaagcctggttttgaaagccgtcacaatctgatgtattggaacaatgctgagtattttggctgcggtgcaggggcttcgggctatgttgatggtatccgctatcgtaaccgcgggcctatccagcattatttgaaagctattaaggaaaagagacaggctcgctttcaagaagaaaggttaagtcaatcggagaaaatggaagaagaactctttttgggtttgcgaaagaaatcggggatttcaattcagcgatttgaagacaaatttggtttgcctttaatggaagtttatggtcaggctattgatgacttagagaaggatggtctgattttagtggaaaaagattgtattaggatgagtaaaaaaggtctctttttgggagatactgttgctgagaaatttattttggagcagaaataa

SEQ ID NO: 11586 - protein, 380 aa, Streptococcus mutans UA159
MSKKPTSAYVHIPFCTQICYYCDFSKVFIKNQPVDAYLEALIKEFNDYYQIKDLQTLYIGGGTPTAISGEQLDYLLTNLSKNLNLNMLEEFTIEANPGDLTPDKVAVLKQSAVNRVSLGVQTFNNKHLKQIGRGHNEAQIYESIDSLKSAGFDNISIDLIYALPNQTITDVKENVAKALALDIPHLSLYNLILEHHTVFMNKMRRGKLNLPAEDLEAEMFDYIISEMEDHGFEHYEISNFTKPGFESRHNLMYWNNAEYFGCGAGASGYVDGIRYRNRGPIQHYLKAIKEKRQARFQEERLSQSEKMEEELFLGLRKKSGISIQRFEDKFGLPLMEVYGQAIDDLEKDGLILVEKDCIRMSKKGLFLGDTVAEKFILEQK

SEQ ID NO: 11587 - DNA, 1131 bp, Streptococcus agalactiae NEM316
  CDS (1)..(1131): transl_table=11
atgttaaagaaaccaacctcagcatatgtacacattccattttgtacccaaatatgttattattgtgatttttcaaaagtttttattaaaaatcagcctgtagacgcttatcttcaggctcttatccgtgaatttcggtcttatgatattacagaattgcgcaccttatatattggaggagggacacctacatctataagcgctgtgcaactggactatttattgacggagttaattagagatttaaacctaaatactttagaggagttcactatcgaagctaatccaggagatttaaccgttgataaaatagaggtgcttcaaaagtcagctgtcaatagagtttctctaggagttcagacctttaatgataaacatttaaagcgtattggacgcagtcacaatgaggcacaaatttattctacaattgatgctcttaaaacagccggttttcaaaatatctctattgacctaatttatgccttacctggacaaacgatggatgatgttagaagtaatgtagccaaagctctctctctaaatattcctcatttgagtttatatagtttaattttagaacaccatactgtatttatgaataaaatgcgtcgtgggaaattacatttgccaacagaagatttagaagccgagatgtttgaatatatcatttctgaaatggaaagaaatggttttgagcattatgaaatttctaattttacaaagccgggttttgaaagtcgtcataatttgatgtactgggataatgtagaatattatggtgttggtgcaggtgcttctggttatcttgatggtattcgttatcgtaatagagggccaatacaacattatctaaagggtgtttcagaaggtaatgcaaggttatctgaagaagtattatcaaaaaatgaaatgatggaagaggagcttttcctcggtcttcgtaaaaaagagggtgtttccatcggaaaatttgaacaaaaatttggaacgtcctttgagaaacgttacggtcagattgttcaagaactccaaagtgatgggcttttgaaagaaaataatggttttatccagatgactaaaaaaggtctcttcttaggagatacggttgccgagaaatttattgtggagtaa

SEQ ID NO: 11588 - protein, 376 aa, Streptococcus agalactiae NEM316
MLKKPTSAYVHIPFCTQICYYCDFSKVFIKNQPVDAYLQALIREFRSYDITELRTLYIGGGTPTSISAVQLDYLLTELIRDLNLNTLEEFTIEANPGDLTVDKIEVLQKSAVNRVSLGVQTFNDKHLKRIGRSHNEAQIYSTIDALKTAGFQNISIDLIYALPGQTMDDVRSNVAKALSLNIPHLSLYSLILEHHTVFMNKMRRGKLHLPTEDLEAEMFEYIISEMERNGFEHYEISNFTKPGFESRHNLMYWDNVEYYGVGAGASGYLDGIRYRNRGPIQHYLKGVSEGNARLSEEVLSKNEMMEEELFLGLRKKEGVSIGKFEQKFGTSFEKRYGQIVQELQSDGLLKENNGFIQMTKKGLFLGDTVAEKFIVE

SEQ ID NO: 11589 - DNA, 1206 bp, Corynebacterium efficiens YS-314
  CDS (1)..(1206): transl_table=11
ttgggtgctatgtcagttcctcgctccgtcttcggtgtctatgtccatgtcccattctgttccacccggtgcgggtactgcgacttcaacacctacacggcgggtgaactgggcagcaccgccgggcccgatacctatctcgatgcgctcgaggtggaattggagatggctgtcgcccgcctcgccgcggcccatgaggccgattccgaccagccgggcccacgtcccgcggaaaccgtcttcatcggcggcggcacaccttcactgatcggggcggatgggctcagccgggtgctctccggcatccgcaataccttcggcctggcgccgggggcggagatcaccaccgaatccaacccggagtccacctcgccggagttcttcgatgccctgcgcgagtccgggtacaaccgcatttcgctggggatgcagtcggcgtcgtcaagcgtgcttagggtgctggaccgccggcacaccccgggcaggccggtggccgccgcgaaggaggcacgcgcggccggtttcgaccacgtcaacctcgacatgatctacggcacccccaccgaaaccgacgaggatgtccgtaaaaccctcgacgccgtcctggaggccgatgttgatcatgtctccgcctactccctcatcgtggaggacggcaccgccatggcccgcaaggtccgccgcggcgaattgcccgcccccgacgaggatgtctacgccgaccgttacgagatgatcgaccagcgcctgcgtgccaacggcttcgactggtatgaggtgtccaactgggccaaacccggcggggagtgccgccacaacatggggtactgggtcgacggtgactggtggggggccggccccggtgcccattcgcacatcggcgaccaccgcttctacaacgtcaaacaccccgccaggtactccgcacagatcgcgggcggggagctgccgatcatggataccgaactcctcaccgccgatgaccaccacactgaacgcgtcatgctgggcctgcgtctcaaacaggggctgcccgccgggatcttctccccatcggcgcaccgggtcatcgaccgccacatcgaccggggtctgctgcaccgggtcggcggcaacatcgcggtcaccgacgccggacgcctgcttgccgacggcatcatcgccgacatcctcctcgccgaggacgatgaccttccaggcgcctga

SEQ ID NO: 11590 - protein, 401 aa, Corynebacterium efficiens YS-314
MGAMSVPRSVFGVYVHVPFCSTRCGYCDFNTYTAGELGSTAGPDTYLDALEVELEMAVARLAAAHEADSDQPGPRPAETVFIGGGTPSLIGADGLSRVLSGIRNTFGLAPGAEITTESNPESTSPEFFDALRESGYNRISLGMQSASSSVLRVLDRRHTPGRPVAAAKEARAAGFDHVNLDMIYGTPTETDEDVRKTLDAVLEADVDHVSAYSLIVEDGTAMARKVRRGELPAPDEDVYADRYEMIDQRLRANGFDWYEVSNWAKPGGECRHNMGYWVDGDWWGAGPGAHSHIGDHRFYNVKHPARYSAQIAGGELPIMDTELLTADDHHTERVMLGLRLKQGLPAGIFSPSAHRVIDRHIDRGLLHRVGGNIAVTDAGRLLADGIIADILLAEDDDLPGA

SEQ ID NO: 11591 - DNA, 1176 bp, Pseudomonas putida KT2440
  CDS (1)..(1176): transl_table=11
atgatcgaaatgctgtcgccccccggcgcggcaggctttagcagcctgccgccgctggcgctgtacatccacattccgtggtgcgtacgcaaatgcccttattgcgacttcaactcccacgcagccgggcctgaactaccggaagatgcctacgtcacagccctgctcgacgacctcgaccaggagctggctgccgtacaaggtcgcccgatcagctcgatcttcttcggtggcggtacgccaagcctgttcagtgccagcgcccttggccggctactgcgtggcgtagagcaacgtattccgttcgcgccagacatcgagatcaccctcgaagccaacccgggcaccttcgagcaggacaagttcaaggcctaccggcagaccggcatcaaccgtctttcgatcggtgtgcagagctttcagccagccaagctggaggcactggggcgcatccacaatggcgacgaagcggttcgagccgccggcatggcgcgcgcggccggtttcgacaatttcaacatggacctgatgcacggcctgcccgaccagtcgctggacgacgcgctgggtgacctgcgccaggccatcgacctggggccgacccacctgtcgtggtatcagctgaccgtggaaccgaacacggtgttctggaaccagccgccagagctgcccgaagacgacatcctctgggatattcaggaagccggccaagcgctgatggccgagcacggctaccgccagtacgaggtatcggcctacgcccaggcaggccgcgccgcccggcacaacctcaactactggcgcttcggcgacttcatcggcattggtgccggcgcccacggcaagctcaccttcgccgacgggcgcatcctgcgtacctggaagacccgcctgcccaaggactacctgaacctggccaagccgttcagggccggcgagaagctgctgccagtcgatgaactgccgttcgagttcctgatgaacgccctgcgcctgaccgatggcgtggaagccgaactgttcacccagcgcaccggcttgccactggcacagctacaggaagcacgccgtgccgccgaacaaaagggccttttacaggtcgaaccggatcgactggtagccacgccgaggggccagttgttcctcaatgacctgctgcagtatttcttgacctga

SEQ ID NO: 11592 - protein, 391 aa, Pseudomonas putida KT2440
MIEMLSPPGAAGFSSLPPLALYIHIPWCVRKCPYCDFNSHAAGPELPEDAYVTALLDDLDQELAAVQGRPISSIFFGGGTPSLFSASALGRLLRGVEQRIPFAPDIEITLEANPGTFEQDKFKAYRQTGINRLSIGVQSFQPAKLEALGRIHNGDEAVRAAGMARAAGFDNFNMDLMHGLPDQSLDDALGDLRQAIDLGPTHLSWYQLTVEPNTVFWNQPPELPEDDILWDIQEAGQALMAEHGYRQYEVSAYAQAGRAARHNLNYWRFGDFIGIGAGAHGKLTFADGRILRTWKTRLPKDYLNLAKPFRAGEKLLPVDELPFEFLMNALRLTDGVEAELFTQRTGLPLAQLQEARRAAEQKGLLQVEPDRLVATPRGQLFLNDLLQYFLT

SEQ ID NO: 11593 - DNA, 1137 bp, Escherichia coli CFT073
  CDS (1)..(1137): transl_table=11
atggttaaattaccgccgctgagtctctacattcacatcccgtggtgcgtgcagaaatgcccgtactgcgatttcaactctcacgcgttgaaaggagaagtgccgcacgacgattatgttcagcatctgcttaacgatctgaacaacgatgtggcttacgctcagggccgtgaagtaaagacaatctttattggcggtggtacgccgagcctgctttccggcccggcgatgcaaacgctgctggacggcatacgtgcgcgtttgccgctggcagcggatgcagaaattacgatggaagcgaatcctggtacggttgaagccgatcgctttgttgattatcagcgtgctggtgtgaaccgcatctccattggcgtacagagttttagcgaagaaaagctgaaacgacttgggcgcattcatggcccgcaagaagcgaaacgagcggcaaatctggcgagcggtttagggttacgtagctttaacctcgatttgatgcatgggctaccggatcaatcactggaagaggcgcttggcgatctacgccaggctattgaactgaatccgccgcatctttcctggtatcaactgaccatcgaacccaatacgctgtttggctcgcgccctcctgtactgccggacgatgacgcgctgtgggacattttcgaacaggggcatcagttattaaccgcagcgggttatcagcaatatgaaacctccgcttacgccaaacccggttatcagtgccagcacaatctcaactactggcgctttggtgactacatcggtattggctgcggcgcgcatggcaaagtgaccttcctggatgggcgcattctgcgtaccaccaaaacgcgtcatccgcgtggttttatgcaggggcggtatctggaaagccagcgtgatgtcgaagccgcagataagccgtttgagttctttatgaatcgcttccgtttgctggaagccgcgccgcgcgtggagtttagccagtatactggcctttcagaagaggttattcgccctcagttagacgaggctattgctcagggttatctcacagaatgtgcggattactggcagataacggaacatgggaagttgtttttaaattcgctgctggagctttttctggctgagtaa

SEQ ID NO: 11594 - protein, 378 aa, Escherichia coli CFT073
MVKLPPLSLYIHIPWCVQKCPYCDFNSHALKGEVPHDDYVQHLLNDLNNDVAYAQGREVKTIFIGGGTPSLLSGPAMQTLLDGIRARLPLAADAEITMEANPGTVEADRFVDYQRAGVNRISIGVQSFSEEKLKRLGRIHGPQEAKRAANLASGLGLRSFNLDLMHGLPDQSLEEALGDLRQAIELNPPHLSWYQLTIEPNTLFGSRPPVLPDDDALWDIFEQGHQLLTAAGYQQYETSAYAKPGYQCQHNLNYWRFGDYIGIGCGAHGKVTFLDGRILRTTKTRHPRGFMQGRYLESQRDVEAADKPFEFFMNRFRLLEAAPRVEFSQYTGLSEEVIRPQLDEAIAQGYLTECADYWQITEHGKLFLNSLLELFLAE

SEQ ID NO: 11595 - DNA, 1338 bp, Escherichia coli CFT073
  CDS (1)..(1338): transl_table=11
atgaacacaaataacaccctggatctcacgccacattttgctttagacggtgatcagccctttaaagacaggcgcgccatgatgccgtttcgtggggccattccggttgccaaagagcaactggcacagacctggcaagagatgatcaatcaaacggtatcaccacgtaagcgactggtttacctacacattcctttttgtgcgacacactgcacgttttgtggtttttatcagaaccgttttaatgacgatgcgtgtgctcattataccgacgccctgattcgtgaaatagaaatggaagcagacagcgtattgcatcagtctgcccccatccacgcggtctatttcggtggcggtacgccttccgcgctttcagcacacgatttggccagaatcatcaccacattacgagaaaagctgccactggcccctgattgtgaaatcactattgaaggccgggtactgaattttgacgctgagcgaatcgatgcttgccttgatgctggagcaaaccgcttctcaattggtattcagtcgtttaacagcaaaatccgcaagaaaatggcccgcacctcggatggcccaaccgctattgcgtttatggaaagcctggtcaaacgcgaccgtgccgcggtggtctgtgacctgctgtttggtctgccgggtcaggatgcgcaaacctggggagaagatctggctattgcccgcgatatcggtctcgacggcgtcgatctctatgcgctcaatgtcctgcccaatacaccgctgggcaaagccgtggaaaatgggcgtactaccgtgccctctccggcagaacgtcgcgatctttacctgcaaggatgtgattttatggacgatgccggttggcgctgcatcagtaacagccactggggccgtaccacacgcgaacgcaatctctataacctgctgattaaacaaggtgccgattgtctggcctttggttccggagccggcggttcgattaatgggtactcctggatgaacgaacgcaatcttcagacctggcatgaatccgtcgcggcaggcaaaaaaccgctgatgatgatcatgcgtaacgccgaacgtaatgcgcaatggcgtcataccttgcagtcgggcattgaaacggcgtgtgtaccgctggacgaacttacgccacatgccgaaaaactcgcgccgttactggcccagtggcaccaaaaaggcttaagccgcgatgcgtcaacgtgtctgcggttgaccaatgaaggtcgtttctgggcaagcaacattttgcagtctcttaatgaactgattcaggtacttaatgcgccagcaattgcgcttgaaaaaccataa

SEQ ID NO: 11596 - protein, 445 aa, Escherichia coli CFT073
MNTNNTLDLTPHFALDGDQPFKDRRAMMPFRGAIPVAKEQLAQTWQEMINQTVSPRKRLVYLHIPFCATHCTFCGFYQNRFNDDACAHYTDALIREIEMEADSVLHQSAPIHAVYFGGGTPSALSAHDLARIITTLREKLPLAPDCEITIEGRVLNFDAERIDACLDAGANRFSIGIQSFNSKIRKKMARTSDGPTAIAFMESLVKRDRAAVVCDLLFGLPGQDAQTWGEDLAIARDIGLDGVDLYALNVLPNTPLGKAVENGRTTVPSPAERRDLYLQGCDFMDDAGWRCISNSHWGRTTRERNLYNLLIKQGADCLAFGSGAGGSINGYSWMNERNLQTWHESVAAGKKPLMMIMRNAERNAQWRHTLQSGIETACVPLDELTPHAEKLAPLLAQWHQKGLSRDASTCLRLTNEGRFWASNILQSLNELIQVLNAPAIALEKP

SEQ ID NO: 11597 - DNA, 1170 bp, Vibrio vulnificus CMCP6
  CDS (1)..(1170): transl_table=11
atgttaacgccccctgcactcagtttgtatgttcacatcccatggtgtgtacaaaagtgcccttattgcgacttcaactctcacgcgctcaaagagcagatcccagagcagatgtacatcaatgcgctgctggaagatcttgaccgtgatatcgaaaagtatcagcttcaccgcgcgccaagaccactgcactcgatttttatcggtggaggcacaccaagcctcatctcagcagaaggcattcgagatcttttgcaagggatcgaaaaacgcattccctttacgccttcgatcgagatcaccatggaagccaatcccggcaccatcgaagctgagcgctttgcgggctatcgcaaagcaggggtcacgcgcatctccatcggtgtacaaagttttgagcagcaaaaacttgagcgtttggggcgtattcatggccaagatgaagcagtgaacgccgcgaaactggctcatcaaattggcttgaacagttttaacctcgatctcatgcacggtttgcccgatcaaagcatcgaacaagctctggccgatctggacaaagcgattgaacttaatccgcctcatctttcttggtatcagctcactattgagccaaataccatgttctactacaaaccgccggctctccccgacgacgaccagttgtgggacatctttgagcgaggtcatcaaaaactcacacaagcgggatacgtgcagtatgagatttccggttacagcaaacccggttatcaatgtcagcacaatcttaactactggcgttttggtgattacttagggattggctgtggctcacacggcaaactgagctttgctgacggtcgcatcattcgcaccaccaaaattaagcacccgaagggctacttggcggcgcatcaaaatatggtcaaaccctatcttgatagcgaacagttggtcgaagagatcgatcgtccgttcgagttctttatgaatcgctttagattgatggaagcgtgccctaaacaagatttcattgatacaacagggctaccactgagttttatcgagacaaccattcaatgggccgttgagatgggctatttgaatgacaacgaaaccagttggcaaatcacagagaaaggtaagctgttcctaaacgacttgctcgaagcgtttatggctgaagagtaa

SEQ ID NO: 11598 - protein, 389 aa, Vibrio vulnificus CMCP6
MLTPPALSLYVHIPWCVQKCPYCDFNSHALKEQIPEQMYINALLEDLDRDIEKYQLHRAPRPLHSIFIGGGTPSLISAEGIRDLLQGIEKRIPFTPSIEITMEANPGTIEAERFAGYRKAGVTRISIGVQSFEQQKLERLGRIHGQDEAVNAAKLAHQIGLNSFNLDLMHGLPDQSIEQALADLDKAIELNPPHLSWYQLTIEPNTMFYYKPPALPDDDQLWDIFERGHQKLTQAGYVQYEISGYSKPGYQCQHNLNYWRFGDYLGIGCGSHGKLSFADGRIIRTTKIKHPKGYLAAHQNMVKPYLDSEQLVEEIDRPFEFFMNRFRLMEACPKQDFIDTTGLPLSFIETTIQWAVEMGYLNDNETSWQITEKGKLFLNDLLEAFMAEE

SEQ ID NO: 11599 - DNA, 1125 bp, Staphylococcus epidermidis ATCC 12228
  CDS (1)..(1125): transl_table=11
gtgaatgtaaaaagtgcatatattcatattccattttgctatagaatttgtacttattgtgatttcaacaaatactttatcgataaacagccagttgatgaatacttagacgcacttattagcgagatgcaagttaaaaataatagagaccttgaaacaatgtatgtcggaggtggtacaccgacagccttgaatatgagacaacttgagaagctacttagagcaattaatcaaacatttacaattagcggagaattttcttttgaagctaatcctgatgagttaacttatgaaaaagttgcacttttaaaacaatatggcgtaaatagaatatcgatgggtgtacaaacatttaaacctgaattattaaaaattttaggcagaacccataaaactgaagatatatatgatgctgttagtcatgcccgaaaggcaggtattgaatcaataagtttggatttaatgtatcatttaccacaacaaactatcgacgattttaaagacagcctggagcgtgccattgcattggatattgatcatatttcaagttatggattaattcttgaacctaaaacccagttttataatttgtatagaaagggacatttaaaattaccaaatgaagatttaggggcagaaatgtatcggtttttaatggagcgtatgaaaaactcaccatttcatcaatatgagatttctaattttggtaaacttaatcatgaatcaaaccataataaagtatattggttaaatgaagaatactatggctttggtgctggtgcaagtggttatgtaaacggtgtacgttacacaaatcttaatccagtaaatcattatattaaagcgataaatgaagggaaaaaaccaatactatctgaaacgtctcctacttataacgaaagaatggaagaagaaatgtttcttggtttaagaatgaatcaaggtgtgagtaaaagccgttttaagaaaaagtttaataaattaatcgatgaggtgtttgttgaaactattaaagatttgaggtgtaggggactcataaaagaagaaggagaatttatatctttaaccgaacgcggaaaagttataggtaacgaagtttttgaagcatttttactaaactcataa

SEQ ID NO: 11600 - protein, 374 aa, Staphylococcus epidermidis ATCC 12228
MNVKSAYIHIPFCYRICTYCDFNKYFIDKQPVDEYLDALISEMQVKNNRDLETMYVGGGTPTALNMRQLEKLLRAINQTFTISGEFSFEANPDELTYEKVALLKQYGVNRISMGVQTFKPELLKILGRTHKTEDIYDAVSHARKAGIESISLDLMYHLPQQTIDDFKDSLERAIALDIDHISSYGLILEPKTQFYNLYRKGHLKLPNEDLGAEMYRFLMERMKNSPFHQYEISNFGKLNHESNHNKVYWLNEEYYGFGAGASGYVNGVRYTNLNPVNHYIKAINEGKKPILSETSPTYNERMEEEMFLGLRMNQGVSKSRFKKKFNKLIDEVFVETIKDLRCRGLIKEEGEFISLTERGKVIGNEVFEAFLLNS

SEQ ID NO: 11601 - DNA, 1122 bp, Bradyrhizobium japonicum USDA 110
  CDS (1)..(1122): transl_table=11
gtgcactggccgttctgcctgtcgaagtgcccctattgcgacttcaacagccatgtccgccatgccgcgatcgacgaagcgcgcttcgcctccgccttcgcgcgcgagatcgaaacgaccgcgcagcgcgcgcccggccgcgaggtcacctcgatcttcctcggcggcggcacgccgtcgctgatgcagcccgcgaccgtcggcgccgtgctcgattcgatcggcaagcactggcaggtcgctcgtgatgtcgaagtcacgctggaagcgaacccgaccagcgtcgaggccacgcgcttcgccggctatcgcgctgccggcgtcaaccgcgtctcgctcggcgtgcaggcgctcgacgatgcttcgctgaaggcgctaggccgcatgcacagcgcgcgcgaagcgctggacgcggtcgccatcgcgcgccgctcgttcgagcgttattcgttcgacctgatctacgcccgccccgaccagacgccggcgatgtgggccgatgaactgcgccttgcgatcgcggaggcggccgagcatctgtcgctctatcaattgacgatcgaggagggcacgccgttcttcggcctgcaccaggccggcaaattgaagacgccggacgaggcggtcgcgcgcgcgctctacgacgtcacgcaggaaacctgcgacaagctcggcctgcccgcttacgagatctccaatcacgcgcggcgcggcgccgaatgccggcacaatctggtctactggcgcggcgacgaatatgccggcatcggccccggcgcgcacggccggctcgacatcgacgggatcaggcacgccaccgccaccgagaagcgtcccgaagcctggctgttgcgggtcgagaccaacggccacggcgtcgtcaccgacgatctcctcaacagcgaggagcgcgccgatgaatttttgctgatgggactccgtctcgccgaaggcatcgatcccgaacgctacaccgccctctccggccgcgcgctcgaccccaagcgcatcgcgctgctgcgtgaggaaggcgcgatcacggtcgatgcgacgggacggctgcgcgtgaccagcagcggattcccggtgctggatgcggtggtcgcggatctggcggcctga

SEQ ID NO: 11602 - protein, 373 aa, Bradyrhizobium japonicum USDA 110
MHWPFCLSKCPYCDFNSHVRHAAIDEARFASAFAREIETTAQRAPGREVTSIFLGGGTPSLMQPATVGAVLDSIGKHWQVARDVEVTLEANPTSVEATRFAGYRAAGVNRVSLGVQALDDASLKALGRMHSAREALDAVAIARRSFERYSFDLIYARPDQTPAMWADELRLAIAEAAEHLSLYQLTIEEGTPFFGLHQAGKLKTPDEAVARALYDVTQETCDKLGLPAYEISNHARRGAECRHNLVYWRGDEYAGIGPGAHGRLDIDGIRHATATEKRPEAWLLRVETNGHGVVTDDLLNSEERADEFLLMGLRLAEGIDPERYTALSGRALDPKRIALLREEGAITVDATGRLRVTSSGFPVLDAVVADLAA

SEQ ID NO: 11603 - DNA, 1272 bp, Bradyrhizobium japonicum USDA 110
  CDS (1)..(1272): transl_table=11
gtgccggatttctccgcgaccgtcggtgccaagacttgtgagacatggttgaggcggctgccgcccgacgatcccgtgtcgctatacatccacgttccgttctgtcgtgctatctgttggtattgcggcttccctacaagcctcactcgcagcgagcgaccgatccgcaagtacttggcgacgctgcatgccgagatacgtttggtcgcagagcaagcgcctcgcgcgctgccggtaagcgacgtgcatttcggcggcgggacgccgactactattgcaccggccgattttctcgccttgatggcactcctgcgacgctgcttcgcgttcagcaaatcagctaccatcgccatagaaatcgacccacgtgcgttcacggccgagatggttgaaacattacaagtggccggcgtcaatcgcgcgagcatcggcgtgcaaagcttcgacggggtggttcagaggtcggtcaaccgcgtccagagcgaggtgcagacggcgtctgtcgtcgaaagccttcgccagcatgggataagccgcatcaatttcgacctcctcttcggactgccgcatcagacggtgcgatcttgcgtggactctacacggacggctctggccatgcggccagaccggcttgcagttttcggctatgctcacgtcccctcctatatgaaacgtcagcgccagatcgatgagacggcgctgccggataatctcgcccgcgccgagcaagccgcggctatcgcagatacgctggtctcggctggctaccgccagatcgggctcgaccatttcgccctgcccaacgacgagctcgcgctggcgcagaaagccggtcagcttcgccgcaactccctgggctattcggctgatacctgcaaaaccgtgatcggcttaggtccgtcagccatcggccgtctgcgtgagggttacgttcagaacgagagcgcaaccgcttcctatcaccaacacattcaggctggtcgtccggcaacctcaaaaggctactgcctctcccccgaagatcgcctccgcgccgcaattatcgagcgtctgatgtgcgatttgcaggccgacgtaccagcgatctgtgctgctcacggatttgatccaattcctcttctcaattcggccgaccggctgggaatgctcgccgaagacgggatagtggacattgaagagggattcattcgggtcaagcaggaacaccggtttctcgttcgtgctgttgctgccgcattcgacacctatctcgaccgtatccctattaactaa

SEQ ID NO: 11604 - protein, 423 aa, Bradyrhizobium japonicum USDA 110
MPDFSATVGAKTCETWLRRLPPDDPVSLYIHVPFCRAICWYCGFPTSLTRSERPIRKYLATLHAEIRLVAEQAPRALPVSDVHFGGGTPTTIAPADFLALMALLRRCFAFSKSATIAIEIDPRAFTAEMVETLQVAGVNRASIGVQSFDGVVQRSVNRVQSEVQTASVVESLRQHGISRINFDLLFGLPHQTVRSCVDSTRTALAMRPDRLAVFGYAHVPSYMKRQRQIDETALPDNLARAEQAAAIADTLVSAGYRQIGLDHFALPNDELALAQKAGQLRRNSLGYSADTCKTVIGLGPSAIGRLREGYVQNESATASYHQHIQAGRPATSKGYCLSPEDRLRAAIIERLMCDLQADVPAICAAHGFDPIPLLNSADRLGMLAEDGIVDIEEGFIRVKQEHRFLVRAVAAAFDTYLDRIPIN

SEQ ID NO: 11605 - DNA, 1152 bp, Xylella fastidiosa Temecula1
  CDS (1)..(1152): transl_table=11
atgttgatcccgccgccactttcgctatatgtgcatttgccttggtgcgtgcgtaagtgcccgtactgtgatttcaactctcaccaagccaagggtgcactcccgttcgatgcttatgtcaacgcattactgcgtgacctggagtacgacttacctttggtgtggggccgtgttgtgcacagtgtgttcttgggtggcggcacgcccagcctattccccccggaagcgattgaccgttttttgcagatcgttgcggcgcggctgcgtcttgctccggatgctgaaatcaccctggaaaccaatccggggactgccgagtatggtcgttttgatcgttatcttgccgctggcatcaatcggctgagctttggtatccaaagttttaatgatgctgcactgcggcgattggggcggattcatgacagcctccaggctgagcaggctgtgaaactggcacaagatgccgggttcactaacatcaacctggatctaatgtatgcgctgccagagcaaaccttgcttgaagccgagcacgacttacagcgtgcatttgccctggcgcctacccatctttcctattatcagctcacccttgaacccaataccgtcttctacgcccgcccgccgcagggcattcccgatgacgatgccgcgtgggagatgcaggagcatacccaacgcctgcttgctgaggctggttaccagcattacgaggtcagcgcttacgcccgtgagggctggcagtgcctgcataatctgaactattggcgctttggagactaccttggtatcggtgccggggcacatggcaagatcacttccggagtgtcacagcatgtgttgcgccgctggaaatgtaagcatccgtacacctacttggacaacgctggtaccgtctctgcgatcggtggtgatgagattgtgccaacggcacgcttgccatttgaatatatgctcaatctattacgcctgcgcgaaggattccgattacaggattttgctgtacgtacaggactgaccgttgaatcaatccatgcagcattgagagaggctgttgcacgcggttggttacgatgtgaacttgaacacgtcatcccgactgaattagggttgcgttttgctaacgatgtcatcaacttattcaatgaataa

SEQ ID NO: 11606 - protein, 383 aa, Xylella fastidiosa Temecula1
MLIPPPLSLYVHLPWCVRKCPYCDFNSHQAKGALPFDAYVNALLRDLEYDLPLVWGRVVHSVFLGGGTPSLFPPEAIDRFLQIVAARLRLAPDAEITLETNPGTAEYGRFDRYLAAGINRLSFGIQSFNDAALRRLGRIHDSLQAEQAVKLAQDAGFTNINLDLMYALPEQTLLEAEHDLQRAFALAPTHLSYYQLTLEPNTVFYARPPQGIPDDDAAWEMQEHTQRLLAEAGYQHYEVSAYAREGWQCLHNLNYWRFGDYLGIGAGAHGKITSGVSQHVLRRWKCKHPYTYLDNAGTVSAIGGDEIVPTARLPFEYMLNLLRLREGFRLQDFAVRTGLTVESIHAALREAVARGWLRCELEHVIPTELGLRFANDVINLFNE

SEQ ID NO: 11607 - DNA, 1149 bp, Clostridium tetani E88
  CDS (1)..(1149): transl_table=11
atgaaagaagattataataactttaagaatataggattatatatacatattccattttgcaaagaaaaatgtaagtattgcgattttatttcctattctaaaaaagaaagctttatgaaagaatacatagaagctttatcaaaagaaattaaaagagaatgtatggacaaaaagattagaagcatatatataggaggaggtactccaagttatgtacccaataaatattgggaaatattaaaggaaaccattgataacttaaataaaagcaaaaacctagagttctctatagaagcaaatccaggcacagtaacagaggaaaaattaaagttttttaaggaaatgggaataaatagaataagttttggattgcaagcatggcaacaccacttacttaataaattaggtagaatacataatatagaagaatttttatatagctataaattagcaagaaaattaggatttgataatataaatgtagatttaatgtttggaataccagaccagaagttagaaaattggaaggaaacattagaaaagatagtagaacttaatccagaacatatttcttgctatagtcttatagtagaagaagggactcctttttataaactatatgaaaaaggaaagttaaatctacctaatgaagatatagaaagagatatgtatagatatgccattgaatttttggaaaacaaagggtaccatcaatatgaaatatcaaatttttcaaaagaacatagagagtgtattcacaatttaatttattgggatttagaagagtatattggatgtggattagcagcacactcatttctaaagggatatagatactccaatgtacacaatatagaagattatataaaattaattaatgagaataagaatataaaaataaacacttataaaaatttaacaaaggatactatggaagaatttatgtttatgggtcttagaaaaataaaaggaataaatacagaggaattttataaaagattccataaaaatatatatgaagtttatggtgatataataaaaaaatatattaatgaaggcttaattatagaaaagcatggcaacatatttttatcatcaatagggatagaattatctaatagtataatgtgtgactttattttggattaa

SEQ ID NO: 11608 - protein, 382 aa, Clostridium tetani E88
MKEDYNNFKNIGLYIHIPFCKEKCKYCDFISYSKKESFMKEYIEALSKEIKRECMDKKIRSIYIGGGTPSYVPNKYWEILKETIDNLNKSKNLEFSIEANPGTVTEEKLKFFKEMGINRISFGLQAWQHHLLNKLGRIHNIEEFLYSYKLARKLGFDNINVDLMFGIPDQKLENWKETLEKIVELNPEHISCYSLIVEEGTPFYKLYEKGKLNLPNEDIERDMYRYAIEFLENKGYHQYEISNFSKEHRECIHNLIYWDLEEYIGCGLAAHSFLKGYRYSNVHNIEDYIKLINENKNIKINTYKNLTKDTMEEFMFMGLRKIKGINTEEFYKRFHKNIYEVYGDIIKKYINEGLIIEKHGNIFLSSIGIELSNSIMCDFILD

SEQ ID NO: 11609 - DNA, 1215 bp, Pseudomonas syringae pv. tomato str. DC3000
  CDS (1)..(1215): transl_table=11
atgacccacgattcgcctgcgcagccgctgtttctcggcgagagcggtttctcgtcagagacgccacgccctgcactgccgcacctgcccccgctgtcgctgtacatccacattccgtggtgcgtgcgcaaatgcccgtactgcgacttcaattcgcacaccgcaagccccgtgctgccggaacaggaatacgtcgacgcgctgctcgccgatctggacctcgacctgccgcacgtctacggccgtgaactgcaatcgatcttcttcggtggaggcacgccgagcctgttcagcgccaacgcgctgggccgtttgctgcgaggcgtcgaacaacgtatccgctttgccagcgacatcgagatcaccctggaagccaaccccggcacctctgaacaggcgaaattcagcgcctatcgcggtctggggatcaatcggctgtccatcggcattcagagctttcaggcatccaaactcaaggcgctgggccgtatccacaacggcgacgaagcgattcgcgccgccgacatggcacgtcaggccggtttcgacaacttcaacttggacctgatgcacggcctgccggaccagtcccaggacgaggcgctggacgatctgcgccaggccatcgccctcgcgccgacgcacttgtcctggtatcaactgacgctggaacccaacaccgtcttctggaaccagccgccggttttgccggaagacgacattctttgggacattcaggaaaccggacagcagttgctggccactcagggttacgcgcagtacgaagtgtcggcttatgcgcaacccgggaaaccggcgcggcataacctcaactactgggcgtttggtgatttcatcggcatcggcgcaggcgcgcacggcaagctgagccatccggacgggcgcattatccgcacctggaagacccggctgcccaaggattacctgaacccggacaaaccgtttcaggccggttcaaagctgttgccgctggacgaattgccgtttgaattcttgatgaatgcattgcgactgacaaatggtgtggacgctgcgttatttcgggaaagaacgggtctaagcctcgattcgctcgccgaggcacgcaggcaagccgaacaaaaaggcctgctgcatgaagatccggcacgcctgatcgcgaccccgcaaggccagctgttcctcaatgacttgctgcaatattttctgatctaa

SEQ ID NO: 11610 - protein, 404 aa, Pseudomonas syringae pv. tomato str. DC3000
MTHDSPAQPLFLGESGFSSETPRPALPHLPPLSLYIHIPWCVRKCPYCDFNSHTASPVLPEQEYVDALLADLDLDLPHVYGRELQSIFFGGGTPSLFSANALGRLLRGVEQRIRFASDIEITLEANPGTSEQAKFSAYRGLGINRLSIGIQSFQASKLKALGRIHNGDEAIRAADMARQAGFDNFNLDLMHGLPDQSQDEALDDLRQAIALAPTHLSWYQLTLEPNTVFWNQPPVLPEDDILWDIQETGQQLLATQGYAQYEVSAYAQPGKPARHNLNYWAFGDFIGIGAGAHGKLSHPDGRIIRTWKTRLPKDYLNPDKPFQAGSKLLPLDELPFEFLMNALRLTNGVDAALFRERTGLSLDSLAEARRQAEQKGLLHEDPARLIATPQGQLFLNDLLQYFLI

SEQ ID NO: 11611 - DNA, 1179 bp, Vibrio parahaemolyticus RIMD 2210633
  CDS (1)..(1179): transl_table=11
atgttaacgcccccagcactcagcttgtatgtacacatcccatggtgtgtacaaaagtgcccttattgcgactttaactcccatgcgcttaaagcggagatcccagaagaagagtacatcagtgcccttctagaagatctggataccgatattgataagtaccgcttaaatgacgcaccgcgtccgctgcattccatcttcattggcggtggcacgccaagtttgatttctgcagaaggcattgagcgtttgctaaaaggcatcgaagcgcgaattccattcaagccagacattgaaatcactatggaagcaaaccctggcaccatcgaagcagagcgtttcgtgggttatcgtaaagcgggggtcacgcgaatttccatcggagttcaaagctttgagcaggagaagttggaacgtctaggacgaattcatggtcaagacgaagccgttaatgcagcaaaacttgcccatcaaattggtttgaacagctttaacctcgacttaatgcacggcttacccgatcaaagcatcgaacaagcgctagccgatttggacaaagcgattgagctcgcaccgccgcacctgtcttggtatcagctcaccatcgaaccaaacaccatgttctactacaagccaccgacactaccagatgacgatgacttgtgggacatcttcgaacaagggcatgaaaagctagcagcagcagggtacgttcagtacgaaatctctggttacagtaaaccgggttatcagtgtcagcacaacctgaattactggcgctttggcgattaccttggcatcggctgtggctcacatggcaaattgagttttgccgatggccgcatcattcgtaccacgaaagtgaagcatcctcgtggctacttggcagcttatcaaaatatggtaaaaccgtatttgcataccgagcagctcgttgccgatgaagaccgcccatttgagttcttcatgaaccgcttccgcttgatggaagcgtgtccgaagcaagattatgtggataccacgggcttaccgctcagtaccattcaagacaccattgattgggcgttagagatgggctatttgagtgaaacagagacgcactggcagatcaccgagaaaggaaagctgttcctcaacgacttacttgaagcctttatggcagaagaagacgaagagtaa

SEQ ID NO: 11612 - protein, 392 aa, Vibrio parahaemolyticus RIMD 2210633
MLTPPALSLYVHIPWCVQKCPYCDFNSHALKAEIPEEEYISALLEDLDTDIDKYRLNDAPRPLHSIFIGGGTPSLISAEGIERLLKGIEARIPFKPDIEITMEANPGTIEAERFVGYRKAGVTRISIGVQSFEQEKLERLGRIHGQDEAVNAAKLAHQIGLNSFNLDLMHGLPDQSIEQALADLDKAIELAPPHLSWYQLTIEPNTMFYYKPPTLPDDDDLWDIFEQGHEKLAAAGYVQYEISGYSKPGYQCQHNLNYWRFGDYLGIGCGSHGKLSFADGRIIRTTKVKHPRGYLAAYQNMVKPYLHTEQLVADEDRPFEFFMNRFRLMEACPKQDYVDTTGLPLSTIQDTIDWALEMGYLSETETHWQITEKGKLFLNDLLEAFMAEEDEE

SEQ ID NO: 11613 - DNA, 1197 bp, Streptococcus pyogenes SSI-1
  CDS (1)..(1197): transl_table=11
atgaagaatcaagggaaatggtttattcatagaaacattttatcatcaaagtggtataataagaccatgtcaaaaaaacctacttcagcctatgtgcacgttcctttttgcacacaaatttgttattattgcgatttttcaaaagtctttatccaaaatcaacctgttgatgcttatttgaaagccttgattcaagaatttgactcttatggcattcgagacctaaaaaccctttatattggaggaggtacgcctacagctatcactgctaaacagttggagtatctcctaaatcaccttgaacgaaacctcaatttagatgatcttgaagaattcacaattgaggcaaatcctggtgatttgacgccagaaaaaattgcggtgcttcagaggtcagctgtcaatcggatttccttgggggtgcagacctttaataacaagcaattaaagcagattggccgtagccataatgaagaacaaatttatagcaccatcactaatttaaaagctgcaggctttcacaatatttccattgatttaatttatgccttgccaggtcaaaccttagatcaagtcaaggaaaatgttgctaaagctttggcacttgatattccccaccttagtctttatagccttattttggaacatcacactgtttttatgaacaaaatgcgacgtggtaaacttaacttaccaacggaagacttggaagcagaaatgtttgagtatattatttcagaaatggaagctaatggctttgaacattatgaaatctccaattttaccaaacctggttttgaaagtcgtcataacttgatgtattgggataatgtggaatattttggatgtggtgcaggggcttcaggttaccttaatggcattcgttatcaaaatcgggtgcccatccagcattatcttaaagcggttgaagcaggaaacgctagactaaatgaagaagtgctgcgcaaagaggaaatgatggaagaggaactctttttgggcttacgtaaaaagacaggagtctccatccagcggttccaagaaaaatttggtatttcttttgaggagcgttatggaaatattgttagggagcttcaaaaccaaggactgcttgtcaaagatgacgcttttgtcagaatgactaaaaagggtcttttcttaggtgattctgttgctgagcggtttatattagattag

SEQ ID NO: 11614 - protein, 398 aa, Streptococcus pyogenes SSI-1
MKNQGKWFIHRNILSSKWYNKTMSKKPTSAYVHVPFCTQICYYCDFSKVFIQNQPVDAYLKALIQEFDSYGIRDLKTLYIGGGTPTAITAKQLEYLLNHLERNLNLDDLEEFTIEANPGDLTPEKIAVLQRSAVNRISLGVQTFNNKQLKQIGRSHNEEQIYSTITNLKAAGFHNISIDLIYALPGQTLDQVKENVAKALALDIPHLSLYSLILEHHTVFMNKMRRGKLNLPTEDLEAEMFEYIISEMEANGFEHYEISNFTKPGFESRHNLMYWDNVEYFGCGAGASGYLNGIRYQNRVPIQHYLKAVEAGNARLNEEVLRKEEMMEEELFLGLRKKTGVSIQRFQEKFGISFEERYGNIVRELQNQGLLVKDDAFVRMTKKGLFLGDSVAERFILD

SEQ ID NO: 11615 - DNA, 1131 bp, Bacteroides thetaiotaomicron VPI-5482
  CDS (1)..(1131): transl_table=11
atggcaggtatttaccttcatattcccttctgtaagacacgttgcatctattgcgacttttattcgactacccgcagcgaattaaagacgcattatgtgcataccctctgccgtgaactggaaatgcggaaagaatatctgaaaggcgaacctgtagaaaccatttatttcggaggaggaactccctctcaactggaggaagctgattttaaacacatctttgaaacgatacgggaaaattacggaatggaacactgccgggagatcactctggaagccaatccggacgatctgtcccaggaatatctgaagatgttatcctcgctccctttcaaccgtatcagcatggggatacagacttttgatgatacgacactccaattactgaaacgccgccatagctcccaaacagccgtcgaagctgtccgcagatgcagggaagcgggatttcagaatatcagcattgatctgatttacggactgcccggcgaaacaaaggaacggtgggtaaacgacctccggcaagctatccgcctggatgtagagcatatttctgcttaccatttgacttacgaagaagatacacctatatataatatgttgaagcaacatcagatagaggaagtagacgaagattccagtctgcagttctttacattgctgatcgaacatttgcagaatgcaggatacgagcattatgaaatatccaatttctgccgccccgacaaatactcccgtcacaatacttcgtactggaggggaataccatatttgggctgcggaccgtccgcacattcattcaatggaacgacacgcgaatggaacgtatcttccatcgacctatatataaaaggtatagaaggaaaccagcgcgactttgagacagaaaacctggaccaaacgacccgttacaacgaatttatcattaccaccatacgcaccgtatggggaacacctatagaaaaactaaaacaagagttcggtaatgaactgtgggaatattgccggaaaatgtctgccccctatctggaaaatgggaaactggaaatccacgagggggctttacgcctgacacgggaaggaattttcatctccgacagcattatgagcgacttgctttgggttaattaa

SEQ ID NO: 11616 - protein, 376 aa, Bacteroides thetaiotaomicron VPI-5482
MAGIYLHIPFCKTRCIYCDFYSTTRSELKTHYVHTLCRELEMRKEYLKGEPVETIYFGGGTPSQLEEADFKHIFETIRENYGMEHCREITLEANPDDLSQEYLKMLSSLPFNRISMGIQTFDDTTLQLLKRRHSSQTAVEAVRRCREAGFQNISIDLIYGLPGETKERWVNDLRQAIRLDVEHISAYHLTYEEDTPIYNMLKQHQIEEVDEDSSLQFFTLLIEHLQNAGYEHYEISNFCRPDKYSRHNTSYWRGIPYLGCGPSAHSFNGTTREWNVSSIDLYIKGIEGNQRDFETENLDQTTRYNEFIITTIRTVWGTPIEKLKQEFGNELWEYCRKMSAPYLENGKLEIHEGALRLTREGIFISDSIMSDLLWVN

SEQ ID NO: 11617 - DNA, 1185 bp, Enterococcus faecalis V583
  CDS (1)..(1185): transl_table=11
atgaccaaaacaaaccaactttcaacttcaacgccgatgttcgatcggtcggcctatattcatattccattttgtgagcatatttgttattattgcgattttaacaaggtctttttagaaggacaaccagttgatgaatatattcagagtttattaaaagaaattcaacttacgcaagcattgtatccagaacaagaaatgaaaaccatctatattggcggaggcacgccaacttcattatcagcgaaacagttagatgtgctactaaaaggggttcgcgaacagctaacgtttgatgaccgaaatgaatttacggtggaagcaaaccctggtgatttaacccaagaaaaattacaagtcatgaaaaactatggcgtcaatcgtctttcgatgggcgttcagacatttgatgatcgcttgctcaaaaaaatcggtcgcaagcacaccgccgcagatgtttatgaaacaatgaaatttttagagaaagaaaattttaccaatgtcagtattgacttaatctatgctttacctggacaaacattggaaagttttcgcgatactttgacaagagccttagcattggacttgccgcactattcgctttattcattaattcttgaaaataaaacaatgttcatgaactgggttcgtcaaggacggttacagctgcctgaagaagaaatcgaagcacaaatgtttgacgaaacgattgaagcaatggagaaaaaaggacgtcaccaatatgaagtcagtaattttgctttaacaggaaaagaaagccagcataatctggcttattggaataatgaccactactatggatttggcgcaggtgccagcggctatcttgggcaaactcgttacaaaaatcacggtccaatccaacattatttgaaacccttgcgagaaaatcaattgccaattgtggagactgaagaattaactcgtctaaatcaaatagaagaagagctatttttaggcttacgtaaaaaagtaggcatttctaaacaaaaattccaacaaaaatttcaggaaccaattgaagcaatttatggagaggtcattcaacgcttaatcaaagaagaattattaattgaagaagcagatatcttacgtttaacgaaaaaagggctatttgtggggaataatgtttttgaagcatttttgttaagtgaaaaagagtaa

SEQ ID NO: 11618 - protein, 394 aa, Enterococcus faecalis V583
MTKTNQLSTSTPMFDRSAYIHIPFCEHICYYCDFNKVFLEGQPVDEYIQSLLKEIQLTQALYPEQEMKTIYIGGGTPTSLSAKQLDVLLKGVREQLTFDDRNEFTVEANPGDLTQEKLQVMKNYGVNRLSMGVQTFDDRLLKKIGRKHTAADVYETMKFLEKENFTNVSIDLIYALPGQTLESFRDTLTRALALDLPHYSLYSLILENKTMFMNWVRQGRLQLPEEEIEAQMFDETIEAMEKKGRHQYEVSNFALTGKESQHNLAYWNNDHYYGFGAGASGYLGQTRYKNHGPIQHYLKPLRENQLPIVETEELTRLNQIEEELFLGLRKKVGISKQKFQQKFQEPIEAIYGEVIQRLIKEELLIEEADILRLTKKGLFVGNNVFEAFLLSEKE

SEQ ID NO: 11619 - DNA, 1128 bp, Coxiella burnetii RSA 493
  CDS (1)..(1128): transl_table=11
atgtcggccattccgcttagtttctatattcatatgccgtggtgcattcgcaaatgcccctattgcgatttcaattcgcacgccttgcatcaggatctgcctgaagaagcttatatcaacgctctgattaatgagttgagacagcaaatagctttaattgaaaagcgtcccattcatactatcttcatcggtggcggaactccgagcctattttcccaaaccgcttatcaaaaattatttgaggaaattaaaaagcaatgcctcttaaaaaaggaggttgaaattaccctagaagcgaatccgggctcggtggaacaaactaaatttaggggctatcgggaaatcggcattaaccgcttatccattggcgtgcaaagtttccaaaatgataaattaaaagttttagggcgcattcatagtgcagaagaggcgaaacaagctattaacattgcaaagcaagcgggttttgaaaatattaatgtagacttgatgtttggtctgccagatcaaaaagttaatgaggcgcttgatgacttacaaacagcccttgatttagaacccactcatctttcctggtatcagttaacgttggaacccaacacctttttttacaaacatccccccgcgcttcctacggacgattatatttgggaaatacagtcaaaaggacgaaaactgttgcggcgagatggatttgcccactacgaggtctctgcttactcccgcagcaatcgcttctgccaacacaatatcaactattgggaattcggcgattacctcggcctcggagcgggtgcgcatagcaaattaacgattcaaggtaagattacgcgttattggaatattaaaaacccccggttttacatggacgctcaaaaacccttcattgaaggccgccaaaccctcgcacctaatgaattaccccttgaatttatgatgaacgccctccgattgcaaaagcctatcccgttgaccctctttacagaacggacgggattatcgccctcggttttagtaccctggctggagacagccaaagaacgcaacctcctccaatgcgataacaaatacctgacggttacccccctaggccatcgttttctaaatgagctgttgattttactctga

SEQ ID NO: 11620 - protein, 375 aa, Coxiella burnetii RSA 493
MSAIPLSFYIHMPWCIRKCPYCDFNSHALHQDLPEEAYINALINELRQQIALIEKRPIHTIFIGGGTPSLFSQTAYQKLFEEIKKQCLLKKEVEITLEANPGSVEQTKFRGYREIGINRLSIGVQSFQNDKLKVLGRIHSAEEAKQAINIAKQAGFENINVDLMFGLPDQKVNEALDDLQTALDLEPTHLSWYQLTLEPNTFFYKHPPALPTDDYIWEIQSKGRKLLRRDGFAHYEVSAYSRSNRFCQHNINYWEFGDYLGLGAGAHSKLTIQGKITRYWNIKNPRFYMDAQKPFIEGRQTLAPNELPLEFMMNALRLQKPIPLTLFTERTGLSPSVLVPWLETAKERNLLQCDNKYLTVTPLGHRFLNELLILL

SEQ ID NO: 11621 - DNA, 1233 bp, Streptomyces avermitilis MA-4680
  CDS (1)..(1233): transl_table=11
atgccttccgcacttcccgacggcgaacccgtccccgacgacggttcgctgcccgcgcacgccctggccggggctgccgagcgtcccctcgggttctacctccatgtgccgtactgcgcgacccgctgcggctactgcgacttcaacacctacacggcgaccgagctgcgcggcacgggaggcgttctggcctcccgcgacaactacgccgagacgctgatcgacgaggtacgcctggcccgcaaggtgctcggtgacgacccccgcccggtgcgcacggtgttcgtcggcggcggtacgccgacgctgctggccgccgacgacctcgtacggatgctgggggcggtccgcgacgagttcggcctcgccgacgacgcggaggtcacgacggaggcgaacccggagtcggtggacccggcgtacctcgcgaccctgcgggccggcggcttcaaccgtgtctccttcggcatgcagagcgcccggcagcacgtactgaaggtgctcgaccgcacgcacacgcccggccgtcccgagcggtgcgtcgcggaggcgcgggcggcgggcttcgaccacgtcaacctggacctgatctacggcacaccgggggagacggacgacgactggcgggcctcgctggacgcggcgctcggcgcgggcccggaccacatctccgcgtacgccctgatcgtcgaggagggcacacagctcgcccgccgcatccgccgcggcgaggtcccgatgacggacgacgacgtccacgccgaccggtacctgatcgccgacgagatcctgtcgtcggcgggcttcgactggtacgaggtgtcgaactgggccacctccgaggcgggccgctgcctgcacaacgagctgtactggcggggcgccgactggtggggcgcgggacccggcgcgcacagccacgtgggcggggtgcgctggtggaacgtgaagcacccgggggcctacgcgggcgccctggcggcggggaagtccccgggcgccggacgcgaactcctctccgaggaggaccgccgcgtcgaacgcgttcttctcgaactgcggctgcgtgagggctgcccgctgtcgctgctccgccccgacggcctggccgcctcccgccgggcactgtcggacggcctcctggagcccggcccgtacgacgccggccacgccgttctcacgctgcgggggcggctgctcgcggacgcggtggtcagggacctggtggactga

SEQ ID NO: 11622 - protein, 410 aa, Streptomyces avermitilis MA-4680
MPSALPDGEPVPDDGSLPAHALAGAAERPLGFYLHVPYCATRCGYCDFNTYTATELRGTGGVLASRDNYAETLIDEVRLARKVLGDDPRPVRTVFVGGGTPTLLAADDLVRMLGAVRDEFGLADDAEVTTEANPESVDPAYLATLRAGGFNRVSFGMQSARQHVLKVLDRTHTPGRPERCVAEARAAGFDHVNLDLIYGTPGETDDDWRASLDAALGAGPDHISAYALIVEEGTQLARRIRRGEVPMTDDDVHADRYLIADEILSSAGFDWYEVSNWATSEAGRCLHNELYWRGADWWGAGPGAHSHVGGVRWWNVKHPGAYAGALAAGKSPGAGRELLSEEDRRVERVLLELRLREGCPLSLLRPDGLAASRRALSDGLLEPGPYDAGHAVLTLRGRLLADAVVRDLVD

SEQ ID NO: 11623 - DNA, 1128 bp, Chlamydophila caviae GPIC
  CDS (1)..(1128): transl_table=11
atgaatggtaagcaacctttagctctctacattcactttcctttctgctcaaagaaatgccactactgtagcttttatactattccctacaatccggaatctgtaagtttgtactgcaatgcggttcttcaagaaggattgaataagctagcagctattaaagatacgcacttcatcgacactgtattttttggtggaggaacaccttcattaattcctccccatcatctgcataatataattacactcctagctccccacgctcaagaaatcactttagaagccaatcctgaggacttatctgaatcctatttgagagatcttactcttacaccgattaataggataagtattggggtacaaacgtttcatgatcccattcttaaagctttaggaaggatccactcagcatctacatctatggatgctgtccaccgttgctacgaacatgaatttcataacatctctatagatcttatttacggtctccctacacaatctttggcagattttcttgcagatcttcatcaagctcttactctccctattgcgcatatttctctttataatctgaccttagatcctcatacctcgttttataagcatcggcgtattctaaccccctctattgctaacgatgatatattagcagctatgagcctctccgctgaagaacttctctcctctcggggattttctcgctatgaacttgcctcatatgcaaaatctcaagcgcagtctaaacataatctctactactggacagataaaccctttttaggattgggggtttctgcatcacaatacatagataaagtacgctcgaaaaatctctcaagaatctcacaatatctacgtgctgtacgcaaaaatctccctactcatgaatctacagaatgcctgcctgaaaaagaacgtatcaaagaagccctagctttaagattacgccttaccaaaggagcaaaaatcaaagatttcccaccttcattaatacaatctcttacatcccttcctctaattaaagaactattcgatcataacgacgagtttctattcttaaataaacaaggtcgattatttcacgatactatcgctgaagaaataatgaatctttcttttttaatttaa

SEQ ID NO: 11624 - protein, 375 aa, Chlamydophila caviae GPIC
MNGKQPLALYIHFPFCSKKCHYCSFYTIPYNPESVSLYCNAVLQEGLNKLAAIKDTHFIDTVFFGGGTPSLIPPHHLHNIITLLAPHAQEITLEANPEDLSESYLRDLTLTPINRISIGVQTFHDPILKALGRIHSASTSMDAVHRCYEHEFHNISIDLIYGLPTQSLADFLADLHQALTLPIAHISLYNLTLDPHTSFYKHRRILTPSIANDDILAAMSLSAEELLSSRGFSRYELASYAKSQAQSKHNLYYWTDKPFLGLGVSASQYIDKVRSKNLSRISQYLRAVRKNLPTHESTECLPEKERIKEALALRLRLTKGAKIKDFPPSLIQSLTSLPLIKELFDHNDEFLFLNKQGRLFHDTIAEEIMNLSFLI

SEQ ID NO: 11625 - DNA, 1140 bp, Bacillus cereus ATCC 14579
  CDS (1)..(1140): transl_table=11
ttggtacaagctgcatacattcatattccgttttgtcagcacatttgtcactattgtgattttaataaagtgtttattgaacgccaaccggttgatcaatatttagattatttagagaaggaaataataaatacggttcaaaaagttccatttgatagtatgaaaacgatttttgtgggtgggggaactccgacagcgttaaatatggaacagacaaaaaaattactcgagattattaatcgtcatttgcgtccgttcgccccgaattgtgaattaacatttgaagcgaatccaggagatctaccgaaagagaagctaaatgtactgctagaaggtggagtaaatcgaattagttttggtgtgcaaacgttccgtgatgaacttcttgagaagatcgggcgcaagcatacgagggaagatgcattcctcgcgattcgagaggcacaggaagtaggctttaaaaatattaatgtagatattatttatgctttgccaggacagacgatagaagatgtaaaagaaacattagatattgcttttacgcttggtgtacaacatttctcggcatattcattaattgtggagccaaaaacagtgttttataacttaatgaacaaagggaaattacgtcttccgggtgaagaccatgaagcgaaaatgtatgaaatagtaatggatgaaatggagaaacacggttataaccagtatgaaattagtaatttctcaaaaggtgacaataaaagtagacataatctcacatactggaataatgaagagtattatggatttggagctggagctcatagttatgtgaacggagaacgtattcaaaatgttggtcccctgaagcaatattttaataaaattgatgaaacaggatttccgtatttagatgttcacaaagtgacggagaaagaaagaatggaagaagagctgttcttagggcttcgaaaaacaaaaggtgtttctaaaacggcgttccgcaataaatttaatgtagagatggatcaagttttcgcgaagcagttacaaagcaaccaagagcagggattgcttgaagaggaagatggacatgtgcgtttaacgcgaaaaggaaaattattagggaatgaagtattccaatcatttttgattgactaa

SEQ ID NO: 11626 - protein, 379 aa, Bacillus cereus ATCC 14579
MVQAAYIHIPFCQHICHYCDFNKVFIERQPVDQYLDYLEKEIINTVQKVPFDSMKTIFVGGGTPTALNMEQTKKLLEIINRHLRPFAPNCELTFEANPGDLPKEKLNVLLEGGVNRISFGVQTFRDELLEKIGRKHTREDAFLAIREAQEVGFKNINVDIIYALPGQTIEDVKETLDIAFTLGVQHFSAYSLIVEPKTVFYNLMNKGKLRLPGEDHEAKMYEIVMDEMEKHGYNQYEISNFSKGDNKSRHNLTYWNNEEYYGFGAGAHSYVNGERIQNVGPLKQYFNKIDETGFPYLDVHKVTEKERMEEELFLGLRKTKGVSKTAFRNKFNVEMDQVFAKQLQSNQEQGLLEEEDGHVRLTRKGKLLGNEVFQSFLID

SEQ ID NO: 11627 - DNA, 1200 bp, Nitrosomonas europaea ATCC 19718
  CDS (1)..(1200): transl_table=11
atgccagttttatccgtgccggattcaaaatcccctcatctggccgaactgcctcctctggggttgtatattcatttgccctggtgtgtcagaaaatgtccttattgtgatttcaattcacacgcaatcaattccggtggcgatcttccggaatccgaatatgtaacggcgctcaaacgcgatctggagcttgcgctgccgctgatctggggacgtccggtgaccagcgtatttttcggaggtggaacgccgagtctgttcagtgcaaccgctattgatgcgattctttctcatgtgcgtatgctactgccccttgctcccggtgttgaaatcacactggaagccaatccgggaacgctggaggcacagaagttcacggattttcattctgctggcatcaaccggctatccatcggtattcaaagcttcaattcccggcatctgcaagcactgggccgcatccacgatggtgccgaggcattgcgtgcagctgagctggcgctgcagcattttagtaatgtcaatctggacctgatgtatgcgctgccggggcagacccgggacgaagcgttgcaggatattgaaacggcttgcaaccggggagtggcacatatttctgcttaccatctgaccatcgagcccaatactccattttatcgctatccgccgcaattgccggatgaagatacatcagccgatatgcaggtcatgatcgagcacattctggcggaacgaggctaccggcattacgagacttctgcgtttgcccaaccggggaagccatgtctccacaatatgaattactggcagtatggggactatctgggaatcggagcgggtgcccacagcaaaatcagctttcgtgacagaatcatccggcagatgcgccataaacatccccggcaatatctggagcaggccatggctggaaatgcctgtcttgagaatctgcttgccacggagcaggaagtagggccgcaggaccgaatttttgaattcatgatgaatgcgctgcggctgacggagggttttgaccccggattgtttcatacccgtaccgggttgacgattgcatcgatccagaagtcgcttgccgaagccgagcagcgcgggctgatcgaatggcaacacgattgcatccgaccgacacctgagggaagacgatttctgaacgatctgctggagatctttttatcgtaa

SEQ ID NO: 11628 - protein, 399 aa, Nitrosomonas europaea ATCC 19718
MPVLSVPDSKSPHLAELPPLGLYIHLPWCVRKCPYCDFNSHAINSGGDLPESEYVTALKRDLELALPLIWGRPVTSVFFGGGTPSLFSATAIDAILSHVRMLLPLAPGVEITLEANPGTLEAQKFTDFHSAGINRLSIGIQSFNSRHLQALGRIHDGAEALRAAELALQHFSNVNLDLMYALPGQTRDEALQDIETACNRGVAHISAYHLTIEPNTPFYRYPPQLPDEDTSADMQVMIEHILAERGYRHYETSAFAQPGKPCLHNMNYWQYGDYLGIGAGAHSKISFRDRIIRQMRHKHPRQYLEQAMAGNACLENLLATEQEVGPQDRIFEFMMNALRLTEGFDPGLFHTRTGLTIASIQKSLAEAEQRGLIEWQHDCIRPTPEGRRFLNDLLEIFLS

SEQ ID NO: 11629 - DNA, 1137 bp, Bacillus anthracis str. Ames
  CDS (1)..(1137): transl_table=11
gtgcaagctgcatatattcatattccgttttgtcagcatatttgtcactattgtgattttaataaagtgtttattgaacgccagccggtggatcaatatttagagtatttagagaaagaaataataaatacagttcaaaaggtaccgtttgatagtatgaaaacgatttttgttggcgggggaactccgacagcattaaatatggagcagacaaagaaattattagatataataaatcgtcgtttacgtccgtttgccccgaattgtgaattaacatttgaagcgaatccaggtgatttgccgaaagagaaattaaatgtattgctagagggtggagtgaaccgaattagttttggtgtgcaaacatttcgagatgaactgcttgagaaaattgggcgtaagcatacgagagaagatgcgtttgtagcaattagagaagcgcaggaagtgggcttcaaaaatataaatgtagatattatttacgctctgccagggcagacgatagaagatgtgaaagaaacgttagatattgcttttacgcttggtgtacaacatttctcggcatattcattaattgtggaaccgaaaactgtgttttataacttaatgaataaagggaaattaagacttccaggggaagaccatgaagcgaaaatgtatgaaatggtaatggatgaaatggagagacacggctatacccagtatgaaattagtaatttttcaaaaggtgataatgaaagtaggcataatctcacatactggaataatgaagagtattatgggtttggagctggagcgcatagttatgtaaatggagaacgtatccaaaatgtaggaccgctcaaacaatatttcaataaaatcgatgaaaccgggtttccgtatttagatgttcatgtggtgacggagaaagaaaaaatggaagaagagttgttcttaggtcttcgtaaaacaaaaggtgtgtcaaaaatggcgttccgcaataaatttaatgtggaaatgaatcaagttttcgcgaagcagttacaaaacaaccaagaacaaggattgcttgaagagagcgatggatatgttcgtttaacgcgaaaagggaaattattagggaatgaagtattccaatcatttttgattgactaa

SEQ ID NO: 11630 - protein, 378 aa, Bacillus anthracis str. Ames
MQAAYIHIPFCQHICHYCDFNKVFIERQPVDQYLEYLEKEIINTVQKVPFDSMKTIFVGGGTPTALNMEQTKKLLDIINRRLRPFAPNCELTFEANPGDLPKEKLNVLLEGGVNRISFGVQTFRDELLEKIGRKHTREDAFVAIREAQEVGFKNINVDIIYALPGQTIEDVKETLDIAFTLGVQHFSAYSLIVEPKTVFYNLMNKGKLRLPGEDHEAKMYEMVMDEMERHGYTQYEISNFSKGDNESRHNLTYWNNEEYYGFGAGAHSYVNGERIQNVGPLKQYFNKIDETGFPYLDVHVVTEKEKMEEELFLGLRKTKGVSKMAFRNKFNVEMNQVFAKQLQNNQEQGLLEESDGYVRLTRKGKLLGNEVFQSFLID

SEQ ID NO: 11631 - DNA, 1128 bp, Mycobacterium bovis AF2122/97
  CDS (1)..(1128): transl_table=11
atgcccggacaaccgttcggggtctacctgcacgtcccgttctgcctgacccgttgcgggtactgcgacttcaatacctacaccccggcccagctgggtggcgtcagcccggaccgttggctgctggcgctgcgggcggagctcgaactggcggccgccaagctggacgcaccgacggtgcataccgtgtatgtgggtggcgggacgccatcgctgctcgggggggagcgcctggccacgttgctggacatggtgcgggaccactttgtgctggcgcccgacgccgaagtcagcaccgaggccaaccccgagtcgacgtggccggagttcttcgccacgatccgcgcggccggttacacgcgggtgtcgctcggcatgcagtcggtggccccgagggtgctggcaaccttggaccgggtgcactcgccgggccgggcggcggccgcggccaccgaggcgatagcggagggcttcacacacgtcaacctcgacctgatctatggaaccccgggggagtccgacgacgacctggtgcgctcagtggacgccacggtgcaggccggtgtggatcatgtgtccgcgtatgccttggtcgtcgagcacggcacggcactggctcgccgggttcggcgtggtgagctggccgcgcccgatgacgacgtgctggcgcatcgctacgagttggtcgatgctcggctgtcggcggccgggtttgcctggtacgaggtgtccaattggtgtcgaccgggcggcgagtgccggcacaacctgggttattgggacggtggccagtggtggggcgcaggtccgggcgcgcacggctacattggcgtgacacgctggtggaatgtcaagcaccccaacacttacgccgagatactggccggggcgacgttgccggtagcgggcttcgagcagctgggcgccgacgctttgcacaccgaagacgtgttgctgaaggtccggctgcgccaggggctaccgctcgcccggctaggggctgccgaacgggaacgtgccgaggcggtgttggccgacggattgctggactaccacggcgaccgactggtcctcaccggccgggggcgattgctggccgacgcggtggtgcgcactctgctgggctaa

SEQ ID NO: 11632 - protein, 375 aa, Mycobacterium bovis AF2122/97
MPGQPFGVYLHVPFCLTRCGYCDFNTYTPAQLGGVSPDRWLLALRAELELAAAKLDAPTVHTVYVGGGTPSLLGGERLATLLDMVRDHFVLAPDAEVSTEANPESTWPEFFATIRAAGYTRVSLGMQSVAPRVLATLDRVHSPGRAAAAATEAIAEGFTHVNLDLIYGTPGESDDDLVRSVDATVQAGVDHVSAYALVVEHGTALARRVRRGELAAPDDDVLAHRYELVDARLSAAGFAWYEVSNWCRPGGECRHNLGYWDGGQWWGAGPGAHGYIGVTRWWNVKHPNTYAEILAGATLPVAGFEQLGADALHTEDVLLKVRLRQGLPLARLGAAERERAEAVLADGLLDYHGDRLVLTGRGRLLADAVVRTLLG

SEQ ID NO: 11633 - DNA, 1116 bp, Helicobacter hepaticus ATCC 51449
  CDS (1)..(1116): transl_table=11
gtgttgctttatgttcatattcccttttgtgggagtaaatgtggttattgtgcatttaattcttttgtggtagaacaagacaactttgaatcttacatacaagcactttgtgcggatatagagcatactttgtgccatttgtatcctcactcgcatattagttctattttttttggtggtggcacaccgaatcttttgcatagtgagcattatgaagctatttttactattctttataaaaacgcgtttatatcaaaagattgtgaaatcactcttgaagcaaatgtaaattatttaaacacgcaatggtgcaaggatttggtatctctaggagcaaatcgcttaagtgttgggattcagagttttgataaagataagatagcttttttagaacgagaacatagtgtgtatgagattgctaaatgtatagagaatgcgtataatggaggatttaaaaatataagctgcgatttaatcattaatacacctttagattctaaagcgcttatatcatcagaaattactcaagctgctgcattgccactaagtcatatatcagtttatactttgagtattgatgagggctctcgtttttttttggaatctaaaaaatcaaagcctatacaaaattcaaaaacaatagattctaagacagatgaagagttaagtttttgggcaagagaatgccttaaagaaaatggattttatcaatatgaagtgtcaaattatgttaaattcaatacaaatgcggaatgtaagcataatctagggtattggcaaggtgaagagtatttaggttgtggagcaggagctgtaggtaggatagcaaataagcgcactagagcttatccaagtctcaatgaatacatcaaaaacccttattatagattagtagaggagttaagtgaggaggatttacgtttagagcagataatgctaggtcttaggtgtgttaaaggcgtggatatggcagtatttgatgatgaaagatttctaaaacctttgtttgatgataaaaaatgttttagagaatcttataatggcaaattatttttggtagcagatgagttatttttggcagatgagattgcaacttggattttatgtaggatttag

SEQ ID NO: 11634 - protein, 371 aa, Helicobacter hepaticus ATCC 51449
MLLYVHIPFCGSKCGYCAFNSFVVEQDNFESYIQALCADIEHTLCHLYPHSHISSIFFGGGTPNLLHSEHYEAIFTILYKNAFISKDCEITLEANVNYLNTQWCKDLVSLGANRLSVGIQSFDKDKIAFLEREHSVYEIAKCIENAYNGGFKNISCDLIINTPLDSKALISSEITQAAALPLSHISVYTLSIDEGSRFFLESKKSKPIQNSKTIDSKTDEELSFWARECLKENGFYQYEVSNYVKFNTNAECKHNLGYWQGEEYLGCGAGAVGRIANKRTRAYPSLNEYIKNPYYRLVEELSEEDLRLEQIMLGLRCVKGVDMAVFDDERFLKPLFDDKKCFRESYNGKLFLVADELFLADEIATWILCRI

SEQ ID NO: 11635 - DNA, 1170 bp, Rhodopirellula baltica SH 1
  CDS (1)..(1170): transl_table=11
atgacgtgcatccctcccggcggctggccccaaccacagtcgctgtatgtgcacgttccgttctgtcgtcatcgatgtggctattgcaacttcagcgtgatcgcgggccgcgatgagttgcaggatcagtacctcgatgccgtcgagcgtgaactcaaaggcatcgacaactcctcgcatgaattgccgctgcgaacgatcttcttaggcggcggcacaccaacgcgtttgtcagccacacgtctgcagcgactgcatcgagcgatctcgaatgcattcccgatcgccgatgacgctgagatcaccgcggaagccaaccccgaagacatctcgcctgagtgcctggatgctttgcaagccatcggagtcaatcgaatcagcctcggcgttcaatcgtttgacgccgaaaaattgcgatgcctcgaacgcggccatgacgaatccatcgcactctccgcgatcgaatccgctcaccgacgagtcggcaatgtctcgatcgatctgatctttggtgcccccaacgaatccctcgcgacttggcaaaacgatttgtcgatcgcggcagcctcctcgatctcgcatgtctccacctatgccctgacattcgaaaaaggcacttcgttttggtcacggcgttcgcgtggcgatctatcggaaactgatgagacgctggaactgcaaatgtacgaagccgctcaacaacaattctcaatcgacggttggcagcagtacgagatcagcagtttcgcaagaggtgccacgcgatgccaacacaacctggcttattgggcgggacgtggttggcacgccgttggtcccggagccgcacgcttcgttgacggtcgacgcgaagtcaaccatcgcagcacaacgacgtacctcaaacgcatgctggccggcggaaatgcaaccgatgaaacggaggcgatcacattggaacagtacgctcgtgaactggccgcgtttggcgtgcgtcaactcgacgggatcgacctttccacgattgataaccgaacttcaatcgacttggaaaccttgcttgcgaaaacgctgacgaaacttcagtcgatggaattggtcacgcacgagaaccaccacctcaggctcacctgccgcggcatcttgtttgctgacaccgttgcaaccgcactgctgtccgagccagagtag

SEQ ID NO: 11636 - protein, 389 aa, Rhodopirellula baltica SH 1
MTCIPPGGWPQPQSLYVHVPFCRHRCGYCNFSVIAGRDELQDQYLDAVERELKGIDNSSHELPLRTIFLGGGTPTRLSATRLQRLHRAISNAFPIADDAEITAEANPEDISPECLDALQAIGVNRISLGVQSFDAEKLRCLERGHDESIALSAIESAHRRVGNVSIDLIFGAPNESLATWQNDLSIAAASSISHVSTYALTFEKGTSFWSRRSRGDLSETDETLELQMYEAAQQQFSIDGWQQYEISSFARGATRCQHNLAYWAGRGWHAVGPGAARFVDGRREVNHRSTTTYLKRMLAGGNATDETEAITLEQYARELAAFGVRQLDGIDLSTIDNRTSIDLETLLAKTLTKLQSMELVTHENHHLRLTCRGILFADTVATALLSEPE

SEQ ID NO: 11637 - DNA, 1185 bp, Haemophilus ducreyi 35000HP
  CDS (1)..(1185): transl_table=11
ttggcaaatcacgtgagtcttattcttccacctttaagcctttatattcatatcccttggtgtgtgcaaaaatgcccatactgtgattttaattcacatacacagaaaggaaccattcctgaagctgaatatattcaacatttattagcggatttatcgcaagatttagtcacttataaaacggctatcgcaaatcgtaaaattcattccatttttattggtggaggaacgcctagccttttttcagcagaagcaatagcttacttattagcagaaattaagcaacggattgcgtttgctccaaaaattgaaatcacacttgaagccaatcccggtaccgcagaagcggagcgttttatttgttataccgaagcagggattaaccgtatttcaatggggattcaaagttttgaagaggaaaaattacgcaagttggggcgtattcacgatgctcatgaagctaaacaagcggtctattttgccaaaaatgcacttatttcgccatcaagaacagtagggttacacagttttaaccttgatttaatgcacgggttgccaaaccaaacgcttgaacaagcattagcggatttaaatacggctatttcgcttaatccaccgcatttttcttggtatcaattgactattgaaccgaatacaatgttctattatcgtcaaccgacgttacctgatgatgatgaactatgggctatttttgaacaaggccatcagttattgactatggcgggttatcaacagtatgaaacttctgcttatgctaagcaaggattccaatgccaacataatttaaattattggcgatttggtgattatttagccattggatgtggtgctcacgggaaaatttcttacccaagcggtgaaatttatcgattcagtaaaaccaaacatcctaaaggctatatgcgcggtgattatcgcgatagccaacaatcgattcaacttgatgatcgtccctttgagttttttatgaaccgctttcgtttacttgagccaacaccaaagcaagaatttgaatgctatactggattagattgtgaaagggtaaggccaacgattgattgggcattaaataagcattatatttcagaaactagcacaacttggcaagttacacaaaaaggcaaactgttcttaaacgagctattagcaggctttttgacataa

SEQ ID NO: 11638 - protein, 394 aa, Haemophilus ducreyi 35000HP
MANHVSLILPPLSLYIHIPWCVQKCPYCDFNSHTQKGTIPEAEYIQHLLADLSQDLVTYKTAIANRKIHSIFIGGGTPSLFSAEAIAYLLAEIKQRIAFAPKIEITLEANPGTAEAERFICYTEAGINRISMGIQSFEEEKLRKLGRIHDAHEAKQAVYFAKNALISPSRTVGLHSFNLDLMHGLPNQTLEQALADLNTAISLNPPHFSWYQLTIEPNTMFYYRQPTLPDDDELWAIFEQGHQLLTMAGYQQYETSAYAKQGFQCQHNLNYWRFGDYLAIGCGAHGKISYPSGEIYRFSKTKHPKGYMRGDYRDSQQSIQLDDRPFEFFMNRFRLLEPTPKQEFECYTGLDCERVRPTIDWALNKHYISETSTTWQVTQKGKLFLNELLAGFLT

SEQ ID NO: 11639 - DNA, 1251 bp, Prochlorococcus marinus subsp. marinus str. CCMP1375
  CDS (1)..(1251): transl_table=11
gtgaattatcctagaagtgcttatttacatatacctttttgtcatagacgctgcttctattgtgatttcccagttgtccctttgggagatagagctggaactgagaatggaccaggtagctcttctgtcaaatcatatttgaatcttttacatagggagatttctttagctcctaaagttgcctcattatcaactgtttatataggtggaggaacaccttctattttaagtgctgaccaagtagcaaatttattagatcatttgcgattacattttgggtttcaaaatggtgctgagatttcttttgaagtagatcctgcaagttttgatactttttcattggaaggctttttagatgcaggagtaaatcgattaagcttaggagcacaaagttttgatgacaaagttcttgctcaattaggaagacgtcatactgccaatgatttgctagatgcttgtggttggattaatcaagcctttaacgaaagaaaactatttagttggagtcttgatttaattcaaaatctacctggacaggatttatgttcttgggaaaagcaacttttgaaggctttagatatttcacctccacatatgtcgatatatgatctttccattgagaaaggtactgtttttgaatggagacaaaataggggggaattgtctttgcctaatgaagatgatgcatctgatatgtcaaagatgactagtgacaaattaaaacaagcaggtttttctcgatatgaaatttctaattatgcactacctgggcacgcttctcgccataatcgtgtttattggagtggctctggatggtggggttttggacaaggtgctaccagttgtccatggggagtgaggtcctctaggcctaggactcgagaaaaatataaaaaatggttagaggttcaagagaatgatggattggataaatctttgactttaaataatgaaggccaattaattcctctagatgagcttttaatctttggactccgtagaagagagggaatagatttcaaagaacttgttagtagttttaattgggatgagagtcagcttgagattaatttgaataatttaaaaaattattgggcaaactctcttaaggagggattaattaaacaaagaggatatagattttatttaactgatcctcatggaatggatcttagtaatcagattcttgttgatatgttgttgtggtatgagtctttacttaattcctcaattgatcaacccaacttgtaa

SEQ ID NO: 11640 - protein, 416 aa, Prochlorococcus marinus subsp. marinus str. CCMP1375
MNYPRSAYLHIPFCHRRCFYCDFPVVPLGDRAGTENGPGSSSVKSYLNLLHREISLAPKVASLSTVYIGGGTPSILSADQVANLLDHLRLHFGFQNGAEISFEVDPASFDTFSLEGFLDAGVNRLSLGAQSFDDKVLAQLGRRHTANDLLDACGWINQAFNERKLFSWSLDLIQNLPGQDLCSWEKQLLKALDISPPHMSIYDLSIEKGTVFEWRQNRGELSLPNEDDASDMSKMTSDKLKQAGFSRYEISNYALPGHASRHNRVYWSGSGWWGFGQGATSCPWGVRSSRPRTREKYKKWLEVQENDGLDKSLTLNNEGQLIPLDELLIFGLRRREGIDFKELVSSFNWDESQLEINLNNLKNYWANSLKEGLIKQRGYRFYLTDPHGMDLSNQILVDMLLWYESLLNSSIDQPNL

SEQ ID NO: 11641 - DNA, 1146 bp, Chlamydophila pneumoniae TW-183
  CDS (1)..(1146): transl_table=11
gtggtatcattgatcccgatgctaatgaatggtaaggctcccctagctctttatattcatattcccttctgcacaaaaaaatgtcgctattgcagtttttatacaatcccctacaaaagtgaatctgtatcgctctattgtaatgctgtaattcaagaggggctaagaaagctagcccccatccaagagacgcatttcatagagactgtgttttttggagggggaacaccttcattagtttctcctcttgatcttaagcgcatcctcaaagagctagccccccatgcccgggaaattactttagaggccaaccccgaaaatctcaccgtaagctatctacgtcaactacaagagactccaataaatagaattagcgttggcgtacaaaccttcgacgactctatcctacagctcctcggaagaacgcattcttcatctgcggcaatcacagcactgcaagaatgccagaatcacggattctctaatctttctatagacctaatctacggactgcccacacagtctttggagatattcctaagcgacctacatcaagctctgactctccctatcactcacatttctctatacaacctcactatagatccccacacctccttctataaacaccgcaaaattctagtccccacaattgcccaagaagaaattctagctgagatgagcctccttgctgaaaatctcctactctcccaagggttccaacgctatgaacttgcttcatatgccaagccagattaccccgcaaagcacaacctctattactggacagatcgccctttcttaggcttaggagtttcagcttcgcaataccttcacggagagcggtcaaaaaattatagtcatatttctcactatctacgtgctgtacgtaagaatctccctacccaagagacctcagaaattctcccaaaaaaagaacgaatcaaagaagccttagccctgcgactccgactccttgaaggagcagacctcgcggagttcccctccacacttatctccatgcttacgcaagatgtaaaattacaaaacctattcagtgtgcatggacaatgtcttgccctaaatagacagggccgtctcttccacgatacaatagcggaagagattatgggatattccttctaa

SEQ ID NO: 11642 - protein, 381 aa, Chlamydophila pneumoniae TW-183
MVSLIPMLMNGKAPLALYIHIPFCTKKCRYCSFYTIPYKSESVSLYCNAVIQEGLRKLAPIQETHFIETVFFGGGTPSLVSPLDLKRILKELAPHAREITLEANPENLTVSYLRQLQETPINRISVGVQTFDDSILQLLGRTHSSSAAITALQECQNHGFSNLSIDLIYGLPTQSLEIFLSDLHQALTLPITHISLYNLTIDPHTSFYKHRKILVPTIAQEEILAEMSLLAENLLLSQGFQRYELASYAKPDYPAKHNLYYWTDRPFLGLGVSASQYLHGERSKNYSHISHYLRAVRKNLPTQETSEILPKKERIKEALALRLRLLEGADLAEFPSTLISMLTQDVKLQNLFSVHGQCLALNRQGRLFHDTIAEEIMGYSF

SEQ ID NO: 11643 - DNA, 1221 bp, Bordetella pertussis Tohama I
  CDS (1)..(1221): transl_table=11
atggccatcacgattcccatccgcaacctgggcgggccggccgccggcgcgcgcgtcctcgcgccggccggcgccacgctgaccagcctgccgccgctgtcggtctatgtgcacgtgccctggtgcgtgcgcaagtgtccctattgcgacttcaattcgcatgccgcgccgggcgagattcccgaacgcgcctacctggacgcgctgcgcgccgacctggagcaggccgtgcccgaggtatgggggcgccaggtcatttccgtcttcatcggcggcggcacgcccagcctgctgtcggcggcggggctggacgagctgctggccatgctgcgcgcctgcctgaacctgctgccggacgccgaaattaccatggaggccaacccgggcactgccgaggccggacgcttccgcgattacgcggccagcggcgtgacgcggctgtcgctgggcatccagagctttgacgatgcccagctgtccaggctgggccgcatccatgacgcggcccaggcgcgcgcggccatcgccatggcgcagcagacggtcgagcgcgtcaacctggacctgatgttcgccttgccgggccaggagctcgagcagtgccgcgcggacctgcgccaggcgctggccttcggcacggaacacctgtcgctgtatcacctgacgctggaacccaatacggttttcgccaaatacccgccggaattgccggacgacgatgccagcgccgccatgcaggacatggtcgaggagaccctggcccaggccgggctggcgcgttatgaggtctcggcctatgcccgccggggcgcgcgttgccggcacaatctcaattactgggagttcggcgactacctgggcctggggcccggcgcccatggcaagctgtcgtttcacgaccgcatcgaacgccaggcgcgcctgcgcaatccggattcctggatgcagcgcgccatggcgcgcgatggcagccatgtggccgaaagccgggtcgtcggggcgggcgaactgccgttcgagttcatgctcaatgcgctgcgcctgaaagaaggcgtggccgcgccctcgtttggcgagcgcactggcctgtcgctggcggccatcgcgcaccaattggaagcagcgacccggcgcggcctgctcgacgccgatccgacccgcctgcgcgccaccgcactgggctggcgcttcctgaacgatctgcaggaaatgttcctgtaa

SEQ ID NO: 11644 - protein, 406 aa, Bordetella pertussis Tohama I
MAITIPIRNLGGPAAGARVLAPAGATLTSLPPLSVYVHVPWCVRKCPYCDFNSHAAPGEIPERAYLDALRADLEQAVPEVWGRQVISVFIGGGTPSLLSAAGLDELLAMLRACLNLLPDAEITMEANPGTAEAGRFRDYAASGVTRLSLGIQSFDDAQLSRLGRIHDAAQARAAIAMAQQTVERVNLDLMFALPGQELEQCRADLRQALAFGTEHLSLYHLTLEPNTVFAKYPPELPDDDASAAMQDMVEETLAQAGLARYEVSAYARRGARCRHNLNYWEFGDYLGLGPGAHGKLSFHDRIERQARLRNPDSWMQRAMARDGSHVAESRVVGAGELPFEFMLNALRLKEGVAAPSFGERTGLSLAAIAHQLEAATRRGLLDADPTRLRATALGWRFLNDLQEMFL

SEQ ID NO: 11645 - DNA, 1227 bp, Prochlorococcus marinus subsp. pastoris str. CCMP1986
  CDS (1)..(1227): transl_table=11
atgatgaataaattgcctagaagtgcttacgtacacatacctttttgccacagacgatgtttctattgtgattttgcagttatacctttaggtaataaaatcgaaagtttagagggatatgggagtaaaaccgttaaagaatatttgacctatttaaataaagaaatattatcaatcaaacataaatctcctctttcaacaatttatatcggtggaggaactccttcaattttaaatcccttacagattaaagatttaataaatctttttaaggagaattataaaattgattatggtgctgaaatcacaatggaagttgatccagctagttttaatgaagatgatctatatggctttataaaggctgggattaatagatttagtcttggagttcaaagttttaataatcaggtcttagaacaggcgggaagaagacattgcagcaaggatgtagaaaaatcttgtttttggttaaagagagcatataatcatggttttataaaaagttggagtttggatttaattcaaaatttaccaagaagtggttttaaagaatggcaagaagacttaaaacaatcgttaaagttttttcctccacacatatcaatttatgatttaagtatcgagaatggaacggtttttaagaaattagttgatttaggtaaactatctttaccaaaggatgatgatgcttttaaaaatagtgagttaacaaactttattttaaaagcttcaggttattcaagatatgaaatttctaattactctatccctggacatcaatcaagacataatagagtttattggaaaggtcttggatggtggagttttggtcaagggtcgactagttctccttggggagagaattttacaaggccaagaattagtaaagattataaaaaatgggtaactaagcaatgcgaaatcaaattagaacattcactaattaaccaagaaaatatttataaagaattggatgagaaaatcatgttaggaatgagacttaaagagggtatcaatatttataacttattaaacgaacaaaattgggataataaaaagtccaaaatagctttaaaaaagttactaaaagcatgggaacccttcctggaaagtggccttttaattaaaagaggtaacagattttttttaagtgatccaaaagggatggaattaagcaatcaaattcttgtttcaatgtttagatggtgggaaaaatttaattga

SEQ ID NO: 11646 - protein, 408 aa, Prochlorococcus marinus subsp. pastoris str. CCMP1986
MMNKLPRSAYVHIPFCHRRCFYCDFAVIPLGNKIESLEGYGSKTVKEYLTYLNKEILSIKHKSPLSTIYIGGGTPSILNPLQIKDLINLFKENYKIDYGAEITMEVDPASFNEDDLYGFIKAGINRFSLGVQSFNNQVLEQAGRRHCSKDVEKSCFWLKRAYNHGFIKSWSLDLIQNLPRSGFKEWQEDLKQSLKFFPPHISIYDLSIENGTVFKKLVDLGKLSLPKDDDAFKNSELTNFILKASGYSRYEISNYSIPGHQSRHNRVYWKGLGWWSFGQGSTSSPWGENFTRPRISKDYKKWVTKQCEIKLEHSLINQENIYKELDEKIMLGMRLKEGINIYNLLNEQNWDNKKSKIALKKLLKAWEPFLESGLLIKRGNRFFLSDPKGMELSNQILVSMFRWWEKFN

SEQ ID NO: 11647 - DNA, 1311 bp, Prochlorococcus marinus str. MIT 9313
  CDS (1)..(1311): transl_table=11
atgagagaaggtcttgctgtgttgccacctcgcagtgcctatctgcacattcctttctgccatcggcgttgcttttattgcgatttcgctgtcgtgccccttggcgatcatgccaatggggctaagggctctggcagcgcctcgattcagtcttatctgcagctattgcaacgggagattgcgcttgtcaagcctgggccaacgctggccacggtttacatcggcgggggaacaccatctctgctcagctcagctcagattggtgccctgttggatcagctacggcaacggtttggcgttcagcttggtgcagaaatcacactggaaatggatccagctagtttcgatcaggcttatctacaggccgtgttagcggctggtgtcaacagggtgagcttgggtgggcagagtttcgatgatgcagtgctcgagacgcttgggcgccgtcatcgtcgccaccatttactggaggcttgcggatggttgcatcaggctcatcagtgcggagagctgaaaagttggagtttggatctcatccagaacctgccaggacaggagctggtggcttggaagcaacagcttgttgaggctattgatactggttcacctcatctttctatctacgatttatctgttgaaccaggcacggtatttgcttggcgtcagcggcggggtgagttggatttgcccgataatgatttagcagctgagcagatgcagaccaccagtgtcttgcttcgtcaggaaggatttggccgctatgaaatctccaattacgccttgccagggcacgcctcacggcacaaccgcgtgtattggagtggggcagggtggtgggcgtttggtcagggtgcgaccagtgcgccctggggcgagaggctggctcgtccgcgcacaagggatggttactgcaactggattgaggttcaggaggcagaaggactggattcctctctagttgcggctcaggcaagacccttacctctggatgaacggttgttggtgggtttgcgttgccgtgagggagttgatcttgaggccctcagtagggcttggggctggactcatgagcagtgcaacgctctattgccgtcgttgcaggtgcgctggcaggcggcgttggatcggggctggttagagctgcatggacgacgttggcagctcagtgaccccgaggggatggccatcagcaatcaggttctggtggagatgttgttgtggtggcagtctttgcctgctgatgcagttgcttcacccaaccttgaagggcttctacgcacagctggcgaccttggatcaatggttgactga

SEQ ID NO: 11648 - protein, 436 aa, Prochlorococcus marinus str. MIT 9313
MREGLAVLPPRSAYLHIPFCHRRCFYCDFAVVPLGDHANGAKGSGSASIQSYLQLLQREIALVKPGPTLATVYIGGGTPSLLSSAQIGALLDQLRQRFGVQLGAEITLEMDPASFDQAYLQAVLAAGVNRVSLGGQSFDDAVLETLGRRHRRHHLLEACGWLHQAHQCGELKSWSLDLIQNLPGQELVAWKQQLVEAIDTGSPHLSIYDLSVEPGTVFAWRQRRGELDLPDNDLAAEQMQTTSVLLRQEGFGRYEISNYALPGHASRHNRVYWSGAGWWAFGQGATSAPWGERLARPRTRDGYCNWIEVQEAEGLDSSLVAAQARPLPLDERLLVGLRCREGVDLEALSRAWGWTHEQCNALLPSLQVRWQAALDRGWLELHGRRWQLSDPEGMAISNQVLVEMLLWWQSLPADAVASPNLEGLLRTAGDLGSMVD

SEQ ID NO: 11649 - DNA, 1224 bp, Synechococcus sp. WH 8102
  CDS (1)..(1224): transl_table=11
atgccctatccaccaccgccccgcagcgcctatctccacattcctttttgccatcgtcgttgttactactgcgatttcgctgtggtgccgctgggggatcgcgtggacgcaagggagggccccggcagccgctccattgaggattacctgcggttgcttcatcgcgagatcgcctccgccgcaagcggtccgcccttgtcgacggtctacatcggtggtggcactccctccctgctgacagcggatcagatcgccgaactgttggcggccctgcgtcgacagttcggtctgcagccgggtgcggaaatcacccttgagatggatcccgccagctttgatcaggcccaactcgtggcggtgcttgctgcgggggtgaaccgcatcagcctgggtggccagagttttgatgatgctgttctgatcgacctcggccggcgtcatcgacgggctgatctgctggaggcctgccgctggatgcatgcggcccatcaagacggggatctgcagagctggagtcttgatctgattcagaacctgccgggtcaaacctttgagcactgggacgaccagctggaccaggccatcggcagtcaggccccgcatctctcggtctatgacctgtccgttgagccaggcacggtttttgcccgcagggctgagcgggcggagctggacctgccggaggaagacctggcggtgcgcttgatggcccacaccagtgcacggctggccgcagctggattgagccgctacgagatctccaaccatgcccgacccggccatgcctcccgccataaccgcgtgtactggagtggtgccggctggtggggcttcggtatgggggccacctcagctgtcaggggggaacggcttgcacgcccccgaactcgggaggcctatcgccgctggcttgaggcacctccaccgctcaacgctggctctggcatgcctctcgacgagctgttgctcgtgggattgcggcgtcgtgaaggggttgttctgacaggtcgcgatggtcaggctttggaggagcgctggcgaccgtttctggagcagggactgctgcagaagtgctccggtcgctggcaactcagggatccggaggggatggccctcagtaatcgggtgttgctggaggtggtgttgtggtgggagtctgtgcagcaatccacgtccgcagcgcctccacaaacagctgctgcccgggaatcagggccgggctga

SEQ ID NO: 11650 - protein, 407 aa, Synechococcus sp. WH 8102
MPYPPPPRSAYLHIPFCHRRCYYCDFAVVPLGDRVDAREGPGSRSIEDYLRLLHREIASAASGPPLSTVYIGGGTPSLLTADQIAELLAALRRQFGLQPGAEITLEMDPASFDQAQLVAVLAAGVNRISLGGQSFDDAVLIDLGRRHRRADLLEACRWMHAAHQDGDLQSWSLDLIQNLPGQTFEHWDDQLDQAIGSQAPHLSVYDLSVEPGTVFARRAERAELDLPEEDLAVRLMAHTSARLAAAGLSRYEISNHARPGHASRHNRVYWSGAGWWGFGMGATSAVRGERLARPRTREAYRRWLEAPPPLNAGSGMPLDELLLVGLRRREGVVLTGRDGQALEERWRPFLEQGLLQKCSGRWQLRDPEGMALSNRVLLEVVLWWESVQQSTSAAPPQTAAARESGPG

SEQ ID NO: 11651 - DNA, 1191 bp, Chromobacterium violaceum ATCC 12472
  CDS (1)..(1191): transl_table=11
atgagcgtggtcgacctgtcggcgttgaccggcggcctgcgcgagctgccgcccttggcgctgtatgtccacttcccgtggtgcatccgcaagtgcccgtactgcgatttcaattcgcacgagccgaagaacggcttcgacgagatggcctatgtcgacgcgctgctgcgcgatctggaatacagcttgccggaagtatggggccggccgctgaccagcatcttcatgggcggcggcacgcccagcctgttcagcccgcaggcgatggacgcgctgcttgccggggtgcgggcgcggatgaagctgcatccggacgccgagatcacgatggaggccaatcccggcaccttcgagatcgagcgcttccgcggctatcgcgaggccggcatcaaccggctgtcgatcggcatccagagctttaatcccaagcacctgaaggcgctgggccgcatccatgacggcgacgaggccaagcgcgcggtggagatcgcgctgacccacttcgacaacgtcaatctggatctgatgtacgcgctgccgggccagaccctggatgaggcgctgtccgacctgaacaccgcgctgtcctatggcatcacccatctgtcggcctaccacctgaccatcgagccgaatacgctgttcgcggcgcagacgccgcaaaacctgccggacgacgaggtgtcggccgacatgcaggaggcgatagagtcctgtctggaggccgccggtttcgatcactacgaaacctcggccttcgccaaacccggccgccacagccgccacaatctcaactactggcagttcggcgactacgtcggcatcggcgccggcgcgcacggcaagatcagcagccacgccggcattgtgcgccagatgcggcacaagcagccggcggcctatctgaaggcggtggcggccggcgcgccgctgcaaagcagccagaaggtcgcccgcgccgacctgccgttcgaattcatgatgaacctgctgcgcctgaccagcggcttcgagagccgcctgttccaggagcgcaccgggctgccgctggcgctgatccgccgccagctggacgcagcccaggcgcaaggcctgctggataccgacggcgccatcctgcgcccgacgctgaaaggccagcgtttcctcaacgatttgctcaccctgttcctcaaagaaggagatgaataa

SEQ ID NO: 11652 - protein, 396 aa, Chromobacterium violaceum ATCC 12472
MSVVDLSALTGGLRELPPLALYVHFPWCIRKCPYCDFNSHEPKNGFDEMAYVDALLRDLEYSLPEVWGRPLTSIFMGGGTPSLFSPQAMDALLAGVRARMKLHPDAEITMEANPGTFEIERFRGYREAGINRLSIGIQSFNPKHLKALGRIHDGDEAKRAVEIALTHFDNVNLDLMYALPGQTLDEALSDLNTALSYGITHLSAYHLTIEPNTLFAAQTPQNLPDDEVSADMQEAIESCLEAAGFDHYETSAFAKPGRHSRHNLNYWQFGDYVGIGAGAHGKISSHAGIVRQMRHKQPAAYLKAVAAGAPLQSSQKVARADLPFEFMMNLLRLTSGFESRLFQERTGLPLALIRRQLDAAQAQGLLDTDGAILRPTLKGQRFLNDLLTLFLKEGDE

SEQ ID NO: 11653 - DNA, 1131 bp, Porphyromonas gingivalis W83
  CDS (1)..(1131): transl_table=11
gtgacgggactatacattcatattcctttctgtgccacgcgctgctcgtattgcgacttctattcgcagacgaacagcgcgcttcgttcggagtatatacaggcactgatcgccgagatgagtattcgtcgtgccgaagtcaccgatacgatcggcactctttacttcggaggagggactccatcgcttctctccccacaggaaataggccgtattatagagcaggtctacagacttttctcattttcttccgatgccgagattaccttggaggccaatcccgacgatctgaatacaagctatgtacaggagcttcgtactctgccgatcaatcgaataagtatgggagcacagagtttccacgatgaagacctgcacttcctcaatcgtcggcacaatgcccgccaagtgctcgaagcagtggatacctgccgcaatgcgggacttaccaacctgagtatcgatcttatttacggtctacccgggcagacgcctgctcgctggcaagaaaatatctccgcagtgcttgctctctccccaccccacctgtccgcctaccatctgatatacgaagaaggaacccccctgacacgcctactccatgcaggaaaggtgcgcgaagtggacgaggaggtaagcctcgaactcttccgcatgcttcgcgaacagctgacaggagccggctatgaacactacgagatttccaattttgcccgttccggttatcactcttgccacaacagctcctattggcaggatactccctatctgggtcttggcccatcggcacacagtttcgatggacggcgtacaaggcgatccaatccctccgatatacgccgatacatagtctccatggcagcaggaaaacctctcttcacggaagaaatcctgaccgataacgaccggtacaacgaagtagtcatgacccgcctgcgtactgcctgtggtttatcgcccgatcagataggccatctcttcggaaaggaatctgccgaacggtgtattcggacagctgctccatttatccgcgacggtctcctccacgaagaagccgacggccgaatacggctcaccgaaaaagggatattcctctcggacaggattatttccgaattctttatcgtctaa

SEQ ID NO: 11654 - protein, 376 aa, Porphyromonas gingivalis W83
MTGLYIHIPFCATRCSYCDFYSQTNSALRSEYIQALIAEMSIRRAEVTDTIGTLYFGGGTPSLLSPQEIGRIIEQVYRLFSFSSDAEITLEANPDDLNTSYVQELRTLPINRISMGAQSFHDEDLHFLNRRHNARQVLEAVDTCRNAGLTNLSIDLIYGLPGQTPARWQENISAVLALSPPHLSAYHLIYEEGTPLTRLLHAGKVREVDEEVSLELFRMLREQLTGAGYEHYEISNFARSGYHSCHNSSYWQDTPYLGLGPSAHSFDGRRTRRSNPSDIRRYIVSMAAGKPLFTEEILTDNDRYNEVVMTRLRTACGLSPDQIGHLFGKESAERCIRTAAPFIRDGLLHEEADGRIRLTEKGIFLSDRIISEFFIV

SEQ ID NO: 11655 - DNA, 1041 bp, Wolinella succinogenes DSM 1740
  CDS (1)..(1041): transl_table=11
gtgcttctctactttcatatccccttttgtgcgagcaagtgcggctactgcgcttttgattctagaagcgctccttctagctggcacgctccctatatgcaagcgctccttgtggcgcttaaatcggagctagcaaagctaaaagaggagaggattgagagcgtctattttgggggtgggacgcccactcttttggatagccatctttttgagccactttttgagcgattctctccctatctctccaaagaggcggagatcaccatcgaggccaatccccgctcgctcaccccctcttgggcagagaggatgcactcctttggggtgaatcgtgtaagtctgggggtgcagagctttgagaggaagaaattggcatggctagagcgtgatcatggcgagggagagattgagcgtgccatggaatcgctccttaaggctagaatcaagcacatcagcattgatcttatctatgacactccgcttgattcgccaaccctcctctccaaagagatccaaagagcctccactctccctatcgatcacctctcggcgtatagtttgacgctggaggaggggagtcgatttttcgccaaaggtcaaaaaggcatggagggagaatcctacgcctctttggtgcgagagagactaggagaagatggatttgtgcaatatgaggtgagcaattacgccagaggctatcgctcatcccacaaccttggctattggatggcaaaggattacataggggtgggcgcgggcgcggtaggatgcctagggggagtgcgctactatcccgccaaagagatagagcgttacatcaaagagccgctttggcgagaagaagagccattaagccacgaggataagaggctagagaggctctttttggggctcagatcggaggtggggatcgcgccccatgaggcgaatcgctctaagcttgagctgcttttatcagggggtaaggtgagggaggagcggggaagaatcctcgccaatgatctctttctcgccgatgagatcgccctttatctatcttaa

SEQ ID NO: 11656 - protein, 346 aa, Wolinella succinogenes DSM 1740
MLLYFHIPFCASKCGYCAFDSRSAPSSWHAPYMQALLVALKSELAKLKEERIESVYFGGGTPTLLDSHLFEPLFERFSPYLSKEAEITIEANPRSLTPSWAERMHSFGVNRVSLGVQSFERKKLAWLERDHGEGEIERAMESLLKARIKHISIDLIYDTPLDSPTLLSKEIQRASTLPIDHLSAYSLTLEEGSRFFAKGQKGMEGESYASLVRERLGEDGFVQYEVSNYARGYRSSHNLGYWMAKDYIGVGAGAVGCLGGVRYYPAKEIERYIKEPLWREEEPLSHEDKRLERLFLGLRSEVGIAPHEANRSKLELLLSGGKVREERGRILANDLFLADEIALYLS

SEQ ID NO: 11657 - DNA, 1227 bp, Gloeobacter violaceus PCC 7421
  CDS (1)..(1227): transl_table=11
atggaacgacaggacgaggcgaacacacagattatagcctctaccgtcccgcatcctccctgtgcaacacttcctcaaacttgcccagggcgcttcggtgaactgcccaccgccgcctacctgcacattccgttttgtcgcacgcgctgccgctactgcgactttgccgtcaccgtcggcaccgaagggctgatcgaaaagtacgtgcgctttttgctcgcggagatcgccttgaccccgagcgggggccagggattggacacggtctacttcggaggcggcacgccgtcgctgttgtcggtcgaacaactcggccgcgttctggcggctctgcgggagcacttcggcggttttgcccccgatgccgaaatttcgctggaggccaaccccggcacttttgattgcaagaaactcaccggttaccgctcgctgggggtcaaccgcctgagcgtcggcgtccaggcctttcagtcccacctactggccctttgcggccgttcccacggacttgaggaggtctactcctccgtggctacggtgcgggcggcaggtttcgagaatttcaacctcgacctcatcttcggtctgccccaccagagccttgccgattgggagttttcgctctctgaagttttgcggctggagcctacccatctatcgctctacgacctgattctcgaagaagagaccccttttggccgggagttcctggggggtcaggcgcccctgccgggtgacgacgacaccgtggcgatgtacctgcgcgcctgcgagcggttgcaggggcagggctaccggcagtatgagattgccaattttgcccggcccggttttcgctgccgccacaaccgggtttactgggacaaccggccctactacggaatcggcaacggtgcgaccggttatgtccggggggcgcgcgtcgagagaccgcgccgattgcacgattattttgcctgggtcgaggggggcgagtttccggcgggtgcaccggtcatgcccgaagaagagttagccgatacgctgctgttgggcctgcggctgctcgaaggggtggaagtgaatgcgctggtgcagcgcttcggccaccttgcagtcacgcaccagctcgaggcgttgcaaagcgccctggagcggggactgttgatactatacgacggccgcttgcggctgagcgtcccggagggactgctgctgtccaacgaagtcttcacgcttttggtgtag

SEQ ID NO: 11658 - protein, 408 aa, Gloeobacter violaceus PCC 7421
MERQDEANTQIIASTVPHPPCATLPQTCPGRFGELPTAAYLHIPFCRTRCRYCDFAVTVGTEGLIEKYVRFLLAEIALTPSGGQGLDTVYFGGGTPSLLSVEQLGRVLAALREHFGGFAPDAEISLEANPGTFDCKKLTGYRSLGVNRLSVGVQAFQSHLLALCGRSHGLEEVYSSVATVRAAGFENFNLDLIFGLPHQSLADWEFSLSEVLRLEPTHLSLYDLILEEETPFGREFLGGQAPLPGDDDTVAMYLRACERLQGQGYRQYEIANFARPGFRCRHNRVYWDNRPYYGIGNGATGYVRGARVERPRRLHDYFAWVEGGEFPAGAPVMPEEELADTLLLGLRLLEGVEVNALVQRFGHLAVTHQLEALQSALERGLLILYDGRLRLSVPEGLLLSNEVFTLLV

SEQ ID NO: 11659 - DNA, 1131 bp, Photorhabdus luminescens subsp. laumondii TTO1
  CDS (1)..(1131): transl_table=11
atgcttaagctcccaccactaagtctttatatccatattccgtggtgtgtacaaaagtgcccttactgtgatttcaactctcatgccttgaaaggtgatgttccacaccaagagtatgttgaccatttattggcagatctgaaaacggatctgccaatggtcaatggtcgggaagttaccactatctttattggtggtggaacccctagcctgcttagctcacaagcaatgcaacaattgctggatggtgtccgtgccctcctgccggtatcgccacaagctgaaattactatggaagccaatccgggtactgtggaagccgaccgctttagtggttatcagcaagcgggtattaaccgaatatccattggcgtgcaaagtttcagtccagataaactggtacgccttggccgtattcacggaccggatgaagccaaacgggcagcacatttagccgctagtctggggctacgcagttttaatctggatttgatgcatggtttgccgaaccaaagccttgatgaagcgctagatgatttacgtcaggcaatcgagttatcaccaccgcatctttcatggtatcagttgactattgaacctaataccagctttggttcccgccctccggttctgcccgacgatgatgcgttgtgggatattttttcacaaggtcaccaattgctgacagcagcgggttatcagcaatacgaaacttctgcttatgccaaaccaggttaccaatgccagcataatctcaactactggcgctttggcgattaccttggtattggctgcggtgctcatggaaaaatcacatttgaagatggccgtattctgcgtacagtgaaaaccaaacatccccgtggatatatgcaggggcgctatctggataaacagcatcaggtagaaaatgaagatcggccatttgaattttttatgaaccgattccgtttactagaagcaatgccaaaacaagatttcagtgatttcaccgggttatctgaaacctcaattcgtactcaaattaaacaagccttagccgcaggttatctctctgaaacagcaacacactggcaaattacgcagaaaggcaaactgttcctaaattcattattggaactatttctctag

SEQ ID NO: 11660 - protein, 376 aa, Photorhabdus luminescens subsp. laumondii TTO1
MLKLPPLSLYIHIPWCVQKCPYCDFNSHALKGDVPHQEYVDHLLADLKTDLPMVNGREVTTIFIGGGTPSLLSSQAMQQLLDGVRALLPVSPQAEITMEANPGTVEADRFSGYQQAGINRISIGVQSFSPDKLVRLGRIHGPDEAKRAAHLAASLGLRSFNLDLMHGLPNQSLDEALDDLRQAIELSPPHLSWYQLTIEPNTSFGSRPPVLPDDDALWDIFSQGHQLLTAAGYQQYETSAYAKPGYQCQHNLNYWRFGDYLGIGCGAHGKITFEDGRILRTVKTKHPRGYMQGRYLDKQHQVENEDRPFEFFMNRFRLLEAMPKQDFSDFTGLSETSIRTQIKQALAAGYLSETATHWQITQKGKLFLNSLLELFL

SEQ ID NO: 11661 - DNA, 1170 bp, Vibrio vulnificus YJ016
  CDS (1)..(1170): transl_table=11
atgttaacgcccccagcactcagtttgtatgttcacatcccatggtgtgtacaaaagtgcccttattgcgacttcaactctcacacactcaaagagcagatcccagagcagatgtacatcaatgcgctgctggaagatcttgaccgtgatatcgaaaagtatcagcttcaccgcgcgccaagaccactgcactcgatttttatcggtggaggcacaccaagcctcatctcagcagaaggcattcgagatcttttgcaagggatcgaaaaacgcattccctttacgccttcgatcgagatcaccatggaagccaatcccggcaccatcgaagctgagcgctttgcgggctatcgcaaagcaggggtcacgcgcatctccatcggtgtacaaagttttgagcagcaaaaacttgagcgtttggggcgtattcatggccaagatgaagcagtgaacgccgcgaaactggctcatcaaattggcttgaacagttttaacctcgatctcatgcacggtttgcccgatcaaagcatcgaacaagctctggccgatctggacaaagcgattgaacttaatccgcctcatctttcttggtatcagctcactattgagccaaataccatgttctactacaaaccgccggctctccccgacgacgaccagttgtgggacatctttgagcgaggtcatcaaaaactcacacaagcgggatacgtgcagtatgagatttccggttacagcaaacccggttatcaatgtcagcacaatcttaactactggcgttttggtgattacttagggattggctgtggctcacacggcaaactgagctttgctgacggtcgcatcattcgcaccaccaaaattaagcacccgaagggctacttggcggcgcatcaaaatatggtcaaaccctatcttgatagcgaacagttggtcgaagagatcgatcgtccgttcgagttctttatgaatcgctttagattgatggaagcgtgccctaaacaagatttcattgatacaacagggctaccactgagttttatcgagacaaccattcaatgggccgttgagatgggctatttgaatgacaacgaaaccagttggcaaatcacagagaaaggtaagctgttcctaaacgacttgctcgaagcgtttatggctgaagagtaa

SEQ ID NO: 11662 - protein, 389 aa, Vibrio vulnificus YJ016
MLTPPALSLYVHIPWCVQKCPYCDFNSHTLKEQIPEQMYINALLEDLDRDIEKYQLHRAPRPLHSIFIGGGTPSLISAEGIRDLLQGIEKRIPFTPSIEITMEANPGTIEAERFAGYRKAGVTRISIGVQSFEQQKLERLGRIHGQDEAVNAAKLAHQIGLNSFNLDLMHGLPDQSIEQALADLDKAIELNPPHLSWYQLTIEPNTMFYYKPPALPDDDQLWDIFERGHQKLTQAGYVQYEISGYSKPGYQCQHNLNYWRFGDYLGIGCGSHGKLSFADGRIIRTTKIKHPKGYLAAHQNMVKPYLDSEQLVEEIDRPFEFFMNRFRLMEACPKQDFIDTTGLPLSFIETTIQWAVEMGYLNDNETSWQITEKGKLFLNDLLEAFMAEE

SEQ ID NO: 11663 - DNA, 1134 bp, Corynebacterium diphtheriae NCTC 13129
  CDS (1)..(1134): transl_table=11
atgtcggatagttttggagtttatgtccacgtcccgttttgttcctcacgttgcgggtactgcgactttaatacctacacccccggtgaactcggtggaacagcatctcctgaaagctacctcgatgcacttgaaaaagaactcgagctagccgcagcctcgggaaccacacgccctgcaactaccgtgtttatcggcggcggcacgccatcgatgctaggcgccagcgggctcacacgcgttctcagcgctgtgcgtaacaccatcgggattgcacccggcgcagaagtcaccactgaatcgaatccagagacaacctccccagaatttttctcggaactgctcgatgccggttacaatcgcatttctttgggaatgcagtcggcgtcgtcaagcgtgctgcgcgtattggaacgaaaacacaccccaggacgtgccttcgacgccgccctcgaagccatgaacgctgggttcctgcacgtaaacctcgacatgatctacggcacgcccaccgagactgacgacgacgttcggcttacccttgagcgcgccctcgacaccggagttgaccacatcagcgcctattcgctgatcgtggaagacggcaccgccatggcccgaaaggtacacaaaggccagctacctcctccgaacgaggacgtgtacgctgatcgctatgggcttatcgataccgcgctgcgagcccaaggatttgattggtatgaagtctccaattgggcaaagccaggcggagaatgccagcacaatctcggctattggctcgacggcgattggtggggagcagggcctggcgcgcactcgcacattgcgtctcgacgcttcttcaacgtgaaacacccgagcacgtatgctcaacaccttgccgacgggcagctgccgatcaaagaagaagagctcctcgatagcactgagcgccatgaagagtctgtcatgctcgggttacgcttgcgtcaaggacttgaattatcgcggtttaccgaagcggagcgtgccgtcatcgaaaaatatgtaggcctaaaactcctgcatatctatgatggtcgcgttgcttccacactgcaaggtcgcctgttgatcgatgggatcatcgccgatattttggtcgcctactaa

SEQ ID NO: 11664 - protein, 377 aa, Corynebacterium diphtheriae NCTC 13129
MSDSFGVYVHVPFCSSRCGYCDFNTYTPGELGGTASPESYLDALEKELELAAASGTTRPATTVFIGGGTPSMLGASGLTRVLSAVRNTIGIAPGAEVTTESNPETTSPEFFSELLDAGYNRISLGMQSASSSVLRVLERKHTPGRAFDAALEAMNAGFLHVNLDMIYGTPTETDDDVRLTLERALDTGVDHISAYSLIVEDGTAMARKVHKGQLPPPNEDVYADRYGLIDTALRAQGFDWYEVSNWAKPGGECQHNLGYWLDGDWWGAGPGAHSHIASRRFFNVKHPSTYAQHLADGQLPIKEEELLDSTERHEESVMLGLRLRQGLELSRFTEAERAVIEKYVGLKLLHIYDGRVASTLQGRLLIDGIIADILVAY

SEQ ID NO: 11665 - DNA, 1158 bp, Rhodopseudomonas palustris CGA009
  CDS (1)..(1158): transl_table=11
ttgcaggctagctccgacccagcttttggcgtctacgtgcactggccgttctgcctgtcgaagtgcccgtattgcgacttcaacagccatgtccgccacgccgcgatcgacgaggagcgattcgcccgcgccttcgcgcgtgagatcgccaccaccgcagagcgaatcgggccgcgccaggtgagctcgatctttcttggcggcggcaccccatctctgatgcagccctcgaccgtggcggcgatcctcgatgccatcgcccggcattggcaggtcgaacccggggccgaagtgacgctcgaggccaacccaaccagcgtcgaggccacgcggtttcgcggctatcgggctgcgggcgtcaaccgcgtgtcactcggcgtgcaggcgctggacgacgcctcgctgaaggcgcttgggcgactgcattcggccgaagaggccttgaacgcggtggcgatcgccaagtcggcgttcgaccgctactcgttcgacctgatttatgcgcggcccggacagaccgcggcgatgtgggaagccgagctgcgctacgcgatcggcgaggccgcagagcatctgtcgctgtatcagctcaccatcgagcccgacacgccgttctattccctgcacaaggccggcaagctgccgacgccggacgaggccgaggcacgggcgctgtacgatgtcacgcaatcggtctgcgccgaactcggactcccggcctatgagatttccaatcacgcccgcccgggcgcggaatgccggcacaatctgatctattggcgcggccacgaatatgccgggatcggccccggcgcgcacggccgcctcgacatcggcaatgcgcgctacgccaccgccaccgagaagcgtcccgagagctggctgatgcgggtggaagccaccggccacggcctgatcgccgacgaacacctcaccagcgaggagcgcgccgacgaattcctgctgatggggctgcggcttgccgaaggcattgatccgcagcgctatcagttgctgtccggccgcccgctcgatccgtcgcggatcgcgctgctgcgcgaagagggcgcgatcgcggtcgacgccgatggccgcttgcgcgtgacgcaagagggcttcccggtgctcgacgccgtggtggccgatctggcggcatag

SEQ ID NO: 11666 - protein, 385 aa, Rhodopseudomonas palustris CGA009
MQASSDPAFGVYVHWPFCLSKCPYCDFNSHVRHAAIDEERFARAFAREIATTAERIGPRQVSSIFLGGGTPSLMQPSTVAAILDAIARHWQVEPGAEVTLEANPTSVEATRFRGYRAAGVNRVSLGVQALDDASLKALGRLHSAEEALNAVAIAKSAFDRYSFDLIYARPGQTAAMWEAELRYAIGEAAEHLSLYQLTIEPDTPFYSLHKAGKLPTPDEAEARALYDVTQSVCAELGLPAYEISNHARPGAECRHNLIYWRGHEYAGIGPGAHGRLDIGNARYATATEKRPESWLMRVEATGHGLIADEHLTSEERADEFLLMGLRLAEGIDPQRYQLLSGRPLDPSRIALLREEGAIAVDADGRLRVTQEGFPVLDAVVADLAA

SEQ ID NO: 11667 - DNA, 1158 bp, Geobacter sulfurreducens PCA
  CDS (1)..(1158): transl_table=11
atgaacgagccgctgcatctctacgtccatatccctttctgcctgaagaagtgccgttattgctctttcgtttcacggtcggacgcacccctggcgatcgacgactacgcatcactcgtggcccgggagatggagatgcgggtcgcggcggcgaatcccctccccctctctccagcgactaccctctatcttggcggagggaccccgtcgcttctgtcgccggcggccctggagcgcatcatcgatgcggcagcgcgcagctatggccttggccccggcgcggagataaccctggaggccaatcccggcaccgtcaccttccagcggctcgccgatttccgctccgcgggcgtgaatcgcctctccctgggcgtccagtccttcgacgacgggatgctggtcctgctgggccggctccacaccgcccgccaagcgagagaggccgttgcggcgacccgtcgtgccggcttcgacaatatcggcatcgacctcatccactcgcttcccggccagacgcccgaccaatggcgcgagcaactggcctgcgccgtggctcttaatcctgatcacgtttcggcctacggtctcacggttgaggagggcacccccttcgcggccatggaggagcggggagaactggtgctgcccgacgaagagcagtcggccctcatgttcgaagcgacgacggacgtgctggtctcagccggcttcgagcactatgagatcgccaattttgcccgtccgcaccggcgttcacgccacaatcaggtttactggctccgccgaaactacctgggattcggcgcgggcgcccattcctttctgcgcgctccggcctttggcgtgcgctggaagaataccgacgacctggaactctatcgcgacactcttgcggcggcggagcttcccggggaggagcggacggtcctttcccgtgccgacgctatggccgagttttttttcctcgggctccggctgctggacggggtgcgggaagaggacttcgtccgggagttcggcgatacgatggaaaacgtgtacggccgcgaaatggaacgcctctgctcggcaggactcctcatgcgcgaggggggcaggttgaagctctcccgccggggagtcatcctcgccaaccgggtattcgcctcctttctctga

SEQ ID NO: 11668 - protein, 385 aa, Geobacter sulfurreducens PCA
MNEPLHLYVHIPFCLKKCRYCSFVSRSDAPLAIDDYASLVAREMEMRVAAANPLPLSPATTLYLGGGTPSLLSPAALERIIDAAARSYGLGPGAEITLEANPGTVTFQRLADFRSAGVNRLSLGVQSFDDGMLVLLGRLHTARQAREAVAATRRAGFDNIGIDLIHSLPGQTPDQWREQLACAVALNPDHVSAYGLTVEEGTPFAAMEERGELVLPDEEQSALMFEATTDVLVSAGFEHYEIANFARPHRRSRHNQVYWLRRNYLGFGAGAHSFLRAPAFGVRWKNTDDLELYRDTLAAAELPGEERTVLSRADAMAEFFFLGLRLLDGVREEDFVREFGDTMENVYGREMERLCSAGLLMREGGRLKLSRRGVILANRVFASFL

SEQ ID NO: 11669 - DNA, 1173 bp, Mycobacterium avium subsp. paratuberculosis K-10
  CDS (1)..(1173): transl_table=11
atggccattcgcgagcaaacggtcgagctgcccgacgtgcgggtggtcgacgggcacccgttcggcctctatgtgcacgtgccgttttgcgtaacccgttgcggttactgcgatttcaacacctacacaccggccgagctgggcggggtcaatcccgacgcgtggctgggggcgctgcgcacggaactggaactggccgccgcgcggctgcggcccccaccggtgaacaccgtgttcgtcgggggcgggacgccctcgctgctggggggcgcgcggctggcgctgctgctggacatggtgcgcgagcacttcgcgctggcgcccgacgcggagatcaccaccgaggccaaccccgagtcgacgtggccggagttcttcgacgccatcggggcggccggctacacccgggtgtcgctgggtatgcagtcggtggcgccgcgggtgctgggtgtgctggaccgcattcacacgccgaaccggtcggcggacgccgcccgcgaggcgctggccgccgggttcgagcacgtcagcctcgatctcatctacgggacgccgggggagtccgacgaggacctgctgtggtcgctcgacaccgcgatcgaaagcggtgtggaccacgtgtccgcctatgcgctggtggtcgaggaaggcacggcgctggcccggagggtgcgccgcggtgagctggcggcgcccgacgacgacgtgctggcgcaccgttacgaattggtcgacgcgcggctgtcgcaggcgggcctgtcctggtacgaagtctccaactggtcgcgcccgggcgggcagtgccggcacaacctcggctactgggacggcggtcagtggtggggcgcgggtcccggtgcccacggctacgtcggcacgacgcgctggtggaatgtcaagcaccccaacgcctatgccgaacggctcaacgccgcggcgctgccggtggccggattcgagcagctcggctccgaggccttgcacaccgaagacgtgctactgaaaatccgcttgcgccaagggtttccggtggatctgttgaattccgcggaacgcgaacgcgcccagggtgtggtggccgacgggttgttggtgcgcgacggcgaccggctggtgctcacgccgcgcgggcggctgctggccgacggcgtggtgcgcacgctgttggggtga

SEQ ID NO: 11670 - protein, 390 aa, Mycobacterium avium subsp. paratuberculosis K-10
MAIREQTVELPDVRVVDGHPFGLYVHVPFCVTRCGYCDFNTYTPAELGGVNPDAWLGALRTELELAAARLRPPPVNTVFVGGGTPSLLGGARLALLLDMVREHFALAPDAEITTEANPESTWPEFFDAIGAAGYTRVSLGMQSVAPRVLGVLDRIHTPNRSADAAREALAAGFEHVSLDLIYGTPGESDEDLLWSLDTAIESGVDHVSAYALVVEEGTALARRVRRGELAAPDDDVLAHRYELVDARLSQAGLSWYEVSNWSRPGGQCRHNLGYWDGGQWWGAGPGAHGYVGTTRWWNVKHPNAYAERLNAAALPVAGFEQLGSEALHTEDVLLKIRLRQGFPVDLLNSAERERAQGVVADGLLVRDGDRLVLTPRGRLLADGVVRTLLG

SEQ ID NO: 11671 - DNA, 1173 bp, Bdellovibrio bacteriovorus HD100
  CDS (1)..(1173): transl_table=11
atggcatttggcgtctatatccacattccctactgtatccagcgctgcacttactgcgattttgccacctatgagcaaagcaagattctgccgccggatcagtacgtcgaactcctgtttaaggaaattcgccagaagcaccgctattacactccccaaagtctggacaccatttactttggtggaggcacaccgagcctcatccctgcaaatctcattgtagcgattatcaaagagctgggtagatatggatttacaactagacctgacacggaaatcacgattgagatcaatccggcgactgtcagcaaagaaaaattgaagacctatctggataacggcatcaaccgtttcagtgtgggcgctcaaacctttgatgaccgcctgttgaaaatggttcatcgcgaacattcagcaaaacaaaccctggaaactctcgaccttcttcgggcccacggagtgaatttcagctttgatattctgtttgcactgccttcgcaaaccgtggaaggcctgcgccgggatgtggaaatcgccgttgaacagggggccaaacatatcagcccttattgtctgacagttcctgatggccatcctttgtcaaaaggccgcccgattgacgacgaacaagtcgagatgtttgacatcatcgccgatgagctgacccgcaaaggctttcaacagtacgaagtatcgaactttgccctgccgggctttgagtcccgtcataacatgctttattgggtcgacgaaccttattggagcctgggcctcagctcgcattcctattccaaagaatccgcctggggcacacgttactggaatattaactccatcaatgaataccagaaacagattctggcatttgacgggcaggaatttgattccccggtgcgccatctgccatcgaatcaggtggaagttctgcaaatgcatcaggctcttacagacttttgtcatacttcgatgcgtctgatgcgcggactcaatgtcgagcagctgcaagccaaattcccgcagaatgtcagtgaaaaggtcctgcaaatcatgaaaaatctggagcaaaaatcctggattcgctttgacaacgggcattggtcactgacgcgtgagggccttgtgctgagcaaccgtgttttccaggaactgactttccttcaagaagatctctaa

SEQ ID NO: 11672 - protein, 390 aa, Bdellovibrio bacteriovorus HD100
MAFGVYIHIPYCIQRCTYCDFATYEQSKILPPDQYVELLFKEIRQKHRYYTPQSLDTIYFGGGTPSLIPANLIVAIIKELGRYGFTTRPDTEITIEINPATVSKEKLKTYLDNGINRFSVGAQTFDDRLLKMVHREHSAKQTLETLDLLRAHGVNFSFDILFALPSQTVEGLRRDVEIAVEQGAKHISPYCLTVPDGHPLSKGRPIDDEQVEMFDIIADELTRKGFQQYEVSNFALPGFESRHNMLYWVDEPYWSLGLSSHSYSKESAWGTRYWNINSINEYQKQILAFDGQEFDSPVRHLPSNQVEVLQMHQALTDFCHTSMRLMRGLNVEQLQAKFPQNVSEKVLQIMKNLEQKSWIRFDNGHWSLTREGLVLSNRVFQELTFLQEDL

SEQ ID NO: 11673 - DNA, 1176 bp, Treponema denticola ATCC 35405
  CDS (1)..(1176): transl_table=11
ttgatgaaaaaggccggcctttatatacacatacctttttgtctccaaaaatgtaattattgcgattttttttctgttcgtgccggccggtttaaaaatatcttatcgggtcatttaagcccctttgttttaagattggctgaagatataaaaattcaagcggataagtattccataaacgaatgggataccgtctatataggcggaggaactccgtctcttctatctcctgatgatctttattatctttcatctcaaataccggctgctcaaaaaaatcctcatagagaatttaccgtcgaaattaatcctgaagatttaactaaagattttttgtccgctgcagtcagtggagggattaataggttttccgtaggaattcaatctcttaatgatgaggttttaagtgcctgtaagaggaggggatgtagaaaaatgagcctttcggcccttgagcttttacgcagtcaaaaaggtctaatcctttcttgtgatctaatcgcagggctaaataaacaaagcttaggtattttaaaagatgatatccaaaccttattacattttaaaccggagcatttttcactatacgccctctgttcaaatacaaagttaccgcccgaaaaagatgatgaaatagccgagttatggagctatggtaaggatattttggagaaaaacagctataataaatatgaagtgtctaatttttcatataagaacttatacaaaagtatacataatgagaaatattggaggttggaggattatataggggtaggcccgggagccttcggttcaattttttttgatagaaaagtcttgcatgctaacgcacatgctaacgcattgcgattttctgcaattaaaaatatagaaaaatggatgaccttaaaaaatagggatgaggtgtatgagtacgaaaccattgatgaaaaagaatttattgaagaagcttttatgatgggcttaagacttaccgagggtattgacagatctttttttaaatcgaggtttggtaaggatatttcggtatttgcaggaaaaactatttcaaaatggctggataggaatgaggccgttttgacggaaaaaagattttatttaacggaaaaaggatttctttacttgaatttatttttacaggaactatttcaagaaattgattccttattttaa

SEQ ID NO: 11674 - protein, 391 aa, Treponema denticola ATCC 35405
MMKKAGLYIHIPFCLQKCNYCDFFSVRAGRFKNILSGHLSPFVLRLAEDIKIQADKYSINEWDTVYIGGGTPSLLSPDDLYYLSSQIPAAQKNPHREFTVEINPEDLTKDFLSAAVSGGINRFSVGIQSLNDEVLSACKRRGCRKMSLSALELLRSQKGLILSCDLIAGLNKQSLGILKDDIQTLLHFKPEHFSLYALCSNTKLPPEKDDEIAELWSYGKDILEKNSYNKYEVSNFSYKNLYKSIHNEKYWRLEDYIGVGPGAFGSIFFDRKVLHANAHANALRFSAIKNIEKWMTLKNRDEVYEYETIDEKEFIEEAFMMGLRLTEGIDRSFFKSRFGKDISVFAGKTISKWLDRNEAVLTEKRFYLTEKGFLYLNLFLQELFQEIDSLF

SEQ ID NO: 11675 - DNA, 1137 bp, Bacillus cereus ATCC 10987
  CDS (1)..(1137): transl_table=11
gtgcaagctgcatatattcatattccgttttgtcagcatatttgtcactattgtgattttaataaagtgtttattgaacgccagccggtcgatcaatatttagagtatttagagaaagaaataataaatacagttcaaaaggtaccgtttgatagtatgaaaacgatttttgttggcgggggaactccgacagcattaaatatggaacagacaaagaaattattagatattataaatcgtcgtttacgtccgtttgccccgaattgtgaattaacatttgaagcgaatccaggtgatttgccgaaagagaaattaaatgtattgctagaaggtgaagtgaaccgaattagttttggggtgcaaacatttcgagatgaattgcttgagaaaattggacgtaagcatacgagagaagatgcgtttgtagcaattagagaagcgcaggaagtaggctttaaaaatataaatgtagatattatttatgctctgccaggacagacgatagaagatgtaaaagaaacattagacattgcttttacgcttggtgtacaacatttctcggcatattcattaattgtggaaccgaaaacagtattttataacttaatgaataaagggaaattaagacttccaggtgaagaccatgaagcgaaaatgtacgaaatggtaatggatgaaatggagaaacatggctatacccagtatgaaattagtaatttttcaaaaggtaataatgaaagtagacataatctcacatactggaataatgaagagtattatggatttggagctggagcgcatagttatgtaaatggagaacgtatccaaaatgtagggccgctcaagcaatatttcaataagattgatgaaaccggatttccgtatttagatgttcatgtggtgacggagaaagaaaaaatggaagaagagttgttcttaggactccgaaaaacaaaaggtgtatctaaaatagcgtttcaaaagaaatttaatatggaaatggatcaagttttcgcgaagcagttacaaaacaaccaagaacaaggattgcttgaagagagcgatggatatgttcgtttaacgcgaaaaggaaaattattagggaatgaagtattccaatcatttttgattgactaa

SEQ ID NO: 11676 - protein, 378 aa, Bacillus cereus ATCC 10987
MQAAYIHIPFCQHICHYCDFNKVFIERQPVDQYLEYLEKEIINTVQKVPFDSMKTIFVGGGTPTALNMEQTKKLLDIINRRLRPFAPNCELTFEANPGDLPKEKLNVLLEGEVNRISFGVQTFRDELLEKIGRKHTREDAFVAIREAQEVGFKNINVDIIYALPGQTIEDVKETLDIAFTLGVQHFSAYSLIVEPKTVFYNLMNKGKLRLPGEDHEAKMYEMVMDEMEKHGYTQYEISNFSKGNNESRHNLTYWNNEEYYGFGAGAHSYVNGERIQNVGPLKQYFNKIDETGFPYLDVHVVTEKEKMEEELFLGLRKTKGVSKIAFQKKFNMEMDQVFAKQLQNNQEQGLLEESDGYVRLTRKGKLLGNEVFQSFLID

SEQ ID NO: 11677 - DNA, 1323 bp, Strongylocentrotus purpuratus
  CDS (1)..(1323)
atgagatgtgaatcatctactcactcccttgcaacaaatggtggtcatgttgaacccaggagcaaggaagatcattatcctctttggatggaggaggcaagtctctatgttcactggccatactgtcagaaacgctgcacctactgcaatttcaacaagtacgtaaccccaaccatcgatcaaaaccggataagggcctgcttggtgagggaagcccagaccttgatcaagcttagtggtgtcaaacaggtcaactccatcttctttgggggagggacaccgagcctagcagaaccaagagtacttgaaggtgtcattgaagcagtcaaggaacttgttgccatgccaacggatgttgagatctccatggaagccaacccaacgtcagtagagatgaagaagttggaggatttcaaaagtgctggtgtgaatagactgtcccttggcatccaggcactcgacagcaatgacctgaaaacccttggtcgtgaacacaccgtcggccaatcactgacctgtatccacgaggccaggaaactcttcccagaccgcctcagcatcgacatcatctttggccgaccttctcaaacactgaattcttgggaagcagaactcgaacagattctacaagtatgtgacagccatatatcattgtaccaattgactcttgaaccaggcactttgttgtataagtttgaccaacagggagttctgcccatgccagatgcagatttaattgctgatatgtatgaaactgctgtggaaagactagctcaggctggtttccataggtatgaagtgtccaactttgcaaggactgtgagagcagagagcatccataacaaggcatactgggaagggaaacagtatattggggtaggccctggtgctcatggacgctttgttccaattacagaacagtttgcagataatgcagatccaagtggtaaaagaggatattcacaagaagccagaatccagactctggaaccagatacatggatgctggaggttgaaaagtatggagatgccaccaggaaacgtattccactgtccaatgtggatgtcctgagagagctcctcctgacaggtctacgcacccggcctggtatatccgaccagacgtggcagcagctcagtcctggagattgcctaagagatgtctttgggtctagtgactttatcaagtcagctagggagtctggtctgatggaacttgatgatgcgggattgaggtgtacccatcgtggactcaatgttctggatagcttgttgccagacttgactgaaatcctaaactctcactatgataggcaaagttga

SEQ ID NO: 11678 - protein, 440 aa, Strongylocentrotus purpuratus
MRCESSTHSLATNGGHVEPRSKEDHYPLWMEEASLYVHWPYCQKRCTYCNFNKYVTPTIDQNRIRACLVREAQTLIKLSGVKQVNSIFFGGGTPSLAEPRVLEGVIEAVKELVAMPTDVEISMEANPTSVEMKKLEDFKSAGVNRLSLGIQALDSNDLKTLGREHTVGQSLTCIHEARKLFPDRLSIDIIFGRPSQTLNSWEAELEQILQVCDSHISLYQLTLEPGTLLYKFDQQGVLPMPDADLIADMYETAVERLAQAGFHRYEVSNFARTVRAESIHNKAYWEGKQYIGVGPGAHGRFVPITEQFADNADPSGKRGYSQEARIQTLEPDTWMLEVEKYGDATRKRIPLSNVDVLRELLLTGLRTRPGISDQTWQQLSPGDCLRDVFGSSDFIKSARESGLMELDDAGLRCTHRGLNVLDSLLPDLTEILNSHYDRQS

SEQ ID NO: 11679 - DNA, 1224 bp, Prochlorococcus marinus str. AS9601
  CDS (1)..(1224): transl_table=11
atgaataagtttccaagaagtgcttatgtgcacattcctttttgccacagaagatgtttttattgtgattttgcagttattccattaggaaacaaagttgaaactttaaaaggttatggaagcaaaactgttcaagagtatttgcaatttttatttaaagaaatattgtcaattaaacataaatcacctctatcgacaatttatataggaggtggtacaccatcaattttagatcccagccaaatcaaagaattaattgatctttttaaagaaaattatggcattgactatggtgctgaaatcactatggagattgatccagctagttttactcaagatgatctttttggattcataaatgctgggataaatagatttagtctcggagtacaaagttttaataatcaggtacttcaaaagtcgggaaggcgtcatttgaaagaagatgcagaaaaatcttgtttctggttgaagagagaatatgattctgggttaataaaaagctggagtttagatttaatacaaaacttgccacttagtggatttaaagaatggcaagatgacttaaaaaaagcaataacattttcaccgccgcatctatctatttacgatttaaatattgaaaatggcactgtttttaagaaattagttaatttaggcaaattaaaactcccaagtgatgaagaagctgttagaaatagtgaatcaacacatttaattttaaaaaacttagggtattcaagatatgaaatctcaaactattgccttccgggacatcaatcgagacacaatagagtttattggagtggtttaggctggtggggttttggtcaaggctccactagttcaccttggggggaaaaattaactagaccaagagttagtaaagaatataaagaatgggtaattagacaatacgaatttaatttagattcatccttaactaataaggattttgtctacaaagaacttgatgagaaaataatgttgggattaagactcaaagagggtttagatatcaaaaaagtgtttcaagaacaaaactgggagaacaaaaaatttgaaagcaactttagtaaattgctcaaagaatgggaaaggtttcttgaaagtggacttttagtaagaaagggttatagattctttttaagtgagcctaatggcatggaactaagcaatcaagttcttgtttctatgtttaagtggtgggatgagattaattaa

SEQ ID NO: 11680 - protein, 407 aa, Prochlorococcus marinus str. AS9601
MNKFPRSAYVHIPFCHRRCFYCDFAVIPLGNKVETLKGYGSKTVQEYLQFLFKEILSIKHKSPLSTIYIGGGTPSILDPSQIKELIDLFKENYGIDYGAEITMEIDPASFTQDDLFGFINAGINRFSLGVQSFNNQVLQKSGRRHLKEDAEKSCFWLKREYDSGLIKSWSLDLIQNLPLSGFKEWQDDLKKAITFSPPHLSIYDLNIENGTVFKKLVNLGKLKLPSDEEAVRNSESTHLILKNLGYSRYEISNYCLPGHQSRHNRVYWSGLGWWGFGQGSTSSPWGEKLTRPRVSKEYKEWVIRQYEFNLDSSLTNKDFVYKELDEKIMLGLRLKEGLDIKKVFQEQNWENKKFESNFSKLLKEWERFLESGLLVRKGYRFFLSEPNGMELSNQVLVSMFKWWDEIN

SEQ ID NO: 11681 - DNA, 1224 bp, Prochlorococcus marinus str. MIT 9515
  CDS (1)..(1224): transl_table=11
atgaataagtttccaagaagtgcttacgtacatatacctttttgccatagaagatgcttctactgtgattttgcagttgtacctctaggtaacaatattgaaagtttaaatggctatggaagtaatactgtaaaagaatatttgacctatttagataaagaaatattgtcaatcaaacataaaactcctctttcaacaatttattttggtggaggaactccttcaattttagatcctattcagatcgaacatttaataaatctttttaaggagaattacagaattgactatggtgctgaaattacaatggaagttgatccagctagttttaatgaaggtgatcttcatggctttataaaagccggaattaatagatttagtcttggtgctcaaagttttaataatcagatacttgatcaagcgggaagaagacattgtggtgaagatgttgaaaaatcttgttcttggctaaagagagcacatgattatggtctcataaaaagttggagtttagatctgattcaaaatttaccaagtagtggttttaaagaatggcaagaagatttagaaaaatcgttaaagttctgccctccacacatatcaatttatgatttaagtattgaaaatggaacagtttttaaaaaattagttgatttaggcaaactatcattaccgaatgatgatgaatcttttaaaaatagtgaactgacacattttattttaaaagcatcaggttattcaagatatgaaatttctaattatgctctccctggtcatcaatcaaggcataatagagtttattggactggtctaggatggtggagttttggacaaggctctacaagttctccttggggggaaaagtttacaagaccaagaattagtaaagactataaaaagtgggtagctgagcaatgcgaaattaaattagagacttctctagaaaataaagaaaatatttataaagaattagatgagaaaatcatgttaggaatgagacttaaagagggtgtgaatatttataaattgataaacgaacacaattgggataaaaaaaagtctgaaatagctttaaaaaaattattaaaagaatgggaaagattcttagaaagtggtcttctaattaaaagaggtaatagattttttttgagtgatccaaaaggtatggaattaagcaatcaaattcttgtctcaatgtttagatggtgggacaaagttaactaa

SEQ ID NO: 11682 - protein, 407 aa, Prochlorococcus marinus str. MIT 9515
MNKFPRSAYVHIPFCHRRCFYCDFAVVPLGNNIESLNGYGSNTVKEYLTYLDKEILSIKHKTPLSTIYFGGGTPSILDPIQIEHLINLFKENYRIDYGAEITMEVDPASFNEGDLHGFIKAGINRFSLGAQSFNNQILDQAGRRHCGEDVEKSCSWLKRAHDYGLIKSWSLDLIQNLPSSGFKEWQEDLEKSLKFCPPHISIYDLSIENGTVFKKLVDLGKLSLPNDDESFKNSELTHFILKASGYSRYEISNYALPGHQSRHNRVYWTGLGWWSFGQGSTSSPWGEKFTRPRISKDYKKWVAEQCEIKLETSLENKENIYKELDEKIMLGMRLKEGVNIYKLINEHNWDKKKSEIALKKLLKEWERFLESGLLIKRGNRFFLSDPKGMELSNQILVSMFRWWDKVN

SEQ ID NO: 11683 - DNA, 1233 bp, Prochlorococcus marinus str. NATL1A
  CDS (1)..(1233): transl_table=11
atggtagccccaccaagaagtgcatatttgcatatacccttttgccataaaagatgtttttactgcgatttttcgattatccctttaggtgatagcgctcaagctccagatagtccagggataacttccattaacgcatatttggatttacttcatagagagatttcaatttcccctaaaggtcctgcattatcaacaatttatttgggcggtggaacaccttccttattaaaaaaaaatgaggtgggtgatttgttgcaaaatcttcaaagaaaatttggatttcaagatggtgcagagataactatggaggttgatccagcaacattttttgaaaacgacctgcatggatacatagggattggaattaatagatttagcttgggtgcgcaggcatttgatgacagtactttggcttcaattggtagaaaacataatcgctcacaattaattgaggcttgtgattgggtaaataatttatttaaaaaaggaatgctaagaagctggagtcttgatttgattcaaaaccttccaggattaaatttgtccaagtggattaaagagttggaacaagcggttcgtacggaggcccctcatttgtcaatttatgatttaactatcgaaccagatactgtttttggaagactacataaaaaaggaaagttgaatatcccaattgattctgaatctcaaaaaatagattttgaaaccactagattactaaaaagtagaggtttcgctagatacgagatttcaagttattcattgcctggtcatgcatctagacataatcgcatgtattggagtggttctggttggtggggctttgggatggggtcaacaagtgctccttggggggaaagattctctagaccaagaacaattgctggttataaaaaatggcttgaacagcaagagagtcagtcattagagaaaactttgtctattgaaaagtcaaaatcaatgccattggatgaacttctgatgattggtcttagaagacgggagggtattcatctggaggaacttgctaaaaatgctggatggacacaaaaaaaatgtgataagaatttaaaatcacttgagaaattttggctaaattctataaatgaaggatttctattaagacacaatggtagatattttttaagtgatcctaaggggtttcaaattagcaatcagattttgattcagatgttttcgtggtgggattcacttgatcgagatcagtag

SEQ ID NO: 11684 - protein, 410 aa, Prochlorococcus marinus str. NATL1A
MVAPPRSAYLHIPFCHKRCFYCDFSIIPLGDSAQAPDSPGITSINAYLDLLHREISISPKGPALSTIYLGGGTPSLLKKNEVGDLLQNLQRKFGFQDGAEITMEVDPATFFENDLHGYIGIGINRFSLGAQAFDDSTLASIGRKHNRSQLIEACDWVNNLFKKGMLRSWSLDLIQNLPGLNLSKWIKELEQAVRTEAPHLSIYDLTIEPDTVFGRLHKKGKLNIPIDSESQKIDFETTRLLKSRGFARYEISSYSLPGHASRHNRMYWSGSGWWGFGMGSTSAPWGERFSRPRTIAGYKKWLEQQESQSLEKTLSIEKSKSMPLDELLMIGLRRREGIHLEELAKNAGWTQKKCDKNLKSLEKFWLNSINEGFLLRHNGRYFLSDPKGFQISNQILIQMFSWWDSLDRDQ

SEQ ID NO: 11685 - DNA, 1311 bp, Prochlorococcus marinus str. MIT 9303
  CDS (1)..(1311): transl_table=11
atgagagaaggtcttgctgtgttgccacctcgcagtgcctatctgcacattcctttctgccatcggcgttgcttttattgcgatttcgctgtcgtgccgcttggcgatcatgccaatggggctaagggctcaggtagcgcctcgattcagtcttatctgcagctattgcaacgggagattgcgcttgtcaagcctgggccaacgctggccacggtgtacatcggtggcggaacaccatctctgctcagctcagctcagattggggctctgttggatcagctacggcaacggtttggcgttcagcttggtgcagaaatcacactggaaatggatccagctagtttcgatcaggcttacctagcggccgtattagcggctggtgtcaacagggtgagcttgggggggcagagtttcgatgatgcagtgctcgagacgcttgggcgccgtcatcgtcgccaccatttactggaggcgtgcggatggttgcatcaggctcatcagtgcggagagctgaaaagttggagtttggatctcatccagaacctgccaggacaggagttggtggcttggaagcaacagcttgttgaggccattgatactggttcacctcatctttcgatctacgatttatctgttgaaccaggcacggtatttgcttggcgtcagcggcggggggagttggatttgcccgatgatgatttagcagctgagcagatgcagaccaccagtgtcttgcttcgtcaggcaggatttggccgctatgaaatctccaattacgccttgccagggcacgcctcgcgccacaaccgcgtgtattggagtggggcagggtggtgggcgtttggtcagggtgcgaccagtgcgccctggggcgagaggctggctcgtccgcgcacaagggatggttactgcaactggattgaggttcaggaggtagaaggactggattcctctctcgttgcggctcaggcaagacccttacctctggatgaacagttgttggtgggtttgcgttgtcgtgagggagttgatcttgaggccctcagtagggcttggggctggactcatgagcagtgcaacgctctattgccgtcgttgcaggtgcgctggcaggcggcgttggatcggggctggttagagctgcatggacgacgttggcagctcagtgatcccgaggggatggccatcagcaatcaggttctggttgagatgttgttgtggtggcagtctctgcctgctgatgcagttgcttcacccaaccttgaagggcttctacgcacagctggcgaccttggatcaatggcggactga

SEQ ID NO: 11686 - protein, 436 aa, Prochlorococcus marinus str. MIT 9303
MREGLAVLPPRSAYLHIPFCHRRCFYCDFAVVPLGDHANGAKGSGSASIQSYLQLLQREIALVKPGPTLATVYIGGGTPSLLSSAQIGALLDQLRQRFGVQLGAEITLEMDPASFDQAYLAAVLAAGVNRVSLGGQSFDDAVLETLGRRHRRHHLLEACGWLHQAHQCGELKSWSLDLIQNLPGQELVAWKQQLVEAIDTGSPHLSIYDLSVEPGTVFAWRQRRGELDLPDDDLAAEQMQTTSVLLRQAGFGRYEISNYALPGHASRHNRVYWSGAGWWAFGQGATSAPWGERLARPRTRDGYCNWIEVQEVEGLDSSLVAAQARPLPLDEQLLVGLRCREGVDLEALSRAWGWTHEQCNALLPSLQVRWQAALDRGWLELHGRRWQLSDPEGMAISNQVLVEMLLWWQSLPADAVASPNLEGLLRTAGDLGSMAD

SEQ ID NO: 11687 - DNA, 1143 bp, Clostridium thermocellum ATCC 27405
  CDS (1)..(1143): transl_table=11
atgtttgatgtaaaggaactgggattgtatattcatgtaccgttttgcaaagcaaagtgtttttactgtgattttaattcctttgcctgcagggatgattttgtccctgcatattttaatgctcttaaaaaggaaatttcagcctattcggacatcatcaaaggatacaggataaagacggtattttttggagggggaacaccttcctacgttggagcgcataatatatatgaaattgtatcgcttttaaagcaaaagtttgacatggacggctgttttgaacttaccattgaagccaatcccggaactctggacgaagaaaagcttttggtgtacagggatgcgggaataaaccggctgagcatcgggcttcaggcatggcagaatcacctgcttgaaagcctggggagaattcatactgtggaagagtttgaagaaaattatcatcttgccgtaaaaactggatttgacaacataaatgtggatcttatttttgcaattccggggcagagttttgaggattgggcggagacaataaacaaagtggcagaacttaatccccggcatatttcctgctacagccttataattgaagaggatacggttttcggagcaaagttttccaaaggggagctttcttctgtggaagacgaacttgacaggaaaatgtactggtatgcagtggaaaaattaaggaccgtgggatataagcactatgaaatatcgaatttttcaaaagaaggatttgagtgcgcccacaatttgatttactggaaggaacaagaatacataggtttcggtgccggagcccattcttattttaacggtcaaagattcaacaatacttataatattgaggaatatgtgaaaataataaattccggaagacttccggtggaaaataagattgccataggaaggaaagatgaaatttccgaatttatgatgctgggattaagacttgttgaaggggtgagtatcagggaattttacgaaaggtttggagagaatgttttggaggttttcaaagagcagataaaaaatttgtccaaaagaggacttgttgcggttgaaaatggttttataaaacttacccgattgggcttggatcttgcaaatcaagcctttatggagtttgtgtga

SEQ ID NO: 11688 - protein, 380 aa, Clostridium thermocellum ATCC 27405
MFDVKELGLYIHVPFCKAKCFYCDFNSFACRDDFVPAYFNALKKEISAYSDIIKGYRIKTVFFGGGTPSYVGAHNIYEIVSLLKQKFDMDGCFELTIEANPGTLDEEKLLVYRDAGINRLSIGLQAWQNHLLESLGRIHTVEEFEENYHLAVKTGFDNINVDLIFAIPGQSFEDWAETINKVAELNPRHISCYSLIIEEDTVFGAKFSKGELSSVEDELDRKMYWYAVEKLRTVGYKHYEISNFSKEGFECAHNLIYWKEQEYIGFGAGAHSYFNGQRFNNTYNIEEYVKIINSGRLPVENKIAIGRKDEISEFMMLGLRLVEGVSIREFYERFGENVLEVFKEQIKNLSKRGLVAVENGFIKLTRLGLDLANQAFMEFV

SEQ ID NO: 11689 - DNA, 1179 bp, Mycobacterium sp. JLS
  CDS (1)..(1179): transl_table=11
gtgagcctccgaaccgcccccgtacgcgcgccggaactggccgccaccgcgggtcggccgttcggcctctacatccacgtcccgttctgcgcgacccgctgcggctactgcgacttcaacacctacacccccgcggaggcgggcggcgccaaccccgagggctggctggtcgcgatgcgccaagagttggcgctcgcggcccggacgttggggacgccgccgccggtgcggaccgtcttcgtcggcggtggcaccccgtcgctgctgggcggtgcgggcctgaccgcggtgctggccgcggtgcgcgagcacttcgaactggcgcccggcgccgaggtcaccactgaggccaacccggagtcgtcgggacccgaactgttcgacgcgctgctggccgccggctacacccgcgtctcgctcggtatgcagtcgacggcccgccatgtcctcaaggtgctcgaccggttgcattcccccggccgcgcggtggccgccgccggagaggcgcgcgcagccggcttcgggcacgtcaacctcgacctgatctacggcacgccgggggagactgacgacgacctgcgccggtccgccgacgccgcgatcggggcgggggtcgaccacgtgtcggcctacgcgctggtggtcgaggacgggacggccctggcccgccgggtgcggcgcggtgaggtgaccgcccccgacgacgacgtgctggcggcgcggtacgaactgctcgatgcgcggctgggcgaggccgggttcgactggtacgaggtgtcgaactgggccaggttcggcggcgagtgccgccacaacctcggctactgggccggcggcgaatggtggggggtcgggccgggggcgcacggcttcctgggcgacacccggtggtggaacgtcaggcatcccaacgcctatgccaccgcgctgggcgacggggcactgcccgtctccgatttcgaggtgctcgacccggccgcgcggcacaccgaggacgtgatgctgcgggtgcggctgcgcagcgggctgccgctggacatgctcaccgccgacgagcggagtcgcgtcggcaccgtggtggccgacggcctcgcggtggtcgacggggcggcgctggtcctcaccgaccgtggccgcctgctcgccgacggtgtggtgcgcacgctgctcgccgactga

SEQ ID NO: 11690 - protein, 392 aa, Mycobacterium sp. JLS
MSLRTAPVRAPELAATAGRPFGLYIHVPFCATRCGYCDFNTYTPAEAGGANPEGWLVAMRQELALAARTLGTPPPVRTVFVGGGTPSLLGGAGLTAVLAAVREHFELAPGAEVTTEANPESSGPELFDALLAAGYTRVSLGMQSTARHVLKVLDRLHSPGRAVAAAGEARAAGFGHVNLDLIYGTPGETDDDLRRSADAAIGAGVDHVSAYALVVEDGTALARRVRRGEVTAPDDDVLAARYELLDARLGEAGFDWYEVSNWARFGGECRHNLGYWAGGEWWGVGPGAHGFLGDTRWWNVRHPNAYATALGDGALPVSDFEVLDPAARHTEDVMLRVRLRSGLPLDMLTADERSRVGTVVADGLAVVDGAALVLTDRGRLLADGVVRTLLAD

SEQ ID NO: 11691 - DNA, 1176 bp, Clostridium difficile 630
  CDS (1)..(1176): transl_table=11
atgctaggactttatgtacatattccattttgtgtgaaaaaatgtaagtattgtgattttaattcttataaaatggacatagattcaaaaaaaagatatatagaagacttaaaaatagaaatggaattatatagtaataaattatataaagataataaatataaaaataaagaatgctgtagtctaaataaaaatgacaaaataacgagtatatttgtagggggaggtacacctagtatactaacctctgatgaaataagagaagtatttataagtataaaagaaatgtttgatatagatgagaatgcagaaataactatagagtgtaatcctgggacattaacattagaaaaattaaaaactatgaaagagattggcataaatagacttagtatagggctacaagctattcaagaaaagcatttgaactttataggaagaatacatacttatgaagaatttgagaaaaactataaagatgcattaagtgtaggttttaaaaatattaatatagatttaatgtacagtcttccaaatcaaactctatgtgattggaaggaaactcttgaaaaagttgtacacttaaatccaacacatatatcagcttattccctgatactagaagaaggaactgaactatacaatatgtatgaaagtaataaatttgaacttatagatgaaaatgtagatatagaaatgtatgagtatacaataaactacttaaagtcaaaaggatataatcaatatgaaatatcaaactactcaaaagaaggctataattgtgagcataatattttatattgggaatgtgaacattatatagggattggagcaggagcttctggctatattaatgagaacagatacaataatgtagaatctttagaagattatcatttaagtttggtaaaaagagaaaaaccaatacaagaaaatgaaattctttctgagaaagatatgatagaagaaaagatatttatggggcttagaatgaataaaggcataaaatttgaagattttaaaaaaaaatttggaatagattttagagagaagtataataagcaaatagaaatgctattagctagaaagcttataaatcagagctttgaaggtatacaattaactcaaaaaggaagagaaatatctaatagtgtatttatagaatttatggaataa

SEQ ID NO: 11692 - protein, 391 aa, Clostridium difficile 630
MLGLYVHIPFCVKKCKYCDFNSYKMDIDSKKRYIEDLKIEMELYSNKLYKDNKYKNKECCSLNKNDKITSIFVGGGTPSILTSDEIREVFISIKEMFDIDENAEITIECNPGTLTLEKLKTMKEIGINRLSIGLQAIQEKHLNFIGRIHTYEEFEKNYKDALSVGFKNINIDLMYSLPNQTLCDWKETLEKVVHLNPTHISAYSLILEEGTELYNMYESNKFELIDENVDIEMYEYTINYLKSKGYNQYEISNYSKEGYNCEHNILYWECEHYIGIGAGASGYINENRYNNVESLEDYHLSLVKREKPIQENEILSEKDMIEEKIFMGLRMNKGIKFEDFKKKFGIDFREKYNKQIEMLLARKLINQSFEGIQLTQKGREISNSVFIEFME

SEQ ID NO: 11693 - DNA, 1224 bp, Prochlorococcus marinus str. MIT 9301
  CDS (1)..(1224): transl_table=11
atgaataagtttccaagaagtgcttatgtgcacattcctttttgccacagaaggtgtttttattgtgattttgcagttattccattaggaaacgaagttgaaactttaaaaggttatggaagcaaaacagttcaggagtatttgcaatttttatataaagaaatattgtcaattaagcataaatcacctctatcgacaatttatataggaggtggtacaccatcaatcttagatcctgcccaaatcaaagaattggttaatctttttaaagaaaattatggaattgactatggtgctgaaattactatggaggttgatccagcaagttttactcaagatgatcttttcggattcataaatgctgggataaatagatttagtcttggagtacaaagttttaataatcagatacttcaaaagtcgggaaggcgtcatttgaaagaagatgcagtgaaatcttgtttatggttgaagagagaatatgataacgggttaataaaaagctggagtctagatttaattcaaaacttgccactaagtggatttaaggaatggcaagatgacttaaaaaaagcaattacattttcaccacctcatctatctatttacgatttaaatattgaagatggcactgtttttaaaaaattaattaatttaggcaaattaaaacttccaagtgatgaagaagcttttagaaatagtgaatcaacacatttaattttaaaaaaatcagggtattcaagatatgaaatctcaaactattgccttccgcgacaccaatcgagacataatagagtttattggagtggtttaggctggtggagttttggtcaaggttccactagttcaccttggggagaaaagtttactcgaccaagagttagtaaagaatataaagaatgggtaacaagacaagacgaatttaatttagattcatccctaactaataaggggtttgtttataaagaacttgatgagaaaataatgttgggattaagacttaaagagggtgtagatatcaaagaagtgtttaaagagcaaaactgggaaaacaaaaaattggaaagcaacttcagtaaattggttgaagaatgggagagatttcttgaaagtggactactagtaagaaaggggaatagattctttttaagtgagcctaatggcatggaacttagtaatcaaattcttgtctctatgtttaagtggtgggatgagattaactaa

SEQ ID NO: 11694 - protein, 407 aa, Prochlorococcus marinus str. MIT 9301
MNKFPRSAYVHIPFCHRRCFYCDFAVIPLGNEVETLKGYGSKTVQEYLQFLYKEILSIKHKSPLSTIYIGGGTPSILDPAQIKELVNLFKENYGIDYGAEITMEVDPASFTQDDLFGFINAGINRFSLGVQSFNNQILQKSGRRHLKEDAVKSCLWLKREYDNGLIKSWSLDLIQNLPLSGFKEWQDDLKKAITFSPPHLSIYDLNIEDGTVFKKLINLGKLKLPSDEEAFRNSESTHLILKKSGYSRYEISNYCLPRHQSRHNRVYWSGLGWWSFGQGSTSSPWGEKFTRPRVSKEYKEWVTRQDEFNLDSSLTNKGFVYKELDEKIMLGLRLKEGVDIKEVFKEQNWENKKLESNFSKLVEEWERFLESGLLVRKGNRFFLSEPNGMELSNQILVSMFKWWDEIN

SEQ ID NO: 11695 - DNA, 1245 bp, Herminiimonas arsenicoxydans
  CDS (1)..(1245): transl_table=11
atgatcccgatcaaaccgataggcaatgacgctgcattcaatctcgatcactcgcaacctgcacgcgccgccaccgcctacctccagcccggtgcgctcaatctgactgcgttgccgccgttatcgctgtacgtgcatttcccgtggtgcgtgaagaagtgtccgtactgcgacttcaattcgcatgaggcgacaggcggctttccggaagacgaatatctgtccgccttgcgtgccgatctggaacaggcattgccattgatctggggccgcaagatttacacgatcttcatcggtggcggtacaccaagcctgttgtcggcaaagggactggatcgcctgctctccgatattcgcactttgctgccgctggatggcgcagtagaaatcacgatggaagccaatccgggcactttcgaggcagagaagttcaagtcgtatcgcagcagtggcgtcaatcgtctgtcgatcggcatacagagcttcaatgccagacatctgcaagcgttagggcgtattcatgatggcgatgaggcgcgtcgtgcggtcgatatcgcgatggcgaatttcgaaaatttcaatcttgatttgatgtacgccttgccatcgcaaacactggaagaagcgcgacaggatgtgcagactgcaatcgcattcgcaccgccgcatctgtcgctgtatcacctgacgatggagccgaataccgtcttcgccaagtatccgccggtggtgccggacgacgatgccagtgccgacatgcaagacatgattgcggaagaaaccactgccgccggttatcagcactatgaagtctctgcctatgcgcagccgaagcgccaggcacggcacaaccttaattattggcagttcggcgattatctcggcatcggtgccggtgcgcacaccaaactatcgttcccgcatcgcgtgattcggcaggcgcgctacaagcagccgaagtcgtacatggaacagatgcgtcttggcaatccgatccaggaagagacggaaatcagccgttcagagcttggttttgagttcatgctcaacgcgatgcgtttgaccaatggcgtggaagtaaacctgtttgccgatcgcacaggcatgcccttgaatgctatcgagcgtgcattgcgtgcagcagaagacaaaggcttgttgtaccgcgaccataaaacgatcaagccgaccgagctgggccagcgcttcttgaatgatctgcagcaaatgtttttagccgaatag

SEQ ID NO: 11696 - protein, 414 aa, Herminiimonas arsenicoxydans
MIPIKPIGNDAAFNLDHSQPARAATAYLQPGALNLTALPPLSLYVHFPWCVKKCPYCDFNSHEATGGFPEDEYLSALRADLEQALPLIWGRKIYTIFIGGGTPSLLSAKGLDRLLSDIRTLLPLDGAVEITMEANPGTFEAEKFKSYRSSGVNRLSIGIQSFNARHLQALGRIHDGDEARRAVDIAMANFENFNLDLMYALPSQTLEEARQDVQTAIAFAPPHLSLYHLTMEPNTVFAKYPPVVPDDDASADMQDMIAEETTAAGYQHYEVSAYAQPKRQARHNLNYWQFGDYLGIGAGAHTKLSFPHRVIRQARYKQPKSYMEQMRLGNPIQEETEISRSELGFEFMLNAMRLTNGVEVNLFADRTGMPLNAIERALRAAEDKGLLYRDHKTIKPTELGQRFLNDLQQMFLAE

SEQ ID NO: 11697 - DNA, 1215 bp, Burkholderia vietnamiensis G4
  CDS (1)..(1215): transl_table=11
atgagccaggcggcgcaaaccggcgcgcacgtcgtcgcgacgttcacgtcgcccgggcaggtgcggctcacgtcgctgccgccgctcgcgctgtacgtgcattttccgtggtgcgtgcgcaagtgtccgtactgcgatttcaattcgcacgaatggaaaggcgagcgcttcccggaaaccgagtatctcgacgcgctgcgcgccgatctcgagcaggcgctgccgctcgtgtggggccgccaggtgcatacggtgttcatcggcggcggcacgccgagcctgctgtcggcggccggcctcgaccggctgctgtccgacgtgcgcgcgctgctgccgctcgacgcggatgccgagatcacgctcgaggcgaaccccggcacgttcgaagcggcgaagttcgcgcagtttcgcgcgagcggcgtgaaccgcctgtcggtcggcatccagagcttcaacgaaggtcatctgaaggcgctcggccgcattcacgacacggcgcaggcgcgcgcggccgtcgagatcgccgcgcagaccttcgacaacttcaacctcgacctgatgttcgcgctgcccaaccagacgctcgccgaatgccgcgccgacatcgagacggcgctgtcgtatgcgccaccgcatctgtcgctctatcacctgacgctcgagccgaacacgctgttcgcgaagttcccgccggtcgtgccggacgacgacgcgtcggccgacatgcaggaatggatccacgagcgcacggccgaggccggctacggccgctacgaggtgtccgcgtatgcgaagccgaatcatcagtgcaagcacaacctgaattactggcgcttcggcgactatctcggaatcggcgcgggcgcccacacgaagctgtcgttcccgaaccggatcctgcgccaggcgcgctacaagcatccggccaccttcatcgaacaggcgatggccggcacgccggtgcaggaagaacgcgaagtgggcgcgcgcgacctgccgttcgagttcatgctgaacacgctgcggctcgtggagggctttccggtgcacagcttcgccgaacgcaccggcctgccgatgggcacgatcgagccggcgctgaacgaagcggaacgccgtgggctcatcacgcgcgacttcacgcagatcgcgccgacgccgctcggccagcgctttctcaacgacctgcaggaattgttcctgcgcgacgattga

SEQ ID NO: 11698 - protein, 404 aa, Burkholderia vietnamiensis G4
MSQAAQTGAHVVATFTSPGQVRLTSLPPLALYVHFPWCVRKCPYCDFNSHEWKGERFPETEYLDALRADLEQALPLVWGRQVHTVFIGGGTPSLLSAAGLDRLLSDVRALLPLDADAEITLEANPGTFEAAKFAQFRASGVNRLSVGIQSFNEGHLKALGRIHDTAQARAAVEIAAQTFDNFNLDLMFALPNQTLAECRADIETALSYAPPHLSLYHLTLEPNTLFAKFPPVVPDDDASADMQEWIHERTAEAGYGRYEVSAYAKPNHQCKHNLNYWRFGDYLGIGAGAHTKLSFPNRILRQARYKHPATFIEQAMAGTPVQEEREVGARDLPFEFMLNTLRLVEGFPVHSFAERTGLPMGTIEPALNEAERRGLITRDFTQIAPTPLGQRFLNDLQELFLRDD

SEQ ID NO: 11699 - DNA, 1131 bp, Streptococcus pyogenes str. Manfredo
  CDS (1)..(1131): transl_table=11
atgtcaaaaaaacctacttcagcctatgtgcacattcctttttgcacacaaatttgttattattgcgatttttcaaaagtctttatccaaaatcaacctgttgatgcttatttgaaagccttgattcaagaatttgactcttatggcattcgagacctaaaaaccctttatattggaggaggtacgcctacagctatcactgctaaacagttggagtatctcctaaatcaccttgaacgaaacctcaatttagatgatcttgaagaattcacaattgaggcaaatcctggtgatttgacgccagaaaaaattacggtgcttcagaggtcagctgtcaatcggatttccttgggggtgcagacttttaataacaagcaattaaagcagattggccgtagccataatgaagaacaaatttatagcaccatcgctaatttaaaagctgcaggctttcacaatatttccattgatttaatttatgccttgccaggtcaaaccttagatcaagtcaaggaaaatgttgctaaagctttggcacttgatattccccaccttagtctttatagccttattttggaacatcacactgtttttatgaacaaaatgcggcgtggtaaacttaacttaccaacggaagacttggaagcagaaatgtttgagtatattatttcagaaatggaagctaatggctttgaacattatgaaatctctaattttaccaaaccaggttttgaaagtcgccataacttgatgtattgggataatgtggagtattttggatgtggtgcaggggcttcaggttaccttaatggcattcgttatcaaaatcgggtgcccatccagcattatcttaaagcggttgaagcaggaaatgctagactaaatgaagaagtgctgcgcaaagaggaaatgatggaagaggaactctttttaggattacgtaaaaagacaggagtctccatccagcggttccaagaaaaatttggtgtttcttttgaggagcgttatggaaatattgctagggagcttcaaaaccaaggactgcttgtcaaagatgacgcttttgtcagaatgactaaaaagggtcttttcttaggtgattctgttgctgagcggtttatattagattag

SEQ ID NO: 11700 - protein, 376 aa, Streptococcus pyogenes str. Manfredo
MSKKPTSAYVHIPFCTQICYYCDFSKVFIQNQPVDAYLKALIQEFDSYGIRDLKTLYIGGGTPTAITAKQLEYLLNHLERNLNLDDLEEFTIEANPGDLTPEKITVLQRSAVNRISLGVQTFNNKQLKQIGRSHNEEQIYSTIANLKAAGFHNISIDLIYALPGQTLDQVKENVAKALALDIPHLSLYSLILEHHTVFMNKMRRGKLNLPTEDLEAEMFEYIISEMEANGFEHYEISNFTKPGFESRHNLMYWDNVEYFGCGAGASGYLNGIRYQNRVPIQHYLKAVEAGNARLNEEVLRKEEMMEEELFLGLRKKTGVSIQRFQEKFGVSFEERYGNIARELQNQGLLVKDDAFVRMTKKGLFLGDSVAERFILD

SEQ ID NO: 11701 - DNA, 1158 bp, Bradyrhizobium sp. ORS278
  CDS (1)..(1158): transl_table=11
ttgagcagcgctgagagcgaagcgttcggagtctatgtgcactggccgttctgcctgtcgaaatgtccgtattgcgacttcaacagccacgtccgccacgccgccatcgaccaggaccgttttgctcgcgccttcgcgcaggagatcgccaacactgcggcgcgcaccgggccgcgcaccgtcagctcgatctttctcggcggcggcacgccgtcgctgatgcagccgcagaccgtcggcgccattctcgatgccatcggcaaacactggcacgtcgcccccgatgtcgaggtgtcgctcgaagccaacccgaccagcgtcgaggccacgcgctttgcaggctatcgtgcggccggcgtcaaccgtgtctcactcggcgtccaggcgatggacgatgcgtcgctgaagatgctgggacgactgcacaccgcagaagaagcgatgaaagcggtggcgatcgcgcggggcgcgttcgagcgctattccttcgatctgatctatgcgcggcccgaccagacggctgcgatgtggaccgaggagctgacgcgcgcgatcggtgaagccgccgagcatctgtcgctgtaccagctgacgatcgaggagggcacgccgttcttcgggctgcacgccgccggcaagctgaagacgctggacgagggcctggcgcgcacgctgtacgacgtcacgcaggagatctgcgcccgccatggcctgccggcctatgagatctccaaccatgcgcgtcccggcgcggagtgccggcacaatctcgtctactggcgcggccaggaatatgccggcatcggtccgggcgcgcacgggcggctcgatatcgagggcatccgccacgccaccgcgaccgacaagcggccggaagcctggctgatgcgggtcgagacaaacggccacggcgtgatgaccgacgacctgctcaacagcgaggagcgcgccgacgaattcctgctgatggggctacgcctgagcgagggcatcgatccccgacgctatgccgcgatcgccggacgtacgctcgatccgcgccgcattgcgctgttgcgcgaggagggcgccatcgccgtggagccggacggccggctgcgcgtcacccaggacggcttccccgtgctcgacgccgtcgtcgccgatctcgccgcgtga

SEQ ID NO: 11702 - protein, 385 aa, Bradyrhizobium sp. ORS278
MSSAESEAFGVYVHWPFCLSKCPYCDFNSHVRHAAIDQDRFARAFAQEIANTAARTGPRTVSSIFLGGGTPSLMQPQTVGAILDAIGKHWHVAPDVEVSLEANPTSVEATRFAGYRAAGVNRVSLGVQAMDDASLKMLGRLHTAEEAMKAVAIARGAFERYSFDLIYARPDQTAAMWTEELTRAIGEAAEHLSLYQLTIEEGTPFFGLHAAGKLKTLDEGLARTLYDVTQEICARHGLPAYEISNHARPGAECRHNLVYWRGQEYAGIGPGAHGRLDIEGIRHATATDKRPEAWLMRVETNGHGVMTDDLLNSEERADEFLLMGLRLSEGIDPRRYAAIAGRTLDPRRIALLREEGAIAVEPDGRLRVTQDGFPVLDAVVADLAA

SEQ ID NO: 11703 - DNA, 1377 bp, Dichelobacter nodosus VCS1703A
  CDS (1)..(1377): transl_table=11
atgactcattattttgatgcggctttgattgaaaaataccgcatgacgggtccgcgttacacttcatatcccaccgccgtgcaatttcatgaacattttggtgaacaagattatcttgcgcagctgcaagaaagtaatcagcataaaaaagatttatcgctttatattcatatccctttttgcacacacgtttgctactactgcgcctgcaataaaatcattacacaaaaacgcgaacacgccgccgcatatttggattatttgcgccgcgatatcgaacggcaaagcgcgcacattgatgcttcacgaaaagttgtgcaactgcatttaggcggcggcacgcccacatttctcacgcccgaacaacaatctgatttaatggcatttttatacgatcattttacttttgcttccgcggaagaaagcgaattatccattgaaattgatccgcgcacggttgataaagcctatttagcgcatttgcggcaattgggttttaatcgcttgagttttggtattcaagatacgcaggaagccgtgcaaaaagtggtgaaccgtgtgcagccgctcgaagaaattgcgcaattgatgaatgaagcgcgcgctttggcttatcaatcgctttccgttgatttaatttatggattaccgctgcaaacgccggcgcgttttgcaaaaacgcttgaagatgttgtgcgtttaaatccggatcgtttagccgtttataactatgcgcatatgccaactttattcggcgcgcaaaaacaaattaatgccgacgatttgcccgacagtcacagcaaactagccattttagaaaccacgattaatcaattaaccggcgcgggttatgaatttatcggcttggatcattttgccaaacccgaagatacgctcgttacgcatcaaaaaaacggcactttgtatcgcaactttcaaggttattccactttttcccaatgcgatttactcggttttggcatcagcgccatttcgcaagtgcatcattgctacagtcagcatgaaaaatcccgtcaaaactattaccaagcgcttgatgagcaacgtttgcccgtcatgcgcgggattatgctcacgcttgacgatcgcatgcgccgcgatgccattatgcaaattatgtgcaatttgcggctggatttagcacaattaagtatccattatcagcgagatgcgcaaaaatgtttcgcgcccgaatggcaacagttaacgacatttgcggacgacgcattaattgaactgacggcagaaactttaatcgttttgccggtcggtcgtttgtttattcgtaatattgctatggtttttgaccgctatttatcgccgcaaaatccgcatcgtttttcgcaagtgatttaa

SEQ ID NO: 11704 - protein, 458 aa, Dichelobacter nodosus VCS1703A
MTHYFDAALIEKYRMTGPRYTSYPTAVQFHEHFGEQDYLAQLQESNQHKKDLSLYIHIPFCTHVCYYCACNKIITQKREHAAAYLDYLRRDIERQSAHIDASRKVVQLHLGGGTPTFLTPEQQSDLMAFLYDHFTFASAEESELSIEIDPRTVDKAYLAHLRQLGFNRLSFGIQDTQEAVQKVVNRVQPLEEIAQLMNEARALAYQSLSVDLIYGLPLQTPARFAKTLEDVVRLNPDRLAVYNYAHMPTLFGAQKQINADDLPDSHSKLAILETTINQLTGAGYEFIGLDHFAKPEDTLVTHQKNGTLYRNFQGYSTFSQCDLLGFGISAISQVHHCYSQHEKSRQNYYQALDEQRLPVMRGIMLTLDDRMRRDAIMQIMCNLRLDLAQLSIHYQRDAQKCFAPEWQQLTTFADDALIELTAETLIVLPVGRLFIRNIAMVFDRYLSPQNPHRFSQVI

SEQ ID NO: 11705 - DNA, 1149 bp, Dichelobacter nodosus VCS1703A
  CDS (1)..(1149): transl_table=11
atgcttgatccggctcgtattccgctgtcgctttatattcatattccttggtgtttgcgaaaatgtccgtattgtgattttaattcacatgctcgcaccgccgatgacaacgaatcggcatatgttcatcatttattgcaagatttttccctcgattatgacggaagaccgttgcacagcgttttcatcggcggcggcacgcccagcctttttcacagtgaacagattgctttattgttagacgaattaaggcagcgcgctgattttaccgatgattgtgaaattacgttggaagccaatcccgcaacttttgagcaacaaaaatttagcgcttatcggcaaagcggcattaatcgtttatcgttgggcattcaaagcctgcagccgcggcatttgcagcaattagggcgtgtgcacagcgctgatgaagcaaaacaggcattgcgtcttgcgcaatcgatgaattttcatcaaattaacactgatgtgatgtttgctttgccggcgcaaacgctcgacgaggcgcgcgctgatttacaaaaaatcatagcgttaggcgcggaacatatcagttggtatcaattaacgattgaaccaaataccgctttttttgtgcgaccgcccaaagcgttgcccgattcggatcaacaagtggaattgtatgaaaacggcagcgcttttttgcgcgcacagggttttaatcagtatgaagtgagcgcgtggacgaaaaccacgcccgccaaacataatatgaattactggcttttcggcgattatctcggcatcggcgccggtgctcacagcaaaatcacgatagccgacggcaaaattatgcggcaaagtaaatatcgcgcgccggcggcgtatcaagcgcgcagcggtcgcaatcgtaatccttaccaagataattgccgccgcgtgccaaaaacggagcaggcgtttgaagtaatgatgaatggattgcgtttgcgcgcgggttttcctaccgcttttttggcgcaacgaagcgatttggatttatccgatctgatgccaacattgctgccgttaattgaccgcggtttaatcgatgctgatattgcagagtgcattgtgacgacgccgcgcggtttttctttattaaataatgtattagaagcatttttgtaa

SEQ ID NO: 11706 - protein, 382 aa, Dichelobacter nodosus VCS1703A
MLDPARIPLSLYIHIPWCLRKCPYCDFNSHARTADDNESAYVHHLLQDFSLDYDGRPLHSVFIGGGTPSLFHSEQIALLLDELRQRADFTDDCEITLEANPATFEQQKFSAYRQSGINRLSLGIQSLQPRHLQQLGRVHSADEAKQALRLAQSMNFHQINTDVMFALPAQTLDEARADLQKIIALGAEHISWYQLTIEPNTAFFVRPPKALPDSDQQVELYENGSAFLRAQGFNQYEVSAWTKTTPAKHNMNYWLFGDYLGIGAGAHSKITIADGKIMRQSKYRAPAAYQARSGRNRNPYQDNCRRVPKTEQAFEVMMNGLRLRAGFPTAFLAQRSDLDLSDLMPTLLPLIDRGLIDADIAECIVTTPRGFSLLNNVLEAFL

SEQ ID NO: 11707 - DNA, 1137 bp, Dehalococcoides sp. BAV1
  CDS (1)..(1137): transl_table=11
atgacccaaaacagccttgctttgtatatgcatttccctttttgcctgaaaaaatgcggatactgctcgtttatttcttatccggacaaactggagagtgtgccggattatgtaaactgccttaagaaagaaattaaactacggacagaggggctttgcttgcacagcctttattttggcggaggaacgcccagccttttatcaccttcgcaggtggcagatatcatgagtagtatacaaacagtatcgcatcttttgcccggtgcagagattacatttgaagctaatccgggtactcttagcctgccctatcttaaacagttaagcgggctcggcatcaaccgtttgagcttgggtatccaaagtttttcagatgcagagctgacaatgctgggccgtttgcatgacgctcaacaagcacggcatatatacacacaagccagaatctccggttttgacaatataaatcttgatcttatttatggtttaccccattccaccctgctttcttttaaagccaatctgagtgaaatgctgaaacttgagccggaacatatttcactttacggtctcactctggaggaagacacccccatgtatcttcaggtgcaaaaaggattattgccctttatggattccgaaattgcggctgaccagtatcagctggctgaagaaatgctggagagtgccggctaccatcactatgagatttccaactgggctaaacagggctatgagagccgtcataaccttacttactggcaaaacaggccttatctgggtttgggtgtggctgggcattccttttttcagaattggcgtacagctaataccatagaccttgatgaatatttactttgctggcaaaataattccccgccgtcaccgtctgaaaatataaatgtagatttagctaatcagctggctgaaactataatattggggcttaggctggataagggtgtaaccgctgaagatattgaagcccgtttcgggacgtgtgtgatggatatgtattatccccagattcaagaatgtgttgaattggggcttttggaagagcatgatggctgtatccgcctgacccccagaggcaggttgctctctaacgaggtattctggcgtttcttgccttaa

SEQ ID NO: 11708 - protein, 378 aa, Dehalococcoides sp. BAV1
MTQNSLALYMHFPFCLKKCGYCSFISYPDKLESVPDYVNCLKKEIKLRTEGLCLHSLYFGGGTPSLLSPSQVADIMSSIQTVSHLLPGAEITFEANPGTLSLPYLKQLSGLGINRLSLGIQSFSDAELTMLGRLHDAQQARHIYTQARISGFDNINLDLIYGLPHSTLLSFKANLSEMLKLEPEHISLYGLTLEEDTPMYLQVQKGLLPFMDSEIAADQYQLAEEMLESAGYHHYEISNWAKQGYESRHNLTYWQNRPYLGLGVAGHSFFQNWRTANTIDLDEYLLCWQNNSPPSPSENINVDLANQLAETIILGLRLDKGVTAEDIEARFGTCVMDMYYPQIQECVELGLLEEHDGCIRLTPRGRLLSNEVFWRFLP

SEQ ID NO: 11709 - DNA, 1299 bp, Synechococcus sp. WH 7803
  CDS (1)..(1299): transl_table=11
atgtccgcacccgcgccccgaagcgcctatctccatattcctttttgccatcgccgctgcttctactgcgatttcgcagtcgtcccgcttggtgatcgtgtgcaagcgctggatggtcctggcagcggatccattgcgctctacctcgacagcattctccaagagatccgcctgtcgccagcgggtccccccctggccacggtgtacatcggtggcggcaccccgtccctgctgacggcggatcaggtgggaggcctgctcgcggccctgactgaccgtttcggcctgcaacaaggggcggaggtcacgttggagatggatccagccagcttcgcgctcgacgacctttcggccctggttcgccacggtgtgaaccgggtgagtcttggtgggcagagtttcgatgatggtgtgctcgctgctctggggcgccgacatcgccgcaaggatgtgctggaggcctgccgctggatgcagcgctttcttcaggatggacgtctacgcagctggagcctggatctgatccgcaatctccccgaccaggatgatgcggcctgggctgcaaccctttcggaggccgtggcgctgcaggcgccccacctttcgatctacgacctcagcattgagcctggcaccgtgttcgccaggcgcgagcagcagggcacgctcaggcttcccgatgaggacggtgccgccgatcgaatcgcgttcacgacgcagcgtcttttcgaggcggggtactgccgctacgagatttccaattactcctggccggggcatgcctcgcgccacaaccgcgtgtactggagtggtgcggggtggtgggcctttggccttggcgccaccagtgccccctggggtgagcgattcgccaggccgcgcatccgcgaggcctatgccctgtggctcgagcagcaacagcaggaagggccccatacctcgctgctgcgggagagcgcacagccgctcagcctcgaagaccggctgttggtggggctacgccgccgggagggggtggatttgctgcagcaggccttggccagtggttggagtgcccagcgctgtgccgtgcatcttccagagctggaacagcgttggcaggtgttcctcgctcagggcttgctggagcaacaagggcgccgttggcgactcacagacccccttggtatggccctcagcaatcagatcctggtggaggttgtgcagtggtgggatcggctcccggctgtcgctgttcctccagccagcaccgaagcgcctcaatgcccagagtcctcccctcaaggcgggcaggactga

SEQ ID NO: 11710 - protein, 432 aa, Synechococcus sp. WH 7803
MSAPAPRSAYLHIPFCHRRCFYCDFAVVPLGDRVQALDGPGSGSIALYLDSILQEIRLSPAGPPLATVYIGGGTPSLLTADQVGGLLAALTDRFGLQQGAEVTLEMDPASFALDDLSALVRHGVNRVSLGGQSFDDGVLAALGRRHRRKDVLEACRWMQRFLQDGRLRSWSLDLIRNLPDQDDAAWAATLSEAVALQAPHLSIYDLSIEPGTVFARREQQGTLRLPDEDGAADRIAFTTQRLFEAGYCRYEISNYSWPGHASRHNRVYWSGAGWWAFGLGATSAPWGERFARPRIREAYALWLEQQQQEGPHTSLLRESAQPLSLEDRLLVGLRRREGVDLLQQALASGWSAQRCAVHLPELEQRWQVFLAQGLLEQQGRRWRLTDPLGMALSNQILVEVVQWWDRLPAVAVPPASTEAPQCPESSPQGGQD

SEQ ID NO: 11711 - DNA, 1098 bp, Thermus thermophilus HB27
  CDS (1)..(1098): transl_table=11
ttggctagcctctacgtccacgtccccttctgccccaccctctgcccctactgcgacttccacgtggtccgccgggggccggggtgggtggaggcctacttaaggcgtctgaaggaagaggcccaagccctccacgagcgcttccccgagcccctacgcaccctctacctgggcggggggacgccgagctacctaagggaccgggagcttgtggccctcttccaaagccttccctgggcgctcgcccaaggcgccgaggtgaccctggaggccaaccccgggaccctctcccctggccgcctccggctcctccaagacctcggggtgaaccgcctctccctaggggtgcagagcttccaggacccggtcctcaagttcctgggccgggcccacgggaggaagggggcgcttagggcggtggagatggccctggaatggggctttcgcgtctccatagacctcatcctgggccttcccatgcaggacgtggaagcggacctgaaggaggcggcccgcctcggggtggggcacgtctccgcctacaccctccaggtggagaagggcacccccttcgccctcctgggcctaaaggaggaccccgagcgggaggcctgggccatggagcgggcggaggaggtgctgggagaggcggggcttttccggtacgaggtctccaacttcgccagggaaggggaggaggcccggcacaacctcgtctactggcgggcgggcttctggctcgccctgggccccgcggccacggggcagtacccgggggaagggggggcctacgccctgaggcgcacggctccgccccttccccgctggctccgaggggaggccccgaaggaggaggccatttccccgctggagcacgccaaggaaagcctcatgctgggcctaaggctccgggaaggggtggacgtgggggccgtggaggagaggacggggctcgccctcttccccctcctccaagggagggcggaggaactcgcccaagaaggcctcctccaggtccgggggaaaaggcttcttcccaccccgaaggcctttcccctcctccaccgggtggtcctggccctctgggaggcgctttag

SEQ ID NO: 11712 - protein, 365 aa, Thermus thermophilus HB27
MASLYVHVPFCPTLCPYCDFHVVRRGPGWVEAYLRRLKEEAQALHERFPEPLRTLYLGGGTPSYLRDRELVALFQSLPWALAQGAEVTLEANPGTLSPGRLRLLQDLGVNRLSLGVQSFQDPVLKFLGRAHGRKGALRAVEMALEWGFRVSIDLILGLPMQDVEADLKEAARLGVGHVSAYTLQVEKGTPFALLGLKEDPEREAWAMERAEEVLGEAGLFRYEVSNFAREGEEARHNLVYWRAGFWLALGPAATGQYPGEGGAYALRRTAPPLPRWLRGEAPKEEAISPLEHAKESLMLGLRLREGVDVGAVEERTGLALFPLLQGRAEELAQEGLLQVRGKRLLPTPKAFPLLHRVVLALWEAL

SEQ ID NO: 11713 - DNA, 1158 bp, Candidatus Protochlamydia amoebophila UWE25
  CDS (1)..(1158): transl_table=11
atgctaacgattggtaaccccacttcatcggaaatcagtctttattttcatatccctttttgtacaaaaaagtgtaattactgccacttttatgtccttcctgatcaagagcctttaaaaaatcaattactgattgctttaaaattagagtggaagcgtatgcttcctctcttaataaataaatgtattatctctatttattttggtgggggaactccttccttattcagcccagatcgcattcaggctgtactagaaacgatacatcaagatctcccctttgactactcaacaactgaaattactttggaggtaaatcctgaaaatggttatttctcccttatgcgagcttacgctcaggcgggaattaatcgagtcagcatcggcattcaaactctagatcaagaacttcttcatctattaggccgcttgcatagtccttccttagcaaaacgatccgttttagaaacatatgaagcaggcatcaccaatctttctatcgacctcatgtacgatttaccgcgtcagtccctcaaacattgggaaatgactttacaagagattggtacccttcctctatctcatctttctttatacaatctcacaatcgaaccttttacagtcttttttaaaaaacaaaattttgtacgtcccctattacccgatgaagagaccagtttagccatgtataatgctgccatcgagcacttaactagttttggattagaacaatatgaaatctccgcttttgcaaagccaggattctattctaaacacaatacaggctactggttagcacgccccttcataggatttggtccctctgcatttagttattgggaaggaaaacgttttcgcaatgtcgctaacttaaaaaaatatcatcaatcattaactcttaatcaatccccgattgattttaatgagcaattagatcccattgcccatttaaaggaattgtttgtcattcaaattcggctctgccaaggaatttctatcgcagatttcgagcaaaggcacgggaaactatcacaagaaacgttagaaacaatagaacaattcattttggatggttttctcacccaatcgaatcaaattttaagcttaacaaaaaaaggtgttcttttttatgacacagtggcttctgaattgatttag

SEQ ID NO: 11714 - protein, 385 aa, Candidatus Protochlamydia amoebophila UWE25
MLTIGNPTSSEISLYFHIPFCTKKCNYCHFYVLPDQEPLKNQLLIALKLEWKRMLPLLINKCIISIYFGGGTPSLFSPDRIQAVLETIHQDLPFDYSTTEITLEVNPENGYFSLMRAYAQAGINRVSIGIQTLDQELLHLLGRLHSPSLAKRSVLETYEAGITNLSIDLMYDLPRQSLKHWEMTLQEIGTLPLSHLSLYNLTIEPFTVFFKKQNFVRPLLPDEETSLAMYNAAIEHLTSFGLEQYEISAFAKPGFYSKHNTGYWLARPFIGFGPSAFSYWEGKRFRNVANLKKYHQSLTLNQSPIDFNEQLDPIAHLKELFVIQIRLCQGISIADFEQRHGKLSQETLETIEQFILDGFLTQSNQILSLTKKGVLFYDTVASELI

SEQ ID NO: 11715 - DNA, 1158 bp, Listeria monocytogenes str. 4b F2365
  CDS (1)..(1158): transl_table=11
atgataaatacgaaccaatcgagtaaggaaagttccgcggtatatatccatattccgttttgcgaacatatttgctattactgcgattttaataaagtattcttagaaggacaaccggtcgacgaatacgtagatttactaattaaagaaatggaattaactgctgcaaaaggacctattgcgccagtcgacactgtatttgttggtgggggaacgcctacaaccctgaacgaagcgcaaattgcgagactttgcacagccatccataacattctacctctaaaaaaagatatcgaattttcctttgaagccaacccaggagatctttcgctatctaaattacaagccatgcaagatcatggcgttaatcgtatcagtatgggagttcaaagcttcaacaatgaacttctcaaaaaaattgggcgcattcatactgtaaaagatgtttatcaatctgtggaaaatatgcgcaaaatcggatttgaaaatgtaagcattgatttaatctttagcttgcctggtcaaacagaagcagatttccaagatacattaaaacaagcgcttgaccttgatttaccgcattactccgcctattcattaatcatcgaaccaaaaacgattttttataaccttatgcaaaaaggaaagcttttcttacctggtcaagatgccgaggcaaatatgtacgatttacttctcaacgaaatggaaaagcacggtcgtaaacaatatgaaattagtaattttgccaaagaaggatttcagagtaaacacaatatcacttattggagcaatgaacattactacggatttggcgccggagcacatggctatgttggcaatacacgttatagtaatttcggaccaatcaaaaaatacatggaaccactccaaaaaaatatactcccaacattccaacaaaaagagcttacattaaaagaaaaaatggaagaagaaatgtttttagggcttagaaaagtggacggcgtagataaaaaacatttcaaacaaaaattcggccaagatttagatgcaacatttgcgaatgctattcaaaaaacaaccgcaaaaggctggctcgaaaataacgaagaaaatgtggcacttacaagaagtggaagatttttaggaaataatgtttttcaagaatttctctaa

SEQ ID NO: 11716 - protein, 385 aa, Listeria monocytogenes str. 4b F2365
MINTNQSSKESSAVYIHIPFCEHICYYCDFNKVFLEGQPVDEYVDLLIKEMELTAAKGPIAPVDTVFVGGGTPTTLNEAQIARLCTAIHNILPLKKDIEFSFEANPGDLSLSKLQAMQDHGVNRISMGVQSFNNELLKKIGRIHTVKDVYQSVENMRKIGFENVSIDLIFSLPGQTEADFQDTLKQALDLDLPHYSAYSLIIEPKTIFYNLMQKGKLFLPGQDAEANMYDLLLNEMEKHGRKQYEISNFAKEGFQSKHNITYWSNEHYYGFGAGAHGYVGNTRYSNFGPIKKYMEPLQKNILPTFQQKELTLKEKMEEEMFLGLRKVDGVDKKHFKQKFGQDLDATFANAIQKTTAKGWLENNEENVALTRSGRFLGNNVFQEFL

SEQ ID NO: 11717 - DNA, 1140 bp, Bacillus anthracis str. Sterne
  CDS (1)..(1140): transl_table=11
ttggtgcaagctgcatatattcatattccgttttgtcagcatatttgtcactattgtgattttaataaagtgtttattgaacgccagccggtggatcaatatttagagtatttagagaaagaaataataaatacagttcaaaaggtaccgtttgatagtatgaaaacgatttttgttggcgggggaactccgacagcattaaatatggagcagacaaagaaattattagatataataaatcgtcgtttacgtccgtttgccccgaattgtgaattaacatttgaagcgaatccaggtgatttgccgaaagagaaattaaatgtattgctagagggtggagtgaaccgaattagttttggtgtgcaaacatttcgagatgaactgcttgagaaaattgggcgtaagcatacgagagaagatgcgtttgtagcaattagagaagcgcaggaagtgggcttcaaaaatataaatgtagatattatttacgctctgccagggcagacgatagaagatgtgaaagaaacgttagatattgcttttacgcttggtgtacaacatttctcggcatattcattaattgtggaaccgaaaactgtgttttataacttaatgaataaagggaaattaagacttccaggggaagaccatgaagcgaaaatgtatgaaatggtaatggatgaaatggagagacacggctatacccagtatgaaattagtaatttttcaaaaggtgataatgaaagtaggcataatctcacatactggaataatgaagagtattatgggtttggagctggagcgcatagttatgtaaatggagaacgtatccaaaatgtaggaccgctcaaacaatatttcaataaaatcgatgaaaccgggtttccgtatttagatgttcatgtggtgacggagaaagaaaaaatggaagaagagttgttcttaggtcttcgtaaaacaaaaggtgtgtcaaaaatggcgttccgcaataaatttaatgtggaaatgaatcaagttttcgcgaagcagttacaaaacaaccaagaacaaggattgcttgaagagagcgatggatatgttcgtttaacgcgaaaagggaaattattagggaatgaagtattccaatcatttttgattgactaa

SEQ ID NO: 11718 - protein, 379 aa, Bacillus anthracis str. Sterne
MVQAAYIHIPFCQHICHYCDFNKVFIERQPVDQYLEYLEKEIINTVQKVPFDSMKTIFVGGGTPTALNMEQTKKLLDIINRRLRPFAPNCELTFEANPGDLPKEKLNVLLEGGVNRISFGVQTFRDELLEKIGRKHTREDAFVAIREAQEVGFKNINVDIIYALPGQTIEDVKETLDIAFTLGVQHFSAYSLIVEPKTVFYNLMNKGKLRLPGEDHEAKMYEMVMDEMERHGYTQYEISNFSKGDNESRHNLTYWNNEEYYGFGAGAHSYVNGERIQNVGPLKQYFNKIDETGFPYLDVHVVTEKEKMEEELFLGLRKTKGVSKMAFRNKFNVEMNQVFAKQLQNNQEQGLLEESDGYVRLTRKGKLLGNEVFQSFLID

SEQ ID NO: 11719 - DNA, 1200 bp, Bartonella quintana str. Toulouse
  CDS (1)..(1200): transl_table=11
atgaatgaaccttttggcatctatattcattggcctttttgcgctgccaaatgtccttattgtgactttaattcgcatgttcgcgtccatggtgttgatcaaccacgtttcgtaaaagcttttaaacgtgaaatagaaacacaataccataaaataggtccacgtcatattacgagtatttttatcggtgggggaaccccttcgcttatgacacctcaaactgttgatgccttgttgcaagcactcgcaaaaacgtggacggtcgatgataaagctgaaatcacactggaagccaacccatccagtgtggaagcaaaccgtttttatggataccgggcagcaggagttaaccgtttgtccttaggtgtacaagcactcaatgacaaagcactacgacaacttggccgtctccatgatgtaaaacaagctcttcatgctattgttttagcgcgggaaatttttccacgtctatcctttgatttaatttatgcccgtcctgaacaaacactcgaacaatggaaatgtgaactttttcaagccattgatttagcagcagaccatctttctctttaccaactcactattgaggaaggaactgcttttaaacggctccatgccgcaggaagactcatcctccccgaatcggaactcgcagcaaatctgtatcatctcacgcaagaaatgactgcactgcatggacttccagcctatgaaatctcaaatcacgcaatccctggtgccgaatcagcacacaatcttctttattggcgttatcacgaatatgcaggctttggtccaggagcacatggacgattcatagagcgttcaacgaatcatttttctccctttttaaaatcatcttcctctcaaattaaaaaccgtgaacgttctgtcacaataaatgaaaaacatcctgaatattggcttgaattggtagaaacgaaagggcatggctgtgtcgaaacagaacaattgaccccgctgcaacaagcaaacgaaatgctcctcatgggtttacgcctttgcgaaggtttggatcttacacgctatgaaactttaacctctaagagcttaccaatagaaaaacttatcaacttaaaacatcaagggctggtagaaacgataggacaccaacgcttaaaagccacagccaaagggcgcatcctacttgaccatatcatcagccaactcgcaaactaa

SEQ ID NO: 11720 - protein, 399 aa, Bartonella quintana str. Toulouse
MNEPFGIYIHWPFCAAKCPYCDFNSHVRVHGVDQPRFVKAFKREIETQYHKIGPRHITSIFIGGGTPSLMTPQTVDALLQALAKTWTVDDKAEITLEANPSSVEANRFYGYRAAGVNRLSLGVQALNDKALRQLGRLHDVKQALHAIVLAREIFPRLSFDLIYARPEQTLEQWKCELFQAIDLAADHLSLYQLTIEEGTAFKRLHAAGRLILPESELAANLYHLTQEMTALHGLPAYEISNHAIPGAESAHNLLYWRYHEYAGFGPGAHGRFIERSTNHFSPFLKSSSSQIKNRERSVTINEKHPEYWLELVETKGHGCVETEQLTPLQQANEMLLMGLRLCEGLDLTRYETLTSKSLPIEKLINLKHQGLVETIGHQRLKATAKGRILLDHIISQLAN

SEQ ID NO: 11721 - DNA, 1200 bp, Bartonella henselae str. Houston-1
  CDS (1)..(1200): transl_table=11
atgaatgaaccttttggcatctacatccattggcccttttgcgctgccaaatgtccttattgtgactttaattcgcatgttcgccttcatggtgttgatcaaccacgtttcgtaaccgcctttgaacgtgaaatagaaacacaatatcataaaataggtccacgttgtattaagagtatttttattggtgggggaaccccatcgcttatgacacctcaaactgttgatgccttgttgcagatattggcaagaacgtggaacatcgatgataaagctgaaattacaatggaagcgaacccatccagtgtagaagcagagcgttttcgtggataccgtgtagcaggggtgaaccgcttgtctcttggtgtacaagcactcaatgacaaagcactacgacaacttggacgtctccatgatgtcaaacaagctctccatgctattgctttagcacggaaaattttcccccgtttatcctttgatcttatctatgcccgccccggacaaacactcgaacaatggaaatgtgaactttttcaagccattgatttagcagcagaccatctttctctttaccaactaactatcgaagaaggaacagcatttaaacggctccatgccgcaggaagactgtttctccccgaatcagaacttgcagcagatctctatcaactcacacaagaaataaccgcactacacgggcttccagcttatgaaatctccaatcatgcaatttctggtgcggaatcagtgcataatcttctctattggcgttatcacgaatatgcgggttttggtccaggagctcatggacgctttattgagcactcacaaaatcattcttctgcctcttcaaaagcagatccttctcaaatcgaaaaccgtgaacgttctgtcacaatcaatgaaaaatatccagaacattggctcgaattggtagaaaagacaggacatggctgtattgagacagaacaattgacgacagaacaacaagcaaacgaaatgctccttatgggtttgcgtctttgcgaaggtttggatcttatacgctacaaaagcttaagctctaaaaacttgcccatggaaaaacttatcgatttacaacaacaagggctggtagaaatggtagaaaaccaacgcttaaaagcgacaaacaaaggacgcattctgcttgactatattatcaatcaattggcacactaa

SEQ ID NO: 11722 - protein, 399 aa, Bartonella henselae str. Houston-1
MNEPFGIYIHWPFCAAKCPYCDFNSHVRLHGVDQPRFVTAFEREIETQYHKIGPRCIKSIFIGGGTPSLMTPQTVDALLQILARTWNIDDKAEITMEANPSSVEAERFRGYRVAGVNRLSLGVQALNDKALRQLGRLHDVKQALHAIALARKIFPRLSFDLIYARPGQTLEQWKCELFQAIDLAADHLSLYQLTIEEGTAFKRLHAAGRLFLPESELAADLYQLTQEITALHGLPAYEISNHAISGAESVHNLLYWRYHEYAGFGPGAHGRFIEHSQNHSSASSKADPSQIENRERSVTINEKYPEHWLELVEKTGHGCIETEQLTTEQQANEMLLMGLRLCEGLDLIRYKSLSSKNLPMEKLIDLQQQGLVEMVENQRLKATNKGRILLDYIINQLAH

SEQ ID NO: 11723 - DNA, 1140 bp, Bacillus thuringiensis serovar konkukian str. 97-27
  CDS (1)..(1140): transl_table=11
ttggtgcaagctgcatatattcatattccgttttgtcagcatatttgtcactattgtgattttaataaagtgtttattgaacgccagccggtggatcaatatttagagtatttagagaaagaaataataaatacagttcaaaaggtaccgtttgatagtatgaaaacgatttttgttggcgggggaactccgacagcattaaatatggagcagacaaagaaattattagatataataaatcgtcgtttacgtccgtttgccccgaattgtgaattaacatttgaagcgaatccaggtgatttgccgaaagagaaattaaatgtattgctagagggtggagtgaaccgaattagttttggtgtgcaaacatttcgagatgaactgcttgagaaaattgggcgtaagcatacgagagaagatgcgtttgtagcaattagagaagcgcaggaagtgggcttcaaaaatataaatgtagatattatttacgctctgccagggcagacgatagaagatgtgaaagaaacgttagatattgcttttacgcttggtgtacaacatttctcggcatattcattaattgtggaaccgaaaactgtgttttataacttaatgaataaagggaaattaagacttccaggggaagaccatgaagcgaaaatgtatgaaatggtaatgtatgaaatggagagacacggctatacccagtatgaaattagtaatttttcaaaaggtgataatgaaagtaggcataatctcacatactggaataatgaagagtattatgggtttggagctggagcgcatagttatgtaaatggagaacgtatccaaaatgtaggaccgctcaaacaatatttcaataaaatcgatgaaaccgggtttccgtatttagatgttcatgtggtgacggagaaagaaaaaatggaagaagagttgttcttaggtcttcgtaaaacaaaaggtgtgtcaaaaatggcgttccgcaataaatttaatgtggaaatgaatcaagttttcgcgaagcagttacaaaacaaccaagaacaaggattgcttgaagagagcgatggatatgttcgtttaacgcgaaaagggaaattattagggaatgaagtattccaatcatttttgattgactaa

SEQ ID NO: 11724 - protein, 379 aa, Bacillus thuringiensis serovar konkukian str. 97-27
MVQAAYIHIPFCQHICHYCDFNKVFIERQPVDQYLEYLEKEIINTVQKVPFDSMKTIFVGGGTPTALNMEQTKKLLDIINRRLRPFAPNCELTFEANPGDLPKEKLNVLLEGGVNRISFGVQTFRDELLEKIGRKHTREDAFVAIREAQEVGFKNINVDIIYALPGQTIEDVKETLDIAFTLGVQHFSAYSLIVEPKTVFYNLMNKGKLRLPGEDHEAKMYEMVMYEMERHGYTQYEISNFSKGDNESRHNLTYWNNEEYYGFGAGAHSYVNGERIQNVGPLKQYFNKIDETGFPYLDVHVVTEKEKMEEELFLGLRKTKGVSKMAFRNKFNVEMNQVFAKQLQNNQEQGLLEESDGYVRLTRKGKLLGNEVFQSFLID

SEQ ID NO: 11725 - DNA, 1125 bp, Staphylococcus aureus subsp. aureus MRSA252
  CDS (1)..(1125): transl_table=11
atgacagtacaaagtgcatatatacatattccattttgtgtaagaatatgtacatattgtgatttcaataaatattttatacagaaccaacctgtagatgagtacttagatgcactaataacagaaatgtctacagcaaaatataggaacttaaagactatgtatgtaggtggcggcacaccaacggccctttctattaatcagttggaaagattacttaaagcaatacgtgatacgtttacaatcacaggtgagtatacatttgaagcaaatcctgatgagttaactaaagagaaagtccaactattagagaaatatggagtaaacagaatttcaatgggcgttcaaacattcaagccggagttattgtctgttttaggtagaacgcacaatactgaagatatttacacgtcggtgttaaatgctaaaaacgccggtattaaatcaatcagtttagatttaatgtatcatttaccgaaacagacgattgaagattttgaacaaagtttagatctagctttagatatggatattcaacatatttcgagttacggcttaatacttgaacctaaaacccaattttataatatgtatagaaaaggtttgctcaaacttcctaatgaggatttaggtgctgacatgtatcagttgctgatgtctaagatagaacaatctcctttccatcaatacgaaatatctaattttgcattagatggccatgaatcagaacataataaggtttactggtttaatgaggaatattatggatttggagcaggtgcaagtggttatgtagatggtgttcgttatacgaatatcaatccagtgaatcattatatcaaagctataaataaagaaagtaaagcaattttagtatcaaataaaccttctttgactgagagaatggaagaagaaatgtttcttgggttgcgtttaaatgaaggtgtgagtagtagaaggttcaaaaagaagtttgaccaatcaattgaaagtgtctttggtcaaacaataaataatttaaaagagaagaaattaattgtagaaaagaacgatgcgattgcacttacaaatcgagggaaagtcattggtaatgaggtttttgaagctttcctaataaacgattaa

SEQ ID NO: 11726 - protein, 374 aa, Staphylococcus aureus subsp. aureus MRSA252
MTVQSAYIHIPFCVRICTYCDFNKYFIQNQPVDEYLDALITEMSTAKYRNLKTMYVGGGTPTALSINQLERLLKAIRDTFTITGEYTFEANPDELTKEKVQLLEKYGVNRISMGVQTFKPELLSVLGRTHNTEDIYTSVLNAKNAGIKSISLDLMYHLPKQTIEDFEQSLDLALDMDIQHISSYGLILEPKTQFYNMYRKGLLKLPNEDLGADMYQLLMSKIEQSPFHQYEISNFALDGHESEHNKVYWFNEEYYGFGAGASGYVDGVRYTNINPVNHYIKAINKESKAILVSNKPSLTERMEEEMFLGLRLNEGVSSRRFKKKFDQSIESVFGQTINNLKEKKLIVEKNDAIALTNRGKVIGNEVFEAFLIND

SEQ ID NO: 11727 - DNA, 1158 bp, Acinetobacter sp. ADP1
  CDS (1)..(1158): transl_table=11
ttgactgttttacttaaccctgccgaaattccactgtcattatatatccatatgccgtggtgtgtacgtaagtgtccttactgtgattttaattcacatgctgtgcctaatggcgctttatcactggagctagagcaacaatatttacaggcattggtggctgattttgaaacgcaggtgaaatttgttcagggacgcaagattcatagtgtctttattggcggaggtacgccatcgctgatttctgcccaaggttatcaatggctgtttgaaaaaatacgtgctttagtcgatttcgaacaggactgtgaaattacattagaagctaatccaggaacggtcgaacatgatccttttgccgattatttagaagcgggaattaatcggttatcgcttggggtacaaagttttgatcaggatcatttagagcgtctcgggcgtattcatagttcagagaatgcaattgaagcgatcaaattggcaaaacaggcgggttttgagcgtgtgaatgccgatttaatgcatggattgtcacaacaaactttagagcaagcgttactcgacttaaaacttgcggtagacaatggcgcaacacatatcagttggtatcaattgaccattgagcccaataccgttttttttagaactcagcctgtcttaccacaagatgaaattcttgaacagattcaacgacaaggtgagcagtatttaaaagcacagggttttagcaattatgaagtttctgcatggcgcaaagaaaaaccttcagcacataatttgaattattggcaatttggcgattatctggcgattggcgcaggggcacatggcaaagtcacacaacctgatggtgtttatcggtttcagaaaacgcgtttgcctaaggattatctcgctaaagttccagccgagcatgtacagtggaaacgtattgaagcagatgaattaccatttgaatttatgatgaatgcactgcgtttaaatgagggtgtagcgacaaacttgtatgagcagcgtacaggattatcactggtcgatattgagcctgccctaaatgctttgcgtcagaaaaaattattggtgaatgatcccgagcgaattgcctgcaccgagcaagggcatctgtttttaaattcagtcttggaagaatttctataa

SEQ ID NO: 11728 - protein, 385 aa, Acinetobacter sp. ADP1
MTVLLNPAEIPLSLYIHMPWCVRKCPYCDFNSHAVPNGALSLELEQQYLQALVADFETQVKFVQGRKIHSVFIGGGTPSLISAQGYQWLFEKIRALVDFEQDCEITLEANPGTVEHDPFADYLEAGINRLSLGVQSFDQDHLERLGRIHSSENAIEAIKLAKQAGFERVNADLMHGLSQQTLEQALLDLKLAVDNGATHISWYQLTIEPNTVFFRTQPVLPQDEILEQIQRQGEQYLKAQGFSNYEVSAWRKEKPSAHNLNYWQFGDYLAIGAGAHGKVTQPDGVYRFQKTRLPKDYLAKVPAEHVQWKRIEADELPFEFMMNALRLNEGVATNLYEQRTGLSLVDIEPALNALRQKKLLVNDPERIACTEQGHLFLNSVLEEFL

SEQ ID NO: 11729 - DNA, 1140 bp, Erwinia carotovora subsp. atroseptica SCRI1043
  CDS (1)..(1140): transl_table=11
atgcttaagcttcccccgctcagcctgtacattcatattccgtggtgcgtacagaaatgtccgtattgcgacttcaactcgcatgcgctgaaaggcgatgtgccgcatcaggaatatgtcgatcatctgctggcggatctggatgccgatttgccgttggcgggtggccgcgcactgcactcgatttttatcggcggtggcacgcctagcctgctaagcgcggaagcgatgcaggcgctgctcgatggcgttcgggcgcgaatcccgttaacgccggatgccgaaattacgatggaagccaatcccggtacagtcgaagccgaccgtttcagcggttatcaacgcgcggggattaaccgaatctccatcggcgtgcagagtttcgatccgcaaaagctaacgcgtcttgggcgtattcacggccccgaagaggccaaacgcgcggcacaactagcgaccggtctgaaattacgcagctttaatctggacctgatgcacggcctgccggatcaatcgctggacgaagcactggacgacctgcgtcaagccattgcgctcaacccgccgcatttatcgtggtatcagttgaccatcgagcccaatacgctgtttagctcacgcccgcctacactgcccgatgatgacgcactgtgggacatctacgagcagggtcacgcgctactgagcgcagcgggttacgagcaatatgaaacctccgcctatgccaaaccgggctaccagtgccagcacaacctgaactactggcgcttcggtgattatttggggattggctgtggggcgcacggcaagctgaccttcagcgacggccacattctgcgcacggtaaaagtccgtcatccacgtggctatatgcagggcacgtacatggataagcaacacgatgttgccaacgacgatcgacctttcgagtttttcatgaatcgctttcgcctgctggaagccgccccacgcgcggatttcacggcttataccggtctggaagagcacagcatccgtccgcaattggatcaggctctggcacaaggctacctcacggaaaccgccacccactggcaaatcaccgagcacggcaaactgtttctgaattccctgctggagctatttctggcggaagagtaa

SEQ ID NO: 11730 - protein, 379 aa, Erwinia carotovora subsp. atroseptica SCRI1043
MLKLPPLSLYIHIPWCVQKCPYCDFNSHALKGDVPHQEYVDHLLADLDADLPLAGGRALHSIFIGGGTPSLLSAEAMQALLDGVRARIPLTPDAEITMEANPGTVEADRFSGYQRAGINRISIGVQSFDPQKLTRLGRIHGPEEAKRAAQLATGLKLRSFNLDLMHGLPDQSLDEALDDLRQAIALNPPHLSWYQLTIEPNTLFSSRPPTLPDDDALWDIYEQGHALLSAAGYEQYETSAYAKPGYQCQHNLNYWRFGDYLGIGCGAHGKLTFSDGHILRTVKVRHPRGYMQGTYMDKQHDVANDDRPFEFFMNRFRLLEAAPRADFTAYTGLEEHSIRPQLDQALAQGYLTETATHWQITEHGKLFLNSLLELFLAEE

SEQ ID NO: 11731 - DNA, 1182 bp, Propionibacterium acnes KPA171202
  CDS (1)..(1182): transl_table=11
atgacgcacgccgacaatagcctgccagaacttcatccagctgacgggccgtggagcatctatctccacgttcccttctgtgcgtcgcggtgcgggtactgcgacttcaacacctacgtgctgtcagcgatgggagatgacgcggtcgcggggtatctcgacgccgcccaccgggaactcgagctggctgccgacgcgctgggggatgcacagcctccggtttcgacgatcttctttgggggcggcactccgacaatgctctccccagtgcagctgggggagctcatcgatcacattcgtaccctatgggggattgaccctgacgccgaggtcaccactgaggccaatcccgaaaccctcagcgtagaagtcttagccggcctgctgaaagccgggattaaccggttatcgatgggaatgcagtccgccgacgagaatgtcttgacggtcttagatcgtcgccatcggccaggacgcgccgtcgagatggcacagctggcgcgccaggtcggattcgatgacgtcagcttggatctcatcttcggcgctcccggggagaaccgtgactcgtggcgatacagtctcgacgccacgttgacggctgagccagaccacatttccgcatactccctcatcgttgaagagggaactcggctggcgggcagaatccgtcggggagaactacctatgactgacgaggacgatctcgctgacaaatacctgcttaccgaaaagattctcaccgaggctgggtacgtcaactacgaggtctcgaactgggctcgtcctcgcagcggccgggatcaccgatgtcggcacaacatggcgtactggttggggtacgactggtggggaattggcccgggggctcattctcacgttgctggcacgcggtggtggaatgtcaaacaccctgccacctaccggaacgtgctggatgacagggtgctgcccgttgacgactatgaggttcttggcgatgtgcagcgtcatgaggagacggtgcttcttcggttgcgtttggctgatgggttgccgatggcggatctgtccgaggttgaatgtatgcgggctaccgaggttgtcgagcaggggctcgggacaatggaggaggggcggctggtactcaacttgtcaggtcgaatggtggctgaccgaatcattaccgatctcctggtctag

SEQ ID NO: 11732 - protein, 393 aa, Propionibacterium acnes KPA171202
MTHADNSLPELHPADGPWSIYLHVPFCASRCGYCDFNTYVLSAMGDDAVAGYLDAAHRELELAADALGDAQPPVSTIFFGGGTPTMLSPVQLGELIDHIRTLWGIDPDAEVTTEANPETLSVEVLAGLLKAGINRLSMGMQSADENVLTVLDRRHRPGRAVEMAQLARQVGFDDVSLDLIFGAPGENRDSWRYSLDATLTAEPDHISAYSLIVEEGTRLAGRIRRGELPMTDEDDLADKYLLTEKILTEAGYVNYEVSNWARPRSGRDHRCRHNMAYWLGYDWWGIGPGAHSHVAGTRWWNVKHPATYRNVLDDRVLPVDDYEVLGDVQRHEETVLLRLRLADGLPMADLSEVECMRATEVVEQGLGTMEEGRLVLNLSGRMVADRIITDLLV

SEQ ID NO: 11733 - DNA, 1227 bp, Streptococcus pyogenes MGAS10394
  CDS (1)..(1227): transl_table=11
ttgtcagctcgtaaaatacttttccaagccatgaagaatcaagggaaatggtttattcataaaaacattttatcaccaaagtggtataataagaccatgtcaaaaaaacctacttcagcctatgtgcacattcctttttgcacacaaatttgttattattgcgatttttcaaaagtctttatccaaaatcaacctgttgatgcttatttgaaagccttgattcaagaatttgactcttatggcattcgagacctaaaaaccctttatattggaggaggtacgcctacagctatcactgctaaacagttggagtatctcctaaatcaccttgaacgaaacctcaatttagatgatcttgaagaattcacaattgaggcaaatcctggtgatttgacgccagaaaaaattgcggtgcttcagaggtcagctgtcaatcggatttccttgggggtgcagacttttaataacaagcaattaaagcagattggccgtagccataatgaagaacaaatttatagcaccattgccaatttaaaaactgcaggctttcacaatatttccattgatttaatttatgccttgccaggtcaaaccttagatcaagtcaaggaaaatgttgctaaagctctggcacttgatattccccaccttagtctttatagccttattttggaacatcacactgtttttatgaacaaaatgcgacgtggtaaacttaacttaccaacggaagacttggaagcggaaatgtttgagtatattatttcagaaatggaagctaatggctttgagcattatgaaatttccaattttaccaaacctggttttgaaagtcgtcataacttgatgtattgggataatgtggagtattttggatgtggtgcaggggcttcaggttaccttaatggcattcgttatcaaaatcgggtgcccatccagcattatcttaaagcggttgaagcagggaatgctagactaaatgaagaagtgctgcgcaaagaggaaatgatggaagaggaactctttttgggcttacgtaaaaagacaggagtctccatccagcggttccaagaaaaatttggtgtttcttttgaggagcgttatggaaatattgttagggagcttcaaaaccaaggactgcttgtcaaagatgacgcttttgtcagaatgactaaaaagggtcttttcttaggtgattctgttgctgagcggtttatattagattag

SEQ ID NO: 11734 - protein, 408 aa, Streptococcus pyogenes MGAS10394
MSARKILFQAMKNQGKWFIHKNILSPKWYNKTMSKKPTSAYVHIPFCTQICYYCDFSKVFIQNQPVDAYLKALIQEFDSYGIRDLKTLYIGGGTPTAITAKQLEYLLNHLERNLNLDDLEEFTIEANPGDLTPEKIAVLQRSAVNRISLGVQTFNNKQLKQIGRSHNEEQIYSTIANLKTAGFHNISIDLIYALPGQTLDQVKENVAKALALDIPHLSLYSLILEHHTVFMNKMRRGKLNLPTEDLEAEMFEYIISEMEANGFEHYEISNFTKPGFESRHNLMYWDNVEYFGCGAGASGYLNGIRYQNRVPIQHYLKAVEAGNARLNEEVLRKEEMMEEELFLGLRKKTGVSIQRFQEKFGVSFEERYGNIVRELQNQGLLVKDDAFVRMTKKGLFLGDSVAERFILD

SEQ ID NO: 11735 - DNA, 1242 bp, Leifsonia xyli subsp. xyli str. CTCB07
  CDS (1)..(1242): transl_table=11
atgccgggtccgcttccgctcggggagccggcgccggccgatggggcgatccccgacaacgccgggggcggctcggcagaccgggacttcggcgtctacctgcatgtgccgttctgccgtgtgcgctgcggctactgcgacttcaacacgtacaccgcgaccgaagtgcgcggtgtctcccagacggactacgcggatcacgctgtggcggaggtgcggttcgccgctcgggcgctcgggcgcagcggcctcccggcccggcctgtctcgaccgtcttcttcggcggcggcacgcccacgctgctcccgccggaggctcttggcaggatgctcggcgccgtgcgcgagcaatggggcttcgtaccgcaagcggaagtcacgaccgaggcgaacccggactcggtggacgcggccgatctgctccggctcgccgccgccgggtttactcgggtctccttcgggatgcagtccgccgtcccgcgcgtcctcgcgaccctggagcgcacccacgacccagagcgtatccccctcgtggtccagtgggcgcgggacgcaggtttgcaggtcagcctcgatctcatctacggcacacccggggagacgctcggcgactgggagcgctcgctcgacaccgcgctctcttgtgtacccgaccacctctctgcgtactcgctgatcgtcgaaccgggcacgaagctcgcccggcagatcgcagcggggcagctcccggagcctgacgacgatcttcaggccgatatgtacgaacgcgccgacacccggctggccggtgcgggctacgactggtacgaggtcagtaactgggcgaaggacgacggccaccgttcccgccacaacctcgcctactggcttggccacgactggtggggcatcggccccggcgctcacagccatatcggcggcgacggcggcggagtgcgctggtggaacgtgaagcatcccgcagcctatgcgcagcgggtcctcgcggggcagtcgcccgcggcaggacgggagaccctgggcgccgagacccagcgtgtcgagcgcgtgctgctccggatgcgcattcgcgagggaatcgcaagcgccgagctggagccgaccggccgtcgcgccgtggccggactcatcgccgatggtctggtggatgcgaaagccgccctcgccgggacagtgacgctgtctctgcgggggcggctgctggctgacgccgtggtccggcggctgctcgccgaggagtga

SEQ ID NO: 11736 - protein, 413 aa, Leifsonia xyli subsp. xyli str. CTCB07
MPGPLPLGEPAPADGAIPDNAGGGSADRDFGVYLHVPFCRVRCGYCDFNTYTATEVRGVSQTDYADHAVAEVRFAARALGRSGLPARPVSTVFFGGGTPTLLPPEALGRMLGAVREQWGFVPQAEVTTEANPDSVDAADLLRLAAAGFTRVSFGMQSAVPRVLATLERTHDPERIPLVVQWARDAGLQVSLDLIYGTPGETLGDWERSLDTALSCVPDHLSAYSLIVEPGTKLARQIAAGQLPEPDDDLQADMYERADTRLAGAGYDWYEVSNWAKDDGHRSRHNLAYWLGHDWWGIGPGAHSHIGGDGGGVRWWNVKHPAAYAQRVLAGQSPAAGRETLGAETQRVERVLLRMRIREGIASAELEPTGRRAVAGLIADGLVDAKAALAGTVTLSLRGRLLADAVVRRLLAEE

SEQ ID NO: 11737 - DNA, 1164 bp, Desulfotalea psychrophila LSv54
  CDS (1)..(1164): transl_table=11
atgtgccaagaccatggatattttacaaaaaagctaatgtcatccctctatttgcatatccccttctgtcgaagtaagtgtcgttactgtgcctttaatagttattccggtcagggtcatctctttgtgcgctatattgccgcccttaaacgggagctctctttcctcttttcggagtatggcggacggccgttggacactgtcttttttggtggtggcacgccaacggttttaggtgctgccggtctggtggagattctcgatcattgccagcaactctggggctggagcaagcaggctgagattagcacggaggcaaatcctgaaacggtgagtgccgctgatcttatccttctgcgtaggggcggttttaatcgaatctcctttggcgtgcagagtctttctgatcatgatcttctctccttggggcgggctcattctgcagccagggctattcaggccctggaggatgctcggcaggcaggatttgataatattaaccttgatctgatgtcaggtctgcacggtcagtccttgcaggattggcgtcgggtgttgaccgaggcgctgactcttaagcccgaccacctctccgtatatcagctgacccctgaagagggtactccctattatgatgatgtgatggcggggcgggcccttgtgccggaggatgatttgagcctggccatggatgctctgacctgggagatgtgccggcaggcgggacttgctcagtatgaggtgtccaactatgcccagtccgggaaaaaatgccgacataatgttaactactggctgaacagtgactctcttgctgcgggtgccggcgcggtgagttttaacggtgggcagcgggcaagacgtcttgaggatccggcagagtattgtcaatgtgtcgaggcaggtcactctcccattgttgagagtgaggagctggaccgcgaggcctctttccgggaaacggttattgtcggcctgcgtatgatcgagggtattgaaatccaatcccttcaggacagatatggaatagatctgccagcctattatggagtggtactgacaggtctgttggcggcgggccttgttgagctggccggtggttttttacgtatcacagaccagggccggccactctccaatcaaatacttgaaaaacttgtttag

SEQ ID NO: 11738 - protein, 387 aa, Desulfotalea psychrophila LSv54
MCQDHGYFTKKLMSSLYLHIPFCRSKCRYCAFNSYSGQGHLFVRYIAALKRELSFLFSEYGGRPLDTVFFGGGTPTVLGAAGLVEILDHCQQLWGWSKQAEISTEANPETVSAADLILLRRGGFNRISFGVQSLSDHDLLSLGRAHSAARAIQALEDARQAGFDNINLDLMSGLHGQSLQDWRRVLTEALTLKPDHLSVYQLTPEEGTPYYDDVMAGRALVPEDDLSLAMDALTWEMCRQAGLAQYEVSNYAQSGKKCRHNVNYWLNSDSLAAGAGAVSFNGGQRARRLEDPAEYCQCVEAGHSPIVESEELDREASFRETVIVGLRMIEGIEIQSLQDRYGIDLPAYYGVVLTGLLAAGLVELAGGFLRITDQGRPLSNQILEKLV

SEQ ID NO: 11739 - DNA, 1176 bp, Rickettsia typhi str. Wilmington
  CDS (1)..(1176): transl_table=11
atgtctagagtacctatgagagttatgactaatgatttaagtatttacattcattggccgttttgtttgtcaaaatgtccatattgtgattttaattctcatgtagtaagtactatagattataatcagtggattaagtcttatgaaaaggaaattgaatattttaagtttattattcaaaataaatatataaaatctattttttttggtggtggtactccttcactaatgcatcctttaatagttgaagttataataaataaaataaataatctcggaattattgataataaaactgagataactctagaaactaatcctacatcctttgaagctgagaagcttaaagcgtttaaatctgctggcattaatcgtatttctattggagtacaatccttaaaagaagacgatttaaaaacattaggtagaactcatgattctatgcaagccataaaaacaattgaggcagcgaatacaattgttccaagagtatcatttgatttgatatatgcacgtaacggtcagacattaaaagattgggaagaagagttaaagcaagctatgtccttggctacctcacatattgcactgtatcaattaactatcgaaaaaggtacgccgttttataaattatttaaaaacggtaatttaattttgcctagtgtagatgaagcagctgagatgtatgagtggacaaatcattatctagaatctaaaaagtattttagatatgaaatatccaattatgctgttctagggcatgaatgtttacataatttaacttattggaattataatagttatttaggtataggtcctggagctcatagtagaataattgaaaatgcaaattcagtattagcaattatgatgttgcataatcctgcaaaatggttagatgctgttagaataaaaaatgttggtattcaaactcatgctaagctaacaaatcaagaaataatagaagaaatcttaatgatgggtttacgtcttagaaagggtataaatattcctacattagagcagaaattgagcgcgaaattagaaaatattttagatatgaataatctgcaacattatcaaaaccaaggtctaattaagttagatgaacatatctatcttactgacaaaggtttaatgctgcataattacatagtacctagattgattagataa

SEQ ID NO: 11740 - protein, 391 aa, Rickettsia typhi str. Wilmington
MSRVPMRVMTNDLSIYIHWPFCLSKCPYCDFNSHVVSTIDYNQWIKSYEKEIEYFKFIIQNKYIKSIFFGGGTPSLMHPLIVEVIINKINNLGIIDNKTEITLETNPTSFEAEKLKAFKSAGINRISIGVQSLKEDDLKTLGRTHDSMQAIKTIEAANTIVPRVSFDLIYARNGQTLKDWEEELKQAMSLATSHIALYQLTIEKGTPFYKLFKNGNLILPSVDEAAEMYEWTNHYLESKKYFRYEISNYAVLGHECLHNLTYWNYNSYLGIGPGAHSRIIENANSVLAIMMLHNPAKWLDAVRIKNVGIQTHAKLTNQEIIEEILMMGLRLRKGINIPTLEQKLSAKLENILDMNNLQHYQNQGLIKLDEHIYLTDKGLMLHNYIVPRLIR

SEQ ID NO: 11741 - DNA, 1251 bp, Symbiobacterium thermophilum IAM 14863
  CDS (1)..(1251): transl_table=11
gtgccgatcgggctctacgtgcacatccccttctgcctgcacaagtgcgggtactgcgacttcaacagccatgccggctcggaccgcgcggagcaggcgcactacgtggatgcccttctgcgggagatggagctctgggcgacccgtcccgaggtcgcgggggaacaggtctccacggtctacgtcggcggagggacgccgaccctgctggagggcgcagagctggcccgggtgctgcgcggggtgcgggagcacttccgcctggcccccgacgccgaggtgacggtggaaggcaacccgggcacggtggacgtggagggggagaagctccacctggcggttcaggccggggccacccgcctctcgttgggcgtccaggcccgccagcggcacctgctggagcggctgggccggatccacgacgccctgcaggtggaggcggccgtgaaagcagcccgccgggcgggctttgcgaacctcaacctcgacctgatgtacggcctgcccggccagaccccggctgacttccgcgagaccgtctcctgggccctcgggctggggccgacccacatcagcgcctacagcctgatcatcgaggaagggacgcccttctaccacgcctacctggccggacggctgcacctgccgccggaggaggcggaggagcagatgttcctggagggcaaggcgctgctggaggcggccgggttcgagcactacgaggtgtccaactgggcgcgcccgggattccggtgccggcataacctcatctactggcgcaacgagcactacctggggctcggctgcggggctcactcgttcctgcggttggcggcgccgctcagcaacctggggccgccgcggcccggcctcaccgcatcccgagtgcagggcggcagcccggtggagacggcgccgggccttccggggcagcagtaccggttctggaacctgaaacaccccggcgcctaccgggccgcgctggagcggggcgtcctgccggtggaggccggggaggtcgtcgaccgtcgggccgagatggcggagacgatgttcatggggcttcggctcctggagggggtcagcggcgagcgcttcgaggcccggttcggcgtctccatcgccgacgtgtacgggccggatgtggaccggctccggcgggaggggctgctggagtgggcagaaggcgcccttcgcctgacgccccggggactccggctgggcaaccgggtctgggaggcgttcgtctag

SEQ ID NO: 11742 - protein, 416 aa, Symbiobacterium thermophilum IAM 14863
MPIGLYVHIPFCLHKCGYCDFNSHAGSDRAEQAHYVDALLREMELWATRPEVAGEQVSTVYVGGGTPTLLEGAELARVLRGVREHFRLAPDAEVTVEGNPGTVDVEGEKLHLAVQAGATRLSLGVQARQRHLLERLGRIHDALQVEAAVKAARRAGFANLNLDLMYGLPGQTPADFRETVSWALGLGPTHISAYSLIIEEGTPFYHAYLAGRLHLPPEEAEEQMFLEGKALLEAAGFEHYEVSNWARPGFRCRHNLIYWRNEHYLGLGCGAHSFLRLAAPLSNLGPPRPGLTASRVQGGSPVETAPGLPGQQYRFWNLKHPGAYRAALERGVLPVEAGEVVDRRAEMAETMFMGLRLLEGVSGERFEARFGVSIADVYGPDVDRLRREGLLEWAEGALRLTPRGLRLGNRVWEAFV

SEQ ID NO: 11743 - DNA, 1140 bp, Bacillus cereus E33L
  CDS (1)..(1140): transl_table=11
ttggtgcaagctgcatatattcatattccattttgtcagcatatttgtcactattgtgattttaataaagtgtttattgaacgccagccggtggatcaatatttagagtatttagagaaagaaataataaatacagttcaaaaggtaccgtttgatagtatgaaaacgatttttgttggcgggggaactccaacagcattaaatatggaacagacaaagaaattattagatattataaatcgtcgtttacgtccgtttgccccgaattgtgaattaacatttgaagcgaatccaggtgatttgccgaaagagaaattaaatgtattgctagagggtggagtgaaccgaattagttttggtgtgcaaacatttcgaaatgaattgcttgagaaaattgggcgtaagcatacgagagaagatgcgtttgtagcaattagagaagcgcaggaagtgggcttcaaaaatataaatgtagatattatttacgctctgccagggcagacgatagaagatgtaaaagaaacgttagatattgcttttacgcttggtgtacaacatttctcggcatattcattaattgtggaaccgaaaactgtgttttataacttaatgaataaagggaaattaagacttccaggggaagaccatgaagcgaaaatgtatgaaatggtaatggatgaaatggagagacacggctatacccagtatgaaattagtaatttttcaaaaggtgataatgaaagtaggcataatctcacatactggaataatgaagagtattatgggtttggagctggagcgcatagttatgtaaatggagaacgtatccaaaatgtaggaccgctcaaacaatatttcaataaaatcgatgaaaccgggtttccgtatttagatgttcatgtggtgacggagaaagaaaaaatggaagaagagttgttcttaggtcttcgtaaaacaaaaggtgtgtcaaaaatggcgttccgcaataaatttaatgtggaaatgaatcaagttttcgcgaagcagttacaaaacaaccaagaacaaggattgcttgaagagagcaatggatatgttcgtttaacgcgaaaagggaaattattagggaatgaagtattccaatcatttttgattgactaa

SEQ ID NO: 11744 - protein, 379 aa, Bacillus cereus E33L
MVQAAYIHIPFCQHICHYCDFNKVFIERQPVDQYLEYLEKEIINTVQKVPFDSMKTIFVGGGTPTALNMEQTKKLLDIINRRLRPFAPNCELTFEANPGDLPKEKLNVLLEGGVNRISFGVQTFRNELLEKIGRKHTREDAFVAIREAQEVGFKNINVDIIYALPGQTIEDVKETLDIAFTLGVQHFSAYSLIVEPKTVFYNLMNKGKLRLPGEDHEAKMYEMVMDEMERHGYTQYEISNFSKGDNESRHNLTYWNNEEYYGFGAGAHSYVNGERIQNVGPLKQYFNKIDETGFPYLDVHVVTEKEKMEEELFLGLRKTKGVSKMAFRNKFNVEMNQVFAKQLQNNQEQGLLEESNGYVRLTRKGKLLGNEVFQSFLID

SEQ ID NO: 11745 - DNA, 1158 bp, Mannheimia succiniciproducens MBEL55E
  CDS (1)..(1158): transl_table=11
atgacaactctcgttcttcctccgcttagtttatatgtgcatattccctggtgcgtgcagaaatgtccttattgcgacttcaattctcatgcgcaaaaaggtgcgatccctgaaatcgattatatccgtcatttagtgacggatttgcaggcggatcttcttcgttttaaagacagcgtgcagaatcgcccgctacacagcattttcattggcggcggcacgccaagcctgttttctgcggaaagcattacctgtttgttaacggaaataaaaaaacttattgatttttcaccgcacattgaaattactatggaagccaatcccggtacggtagaggccgaacgatttcaaggctatgtgaaagcgggtgtcacccggatttccatgggcatacaaagttttaatgatgaaaaactaaaagctttaggacgaattcataacgcccgggaagcaaaaagtgcggtggaaattgccaaaatttccggtttaaaaagctttaatttagatcttatgcacggcttgccgaatcaaacgccggaacaggcgctggacgacctacggcaggctatcgcattaaatccgccgcatttgtcctggtatcagcttactattgaacctaataccatgtttgcttatcgtccgcccgtattaccggatgacgacgagctctgggatatttttgagcggggacaccgattattaacggaagcgggttatcggcaatatgaaacctccgcttatgccaaaccggattttcaatgccaacataacctaaattattggcgttttggtgattatctggctgtcggttgcggtgctcacggcaaaatgagcttcgtcaatggcgatattatacgttacagcaagaccaagcatccgaaaggttatttacgcggcgaatatctttatgaagaacggctgattaacgaagcggatcgtccttttgaattttttatgaaccgtttccgcctgttggaacccgtaccgaaaacggaattcgtgcaatttaccggtttgcctgaaagtgcggtcaaaaaacaaatagattgggcgctggaaaaaaattatattattgaaaccgagtcgacctggcaaattaccgaacgaggtaagttgtttttaaatgaattgctggaagtttttttacctgatgactag

SEQ ID NO: 11746 - protein, 385 aa, Mannheimia succiniciproducens MBEL55E
MTTLVLPPLSLYVHIPWCVQKCPYCDFNSHAQKGAIPEIDYIRHLVTDLQADLLRFKDSVQNRPLHSIFIGGGTPSLFSAESITCLLTEIKKLIDFSPHIEITMEANPGTVEAERFQGYVKAGVTRISMGIQSFNDEKLKALGRIHNAREAKSAVEIAKISGLKSFNLDLMHGLPNQTPEQALDDLRQAIALNPPHLSWYQLTIEPNTMFAYRPPVLPDDDELWDIFERGHRLLTEAGYRQYETSAYAKPDFQCQHNLNYWRFGDYLAVGCGAHGKMSFVNGDIIRYSKTKHPKGYLRGEYLYEERLINEADRPFEFFMNRFRLLEPVPKTEFVQFTGLPESAVKKQIDWALEKNYIIETESTWQITERGKLFLNELLEVFLPDD

SEQ ID NO: 11747 - DNA, 1140 bp, Bacillus licheniformis ATCC 14580
  CDS (1)..(1140): transl_table=11
atgaaagcagcatatatacatattccgttttgcgagcacatttgccattattgcgacttcaacaagttttttattcaatctcagcccgttgatgaatatttgcgttccttagagaaggaaatggccaattcaatggaggcaaccggacatccggagctgaaaacgatctttatcgggggaggaacgccgacatcgctgtcggcagctcagctcgaacggctcctcgattccattcatcgcgttttgaaaccgtccgaaagccttgctgaatttgcagtggaagccaatcccgacgatttatcagctgaaaagctggatgttttaaaagctgccggtgtagacaggctgagctttggcgtgcagacgtttgaagacgagctgctgaaaaaaatcggcagggttcacgagcaaaaagacgtactcgtttcgtttgaaagagcgagaaaggcggggtttgataatatcagccttgatctgatgttcggtctgcccggacaaaccatcggccacctcgcttcatcgctcgatacggcgcttgccctcggtgctgaacactattcggtttattcgctgatcgtcgaaccgaaaaccgttttctacaacttgatgaaaaaaggccggcttcacctgccgccgcaggatcaggaagctgaaatgtacgaactcgttatgcggaaaatggaagaagcgggcatcggccaatacgaaatcagcaactacgccaaaaaaggatatgagagcaaacataacctcacatattggaacaatgaggattatttcggttttggcgcgggcgcacacggttatatcaatggtgaaagaacggtaaatgcgggccctgtcaaacattatatcgacctgattgaacaatccggctttccttataaggaaaagcacatggtcacaaaaaatgaacagattgaagaagaaatgtttctcggtcttcgaaaaactgagggagtaaacaaagagcgctttttcgaaacatatggaagatctgttgacgatctctttccgaaggtgctccattcgctggaagaaacagggttgattgtgaacacgaacaaaaacgtgtttctaacacataatggaaaactgttgggaaatgaagtatttcaggcattcctgggtgagttataa

SEQ ID NO: 11748 - protein, 379 aa, Bacillus licheniformis ATCC 14580
MKAAYIHIPFCEHICHYCDFNKFFIQSQPVDEYLRSLEKEMANSMEATGHPELKTIFIGGGTPTSLSAAQLERLLDSIHRVLKPSESLAEFAVEANPDDLSAEKLDVLKAAGVDRLSFGVQTFEDELLKKIGRVHEQKDVLVSFERARKAGFDNISLDLMFGLPGQTIGHLASSLDTALALGAEHYSVYSLIVEPKTVFYNLMKKGRLHLPPQDQEAEMYELVMRKMEEAGIGQYEISNYAKKGYESKHNLTYWNNEDYFGFGAGAHGYINGERTVNAGPVKHYIDLIEQSGFPYKEKHMVTKNEQIEEEMFLGLRKTEGVNKERFFETYGRSVDDLFPKVLHSLEETGLIVNTNKNVFLTHNGKLLGNEVFQAFLGEL

SEQ ID NO: 11749 - DNA, 1128 bp, Legionella pneumophila subsp. pneumophila str. Philadelphia 1
  CDS (1)..(1128): transl_table=11
atgcttccgttatccttgtacattcatattccctggtgcatcagaaaatgcccatactgtgattttaactcacacaaaagccctgatgttttacccgaacaccagtatattcaggctttgattgaagaccttaaaacggatatttcctcatacaatacccgtgaaattaactccatttttattggtggcggcacacccagtttattttcagccgaagcttataacaacttatttaatgaattaaagcgcatactcccctttgcaaaaaatattgaaattacaatggaagccaatcccggtactgtagaacaacatcgatttactgattatagacaatcaggaatcaatcgtctttctttgggaattcaaagctttaatcccaatcatttaaaaattcttggccgtattcatgacgagaaacaagcccattctgctatagatactgcccgtaaagccggctttgataatctcaatcttgatatcatgcacagtttacccaatcaaagtgtaacgcagggattacaggatcttaagaccgctttatcctatcaacctgagcatttatcctggtatcaattaaccatagaaccgaatactgtattttacaagcatactcctcccctaccttctgaagaagaagattacttgctggaggaacaaggatttgccctgttacataattccggatatcaccgctatgaaatttctgccttttccaaaccggaaaagcaagccagacacaatatcaattattggctattcggtgattatttgggtataggcgctggtgctcatggaaaaatgacaaccccaaacgcaataataagaacccgtaagcaccgtcaacccaaagattatctggataatgagaaaccttatctggctgcttgcgaaaccattacaggtaaagaattgttgtttgagtttatgctgaatacaacccggttggaacaatccatacctttagacttatttacgacaacgacaggattggaacttaatcagcttttacccttgctgaaattagctaataagaaacaattgattaatttaacagatactcattggcaagtaacaccattaggcaggcaatatactaatgatttgcaagccttgtttctgccctag

SEQ ID NO: 11750 - protein, 375 aa, Legionella pneumophila subsp. pneumophila str. Philadelphia 1
MLPLSLYIHIPWCIRKCPYCDFNSHKSPDVLPEHQYIQALIEDLKTDISSYNTREINSIFIGGGTPSLFSAEAYNNLFNELKRILPFAKNIEITMEANPGTVEQHRFTDYRQSGINRLSLGIQSFNPNHLKILGRIHDEKQAHSAIDTARKAGFDNLNLDIMHSLPNQSVTQGLQDLKTALSYQPEHLSWYQLTIEPNTVFYKHTPPLPSEEEDYLLEEQGFALLHNSGYHRYEISAFSKPEKQARHNINYWLFGDYLGIGAGAHGKMTTPNAIIRTRKHRQPKDYLDNEKPYLAACETITGKELLFEFMLNTTRLEQSIPLDLFTTTTGLELNQLLPLLKLANKKQLINLTDTHWQVTPLGRQYTNDLQALFLP

SEQ ID NO: 11751 - DNA, 1143 bp, Methylococcus capsulatus str. Bath
  CDS (1)..(1143): transl_table=11
atgctgaaaccaccacccttgggactctacgtccacgtgccctggtgcgtgcgcaagtgtccgtactgcgacttcaactcccaccgcctcgagggaggactgccggagcgcgattatatcgcggccttgctgaacgatctggcgcgggacgcagacagggtgaccggccgctgcgtcgaatcggtcttcatcggaggcggcacgcccagcctgctgagtcccgaagccgtcgacctgctgctggagggtgtcaggtcgcgcatcgccctggccagcgacgcggaaatcacgctcgaagccaatcccggcacggcggaaaccgccaagttcaagggcttccgcgaagccggcgtcaaccgcctgtcgatcggcgtgcagagcttcgacgatgccaaactgaccgcgctgggccgcatccacgacggccgcgccgccgtcgaggccgcggcgatggcccgcgaagccggattcaccaacttcaacctcgacctgatgttcggcctgcccggacagaccatcgcccaggcgaaacgggatgtggaaacggccatcgcccagcggccgacccatgtctcctattaccagctcacgctcgaacccaacacattgttccaccgctccccccctgcattgccggaggcggacgcggtttgggacatccagcgcgccggccaggcactgctggccgatgccggctacggccactacgaaatctcggcctatgcccgcgacggcttccgctgccgccacaacgtcaactactggcgtttcggcgactatctgggggtgggagccggcgcccacggcaaggtcaccgacccggcatcgggtcggatcacgcgcctgtggaagacccgccatcccgcgcgatacctggaaacccagggtctgggaggcgagcacgtcgtggacgatgcgagcctgcccttcgaatttctgatgaaccagttgcggctgcgggaaggtttcgaactcgcaagcttcaccgaacgcaccggactgaccgcatgcgccctggaacccgccctgtcggaatgcctgcaagaaggacacctcgaacgccatggcggcgtgattcgctgtagcgaccgcggctggaatttcctggacgaggtcttgcagcgcttcctcccgccggcctga

SEQ ID NO: 11752 - protein, 380 aa, Methylococcus capsulatus str. Bath
MLKPPPLGLYVHVPWCVRKCPYCDFNSHRLEGGLPERDYIAALLNDLARDADRVTGRCVESVFIGGGTPSLLSPEAVDLLLEGVRSRIALASDAEITLEANPGTAETAKFKGFREAGVNRLSIGVQSFDDAKLTALGRIHDGRAAVEAAAMAREAGFTNFNLDLMFGLPGQTIAQAKRDVETAIAQRPTHVSYYQLTLEPNTLFHRSPPALPEADAVWDIQRAGQALLADAGYGHYEISAYARDGFRCRHNVNYWRFGDYLGVGAGAHGKVTDPASGRITRLWKTRHPARYLETQGLGGEHVVDDASLPFEFLMNQLRLREGFELASFTERTGLTACALEPALSECLQEGHLERHGGVIRCSDRGWNFLDEVLQRFLPPA

SEQ ID NO: 11753 - DNA, 1224 bp, Azoarcus sp. EbN1
  CDS (1)..(1224): transl_table=11
gtgacccgccatcgcgtcatccccctcgcgcccgctccagccgctgccggaccgctgccggagcgggcgcaactgacggcgtcgccgccgctcgcgctgtacgtgcattacccgtggtgcgtgaagaagtgcccgtactgcgacttcaactcgcacgcgtcgcgcggcgggccgggcgagatcccggagcaggcctacatcgacgcgctgctcgccgacatcgagaccgccttgccgcaggtgtggggacggcgcgtgctgtcggtgttcatcggcgggggcacgccgagcctgatgtcggccgcggcgctcgaccgcctgctgaccggcgtgcgcatgctgctgcagctcgacccgctggccgaaatcacgctcgaagccaatcccggcaccgtcgaggcgggccgcttccgcgattactgcgctgccggcgtgaaccgcctgtcgctcggcatccagagtttcgacgacgcgcagcttgtgcgcctggggcgcattcacgacgggcgggaagcgcgcgtcgcgatcgacactgcgctggcgaacttcgatcgcgtgaacctcgacctgatgtacgcgctgccggagcagacgccggagcaggcactcgccgatctcgacactgcgctcgcgaccggcgcgacccatctgtcgtgctaccagctgacgctcgagccgaacacgcctttccaccacgccccgccgccgctgcccgataccgatactgcggccgacatgcaagatgcgatcgaagcgcgcctcggcggcgcgggattccgccactacgagacgtcggcgttcgcccggcccggcgaggaatgccgccacaatctcaattactggacgttcggtgactacctcggcatcggcgcaggcgcgcacggcaagctgtcgagcttcgagggcatcgtgcgcgagatgcgccacaagcatcccgggcgctatctcgacgcggcgaagagccgcgagttcgtgcaggaacgtcgcacgatcggcgtcaccgagctgccgttcgaattcatgatgaatgcgctgcgcctgagcggcggcgtcccgcgccggctgttcgccgagcgcaccggcctgccgctcgcggtgatcgaggacgaactgaaggcggcgcgcgagcaagggttggtcgaggtcacgccggagctcatccgtccgactgaacgcggacggcatttcctcaacgatctgctgacactgttcctgcgcgactga

SEQ ID NO: 11754 - protein, 407 aa, Azoarcus sp. EbN1
MTRHRVIPLAPAPAAAGPLPERAQLTASPPLALYVHYPWCVKKCPYCDFNSHASRGGPGEIPEQAYIDALLADIETALPQVWGRRVLSVFIGGGTPSLMSAAALDRLLTGVRMLLQLDPLAEITLEANPGTVEAGRFRDYCAAGVNRLSLGIQSFDDAQLVRLGRIHDGREARVAIDTALANFDRVNLDLMYALPEQTPEQALADLDTALATGATHLSCYQLTLEPNTPFHHAPPPLPDTDTAADMQDAIEARLGGAGFRHYETSAFARPGEECRHNLNYWTFGDYLGIGAGAHGKLSSFEGIVREMRHKHPGRYLDAAKSREFVQERRTIGVTELPFEFMMNALRLSGGVPRRLFAERTGLPLAVIEDELKAAREQGLVEVTPELIRPTERGRHFLNDLLTLFLRD

SEQ ID NO: 11755 - DNA, 1158 bp, Silicibacter pomeroyi DSS-3
  CDS (1)..(1158): transl_table=11
ttggcggatgactggcagcatgggggctttggcctctacgtgcattggcccttttgccaggccaagtgtccctattgcgacttcaacagccatgttgcccgtgaaatcgaccagaaagcctgggttagagcctatgtttccgaacttgaacgctgtgccgctgagctgccgggccgggttctgaacaccatcttttttggcggcggtaccccgtcgctgatgatgccggaaacggtcgcggcagtgatcgaaaccgtccgccgtctctggcccacctccaacgacatggaaatcacgctcgaggccaatcccggctcggttgaggccgggcgctttgccgcctatcgcgatggcggggtcaaccggatctcgatgggggtgcaggcgctgaacgaccgggacctgcaccggctgggccgcatccacagcgtggccgaggcgcgggcagctttcgacattgcgcggcgctgttttgagcgggtcagtttcgacctgatctatgcccggcaggaccagacacccgaagcgtggcgtgccgagttgaacgaggcgctggccatggcggtcgatcacctgtcgctctaccagttgacgatcgaggacggcaccgcctttggcgaccgctatgcccgcggcaagctgcgcggcctacccgccgatgacgacgccgccgacatgtacctgatcacgcaagaggtctgcgccacgcatggcctgcccgcctacgaggtctcgaaccacgcccgccccggttcggaatcgcgccacaacctgatctattggcgctatggcgattatgtcggcatcggccccggcgcacatggtcgcatcaccgtggatggccagcgtttcgccaccgaaagcccgctgaaccctggcgcctggctgggcgcagtggcaaagggaagtggtgagttgagccgagtagccctctcgctacaagatcaagccgacgaatacctgatgatggggcttcgtattgccgaaggactagatatccaccgatacgaggcgctttcgccgcagcccctaaaccggaaccgccttgcccatttgaccgaactgggcatgatcgagatcgaaggtacgcggctgaaggccaccgcccaggggcgtgcggtgctgaacgcggtcattctggacctgatgtcggagtag

SEQ ID NO: 11756 - protein, 385 aa, Silicibacter pomeroyi DSS-3
MADDWQHGGFGLYVHWPFCQAKCPYCDFNSHVAREIDQKAWVRAYVSELERCAAELPGRVLNTIFFGGGTPSLMMPETVAAVIETVRRLWPTSNDMEITLEANPGSVEAGRFAAYRDGGVNRISMGVQALNDRDLHRLGRIHSVAEARAAFDIARRCFERVSFDLIYARQDQTPEAWRAELNEALAMAVDHLSLYQLTIEDGTAFGDRYARGKLRGLPADDDAADMYLITQEVCATHGLPAYEVSNHARPGSESRHNLIYWRYGDYVGIGPGAHGRITVDGQRFATESPLNPGAWLGAVAKGSGELSRVALSLQDQADEYLMMGLRIAEGLDIHRYEALSPQPLNRNRLAHLTELGMIEIEGTRLKATAQGRAVLNAVILDLMSE

SEQ ID NO: 11757 - DNA, 1167 bp, Bacillus clausii KSM-K16
  CDS (1)..(1167): transl_table=11
gtgagccactcgctatatgtgcatattccattttgtgaacatatctgtcattattgtgattttaataaagtatttattgaaaaccagcctgtggatgcctacattgacgctttaattgaagaaatgaaacaagcccgtgcccgtcgaagagatggcctagtgaaaacgatttatgttggtggtggcacgccgacagcgttaacggctatacaactagaacgactgttttcagcgatagagagccttttcgatttaagcgcactggaagaatggacggttgaagtgaacccagacagcgccgatgaagataagctcggagttatgaaacgttacggtgtcaaccgcttaagcataggcgcgcaaacattcaaccaaaagctgttagcggatattggacgaacccattcgcccgaaggggtggagcaggctgttcgcaaggcgcgttcattagggtttaccaatctttctattgatttaatgctcggcttgccaaaccaatcagttgccgactttgaacgctcagtcgatcgcgctttgtccttagacgtagaacatatttccgcttatgcattaaaaattgaaaaacaaactgtcttttataaccgttacaaaaaagggcagctccacttgccccctgaagacgatgatgtagcgatgtatgagctgcttaagaaaaaaacagctgcagctgggcttgaccagtatgaaattagcaatttcggcaaacctggctatgagagcaaacataatcttgtctattggcgcaatgaaccatatgccggttttggcgccggtgcttctggctacgaaaatcaagtgcgctaccaaaatatcaatcccgttgcaaaatatattgaagctgtgtgggctactggagagccgcggttgcggacccatgtcgtcagtcgggccgagtgtttagaagaggctgtttttttagggcttcgtattcgtagcggtataaataaagctgatttttttgcgcgttatgggctagacgtggagtcgctgtttgccaaagaaatcgcagaggggaaacgaaaagggcttctagaagaaaacgaccacgtgattcgtttgacagaaaatgggttgttgcttgggaatgaagcatttgcattgtttgtggctgttttagaagacagcgagctgcaaggcgatcattga

SEQ ID NO: 11758 - protein, 388 aa, Bacillus clausii KSM-K16
MSHSLYVHIPFCEHICHYCDFNKVFIENQPVDAYIDALIEEMKQARARRRDGLVKTIYVGGGTPTALTAIQLERLFSAIESLFDLSALEEWTVEVNPDSADEDKLGVMKRYGVNRLSIGAQTFNQKLLADIGRTHSPEGVEQAVRKARSLGFTNLSIDLMLGLPNQSVADFERSVDRALSLDVEHISAYALKIEKQTVFYNRYKKGQLHLPPEDDDVAMYELLKKKTAAAGLDQYEISNFGKPGYESKHNLVYWRNEPYAGFGAGASGYENQVRYQNINPVAKYIEAVWATGEPRLRTHVVSRAECLEEAVFLGLRIRSGINKADFFARYGLDVESLFAKEIAEGKRKGLLEENDHVIRLTENGLLLGNEAFALFVAVLEDSELQGDH

SEQ ID NO: 11759 - DNA, 1137 bp, Dehalococcoides ethenogenes 195
  CDS (1)..(1137): transl_table=11
atgacagacaccagccttgccttatatctccacttccctttttgcctgcaaaaatgcggatactgctcgtttgtttcttaccctgcaagattggattgcctgcctgattatgtaaaatgccttagaaaagaaataaagtccagggcaagcgggctttactttcacagcctgtattttggcggcggcacacccagcctcttatccccttcgcaagtggcagatattttagccggtatacgcactgcggcacatttgttgccggatgcggaaattacctttgaggcaaatcccggtacgctggccctgccttatcttccagaaataaaaagcctgggcataaaccgcttaagtctgggtatccaaagcttttcgggtgccgaactgacaatgcttgggcggctgcataatgccgcaaaagcccgtcaagcatataaacaggccagagctgccggctttaataatatcagccttgaccttatatatggcctgccggattccagcgttagttcttttaaaaaaaatctggcagaagcgctggcacttgctccggaacatatctcactttacggcctgactttagaagaagatacacctatgtaccggcaggtgcaagaaggattgctgcctgaaataaatgccgaaactgcggctgaccagtatcaagccgccgaagacatactggcgaaagccggataccgccattatgagatatctaactgggctaaaccgggatacgaaagccgccataaccttacctactggcaaaacaggccgtatctgggtctgggagcggccgggcactcctttcttgagaattggcggctggcaaatacctccagcctggatgaatatttaaacagatggcaaaatgacctcccgccgacgccatctgaaaatatatatctagatttggaaaatcaactggctgaaaccatcatactgggtcttcggctggataagggtataactgccgaagatattgaaaaccgcttcgggcaacatgtgatggacaaatattttccggttatacaggaatgcacgggcctgggccttttagaaaaatctgatggcggtatcagcctgactcccagaggacgcttgctttcaaacgaggttttctggcgtttcttgccttaa

SEQ ID NO: 11760 - protein, 378 aa, Dehalococcoides ethenogenes 195
MTDTSLALYLHFPFCLQKCGYCSFVSYPARLDCLPDYVKCLRKEIKSRASGLYFHSLYFGGGTPSLLSPSQVADILAGIRTAAHLLPDAEITFEANPGTLALPYLPEIKSLGINRLSLGIQSFSGAELTMLGRLHNAAKARQAYKQARAAGFNNISLDLIYGLPDSSVSSFKKNLAEALALAPEHISLYGLTLEEDTPMYRQVQEGLLPEINAETAADQYQAAEDILAKAGYRHYEISNWAKPGYESRHNLTYWQNRPYLGLGAAGHSFLENWRLANTSSLDEYLNRWQNDLPPTPSENIYLDLENQLAETIILGLRLDKGITAEDIENRFGQHVMDKYFPVIQECTGLGLLEKSDGGISLTPRGRLLSNEVFWRFLP

SEQ ID NO: 11761 - DNA, 1158 bp, Staphylococcus aureus subsp. aureus COL
  CDS (1)..(1158): transl_table=11
ttggataaaaagtctgagaagcggggcattaaaatgacggtacaaagtgcatatatacatattccattttgtgtaagaatatgtacatattgtgatttcaataaatattttatacagaatcaacctgtagatgagtacttagatgcactaatcacagaaatgtctacagcaaaatataggatcttaaagaccatgtatgtaggtggcggcacaccaacggccctttctattaatcagttggaaagattacttaaagcaatacgtgatacgtttacaatcacaggcgagtatacatttgaagcaaatcctgatgagttaactaaagagaaagtccaactattagagaaatatggagtaaaaaggatttcaatgggcgttcaaacattcaagccggagttattgtctgttttaggtagaacgcacaatactgaagatatttacacttcggtgttaaatgctaaaaacgcaggtattaaatcaatcagtttagatttaatgtatcatttaccgaaacagacgattgaagattttgaacaaagtttagatctagctttagatatggatattcaacatatttcgagttacggcttaatacttgaacctaaaacccaattttataatatgtatagaaaaggcttgctcaaacttcctaatgaggatttaggtgctgacatgtatcagttgctgatgtctaagatagaacaatctcctttccatcaatacgaaatatctaattttgcattagatggccatgaatcagaacataataaggtttactggtttaatgaggaatattatggatttggagcaggtgcaagtggttatgtagatggtgtgcgttatacgaatatcaatccagtgaatcattatatcaaagctataaataaagaaagtaaagcaattttagtatcaaataaaccttctttgactgagagaatggaagaagaaatgtttcttgggttgcgtttaaatgaaggtgtgagtagtagtaggttcaaaaagaagtttgaccaatctattgaaagtgtctttggtcaaacaataaataatttaaaagagaaggaattaattgtagaaaagaacgatgtgattgcacttacaaatagagggaaagtcataggtaatgaggtttttgaagctttcctaataaatgattaa

SEQ ID NO: 11762 - protein, 385 aa, Staphylococcus aureus subsp. aureus COL
MDKKSEKRGIKMTVQSAYIHIPFCVRICTYCDFNKYFIQNQPVDEYLDALITEMSTAKYRILKTMYVGGGTPTALSINQLERLLKAIRDTFTITGEYTFEANPDELTKEKVQLLEKYGVKRISMGVQTFKPELLSVLGRTHNTEDIYTSVLNAKNAGIKSISLDLMYHLPKQTIEDFEQSLDLALDMDIQHISSYGLILEPKTQFYNMYRKGLLKLPNEDLGADMYQLLMSKIEQSPFHQYEISNFALDGHESEHNKVYWFNEEYYGFGAGASGYVDGVRYTNINPVNHYIKAINKESKAILVSNKPSLTERMEEEMFLGLRLNEGVSSSRFKKKFDQSIESVFGQTINNLKEKELIVEKNDVIALTNRGKVIGNEVFEAFLIND

SEQ ID NO: 11763 - DNA, 1176 bp, Neisseria gonorrhoeae FA 1090
  CDS (1)..(1176): transl_table=11
atgcacaccatttcctttccaaaccgcacccgactcaccgccctgccgcccctgtcgctctatatccacatcccgtggtgcatcaaaaaatgcccgtattgcgacttcaattcccacagcctgaaaaacggattgcccgaagccgcctatatcgacgcgctgctgaccgacttgcagcttgaattgcccaatatttggggcaggccggtggaaacgatatttttcggcggcggtacgcccagcctgtttcaggcggaatcgattgaccgtttgttaagcggcgtgcgttcgctgttgcgcttgcagcccgaagcggaaattacgttggaagccaatccgggtacagttgaaatcgagaagtttcaaggatttaaagacgcaggcatcacgcggctttctattggtgtacaaagcttcaacgacgatatgctctcaaggctggggcgcgtccacaacggcaaggaagccttaaccgccatagctaccgccctgaaattatttgataaagtcaatatcgacttgatgtatgccctgccgaaccaaaccgttcagacggcattagacgacgtgcaaaccgccatcgccacagacgcaacccacatcagcgcatatcatctgacgatggagccgaacacgccgttcggtcatacgccgccgaaaggtttaccgcaagacgaagcggcgctcgacatcgaagacgcggtacacggcacactggaaggcgcgggttttatccactacgaaacatcggcttttgcgaaacccaccatgcagtgccgccacaatttgaactactggcagttcggcgattatttgggcataggcgcgggcgcgcacggcaaaatctcctatcccgaccgcatcgagcgcaccgtccgccgccgccaccccaacgactacctcgccttaatgcaaagtcagccgggcgaagccgtcgaacgcaaaaccgtcgccgccgaagatttgccgttcgaattcatgatgaacgccctgcgcctgaccgacggcgtacccgccgcgatgttgcaggagcgcacgggcgtacccgccgccaaaatcatggtgcaaatcgaaacggcaaggcaaaaaggcctgctggaaaccgacccgaccgtattccgcccgaccgaaaaaggacgcttgtttttaaacgatttgttgcagtgttttttataa

SEQ ID NO: 11764 - protein, 391 aa, Neisseria gonorrhoeae FA 1090
MHTISFPNRTRLTALPPLSLYIHIPWCIKKCPYCDFNSHSLKNGLPEAAYIDALLTDLQLELPNIWGRPVETIFFGGGTPSLFQAESIDRLLSGVRSLLRLQPEAEITLEANPGTVEIEKFQGFKDAGITRLSIGVQSFNDDMLSRLGRVHNGKEALTAIATALKLFDKVNIDLMYALPNQTVQTALDDVQTAIATDATHISAYHLTMEPNTPFGHTPPKGLPQDEAALDIEDAVHGTLEGAGFIHYETSAFAKPTMQCRHNLNYWQFGDYLGIGAGAHGKISYPDRIERTVRRRHPNDYLALMQSQPGEAVERKTVAAEDLPFEFMMNALRLTDGVPAAMLQERTGVPAAKIMVQIETARQKGLLETDPTVFRPTEKGRLFLNDLLQCFL

SEQ ID NO: 11765 - DNA, 1134 bp, Bacteroides fragilis NCTC 9343
  CDS (1)..(1134): transl_table=11
atggcaggcatatacatacacgtccccttctgtaagacacgctgtatctattgcgatttttactcaacgacgcgaagcgaatggaaaggacgctacatcgaagcactctgcaaagagctggaaatgagatatacttacctgaaaggaaagcctattgagacgctctactttggtggaggtactccttcgcagctcgacgaaaaggatttccggaaagtattcgacaccgtccgccgggtttatgggatggagaattgccatgaaataacacttgaagccaatccggatgacctctgtccggaatacctgcaaatgctctccgaattgccgttcaaccgcatcagcatgggcatccagacatttgacgacactacgctcaagttgctgaaacgccgccacaatgcggctcaagccattcgtgcggtagagttgtgccgtgcccacggtttccgcaacatcagcatcgacctgatctacgggctccccggtgaaacaacggaacgctgggaaaaagacttgcaacaggctattgccctagacgtggaacatatatcggcttatcacttgatttacgaagaaggtactcccatttataaaatgttgcaaaagcatcaggtcgaagaggtggacgaggacagcagtgtccggttcttcaccttattaatagaccggttgcgtgaagccggatacgagcattatgaaatatccaacttctgcaagccgggcatgtattcgcgccacaacacttcgtactggcagggagtaagttatctcggctgcggcccgtcggcacactctttcgacggacaaacccgggaatggaactgctcttcgatcgaaaaatacatgtccggcattgaaagcggacaacgggacttcgaacgggaagagcgggatctgaccacccgatacaacgaatttatcattacctctgtccgcactcaatggggaatttcactcgaacgcctcagtaatgattacggaacgcaactggaacaatattgtctcaaaatggcacgtccttctttagaaaacggcaaattagaaatatacgaaggtgctttgcgcctcacccgcgaaggaatttttatttccgacagcatcatgagcgacctgctctgggtggaaaactaa

SEQ ID NO: 11766 - protein, 377 aa, Bacteroides fragilis NCTC 9343
MAGIYIHVPFCKTRCIYCDFYSTTRSEWKGRYIEALCKELEMRYTYLKGKPIETLYFGGGTPSQLDEKDFRKVFDTVRRVYGMENCHEITLEANPDDLCPEYLQMLSELPFNRISMGIQTFDDTTLKLLKRRHNAAQAIRAVELCRAHGFRNISIDLIYGLPGETTERWEKDLQQAIALDVEHISAYHLIYEEGTPIYKMLQKHQVEEVDEDSSVRFFTLLIDRLREAGYEHYEISNFCKPGMYSRHNTSYWQGVSYLGCGPSAHSFDGQTREWNCSSIEKYMSGIESGQRDFEREERDLTTRYNEFIITSVRTQWGISLERLSNDYGTQLEQYCLKMARPSLENGKLEIYEGALRLTREGIFISDSIMSDLLWVEN

SEQ ID NO: 11767 - DNA, 1122 bp, Chlamydophila abortus S26/3
  CDS (1)..(1122): transl_table=11
atgaatggtaaatcgcctttagccctgtatatccattttcctttctgttcaaagaaatgccattactgtagcttttatacgattccctacaatcctgaatcggtaagtctgtattgtaatgctattcttcaagaaggtttgcaaaaactgtcgacaattgaggacacgcatttcgtcgatactgtatttcttggtggaggaacaccctcattaattcctccacactatctccacaacataattcaaacactcgctccccacgctcaagaaatcaccctagaggctaatcccgaagacctttctgaattttatttaagagaactgcttcttactgctgtgaataggattagcattggagcacaaacttttcatgatccccttcttaaagccttaggcagaatccactcctcagcagcatctatagacgccgtacaccgctgttatgaacatggatataacaacatctccttagatctgatttatggtctgcccacacaatcgctagcagattttatcacagaccttcatcaagctctgactcttccaattgcgcatatctctctttataatctcaccctagatccccacacatctttttataagcaccgtcgtattctagctccttctattgctgatgatgatatactcgctgctatgagcctatctgctgaagagctcctgacctcacgtggattttctcgttatgaactcgcctcttatgccaaatctcaagcgcaatccaaacacaatctttattattggacagatcaaccattcctaggcttaggagtttctgcctcacaatatattcataaggtgcggtcaaaaaatctctcaagaatctctcagtatctacgtgcagtacgtaaaaatcttcctgtgcatgaatctacagagagcttaccagaaaacgaacgtatcaaagaagctctagctctaagattacgtcttacccaaggagcgagatggaaagatttccctgctccattaatggagtctcttgcctcccttcctctcattaaagaactcttcggtcacaataacgaatttttattcttaaataaacaaggtcgtttatttcatgatacaattgctgaagaaatcatgaatatctctttttaa

SEQ ID NO: 11768 - protein, 373 aa, Chlamydophila abortus S26/3
MNGKSPLALYIHFPFCSKKCHYCSFYTIPYNPESVSLYCNAILQEGLQKLSTIEDTHFVDTVFLGGGTPSLIPPHYLHNIIQTLAPHAQEITLEANPEDLSEFYLRELLLTAVNRISIGAQTFHDPLLKALGRIHSSAASIDAVHRCYEHGYNNISLDLIYGLPTQSLADFITDLHQALTLPIAHISLYNLTLDPHTSFYKHRRILAPSIADDDILAAMSLSAEELLTSRGFSRYELASYAKSQAQSKHNLYYWTDQPFLGLGVSASQYIHKVRSKNLSRISQYLRAVRKNLPVHESTESLPENERIKEALALRLRLTQGARWKDFPAPLMESLASLPLIKELFGHNNEFLFLNKQGRLFHDTIAEEIMNISF

SEQ ID NO: 11769 - DNA, 1143 bp, Corynebacterium glutamicum ATCC 13032
  CDS (1)..(1143): transl_table=11
atgtcagtttttggtgtgtatattcatgtgccgttttgttcaactcggtgcggttattgcgatttcaacacctatactgctggggaattaggtagtactgcaggcccggacacctatcttgactcgttggaagttgagttggagatggctgtggcttcgctggataatcctcggcaggcggaaactatctttattggcgggggtaccccgtcgttgattggtgcggacggtttggccagggttttgggggctgtgcgcaatacttttggcattgcggatggtgcggaagtcaccacggagtccaatccggagtctacctcgcctgagtttttcgatggcctgcgtgaggcgggctacaacaggatttcgttagggatgcagtcggcgtcgtcaagcgttttgaaggtgctggaccgcacgcacaccccagggcgcccggtggcggcggccaaggaggcacgtgaggcggggtttgagcatgtcaatttggacatgatttatggcacgccgacagagaccgatgatgatgtccgcaagacgctggatgcggtgctcgaagcgaacgtggatcacgtgtctgcctattccttgatcgtggaagatggcacggcgatggcgcgcaaggtgcgcaagggcgagctgccagcgccggacgaggatgtctacgctgatcgttttgagcttatcgacgctcgcctgcgctcagctggtttcgattggtacgaggtgtccaactgggcgaaacccggcggagaatgcaagcacaacatgggctattgggtcgacggcgactggtggggcgcgggcccgggcgcgcactcgcacatcggcgaccgccgcttctacaacatcaagcacccagcgcgttactccgcgcagattgcggccggcgagctgcccattaaggaaacagagcggctgacggcggaagatcaccacaccgagcgcgtcatgcttggtttgcgcctgaaacaaggcgtgccgctgaaccttttcgcacccgcagcgcgcccggtcatcgaccgtcatatcgcagggggcctgctgcacgtcaatgcgctgggcaacctggcggtgaccgatgcgggacgtttgcttgccgacggcatcatcgccgacattttgcttagtgaagaagactaa

SEQ ID NO: 11770 - protein, 380 aa, Corynebacterium glutamicum ATCC 13032
MSVFGVYIHVPFCSTRCGYCDFNTYTAGELGSTAGPDTYLDSLEVELEMAVASLDNPRQAETIFIGGGTPSLIGADGLARVLGAVRNTFGIADGAEVTTESNPESTSPEFFDGLREAGYNRISLGMQSASSSVLKVLDRTHTPGRPVAAAKEAREAGFEHVNLDMIYGTPTETDDDVRKTLDAVLEANVDHVSAYSLIVEDGTAMARKVRKGELPAPDEDVYADRFELIDARLRSAGFDWYEVSNWAKPGGECKHNMGYWVDGDWWGAGPGAHSHIGDRRFYNIKHPARYSAQIAAGELPIKETERLTAEDHHTERVMLGLRLKQGVPLNLFAPAARPVIDRHIAGGLLHVNALGNLAVTDAGRLLADGIIADILLSEED

SEQ ID NO: 11771 - DNA, 1215 bp, Pseudomonas syringae pv. syringae B728a
  CDS (1)..(1215): transl_table=11
atgacccacgattcgcctgcgcagccgctgtttctcggcgagagcggcttctcgtcggagagcccgcgccctgcactgccgcacctgccgccgctgtcgctgtacatccatattccgtggtgcgtgcgcaaatgcccgtactgcgacttcaactcgcacaccgccagcccggtgctgccggaacaggaatatgtcgacgccctgctcgccgacctcgaccttgacctgccgcacgtctacggccgcgagctgcaatcgatcttctttggtggcggtacgccgagcctgttcagcgccgatgcgctggggcgcctgctgcaaggcgtcgaacagcgcatccgctttgccagcgacatcgagatcaccctggaagccaaccccggcaccttcgaacaggtcaagttcagcgcctatcgcggcctgggcatcaatcggttgtcgatcggcattcagagctttcaggaatccaaactcaaggcgctgggccgcattcataacggtgacgaagcgattcgtgctgccgacatggcgcgccgggccggtttcgacaacttcaacctggacctgatgcacggcctgccggatcaatcccaggacgaggcgctggccgatctgcgccaggccattgccctcgcgccgacccacctgtcctggtatcaactgaccctggagcccaacacggtgttctggaatcagccaccggtgctgcccgaagacgacattctctgggacattcaggaaaccggacagcagttgctggccactcatggctacgcgcaatacgaagtgtcggcttatgcacagcccgggaaaccggcgcggcataacctcaactattgggcgttcggtgatttcatcggcatcggcgcaggcgcacacggcaagctgagccacccggacgggcgcattgtccgtacttggaaaacccggctgcccaaggattacctgaacccggacaagccgtttcaggccggttccaagctgttgccgctcgatgaattgccgttcgaattcctgatgaacgcactgcgactgacaaatggtgtggacgctgcgttatttcgcgaaagaaccggtctaagcctcgattcgctggccgaggcgcgtcgacaggctgaacaaaagggcttgctgcaccaggacccgacacgcctgatcgccacgccacaaggccagctgttcctcaatgacctgctgcaatactttctgatctaa

SEQ ID NO: 11772 - protein, 404 aa, Pseudomonas syringae pv. syringae B728a
MTHDSPAQPLFLGESGFSSESPRPALPHLPPLSLYIHIPWCVRKCPYCDFNSHTASPVLPEQEYVDALLADLDLDLPHVYGRELQSIFFGGGTPSLFSADALGRLLQGVEQRIRFASDIEITLEANPGTFEQVKFSAYRGLGINRLSIGIQSFQESKLKALGRIHNGDEAIRAADMARRAGFDNFNLDLMHGLPDQSQDEALADLRQAIALAPTHLSWYQLTLEPNTVFWNQPPVLPEDDILWDIQETGQQLLATHGYAQYEVSAYAQPGKPARHNLNYWAFGDFIGIGAGAHGKLSHPDGRIVRTWKTRLPKDYLNPDKPFQAGSKLLPLDELPFEFLMNALRLTNGVDAALFRERTGLSLDSLAEARRQAEQKGLLHQDPTRLIATPQGQLFLNDLLQYFLI

SEQ ID NO: 11773 - DNA, 1152 bp, Haemophilus influenzae 86-028NP
  CDS (1)..(1152): transl_table=11
atgctaaaacttcccccactttccctttatatacacattccttggtgcgttcaaaaatgcccttattgtgattttaattcgcacgcacaaaaaggcgatataccagaacaagactatatttatcatcttctgcaagatttgcaggctgatttgcaacgctttaaagattctattcaacaacgaaaactccattcaatttttattggtggcggtacaccaagtttgttctcggcagaaagcattgcgtatctcttaaaagaaataaaaaaacagattgattttgaagataatattgaaatcacattagaagctaatcctggcacggtagaagctgaacgttttaaaggttatgtatccgcaggcattatgcgaatttctatgggaattcaaagtttcaatgatgataaattacaacgtcttgggcggattcataatgcagcagaggcaaaaagtgcggtcaatttagcgaaagtttctgggctaaaaagtttcaatttagatttaatgcacggtttgcctaaccaaacgttggaagaagccttagatgatcttcgtcaagcaattgagctatctcctccccatatttcttggtatcagctgactattgaaccaaatacgatgtttgcttatcgcccacctaaattaccagatgatgacgcactttgggacatttttgagcaaggtcaccaacttttaacgatggcaggctaccagcaatatgaaacgtctgcttacgcaaaagcgggttttcaatgtaaacataatttgaattattggcgatttggggattatttagccattggctgtggcgcacacgggaaattgacgtttccgactggcgagattactcgcttttctaaaaccaagcacccgaaaggttatttgcgtggcgaatatctttacgaagaaaaaaacgtgccagaaattgaccgcccttttgagttttttatgaatcgctttcgtttgttagaagcggttcccaaacaagaatttgaagattacacaggcttgtcgcaaagtgcggtgaaaaatcaaattgattttgccattcaacaaaactatattgtggaaaacgctgattcttggcaaatcactgagcacggcaagttatttctcaatgaactattggaattatttttaactgaagaatag

SEQ ID NO: 11774 - protein, 383 aa, Haemophilus influenzae 86-028NP
MLKLPPLSLYIHIPWCVQKCPYCDFNSHAQKGDIPEQDYIYHLLQDLQADLQRFKDSIQQRKLHSIFIGGGTPSLFSAESIAYLLKEIKKQIDFEDNIEITLEANPGTVEAERFKGYVSAGIMRISMGIQSFNDDKLQRLGRIHNAAEAKSAVNLAKVSGLKSFNLDLMHGLPNQTLEEALDDLRQAIELSPPHISWYQLTIEPNTMFAYRPPKLPDDDALWDIFEQGHQLLTMAGYQQYETSAYAKAGFQCKHNLNYWRFGDYLAIGCGAHGKLTFPTGEITRFSKTKHPKGYLRGEYLYEEKNVPEIDRPFEFFMNRFRLLEAVPKQEFEDYTGLSQSAVKNQIDFAIQQNYIVENADSWQITEHGKLFLNELLELFLTEE

SEQ ID NO: 11775 - DNA, 1203 bp, Pseudomonas fluorescens Pf-5
  CDS (1)..(1203): transl_table=11
atgagccacgagccctccgcatcgccgctgattctcggcggcgcgcatacgccccgggcggcgctgccccagttgccgcccctggcgctgtacatccacatcccgtggtgtgtacgcaaatgcccctactgcgacttcaactcccacgcggccagcccgacgctaccggaagaggagtacgtcgacgccctgctggccgacctcgaccaagacctgcacgccgtgcacggtcgcgagctgagctcgatcttcttcggcggcggcaccccgagcctgttcagcgcccaggccctgggtcggctgctcaagggcgtggaacagcgcatccggtttgcccccgacatcgaaatcaccctggaagccaaccccgggaccttcgagcaggaaaaattcaccgcctaccgcgccctgggcatcaatcgcctgtccatcggcatccagagtttccaggaacagaagctcaaggccctgggccgcatccacaacggcgatgaagcgattcgcgccgctggcatggcgcgccaggccgggttcgacaacttcaacctggacctgatgcacggcctgccggaccagtccctggacgatgccctgggcgacctgcgccaggccattgcgatgaagccgacccacctgtcctggtaccagctgaccctggagcccaatacggtgttctggaaccagccaccggtactgccggaagacgacaccctgtgggacatccaggaagccggacaggccctgctggccgaacacggctatgcccagtacgaagtctcggcctacgcccagcccgggcgcgcggcgcggcacaacctgaactactggagctttggcgacttcatcgggatcggcgccggtgcccacggcaaactcagccacccggacgggcgcatcctgcgcacctggaagacccgcctgcccaaggactacctgaacccggccaagcagttcaaggcgggcgagaaggccctgggcaacgaagagctgccgttcgagttcctgatgaacgccctgcgcctcaccgatggcgtggacgctgcgctgttcgcccaacgcaccggcctggacctggtcagcctcgccgaaggtcggcgccaggccgaacaaagcggcttgttgcaggtcgaaccgtcacgcctggcggccacggcccgcgggcaactgtttctcaatgacctgctgcaatactttctgatctaa

SEQ ID NO: 11776 - protein, 400 aa, Pseudomonas fluorescens Pf-5
MSHEPSASPLILGGAHTPRAALPQLPPLALYIHIPWCVRKCPYCDFNSHAASPTLPEEEYVDALLADLDQDLHAVHGRELSSIFFGGGTPSLFSAQALGRLLKGVEQRIRFAPDIEITLEANPGTFEQEKFTAYRALGINRLSIGIQSFQEQKLKALGRIHNGDEAIRAAGMARQAGFDNFNLDLMHGLPDQSLDDALGDLRQAIAMKPTHLSWYQLTLEPNTVFWNQPPVLPEDDTLWDIQEAGQALLAEHGYAQYEVSAYAQPGRAARHNLNYWSFGDFIGIGAGAHGKLSHPDGRILRTWKTRLPKDYLNPAKQFKAGEKALGNEELPFEFLMNALRLTDGVDAALFAQRTGLDLVSLAEGRRQAEQSGLLQVEPSRLAATARGQLFLNDLLQYFLI

SEQ ID NO: 11777 - DNA, 1326 bp, Psychrobacter arcticus 273-4
  CDS (1)..(1326): transl_table=11
atgtcaaatatcaaacctaatcacctgtttcagcaatcaaaccctcttcatgatgctcattcgaatgcaatagaggtgaaagacattccattggcgttatatatccatatcccgtggtgtgtcaaaaaatgcccctattgtgattttaattcacatgagctaccagtagacggtcagctgtccatgtatgatgagtatgtagatgcactgttgcaagatgccgccatgcagcagatattgacccaagggcgtgagattggctctatatttatcggaggtggtacgccgtcgttgttgcccattgcgcagtatcagcgattgtttgatggtttacagaaatattatgaatttgctagtgacatcgaaatcactatggaggccaatccaggcacacttgagcatgcaccatttgttgaatacttagaggtaggcatcaatcgtctatcgattggtgtgcaaagcttttctgctgagcaattaaccacgcttggacgtattcacaatcctatacaagcactatctgcgattaaagccgctcgagcggctggctttgagcgcgtaaacgtggatttgatgcatggattgccagagcaaactaggagcgaggcgttagacgatatacaaatggcacacaatgcaggtgcgacgcatatctcttggtatcagctgaccattgagcctaataccgtcttttatcgcagtcagccggttttacccgatgaggatcgtctggcagatattgaagaagcaggtcaaatattattacagaatttaggctatcacaattatgaggtatccgcatggtctggggcagcagataaaccttgtcgtcacaatgtcaactactggcagtttggcgattatctggcaatcggagcaggggctcacggcaaagtaacggttagggaaggggtcattgataacaaagttagccatgagatgactgctaacatattgatcaatgatgaagagaacaaacaagcaggtatctatcgctttagtaaatctcgtatgccaaaagactatatggaatatcaagaggctcatcagcccgatagggcgttaacaccagcgccaaaaatgattggctggcaagccattgatcaggatgagttgattagtgagtttatgctcaatgccttacgtttgcatgatggtgtaacgtggtcgttatttgagacgcgtacagggctaagttatgacagcgttacgatacaagtcactcaattaatcgagcaaggtctgctgacggacagtcttgaacaattgcagccgacagagcttggaaaaaggtacctcaatcaaatattaagagcatttttatag

SEQ ID NO: 11778 - protein, 441 aa, Psychrobacter arcticus 273-4
MSNIKPNHLFQQSNPLHDAHSNAIEVKDIPLALYIHIPWCVKKCPYCDFNSHELPVDGQLSMYDEYVDALLQDAAMQQILTQGREIGSIFIGGGTPSLLPIAQYQRLFDGLQKYYEFASDIEITMEANPGTLEHAPFVEYLEVGINRLSIGVQSFSAEQLTTLGRIHNPIQALSAIKAARAAGFERVNVDLMHGLPEQTRSEALDDIQMAHNAGATHISWYQLTIEPNTVFYRSQPVLPDEDRLADIEEAGQILLQNLGYHNYEVSAWSGAADKPCRHNVNYWQFGDYLAIGAGAHGKVTVREGVIDNKVSHEMTANILINDEENKQAGIYRFSKSRMPKDYMEYQEAHQPDRALTPAPKMIGWQAIDQDELISEFMLNALRLHDGVTWSLFETRTGLSYDSVTIQVTQLIEQGLLTDSLEQLQPTELGKRYLNQILRAFL

SEQ ID NO: 11779 - DNA, 1215 bp, Pseudomonas syringae pv. phaseolicola 1448A
  CDS (1)..(1215): transl_table=11
atgacccacgattcgcctgcgcagccgctgtttctcggcgagagcggtttctcgtcagaaagcccacgccctgcgctgccgcacctgccaccgctgtcgctgtacatccatattccgtggtgcgtgcgcaaatgcccgtactgcgacttcaattcgcacactgccagcccggtattgccggaacaggaatacgtcgacgccctgctcgccgacctggaccttgacctgccgcacgtctatggccgcgaactgcaatcgatcttctttggcggcggtacgccaagcctgttcagcgcagacgcactgggccgcctgctcaagggcgtggaacaacgcatccgctttgccagcgacatcgaaattaccctggaagccaaccccggcacctttgaacaggtcaaattcagcgcctatcgcggtctgggcatcaatcgactgtcgatcggcattcagagctttcaggagtccaaactcaaggcgctgggccgcatccacaatggcgacgaagcgattcgggctgccgatatggcgcgtcaggccggtttcgacaacttcaacctggacctgatgcacggtctgccggaccagtcccaggacgaagcgctggccgatctgcgccaggccattgccctcgcgccgactcatctgtcctggtatcaactgaccctggagcccaacacggtgttctggaatcagccaccggtgctgcccgaagacgacattctttgggatattcaggaaaccggacagcagttgctggccactcatggctacgcgcaatacgaagtgtcggcttatgcacagcccggaaaaccggccaggcataacctcaactattgggcattcggagatttcatcggtatcggcgcaggcgcacatagcaagttgagccatccggacggacgcatcatgcgtacctggaagacccggctgcccaaggattacctgaacccggacaagccgtttcaggccggggcaaagctgttgccgctcgatgaattgccgtttgaattcttgatgaatgcattgcgactgacaaatggagtggacgctgcgttatttcgtaaaagaaccggtctaagcctcgattcgctgaccgaggcgcgtcgacaggctgaacaaaaggggttgctgcaccaggacccgacacgcctgatcgccacgccgcaaggccagctgttcctcaacgacctgctgcaatactttctgatctaa

SEQ ID NO: 11780 - protein, 404 aa, Pseudomonas syringae pv. phaseolicola 1448A
MTHDSPAQPLFLGESGFSSESPRPALPHLPPLSLYIHIPWCVRKCPYCDFNSHTASPVLPEQEYVDALLADLDLDLPHVYGRELQSIFFGGGTPSLFSADALGRLLKGVEQRIRFASDIEITLEANPGTFEQVKFSAYRGLGINRLSIGIQSFQESKLKALGRIHNGDEAIRAADMARQAGFDNFNLDLMHGLPDQSQDEALADLRQAIALAPTHLSWYQLTLEPNTVFWNQPPVLPEDDILWDIQETGQQLLATHGYAQYEVSAYAQPGKPARHNLNYWAFGDFIGIGAGAHSKLSHPDGRIMRTWKTRLPKDYLNPDKPFQAGAKLLPLDELPFEFLMNALRLTNGVDAALFRKRTGLSLDSLTEARRQAEQKGLLHQDPTRLIATPQGQLFLNDLLQYFLI

SEQ ID NO: 11781 - DNA, 1200 bp, Dechloromonas aromatica RCB
  CDS (1)..(1200): transl_table=11
atggcacgcaccattcctatcttcgccgccggcaagacaccctccgtttcctcatcattggagttccgcgtctcgccgccactcgccctttatgtgcacgtgccgtggtgcgtccagaagtgcccgtattgcgacttcaattcgcacgaggccaacgggacgatccctgaacgtgaatatgtcgatgcgctgatcgctgacctgcaatctgccctgccgctgatctggggccggccggtggtcagtgtcttttttgggggtggcacacccagcctgctgtcgccggcggcggtcgacgaactgatcgccaccttccgggcgctggccatgctggcgccggatgccgaaatcacgctggaagcaaacccgggaacggtcgaggcggagaagttcgccggcttccgctccgccggcgtcaatcgcctgtctctgggcattcagagcttcaacgatgaacacctgcaagcgctcggccgcatccacggcgccgaagaggccaagcgcgcggcacaactggccggcgagcattttgactcgttcaacctcgacctgatgtacggcctgccggggcaaacgcacgaacaagcgctctctgatgttgaaaccgcgctgagcttttccccttcacatctgtcctgctaccagctgacgctggagccgaatacccgcttcgccgccttcccaccggaactgccggagagtgatatctgcgccgacatgcaggaaagcatcgaagctcgcctggctgctgccggtttcagcaattacgaaacctcggcctttgcccaacgcggcaagcagtgcaagcacaacctcaattactggtatttcggtgattatcttggcatcggcgctggcgcccactccaagctgaccttgcatgaccgggtactgcgccagatgcgctggaaacacccgaaggcctacctggaaaatatccgcagcggccacgcagtgcaggaagacaatcaggttgaagtggccagcctgcccttcgaattcatgatgaatgcgctgcgcctggccgacggcttccacccgtccctgttcgaagcgcgcactgcccagtcgctgaaccgcgtcctgccgcaaatgaaagccgcagaatccgacggactgctgatcgtcggcccggaaaaaattgcgccgaccgcgaagggccggcgctttctgaacgtgttgctagaacgttttctctag

SEQ ID NO: 11782 - protein, 399 aa, Dechloromonas aromatica RCB
MARTIPIFAAGKTPSVSSSLEFRVSPPLALYVHVPWCVQKCPYCDFNSHEANGTIPEREYVDALIADLQSALPLIWGRPVVSVFFGGGTPSLLSPAAVDELIATFRALAMLAPDAEITLEANPGTVEAEKFAGFRSAGVNRLSLGIQSFNDEHLQALGRIHGAEEAKRAAQLAGEHFDSFNLDLMYGLPGQTHEQALSDVETALSFSPSHLSCYQLTLEPNTRFAAFPPELPESDICADMQESIEARLAAAGFSNYETSAFAQRGKQCKHNLNYWYFGDYLGIGAGAHSKLTLHDRVLRQMRWKHPKAYLENIRSGHAVQEDNQVEVASLPFEFMMNALRLADGFHPSLFEARTAQSLNRVLPQMKAAESDGLLIVGPEKIAPTAKGRRFLNVLLERFL

SEQ ID NO: 11783 - DNA, 1344 bp, Thermobifida fusca YX
  CDS (1)..(1344): transl_table=11
gtgaccacactgcacagctatcccgttgccgcgccccccgcggacacgccgtaccgcacctacgtctacggctatccgcacaagaccgcctaccgtccgctcatcccggccccgcggctggccgacgtgtggcgggacgagcccaccgatgccctgttcctgtacttccacattccgttctgtgaagtgcgctgcgggttctgcaacctgttcacccgcgcggtaccgcctgccgagcaggtcactgcctacctggatgcgcttgcccggcaggctgaggcggtcgcggacgcgctcggcggcacagcgcggttcgcccgtgctgctttcggcggcggcactcccacctatctgaccgctgacgaactccaccggctctacgacctggccgaccgggttcttggcgtggatttggcggccattcccacgtcggtggagacttctccggcaaccgccaccccggagcgtctcgatgtggtggcggcccgcggggccagccggatcagtatcggggtgcagagtttcctggacgccgaggcgcacgcggtggggcggccgcagcgccgcgccgacgtggaccgggcgcttgccgcgatccgcagccacgccccgcgcgcccggctcaacatcgacctcatctacggcattgccgggcagaccccggacagttggcgctattcgctggacgctgccgtggcgtaccggccggaggagatctacctgtacccgctgtatgtgcgcccgctgaccgggttggggaagcgcggccgggcgtgggacgaccagcgccgcaccctctaccagcagggccgcgactatctgctggagcgcggctatcggcaggtgtcgatgcgcatgttcgagcgggttgatgcgccgtcggagacggggcccgcctactgctgtcagactgacggcatggtcggtttgggctgcggggcccgctcctacacccgcgggctgcactattccttcgattacgcggtcggtgtgcgtcaggtgcgggcgatcctcgacgactacatttcccgtggtccgggcgggttcgactgtgccgaagtggggttccggcttgacgaggacgagcggcggcggcgccacctgctgcagtcgctgctgcaagccgacggtctcgaccttgactggtaccggtcgcggttcgcttctgatccgcgcaccgactttcccgcggagttcgcggttttgacccagcgtggctgggtgacggaaacctcccgggtggtgcggctcaccgacgaagggctcgcctactccgacacggtgggtccgctgttcttctcacccagggtgaccaggctgatggcggagtacgacgcgcgatga

SEQ ID NO: 11784 - protein, 447 aa, Thermobifida fusca YX
MTTLHSYPVAAPPADTPYRTYVYGYPHKTAYRPLIPAPRLADVWRDEPTDALFLYFHIPFCEVRCGFCNLFTRAVPPAEQVTAYLDALARQAEAVADALGGTARFARAAFGGGTPTYLTADELHRLYDLADRVLGVDLAAIPTSVETSPATATPERLDVVAARGASRISIGVQSFLDAEAHAVGRPQRRADVDRALAAIRSHAPRARLNIDLIYGIAGQTPDSWRYSLDAAVAYRPEEIYLYPLYVRPLTGLGKRGRAWDDQRRTLYQQGRDYLLERGYRQVSMRMFERVDAPSETGPAYCCQTDGMVGLGCGARSYTRGLHYSFDYAVGVRQVRAILDDYISRGPGGFDCAEVGFRLDEDERRRRHLLQSLLQADGLDLDWYRSRFASDPRTDFPAEFAVLTQRGWVTETSRVVRLTDEGLAYSDTVGPLFFSPRVTRLMAEYDAR

SEQ ID NO: 11785 - DNA, 1233 bp, Thermobifida fusca YX
  CDS (1)..(1233): transl_table=11
atgccttcagctccactcgacggtacgcctgttcccccggacggctccctgcctgccgatgcgctcgccgagctcggcacccggccgttcgggttctacgtgcacgtgccgttctgcgcgacccgctgcggctactgcgacttcaacacctacaccgccgcggagctgcgctcgcgggacggaacagcagtcgcctccccgcgcacctacgcggaccaggcgatcgctgaaatagcgctcgcccggcgggtgctcggcgaccgcgaactcccggtgcgtaccgtcttcatgggcggcggcacccccaccctgctctccccggaggaactcggccgcatcctcgacgcgatcgacgcgcagttcgggctcgcccccgacgccgagatcaccaccgaagccaacccggaaaccgtggacgcgggcatcctcgcccggttgcgcgaagcagggttcacccggatctccttcgggatgcagagcgccaaagcgcacgtgctcgcggtcttggaacgcacccacaccccgggacggcccgaacagtgcgtggcctgggcccgccaggccgggttcgcgcacgtcaacctggacctcatctacgggacccccggggagagcgacgccgactggaaagagtccctcaccgccgcgatcgcggccggcccggaccacatctccgcctactcgctcatcgtggaagaaggcacccggctcgccgcccgggtgcgccgcggcgagctgaccccgttcgacgacgacgtgctggccgaccgctacatcatggccgacgaactgctctccgccgcgggactgcagtggtacgaggtgtcgaactgggcagccgaccctaccgcgcgcagcgcgcacaacctgctgtactggaccggcggccactggtggggggtcggccccggtgcgcacagccacatcggcggggtgcggtggtggaacgtcaaacaccccgctgcctacgcggcccgcctggccgcgggccgcaccccggcgcacgcccgggagatcctctccgcagcggaccgccgtttcgaacggatcctcttggagctgcggatcgcccaaggctgccccctcgacctgctcgacgacgcggggcgtgccgcggctgcccgcgccgtcgccgacgggctgctggacgccgccgcccacgcgcggggacgcgccgtcctcaccctgcgcggccggctgctcgccgatgcgctggtgctcgaccttgcctga

SEQ ID NO: 11786 - protein, 410 aa, Thermobifida fusca YX
MPSAPLDGTPVPPDGSLPADALAELGTRPFGFYVHVPFCATRCGYCDFNTYTAAELRSRDGTAVASPRTYADQAIAEIALARRVLGDRELPVRTVFMGGGTPTLLSPEELGRILDAIDAQFGLAPDAEITTEANPETVDAGILARLREAGFTRISFGMQSAKAHVLAVLERTHTPGRPEQCVAWARQAGFAHVNLDLIYGTPGESDADWKESLTAAIAAGPDHISAYSLIVEEGTRLAARVRRGELTPFDDDVLADRYIMADELLSAAGLQWYEVSNWAADPTARSAHNLLYWTGGHWWGVGPGAHSHIGGVRWWNVKHPAAYAARLAAGRTPAHAREILSAADRRFERILLELRIAQGCPLDLLDDAGRAAAARAVADGLLDAAAHARGRAVLTLRGRLLADALVLDLA

SEQ ID NO: 11787 - DNA, 1233 bp, Prochlorococcus marinus str. NATL2A
  CDS (1)..(1233): transl_table=11
atggtagccccaccaagaagtgcatatttgcatatacccttttgccataaaagatgtttttactgcgatttttcgattatccctttaggtgatagcgctcaatctccagatagtccagggataacttctattaactcatatttggatttacttcatagagagatttcaatctcccctaaaggtcctgcattatcaacaatctatttgggcggtggaaccccttctttattaaaaaaaaatgaggtgggtgatttgttgaaaaatcttcaaagaaaatttggatttcaagatggtgcagagataactatggaggttgatccagcaacattttttgaaaacgacctggatggatacatagggattggaattaatagatttagcttgggtgctcaggcatttgatgacagtactttggcttcaattggtagaaaacataatcgttcacaattaattgaggcttgtgattgggtaaataatttatttaaaaaaggaatgctaagaagctggagtcttgatttgattcaaaatcttccaggattaaatttgtctaagtggattaaagagttggaacaagcggttagtacggaggcccctcatttgtcaatttatgatttaactatcgaaccagatacggtttttggaagactacataaaaaagggaagttgaatatcccaattgattctgaatctcaaaaaatagattttgaaaccactagattactgaaaagtagaggtttcgctagatacgagatttcaagttattcattgcctggtcatgcatctagacataatcgcatgtattggagtggttctggttggtggggctttgggatgggggcaacaagtgctccttggggggaaagattctctagaccaagaacaattgctggttataaaaaatggcttgaacagcaagagagtcagacattagagaaaactttgtctattgaaaagtcaaaatcaatgccattggatgaacttctgatgattggtctcaggagacgtgagggtattcatctggaggaacttgctaaaaatgctggatggacacaaaaaaaatgtgataagaatttaaaatcacttgagaaattttggctaaattctataaatgaaggatttctattaagacacaatggtagatattttttaagtgatcctaaggggatgcaaattagcaatcagattttgattcagatgtttttgtggtgggattcacttgatcgagatcagtag

SEQ ID NO: 11788 - protein, 410 aa, Prochlorococcus marinus str. NATL2A
MVAPPRSAYLHIPFCHKRCFYCDFSIIPLGDSAQSPDSPGITSINSYLDLLHREISISPKGPALSTIYLGGGTPSLLKKNEVGDLLKNLQRKFGFQDGAEITMEVDPATFFENDLDGYIGIGINRFSLGAQAFDDSTLASIGRKHNRSQLIEACDWVNNLFKKGMLRSWSLDLIQNLPGLNLSKWIKELEQAVSTEAPHLSIYDLTIEPDTVFGRLHKKGKLNIPIDSESQKIDFETTRLLKSRGFARYEISSYSLPGHASRHNRMYWSGSGWWGFGMGATSAPWGERFSRPRTIAGYKKWLEQQESQTLEKTLSIEKSKSMPLDELLMIGLRRREGIHLEELAKNAGWTQKKCDKNLKSLEKFWLNSINEGFLLRHNGRYFLSDPKGMQISNQILIQMFLWWDSLDRDQ

SEQ ID NO: 11789 - DNA, 1242 bp, Ralstonia eutropha JMP134
  CDS (1)..(1242): transl_table=11
atgatcccgatcgtaccggccggcgccgcgccggccaccacgcccgacaacacgcagctctggctcaagcccggtcagatcgcactaccgggctcgccgccactgtcgctctatgtgcatgtgccatggtgcgtgcgcaagtgcccgtactgcgatttcaattcgcatgccgtgccgggcaaggacggcagccacgacattccggaagacgcttacctcgacgcgttacgtgcggacctggagcagtcgctgccgctggtctggggccgtccggtccataccgtgtttatcggcggcggcacaccgagtctgctgtctgcagctggcatggaccggctgctgtcggatatccgggcattgctgccgctcgatgccgatgccgagatcacgatggaggccaaccccggcaccttcgaagccgagcgtttcgcgagctatcgcgcgagcggtgtgaaccggctttccatcggcatccagagtttcaacgacagccacctgcaggcgctcggccgtatccatggcgaacgcgaggcacgagcggccatcgatatcgcgcaacgcagcttcgacaacgtcaaccttgacctgatgtacgcgctgcccggccagacgctggaacagtgccgcagcgacctggaaagcgcgttgtcgtatggcaccacacacctgtcgctctaccacctgacgctcgagccaaacacgctgttcgcgaagttcccgcccgcgctgccagacgatgacctcgcctacgagatgcaggacctgatcgaggcccgcaccacagaagccggctaccggcactacgagacctcggcctatgcacgcgcgcatcgcgaggcgcggcacaacctgaactactggcgcttcggcgactaccttgggatcggcgccggcgcgcacggcaagttgtcgttccccaaccgcatcctgcgccagatgcggcacaagcaccctgccacctacatggcgcaggcgatggccggcaatgcggtgcaggaagcgcgcgaagtcggcgcggacgaactgccgttcgagttcatgcttaacgcactgcgcctcactgatggcgtgccggcctccagcttccacgacatgaccggcctgccgctgcatgcgatcagccggcagctcgcggcggcggagaagaagggattgctcgatgccgatccgacggtgatccgccctaccgaactcggccggcgcttcctcaacgacttgcaggagatgttcctgaaggactga

SEQ ID NO: 11790 - protein, 413 aa, Ralstonia eutropha JMP134
MIPIVPAGAAPATTPDNTQLWLKPGQIALPGSPPLSLYVHVPWCVRKCPYCDFNSHAVPGKDGSHDIPEDAYLDALRADLEQSLPLVWGRPVHTVFIGGGTPSLLSAAGMDRLLSDIRALLPLDADAEITMEANPGTFEAERFASYRASGVNRLSIGIQSFNDSHLQALGRIHGEREARAAIDIAQRSFDNVNLDLMYALPGQTLEQCRSDLESALSYGTTHLSLYHLTLEPNTLFAKFPPALPDDDLAYEMQDLIEARTTEAGYRHYETSAYARAHREARHNLNYWRFGDYLGIGAGAHGKLSFPNRILRQMRHKHPATYMAQAMAGNAVQEAREVGADELPFEFMLNALRLTDGVPASSFHDMTGLPLHAISRQLAAAEKKGLLDADPTVIRPTELGRRFLNDLQEMFLKD

SEQ ID NO: 11791 - DNA, 1137 bp, Dehalococcoides sp. CBDB1
  CDS (1)..(1137): transl_table=11
atgacccaaaacagccttgctttgtatatgcatttccctttttgcctgaaaaaatgcggatactgctcgtttatttcttatccggacaaactggaaagtgtgccggattatgtaaactgccttaagaaagaaatcaaactacgggcagaggggctttgcttgcacagcctttattttggcggagggacgcccagccttttatcaccttcgcaggtggcagatatcatgagtagtatacaaacaatatcgcatctgttacccggtacagagattacatttgaagctaatccgggtactcttagcctgccctatcttgagcagttaagcgggctcggcatcaaccgtttgagcttgggtatccaaagtttttcagatgcagagctgacaatgctgggccgtttgcatgacgctcaacaagcacggcatatatacaaacaggccagaaccgccggttttgacaatataaatcttgatcttatttatggtttaccccattccaccctgctttcttttaaagccaatctgagtgaaatgctgaaacttgagccggaacacatttcactttacggtctcactctggaggaagacacccccatgtatcttcaggtgcaaaaaggattattgccctttatggattccgaaattgcggctgaccagtatcagctggctgaagaaatgctggagagtgccggctaccatcactatgagatttccaactgggctaaaccgggctatgagagccgccataaccttacttactggcaaaacaggtcttatttgggtttgggtgtggctgggcattccttttttcagaattggcgtacagccaataccatagaccttgatgaatatttactttgctggcaaaataattcctcgccgtcaccgtctgaaaatataaatgtagatttagctaatcagctggctgaaactataatattgggacttaggctggataagggtgtaaccgctgaagatattgaagcccgtttcgggacgtgtgtgatggatatgtattatccccagattcaagaatgtgttgaattggggcttttggaagagcatgatggctgtatccgcctgacccccagaggcaggttgctctctaacgaggtgttctggcgtttcttgccttaa

SEQ ID NO: 11792 - protein, 378 aa, Dehalococcoides sp. CBDB1
MTQNSLALYMHFPFCLKKCGYCSFISYPDKLESVPDYVNCLKKEIKLRAEGLCLHSLYFGGGTPSLLSPSQVADIMSSIQTISHLLPGTEITFEANPGTLSLPYLEQLSGLGINRLSLGIQSFSDAELTMLGRLHDAQQARHIYKQARTAGFDNINLDLIYGLPHSTLLSFKANLSEMLKLEPEHISLYGLTLEEDTPMYLQVQKGLLPFMDSEIAADQYQLAEEMLESAGYHHYEISNWAKPGYESRHNLTYWQNRSYLGLGVAGHSFFQNWRTANTIDLDEYLLCWQNNSSPSPSENINVDLANQLAETIILGLRLDKGVTAEDIEARFGTCVMDMYYPQIQECVELGLLEEHDGCIRLTPRGRLLSNEVFWRFLP

SEQ ID NO: 11793 - DNA, 1179 bp, Thiobacillus denitrificans ATCC 25259
  CDS (1)..(1179): transl_table=11
ttggctgacgccgtcgttcgcgtcgcggggcgcgggctcacggtcccgccgccgctgtcgctctacatccacctgccgtggtgcgtgaagaagtgcccgtattgcgacttcaattcccacgccgcggaaggcatccccgaagctgcctacgtcgacgccttgcgggccgacctcgagcacgcgctgcccgacatctggggccgcaagatccacacggtgtttttcggcggcggcacgccgagcctgttctcggccgagggcatcgaccggattctcgccacagtgcgcacgctgacgccactggtgcccggcgcggaaatcacgctcgaggcgaatccgggcaccatcgaagcggcaaagttcgccggctttcgtgaggccggaattacgcgagtctcgctgggcatccagagcttcgatccgcgccatctcaaggcgctcgggcgcatccacgacgggaccgaggcgcgccgcgcagccgagcttgcggccacgcatttcgatactttcaatctcgacctgatgtacgcgctgcccgggcagacgctcgccgaagcgctcgccgatgtcgacgcggcgctcgcttttcagccgccgcatctgtcggcctatcacctcacgctcgagcccaacacgccgttcggccacgccgccccgcccaacctgcccgacgacgacctcgccgccgacatgcagctcgcgatcggggcgcggttgatcgacgccggcatgcagcactacgaaacctccgcgtatgcgaagcccggccacgccggtcgtcacaacctcaactactggcagttcggcgactacctcgggatcggtgccggcgcgcattccaagttgagcttccacgaccgcatcgtacgccagatgcgcaccaagcatccgcagcagtacatgacggccgtacacggcggcgcccacgtcgccgacacgcgcgccctcacgcgcaacgacctgcccttcgagttcatgatgaacgccttgcgcctcaccgaaggcgtgccggctgagttgttcgagttgcgtacggggttgccgctcaacgtatgtgccgccgcgctcgcacaggcgcgcgcgaagggcttgctcggggtcgagctcggccgcctcgagccgacgctgcagggtcagcgcttcctcaacgacctgctggaattgtttctgcccgcttga

SEQ ID NO: 11794 - protein, 392 aa, Thiobacillus denitrificans ATCC 25259
MADAVVRVAGRGLTVPPPLSLYIHLPWCVKKCPYCDFNSHAAEGIPEAAYVDALRADLEHALPDIWGRKIHTVFFGGGTPSLFSAEGIDRILATVRTLTPLVPGAEITLEANPGTIEAAKFAGFREAGITRVSLGIQSFDPRHLKALGRIHDGTEARRAAELAATHFDTFNLDLMYALPGQTLAEALADVDAALAFQPPHLSAYHLTLEPNTPFGHAAPPNLPDDDLAADMQLAIGARLIDAGMQHYETSAYAKPGHAGRHNLNYWQFGDYLGIGAGAHSKLSFHDRIVRQMRTKHPQQYMTAVHGGAHVADTRALTRNDLPFEFMMNALRLTEGVPAELFELRTGLPLNVCAAALAQARAKGLLGVELGRLEPTLQGQRFLNDLLELFLPA

SEQ ID NO: 11795 - DNA, 1191 bp, Anabaena variabilis ATCC 29413
  CDS (1)..(1191): transl_table=11
atgcaaaaagttaatgttcctagcctcgctagttctgcttatgtacatattcccttttgcagaaggcggtgcttttattgtgacttcccgatatttgttgtcggcgatcgccaacgtggtgaaacatctgttaccatctccgggtatgtggatactctctgtgaagaaattgccattacaccagtttttggtcaacccctccagaccatatttttcggcggtggtacgccttcgctgttatctacagcacaattagcacaaatactaggaaccctagataagcggtttgggattgtgcctgatgcagaaatttcgatggaaattgatccaggtacatttgatctagcacacatccaaggctatcgtagcgttggtgtgaatcgggtaagtttgggtgtacaagcgtttcaagaagaattgttaaaattagctgggcgatcgcactcgcttaaagatatctttgcagctatagacttgattcaccaagtcgagattcccgaatttagcatagacttaatctctgggttgccgcatcagtctttagatcaatggcaagattccctagaaacagccgttaacattgcacccacccatatatctatctatgatttgacaattgagccaggaacagcctttggtcgttattacaaacctggggataatcccttacctactgatgaaaccacagtgaaaatgtatcagatgggtcagaggattttgactgatggcggttatgaacattatgaaatttccaactacgccaagccaggacaccagtgtagacataaccgcgtgtattgggaaaactgcccttattacggctttggtatgggtgcggccagctatgtagaaggtaaacgcttcacccgtccccgaaaaacaaaggaatattctcaatgggtgcaagagttgattgctaatcacggtgtgattgattgggaaattacgccaaaagcagatgtattgttagaaacgttaatgttggggttacgcttggctgatggtgtgagtttagcagcactaaccgaggaatttggcaaggagaaaatacaagaactgcatcaatgtctgcaaccttattttactcaaggttgggtacaagttgtgggtgataggttgcggttgagtgatcccgatggttttttattttccaatgtggtgttagccgatttgtttagtcagttgggttaa

SEQ ID NO: 11796 - protein, 396 aa, Anabaena variabilis ATCC 29413
MQKVNVPSLASSAYVHIPFCRRRCFYCDFPIFVVGDRQRGETSVTISGYVDTLCEEIAITPVFGQPLQTIFFGGGTPSLLSTAQLAQILGTLDKRFGIVPDAEISMEIDPGTFDLAHIQGYRSVGVNRVSLGVQAFQEELLKLAGRSHSLKDIFAAIDLIHQVEIPEFSIDLISGLPHQSLDQWQDSLETAVNIAPTHISIYDLTIEPGTAFGRYYKPGDNPLPTDETTVKMYQMGQRILTDGGYEHYEISNYAKPGHQCRHNRVYWENCPYYGFGMGAASYVEGKRFTRPRKTKEYSQWVQELIANHGVIDWEITPKADVLLETLMLGLRLADGVSLAALTEEFGKEKIQELHQCLQPYFTQGWVQVVGDRLRLSDPDGFLFSNVVLADLFSQLG

SEQ ID NO: 11797 - DNA, 1131 bp, Streptococcus agalactiae A909
  CDS (1)..(1131): transl_table=11
atgttaaagaaaccaacctcagcatatgtacacattccattttgtacccaaatatgttattattgtgatttttcaaaagtttttattaaaaatcagcctgtagacgcttatcttcaggctcttatccgtgaatttcggtcttatgatattacagaattgcgcaccttatatattggaggagggacacctacatctataagcgctgtgcaactggactatttattgacggagttaagtagagatttaaacttaaatactttagaggagttcactatcgaagctaatccaggagatttaaccgttgataaaatagaggtgcttcaaaagtcagctgtcaatagagtttctctaggagttcagacctttaatgataaacatttaaagcgtattggacgcagtcacaatgaggcacaaatttattctacaattgatgctcttaaaacagctggttttcaaaatatctctattgacctaatttatgccttacctggacaaacgatggatgatgttagaagtaatgtagccaaagctctctctctaaatattcctcatttgagtttatatagtttaattttagaacaccatactgtatttatgaataaaatgcgtcgtgggaaattacatttgccaacagaagatttagaagccgagatgtttgaatatatcatttctgaaatggaaagaaatggttttgagcattatgaaatttctaattttacaaagccgggttttgaaagtcgtcataatttgatgtactgggataatgtagaatattatggtgttggtgcaggcgcttctggttatcttgatggtattcgttatcgtaatagagggccaatacaacattatctaaagggggtttcagaaggtaatgcaaggttatctgaagaagtattatcaaaaaatgaaatgatggaagaggagcttttcctcggtcttcgtaaaaaagagggtgtttccatcggaaaatttgaacaaaaatttggaacgtcctttgagaaacgttacggtcagattgttcaagaactccaaagtgatgggcttttgaaagaaaataatggttttatccagatgactaaaaaaggtctcttcttaggagatacggttgccgagaaatttattgtggagtaa

SEQ ID NO: 11798 - protein, 376 aa, Streptococcus agalactiae A909
MLKKPTSAYVHIPFCTQICYYCDFSKVFIKNQPVDAYLQALIREFRSYDITELRTLYIGGGTPTSISAVQLDYLLTELSRDLNLNTLEEFTIEANPGDLTVDKIEVLQKSAVNRVSLGVQTFNDKHLKRIGRSHNEAQIYSTIDALKTAGFQNISIDLIYALPGQTMDDVRSNVAKALSLNIPHLSLYSLILEHHTVFMNKMRRGKLHLPTEDLEAEMFEYIISEMERNGFEHYEISNFTKPGFESRHNLMYWDNVEYYGVGAGASGYLDGIRYRNRGPIQHYLKGVSEGNARLSEEVLSKNEMMEEELFLGLRKKEGVSIGKFEQKFGTSFEKRYGQIVQELQSDGLLKENNGFIQMTKKGLFLGDTVAEKFIVE

SEQ ID NO: 11799 - DNA, 1206 bp, Pseudomonas fluorescens PfO-1
  CDS (1)..(1206): transl_table=11
atgaccgatagttcctccgcgtcgtcgctgattatcggcggcgccgcctcctcgcctcgggcgccgttgccgacgctgccgcccctggcgctgtacatccacatcccgtggtgtgtgcgcaaatgcccctattgcgacttcaactcccacaccgccagcccggtgctgccggagcaggagtatgtcgacgcgatgctggccgacctcgatcaggatctgcacgcggtgtacggccgtgagttgagttcgatcttctttggcggcggcacgccgagcctgttcagtgccgaagcccttggtcgcttgctggaaggcgtcaaacaacgcatcccgtttgccgatgacatcgaaatcaccctggaagccaaccccgggactttcgagcaagagaagttcgttgcctaccgcaagctgggaatcaatcgcctgtcgatcggtatccagagcttccagcaggaaaagctcaaggccctcggccgaatccacaacggcgatgaagcggtacgcgccgccggcatggcgcgccaggccgggttcgataacttcaacctcgacttgatgcacggcttgccggaccagtcactggacgatgccctgagcgatctgcgccaggcgatcgaactgaagccgacgcatatttcctggtatcagctgacactggagccgaacaccgtgttctggaaccagccgccggtgctgccggaagacgacacgctgtgggacattcaagaggccgggcaggcgctgctggccgagcacggttacgcgcagtacgaagtttcggcctacgcccaaccgggtcgaccggcgcggcacaacctcaattactggagcttcggcgacttcatcggcatcggcgccggcgcccacggcaagctcagtcacccggacgggcgcatcgtgcgtacctggaagacacgcctgccgaaggactacctcaacccggccaaaagcttccaggccggcgagaaagccctgaccaacgacgagatgccgttcgagttcctgatgaacgccctgcgcctcaccgccggcgtcgaatcgcgcctgtacccggagcgcaccggcctgtcgctggacacgcttgccgaaggtcggcgcgaggccgaacaaagcggtctgttgcaggtcgaaccgtcacgcctggcgaccacagagcgcggacagctgttcctcaacgacttgctgcaacaatttctgaactga

SEQ ID NO: 11800 - protein, 401 aa, Pseudomonas fluorescens PfO-1
MTDSSSASSLIIGGAASSPRAPLPTLPPLALYIHIPWCVRKCPYCDFNSHTASPVLPEQEYVDAMLADLDQDLHAVYGRELSSIFFGGGTPSLFSAEALGRLLEGVKQRIPFADDIEITLEANPGTFEQEKFVAYRKLGINRLSIGIQSFQQEKLKALGRIHNGDEAVRAAGMARQAGFDNFNLDLMHGLPDQSLDDALSDLRQAIELKPTHISWYQLTLEPNTVFWNQPPVLPEDDTLWDIQEAGQALLAEHGYAQYEVSAYAQPGRPARHNLNYWSFGDFIGIGAGAHGKLSHPDGRIVRTWKTRLPKDYLNPAKSFQAGEKALTNDEMPFEFLMNALRLTAGVESRLYPERTGLSLDTLAEGRREAEQSGLLQVEPSRLATTERGQLFLNDLLQQFLN

SEQ ID NO: 11801 - DNA, 1158 bp, Rhodobacter sphaeroides 2.4.1
  CDS (1)..(1158): transl_table=11
atggacgactggcggaacggcggcttcgggctttacctgcactggccgttctgtcagtcgaaatgcccctactgcgacttcaattcccacgtcgcggccaccatcgaccaggggcgctggcagcgcgcctatctctccgaaatccgccgtctgggcgccgagaccgaaggccgggtgctgaactcggtcttcttcggcggcggcacgccctcgctgatggagcccgacctcgtggcggccatcctcgagacggtgcgcgccacctggccgctcgccaacgatctggaggtgacgctcgaggccaatccgggctcggtcgaggccgggcgcttccggggctatcgcgcagcgggcgtgaaccgcatctcgatgggcattcaggcgctgaacgacgcggacctgaggaagctcgggcggctccatacggtggccgaggcgcgggccgcgttcgacgtggcccgcacgaccttcgaccgggtgagcttcgacctgatctatgcccggcaggatcagccgctggagcattggcgcagcgaactgaccgaggcgctgacgatggccgccgatcacctctcgatgtatcaacttacagttgaagacggcacggctttcggcgaccgtttcaagcggggcaagctgcgggggctgccggaagaggagctgtcggcggacatgtatgcgctgacgcaggatctgtgcgaggcggcgggcctgcccgcctatgaagtctccaatcacgcgcggccgggcgccgaatcgcggcacaatctgatctactggcgcggcggcgactatgcgggcgtgggacccggcgcccacgggcgcctcacctttccgaccggacgctgggcgaccgaagcccccagggcacccgccgcctggctcgagcgcgtggaacgcgacggcactggcgaaggcccgcgggtccgactggacgccgaggatcatgcgctcgaatatctgatgatgtccctccgcctgcgtgaggggctcgaccgcgggcgccatgcggcgctcgccgggcggccactggacgagcggcgggtcgcggacctgcgggagatgggcatgatcgacacggacgacgagcggatcttcgcgacgaccgagggccggatggtcctcaattccgtcatcaccgctctggcgggggcgtag

SEQ ID NO: 11802 - protein, 385 aa, Rhodobacter sphaeroides 2.4.1
MDDWRNGGFGLYLHWPFCQSKCPYCDFNSHVAATIDQGRWQRAYLSEIRRLGAETEGRVLNSVFFGGGTPSLMEPDLVAAILETVRATWPLANDLEVTLEANPGSVEAGRFRGYRAAGVNRISMGIQALNDADLRKLGRLHTVAEARAAFDVARTTFDRVSFDLIYARQDQPLEHWRSELTEALTMAADHLSMYQLTVEDGTAFGDRFKRGKLRGLPEEELSADMYALTQDLCEAAGLPAYEVSNHARPGAESRHNLIYWRGGDYAGVGPGAHGRLTFPTGRWATEAPRAPAAWLERVERDGTGEGPRVRLDAEDHALEYLMMSLRLREGLDRGRHAALAGRPLDERRVADLREMGMIDTDDERIFATTEGRMVLNSVITALAGA

SEQ ID NO: 11803 - DNA, 1131 bp, Carboxydothermus hydrogenoformans Z-2901
  CDS (1)..(1131): transl_table=11
ttgataataacaaataaagctcaggccctttacctgcatatgcctttttgtcttaagaagtgccattactgtgcttttacctcttttcccgcgccggcgggtgaaggggtattttcgtatttaagcttaataaagaaagaattggaatggcgaaaagattttttagcgcctcttaagaccatttatgtgggcgggggaacgccaacttccctttcgctgaacgctttagaaaaactgggggaaattatctcgccgtatatttccgataagcttttggagtttaccgttgaagccaatccgggaacgttaaatagggaaaaaattcgccttttaaaagatttaggagtcaatcgtgtaagccttggggcccaatcttttaatgatgagattcttttaaaaatgggtagagcccatactgctgctcaaacgttggaagcgtacaatttattgagggaagagggcataaacaatttaaacctggacttaattatcggttatcccgaggggcgcgaaagctttataaacactgtaaaaacggccataagcttaaagccggaacatatttctttatacgatttaaaggtagaagaaaatacccgcctttatgaagaagtagcaaagggtgaaataatacttccggaagaggatgaagtagttttatattgggaggaagcgattaatcttttagaggaaaacggttacgaacggtacgaaattgctaactttgctcgaaaccagcagtattcccgtcacaaccttacttactgggaaaataaaccttatcttggcattggcctagctgcccatagcaaggtaggcctgtaccggttctggaatccgaatacgatgctggagtaccgggaaatgcttttaacaggaaaaaattatggcgaggaaaaattaactttagaagaagatgccaaagaagaaataattttaagattaaggttaaaaaccgggctaaatcttcaggagtttcaaaaaaaataccggcgggactttatggcagagtttggcgataaaatccaaaaatttatcgaacttggcctgcttttccttgaagatgataggctttttttaacccgcaaggggagttttgtagccaacactgtattaattgagtttatctaa

SEQ ID NO: 11804 - protein, 376 aa, Carboxydothermus hydrogenoformans Z-2901
MIITNKAQALYLHMPFCLKKCHYCAFTSFPAPAGEGVFSYLSLIKKELEWRKDFLAPLKTIYVGGGTPTSLSLNALEKLGEIISPYISDKLLEFTVEANPGTLNREKIRLLKDLGVNRVSLGAQSFNDEILLKMGRAHTAAQTLEAYNLLREEGINNLNLDLIIGYPEGRESFINTVKTAISLKPEHISLYDLKVEENTRLYEEVAKGEIILPEEDEVVLYWEEAINLLEENGYERYEIANFARNQQYSRHNLTYWENKPYLGIGLAAHSKVGLYRFWNPNTMLEYREMLLTGKNYGEEKLTLEEDAKEEIILRLRLKTGLNLQEFQKKYRRDFMAEFGDKIQKFIELGLLFLEDDRLFLTRKGSFVANTVLIEFI

SEQ ID NO: 11805 - DNA, 1215 bp, Burkholderia sp. 383
  CDS (1)..(1215): transl_table=11
atgagccaggccgcggaaaccggcgcgcgcgttgtcgcgaccttcacgtcgcccggccaggtgcggctcacgtcgctgccgccgctcgcgctgtacgtgcatttcccgtggtgcgtgcgcaagtgcccgtactgcgatttcaactcgcacgagtggaagggcgagcggtttccggaaaccgagtatctcgacgcgctgcgcgccgatctcgagcaggcgctgccgctcgtgtggggccggcaggtgcatacgatattcatcggcggcggcacgccgagcctgctgtcggcggccggtctcgaccggatgctgtccgacgtgcgcgcgctgctgccgctcgacgccgatgcggagatcacgctcgaggccaatccgggcacgttcgaggccgcgaagttcgcgcagttccgcgcgagcggcgtgaatcgcctgtcggtcggcatccagagcttcaacgagacgcacctgaaggcgctcggccggattcacgacaccacgcaggcacgcgccgctgtcgagatcgccgcgaagaacttcgacaacttcaacctcgacctgatgttcgcgctgccgaaccagacgctcgacgaatgccgcaccgacgtcgaaaccgcgctgtcgtacgcgccgccgcatctgtcgctgtatcacctgacgctcgagccgaatacgctgttcgcgaagttcccgccggtcgtgcccgacgacgacgcgtcggccgacatgcaggaatggattcacgcgcgcacggccgaggccggttacggacactacgaagtctccgcgtatgcgaagccgaatcatcagtgcaagcacaacctgaactactggcgcttcggcgactatctcggaatcggtgcgggcgcacacacgaagctgtcgttcccgaaccggatcctgcggcaggcacgctacaagcatccggcaaccttcatcgagcaggcgatggccggcacggccgtgcaggaagagcgtgaagtcggcgcgcgcgacctgccgttcgagttcatgctgaacacgctgcggctcgtcgagggcttccccgtgcacaacttcgccgaacgcacgggcctgccgatgagcacgatcgagccggcgctgcaggaagcggaacgacgcgggctgatcgcgcgcgatttcgcgcagatcgcgccgacgccgctgggccagcgtttcctcaacgacctgcaggaattgttcctgcgcgacgattga

SEQ ID NO: 11806 - protein, 404 aa, Burkholderia sp. 383
MSQAAETGARVVATFTSPGQVRLTSLPPLALYVHFPWCVRKCPYCDFNSHEWKGERFPETEYLDALRADLEQALPLVWGRQVHTIFIGGGTPSLLSAAGLDRMLSDVRALLPLDADAEITLEANPGTFEAAKFAQFRASGVNRLSVGIQSFNETHLKALGRIHDTTQARAAVEIAAKNFDNFNLDLMFALPNQTLDECRTDVETALSYAPPHLSLYHLTLEPNTLFAKFPPVVPDDDASADMQEWIHARTAEAGYGHYEVSAYAKPNHQCKHNLNYWRFGDYLGIGAGAHTKLSFPNRILRQARYKHPATFIEQAMAGTAVQEEREVGARDLPFEFMLNTLRLVEGFPVHNFAERTGLPMSTIEPALQEAERRGLIARDFAQIAPTPLGQRFLNDLQELFLRDD

SEQ ID NO: 11807 - DNA, 1185 bp, Synechococcus sp. CC9605
  CDS (1)..(1185): transl_table=11
atgccttatcccatcccgccccgcagcgcctatctccacattcccttttgccaccggcgctgttactactgcgatttcgccgtggttcccctgggggaccaggcccgcgccgacaacgggcctggcagccgctcgatccgtgagtacctaagcctgctgcaccgtgaaatcgcctctgccccaagcggtccgcccctatcgacggtgtatgtcggcgggggaacgccatcgctgttgtgccccgatcagatcggagacctgctcgatgccttgaccaataaatttggtcttcaaccgggtgcggaaatcaccctggagatggacccagccacctttgatgccgcgcagttggcctccgttcttgcccatggcgtgaaccgcatcagcctgggggggcagagctttgatgatgcggtgctcgagcagctggggcgtcggcatcgcctgagcgacctccatgcggcgatcgactggctggttcaggcctggcgcgatggcgcgctcatctcttggagtctcgatctcatccagaacctcccgggtcagaccctgaccgggtgggatgcgcagttggatcaggccattgccagtcaggccccccatctctcgatttacgacctctcggtggagccgggcacggtgtttgatcgccaacgttcgcttggcctgttgaagctgccggaggacgaccttgcctttgccttgatggagcggaccacgcaacggctggcggctgctggactcagccgctacgagatttccaaccacgcccgtccgggccatgcctcccggcacaaccgggtgtattggagtggtgccggttggtggggttttggcatgggagcgacatccgcaccctggggggtgcgtttggcacgaccccgcacccgcgccgcctacgcggaatggcttgatcacccttctcacgaatcgatcgccgaggctggtctccccctggatgatcgattgctggtgggtctgcggcgccgcgaaggggtgacccttcaagggcttgatgctgatgcgctggtgcgccgttggcaaccgttcgttgagcgtggatggctgcagcagcgggcaggccgttggtgtctcaccgaccccgagggcatggccctcagcaatccagtgttgattgaggtgattctgtggtgggaaaaggttttagaagaacaaagccagtaa

SEQ ID NO: 11808 - protein, 394 aa, Synechococcus sp. CC9605
MPYPIPPRSAYLHIPFCHRRCYYCDFAVVPLGDQARADNGPGSRSIREYLSLLHREIASAPSGPPLSTVYVGGGTPSLLCPDQIGDLLDALTNKFGLQPGAEITLEMDPATFDAAQLASVLAHGVNRISLGGQSFDDAVLEQLGRRHRLSDLHAAIDWLVQAWRDGALISWSLDLIQNLPGQTLTGWDAQLDQAIASQAPHLSIYDLSVEPGTVFDRQRSLGLLKLPEDDLAFALMERTTQRLAAAGLSRYEISNHARPGHASRHNRVYWSGAGWWGFGMGATSAPWGVRLARPRTRAAYAEWLDHPSHESIAEAGLPLDDRLLVGLRRREGVTLQGLDADALVRRWQPFVERGWLQQRAGRWCLTDPEGMALSNPVLIEVILWWEKVLEEQSQ

SEQ ID NO: 11809 - DNA, 1152 bp, Geobacter metallireducens GS-15
  CDS (1)..(1152): transl_table=11
atggacgacacgacagccctctacatccacattcctttctgtgtgcgcaagtgtctctactgcgccttcgcttccacggacgaagcccccctcgcgatcggggagtacacggcgcttctcctccgggagatggaacttcgggccgccgcgctggcatccccactgcgcgccaccaccctctatctgggaggaggaaccccgtcgctgttggagcccgaccttgtcgggaatatcatcgatggcgccgcccgcctcttctggctcgatccgtcggcggaaatcaccctcgaagccaatcccggcaccgtcacggccgactccctcgcggggtaccggggcgctggggtgaatcgcctctccctcggggtccagtccttcgacgaccggatgctggagcgcctcggccgggtccatacggcccgggaagcgaaggacgcctttgccctggcccgccgggccggcttcgacaatatcggtatcgatctcatccacgggcttccggaccagagtcttgaccactggcgggaccagctccggatggcggcagcccttcggccggggcacatctccgcctacggcctcacggtggaggagggaaccccctttgcccgcctggaggatcagggtgtattggcgcttccggacgaggatgacgctgccgccatgttcgaggagacggcggaggtcctggcggcggccggctatgaacagtacgagattgccaacttcgctctgccgggacgccgctcccgccacaaccaggtctactggcggcggtggaattatctcgggttcggcgccggggcccactcgttcctgcgggagccgttccccggcatccgctggcgcaacccggatgatctcggcacctacggatgctccctggcggatggggttctgcccgagacggacattgcccttcttgcggaagaggacgccatggccgagtggctctttctggggctcaggatgctcgaaggaatcgaggaagcgcggtttcgggaggaattcggccggcccctcatggagatccacggcaccgccatcgaggggttctgcgccgccggtctcctcgtgcgcgggggggggcgcctgcggctcacccgccggggggtaatcctctcaaaccgggtcttcgcggcctttctctga

SEQ ID NO: 11810 - protein, 383 aa, Geobacter metallireducens GS-15
MDDTTALYIHIPFCVRKCLYCAFASTDEAPLAIGEYTALLLREMELRAAALASPLRATTLYLGGGTPSLLEPDLVGNIIDGAARLFWLDPSAEITLEANPGTVTADSLAGYRGAGVNRLSLGVQSFDDRMLERLGRVHTAREAKDAFALARRAGFDNIGIDLIHGLPDQSLDHWRDQLRMAAALRPGHISAYGLTVEEGTPFARLEDQGVLALPDEDDAAAMFEETAEVLAAAGYEQYEIANFALPGRRSRHNQVYWRRWNYLGFGAGAHSFLREPFPGIRWRNPDDLGTYGCSLADGVLPETDIALLAEEDAMAEWLFLGLRMLEGIEEARFREEFGRPLMEIHGTAIEGFCAAGLLVRGGGRLRLTRRGVILSNRVFAAFL

SEQ ID NO: 11811 - DNA, 1737 bp, Desulfovibrio desulfuricans G20
  CDS (1)..(1737): transl_table=11
atgctttcactgctacaggatacggctcgaacgggccgtatccgtagcccgcagaggcgggttcgacatggttacctccaccctgctgtattcccgcaaacagcagcacgagcgcatcgccgcgctgggcagcgacctgtgcggcgacggcaggctgcgttttctgtaccgcgacttccgggaaggctggcagcagggcatagagacttccaaagcgtggggcatataccggcagcagtactgcggctgcctgtacagcgaaaccgaacggtacgcccgcgaactgaaaaacgccggtgcgcaggtgccgcaacagaccgccggcacgccctgctgcgcagaaggtacagaaaaacaggcagaacaggccgacgccacccccgcagccgacaatgcaggcagataagacatactgtgccgcaacgcggcgcggcacacgccgcatgcgctgaccgcaaccgcccgcagcccgcgcggtatccgcaaccaccgggcggcgaagcagaaagacagacccgcgcggccgttcaccgccggacatccggagcctttgtgctgctgtatattcatgtgcccttctgccgcagcaaatgcggctactgcgctttccattccgtccctgtggccgccgcgggaccggacggcatgcaacagtatcttgatgcgctgctgcgcgagatagccctgtggggcgaccggctgggtaacagagcggtgcataccgtttttttcggcgggggcacgcccagtctgctgccggaaaaagcggtggccgtcatcatggacaggctgcgacgcgcgttcgacatacagaacggggccgaaatcagctttgaggcaaatcccgaatccgtctccgcctacgggtatcttgacacccttttcaaatgcggcatcaacagactgagcctgggagtgcagagcctgaacaacgacggtctgcgcgtactggggcggccccacaaggcgcgcgaagccgtaaatgccttccgtctggcgcgtcaggcaggctttggcaacatcaatctggacatgatatgggggctgccatcgcagcggctcaagctgtggcttgacgagctgaaagcagtaacagagctcaagcccgaccatctgtcatgctacggactcacgctggaagaaggtaccccgctggaacaggcatgtctgcaggggcggcacacactgcccgacgagcaggaacaggcccgcatgttcatctacggtgcggaatttctggaatcgcggggctatatgcagtacgaaatttccaacttcgcccgcatgggatttcagtgcaggcacaatctgggctactgggaaggcgccgaatatctgggcatggggccttcggcggtttccacgctgtccggcagacgctgggaaaacccgcacgggctgcaggagtatgcccgccgcacagccgagggtacgctggggcacgatgccgcggcactcaccccgctggagcgggccgaagaacttatcatgctgcgtctgcgcacggcacgcggcctgcgcgtgaaagcataccgcgaccttaccggacgcgattttctgcgcgagcacaaacagctggtgcacgccctgcaccgcaacaggctggtacgcatcagcaacgggtatctgcgcttgaccagaaacggcatgctggtatcgaataccattctggaaaacatctttgccactctgcccgaagaaacgccgcacaagctgtccgcagcacaggaaccgtag

SEQ ID NO: 11812 - protein, 578 aa, Desulfovibrio desulfuricans G20
MLSLLQDTARTGRIRSPQRRVRHGYLHPAVFPQTAARAHRRAGQRPVRRRQAAFSVPRLPGRLAAGHRDFQSVGHIPAAVLRLPVQRNRTVRPRTEKRRCAGAATDRRHALLRRRYRKTGRTGRRHPRSRQCRQIRHTVPQRGAAHAACADRNRPQPARYPQPPGGEAERQTRAAVHRRTSGAFVLLYIHVPFCRSKCGYCAFHSVPVAAAGPDGMQQYLDALLREIALWGDRLGNRAVHTVFFGGGTPSLLPEKAVAVIMDRLRRAFDIQNGAEISFEANPESVSAYGYLDTLFKCGINRLSLGVQSLNNDGLRVLGRPHKAREAVNAFRLARQAGFGNINLDMIWGLPSQRLKLWLDELKAVTELKPDHLSCYGLTLEEGTPLEQACLQGRHTLPDEQEQARMFIYGAEFLESRGYMQYEISNFARMGFQCRHNLGYWEGAEYLGMGPSAVSTLSGRRWENPHGLQEYARRTAEGTLGHDAAALTPLERAEELIMLRLRTARGLRVKAYRDLTGRDFLREHKQLVHALHRNRLVRISNGYLRLTRNGMLVSNTILENIFATLPEETPHKLSAAQEP

SEQ ID NO: 11813 - DNA, 1224 bp, Prochlorococcus marinus str. MIT 9312
  CDS (1)..(1224): transl_table=11
atgaataagtttccaagaagtgcttatgtgcacattcctttttgccatagaaggtgcttttactgtgattttgcagttattccactaggaaataaagttgaaactttacatggttatggaagtaaaactgttaaagaatatttgcactatttatccaaagaaatattgtcaattaagcataaatcacctctttcgacaatttatgttggtggcggcacaccatcaatcttggatccccaacaaattaaagagttaattgatctttttaaagaaaattatggagttgactatggtgctgaaattactatggaggttgatccagctagttttaatgaagatgatctttatggattcataaatgctgggataagtagatttagtctcggagtgcaaagttttaataatcagatccttcaaaattctggcaggaggcatttgagagaagatgctgaaaaatcttgtttatggttgaagagagtatttgataatgggctaataaaaagctggagcttagatttaattcaaaacttgccactaagtggatttaaagaatggcaagatgacttaaataaagcaataacgtttttaccacctcatatttccatttacgatttaaatattgaaaatggaactgtttttaaaaaattagttaatttaggaaaattagaagttccaagtgatgaagaggcttttagaaatagtgaagtaacacatgtaattttaaaaaactcagggtactcaagatatgaaatctcaaactattgtcttccgaggcatcaatcgagacataatagagtttattggagtggttcaggctggtggagttttggtcaaggttccactagttcaccttggggggaaaagttaactagaccaagagttagtaaagaatataaagaatgggtaattaggcaatacgaacttaatttagattcatccctcactaataaggattttgtctataaagaacttgatgagaaaataatgttgggaatgagacttaaagagggtatagatatctatgaggtgtttaaagaacaaaactgggaaaataaaaaatttgaaagtaacttgagtaaattacttgaagaatgggaaagatttcttgaaagtggactattagttagaaaggggaatagattctttttaagtgaacctaaagggatggagctaagcaatcaaattcttatttccatgtttaagtggtgggatgagattaattaa

SEQ ID NO: 11814 - protein, 407 aa, Prochlorococcus marinus str. MIT 9312
MNKFPRSAYVHIPFCHRRCFYCDFAVIPLGNKVETLHGYGSKTVKEYLHYLSKEILSIKHKSPLSTIYVGGGTPSILDPQQIKELIDLFKENYGVDYGAEITMEVDPASFNEDDLYGFINAGISRFSLGVQSFNNQILQNSGRRHLREDAEKSCLWLKRVFDNGLIKSWSLDLIQNLPLSGFKEWQDDLNKAITFLPPHISIYDLNIENGTVFKKLVNLGKLEVPSDEEAFRNSEVTHVILKNSGYSRYEISNYCLPRHQSRHNRVYWSGSGWWSFGQGSTSSPWGEKLTRPRVSKEYKEWVIRQYELNLDSSLTNKDFVYKELDEKIMLGMRLKEGIDIYEVFKEQNWENKKFESNLSKLLEEWERFLESGLLVRKGNRFFLSEPKGMELSNQILISMFKWWDEIN

SEQ ID NO: 11815 - DNA, 1191 bp, Synechococcus elongatus PCC 7942
  CDS (1)..(1191): transl_table=11
atgatcaatttgccgattgctgcttacctacacatccccttttgtcgtcgtcgctgcttttactgtgacttcccgattagcgtcgtgggcgatcgcctgcgcggggatcagtccggcatgatccgccagtatgtggacgcgatctgccaagaaattgctgcgacgcctgtgcttgggccagcactgcaaacggtctttttcggtgggggaacgccctccctgctgagtcccaatcagctcgatcgcattctgcagaccctcgatcgccgttttgggattgcagcgacggctgaaatttcaatcgaaatggatcccgctagctttgaccgatcgcaagcgatcgcaacgcgacagctaggctttaaccgcgtcagtattggcgctcaggcgtttcaagatggcctgttggaacggtgtggtcgtacccatcggcgggccgatatcgatcgcgctgtggcggatttgcgggctgctggtttcgagaatctcagtctggatttgatctcgggtctaccggaacagacgctggcggattggcaggcttcattagaagccgcgatcgccctagaaccgactcacctctcggcctacgatctggtgctagaaccagagacggtgtttggcaagcgctatcaaccgggcgatcgccccttgccagccgatgagcaaaccgctgtcatgtatcgactggcgcataggaccttggaagcggcgggctttgagcactatgaaatctcgaactatgcgcgatcgggatttcagtgtcgccacaatcgcgtctactggcaggatcagtccttctatggctttggggtcggtgcgacgagtgccctgcaaggccagcggtttggccgtccgcgccgccgagctgattactttatctggctcgagacgccgggtgcgatcgcggcagcttgtgcaccggttacctctgatccggctgatgccttagcggaaacgctgatgttggggctgcggctggcggaagggttggattggaccgcattagagcagccgtttggggcagaaatcctgcgatcgctgcaacctgtgattcagcgctaccaacaggcgggctggttgcaatggcagggcgatcgcctcagcttgacccagccggagggcatgctcttctcgaatcaggtcttagccagtttgtttgaacgactcgaggcgatcgcgactgtctag

SEQ ID NO: 11816 - protein, 396 aa, Synechococcus elongatus PCC 7942
MINLPIAAYLHIPFCRRRCFYCDFPISVVGDRLRGDQSGMIRQYVDAICQEIAATPVLGPALQTVFFGGGTPSLLSPNQLDRILQTLDRRFGIAATAEISIEMDPASFDRSQAIATRQLGFNRVSIGAQAFQDGLLERCGRTHRRADIDRAVADLRAAGFENLSLDLISGLPEQTLADWQASLEAAIALEPTHLSAYDLVLEPETVFGKRYQPGDRPLPADEQTAVMYRLAHRTLEAAGFEHYEISNYARSGFQCRHNRVYWQDQSFYGFGVGATSALQGQRFGRPRRRADYFIWLETPGAIAAACAPVTSDPADALAETLMLGLRLAEGLDWTALEQPFGAEILRSLQPVIQRYQQAGWLQWQGDRLSLTQPEGMLFSNQVLASLFERLEAIATV

SEQ ID NO: 11817 - DNA, 1245 bp, Rhodospirillum rubrum ATCC 11170
  CDS (1)..(1245): transl_table=11
atgcctgggcggctgagcccccctgccaccgccgtcgccaccgccgtcggggcccagggggacgagggcttcggcgtttatgtccattggccgttctgcctgtcgaaatgcccctattgcgacttcaacagccatgtcgccgccgccccccttgatcaggcggcgtggcgccaggggctgcttcgcgatctggaaacccaggccggagccctgccgccccggcaacgccgtctgaccagcgtcttctttggcggcggcacgccctcgctgatggacccggcgacggtgggcgcggtgatcgacaaggcgctcgcgctgtggccggtggccgatgatctggaaatcaccctggaagccaatccgggcacggtggagcgcgggcgcttcgccgatttccgccaagccggcgtcacccgcctctcccttggcgtccagtcgctcgaggacgaggccctgcgcttccttgggcgccgccatgacgccgccggcgccctggccgccctggagacggcgcgcgccctgttcgagcgcttctcgttcgatctgatctatgcccgccccggtcagaccctggacgcctgggaggatgaactggcccgggccgtagccctcggccccagccatctgtcggtctatcaattaaccatcgaggccggcacccggtttttcgccgaacacgcccggggcgccttcgttctgcccgacgaggacctgggggcggcgctgttcgagctgacccgccaacgcctgaccgaggccggcctgccggcctatgaggtttccaaccacgcccgccccggcgaggaatcgcgccacaacctgatctattggcgcggcggcgagtatctgggcgtcggcccgggggcccatggccgcctgaccagcgccacggacgaaggcgcctttcaggccaccgtcgcccaccgcgcccccgaggtctggctgcgccacgtaagccagcagggtcacggcctgaaaagcaccacggcgattgaccgccgccagcgcgccgaggaaatggtgatgatgggcctgcgcctcgaggaggggctggtggaagagcgccttctgcgcctgaccggcctgggcttcgccgaggtgcttgatgccggcgggctggcgatggccagcgaagaaggcctgctccaccgccccgccccgggcgttctgcgggcgaccggcgccgggatggcggtgctcaacgccctgaccgccgcccttctcgcttacgatcccaaccgatag

SEQ ID NO: 11818 - protein, 414 aa, Rhodospirillum rubrum ATCC 11170
MPGRLSPPATAVATAVGAQGDEGFGVYVHWPFCLSKCPYCDFNSHVAAAPLDQAAWRQGLLRDLETQAGALPPRQRRLTSVFFGGGTPSLMDPATVGAVIDKALALWPVADDLEITLEANPGTVERGRFADFRQAGVTRLSLGVQSLEDEALRFLGRRHDAAGALAALETARALFERFSFDLIYARPGQTLDAWEDELARAVALGPSHLSVYQLTIEAGTRFFAEHARGAFVLPDEDLGAALFELTRQRLTEAGLPAYEVSNHARPGEESRHNLIYWRGGEYLGVGPGAHGRLTSATDEGAFQATVAHRAPEVWLRHVSQQGHGLKSTTAIDRRQRAEEMVMMGLRLEEGLVEERLLRLTGLGFAEVLDAGGLAMASEEGLLHRPAPGVLRATGAGMAVLNALTAALLAYDPNR

SEQ ID NO: 11819 - DNA, 1167 bp, Moorella thermoacetica ATCC 39073
  CDS (1)..(1167): transl_table=11
atggggacaatgtctcaggctggctttgtaaacaaagccagccacatctatatccacatacccttctgcgtccgcaagtgtaactactgcgactttatctcctatcccgaacagtcaccggaggtgatggccgtctactgccgcctcctggaggaagaaatgaagctggcggccgggacgtggcagccagggccggcagcaacggttttcctgggtggcggtacgccgaccatccttcctgccgacctgctggaaaggattctggttgctgtcgagggctattttaaccggcaaccggaggctgaagtttcagtagaagccaaccctggcaccatcaccctggaaaaactacgggttttgcgctccgccggggttaaccgcctttccctgggggtccagtcctttgacgaccgtctccttaaggccatgggtcgcatccaccgccgccgggacatctaccaggcttaccacctggcccgccgggccggctttgccaatataaacctggatttaattttcggcctgccgggccagaccctggagaactggcaggctactttaagggaggcccttgccctccagcccgagcatcttgccgcctacagcctccaggtggaggaggacacgccctggggccgtctggcggcagcaggcaacctgaaccttccgggcgaggaactggaactggccatgtaccaggaggcccgggaaaagctggctgcggccggctaccagcagtacgaaatttccaacttcgcccggccggggtaccgctgccgccataacgtcacctactggctgaaccatccttacctgggcctgggggcggcggcggcttccagctggcggggagagcgctggcagaattacaagaaccttgagcagtacggcgcggccctctccgccggccggcttccccgggcagagatagaggtcactacaccccgccagcagatggctgaaactatgtttatgagcctgcgcctgctggccggtgttaatctgcaggccttccggcagcgattcggtaaagacgcccgggaggtttacgccggcgaaatggaacggttgctccgggccggcctgattgaagtgcaggggcatcacctcaaactgacggagcggggcctgcccctggccaacgaggttttcgcggcctttgtctga

SEQ ID NO: 11820 - protein, 388 aa, Moorella thermoacetica ATCC 39073
MGTMSQAGFVNKASHIYIHIPFCVRKCNYCDFISYPEQSPEVMAVYCRLLEEEMKLAAGTWQPGPAATVFLGGGTPTILPADLLERILVAVEGYFNRQPEAEVSVEANPGTITLEKLRVLRSAGVNRLSLGVQSFDDRLLKAMGRIHRRRDIYQAYHLARRAGFANINLDLIFGLPGQTLENWQATLREALALQPEHLAAYSLQVEEDTPWGRLAAAGNLNLPGEELELAMYQEAREKLAAAGYQQYEISNFARPGYRCRHNVTYWLNHPYLGLGAAAASSWRGERWQNYKNLEQYGAALSAGRLPRAEIEVTTPRQQMAETMFMSLRLLAGVNLQAFRQRFGKDAREVYAGEMERLLRAGLIEVQGHHLKLTERGLPLANEVFAAFV

SEQ ID NO: 11821 - DNA, 1218 bp, Burkholderia thailandensis E264
  CDS (1)..(1218): transl_table=11
atgagcgacgcggcaaccaacggcgcgcgcgtcgtcgcgacattcgccgcgcccggcaagatccggctcgcgtcgctgccgccgctcgcactgtacgttcacttcccgtggtgcgtgcgcaagtgcccgtactgcgacttcaattcgcacgaatggaaggacggcggcgcgctgcccgagcacgattatctcgacgcgctgcgcgccgatctcgaacatgcgctgccgctcgtctggggacgccaggtgcacacggtgttcatcggcggcggcacgccgagcctgctgtcggcggcggggctcgaccggctgctgtccgacgtgcgcgcgctactgccgctcgacgcggacgccgagatcacgctcgaggcgaaccccggcacgttcgaggcggcgaaattcgcgcaattccgcgcgagcggcgtcaatcgtctgtcgatcggcatccagagcttcaacgaagcgcatctgaaggcgctcgggcgaatccacgacgccgcgcaggcgcgcgccgcggtcgagatcgccgcgcgcacgttcgagaacttcaatctcgacctgatgttcgcgctgccgaaccagacgctcgacgaatgccgcgcggatctcgagaccgcgctcacgttcgcgccgccgcatctgtcgctttatcacctgacgctcgagccgaatacgtacttcgcgaaatttccgcccgccgtaccggacgacgacgcgtcggccgacatgcaggactggttgcacgagcgcaccgcgcaggcgagctacgcgcgctacgaggtgtcggcttacgcgaagccgcatcggcagagcaagcacaacctcaactactggtgcttcggcgactatctcgggatcggcgcgggcgcgcacacgaagctgtcgtttccgaaccggatcctgcgccaggcgcgctacaaacatccggcgacgttcatcgaacaggcgaaagcgggtgcggcggtgcaggaagagcgggaggtcggcccgcgcgatctgccgttcgagttcatgctgaacgcgctgcggctcgtcgacggcgtgcccacccacagcttcgcggagcgcacgggcatgtcgctcgcgtcgatcgggcccgcgctcgcgcaagcgcagcagcgtggcctcatcgtgcacgatcacacgcgcatcgcgccgacgccgctcggccagcgtttcctcaacgatctgcaggcgcttttcctgcgcgacgaatga

SEQ ID NO: 11822 - protein, 405 aa, Burkholderia thailandensis E264
MSDAATNGARVVATFAAPGKIRLASLPPLALYVHFPWCVRKCPYCDFNSHEWKDGGALPEHDYLDALRADLEHALPLVWGRQVHTVFIGGGTPSLLSAAGLDRLLSDVRALLPLDADAEITLEANPGTFEAAKFAQFRASGVNRLSIGIQSFNEAHLKALGRIHDAAQARAAVEIAARTFENFNLDLMFALPNQTLDECRADLETALTFAPPHLSLYHLTLEPNTYFAKFPPAVPDDDASADMQDWLHERTAQASYARYEVSAYAKPHRQSKHNLNYWCFGDYLGIGAGAHTKLSFPNRILRQARYKHPATFIEQAKAGAAVQEEREVGPRDLPFEFMLNALRLVDGVPTHSFAERTGMSLASIGPALAQAQQRGLIVHDHTRIAPTPLGQRFLNDLQALFLRDE

SEQ ID NO: 11823 - DNA, 1215 bp, Syntrophus aciditrophicus SB
  CDS (1)..(1215): transl_table=11
atgcggattgacatgcaggttcaccataacttcttcatttccatgcaaaaaccgaagagtcagtcctccaaaccggtcgggaagagaagggccgaggataatccaggtctctatctccatatacccttctgtgaaatcaaatgccgatactgtgattttttttctgtaacagaactgagcaggattaccgattttctggatgcgatttgccgggagatgaacctccgcggcaaagtttttaaattctttgacacgctttatattggcggtggcactccttcagttttacgcccggatcaactgaaccgtcttcttgaacatctccaccagcactttaaaatttccaaagaggcggaaattaccctggaagcaaatccggcggatatctcggtttccgtgatgaaagaactgcgctcactgggaatcaacagattgaatatcggggtgcagtccttcgacaaccatatcctggaatttctgggccgaaggcacaacggcaggcaggcaatccgggccattgaggcatcccttcaggccggtttcggcaatttcggaattgatctcatttatggaattcccggacagaaacgcaatacatggataaagactctggaacaggcgttaacctttcagattccgcatctatcctgttatcagcttacggtggaacctgagacacctcttgggcaatcttacaaaaagggccttattctcacgccggataatgacgaactttttgaattatttatggacacgtcggaatttcttgagaaagcaggatattgtcactatgaagtttccaattttgcccgcggagactcccgaatatcccgtcataattcgaaatactggcatcatattccttatcttgggctcggtccctccgctcattcctttgatggagagaagcgctggatgaatgttcgatctttggaagattatatccagcgtctgaatcaaggcaaactgcccatggagttctgcgaaaatttgaccagggaggaactgcaattcgaggctcttttcctcgggttccgtaccagcgcgggaatagatcttgacgattttgaagagaaattcggatggaatctatggtctgtaaaggaaagggattatgaactgcttcttgatgcaggacatctgaaaatcgtgaacggccgcctccagccaacccggaccggtatggccctggccgacagcctggccctgctctaa

SEQ ID NO: 11824 - protein, 404 aa, Syntrophus aciditrophicus SB
MRIDMQVHHNFFISMQKPKSQSSKPVGKRRAEDNPGLYLHIPFCEIKCRYCDFFSVTELSRITDFLDAICREMNLRGKVFKFFDTLYIGGGTPSVLRPDQLNRLLEHLHQHFKISKEAEITLEANPADISVSVMKELRSLGINRLNIGVQSFDNHILEFLGRRHNGRQAIRAIEASLQAGFGNFGIDLIYGIPGQKRNTWIKTLEQALTFQIPHLSCYQLTVEPETPLGQSYKKGLILTPDNDELFELFMDTSEFLEKAGYCHYEVSNFARGDSRISRHNSKYWHHIPYLGLGPSAHSFDGEKRWMNVRSLEDYIQRLNQGKLPMEFCENLTREELQFEALFLGFRTSAGIDLDDFEEKFGWNLWSVKERDYELLLDAGHLKIVNGRLQPTRTGMALADSLALL

SEQ ID NO: 11825 - DNA, 1236 bp, Frankia sp. CcI3
  CDS (1)..(1236): transl_table=11
atgccacaaaagcctcccgacggctcgcttccgccggacgacggtgccctcccggcggccgcgctggccgaggtgacccggcggccgttcggggtctacgtgcatgtgccctattgcgcggcgcgctgcggctactgcgacttcaacacctacacggcggccgacctaggcggcgccctggtgtcgtcggtgggcctcacgacgttcgtcgacatcgcgaccggcgaggtccggctcgcgcgtaccgtgcttggtgagcaggagctggtggtctccacggtcttcgtcggtggcggcacgccgaccctgttgaccgcggacgatctcgggcggctgttgcggatcctggacgacgggttcgggctggcgtccgacgcggagatcaccaccgaggcgaatccggagtcggtggatccggcgcaactggagcagctgcgcgccgccggttacacccggatctccttcgggatgcagagtagccgtccgcacgtcctcgccgccctggaccggcggcacacccctggccgcgtgcccgaggtgatgcgctgggcccgcaaggcgggctttgaccaggtcagcctggacctcatctacggggctccgggcgagtcggaggcggactgggcggcgagcctggacgcggcgatccagctcggcccggaccacgtcagtgcctacgcgctgacggttgaggagggcacgaaactgtcccgccgggtccgccggggcgagctgctcgaacccgacgacgacctgcttgccgaccgctacctgcaggccgatgacgctctgtgcgcggccggcctgaccagctacgaggtcagcaactggtcgcgggggaccgatacccggtgtcggcacaatctggggtactggcgcggagatcactggtgggggatcggtccgggcgcgcacagccacgtcggcggggtgcgatggtggaacgtgcgtcatccggcggagtacgcggcccggctgggggccgggcgcagtcccgcggccgcccgggaggagctcgacgcgcaggcccgccgggtcgagcgggtcatgctgggcgtccggttggccgagggactggccgtcggtgagctggacgggcccggccgggaggccaccgccgggctcgcgaagtccggcctggtggaacccggtgccctggagttcggccgggtgcgtctcactcgtcgcggtcgtctgctcaccgacacggtcgtgcgagccctgctgcccgactga

SEQ ID NO: 11826 - protein, 411 aa, Frankia sp. CcI3
MPQKPPDGSLPPDDGALPAAALAEVTRRPFGVYVHVPYCAARCGYCDFNTYTAADLGGALVSSVGLTTFVDIATGEVRLARTVLGEQELVVSTVFVGGGTPTLLTADDLGRLLRILDDGFGLASDAEITTEANPESVDPAQLEQLRAAGYTRISFGMQSSRPHVLAALDRRHTPGRVPEVMRWARKAGFDQVSLDLIYGAPGESEADWAASLDAAIQLGPDHVSAYALTVEEGTKLSRRVRRGELLEPDDDLLADRYLQADDALCAAGLTSYEVSNWSRGTDTRCRHNLGYWRGDHWWGIGPGAHSHVGGVRWWNVRHPAEYAARLGAGRSPAAAREELDAQARRVERVMLGVRLAEGLAVGELDGPGREATAGLAKSGLVEPGALEFGRVRLTRRGRLLTDTVVRALLPD

SEQ ID NO: 11827 - DNA, 1155 bp, Novosphingobium aromaticivorans DSM 12444
  CDS (1)..(1155): transl_table=11
atgcagccccttgccctctacgtccactggccgttctgcctcgcaaagtgcccttattgcgacttcaacagccatgtgcgcgcgcggaccgacatcgcagcgtggcaggccgcgctgctggcggacatgcgacatgaagctcggttgacgccgggacggccgctctcctcgatcttcttcggaggcggtacgccatcgctcatgccgcccgcgctggtcgaggcattgctcgccgaagcagagcggctctggggctttgccccgggcatcgagatcacgctggaggcgaacccaagttcggtcgaggccgcaaacttcgcggccctgtccagcgccggaatcaatcgcgtctcgcttggccttcaggcgctcgacgacaacaccctgaaattcctcggtcggctgcatgacgtcagcgaaagccttgccgcgctggatcttgcccagacccatttcggccgtgtcagcttcgacctcatctatgcccgccccggccagaccccggcgcagtgggaagctgaactcaagcgcgctttaggcttcggaaccggccacctctcgctctaccagctcaccatcgagcccggcacccgcttcgccacgctcgtccgcgaaggcaagctcgcccctctcgacgacgacgaggcggccgacctctttgccctgacccgggagctgacctccgctgccagcctgcccgcctacgagaccagcaaccatgcccgccccggcgaggaaagccgccacaacctgacctactggcgctaccaggactacatcggcataggacctggcgcccatggccggaggcttggcgcggcgaccgtgcggcacaagaaacccgagaactttctccgcgcggtttccgaacatggccaaggcattgtcgaagaacgacaacttaccccgtccgaacaggcgatcgaagccgtgctcatgggtctgcgccttgccgagggcatttccccgccggcgctcgccgcccgcttcggctttgcggaggacgaaatgatcgaccggcgcaatcgcgaatccttcgcaagaatggggtacctgaacgacaccgaaacatgcctgaaggtgaccgaacagggcgcgccggtgctggaagcgttgctggccgacctcgtgaccgacacgatcatcgccgcatga

SEQ ID NO: 11828 - protein, 384 aa, Novosphingobium aromaticivorans DSM 12444
MQPLALYVHWPFCLAKCPYCDFNSHVRARTDIAAWQAALLADMRHEARLTPGRPLSSIFFGGGTPSLMPPALVEALLAEAERLWGFAPGIEITLEANPSSVEAANFAALSSAGINRVSLGLQALDDNTLKFLGRLHDVSESLAALDLAQTHFGRVSFDLIYARPGQTPAQWEAELKRALGFGTGHLSLYQLTIEPGTRFATLVREGKLAPLDDDEAADLFALTRELTSAASLPAYETSNHARPGEESRHNLTYWRYQDYIGIGPGAHGRRLGAATVRHKKPENFLRAVSEHGQGIVEERQLTPSEQAIEAVLMGLRLAEGISPPALAARFGFAEDEMIDRRNRESFARMGYLNDTETCLKVTEQGAPVLEALLADLVTDTIIAA

SEQ ID NO: 11829 - DNA, 1125 bp, Staphylococcus aureus subsp. aureus NCTC 8325
  CDS (1)..(1125): transl_table=11
atgacggtacaaagtgcatatatacatattccattttgtgtaagaatatgtacatattgtgatttcaataaatattttatacagaatcaacctgtagatgagtacttagatgcactaatcacagaaatgtctacagcaaaatataggatcttaaagaccatgtatgtaggtggcggcacaccaacggccctttctattaatcagttggaaagattacttaaagcaatacgtgatacgtttacaatcacaggcgagtatacatttgaagcaaatcctgatgagttaactaaagagaaagtccaactattagagaaatatggagtaaaaaggatttcaatgggcgttcaaacattcaagccggagttattgtctgttttaggtagaacgcacaatactgaagatatttacacttcggtgttaaatgctaaaaacgcaggtattaaatcaatcagtttagatttaatgtatcatttaccgaaacagacgattgaagattttgaacaaagtttagatctagctttagatatggatattcaacatatttcgagttacggcttaatacttgaacctaaaacccaattttataatatgtatagaaaaggcttgctcaaacttgctaatgaggatttaggtgctgacatgtatcagttgctgatgtctaagatagaacaatctcctttccatcaatacgaaatatctaattttgcattagatggccatgaatcagaacataataaggtttactggtttaatgaggaatattatggatttggagcaggtgcaagtggttatgtagatggtgtgcgttatacgaatatcaatccagtgaatcattatatcaaagctataaataaagaaagtaaagcaattttagtatcaaataaaccttctttgactgagagaatggaagaagaaatgtttcttgggttgcgtttaaatgaaggtgtgagtagtagtaggttcaaaaagaagtttgaccaatctattgaaagtgtctttggtcaaacaataaataatttaaaagagaaggaattaattgtagaaaagaacgatgtgattgcacttacaaatagagggaaagtcataggtaatgaggtttttgaagctttcctaataaatgattaa

SEQ ID NO: 11830 - protein, 374 aa, Staphylococcus aureus subsp. aureus NCTC 8325
MTVQSAYIHIPFCVRICTYCDFNKYFIQNQPVDEYLDALITEMSTAKYRILKTMYVGGGTPTALSINQLERLLKAIRDTFTITGEYTFEANPDELTKEKVQLLEKYGVKRISMGVQTFKPELLSVLGRTHNTEDIYTSVLNAKNAGIKSISLDLMYHLPKQTIEDFEQSLDLALDMDIQHISSYGLILEPKTQFYNMYRKGLLKLANEDLGADMYQLLMSKIEQSPFHQYEISNFALDGHESEHNKVYWFNEEYYGFGAGASGYVDGVRYTNINPVNHYIKAINKESKAILVSNKPSLTERMEEEMFLGLRLNEGVSSSRFKKKFDQSIESVFGQTINNLKEKELIVEKNDVIALTNRGKVIGNEVFEAFLIND

SEQ ID NO: 11831 - DNA, 1143 bp, Francisella tularensis subsp. holarctica
  CDS (1)..(1143): transl_table=11
atgtttgaaatcaacaaacaaattggaatttatatccattttccttggtgcgtgcgtaaatgcccgtactgtgactttaactctcatccaataaaagatgatagctatctttcagaacaatattatcaaaaacttatagccgattttgatactcatcttgatgatttacaagctagagaagttataagtatttttattggtggcggcactccttctctgtttaaagctgagtaccttgataaagttttacaacatattactaaaaatacaaaaattagcattaattgtgaaataactttagaaatgaatccaggaacagtagagagaggttcaatactaagttatcaaaatattggaattaataggatatcgcttggggtgcaaagctttcaagatgataaactaaaaattttgggaagaattcataattgcgaaaatgtttatactactattgatgaaatcaaaaactcaaaaatctctaatttcaatattgatataatgcatggactcccaaatcaaagctttgatgatggtatttttgatataactcaagccatagcaatgcaaccaacacatatttcttggtatcaacttactattgagcctaatacattatttgcagcaaaacgaccaaaactccctgatgaagaaattcttgaaagtattgaaatagccggcaaagaggctcttgcacatgcaggttttaaacaatacgaagtttctgcttttgccaaaaatactctaagatctattcataattctaattactggatgtttggcgattatataggcattggcgctggagcgcatagcaagattaccaatcttaaaaccaaacaaatcaaaagagtttggaaacataaacaccctaagatatatactcaaactgataaatttatcaaagactcaaacatagttacccaagatgagattatatatgagtttatgcttaatactctaagattaaaaaatggttttaaacttagtgagtttgaacaacaaacttttttatcaagcaatattattagccaaaagttacaattaggtattgataaagggctcttagaactaaatgctaatcaaatcaaaccaacagccaaaggttatctatttttaaatgactgtattaatatttttagctaa

SEQ ID NO: 11832 - protein, 380 aa, Francisella tularensis subsp. holarctica
MFEINKQIGIYIHFPWCVRKCPYCDFNSHPIKDDSYLSEQYYQKLIADFDTHLDDLQAREVISIFIGGGTPSLFKAEYLDKVLQHITKNTKISINCEITLEMNPGTVERGSILSYQNIGINRISLGVQSFQDDKLKILGRIHNCENVYTTIDEIKNSKISNFNIDIMHGLPNQSFDDGIFDITQAIAMQPTHISWYQLTIEPNTLFAAKRPKLPDEEILESIEIAGKEALAHAGFKQYEVSAFAKNTLRSIHNSNYWMFGDYIGIGAGAHSKITNLKTKQIKRVWKHKHPKIYTQTDKFIKDSNIVTQDEIIYEFMLNTLRLKNGFKLSEFEQQTFLSSNIISQKLQLGIDKGLLELNANQIKPTAKGYLFLNDCINIFS

SEQ ID NO: 11833 - DNA, 1146 bp, Desulfitobacterium hafniense Y51
  CDS (1)..(1146): transl_table=11
atgccttctctttatatccatgttcctttttgtgtgcagaaatgcaattattgtgctttttattcggagccctggcaggaagtcaaggctgaagcttatttagcaggcttaaaccgtgaggttgagctgaggcaggagattgtgttaagacaacaagaggttcaggaggagatagagacccttttcattggcggggggacgccgacggctttgccggaagcggaactgggcgctctcttaagcatcattcatggtcagttaaggtttaaggatgggggggaaaaaaccatcgaagccaatcctggtacccttacggctgaaaagctccggatcctcagccggcaaggtatcaaccgcatctctttaggggttcagtcctttaatgacgacttgttaagacagatcggcagaatccatcggactgaggaggttcgggagggggtgcagctgatcagggaggcgggctttaagaaccttaatctggatttgatgttcggactgccagggcagacccaggccgattggcgggataccatggaagaggccttaaggctccggcctgagcatctctctgtttatgggctgatggtcgaagagggtaccccgctggccctgaattcggaatcgcttacgaatttgcctgatgatgacagccaggccgagatgtaccacttggcccgggagatactgggcaaggcgggataccggcattatgaagtctctaattacgccctcccgggttatgaatgtcagcataatcttggctactggcacaggaaggattatttagggatagggccaagtgccgtatcttgcctgaataaccgccgttatcaaaatgttgaagacattcttctctatgcaaagatgctgtctcaaggggaacttccggtggatagtcaaaagaatgaatttctttcccaacatgagcaaatggcagaacttttaatactgggtctgcgtcttaaagatggggtgaatttgtcccagttccaaaaagaggtcggcgcggagctttttgagctttatcctgctgttttggagcgttatcttaaggccggcgtcctaaagatcgaagagggctcccttctcttgcaaccggagtattggtttgtcgccaatggggtgctgcaggaattcgtgtga

SEQ ID NO: 11834 - protein, 381 aa, Desulfitobacterium hafniense Y51
MPSLYIHVPFCVQKCNYCAFYSEPWQEVKAEAYLAGLNREVELRQEIVLRQQEVQEEIETLFIGGGTPTALPEAELGALLSIIHGQLRFKDGGEKTIEANPGTLTAEKLRILSRQGINRISLGVQSFNDDLLRQIGRIHRTEEVREGVQLIREAGFKNLNLDLMFGLPGQTQADWRDTMEEALRLRPEHLSVYGLMVEEGTPLALNSESLTNLPDDDSQAEMYHLAREILGKAGYRHYEVSNYALPGYECQHNLGYWHRKDYLGIGPSAVSCLNNRRYQNVEDILLYAKMLSQGELPVDSQKNEFLSQHEQMAELLILGLRLKDGVNLSQFQKEVGAELFELYPAVLERYLKAGVLKIEEGSLLLQPEYWFVANGVLQEFV

SEQ ID NO: 11835 - DNA, 1203 bp, Saccharophagus degradans 2-40
  CDS (1)..(1203): transl_table=11
atgccgactacagattacagagcccccgccatgcccacaccaactgccttgccgccactttccctttacgtgcatataccttggtgtgtaagaaagtgcccctattgcgattttaattcgcatgcggcgcccagtgaattgcccattgacgactacctcgcctgcttaaaacaagatttgctgcacgacctagatcaggtgcaggggcgcaaaattcacagtgtattttttggcggtggcacaccgagcttgttccccggcgtggccattggcgacttgctggcctttgtagcagataaaataggcttcgaagctggggcagaaataactttagaagccaaccccggcacagcagagcgcggcaactttaccagcttgcgcatggagggagtaaaccggttgtcgctgggcgtacaaagctttaacgatgaccacctgcagcgcttagggcgtattcacggccgtgatgaagcactcaatgccttccaattagcgcgcgatgcgggttttaacaatataaatatagacctaatgcacggcctgcccgagcaaacgccagagcaagggttaagtgatttacaacaagctattggtttggggccagagcatatttcgtggtaccagcttaccattgagcccaacacccacttttattcccacacgccggtattacccttagaagacacgctcgagtccattcaagagctagggcacgaagcgctgcaaagtgcaggctacctgcgctacgaaacctctgcctatgcccaaaacgccaagcgctcagctcacaacctaaattactggcagtttggcgattacttggccattggcgccggtgcgcacggtaaaaacaccacgcttacccccaatggcctagtaattagccgcaaccgaaaaacgcgtctacccaaagattacttagccgcagccaaaagtaccgccaatggcaacccattttgcgccaagcaaagccttatcgacccgagccaactaccgttagagtttatgatgaacgccctgcggctaatggatggcgttaaagcaagtacttacttcgaaagaacgggcttagcgttagaaccgctagcccaaacacttgccgacctgcgcgcacaggggctgatgattgacaaccccaacacgctagccaacacagagcttggccaccgctacctcaacgccatcctagagcgttttttgtaa

SEQ ID NO: 11836 - protein, 400 aa, Saccharophagus degradans 2-40
MPTTDYRAPAMPTPTALPPLSLYVHIPWCVRKCPYCDFNSHAAPSELPIDDYLACLKQDLLHDLDQVQGRKIHSVFFGGGTPSLFPGVAIGDLLAFVADKIGFEAGAEITLEANPGTAERGNFTSLRMEGVNRLSLGVQSFNDDHLQRLGRIHGRDEALNAFQLARDAGFNNINIDLMHGLPEQTPEQGLSDLQQAIGLGPEHISWYQLTIEPNTHFYSHTPVLPLEDTLESIQELGHEALQSAGYLRYETSAYAQNAKRSAHNLNYWQFGDYLAIGAGAHGKNTTLTPNGLVISRNRKTRLPKDYLAAAKSTANGNPFCAKQSLIDPSQLPLEFMMNALRLMDGVKASTYFERTGLALEPLAQTLADLRAQGLMIDNPNTLANTELGHRYLNAILERFL

SEQ ID NO: 11837 - DNA, 1155 bp, Methylobacillus flagellatus KT
  CDS (1)..(1155): transl_table=11
atgcttgcctcggcgccaacccagcccccgccgttgtcgctttacatccatatcccatggtgtgtgcgcaagtgcccttattgcgatttcaattcgcacgagtcgcgcaccgagattccagaagcagcctatgtcgatgcgttgattgcagacctagagcagtcggtaccacgcatctggggacgtcgcgtgcacagtattttcttcggcggcggcacacccagcctgttctcgcccaaggcgatcgaccgcatcctcagcaatgtgcgggctctcgtgcccttgagcgtggattgcgaggtcacgctggaagccaatccgggcaccgtggatgccgcccatttccgcggataccgcgcggcaggcgtcaaccggctctcgcttggcattcagagtttcgacagtacctatctgcagaaactcgggcgcatccatgatgaggcacaggccatggccgctgccgatctcgctctgcagacctttgattccgtcaacctggacgtcatgtacgcattgcccggacaacacctggaacatgccctggccgacgcgcaacgcgcctgcagcctccaacccgcacacctgtcgttctaccatctgacgctggaacccaatacgccgtttcaccgtactccgcctgcattgccggacgacgacaccagtgccgccatgcaggaagcgatagaagacctgctgggccggcatggctacgagcattacgaaacctcggcgtttgcgcaacatggcaagcagtgccgccacaaccgcaattattggctgttcggcgattacctgggcatcggggccggcgcacatagcaaactgagcttccatgaccgcatcacgcgcgaaagccgccacaaacatcccaaacgctacctggaacatgccagccgaggcaatgccgtggagcaccaatggcagattgccaggcatgaactgcccttcgagttcatgatgaacgccttgcggctcaccggcggctttgcacccgcacttttcgagctacgcaccggcctgccgctggaaagcattgcccatacgctgcaacatgctgttcaaaaagggttattggacgtaggccaggagcgcattgcccccacattgctgggacaacgcttcctgaatgaactgctgcaactgttcctggattga

SEQ ID NO: 11838 - protein, 384 aa, Methylobacillus flagellatus KT
MLASAPTQPPPLSLYIHIPWCVRKCPYCDFNSHESRTEIPEAAYVDALIADLEQSVPRIWGRRVHSIFFGGGTPSLFSPKAIDRILSNVRALVPLSVDCEVTLEANPGTVDAAHFRGYRAAGVNRLSLGIQSFDSTYLQKLGRIHDEAQAMAAADLALQTFDSVNLDVMYALPGQHLEHALADAQRACSLQPAHLSFYHLTLEPNTPFHRTPPALPDDDTSAAMQEAIEDLLGRHGYEHYETSAFAQHGKQCRHNRNYWLFGDYLGIGAGAHSKLSFHDRITRESRHKHPKRYLEHASRGNAVEHQWQIARHELPFEFMMNALRLTGGFAPALFELRTGLPLESIAHTLQHAVQKGLLDVGQERIAPTLLGQRFLNELLQLFLD

SEQ ID NO: 11839 - DNA, 1230 bp, Burkholderia xenovorans LB400
  CDS (1)..(1230): transl_table=11
gtgattccgatcaagcccgcgcccgccgatatcggcaatggcgtcatcaaggcgttcacgtcgccgggcagcatccggctgacgtcgctgccgccgttggcgttgtacgtgcatttcccgtggtgcgtgcgcaagtgtccgtattgcgacttcaattcgcacgaatggaaaggcgacacgttcccggaaaccgaatatctcgatgccttgcgcgccgatctggaaatggcgctgccgctcgtctggggacgccaggtgcatacggtgttcatcggcgggggcacgcccagcctgctgtcggcggccgggctcgatcgcatgctgtcggacgtgcgcgcgctgctgccgctcgacgccgacgcggaaatcacgctcgaagccaaccccggcacgttcgaagccgacaaattcgcgcagtttcgcgcgagtggtgtgagccggctctcggtgggtattcagagtttcaacgaagcgcatctgaaggcgctcggccgcattcatgattcggcgcaggcgcgccatgccgttgaggtggcgtcaaccaccttcgacaacttcaatctcgacctgatgttcgcgctgccggggcaaacgctcgccgaatgccaggccgatgtcgagatggcgttgtcgttcgcgccgccgcatctgtcgctgtaccacctgacgctcgaaccgaacacgctgttcgcaaagttcccgcccgccctgcccgacgacgatgcctccgccgacatgcaggactggattcacgagcgcacctcagccgcgggttatgaacggtatgaggtgtcggcgtatgcgcggccgcatcggcagagcaggcacaatctgaactactggcgcttcggcgactatctcggcattggtgcgggggcgcataccaagctctcgtttccgaatcgcgtgctgcgtcaggcgcgttacaagcatcccaccaccttcatcgagcaggctaaggccggcacggcggtgcaggaagagcatgaagtcgggacgcgcgatctgccgttcgagttcatgctaaacgcgctgcggctggtggaagggtttccggtgcatcggttcatcgagcgcacgggaatgtcgatgacgtcgatcgaaccggcgttgcaagaagccgaacggcgcaagctgattacgcgcgaccacgaaaagattgcgccgacgccgcttggccaggcgttcctgaacgatctgcaggagctgtttctgaaagatccgcagtga

SEQ ID NO: 11840 - protein, 409 aa, Burkholderia xenovorans LB400
MIPIKPAPADIGNGVIKAFTSPGSIRLTSLPPLALYVHFPWCVRKCPYCDFNSHEWKGDTFPETEYLDALRADLEMALPLVWGRQVHTVFIGGGTPSLLSAAGLDRMLSDVRALLPLDADAEITLEANPGTFEADKFAQFRASGVSRLSVGIQSFNEAHLKALGRIHDSAQARHAVEVASTTFDNFNLDLMFALPGQTLAECQADVEMALSFAPPHLSLYHLTLEPNTLFAKFPPALPDDDASADMQDWIHERTSAAGYERYEVSAYARPHRQSRHNLNYWRFGDYLGIGAGAHTKLSFPNRVLRQARYKHPTTFIEQAKAGTAVQEEHEVGTRDLPFEFMLNALRLVEGFPVHRFIERTGMSMTSIEPALQEAERRKLITRDHEKIAPTPLGQAFLNDLQELFLKDPQ

SEQ ID NO: 11841 - DNA, 1260 bp, Ralstonia metallidurans CH34
  CDS (1)..(1260): transl_table=11
atgatcccgatcgtccctgtcggcggtggcacgccggccacatcctcgccgctatcccctgccgacaaccagaagctttggctcaagccgggccagatcgccctgcccggctcgccgccgctttctctctacgtgcacatcccatggtgcgtgcgcaaatgcccgtactgtgatttcaactcgcacgcggcaccgggaaagccggatagccacgagattcccgaggacgcctacctcgacgcgctacgcgcagatcttgagcaatcgctgccactggtatggggacgtcccgtgcatacggtgtttatcggcggcggcacaccgagcctgctgtcggccgctggcatggaccgcctgctatcggacatccgcgcgctgctaccgctcgatgccgatgccgagattacgatggaagccaaccccggcaccttcgaagccgaacggttcgcaagctatcgcgccagcggcatcaaccggctgtcgatcggcatccagagtttcaacgacgcccacttgaaagcgcttggccggatccacggcgagcgcgaggcacgcgcggccatcgacatcgcgctgaagcacttcgacaacgtcaatctggacttgatgtatgcgctgccggggcagaccctggacgaatgcgcgcgcgacctggacgcagcgttgtcgtacggcaccacgcacctgtcgctctatcacctgacgctggaaccgaacacgctgtttgcgaagtttccgcccgcgctgccggacgaggacaccgcctacgagatgcaggacatcgtcgaggcccgtacggctcaggctgggtatcgccactacgagacatcggcctatgcgaagccgcatcgcgaggcgcgccacaacctcaactactggcgcttcggcgactacctcggcatcggcgccggcgcccacggcaagctttcgtttccaaaccggatcctgcggcagatgcgacacaagcacccggccacttatatggagcaggccctggctggcaacgccgtgcaggaagcgcgcgaagtcggcgctgacgaactcccgttcgaattcatgctcaacgcgctgcgtctgacggacggcgtgccggcatcgagtttccacgactacaccggcctgccattgcacatgatcggcaagcagcttgccgcagccgagaagaagggactgctcgacgccgaccctaccgtgatcaagccgactgaactcggccgacgcttcctcaacgacctgcaggagatgttcctgaaggattga

SEQ ID NO: 11842 - protein, 419 aa, Ralstonia metallidurans CH34
MIPIVPVGGGTPATSSPLSPADNQKLWLKPGQIALPGSPPLSLYVHIPWCVRKCPYCDFNSHAAPGKPDSHEIPEDAYLDALRADLEQSLPLVWGRPVHTVFIGGGTPSLLSAAGMDRLLSDIRALLPLDADAEITMEANPGTFEAERFASYRASGINRLSIGIQSFNDAHLKALGRIHGEREARAAIDIALKHFDNVNLDLMYALPGQTLDECARDLDAALSYGTTHLSLYHLTLEPNTLFAKFPPALPDEDTAYEMQDIVEARTAQAGYRHYETSAYAKPHREARHNLNYWRFGDYLGIGAGAHGKLSFPNRILRQMRHKHPATYMEQALAGNAVQEAREVGADELPFEFMLNALRLTDGVPASSFHDYTGLPLHMIGKQLAAAEKKGLLDADPTVIKPTELGRRFLNDLQEMFLKD

SEQ ID NO: 11843 - DNA, 1233 bp, Acidobacteria bacterium Ellin345
  CDS (1)..(1233): transl_table=11
gtggccctcggcatttatatctctgtcccgttttgccgcactaagtgctctttctgcaatttcgcgtcaggggtgttctcgcgggagcttttcgaccgctacatcaatatcgtggccgaagacattgcgcgggccgaacagattgcgccgggcgctcagttcgagagcgaggtggactcgatctatctcggtggggggactccgagtgtattggcccccgaccaactggagcgacttttcctcgcggttcacgaaaagttcaaagtgagcaacaacaccgaagtcacagtggaatgcgcgccgggaacactgacccgcgaaatgctgaacgcgctggtggatttcggtgtgaaccgcgtgagccttggggtgcagtcgtttgtagatgaagagagccgttcggtcggacgactccatacgcgcgaaatcaccttcgccgacatcaattccctgcgccaacatgggattgaaaacatcagcgtggacctgatcgccggacttccgcaccaaacgcccaagagttggcgtgagtcgctgcaggacgtggtggactcgcaggtgccgcacgtaagtgtgtacatgcttgaggtcgatgaggactcccgcttgggacgcgaactgatggcgggcggcacgcgctaccatgcccattttgtccccgatgacgacaccaccgcggacctctatcagcaggcgtgcgacacactgaacaaggctggagtaaggcaatacgaaatctcgaattttgcacgcccagagagcgaatcgcggcataacttaaagtattggttgaggcagccttatcttggatttggggtggatgctcactccatgctggcttcgcagaattgcgagggactgcgcttctccactgccgacgacctggatcaattccttgccggagcgccgcgaacgtttcgccatgtgaaccgggccgcagcggaagacgaagcattcttcctcggcttgcgactgaaccgcggcgtcgacctgagcgcgatcgagcaggagtccgggaaagaccccgtcgcacgtcgcggcgccgcactcgaagaactcacagaggccgaactcctccaacgcgatcactgcaccatacgtctcaccgatcgcgggcggttgctctccaatgaagtctttgagcggttaacgcttgccgcgcctcccgaagaggaacggcggaacgagtcggcgaatccgccactcatcgcaatttctccgccacccaagtaa

SEQ ID NO: 11844 - protein, 410 aa, Acidobacteria bacterium Ellin345
MALGIYISVPFCRTKCSFCNFASGVFSRELFDRYINIVAEDIARAEQIAPGAQFESEVDSIYLGGGTPSVLAPDQLERLFLAVHEKFKVSNNTEVTVECAPGTLTREMLNALVDFGVNRVSLGVQSFVDEESRSVGRLHTREITFADINSLRQHGIENISVDLIAGLPHQTPKSWRESLQDVVDSQVPHVSVYMLEVDEDSRLGRELMAGGTRYHAHFVPDDDTTADLYQQACDTLNKAGVRQYEISNFARPESESRHNLKYWLRQPYLGFGVDAHSMLASQNCEGLRFSTADDLDQFLAGAPRTFRHVNRAAAEDEAFFLGLRLNRGVDLSAIEQESGKDPVARRGAALEELTEAELLQRDHCTIRLTDRGRLLSNEVFERLTLAAPPEEERRNESANPPLIAISPPPK

SEQ ID NO: 11845 - DNA, 1155 bp, Silicibacter sp. TM1040
  CDS (1)..(1155): transl_table=11
gtggatgattggcggaatgggggctttggtctctatgtgcattggccgttctgtcaggccaaatgcccctactgcgatttcaacagccatgtggtttcccagatcgaccaatcagcctgggtgaccgcctatcaggccgagctgcgccgcatgggagaattgctccccgatcgcctcctgaactcgatcttctttggtggcgggacgccatcccttatgcatccagataccgtcgccgctgtcatcgaagctgcacgcgagaactggacctttgcaaatgacattgaaatatccttggaggccaatccaggatcggtagaagccggtcgttttgcgggttaccgagatgcgggcgtcaaccggatctcaatggggatccaagcgctcaatgatgaggatctgcggcgtctcggacgcatccactccgttgaagaggcccgcaaagccttcgacgttgcgcgaaactgttttgatcgtgtgagctttgatctcatttatgcgcgccagggccagacattgaacgcatggaaggccgagctttcagaggccttgagcatggcgattgatcatctctcgctctatcagctcacgatcgaagacggcaccgcctttggggatcgctatgcccgcggcaagctgcgggatctgcccaccgatgatcacgccgcagatatgtatctcgcgacccaagagatctgtgaattgtatggattgcctggctatgagatttccaaccacgcccgtccgggcgcagaaagccgccacaatctgatctactggcgatatggcgactacgttgggatcggtccgggcgctcacggtcgcatcacgttgaacggaacccgtttcgccacagaggcaccccgcgcacctggcgcatggctctctgcagtggaacaaggcaatgggctattgccctttgatgctttgaactcagaagatcaggtgaatgaacacatgatgatggggctgcgtctgttcgaaggtgtagatctggatcggcatactgccctcgctcaaaagccgctctcgccatccaaaattcaagagctttgtaacctcggcatgttagatctggacgggtcacggctacgggctacgtctcaagggcgcgcggtactcaacgcggtcctgcgagagctgctaacggattga

SEQ ID NO: 11846 - protein, 384 aa, Silicibacter sp. TM1040
MDDWRNGGFGLYVHWPFCQAKCPYCDFNSHVVSQIDQSAWVTAYQAELRRMGELLPDRLLNSIFFGGGTPSLMHPDTVAAVIEAARENWTFANDIEISLEANPGSVEAGRFAGYRDAGVNRISMGIQALNDEDLRRLGRIHSVEEARKAFDVARNCFDRVSFDLIYARQGQTLNAWKAELSEALSMAIDHLSLYQLTIEDGTAFGDRYARGKLRDLPTDDHAADMYLATQEICELYGLPGYEISNHARPGAESRHNLIYWRYGDYVGIGPGAHGRITLNGTRFATEAPRAPGAWLSAVEQGNGLLPFDALNSEDQVNEHMMMGLRLFEGVDLDRHTALAQKPLSPSKIQELCNLGMLDLDGSRLRATSQGRAVLNAVLRELLTD

SEQ ID NO: 11847 - DNA, 1164 bp, Mesorhizobium sp. BNC1
  CDS (1)..(1164): transl_table=11
atgaacaagccgctcgacgaggggcctggcttcggcgtttacgttcactggcccttctgcgcggccaaatgcccttattgcgacttcaacagccatgtacgccaccagccggtagatcaggaacgcttcgccgccgcgttcaagcgcgagctcgcagcgatgcgggcgcgaaccggtccgcgcagcgtatccagcattttcctgggcggcggcacaccctctctgatggacccgaaaacagttggcgcaatcatcgacgcggtcgctgcgagctggcacgttccgatgggcgtggaaataacgctggaggccaatccttcctccgtggaggcggaccggtttcgtggctatcgctcggcgggggtcaaccgcgtttccatgggcatccaggcgttgaacgaccgggatctgcgctttctcggccgcctccacaatgtggaggaggcgcttggcgcgatccggctcgcgcgcgatctctttccgcgcatgtcattcgacctgatctacgctcggccgggccagacggtggacgcctggagagctgagctggaggaagcggtcggatacgccgccgatcacttgtcgctttaccagctcacaatcgaggagggcacgcccttttatgcgctgcgcgcggccggaaagcttaccgtacctgatatggatctcgcggcggatctctatcaggtgacccaggagattacggccgcgcgcggccttcccgcctacgagatttccaaccacgccaaaccgggcgccgagagccggcacaacctgatctactggcgctatggcgaatatgtgggcgtcgggccaggcgcccatggacgcttcatcgaggatgggcggcgggtcgtgaccatgaccgaaagaaatccggagacctgggcggcgctggtggaagcacgcggctcaggcgtgacgggcggcgagatgctcacgcgctcggaagaggcggacgagtttctgctgatggggctgcggctggtggaaggaatcgatctcgatcgctacgagaagctggccggatttccgctttccccgcaacgcgtcgccatcctgcgcgaggaagggctgatcgagccggtcggcaattctcgcttgcgtgctacacccgcagggatggttgtgctcgacgcgctcgtggcggacctggcgcgctga

SEQ ID NO: 11848 - protein, 387 aa, Mesorhizobium sp. BNC1
MNKPLDEGPGFGVYVHWPFCAAKCPYCDFNSHVRHQPVDQERFAAAFKRELAAMRARTGPRSVSSIFLGGGTPSLMDPKTVGAIIDAVAASWHVPMGVEITLEANPSSVEADRFRGYRSAGVNRVSMGIQALNDRDLRFLGRLHNVEEALGAIRLARDLFPRMSFDLIYARPGQTVDAWRAELEEAVGYAADHLSLYQLTIEEGTPFYALRAAGKLTVPDMDLAADLYQVTQEITAARGLPAYEISNHAKPGAESRHNLIYWRYGEYVGVGPGAHGRFIEDGRRVVTMTERNPETWAALVEARGSGVTGGEMLTRSEEADEFLLMGLRLVEGIDLDRYEKLAGFPLSPQRVAILREEGLIEPVGNSRLRATPAGMVVLDALVADLAR

SEQ ID NO: 11849 - DNA, 1122 bp, Cytophaga hutchinsonii ATCC 33406
  CDS (1)..(1122): transl_table=11
atggcaggcttatacatacatgttccttattgtcacaaggcttgtcattattgtaactttcatttttctacatctttgaaagatatggataaaatggtcgattccatttgtactgaattactgttacggaaagattacttagatcaacgtttgattgaaaccgtttattttggaggaggcactccttctattctaagcagtgataatctgtctaaaatattccatgcaatacatgatcattatagtattgcgtcaagtgcagaaataaccctggaagcaaatccggaagatataacggaaacttctttgctgtgttggaaatcacttggcgtaaataggttaagtattggtattcaaagttttcaaaacgaatacctgcattggatgaacagaaaccattcatcagaagcatctatcaagtgtgttactcttgcccaaaaaaatggttttgaaaatatttctattgatttgatatatggcctgcctacattaactgccgatcaatggcgagccgaaattcagaccgcaatttcccttaatgttcctcatatctcctcttattgtctaactgttgaagaaaaaacggtatttggaaatctggcaaaaaaaggagcacttcagcctattccggatgaaatttcggaagaacatctgatcattctgatacatgagctgctagctgcaggatatgagcaatatgaaatatcgaatttctgtaaacctgcttttgaatcaaaacacaacagcagctattggcagcgaaagccctatattggaatcgggccaggcgcgcactcatacaatcaccgggaacgagctgcgaacatcagcaataattcactatacattaagcagatagaaaaaaatgaatggactggttcgattgagattctttcagatattgatcagtataatgaatatattttaaccagattacgcacaaaatggggtattacattaattgaaattgaagcgttttccctcccggatattgaaaaaacaatcaaacttttgacacaatttgttaatgaaggctttctctatattaaggatgacatatatctcctcacaacaaaaggtaagttattagctgatgaaataacgttacaactcatgcattaa

SEQ ID NO: 11850 - protein, 373 aa, Cytophaga hutchinsonii ATCC 33406
MAGLYIHVPYCHKACHYCNFHFSTSLKDMDKMVDSICTELLLRKDYLDQRLIETVYFGGGTPSILSSDNLSKIFHAIHDHYSIASSAEITLEANPEDITETSLLCWKSLGVNRLSIGIQSFQNEYLHWMNRNHSSEASIKCVTLAQKNGFENISIDLIYGLPTLTADQWRAEIQTAISLNVPHISSYCLTVEEKTVFGNLAKKGALQPIPDEISEEHLIILIHELLAAGYEQYEISNFCKPAFESKHNSSYWQRKPYIGIGPGAHSYNHRERAANISNNSLYIKQIEKNEWTGSIEILSDIDQYNEYILTRLRTKWGITLIEIEAFSLPDIEKTIKLLTQFVNEGFLYIKDDIYLLTTKGKLLADEITLQLMH

SEQ ID NO: 11851 - DNA, 1134 bp, Clostridium perfringens ATCC 13124
  CDS (1)..(1134): transl_table=11
atggacaaaatttctttatatatacacattcctttttgtgcacaaaagtgtctttattgtgattttccttcctttgccaggaaagatcatttaagaaaggcctatatagaagctctaaataaggaaataataaatttaagagagaaacataataatctagaaataaacactatatttattggagggggaacaccaagtgttttagaatctaatgaattagaatgtttattaaaagaaatagctaaacttaatatggcaaaagatatagagtactctatggagtgtaatccaggaaacttaacagaagaaaagctagaagttatgaaaaagtatggtgtaaataggatcagtatggggcttcaagctaagcaggataatcttcttaaagggcttggaagaatacataactataaaacctttaaagaaaattttttattagcaaaaaaggttggttttaataacataaatgttgatttaatgtttggtttaccaaatcaaagattaaatgaatgggaagagactttaagagagataatatctttagagccagcacatatatcagcatatagtttaattatagaagaaggcactgctttttataatttatatgaaaatgataagttaaagctaccaacagaagaagaagagagaaaaatgtaccatttagcaaagaaaattttagaggaaaatggatttaatcaatatgagatttctaattatgctaaagagggaaaagaatgtagacataatttagcatattggaatatggataactggataggagtaggatcagcagcagcttcttatattaatggaaaaagaattaaaaatataagtagtgttgaggaatatataaattctatcaatgagaagggagaagccgtagaagaaataataaataattcaaaaaatgataatatggaagaatttatgtttatggggcttagaaaaattaatggaatagatgaaaatgaatttaaaaagagatttagtatgaatataaatgatgtttatggagaaatactaaataagtatatagatgaagggcttttaataagggattcaggaaggatttttctaagtgaaaaaggcatagaaatatcaaatataataatggctgattttctattataa

SEQ ID NO: 11852 - protein, 377 aa, Clostridium perfringens ATCC 13124
MDKISLYIHIPFCAQKCLYCDFPSFARKDHLRKAYIEALNKEIINLREKHNNLEINTIFIGGGTPSVLESNELECLLKEIAKLNMAKDIEYSMECNPGNLTEEKLEVMKKYGVNRISMGLQAKQDNLLKGLGRIHNYKTFKENFLLAKKVGFNNINVDLMFGLPNQRLNEWEETLREIISLEPAHISAYSLIIEEGTAFYNLYENDKLKLPTEEEERKMYHLAKKILEENGFNQYEISNYAKEGKECRHNLAYWNMDNWIGVGSAAASYINGKRIKNISSVEEYINSINEKGEAVEEIINNSKNDNMEEFMFMGLRKINGIDENEFKKRFSMNINDVYGEILNKYIDEGLLIRDSGRIFLSEKGIEISNIIMADFLL

SEQ ID NO: 11853 - DNA, 1263 bp, Rhodococcus sp. RHA1
  CDS (1)..(1263): transl_table=11
atggacgacgtcggcgagccgaccatggacactggaaccgtgaacggaacgagcactaccacggtcggtcgcgacgaggcggcggcgttcgcgctgcccgggagtgcgctgaagggtgtggggagccgcccgttcgggatctatgtgcacgtgcctttctgtgccacacgctgcggatactgcgatttcaacacgtacacggcaggcgagctggggacgtcggcgtcgccgcagtcgtggatggaagggctgcgccgcgaactcgacctcgccgcggagatgacgggcgccccggccgtcgacacggtgttcgtcggcggcggcacgccgtcactcctcggcggtgacggactgtcggacgtcctcggtgcggtccgctcgagtttcgggattgcgaagggcgccgaagtgaccaccgagtcgaacccggagtccacgtcgccggaattcttcgagcggttgcgggccggcggattcacgcggatctcgctgggcatgcagtcggcagcgcagcacgtcctgagggtgctcgaccgcacccacacaccgggacgtgccgtggcggcggcgcaggaggcgcgggccgccggattcgagcacgtcaatctcgacctcatctacggaaccccgggagagcgcgacgaggacctcgacctctcgctggacgcggtgctctctgccggggtggaccacgtgtccgcctacgcgctgatcgtcgaggacgggaccgcgctggcgaggaaggtgcgccgcggggaactgcccgcgcccgacgacgacgtcctggcgtcgcggtacgagaggatcgacgcgcggctcgccgacgcgggcctgacctggtacgaggtgtcgaactgggcatcggctgacgccgcgacgggcgaatcacgctgccggcacaacctggggtactgggacgacggggactggtggggcgccgggccgggcgcgcacagccacgtcggcggagtgcgctggtggaacgtcaagcacccggcgcgctacgcggaccagctggcggcgggaagtctgcccgtcggcgggagcgaacagctgaccgcggaggacgtccacgtcgagcgggtgatgctgacggcgcggctgcggaccggactaccggtggcggagctggatgccgcggagcagcacgcggccgagacggtggtggccgacggactgctcgtgcgccagggccagcacctggtgctgaccgaccgtgggcggctcctcgccgacgccgtggtccgcacggtgctgcgctag

SEQ ID NO: 11854 - protein, 420 aa, Rhodococcus sp. RHA1
MDDVGEPTMDTGTVNGTSTTTVGRDEAAAFALPGSALKGVGSRPFGIYVHVPFCATRCGYCDFNTYTAGELGTSASPQSWMEGLRRELDLAAEMTGAPAVDTVFVGGGTPSLLGGDGLSDVLGAVRSSFGIAKGAEVTTESNPESTSPEFFERLRAGGFTRISLGMQSAAQHVLRVLDRTHTPGRAVAAAQEARAAGFEHVNLDLIYGTPGERDEDLDLSLDAVLSAGVDHVSAYALIVEDGTALARKVRRGELPAPDDDVLASRYERIDARLADAGLTWYEVSNWASADAATGESRCRHNLGYWDDGDWWGAGPGAHSHVGGVRWWNVKHPARYADQLAAGSLPVGGSEQLTAEDVHVERVMLTARLRTGLPVAELDAAEQHAAETVVADGLLVRQGQHLVLTDRGRLLADAVVRTVLR

SEQ ID NO: 11855 - DNA, 1179 bp, Haemophilus somnus 129PT
  CDS (1)..(1179): transl_table=11
atgacacaattctcccttgttaaactatttcccattcagctacctccattaagtttatatatacatatcccttggtgtgtacaaaaatgcccttattgtgatttcaactcccatgcacaaaaggggtctattccggaaactgaatatgttacccatttgcttactgacttaaagcaagatttggtacgttatcatgcctcaatagccaaccgaaaattgcattctattttcattggaggcggaactcctagcctattttctgtacaaagtattgattatttattgaatcaaattaaacaacttattccttttgaggataatattgaaattacgcttgagtcaaatcctgtaacagctgaaagcgatcggtttgtcggatatgcacaagccggagtgaatcgaatttctatagggattcaaagttttaataatgaaaaattacagagactggggcgtgcccataatgcagttgaagcaaaaagtgcggtgcgttttgctcaacattccggattaaacagttttaacttggatttaatgcacggattacccaatcaatctttggtgcaagcactggacgatttacagcaagctattgctttaaaaccgcctcatttatcttggtatcaactcacaattgagcctaatacaatgtttgcatatcgtccgccgaaattacccgatgaagatgaactttgggatatttttgagcagggtcatcaattgttatccaaagcaggttaccaacaatatgaaacctctgcttatgcaaaagttgattttcaatgtcaacacaatttgaattattggagatttggtgattatttagccattgggtgtggagcacatggtaaattgagttttgctgatggacaaattttacgtttttctaaaactaaacaccctaaaggctatatgcgtggtgaatatctatatgaggaaaaaaatatccctttttcagaacgtccatttgagttttttatgaatcgctttcgtttattggaacctatggaaaaacaacaatttgaactgttaactggattagcacaaagtgcggtagaaaaacaaattgattgggcgttagagaaaaactatttatcagaaacgaaccgcacttggcaaatcactgaacaaggaaaacttttccttaatgaattattaacggagtttttgcctgattag

SEQ ID NO: 11856 - protein, 392 aa, Haemophilus somnus 129PT
MTQFSLVKLFPIQLPPLSLYIHIPWCVQKCPYCDFNSHAQKGSIPETEYVTHLLTDLKQDLVRYHASIANRKLHSIFIGGGTPSLFSVQSIDYLLNQIKQLIPFEDNIEITLESNPVTAESDRFVGYAQAGVNRISIGIQSFNNEKLQRLGRAHNAVEAKSAVRFAQHSGLNSFNLDLMHGLPNQSLVQALDDLQQAIALKPPHLSWYQLTIEPNTMFAYRPPKLPDEDELWDIFEQGHQLLSKAGYQQYETSAYAKVDFQCQHNLNYWRFGDYLAIGCGAHGKLSFADGQILRFSKTKHPKGYMRGEYLYEEKNIPFSERPFEFFMNRFRLLEPMEKQQFELLTGLAQSAVEKQIDWALEKNYLSETNRTWQITEQGKLFLNELLTEFLPD

SEQ ID NO: 11857 - DNA, 1266 bp, Trichodesmium erythraeum IMS101
  CDS (1)..(1266): transl_table=11
gtgaaaaggccagtcggaaattattgtattcccagttcggcttatgtccatatccctttctgccgacggcgatgctattactgtgatttcccaatctctgtagtaggtgatggtaagaaaggtgataatttttctccaattcaagaatatgtagaggtaatttgtcaggaaataagcactacaaagtcttttgatcaacccttaaaaacaattttttttggtggtggtactccttccctattgtcagtgggtcaattaagtcggattttagatgccctagaacaaaaatttggaattgtggccaatgctgaaatttctatagaaatggaccccggaacttttgacttagaacaagtgcaaggatataaattcctaggagtaaatcgagtcagccttggagtacaagcatttcaagatgatttattacaggtttgtgggcgattacacaatgtctcagatatttacaaagcagtaaatacattgcatcaagcaggaattattaacttcagtattgatttaatttcaggactgccccaccaaactttagaacaatggcaaatttctttgttaagtggaatagctatttctccaactcatatatccagctatgaccttgtactagaaaaagttacagcttttggacattactataaaccaggtcatgctcctttacctacagatgaaacagcagctgaaatgtatcgaattgcacagcaactgatatcaatttcgggatatgaacattatgagatatctaattatgccaagcaaggctatcagtgtagccacaatcgagtttactgggaaaatcatccttattatggctttggcatgggtgcagccagctatttagaaggacaaagatttaccaggccgcgtacgcggaaaaaatattatcaatgggtgctatcgtttcaagatcatagtttagaaagtcagggtattaatgcatcaaatcaggattttttgttagaaacactgatgttaggatttcgcttggcacaagggataaatgtcttaacattatcccagcagtttggtcaaaaaactgtagaaaaattattaatctatctacaaccctatcaaaagttagggtgggtagagtttatcaatcaaaaaggtgtagcaacccctttctctgataaccagaaacttccgatagagggacatctgagattgactgatcctgaaggttttttgttttctaatactgttttatcaacattatttagtaagattagtaattctatcagtatgaaatgctaa

SEQ ID NO: 11858 - protein, 421 aa, Trichodesmium erythraeum IMS101
MKRPVGNYCIPSSAYVHIPFCRRRCYYCDFPISVVGDGKKGDNFSPIQEYVEVICQEISTTKSFDQPLKTIFFGGGTPSLLSVGQLSRILDALEQKFGIVANAEISIEMDPGTFDLEQVQGYKFLGVNRVSLGVQAFQDDLLQVCGRLHNVSDIYKAVNTLHQAGIINFSIDLISGLPHQTLEQWQISLLSGIAISPTHISSYDLVLEKVTAFGHYYKPGHAPLPTDETAAEMYRIAQQLISISGYEHYEISNYAKQGYQCSHNRVYWENHPYYGFGMGAASYLEGQRFTRPRTRKKYYQWVLSFQDHSLESQGINASNQDFLLETLMLGFRLAQGINVLTLSQQFGQKTVEKLLIYLQPYQKLGWVEFINQKGVATPFSDNQKLPIEGHLRLTDPEGFLFSNTVLSTLFSKISNSISMKC

SEQ ID NO: 11859 - DNA, 1239 bp, Synechococcus sp. CC9311
  CDS (1)..(1239): transl_table=11
atgaccgcatctgcacctcgcagcgcctatttacatattcctttttgccatcggcgttgtttttactgcgacttcgctgtggttcctctcggtgatcgggctaatccatttggagggtctggtagtggctcaatcgaggcctacctggatctgctcagcgcagagatcaacctgtctccccaaggccctgcactggccaccgtgtatgtcgggggtgggacgccatcgttgttgaggcccgatcaaattgcagcactgctgcagcagctcaaaggtcgatacggcttccaggacggtgccgaaatcactctcgaaatggaccctgccacgtttgagagacgtgatcttctcgccctgatcgctgcaggcgtcacccgcgtgagtttgggaggtcaaagttttgacgatgtcaggctcgcggccctggggcgtcgacatcgcaggcaggatttgctggaggcctgccattggctccaagagtctttgcaggttggtgaactccagagctggagtttggatctgattcgaaaccttccagaccaaggaaatctggaatgggaggctcagctggagcaggccgtcgctgttcaagctccccatgtgtcgatttacgacctaagcgtggagccaggcactgtgtttgcttggcgtgagaagcgaggcgagctggctctccctgaggaagatgcggccgccgaccgcatcgccttcaccacccacaggctccgacgggccggttacagccgctatgaaatctcaaatttcgccaggccaggccatgcctccaggcataaccgcgtgtactggagtggtgtgggctggtgggcctttggcctgggtgcgaccagtgctccctggggggagcggatggctcggcctcgtacccgtgaggcctatgcctcctggttgaaggaacagagtcagaaactagattccagcttgcttcaagggtcagcgggaagcttggctttggatgatcggttgatcgtggggctgcgctgccatgaaggcgtagatctatgggatcttgcgagacgctgcggatggagcgaacagcgctgcagccgtgatctatccgccctggaggcgcgctggcaaccctttttggaaaggggtctcctagaacgctttggctgtcgctggcgcctcagtgatcccgaggggatggccgttagcaatcaggtgctggtggaggtggtggagtggtgggagttgctctctgatcccgttgctccttaa

SEQ ID NO: 11860 - protein, 412 aa, Synechococcus sp. CC9311
MTASAPRSAYLHIPFCHRRCFYCDFAVVPLGDRANPFGGSGSGSIEAYLDLLSAEINLSPQGPALATVYVGGGTPSLLRPDQIAALLQQLKGRYGFQDGAEITLEMDPATFERRDLLALIAAGVTRVSLGGQSFDDVRLAALGRRHRRQDLLEACHWLQESLQVGELQSWSLDLIRNLPDQGNLEWEAQLEQAVAVQAPHVSIYDLSVEPGTVFAWREKRGELALPEEDAAADRIAFTTHRLRRAGYSRYEISNFARPGHASRHNRVYWSGVGWWAFGLGATSAPWGERMARPRTREAYASWLKEQSQKLDSSLLQGSAGSLALDDRLIVGLRCHEGVDLWDLARRCGWSEQRCSRDLSALEARWQPFLERGLLERFGCRWRLSDPEGMAVSNQVLVEVVEWWELLSDPVAP

SEQ ID NO: 11861 - DNA, 1158 bp, Shewanella sp. MR-7
  CDS (1)..(1158): transl_table=11
atgtcagtgaatgtgtcacctcagttaaccctgccgccgttgagcttgtacatccatatcccttggtgtgtacaaaaatgcccttactgcgactttaactcccatggacaaaatggcgaattaccccagcaggcctatgtggatgcgctgctagcggacttacgccaagacttgcacttagtacaaggccgtaagctgcacactatttttattggtggtggaacgccgtctctgtttgatgccaatcaaatcaaacggatattggatggcgccaatgcgctaatcccctttagtgacgatattgaaatcaccatggaagccaaccctggtaccctagagcacgatgactttagtgcctaccgcgccgccggggtcacccgattatccattggggtacaaagcttctctaaggataagctcaatctactaggacggatccacgatcaaaacgaagcccaaactgccgcccaaaaagccagccaagcgggttatttaagttttaacttggatttgatgcacggacttcccaatcaaagttttgctgaggccatggcggatatagataccgcggcggcgctcaatccgccgcatttgtcttggtatcaactgacgattgagcccaataccctgttccactcaaaaccgccgcaactacccgacgatgaagatctctggcagatctacgaacaagggcaacaaaagttagcggcactcggttatgagcagtatgaaatctctgcctatgccaaacccggctatcaatgcaggcataaccttaactattggcagtttggcgattatttaggcataggctgcggtgcccatggcaaagtgaccttgcccgaagagaaccgcattattcgcacggttaaaatcaaacaccctaagggttatttagctgccgacaactatcacttcgagcagactgaggtcgccgaagaagatcgcgccctcgaatacttgatgaatcgtctgcgcttaatgacgcctatccctaagcaagagtttgaagacagaaccggtttacaccgagatacgttgaaagagggaatggaaaaggccaaacaacggggtttactgaccgaatcggctgaacattggcaattaaccagtaaaggtcacatgtttgtgaacgatttgctgacgcaattttgttaa

SEQ ID NO: 11862 - protein, 385 aa, Shewanella sp. MR-7
MSVNVSPQLTLPPLSLYIHIPWCVQKCPYCDFNSHGQNGELPQQAYVDALLADLRQDLHLVQGRKLHTIFIGGGTPSLFDANQIKRILDGANALIPFSDDIEITMEANPGTLEHDDFSAYRAAGVTRLSIGVQSFSKDKLNLLGRIHDQNEAQTAAQKASQAGYLSFNLDLMHGLPNQSFAEAMADIDTAAALNPPHLSWYQLTIEPNTLFHSKPPQLPDDEDLWQIYEQGQQKLAALGYEQYEISAYAKPGYQCRHNLNYWQFGDYLGIGCGAHGKVTLPEENRIIRTVKIKHPKGYLAADNYHFEQTEVAEEDRALEYLMNRLRLMTPIPKQEFEDRTGLHRDTLKEGMEKAKQRGLLTESAEHWQLTSKGHMFVNDLLTQFC

SEQ ID NO: 11863 - DNA, 1197 bp, Alkalilimnicola ehrlichei MLHE-1
  CDS (1)..(1197): transl_table=11
gtgaacccgcaggccggcacccccccgcccccgctcggggtctacctgcacctgccctggtgcgtgcagaaatgcccctattgcgatttcaacagccacgccccggcccgcgcggaccggcgcgctgatgccagcaccctgcccgccattccccacgagcgctacacccgcgccgtgctgacggacctggccagcgccgccgggccgctccagggccggcgcgtggagacggtcttcattggcggcggcacccccagtctgttcccgcccgaggccatcggcgggttgctggaggcgctggaccggcgcctgggtctgaccggcgatgcggagatcaccctcgaggcgaatccgggcaccgtggagcagggtcggttccacggctaccgggcggccggggtcaaccggctttccatcggggtgcaaagtttcgatgccggcgcgctgcgccgtctgggccgcattcatggcccggaggaggcccgccgggcggtgcgggcggcacgacgggctggcttccggcgtatcaacctggacctgatgtacgccctgcccggccagaccacggcccaggccctggcggacgtggaggccgccctggcgctggcgccggagcacatctcccactaccagctcaccctggagccgggcacgcccttccacagccgcccgccggcggatctgccggacgaggcccggctgctggcgctggaggcggcatgccgtgagcgtctggccgccgccggactgacccgttacgaggtctcggcctgggcgcacccgggcgaggcctgccgccacaacctcaattactggcgcttcggcgattacctgggcttgggcgccggggcccacggcaagctgagcgacccggcccgggacgagatccgccgtgaggcccgggtgcgcatgccgggcacctatatggcacaggcgggcacgccggctgcgatcgctgaactccggcggctgcaaaacggcgatatcgtgcttgaattcatgatgaacgccctgcgtctggcagagggctttcaccgcgacgactggcggcgacacaccggccgcccgaccaccctgtttgaggaccgggtggccgaggcggtgacagacggcctgctgagcgatgacggggggcgcatccggcccactcaacggggctggcaactgctggacggcctgctgcaacggttcttgtga

SEQ ID NO: 11864 - protein, 398 aa, Alkalilimnicola ehrlichei MLHE-1
MNPQAGTPPPPLGVYLHLPWCVQKCPYCDFNSHAPARADRRADASTLPAIPHERYTRAVLTDLASAAGPLQGRRVETVFIGGGTPSLFPPEAIGGLLEALDRRLGLTGDAEITLEANPGTVEQGRFHGYRAAGVNRLSIGVQSFDAGALRRLGRIHGPEEARRAVRAARRAGFRRINLDLMYALPGQTTAQALADVEAALALAPEHISHYQLTLEPGTPFHSRPPADLPDEARLLALEAACRERLAAAGLTRYEVSAWAHPGEACRHNLNYWRFGDYLGLGAGAHGKLSDPARDEIRREARVRMPGTYMAQAGTPAAIAELRRLQNGDIVLEFMMNALRLAEGFHRDDWRRHTGRPTTLFEDRVAEAVTDGLLSDDGGRIRPTQRGWQLLDGLLQRFL

SEQ ID NO: 11865 - DNA, 1173 bp, Hyphomonas neptunium ATCC 15444
  CDS (1)..(1173): transl_table=11
atgacccaggtttttgcgcctttcggcccgcatttcggcttcggcctgtatatccattggccctattgcacgcgggtctgcccttattgcgacttcaacgtctacgccgccaaggaccgggccaccgatccgctggtgacggcgattgccgatgacattcgcgttcaccgccgcaagctgcccgagcatggcgcgctcgatacggtatattttggcggcggcacgcccgccttgctgaggccagagcaggtggctgaaatcctgaaggcggcgtctgaaacattcggcatcaaggacggcgctgaaataacgctggaggccaatccgaacgatgttctgaaagcggaccttctggcgctgcgccgggcgggcgtcacgcgcctgtccatcggcgtccagtcgatgcgggattcggcgctggcattcctggggcgcgatcataccgccgaggcgggcggcgaggcggtgaagcgcgcgctgaaagtgttcgacacgatttccatggacctgatctatgccaggcccggacaatccccggcaaactgggaagccgagctcgccgatgcgctggcgctcggcgcgccgcatctctcgctttatgagctgaccttcgagccggcaacggcgtttggtaaggcagcccagcgcggcgagattgttccgatgccggatgatgcgcaggccgatctttatgagctgacccagcagatgacgcgcgatgccggcatgcctgcctatgaagtgtccaatcacgcggcctcgcccgcgcatcaatcacgccacaatctgatctactggcggggtggcgactggatcggcgcggggcctggcgcgcatggccgcgtttcggttgcgggcaaccggtatgccaccgaggccgagcggcgcccggaaggctatatggccggcatgcagatgttgcaggagggctgggccgacgcggcaaagctgcccccgctcgacattgcgcgggagatcctggcgatgggcctgcgcgccgcagagggcgtggacctgcgccgggtggagattgtcagcggcaaaaaggtctcgcgggagaagattggcgttttcaccgagcagggctgggtgaaacttcaggggtcggagctttcgttgacggagagcgggcggctgctggccgacgcgctgacgtctcaattggcgccctga

SEQ ID NO: 11866 - protein, 390 aa, Hyphomonas neptunium ATCC 15444
MTQVFAPFGPHFGFGLYIHWPYCTRVCPYCDFNVYAAKDRATDPLVTAIADDIRVHRRKLPEHGALDTVYFGGGTPALLRPEQVAEILKAASETFGIKDGAEITLEANPNDVLKADLLALRRAGVTRLSIGVQSMRDSALAFLGRDHTAEAGGEAVKRALKVFDTISMDLIYARPGQSPANWEAELADALALGAPHLSLYELTFEPATAFGKAAQRGEIVPMPDDAQADLYELTQQMTRDAGMPAYEVSNHAASPAHQSRHNLIYWRGGDWIGAGPGAHGRVSVAGNRYATEAERRPEGYMAGMQMLQEGWADAAKLPPLDIAREILAMGLRAAEGVDLRRVEIVSGKKVSREKIGVFTEQGWVKLQGSELSLTESGRLLADALTSQLAP

SEQ ID NO: 11867 - DNA, 1203 bp, Rhizobium leguminosarum bv. viciae 3841
  CDS (1)..(1203): transl_table=11
gtggacaatttcgacacgccaagcacctcgcgcgacgcggctctgctgcccgataccggcgagccgggcttcggcgtctatgtgcattggcccttctgcgcggcgaagtgtccctattgcgacttcaacagccatgtgcgccaccagccggtggatcaggagcgctttacatcagccttcctgacggagatggcggcggtccggtcgatgagcgggccgaagacggtgacgagcatctttctcggcggcggcacgccttcgctgatgaagccggaaacggtctccgccattctcgacggcattgcgcggcactggcatgtgccagatggcatcgagatcaccatggaggccaacccttcgagcgtcgaggccgaacggttccgcggctaccgggcggccggcgtcaatcgcgtctcgcttggcgtgcaggcgctgaacgaccgggatctcaaattcctcggcaggctgcatgatgtcgccgacgcactgaaggcgataaggctggcacgcgacatcttcccgcgcatgtccttcgacctgatctatgcccggccggagcagacggtcgaggaatgggaaaaggaactgaaggaggcgatctcctatgcggtcgaccatctttcgctctatcagctgaccatcgaggaaggcacgccattctacggtctgcacaaggccggcaagctgatcgtgccggacggcgagcaatcggcactgctctacgaggcgacacaggagatcacggcgcgcgagggcatgccggcctatgaggtttccaatcatgcccggccgggtgctgaaagccggcataacctgacctactggcgctacggcgattatgccggcatcggcccaggcgcccacggccggctgacgcgtggcccggagaagcttgcgacggcgaccgagcgcaagccggaaacctggctcgacatggtcgagcgtgatgggcacggcattctcgacgaggagcggctcggcttcgaggaacagtccgacgagctgctgctgatggggctgcggctgagggaaggcgtcgatctcgcccgctggcagcagctttcgggccgcgacctcgacccgaaacgcgaggaattcctgctcgaacacaaattcatcgagcggatcggcaattcacgcctgcgctgcacgccatcaggcatgctgatcctcgattccgtcgtcgccgatctcgcctgctga

SEQ ID NO: 11868 - protein, 400 aa, Rhizobium leguminosarum bv. viciae 3841
MDNFDTPSTSRDAALLPDTGEPGFGVYVHWPFCAAKCPYCDFNSHVRHQPVDQERFTSAFLTEMAAVRSMSGPKTVTSIFLGGGTPSLMKPETVSAILDGIARHWHVPDGIEITMEANPSSVEAERFRGYRAAGVNRVSLGVQALNDRDLKFLGRLHDVADALKAIRLARDIFPRMSFDLIYARPEQTVEEWEKELKEAISYAVDHLSLYQLTIEEGTPFYGLHKAGKLIVPDGEQSALLYEATQEITAREGMPAYEVSNHARPGAESRHNLTYWRYGDYAGIGPGAHGRLTRGPEKLATATERKPETWLDMVERDGHGILDEERLGFEEQSDELLLMGLRLREGVDLARWQQLSGRDLDPKREEFLLEHKFIERIGNSRLRCTPSGMLILDSVVADLAC

SEQ ID NO: 11869 - DNA, 1155 bp, Pseudomonas aeruginosa UCBPP-PA14
  CDS (1)..(1155): transl_table=11
gtgacccaagccaccccgttccagctcccgcccctggccctgtacgtgcacatcccgtggtgcgtgcgcaagtgcccgtattgcgacttcaactcccacgccgctggcacggagctgcccgaagaggcctatgtcgacgccctgctcgccgacctggagcaagacctgcgccatgtccacggccggcgcctgggttcgatcttcttcggcggcggcacgcccagcctgttctcggccaaggccctgggccggctactggaaggcgtcgagcgcagggtcggcttcgccgacggcatcgagatcaccctggaagccaatcccggcaccttcgaacaggtcaagttcgccgactaccggcgcctcggcatcaatcgcctgtccatcggcgtgcagagcttccaggccgacaagctgcaggctctggggcgcatccacgacggcgccgaggcagtgcgcgccgccgacatggcgcgccaggccggcttcgacaacttcaacctcgacctgatgcacggcctgcccgggcagagcctcgacgacgccctggccgacctgcgccaggccctcgccctggcccccacgcacctctcctggtaccaactgaccatggagccgaacacggtgttctggagccagccgccggagctgcccgaggacgacatcctctgggacatccaggaagccggccaggccctgctcgacgcgcacggctaccgccagtacgagacctccgcctacgcccgcgacgacctgcgcgcccggcacaacctgaactactggagcttcggcgacttcctcggcatcggcgccggcgcccacgccaagctgagcgcgccggacggacgcatcgtgcggacctggaagacccgcctgccgaaggactacctcaacccgcaaaaggccttccaggccggcgagcgcccgctggaagcggccgacctgccattcgaattcatgatgaacgtgctgcgactggtcgacggcgtccccgccgcgctctacccgcagcgcaccggccaaccgctggcggcgatcgccgatgcctgcgccgccgcgcgcgacgccgggctgctcgccgacgacccgcagcgcctgcgtcccagcgaacgcggccagctgttcctcaacgacctgctgcaacatttcctgccgtga

SEQ ID NO: 11870 - protein, 384 aa, Pseudomonas aeruginosa UCBPP-PA14
MTQATPFQLPPLALYVHIPWCVRKCPYCDFNSHAAGTELPEEAYVDALLADLEQDLRHVHGRRLGSIFFGGGTPSLFSAKALGRLLEGVERRVGFADGIEITLEANPGTFEQVKFADYRRLGINRLSIGVQSFQADKLQALGRIHDGAEAVRAADMARQAGFDNFNLDLMHGLPGQSLDDALADLRQALALAPTHLSWYQLTMEPNTVFWSQPPELPEDDILWDIQEAGQALLDAHGYRQYETSAYARDDLRARHNLNYWSFGDFLGIGAGAHAKLSAPDGRIVRTWKTRLPKDYLNPQKAFQAGERPLEAADLPFEFMMNVLRLVDGVPAALYPQRTGQPLAAIADACAAARDAGLLADDPQRLRPSERGQLFLNDLLQHFLP

SEQ ID NO: 11871 - DNA, 1080 bp, Solibacter usitatus Ellin6076
  CDS (1)..(1080): transl_table=11
gtgcccggagtctacgtctcataccccttctgcgcgcagaagtgtacctactgcaacttcgccagcggagtttttccgcgcgaccaggaggcgccctatctcgacgccctcgcgcgcgaaatccgcgcccaccagtggcgctggaacccagacaccgtctacctcggcggcggcacgcccagcaacctcgcgcccgtcgccctccgcgggctgctcgacctcatccccggccgtccctgggcggaggctacgctcgaagccgcaccggggaacatcactcctgaactcgcccgcagctggtccgacgccgggatcaaccgcgtctcgctcggcgtgcagtccttctccgaacccgaaatccgccgcagcggccgcaagcacaccgcccagatcgtcgccgccgaaatcgccgccctgcgcgacgccggcatccgcgacatcaatatcgacctgatcgccggcctcgccgcccagaccgccgactcctggcgcgaatcgctcgactggatcgagcgcctcgcccccgagcacgtctccgtctacatgctcgaaatcgacgaagacagccgcctcggcaaggaactcatgctcggcggcgtccggtacggcgcgctcgacaccccatccgaagacgccaccgccgatttctacgaatacgccgtggagcgcctggccggcatcggcatcgcgcgctacgaaatctccaacttcgcgcgccccggccacgaatcgcgccacaatctgaaatactggtgcctcgagccctacgtcggtttcggcgccgacgcccactccttcgacggcagcacccgccatcagaatcccgaatcgctcgccgactatctcgccggcaccgcccaggtccccgaccagccgcacctctccgacgaacgcctcttcatcggactccgcctctcggccggcgtccgtcccgaccccgacgagtggcagcgctacgaggcgcccatccaccgcttcctcgatgccggattgctcgaaaccagcgacggcattctgcgtctcaccaaccgcggcgtcctgctctccaacgaagtcttccaggagttcctaaacatatga

SEQ ID NO: 11872 - protein, 359 aa, Solibacter usitatus Ellin6076
MPGVYVSYPFCAQKCTYCNFASGVFPRDQEAPYLDALAREIRAHQWRWNPDTVYLGGGTPSNLAPVALRGLLDLIPGRPWAEATLEAAPGNITPELARSWSDAGINRVSLGVQSFSEPEIRRSGRKHTAQIVAAEIAALRDAGIRDINIDLIAGLAAQTADSWRESLDWIERLAPEHVSVYMLEIDEDSRLGKELMLGGVRYGALDTPSEDATADFYEYAVERLAGIGIARYEISNFARPGHESRHNLKYWCLEPYVGFGADAHSFDGSTRHQNPESLADYLAGTAQVPDQPHLSDERLFIGLRLSAGVRPDPDEWQRYEAPIHRFLDAGLLETSDGILRLTNRGVLLSNEVFQEFLNI

SEQ ID NO: 11873 - DNA, 1173 bp, Magnetococcus sp. MC-1
  CDS (1)..(1173): transl_table=11
atgaccatatttcccctctctctctatctccatattccttactgtgtgcataagtgtccctattgtgattttcattcacgggtcgaggtgcaggtgccccaggagcgttatgtggatgccctgctcatggagttgggtatgtggcggcggcgtttttcacaggatgcgcggcctttgcagagcatttttttgggcgggggtacgccatcgttatttgatccaccgcagattggccggttaatggccggtattggggcgatttggccgttggagagcggttgtgaggtgacgatggagggtaatccggagtcactcacgcaggggcgtttggccggttacggtgaggcgggcattacccgtatgagtgtgggggtgcaggcgttggatgaggggcggttgcgtcagttgcagcgcccccatgaccgggcgcaggcgttacaggggttagggtggttggcacaggcggggtttagcagctggagtgcggatttcatatttgccacgccgggccatacggtggcggggtggttggaggagttggcagaggtattggcttttgcgccgccgcatctctcctgttacggcttgacggtggagccgggcacgcccttttttcagcggcagcaggggggtgaggcgttggttgcggatgaggagcgacagctcgcactgttggaggccacctatgagcggctgacagcggcggggttgccttcttatgaaatcagcaattttgcgcgggctgggcatgggtgcaggcacaatgtgaactattggcggtttggggattatttgggggtgggggtggcggcgcatggcaaatggagtgatgcggatggcgtggtgtggcgcagtgccaatctggcggatgcagcacgttatatggcgtgtgttgaggcgggacgttcgccatgggtgagggatcagcggttgaccccgcaggaggcgggtaatgaggcgttggtgatgggtttgcgtatgggcgaggggatgagcaaggcgacctatcagtgggtaaggggggtctctttacagcagagcgtgggtgatgggctggcatggtttgagcgacagggtatgcttgcgcagagtgcaacgcatgtgtggttgacaccacgggggttacggttggcggatggggtaatggcggagttgatggaggttgagccttaa

SEQ ID NO: 11874 - protein, 390 aa, Magnetococcus sp. MC-1
MTIFPLSLYLHIPYCVHKCPYCDFHSRVEVQVPQERYVDALLMELGMWRRRFSQDARPLQSIFLGGGTPSLFDPPQIGRLMAGIGAIWPLESGCEVTMEGNPESLTQGRLAGYGEAGITRMSVGVQALDEGRLRQLQRPHDRAQALQGLGWLAQAGFSSWSADFIFATPGHTVAGWLEELAEVLAFAPPHLSCYGLTVEPGTPFFQRQQGGEALVADEERQLALLEATYERLTAAGLPSYEISNFARAGHGCRHNVNYWRFGDYLGVGVAAHGKWSDADGVVWRSANLADAARYMACVEAGRSPWVRDQRLTPQEAGNEALVMGLRMGEGMSKATYQWVRGVSLQQSVGDGLAWFERQGMLAQSATHVWLTPRGLRLADGVMAELMEVEP

SEQ ID NO: 11875 - DNA, 1158 bp, Shewanella sp. ANA-3
  CDS (1)..(1158): transl_table=11
atgtcagtgaatgtgtcacctcagttaaccctgccgccgttgagcctgtacatccatatcccttggtgtgtacaaaaatgcccttactgcgactttaactcccatgggcaaaacggtgaattaccccaaaaggcctatgtggatacgctgctagcggacttacgccaagacttgcacttagtacaaggccgtaagttacacaccatttttattggtggtggaacgccgtctctgtttgatgctaatcaaatcaaacggatattggatggcgccaatgcgctcattcccttcagtgacgatattgaaatcaccatggaggccaaccctggcaccctagagcacgatgactttagtgcctaccgcgccgcaggggtcacccgattatccattggggtgcagagtttctctaaggataagctcaatctgctggggcggatccacgatcaaaacgaagcccaaaccgccgcccaaaaagccagccaagcgggttatttaagttttaacttggatttgatgcacggacttccgaatcaaagttttgctgaggccatggcggatatagataccgctgcggcgctcaatccgccgcatttgtcttggtaccaactgacgattgagcccaataccctgttccactcaaaaccgccgcagctgcccgacgatgaagatctctggcagatctacgaacaagggcaacaaaagttagcggcactcggttatgaacagtatgaaatctcggcctatgccaaacccggttatcaatgcaggcataaccttaactattggcagtttggtgattacttaggcattggctgtggcgcccatggcaaagtgaccttgcccgaagaaaatcgcattattcgcacggtaaaaatcaaacaccctaaggggtatttagctgccgacaactatcacttcgagcagactgaggtcgccgaagaagatcgcgccctcgaatacttgatgaatcgtctgcgcttaatgacacctatccctaagcaagagtttgaagacagaaccggtttacaccgagattctttgaaagagggaatggaaaaggccaaacaacggggtttactcaccgaatctgctgaacattggcaattaaccagtaaaggtcacatgtttgtgaacgatttactgacgcaattttgttaa

SEQ ID NO: 11876 - protein, 385 aa, Shewanella sp. ANA-3
MSVNVSPQLTLPPLSLYIHIPWCVQKCPYCDFNSHGQNGELPQKAYVDTLLADLRQDLHLVQGRKLHTIFIGGGTPSLFDANQIKRILDGANALIPFSDDIEITMEANPGTLEHDDFSAYRAAGVTRLSIGVQSFSKDKLNLLGRIHDQNEAQTAAQKASQAGYLSFNLDLMHGLPNQSFAEAMADIDTAAALNPPHLSWYQLTIEPNTLFHSKPPQLPDDEDLWQIYEQGQQKLAALGYEQYEISAYAKPGYQCRHNLNYWQFGDYLGIGCGAHGKVTLPEENRIIRTVKIKHPKGYLAADNYHFEQTEVAEEDRALEYLMNRLRLMTPIPKQEFEDRTGLHRDSLKEGMEKAKQRGLLTESAEHWQLTSKGHMFVNDLLTQFC

SEQ ID NO: 11877 - DNA, 1173 bp, Mycobacterium avium 104
  CDS (1)..(1173): transl_table=11
atggccattcgcgagcaaacggtcgagctgcccgacgtgcgggtggtcgacgggcgcccgttcggcctctatgtgcacgtgccgttttgcgtaacccgttgcggctactgcgatttcaacacctacacacccgccgagctgggcggggtcaatcccgacgcgtggctgggggcgctgcgcacggaactggaactggccgccgcgcggctgcggccaccaccggtgaacaccgtgttcgtcgggggcgggacgccctcgctgctggggggcgcgcggctggcgctgctgctggacatggtgcgcgagcacttcgccctggcgcccgacgcggagatcaccaccgaggccaaccccgagtcgacgtggccggagttcttcgacgccatccgggcggccggttacacccgggtgtcgctggggatgcagtcggtggcgccgcgggtgctgggtgtgctggaccgcattcacacgccgaaccggtcggcggacgccgcccgcgaggcgctggccgccgggttcgagcacgtcagcctcgatctcatctacgggacgccgggggagtccgacgaggacctgctgtggtcgctcgacaccgcgatcgaaaccggtgtggaccacgtgtccgcctatgcgctggtggtcgaggaaggcacggcgctggcccggagggtgcgccgcggtgagctggcggcgcccgacgacgacgtgctggcgcaccgttacgaattggtcgacgcgcggctgtcgcaggcgggtctgtcctggtacgaagtctccaactggtcgcgcccgggcgggcagtgccggcacaacctcggctactgggacggcggtcagtggtggggcgcgggtcccggtgcccacggctacgtcggcacgacgcgctggtggaatgtcaagcaccccaacgcctatgccgaacggctcaacgccgcggcgctgccggtggccggattcgagcagctcggctccgaggccttgcacaccgaagacgtgctactgaaaatccgcctgcgccaagggcttccggtggatctgttgaatcccgcggaacgcgaacgcgtccagggcgtggtggccgacgggttgttggtgcgcgacggcgaccggctggtgctcacgccgcgcgggcggctgctggccgacggcgtggtgcgcacgctgttggggtga

SEQ ID NO: 11878 - protein, 390 aa, Mycobacterium avium 104
MAIREQTVELPDVRVVDGRPFGLYVHVPFCVTRCGYCDFNTYTPAELGGVNPDAWLGALRTELELAAARLRPPPVNTVFVGGGTPSLLGGARLALLLDMVREHFALAPDAEITTEANPESTWPEFFDAIRAAGYTRVSLGMQSVAPRVLGVLDRIHTPNRSADAAREALAAGFEHVSLDLIYGTPGESDEDLLWSLDTAIETGVDHVSAYALVVEEGTALARRVRRGELAAPDDDVLAHRYELVDARLSQAGLSWYEVSNWSRPGGQCRHNLGYWDGGQWWGAGPGAHGYVGTTRWWNVKHPNAYAERLNAAALPVAGFEQLGSEALHTEDVLLKIRLRQGLPVDLLNPAERERVQGVVADGLLVRDGDRLVLTPRGRLLADGVVRTLLG

SEQ ID NO: 11879 - DNA, 1173 bp, Mycobacterium smegmatis str. MC2 155
  CDS (1)..(1173): transl_table=11
atgaccacccggaccgcgcccctcggccagcccgatctggcccccacaccgggccggcccttcggcatctacatccatgtcccgttctgcgcgacacgctgcgggtactgcgacttcaacacctacacaccgtccgagctcggcggcgccaaccccgagggctggctggaggcgttgcgcgtcgaactgcgcctggccgctgagcgggtgggtgcgctggcggtgcagacggtgttcgtcggcggcggtacgccctcgttgttgggcggggacggcctgagcgcggtgctcgacgcggtgcgcgacaacttcgtgctggccaccggcgccgaggtcaccacagaagcgaaccccgagtcgacgtcacccgagctgttcgcggcgctgcgcaacgcgggctacacccgcatctcgctcggcatgcagtcggtggcgccgcatgtgctggcggtgctcaaccgcacgcactcgccggggcgcgcgccggccgcggtggccgaggccaaggccgcgggcttcgagcacgtcaacctcgacctcatctacggcacgccgggggagtccgacgacgatctgcttcgctcggtcgatgcggccgtgcacgcgggcgtggaccacgtgtccggctacgcgctggtggtcgaggacgggaccgcgctggcgcggcgtgttcgccggggcgagatcgccgcacccgacgacgacgtgctcgcgcaccgctacgaactgctcgacgcgcagctgtcggccgctggtttcgcgtggtacgaggtgtcgaactggagcagacccggcggtgagtgcctgcacaacctcggctactgggacggcggagaatggtggggcgcaggtcccggtgcgcatggcttcctcaacgcgacgcggtggtggaacgccaagcaccccaacgcatatgcacagacccttgccgaaggcgcgctgcccatcgccgatttcgaggtgctcgacgcggccgaccggcacaccgaggacgtgatgttgcggttgcggttgcggcgcggtctggcgttggacgacctcgcggccgacgagcgcgcgcgggtgcccgagatcgtcgcggagggcctgctcgacaccgcgggtgagcgcgtggtgctgaccgaccgtgggaggttactggccgacggtgtggtgcgcgcactgctggcctga

SEQ ID NO: 11880 - protein, 390 aa, Mycobacterium smegmatis str. MC2 155
MTTRTAPLGQPDLAPTPGRPFGIYIHVPFCATRCGYCDFNTYTPSELGGANPEGWLEALRVELRLAAERVGALAVQTVFVGGGTPSLLGGDGLSAVLDAVRDNFVLATGAEVTTEANPESTSPELFAALRNAGYTRISLGMQSVAPHVLAVLNRTHSPGRAPAAVAEAKAAGFEHVNLDLIYGTPGESDDDLLRSVDAAVHAGVDHVSGYALVVEDGTALARRVRRGEIAAPDDDVLAHRYELLDAQLSAAGFAWYEVSNWSRPGGECLHNLGYWDGGEWWGAGPGAHGFLNATRWWNAKHPNAYAQTLAEGALPIADFEVLDAADRHTEDVMLRLRLRRGLALDDLAADERARVPEIVAEGLLDTAGERVVLTDRGRLLADGVVRALLA

SEQ ID NO: 11881 - DNA, 1281 bp, Nocardioides sp. JS614
  CDS (1)..(1281): transl_table=11
gtgaggagtgggtgggaggatggggtggtgtccccgtccgcgctgcctcccggtgagcccgcgcccgaggacgggtccctccccgcgagcgcgctggcccgggtgggggagcgcgggttcgggttctacgtgcacgtgccgttctgcaccgtgcggtgcggctactgcgacttcaacacctacaccgccgaggagctggggcccgccggtggggcccccggggcgagccgggcgacgtacgccgaggccgcgatcgccgaggtacgccgggcgcgccaggtgctcggcgacaccgatctgccggtgaacaccgtcttcttcggcggcggcacccccacgctgctcggcccggccgacctgggggcggtgctggccgcgatcggcgcggagttcgggttggccgacgacgtggaggtcacgaccgaggcgaaccccgacagcgtcgccctctgggacctcgaggagctccgcgctgccgggttcacccggctctccttcggcatgcagtcggcggtcgaccacgtgctgcgggtgctggatcgcacccacgacccgctccgggtgccggcggtcgtcgactgggcgcggcaggcgggcttcgagcagatcagcctggacctgatctacggcaccccgggcgagtccgtcgccgactgggacgtcagcgtcgaggccgccctcgcgtgcggaccggagcacgtgtcggcgtactccctcatcgtcgaggagggcaccgcgctggcccgccgggtcaagcggggcgagctgccgatgccggacgaggacgacctcgccgacaagtacctcctggtcgacgaccggctcgccgccgctgggctggagtggtacgaggtgtcgaactgggcgcgcggccgcgacgacaacacggcgagccgctgtcggcacaacctcctctactggaccgggggcgactggtggggcgtcgggccgggtgcgcactcgcacgtcggcggggtgcggtggtggaacgtcaagcaccccgcggcgtacgccgagcggatcgcggccggccggagcccggcccacgcgcgggaggtcctggacgaggagagccggcgggtcgagcgggtgctgctcgagctccggctgcgcgacggcctgcccgtcgaggtcctcgacgagtccggccgggcggcggtcccggacctcgtggcccgcgacctgatcaccgagctggcgaccgacgacgggcaccgcctggtgcccacccgccgcggccggctgctcgccgatgcggtcgtgcgcgatctcctgccgtga

SEQ ID NO: 11882 - protein, 426 aa, Nocardioides sp. JS614
MRSGWEDGVVSPSALPPGEPAPEDGSLPASALARVGERGFGFYVHVPFCTVRCGYCDFNTYTAEELGPAGGAPGASRATYAEAAIAEVRRARQVLGDTDLPVNTVFFGGGTPTLLGPADLGAVLAAIGAEFGLADDVEVTTEANPDSVALWDLEELRAAGFTRLSFGMQSAVDHVLRVLDRTHDPLRVPAVVDWARQAGFEQISLDLIYGTPGESVADWDVSVEAALACGPEHVSAYSLIVEEGTALARRVKRGELPMPDEDDLADKYLLVDDRLAAAGLEWYEVSNWARGRDDNTASRCRHNLLYWTGGDWWGVGPGAHSHVGGVRWWNVKHPAAYAERIAAGRSPAHAREVLDEESRRVERVLLELRLRDGLPVEVLDESGRAAVPDLVARDLITELATDDGHRLVPTRRGRLLADAVVRDLLP

SEQ ID NO: 11883 - DNA, 1224 bp, Azoarcus sp. BH72
  CDS (1)..(1224): transl_table=11
gtgaacgaacgccgcgtcatcccgctgacgccggcgccggcagcggcggccgtcgtccttcccgagcgcccgcagctcagcgcgccgccgccgctcgcgctgtacgtgcatttcccgtggtgcgtgcgcaagtgcccgtactgcgacttcaactcgcacgccccgcgcggtgagaccgccattccggaagaggcgtgggccgcagccgtggtggccgacctcgaagccgccctgccgcaggtgtgggggcgtcgggtgcacagcatcttcatcggtggcggcacgcccagcctgatgtcggcaccggtgctcgaccgcctgctcaccgacatccgcatgcgcctgccgctcgacccgatggcggagatcacgctggaggccaatcccggcacggtggaagcggcccgcttccgcgatttccgcgccgccggcgtcaaccgcctgtcgctcggcgtccagagcttcgacgacgccatgctcctccgcctcggccgcatccacggcagcgacgaagcgaagcgtgcgatcgaaggcgcactcgcgcacttcgagcgggtaaacatcgacctgatgtacgcgctaccgcagcaagggctggacgcggcgctcgccgacctcgacaccgcgctcggcttcggcgtcacgcatctgtcctgctaccacctgacgctggagccgaacacgcccttcgcccacgatccgccgccgctgccggacgacgacagcgccgccgacatgcaggacgcgatcgaggcgcggctggcggccgcgggcttccgccactacgaaacctccgccttcgcccggccggggcaggaatgccgccacaacctcaactactggcagttcggcgactacctcgggatcggccccggcgcccacggcaagctctccaaccatgaaggcatcgtgcgcgagatgcgccacaagcatccgcagcgctatctggaaggcgcggcgcgcggcgacttcgtgcaggaacggcggtcggtgacggtcgccgagctgccgttcgaattcatgatgaacgcgctgcggctgaccggcggttttccgctcgcgctgttcgccgcgcgcaccgggctgccgctggccgcggtggaagcgcgcctgcgtgcggcgcgccaggacggcctgctcgagatcgacgctgacagcgtgcgcccgaccgagcgcggacgccacttcctcaacgaccttctgcagcgtttcctggacgactga

SEQ ID NO: 11884 - protein, 407 aa, Azoarcus sp. BH72
MNERRVIPLTPAPAAAAVVLPERPQLSAPPPLALYVHFPWCVRKCPYCDFNSHAPRGETAIPEEAWAAAVVADLEAALPQVWGRRVHSIFIGGGTPSLMSAPVLDRLLTDIRMRLPLDPMAEITLEANPGTVEAARFRDFRAAGVNRLSLGVQSFDDAMLLRLGRIHGSDEAKRAIEGALAHFERVNIDLMYALPQQGLDAALADLDTALGFGVTHLSCYHLTLEPNTPFAHDPPPLPDDDSAADMQDAIEARLAAAGFRHYETSAFARPGQECRHNLNYWQFGDYLGIGPGAHGKLSNHEGIVREMRHKHPQRYLEGAARGDFVQERRSVTVAELPFEFMMNALRLTGGFPLALFAARTGLPLAAVEARLRAARQDGLLEIDADSVRPTERGRHFLNDLLQRFLDD

SEQ ID NO: 11885 - DNA, 1179 bp, Mycobacterium sp. KMS
  CDS (1)..(1179): transl_table=11
gtgagcctccgaaccgcccccgtacgcgcgccggaactggccgccaccgcgggtcggccgttcggcctctacatccacgtcccgttctgcgcgacccgctgcggctactgcgacttcaacacctacaccccggcggaggcgggcggggccaaccccgagggctggctggtcgcgatgcgccaggagttggcgctcgcggcccggacgttggggacgccgccgccggtgcggaccgtcttcgtcggcggtggcaccccgtcgctgctgggcggtgcgggtctgaccgcggtgctggccgcggtgcgcgagcacttcgatctggcgcccggcgccgaggtcaccaccgaggccaacccggagtcgtcgggacccgaactgttcgacgcgctgctggccgccggctacacccgcgtctcgctcggtatgcagtcgacggcccgccatgtcctcaaggtgctcgaccggttgcattcccccggccgcgcggtggccgccgccggagaggcgcgcgcagccggcttcgggcacgtcaacctcgacctgatctacggcacgccgggggagactgacgacgacctgcgccggtccgccgacgccgcgatcggggcgggggtcgaccacgtgtcggcctacgcgctggtggtcgaggacgggacggccctggcccgccgggtgcggcgcggtgaggtgaccgcccccgacgacgacgtgctggcggcgcggtacgaactgctcgacgcgcggctgggcgaggccgggttcgactggtacgaggtgtcgaactgggccaggtccggcggcgagtgccgccacaacctcggctactgggccggcggcgaatggtggggggtcgggccgggggcgcacggcttcctgggcgacacccggtggtggaacgtcaagcatcccaacgcctatgccaccgcgctgggcgacggggcactgcccgtctccgatttcgaggtgctcgacccggccgcgcggcacaccgaggacgtgatgctgcgggtgcggctgcgcagcggtctgccgctggacatgctgaccgccgacgagcggagtcgcgtcggcaccgtggtggccgacggcctcgcggtggtcgacggggcggcgctggtcctcaccgaccgtggccgcctgctcgccgacggtgtggtgcgcacgctgctcgccgactga

SEQ ID NO: 11886 - protein, 392 aa, Mycobacterium sp. KMS
MSLRTAPVRAPELAATAGRPFGLYIHVPFCATRCGYCDFNTYTPAEAGGANPEGWLVAMRQELALAARTLGTPPPVRTVFVGGGTPSLLGGAGLTAVLAAVREHFDLAPGAEVTTEANPESSGPELFDALLAAGYTRVSLGMQSTARHVLKVLDRLHSPGRAVAAAGEARAAGFGHVNLDLIYGTPGETDDDLRRSADAAIGAGVDHVSAYALVVEDGTALARRVRRGEVTAPDDDVLAARYELLDARLGEAGFDWYEVSNWARSGGECRHNLGYWAGGEWWGVGPGAHGFLGDTRWWNVKHPNAYATALGDGALPVSDFEVLDPAARHTEDVMLRVRLRSGLPLDMLTADERSRVGTVVADGLAVVDGAALVLTDRGRLLADGVVRTLLAD

SEQ ID NO: 11887 - DNA, 1245 bp, Acidovorax sp. JS42
  CDS (1)..(1245): transl_table=11
atgaccatccccatcctccctgccgcgcagtccggcgcgccgctgcgcgacgtgcagcactacatgcgccccggcctgctgcagctgcccagcctgccgccgctgtcgctgtacgtgcacctgccgtggtgcctgcgcaaatgcccgtactgcgacttcaactcgcacgaggcgcgcggcggcatgggcggcgatggcggcgtgcccgaagcgcgctatatcgacgccctgctggccgacctggaggccgccctgccgctgatctggggccgcacggtgcacagcatcttcatcggcggcggaacgcccagcctgtttgcgcccgagtccatcgaccggctgctgggcgacatccgcgcgcgcctgcggttggacgcgggctgcgagatcacgctggaggccaaccccggcacgttcgagaaggagcgctttcgcgcctaccgcggcgcgggggtcacgcggctgtccatcggcgtgcagagcttcaacgaccggcacctgcaggcgctgggccgcgtgcacaaccgcgcacaggcgctggctgccgtggaggaagcggcgcaggcgttcgacaccttcaacctcgacatcatgtacgccctgcccggccagacgccggccgagctggacgaggacatgcgcaccgcgctcgcgctgcagccgccgcacatctccatctaccacctgaccatcgagcccaacacctacttcgccaagtaccccccaccgctgcccgaggacgacgcagcctatgccatgctcgaccgcatcacagaactgacgggcgcggcaggccttgcacgctacgaggtatcggcctatgcacgcgagggccaccaatgcgtgcacaaccgcaactattggcagtttggcgactatctgggcattggcgcgggcgcgcacagcaagctcagctttgcgcaccgggtggtgcgccaggtgcgcctgcgcgatccgcagctctacatggccggagcactcgcagggcgcgccatcgcgcaagacgacgacgtgcgccgcgcggacctgccgttcgagttcatgctcaatgcgctaaggctgcaggagggttttgcgctgcaggacttcaccgcccgtacgggcctggcgatcacggccatagccgctggcctgcagcaggccgaggcgcagggcctgatcacgcgcgacatggagcgcgtgcgtcccacacagcggggctttgattttttgagcgacctgcaggcgctcttcctggcggactga

SEQ ID NO: 11888 - protein, 414 aa, Acidovorax sp. JS42
MTIPILPAAQSGAPLRDVQHYMRPGLLQLPSLPPLSLYVHLPWCLRKCPYCDFNSHEARGGMGGDGGVPEARYIDALLADLEAALPLIWGRTVHSIFIGGGTPSLFAPESIDRLLGDIRARLRLDAGCEITLEANPGTFEKERFRAYRGAGVTRLSIGVQSFNDRHLQALGRVHNRAQALAAVEEAAQAFDTFNLDIMYALPGQTPAELDEDMRTALALQPPHISIYHLTIEPNTYFAKYPPPLPEDDAAYAMLDRITELTGAAGLARYEVSAYAREGHQCVHNRNYWQFGDYLGIGAGAHSKLSFAHRVVRQVRLRDPQLYMAGALAGRAIAQDDDVRRADLPFEFMLNALRLQEGFALQDFTARTGLAITAIAAGLQQAEAQGLITRDMERVRPTQRGFDFLSDLQALFLAD

SEQ ID NO: 11889 - DNA, 1128 bp, Magnetospirillum magnetotacticum MS-1
  CDS (1)..(1128): transl_table=11
atgacctctcccggcttcggcatctatatccactggccgttctgcctgtccaaatgcccttattgcgacttcaacagccatgcgggcctcgccgtggatcatgggcgctggcgcaaggccctgttggccgaactggatcatttcgcagcccaaacgcctgaccgcacccccaccagcgtgtttttcggcggcggcacgccgtcgctgatggagcctgaaacggcgggcgccctgatcgccatggtgaaaagccgctgggcctcaggccccgatctggaagtgacgctggaggccaatcccaccagcgtggaggccgaccgcttccgcgctttccgcgacgcaggcgtcaaccgtctgtccttggggattcaggcgctggacccggagtccctggcctttttagggcggcgccattcggtggacgaggccctggcggccttgagcctggcccaagccacctttccccgcgtctccttcgacctgatctattcgcgccccggccagacgcaagcgcagtggcgggccgagctggcccgcgccctcgatctggcgggcgagcatctgtcgctctaccagctgaccatcgaggacggcaccgcctttgccccccttcatgcccgtggcggtttcgccctgcccgacgaggacgaggccacggcccagttcgaactcacccaggagatgtgcgaacgggccgggctgcccgcctatgagatctccaaccacgcccgagcgaacgcccaatgccgccataacctcacctattggcagggcggcgcgtggctgggcatcggccccggcgcccatggccgctttggcggcgaggctttggcccaaacccgttcgcccggtccctggctggcccaggtggagtcgcaaggccacgccaccgaaacccgctacgtcctcgaccccgccgagcggctgtccgaactggtgctgatgggattacggctgcgaaacggccttgggcccgccttgctggccgaggtgcgtcaggtattggatgccgaaggcctggcccgcatgatcgcggacggcttcctggtgcaagacgcacggggcctgcgcaccaccgaccgaggacggctggtgctcaatgccgtcttgggccagctactggcctga

SEQ ID NO: 11890 - protein, 375 aa, Magnetospirillum magnetotacticum MS-1
MTSPGFGIYIHWPFCLSKCPYCDFNSHAGLAVDHGRWRKALLAELDHFAAQTPDRTPTSVFFGGGTPSLMEPETAGALIAMVKSRWASGPDLEVTLEANPTSVEADRFRAFRDAGVNRLSLGIQALDPESLAFLGRRHSVDEALAALSLAQATFPRVSFDLIYSRPGQTQAQWRAELARALDLAGEHLSLYQLTIEDGTAFAPLHARGGFALPDEDEATAQFELTQEMCERAGLPAYEISNHARANAQCRHNLTYWQGGAWLGIGPGAHGRFGGEALAQTRSPGPWLAQVESQGHATETRYVLDPAERLSELVLMGLRLRNGLGPALLAEVRQVLDAEGLARMIADGFLVQDARGLRTTDRGRLVLNAVLGQLLA

SEQ ID NO: 11891 - DNA, 1203 bp, Rickettsia sibirica 246
  CDS (1)..(1203): transl_table=11
atgtccacaaaacctaagttagcactagcaaaaatacaaaatatgagagttatggctaatgatttaagtatttatattcattggcctttttgtttgtccaaatgtccgtattgtgattttaattctcatatagcaagtactatagatcataatcagtggtttaaatcttatgaaactgaaattgaatattttaaggatattattcaaaataaatatataaaatctattttttttgggggcggtactccctctttaatgcatcctgtaatagttgaaggaataataaataaaatcagtaatctagcaattattgataatcaaaccgagataactctagaaactaatcccacatcatttgaaactgaaaaatttaaagcattcaaagccgccggaattaatcgtatttcaataggagtgcaatccttaaaagaggacgatttaaaaaaattaggtagaactcatgattgtatgcaggccattaaaacaattgaggcggcaaatacgatttttctacgagtgtcatttgatttaatatatgcacgtagcggtcagacattaaaagactggcaagaagaattaaaacaagctatgcagctcgctacctcacatatttctctttatcaattgactatcgaaaaaggtacgccgtgttataaattatttaaggagggtaatctgattttgccgcattcagatgcggcagctgaaatgtatgaatggactaatcattatctagaatctaaaaagtattttagatatgaaatatccaattatgctatgatagggtatgaatgtttgcataatttaacttattggaattataatagctatttaggtataggccccggagctcatagtagaatcattgaatcctcaagttcggtatcggcaattatgatgtggcataaacctgaaaaatggttagatgcggttaaaacaaaaaatgttggtattcaaactaatactaagttaacacatcaagagattattgaagaaatgctaatgatgggtttacgccttagcaaaggtataaatatttctacattagagcagaaattaaacacgaaattagagcatattttagatatgaataatcttaagcattatcaagcgttagacttaattagactagatgaaaatatctatcttaccgacaaaggtttaatgctgtatagctacatagtacctagattgattatatga

SEQ ID NO: 11892 - protein, 400 aa, Rickettsia sibirica 246
MSTKPKLALAKIQNMRVMANDLSIYIHWPFCLSKCPYCDFNSHIASTIDHNQWFKSYETEIEYFKDIIQNKYIKSIFFGGGTPSLMHPVIVEGIINKISNLAIIDNQTEITLETNPTSFETEKFKAFKAAGINRISIGVQSLKEDDLKKLGRTHDCMQAIKTIEAANTIFLRVSFDLIYARSGQTLKDWQEELKQAMQLATSHISLYQLTIEKGTPCYKLFKEGNLILPHSDAAAEMYEWTNHYLESKKYFRYEISNYAMIGYECLHNLTYWNYNSYLGIGPGAHSRIIESSSSVSAIMMWHKPEKWLDAVKTKNVGIQTNTKLTHQEIIEEMLMMGLRLSKGINISTLEQKLNTKLEHILDMNNLKHYQALDLIRLDENIYLTDKGLMLYSYIVPRLII

SEQ ID NO: 11893 - DNA, 1203 bp, Rickettsia rickettsii
  CDS (1)..(1203): transl_table=11
atgtccacaaaacctaagttagcactagcaaaaatacaaaatatgagagttatggctaatgatttaagtatttatattcattggcctttttgtttgtccaaatgtccgtattgtgattttaattctcatgtagcaagtattatagatcataatccgtggcttaaatcttatgaaactgaaattgaatattttaaggatattattcaaaataaatatataaaatctattttttttggaggcggtactccctctttaatgaatcctgtaatagttgaaggaataataaataaaatcagtaatctagcaattattgataatcaaaccgagataactctagaaactaatcccacatcatttgaaactgaaaaatttaaagcattcaaagccgccgggattaatcgtgtttcaataggagtgcaatccttaaaagaggacgatttaaaaaaattaggtaggactcatgattgtatgcaggccattaaaacaattgaggcggcaaatacgatttttctacgagtgtcatttgatttaatatatgcacgtagcggtcagacattaaaagactggcaagaagaattaaaacaagctatgcagctcgctacctcacatatttctctttatcaattgactattgaaaaaggtacgccgtgttataaattgtttaaggagggtaatctgattttgccgcattcagatgcggcagctgaaatgtatgaatggacgaatcattatctagaatctaaaaagtattttagatatgaaatatccaattatgctatgatagggtatgaatgtttgcataatttaacttattggaattataatagctatttaggtataggccccggagctcatagtagaatcattgaatcctcaagtttggtatcggcaattatgatgtggcataaacctgaaaaatggttagatgcggttaaaacaaaaaatgttggtattcaaactaatactaagttaacacatcaagagattattgaagaaatgctaatgatgggtttacgccttagcaaaggtataaatatttctacattagagcagaaattaaacacgacattagagaatattttagatatgaataatcttaagcattatcaagcgttagacttaattagactagatgaaaatatctatcttaccgacaaaggtttaatgctgtatagctacatagtacctagattgattatatga

SEQ ID NO: 11894 - protein, 400 aa, Rickettsia rickettsii
MSTKPKLALAKIQNMRVMANDLSIYIHWPFCLSKCPYCDFNSHVASIIDHNPWLKSYETEIEYFKDIIQNKYIKSIFFGGGTPSLMNPVIVEGIINKISNLAIIDNQTEITLETNPTSFETEKFKAFKAAGINRVSIGVQSLKEDDLKKLGRTHDCMQAIKTIEAANTIFLRVSFDLIYARSGQTLKDWQEELKQAMQLATSHISLYQLTIEKGTPCYKLFKEGNLILPHSDAAAEMYEWTNHYLESKKYFRYEISNYAMIGYECLHNLTYWNYNSYLGIGPGAHSRIIESSSLVSAIMMWHKPEKWLDAVKTKNVGIQTNTKLTHQEIIEEMLMMGLRLSKGINISTLEQKLNTTLENILDMNNLKHYQALDLIRLDENIYLTDKGLMLYSYIVPRLII

SEQ ID NO: 11895 - DNA, 1152 bp, Haemophilus influenzae R2846
  CDS (1)..(1152): transl_table=11
atgctaaaacttcccccactttccctttatatacacattccatggtgcgttcaaaaatgcccttattgtgattttaattcgcacgcacaaaaaggcgatataccagaacaagactatatttatcatcttctgcaagatttgcaggctgatttgcaacgctttaaagattctattcaacaacgaaaactccattcaatttttattggtggcggtacaccaagtttgttctcggcagaaagcattgcgtatctcttaaaagaaataaaaaaacagattgattttgaagataatattgaaatcacattagaggctaatcccggtacggtagaagcggaacgttttaaaggttatgtttcagcaggcattacgcgaatttctatgggaattcaaagtttcaatgatgacaaattacaacgtcttgggcggattcataatgcagcagaggcaaaaagtgcggtcaatttagcgaaagtttctgggctaaaaagtttcaatttagatttaatgcacggtttgccgaaccaaacgttggaagaagccttagatgatcttcgtcaagcaattgagctatctcctccccatatttcttggtatcagctgactattgaaccaaatacgatgtttgcttatcgcccacctaaattaccagatgatgacgcactttgggacatttttgagcaaggtcaccaacttttaacgatggcagactaccagcaatatgaaacctcagcttacgcaaaagcaggttttcaatgtaaacataatttgaattattggcgatttggggattatttagccattggctgtggcgcacacgggaaattgacgtttccgactggcgagattactcgcttttctaaaaccaagcacccgaaaggttatttgcgtggcgaatatctttacgaagaaaaaaacgtgtcagaaattgaccgcccttttgagttttttatgaatcgctttcgtttgttagaagcggtacccaaacaagaatttgaagattacacaggcttatcgcaaagtgcggtgaaaaatcaaattgattttgccattcaacaaaactatattgtggaaaacgctgattcttggcaaatcactgaacacggcaagttatttctcaatgaacttttggaattatttttaacggaagaatag

SEQ ID NO: 11896 - protein, 383 aa, Haemophilus influenzae R2846
MLKLPPLSLYIHIPWCVQKCPYCDFNSHAQKGDIPEQDYIYHLLQDLQADLQRFKDSIQQRKLHSIFIGGGTPSLFSAESIAYLLKEIKKQIDFEDNIEITLEANPGTVEAERFKGYVSAGITRISMGIQSFNDDKLQRLGRIHNAAEAKSAVNLAKVSGLKSFNLDLMHGLPNQTLEEALDDLRQAIELSPPHISWYQLTIEPNTMFAYRPPKLPDDDALWDIFEQGHQLLTMADYQQYETSAYAKAGFQCKHNLNYWRFGDYLAIGCGAHGKLTFPTGEITRFSKTKHPKGYLRGEYLYEEKNVSEIDRPFEFFMNRFRLLEAVPKQEFEDYTGLSQSAVKNQIDFAIQQNYIVENADSWQITEHGKLFLNELLELFLTEE

SEQ ID NO: 11897 - DNA, 1152 bp, Haemophilus influenzae R2866
  CDS (1)..(1152): transl_table=11
atgctaaaacttcccccactttccctttatatacacattccatggtgcgttcaaaaatgcccttattgtgattttaattcgcacacacaaaaaggcgatataccagaacaagactatatttatcatcttctgcaagatttgcaggctgatttgcaacgctttaaagatgctattcaacaacgaaaactccattcaatttttattggtggcggtacaccaagtttgttctcggcagaaagcattgcgtatctcttaaaagaaataaaaaaacagattgattttgaagataatattgaaatcacattagaggctaatcccggtacggtagaagctgaacgttttaaaggttatgtttcagcaggcattacgcgaatttctatgggaattcaaagtttcaatgatgataaattacaacgtcttgggcggattcataatgcagcagaggcaaaaagtgcggtcaatttagcgaaagtttctgggctaaaaagtttcaatttagatttaatgcacggtttgcctaaccaaacgttggaagaagccttagatgatcttcgtcaagcaattgagctatctcctccccatatttcttggtatcagctgactattgaaccaaatacgatgtttgcttatcgcccacctaaattaccagatgatgacgcactttgggacatttttgagcaaggtcaccaacttttaaccgcagcgggctaccagcaatatgaaacgtctgcttacgcaaaagcgggttttcaatgtaaacataatttgaattattggcgatttggggattatttagccattggctgtggcgcacacgggaaattgacgtttccgactggcgagattactcgcttttctaaaaccaagcacccgaaaggttatttgcgtggcgaatatctttacgaagaaaaaaacgtgtcagaaattgaccgcccttttgagttttttatgaatcgctttcgtttgttagaagcggtacccaaacaagaatttgaagattacacaggcttgtcgcaaagtgcggtgaaaaatcaaattgattttgccattcaacaaaactatattgtggaaaacgctgattcttggcaaatcactgaacacggcaagttatttctcaatgaacttttggaattatttttaacggaagaatag

SEQ ID NO: 11898 - protein, 383 aa, Haemophilus influenzae R2866
MLKLPPLSLYIHIPWCVQKCPYCDFNSHTQKGDIPEQDYIYHLLQDLQADLQRFKDAIQQRKLHSIFIGGGTPSLFSAESIAYLLKEIKKQIDFEDNIEITLEANPGTVEAERFKGYVSAGITRISMGIQSFNDDKLQRLGRIHNAAEAKSAVNLAKVSGLKSFNLDLMHGLPNQTLEEALDDLRQAIELSPPHISWYQLTIEPNTMFAYRPPKLPDDDALWDIFEQGHQLLTAAGYQQYETSAYAKAGFQCKHNLNYWRFGDYLAIGCGAHGKLTFPTGEITRFSKTKHPKGYLRGEYLYEEKNVSEIDRPFEFFMNRFRLLEAVPKQEFEDYTGLSQSAVKNQIDFAIQQNYIVENADSWQITEHGKLFLNELLELFLTEE

SEQ ID NO: 11899 - DNA, 1158 bp, Listeria monocytogenes str. 1/2a F6854
  CDS (1)..(1158): transl_table=11
atgataaatacaaacctatcgagtaatgaaagttccgcggtatatatccatattccgttttgcgaacatatttgctattactgcgattttaataaagtattcttagaaggacaaccggtcgacgaatacgtagatttactgattaaagaaatggaattaacagtcgcaaaaggaccaatagcgccagtcgacacggtatttgtcggtggaggcacacctacaaccttaaacgaagcgcaaattgcgagactctgcaccgccattcataacactctgccgctcaaaaaagatatcgaattttcgtttgaagccaacccaggagatctttcgctatctaaactacaagcgatgcaagatcacggagttaatcgtattagcatgggtgttcaaagcttcaacaatgaacttctcaaaaaaattggtcgcattcatactgtaaaagatgtttatcaatccgtcgaaaatatgcgcaaaatcggatttgaaaatgtaagcattgatttaatttttagcttgccaggacaaacagaagccgatttccaagatacattaaaacaagcgcttgaccttgatttaccgcattactccgcctattcattaatcatcgaaccaaaaacgattttttacaaccttatgcaaaaaggaaagcttttcttacctggtcaagatgccgaggcaaatatgtacgatttacttctcaacgaaatggaaaagcacggtcgtaaacaatatgaaattagtaattttgctaaagaaggatttcagagtaaacacaatattacttactggagcaatgaacattactacggatttggcgccggagcacatggatatgtcggcaatacacgttatagcaatttcggaccaatcaaaaaatacatggaaccactccaaaaaaatatactcccaactttccaacaaaaagagcttactttaaaagaaaaaatggaagaagaaatgtttttagggcttagaaaagtggacggtgtaaataaaaaccatttcaagcaaaaattcggtcaagatttagatgcaacatttgcgaatgcgattcaaaaaacaactgcaaaaggctggcttgaaaataacgaagaaaatgtggcacttacaagaaacggaagatttttaggaaataatgtttttcaagaatttctctaa

SEQ ID NO: 11900 - protein, 385 aa, Listeria monocytogenes str. 1/2a F6854
MINTNLSSNESSAVYIHIPFCEHICYYCDFNKVFLEGQPVDEYVDLLIKEMELTVAKGPIAPVDTVFVGGGTPTTLNEAQIARLCTAIHNTLPLKKDIEFSFEANPGDLSLSKLQAMQDHGVNRISMGVQSFNNELLKKIGRIHTVKDVYQSVENMRKIGFENVSIDLIFSLPGQTEADFQDTLKQALDLDLPHYSAYSLIIEPKTIFYNLMQKGKLFLPGQDAEANMYDLLLNEMEKHGRKQYEISNFAKEGFQSKHNITYWSNEHYYGFGAGAHGYVGNTRYSNFGPIKKYMEPLQKNILPTFQQKELTLKEKMEEEMFLGLRKVDGVNKNHFKQKFGQDLDATFANAIQKTTAKGWLENNEENVALTRNGRFLGNNVFQEFL

SEQ ID NO: 11901 - DNA, 1140 bp, Bacillus cereus G9241
  CDS (1)..(1140): transl_table=11
ttggtgcaagctgcatatattcatattccgttttgtcagcatatttgtcactattgtgattttaataaagtgtttattgagcgccagccggtcgatcaatatttagagtatctagagaaagaaataataaatacagttcaaaaggtaccgtttgatagtatgaaaacgatttttgttggcgggggaactccgacagcattaaatatggaacagacaaagaaattattagatattataaatcgtcgtttacgtccgtttgccccgaattgtgaattaacatttgaagcgaatccaggtgatttgccgaaagagaaattaaatgtattgctagaaggtggagtgaaccgaattagttttggtgtgcaaacatttcgagatgaattgcttgagaaaattggacgcaagcatacgagagaagatgcattcgtagcaattagagaagcgcaggaagtgggcttcaaaaatataaatgtagatattatttatgctctgccgggacagacgatagaagatgtaaaagaaacgttagatattgcttttacgcttggtgtacaacatttctcggcatattcattaattgtggaaccgaaaactgtgttttataacttaatgaataaagggaaattaagactaccaggtgaagaccatgaagcgaaaatgtacgaaatggtaatggatgaaatggagaaacacggctatacccagtatgaaattagtaatttctcaaaaggtaataatgaaagtagacataatctcacatactggaataatgaagagtattatggatttggagctggagcgcatagttatgtaaatggagaacgtatccaaaatgtagggccgctcaagcaatatttcaataaaatcgatgaaaccggatttccgtatttagatgttcacgtggtgacggagaaagaaaaaatggaagaagagttgttcttaggactccgaaaaacaaaaggtgtatctaaaatagcgtttcaaaagaaatttaatatggaaatggatcaagttttcgcgaagcagttacaacacaaccaagaaaagggattgcttgaagagagcgatgaatatgttcgtttaacgcgaaaagggaaattattagggaatgaagtattccaatcatttttgattgactaa

SEQ ID NO: 11902 - protein, 379 aa, Bacillus cereus G9241
MVQAAYIHIPFCQHICHYCDFNKVFIERQPVDQYLEYLEKEIINTVQKVPFDSMKTIFVGGGTPTALNMEQTKKLLDIINRRLRPFAPNCELTFEANPGDLPKEKLNVLLEGGVNRISFGVQTFRDELLEKIGRKHTREDAFVAIREAQEVGFKNINVDIIYALPGQTIEDVKETLDIAFTLGVQHFSAYSLIVEPKTVFYNLMNKGKLRLPGEDHEAKMYEMVMDEMEKHGYTQYEISNFSKGNNESRHNLTYWNNEEYYGFGAGAHSYVNGERIQNVGPLKQYFNKIDETGFPYLDVHVVTEKEKMEEELFLGLRKTKGVSKIAFQKKFNMEMDQVFAKQLQHNQEKGLLEESDEYVRLTRKGKLLGNEVFQSFLID

SEQ ID NO: 11903 - DNA, 1161 bp, Rickettsia akari str. Hartford
  CDS (1)..(1161): transl_table=11
atgaaagttatggcagatgatttaagcatttatattcattggcctttttgtttatcaaaatgtccgtattgtgattttaattctcatgtggctagcactatagatcataatcaatggattaaatcgtatgaaaccgaaattgagtattttaagaatattattcaaaataaatatataaaatccattttttttggtggcggaactccttcattaatgaatcccgtattagttgaattgataatcaataaaatcaataatctagcaattcttgataatcgaactgaaataactctagaaaccaatcccacatcatttgaaactgaaaaatttaaagcgttcaaatctgccggaattaaccgtgtgtccattggagtacaatccttaaaagaagacgatttaaaaaaattaggcagaactcatgatgctttgcaagccatcaaaacaattgagcaggcaaatgggatttttccaagagtttcattcgatttaatatatgcacgtagcggtcaaaaattaaaagactggcaagaagaattaaagcaagctatgcaactcgcaaatgggcatatctctctttatcaattgactatcgaaaaaggtacacctttttataaattatttaatgagggtaatctgattgtgccgcattcagatgcggcagctgaaatgtacgaatggacaaatcattatctagcatctaaaaaatattttagatatgagatatctaattatgctctagcaaatcagaaatgtttgcataatttgacttattggcattataatagttgcttaggtataggtcccggggctcatagtagaatcattgaaccgtcaggttcggtagcggcaattatgatgtggcacaagccagaaaaatggttagactcagttaaaacaaaaaatgtcggtattcaaactaacgctaagctaacacatcaagaaataatcgaagagattttaatgatgggtttacgtcttagcaaaggcataaatatttctacattagagcagaaaataaacgcaaaattaatggatattttagacatgaataaccttaaacattatcaagcgttagatttaattaaactagataaaaatatctatcttaccgacaaaggtttaatgctacatagttacatagtacctagattaattatatga

SEQ ID NO: 11904 - protein, 386 aa, Rickettsia akari str. Hartford
MKVMADDLSIYIHWPFCLSKCPYCDFNSHVASTIDHNQWIKSYETEIEYFKNIIQNKYIKSIFFGGGTPSLMNPVLVELIINKINNLAILDNRTEITLETNPTSFETEKFKAFKSAGINRVSIGVQSLKEDDLKKLGRTHDALQAIKTIEQANGIFPRVSFDLIYARSGQKLKDWQEELKQAMQLANGHISLYQLTIEKGTPFYKLFNEGNLIVPHSDAAAEMYEWTNHYLASKKYFRYEISNYALANQKCLHNLTYWHYNSCLGIGPGAHSRIIEPSGSVAAIMMWHKPEKWLDSVKTKNVGIQTNAKLTHQEIIEEILMMGLRLSKGINISTLEQKINAKLMDILDMNNLKHYQALDLIKLDKNIYLTDKGLMLHSYIVPRLII

SEQ ID NO: 11905 - DNA, 1179 bp, Haemophilus somnus 2336
  CDS (1)..(1179): transl_table=11
atgacacaattctcccttgttaaactatttcccattcagctacctccattaagtttatatatacatatcccttggtgtgtacaaaaatgcccttattgtgatttcaactcccatgcacaaaaagggcttattccggaaactgaatatgttacccatttgcttactgacttaaagcaagatttggtacgttatcatgcctcaatagccgaccgaaaattgcattctattttcattggaggcggaactcctagcctattttctgtacaaagtattgattatttattgaatcaaattaaacaacttattccttttgaggataatattgaaattacgcttgagtcaaatcctgtaacagctgaaagcgatcggtttgtcggatatgcacaagccggagtgaatcgaatttctatagggattcaaagttttaataatgaaaaattacagagactggggcgtgcccataatgcagttgaagcaaaaagtgcggtgcgttttgctcaacattccggattaaacagttttaacttggatttaatgcacggattacccaatcaatctttggtgcaagcactggacgatttacagcaagctattgctttaaaaccgcctcatttatcttggtatcaactcacaattgagcctaatacaatgtttgcatatcgtccgccgaaattacccgatgaagatgaactttgggatatttttgagcagggtcatcaattgttatccaaagcaggttaccaacaatatgaaacctctgcttatgcaaaagttgattttcaatgtcaacacaatttgaattattggagatttggtgattatttagctattgggtgtggagcacatggtaaattgagttttgctgatggacaaattttacgtttttctaaaacgaaacaccctaaaggctatatgcgtggtgaatatctatatgaggaaaaaaatatccctttttcagaacgtccatttgagttttttatgaatcgctttcgtttattggaacctatggaaaaacaacaatttgaactgttaactggattagcacaaagtgcggtacaaaaacaaattgattgggcgttagagaaaaactatttatcagaaacgaaccgcacttggcaaatcactgaacaaggaaaacttttccttaatgaattattaacggagtttttgcctgattag

SEQ ID NO: 11906 - protein, 392 aa, Haemophilus somnus 2336
MTQFSLVKLFPIQLPPLSLYIHIPWCVQKCPYCDFNSHAQKGLIPETEYVTHLLTDLKQDLVRYHASIADRKLHSIFIGGGTPSLFSVQSIDYLLNQIKQLIPFEDNIEITLESNPVTAESDRFVGYAQAGVNRISIGIQSFNNEKLQRLGRAHNAVEAKSAVRFAQHSGLNSFNLDLMHGLPNQSLVQALDDLQQAIALKPPHLSWYQLTIEPNTMFAYRPPKLPDEDELWDIFEQGHQLLSKAGYQQYETSAYAKVDFQCQHNLNYWRFGDYLAIGCGAHGKLSFADGQILRFSKTKHPKGYMRGEYLYEEKNIPFSERPFEFFMNRFRLLEPMEKQQFELLTGLAQSAVQKQIDWALEKNYLSETNRTWQITEQGKLFLNELLTEFLPD

SEQ ID NO: 11907 - DNA, 1254 bp, Crocosphaera watsonii WH 8501
  CDS (1)..(1254): transl_table=11
atggactttctcatccctgtctccgcttatcttcatattcccttttgtcgtcgtcgttgttattattgtgattttcctatctctgttttaggagataaaacaaatactaatacatcgggttcaatttcagaatatgttcaatttctctgtgaagaaattaagataactcctacttacaatcgacctttaaaaacagtttttttcggaggaggtactccttctctgttacctccccgttatttggataaaattttagcgacattagaccagcagttcggcatctgcgctgatgcagaaatatctatggaaatagaccctgggacttttagtttagaacaattatctgactataaaacattaggggtcaatcgctttagtttaggtattcaatcttttgatgataaattactagaaaaatctggtcgttttcatcgttataaagatattgaacagtctattgattttatttataaaactaatattataaattttagcttagacttgatttctggtcttccttaccaaactttagaagattggaaatcttccttagaaaaagcgattaaaatacagcctagtcatatttcttgttatgatttagtattagaaccagtaaccgcttttggtaaacaatataaaccaggaaagtttcctttaccagatgatgacaatactatgcttatgtataagatgggacaaagaatattaaccgaagcaggatatgaacattacgaaatatctaattatgctcaacaaggttatcaatgtcttcataaccttgtttactgggaaaataagccttattatgctttaggaatgggagcagcaagttatagtaacaaccaaagatttactcggccaagaactcgtaaagactactatcaatggatagaaaagttaaaacaatcagattattccttggattgtgattatttagacacaattgacattatcttggaaacatttatgttaggtttgcgattaaaaaaaggagtagattggtcaaaaatatatacatcttttggagaagatattataaaattaatttataaaatactcttgccctattatcaacaaaaattagtttattttcaagatattaacgataagtttatcacagaaataaaggataataatttgcatgatataaaccgagtcatgctcagcgatcctgatggctttctcttatccaacactattttagcagacttattcgctcagttagaatctacaattttagaatctacaatttga

SEQ ID NO: 11908 - protein, 417 aa, Crocosphaera watsonii WH 8501
MDFLIPVSAYLHIPFCRRRCYYCDFPISVLGDKTNTNTSGSISEYVQFLCEEIKITPTYNRPLKTVFFGGGTPSLLPPRYLDKILATLDQQFGICADAEISMEIDPGTFSLEQLSDYKTLGVNRFSLGIQSFDDKLLEKSGRFHRYKDIEQSIDFIYKTNIINFSLDLISGLPYQTLEDWKSSLEKAIKIQPSHISCYDLVLEPVTAFGKQYKPGKFPLPDDDNTMLMYKMGQRILTEAGYEHYEISNYAQQGYQCLHNLVYWENKPYYALGMGAASYSNNQRFTRPRTRKDYYQWIEKLKQSDYSLDCDYLDTIDIILETFMLGLRLKKGVDWSKIYTSFGEDIIKLIYKILLPYYQQKLVYFQDINDKFITEIKDNNLHDINRVMLSDPDGFLLSNTILADLFAQLESTILESTI

SEQ ID NO: 11909 - DNA, 1146 bp, Exiguobacterium sibiricum 255-15
  CDS (1)..(1146): transl_table=11
atgacaccacgcgccgcatatgtccacattccattttgtgagcatatttgttattactgtgactttaataaagtctttttaaaaaatcagccggttgcagaatatctggatgcattggaacgggagatcgaactgacgttacaacactatccgacggatcggctcgaaacgatcttcatcggtggaggaacaccgactgccttaaatgaagctcagatgcaacgattgatggatatcatttcgaagcaccttctgccgctgacggatgcgacacttgagtataccgtcgaatcgaatccggacggcgtttcgccggaaaaactcgatatcatgaaagcgggcggcgtcaaccgggtcagcttcggtgtccagtcatttgacgacggattactcgaacggatcggccggacgcaccgggaagcgaaagtcgcagagacgctcgatcatgcggcaaagcgctttgataacatctcggttgatttgatgttcggcttaccgaaccaaacgctcgaacaagtccggtatgatgtcaaacgggcattacatttgccaatcacgcatatctcgtcgtattcattgattcttgagccgcataccgtttttgcgattcaagaacgaaaaggcaagttgccgttaccgacgcaggacctggaagcggatatgtaccgtttgatgattgaaacgattgaagccggcggattgcatcaatatgagatttcgaatttttctctgccgggtcgggaaagccggcataaccgcgtctactgggaaaatgatgaatattacgggtttggcgccggctcccacagttatatcaacaaaacacggcgggcaaacatcgcaccgattccgcactacattaaagcggaaggattaccggtccgtaatgaaacgccgttgacggaagtcgaacggatggaagaagagatgtttctcggtttacggatgaaagaaggggtgtcagaacggcacttcgaagaaaaatacggtcattcgctcgaccgggtcttcggacagacaattgcaaaattattgccgcgcggactcgtcgaacggacagcgactcatcttcgtctgacggacgccggtgtcccgctcgccaacgaagtatttgccgagttcatcggcgaagcagaagtggaataa

SEQ ID NO: 11910 - protein, 381 aa, Exiguobacterium sibiricum 255-15
MTPRAAYVHIPFCEHICYYCDFNKVFLKNQPVAEYLDALEREIELTLQHYPTDRLETIFIGGGTPTALNEAQMQRLMDIISKHLLPLTDATLEYTVESNPDGVSPEKLDIMKAGGVNRVSFGVQSFDDGLLERIGRTHREAKVAETLDHAAKRFDNISVDLMFGLPNQTLEQVRYDVKRALHLPITHISSYSLILEPHTVFAIQERKGKLPLPTQDLEADMYRLMIETIEAGGLHQYEISNFSLPGRESRHNRVYWENDEYYGFGAGSHSYINKTRRANIAPIPHYIKAEGLPVRNETPLTEVERMEEEMFLGLRMKEGVSERHFEEKYGHSLDRVFGQTIAKLLPRGLVERTATHLRLTDAGVPLANEVFAEFIGEAEVE

SEQ ID NO: 11911 - DNA, 1251 bp, Prosthecochloris aestuarii DSM 271
  CDS (1)..(1251): transl_table=11
atggagaggagtcgctctgcagggagaaaaaccttcttcccgaatatgttgccgatgacctttacgatgccgttgccggttatatcctttcacaacagctcacttgactcgcctgacactcccgggatgcttcactgttacgtccatattcctttctgcagaaaccgctgcagctactgtgactttttcctgataacccgcgagggatttcaggaacctttttttcgtgcgctccgggaggagacccgctctcgcgctatcctgcttgagggcaggacgatccgttccgttcatttcggcggtggaaccccctcgcttgtcgaccctcggcacctcgaagcgtggttgaatcaggttgccgggtatgcgacctttcatcctgaactggagatcacccttgaagccaatccggaagatcttacccctcaatcccttgcgctctggtcatcgatcggtgtcaaccgcctgagtatcggtattcagtcatacaacagcaggaaacttcacgctctcgggcgcgaccatgacgccttgtgcgcacgtcgcgtcaccggggaggcgatggagcgcttccggaatgtcagcgttgatctgatctgcggggttgagggggagtcgtctgccctgtggggtgccgatcttgatgacgccctctcattcggtctgcagcatctgtcggtctatatgctgacggtcgagccttccacgcggcttgcccgcgatgtcagcaaaggcctcgttcaggtgccgggtgagggtgagcttgcctcgatgtactcgattgcctcagaacggctctcatcatcggggttcgagcattatgaggtatcgaatttcgccagggcaggctgtttttcacgctataatatgggatgctggcaaagggaatcgtatcttggattcggtccttctgcccattcgctctatacactgggggcagctgagtggcgcagtgccaatgtgacgagtctgacacgctatattgctgaaccccgtgagctctcttcacagagagagtttctctcagaaaaggatcgtcgcaatgagcagatttttctttcccttcgcctgaagaccggtctcgatgccggccttctgcaaaggtggcattcgttcgatccgaggatcgatgcggcagtcgatgcattcagacaacgagggtggctcgatgtgaacggccggaccctcaaggtgacccggaaagggtttcttttcgccgatctcattgctgaggaactgctgctcggatga

SEQ ID NO: 11912 - protein, 416 aa, Prosthecochloris aestuarii DSM 271
MERSRSAGRKTFFPNMLPMTFTMPLPVISFHNSSLDSPDTPGMLHCYVHIPFCRNRCSYCDFFLITREGFQEPFFRALREETRSRAILLEGRTIRSVHFGGGTPSLVDPRHLEAWLNQVAGYATFHPELEITLEANPEDLTPQSLALWSSIGVNRLSIGIQSYNSRKLHALGRDHDALCARRVTGEAMERFRNVSVDLICGVEGESSALWGADLDDALSFGLQHLSVYMLTVEPSTRLARDVSKGLVQVPGEGELASMYSIASERLSSSGFEHYEVSNFARAGCFSRYNMGCWQRESYLGFGPSAHSLYTLGAAEWRSANVTSLTRYIAEPRELSSQREFLSEKDRRNEQIFLSLRLKTGLDAGLLQRWHSFDPRIDAAVDAFRQRGWLDVNGRTLKVTRKGFLFADLIAEELLLG

SEQ ID NO: 11913 - DNA, 1152 bp, Xylella fastidiosa Dixon
  CDS (1)..(1152): transl_table=11
atgttgatcccgccgccactttcgctatatgtgcatttgccttggtgcgtgcgtaagtgcccgtactgtgatttcaactctcaccaagccaagggtgcactcccgttcgatgcttatgtcaacgcattactgcgtgacctggagtacgacttacctttggtgtggggccgtgttgtgcacagtgtgttcttgggtggcggcacgcccagcctattccccccggaagcgattgaccgttttttgcagatcgctgcggcgcggctgcgtcttgctccggatgctgaaatcaccctggaaaccaatccggggactgccgagtatggtcgttttgatcgttatcttgccgctggcatcaatcggctgagctttggtatccaaagttttaatgatgctgcactgcggcgattggggcggattcatgacagcctccaggctgagcacgctgtgaaactggcacaagatgccggcttcactaacatcaacttagatctaatgtatgcgctgccagagcaaaccttgcttgaagccgagcacgacttacagcgtgcatttgccctggcgcctacccatctttcctattatcagctcacccttgaacccaataccgtcttctacgctcgtccgccgcagggcattcccgatgacgatgccgcgtgggagatgcaggagcatacccaacgcctgcttgctgaggctggttaccagcattacgaggtcagcgcttacgcccgtgagggctggcagtgcctgcataatctgaactattggcgctttggagactaccttggtatcggtgccggggcacatggcaagatcacttccggagtgtcacagcatgtgttgcgccgctggaaatgtaagcatccgtacacctacttggacaacgctggtaccgtctctgcgatcggtggtgatgagattgtgccaacggcacgcttgccatttgaatatatgctcaatctattacgcctgcgcgaaggattccgattacaggattttgctctacgtacaggactgaccgttgaatcaatccatgcagcattgagagaggctgttgcacgcggttggttacgatgtgaacttgaacacgtcatcccgaccgaattagggttgcgttttgctaacgatgtcatcaacttattcaatgaataa

SEQ ID NO: 11914 - protein, 383 aa, Xylella fastidiosa Dixon
MLIPPPLSLYVHLPWCVRKCPYCDFNSHQAKGALPFDAYVNALLRDLEYDLPLVWGRVVHSVFLGGGTPSLFPPEAIDRFLQIAAARLRLAPDAEITLETNPGTAEYGRFDRYLAAGINRLSFGIQSFNDAALRRLGRIHDSLQAEHAVKLAQDAGFTNINLDLMYALPEQTLLEAEHDLQRAFALAPTHLSYYQLTLEPNTVFYARPPQGIPDDDAAWEMQEHTQRLLAEAGYQHYEVSAYAREGWQCLHNLNYWRFGDYLGIGAGAHGKITSGVSQHVLRRWKCKHPYTYLDNAGTVSAIGGDEIVPTARLPFEYMLNLLRLREGFRLQDFALRTGLTVESIHAALREAVARGWLRCELEHVIPTELGLRFANDVINLFNE

SEQ ID NO: 11915 - DNA, 1152 bp, Xylella fastidiosa Ann-1
  CDS (1)..(1152): transl_table=11
atgttgatcccgccgccactttcgctatatgtgcatttgccttggtgcgtgcgtaagtgcccgtactgtgatttcaactctcaccaagccaagggtgcactcccgttcgatgcttatgtcaacgcattactgcgtgacctggagtacgacttacctttggtgtggggccgtgttgtgcacagtgtgttcttgggtggcggcacgcccagcctattccccccggaagcgattgaccgttttttgcagatcgttgcggcgcggctgcgtcttgctccggatgctgaaatcaccctggaaaccaatccggggactgccgagtatggtcgttttgatcgttatcttgccgctggcatcaatcggctgagctttggtatccaaagttttaatgatgctgcactgcggcgattggggcggattcatgacagcctccaggctgagcacgctgtgaaactggcacaagatgccggcttcactaacatcaacttagatctaatgtatgcgctgccagagcaaaccttgcttgaagccgagcacgacttacagcgtgcatttgccctggcgcctacccatctttcctattatcagctcacccttgaacccaataccgtcttctacgctcgcccgccgcagggcattcccgatgacgatgccgcgtgggagatgcaggagcatacccaacgcctgcttgctgaggctggttaccagcattacgaggtcagcgcttacgcccgtgagggctggcagtgcctgcataatctgaactattggcgctttggagactaccttggtatcggtgccggggcgcatggcaagatcacttccggagtgtcacagcatgtgttgcgccgctggaaatgtaagcatccgtacacctacttggacaacgctggtaccgtctctgcgatcggtggtgatgagattgtgccaacggcacgcttgccatttgaatatatgctcaatctattacgcctgcgcgaaggattccgattacaggattttgctgtacgtacaggactgaccgttgaatcaatccatgcagcattgagagaggctgttgcacgcggttggttacgatgtgaacttgaacacgtcatcccgaccgaattagggttgcgttttgctaacgatgtcatcaacttattcaatgaataa

SEQ ID NO: 11916 - protein, 383 aa, Xylella fastidiosa Ann-1
MLIPPPLSLYVHLPWCVRKCPYCDFNSHQAKGALPFDAYVNALLRDLEYDLPLVWGRVVHSVFLGGGTPSLFPPEAIDRFLQIVAARLRLAPDAEITLETNPGTAEYGRFDRYLAAGINRLSFGIQSFNDAALRRLGRIHDSLQAEHAVKLAQDAGFTNINLDLMYALPEQTLLEAEHDLQRAFALAPTHLSYYQLTLEPNTVFYARPPQGIPDDDAAWEMQEHTQRLLAEAGYQHYEVSAYAREGWQCLHNLNYWRFGDYLGIGAGAHGKITSGVSQHVLRRWKCKHPYTYLDNAGTVSAIGGDEIVPTARLPFEYMLNLLRLREGFRLQDFAVRTGLTVESIHAALREAVARGWLRCELEHVIPTELGLRFANDVINLFNE

SEQ ID NO: 11917 - DNA, 1131 bp, Croceibacter atlanticus HTCC2559
  CDS (1)..(1131): transl_table=11
ttgtctagcatatatatacatattccattctgcaaacaagcctgtcattactgcgactttcatttttctacctcattaaagaaaaaagatgagcttgtaaatactcttaaaacagaattatcacttcgtaaagttgagcttaccaatactgtggagtgcatatattttggcggcggcacaccttctctactttctgctgaagagttaaatagccttattgaaactgtttatactaattacaacgtttctgaaactcctgaaattacgcttgaagcaaatccagatgatttaaccaaagacaaaattacagagttaggaaaatctaaaattaataggcttagtattggcattcaatctttttttgaagacgatttaaaactgatgaatcgtgctcataatgctaaagaagccttacaatgtattgaattttcaaaaactgaatttgataacatctcaatagatctcatttatggggttccaggaatgacaacccaaaaatggaaagagaatctcaacattgctctacaacttgatataccacatatttctagttatgcgcttactgttgagcccaatactgcacttaaacgctttatagaaaaaggtgttgtgcctccagttgatgatgatttagcaaaacaacattttgatattcttgttgaaacactgcaacaagcaggctatagtaattatgagttttcaaactttggaaaacaaggatatcactctaacaacaatacggcatactggacaggtaaatcttatcttggcataggtccttctgcacatagctataatggcaaacaacgaagttggaatataaataacaatccaaaatacattaaaagtatacaacaaggaattatccctaatgaggttgaaacgttatctgttacagacaggtacaatgaatatgtcatgacaggcttacgcaccatttggggaatttcacttagtaaaattgaaaaggaatttggcctaaattttaaaacttacgtcttacaacaggccaaatattttatagaagatcatcttttatttttagacggagataccattattgtaacaaaaaaaggtaaatttttaagtgacggaattgcttcagaattatttatgctgaatttaaaatag

SEQ ID NO: 11918 - protein, 376 aa, Croceibacter atlanticus HTCC2559
MSSIYIHIPFCKQACHYCDFHFSTSLKKKDELVNTLKTELSLRKVELTNTVECIYFGGGTPSLLSAEELNSLIETVYTNYNVSETPEITLEANPDDLTKDKITELGKSKINRLSIGIQSFFEDDLKLMNRAHNAKEALQCIEFSKTEFDNISIDLIYGVPGMTTQKWKENLNIALQLDIPHISSYALTVEPNTALKRFIEKGVVPPVDDDLAKQHFDILVETLQQAGYSNYEFSNFGKQGYHSNNNTAYWTGKSYLGIGPSAHSYNGKQRSWNINNNPKYIKSIQQGIIPNEVETLSVTDRYNEYVMTGLRTIWGISLSKIEKEFGLNFKTYVLQQAKYFIEDHLLFLDGDTIIVTKKGKFLSDGIASELFMLNLK

SEQ ID NO: 11919 - DNA, 1158 bp, Sulfitobacter sp. EE-36
  CDS (1)..(1158): transl_table=11
ttgactgaggattggcgccaggggggctttggcctttatatccattggccgttttgcgaggcgaagtgcccctattgtgactttaacagccatgttagtcgcacaatcgaccaacgggcttggcgcgatgcctatctggcagagcttgaacgcggcgccgccgaaacccaagggcgcgtcttgaacgccgtctttttcggcggtggcacccccagcctgatggaccccgatgtcgtcgccgatgtcatcgccgcgatccgtcgactgtggcccacggcgaatgatctggaaatcacgcttgaggcgaaccccggttcggttgaggccgtccgttttgccgccttccgtcaggcgggcgtcaaccgcatttcaatggggatacaggccttgaatgacgcggacctgaaacgtctgggccgcatccatacggttgacgaagggcttgccgcttttgacatcgcccgtaatacctttgaacgcgtcagttttgacctgatttatggtcgccagaaccagggtttggccgactggcggaccgagctgaaacaggccctatcgctagcgatagaccatatgtcgctgtatcaactgaccatcgaacaaggcaccgcctttggcgatcgctatgcagtgggaaagctgcgcggattgcccagcgatgatctgggtgccgatatgtatgcggccactcaggatatttgcggcgagatgggcatgccctcttacgaggtatcgaaccacgcccgcgacggggcgcaatcgcggcacaatctgatctactggcgctacggtgattatcttggcatcggtccgggggcccacgggcgcttgacccaaaacggcaatcgctttgcgaccgaatgttttagcaaccccaaacgctggcttgacgctgttgccagcggtgccaccgaaaagccccgcgagcttttgacgaccgaagatcaggggagcgagtttctgatgatggggctgcgtctgaaagaaggcgtggatctgcgccggtacgaggcgctttccggcgcaccgctttcgacaaaaaaaatcacccagatgcaggacatcgggatgatttctagggataaagaccagctttatgtgacggatcagggctttatggtgctaaacgcgatcctggccgagcttttgtcggattaa

SEQ ID NO: 11920 - protein, 385 aa, Sulfitobacter sp. EE-36
MTEDWRQGGFGLYIHWPFCEAKCPYCDFNSHVSRTIDQRAWRDAYLAELERGAAETQGRVLNAVFFGGGTPSLMDPDVVADVIAAIRRLWPTANDLEITLEANPGSVEAVRFAAFRQAGVNRISMGIQALNDADLKRLGRIHTVDEGLAAFDIARNTFERVSFDLIYGRQNQGLADWRTELKQALSLAIDHMSLYQLTIEQGTAFGDRYAVGKLRGLPSDDLGADMYAATQDICGEMGMPSYEVSNHARDGAQSRHNLIYWRYGDYLGIGPGAHGRLTQNGNRFATECFSNPKRWLDAVASGATEKPRELLTTEDQGSEFLMMGLRLKEGVDLRRYEALSGAPLSTKKITQMQDIGMISRDKDQLYVTDQGFMVLNAILAELLSD

SEQ ID NO: 11921 - DNA, 1158 bp, Roseovarius nubinhibens ISM
  CDS (1)..(1158): transl_table=11
ttgactgaggattggcaacagggcggctttggcatctatgttcattggccgttttgccaatcgaaatgcccctattgcgacttcaacagccacgtcaccgcgtcaattgatcaggatgcctggcttgaaagctatctagctgaaattaaaagatattccgatctgttgccggggcgggttgtcaactcgatcttcttcgggggcggcacaccgagcctgatgcagccgcatgtcgtgggcggtgtgattgacgcgatcggcaaaggctggaccctcgccaatgatgtcgagatcacgctcgaggcgaaccccggctcggtcgaagccgggcgctttctcggctatcgcgaggcgggggtaaatcgcatttccatgggcattcaggcgctcaatgacccggatttgcgccgcttgggccgtctccacagcgtctctgaggcgcttcaggccttcgatgtggcccgcagcaccttctctcgcgtcagttttgacctgatttatgcccgccaagaccagactctggccgattgggaggcggaattgacccgcgcgctcacctatgcggtcgatcatctctcgctctatcagctgaccatcgagcaaggcaccgcctttggcgaccgctacaatcgcgggctgctcaaaggtctgcccgccgatgacagcgccgcggatatgtatgatctgacccaaaccatctgcgcagatcacggcatgcccgcctatgagatctcgaaccacgccggccccggcgcgcaatcgcggcacaatctgatctactggcgctatggcgattatgtcggcatcggccccggtgcccatggccggatcacggttggcggtcgtaaattcgcgaccgaggcccatcgcgcccccggtaaatggctcgcagaggtcaagaacggctcgggcgacagcgccaaaaatgaggtgattgggccggaacagggtctggaatacctgttgatgtgcctccgcctgacggaaggtctcgaccgggatcgctatcgaacactcgcgcagcgcgactttgcgcccgataccctcgctgagcttcgcgacatgggcatgatcgtggccgatgaccagaacctgcggttgaccgaaaaggggcgccccgtcctcaatgcaattctcgccgagttggcaggcgactga

SEQ ID NO: 11922 - protein, 385 aa, Roseovarius nubinhibens ISM
MTEDWQQGGFGIYVHWPFCQSKCPYCDFNSHVTASIDQDAWLESYLAEIKRYSDLLPGRVVNSIFFGGGTPSLMQPHVVGGVIDAIGKGWTLANDVEITLEANPGSVEAGRFLGYREAGVNRISMGIQALNDPDLRRLGRLHSVSEALQAFDVARSTFSRVSFDLIYARQDQTLADWEAELTRALTYAVDHLSLYQLTIEQGTAFGDRYNRGLLKGLPADDSAADMYDLTQTICADHGMPAYEISNHAGPGAQSRHNLIYWRYGDYVGIGPGAHGRITVGGRKFATEAHRAPGKWLAEVKNGSGDSAKNEVIGPEQGLEYLLMCLRLTEGLDRDRYRTLAQRDFAPDTLAELRDMGMIVADDQNLRLTEKGRPVLNAILAELAGD

SEQ ID NO: 11923 - DNA, 1155 bp, Oceanicola batsensis HTCC2597
  CDS (1)..(1155): transl_table=11
ttgcctgaagactgggaagccggcgggttcggcatctacattcactggcctttctgcgaggccaagtgcccctattgcgatttcaactcgcatgtctcgcgcagcatcgaccaggaccgctggctctcggcctacctctccgaactcgaccgccaagcggccgaggtgcccggccgcgtggtgagctcggtcttcttcggcggcggaacccccagcctgatggacccgcacgtggtcggtgccgttctcgatcgcatcgcccggctctggccacaggccaacgaccccgaaatcaccctggaggccaaccccggttccgtagaatcctcccgattcagagcctaccactctgccggagtgtcacgtgtgtcgatggggtttcaggcgatgaacgacggcgaccttcgccgcctcggccgcctccacaccgtcgccgaggcgctgagggccttcgacatcgcgcgcagttgtttcgaacgggtgagctttgacctgatctatgcccggcaggaccagacccccgaagattggcagaaagagctggaacaggctcttgaactggccgtcgatcacctctcgctctaccagttgacgatcgaggaaggcacggccttcggggaccgctaccgcatcggaaagcttagggggctgccggacgaagatgccgcggcgaccatgtacgagatcacccaggcggttaccgctgcggccggcttcgaaccctacgaggtcagcaatcatgcccgtcccggagcggaatcccggcataacagtctctactggcgctacggcgactatgtcgggatcgggcccggagcgcacggccgtctgaccctcggcggcaaaagaaacgccaccgaagcgatccggatgcccgatggctggttgaaggcggccgaacaaggcaatggcgacaagcggcgaacgcctctgtcaccctcggaccaggctacggaattcctcctgatgggactacggttgaccgaaggcgtcgacatgatgcgctacacgcgcctcgccgggcgccccctgtcgcaatcttcggttctggacctatctgaaatgggcatgatcgaaaccgacggccaaaggctccgtgtctcgcctcagggtcgtctcgtgctgaacgccgtgattgcccgtctgttggagtga

SEQ ID NO: 11924 - protein, 384 aa, Oceanicola batsensis HTCC2597
MPEDWEAGGFGIYIHWPFCEAKCPYCDFNSHVSRSIDQDRWLSAYLSELDRQAAEVPGRVVSSVFFGGGTPSLMDPHVVGAVLDRIARLWPQANDPEITLEANPGSVESSRFRAYHSAGVSRVSMGFQAMNDGDLRRLGRLHTVAEALRAFDIARSCFERVSFDLIYARQDQTPEDWQKELEQALELAVDHLSLYQLTIEEGTAFGDRYRIGKLRGLPDEDAAATMYEITQAVTAAAGFEPYEVSNHARPGAESRHNSLYWRYGDYVGIGPGAHGRLTLGGKRNATEAIRMPDGWLKAAEQGNGDKRRTPLSPSDQATEFLLMGLRLTEGVDMMRYTRLAGRPLSQSSVLDLSEMGMIETDGQRLRVSPQGRLVLNAVIARLLE

SEQ ID NO: 11925 - DNA, 1152 bp, Erythrobacter sp. NAP1
  CDS (1)..(1152): transl_table=11
ttggcacgcgccctctacatccactggcccttctgcgcgaagaaatgcccctattgcgacttcaactcgcatgttcgcgagagcgtggacatcgacctgtgggaacgcgcgctcattgccgacttgcgcgctgaggcgcgtgaaggaggctatgagaaactgacttcgatcttttttggaggcgggaccccgtcgctgatgccgcccaaactggtttcagctttgctgaacgaagcagagaaactctggggctttgcacccgagatcgagatcactcttgaagccaacccctcgtcggtagaggcggccaacttcgccgcgcttgcgtcggctggcatcaatcgcgtgtcacttggagtgcagtcgcttgacgacaagaccctacgctggcttgggcgacttcatggcgcgcaggaggcgatcggagcgcttgacgttgcgcaggctcattttgcgcgtgtcagttttgacctgatctatgccctgcccgaccaaactgctgagcaatgggaagcgcaactcacaagggcactatcgttcggcacctcgcatatgtcgctttatcagctcacgattgagcccggcacgcgtttcgaaactgacgttcgccttgggcgatttgctccgctggacaatgacgaggcagcagagctgtttgcactcacgcagtccctcacatcggctgcaggattgccagcatatgaaaccagcaatcacgcgcacccagatgacgaaagccgccacaatctcacttattggcggtaccaggattacgcaggcgttggtccaggtgcccatggccgacgtggcgggttcgctaccgtgaggcacaaaaagccggagaattttctcaaggcggtgaacgaaagagcgcacggcatttcggagcagcgtcttctggacccgaaggaagcggcgtccgaggccttgatgatggggctaaggctcgttgaaggggtcgacctgtcggccttggaggcgcgttttcggcaggatcgcggcgaaatggtcgatgcaggcaaactcaagcacctgaaggacatcggcctgatctggcaggaagacgagcgcattggacttaccgatgccgggcgcccagtccttgacgcggtcctgggcgacttgcttgccgaagcactggtgcaggcgtga

SEQ ID NO: 11926 - protein, 383 aa, Erythrobacter sp. NAP1
MARALYIHWPFCAKKCPYCDFNSHVRESVDIDLWERALIADLRAEAREGGYEKLTSIFFGGGTPSLMPPKLVSALLNEAEKLWGFAPEIEITLEANPSSVEAANFAALASAGINRVSLGVQSLDDKTLRWLGRLHGAQEAIGALDVAQAHFARVSFDLIYALPDQTAEQWEAQLTRALSFGTSHMSLYQLTIEPGTRFETDVRLGRFAPLDNDEAAELFALTQSLTSAAGLPAYETSNHAHPDDESRHNLTYWRYQDYAGVGPGAHGRRGGFATVRHKKPENFLKAVNERAHGISEQRLLDPKEAASEALMMGLRLVEGVDLSALEARFRQDRGEMVDAGKLKHLKDIGLIWQEDERIGLTDAGRPVLDAVLGDLLAEALVQA

SEQ ID NO: 11927 - DNA, 1290 bp, Synechococcus sp. RS9917
  CDS (1)..(1290): transl_table=11
atgtccgcaccccgtagcgcctatgtgcacatccccttttgccatcggcgttgcttctactgcgacttcgccgtcgtgcccctgggagacagggcggatgcggcggcggggcccggacgggcctcgatccaggcctatctcgccctgctgcatgaggagatcggcctctcccctgcagggccgcccctggccacggtgtatgtgggcggcggcacaccctccctgctcacccccagccagatcgccgatctgctgcagcggctgacgcagcgtttcggtctgcaggacggggcggagatcaccctggagatggatccggccagttttgatctgcagcacctggaggccgtcctcgacgccggcgtgacccgggtgagcctgggcggacagagttttgatgatggggtgctggccagcctcggacggcgccatcgccgggccgatctgcaggccgcctgcacctggctgcaacgggctttgctgcagggacggctgacgagctggagcctcgacctgatccgcaatctgccggggcagaccgaggcgcaatggcagcagcagctggagttggccctggccgctggcgtgccccatctctccgtctacgacctgtcggtggagcccggcaccgtcttcgcctggcggcagcaaaggggcgagctggtgctccccgatgacggggaagcggtggagcggattcgacagaccggcgagcgcctgcgacaggcggggttctgccgctatgaggtgtcgaattacgcccggcctgggcatgcctcgcgccacaaccgtgtgtattggagcggtgccggctggtggggcttcgggcttggggccaccagtgccccctggggccggcgcctggcgcggccgcgcatccgtgaggcctacgcccgctggttgatgacgcaacggcagcagcccgactgttcgcttctggcgtcagcagcggtgccgctgcccctcgatgacctgctcttggtggggctgaggcgacgcgagggcgtcgatctgtggcgtctggctgctgccagcggctgggatgcggccacatgcgagcgtcatctgcccgatcttgagcgccgctggttggagccggaagcccagggcctgattgagtcgtgcggacgccgctggcgcctgcgagatcccgagggtctggccctcagcaatcaggtgctggtggaggtggtgcgctggtgggagaccctgccggctgccgttgtgcagtcacccagccctgaagcgcctccaccagcagttgccgccccgggatcagggcggggctga

SEQ ID NO: 11928 - protein, 429 aa, Synechococcus sp. RS9917
MSAPRSAYVHIPFCHRRCFYCDFAVVPLGDRADAAAGPGRASIQAYLALLHEEIGLSPAGPPLATVYVGGGTPSLLTPSQIADLLQRLTQRFGLQDGAEITLEMDPASFDLQHLEAVLDAGVTRVSLGGQSFDDGVLASLGRRHRRADLQAACTWLQRALLQGRLTSWSLDLIRNLPGQTEAQWQQQLELALAAGVPHLSVYDLSVEPGTVFAWRQQRGELVLPDDGEAVERIRQTGERLRQAGFCRYEVSNYARPGHASRHNRVYWSGAGWWGFGLGATSAPWGRRLARPRIREAYARWLMTQRQQPDCSLLASAAVPLPLDDLLLVGLRRREGVDLWRLAAASGWDAATCERHLPDLERRWLEPEAQGLIESCGRRWRLRDPEGLALSNQVLVEVVRWWETLPAAVVQSPSPEAPPPAVAAPGSGRG

SEQ ID NO: 11929 - DNA, 1221 bp, Synechococcus sp. WH 5701
  CDS (1)..(1221): transl_table=11
gtgaccgcaccccgcgccgcctacctccacatccccttctgccaccgccgttgcttctactgcgacttcgcggtggtgccgctgggggaccacgccgacggtgcccattccgcctcgatcgctgcctatctgccgctattgcaggccgagatcgccgcttccccgaacccggcccctctctccactgtgtacatcggtggcggcaccccctcgctgctcaccccagagcagatgggggagctgctggatggcctgcgccagcgcttcggcttctcccctggagctgagatcaccctggagatggatccggccagctttgatcgcccgcggttggaggggatgctggcgctgggcatcaaccgggtaagcctgggggggcagagcttcgatgacgcggtgctggagcgcctgggccgtcgccatcgccgtcgacacctgctccaggccgccgcctggctgcgccaggcccaggccgccgctgatctggccagttggagtctggatctgattcaggggcttcccgagcaggatctgccccactggcggcagcagctgcagcaggccctcgagctggagccaccccatctctccgtctacgacctgatcgtggaacccggcactgtgttcgagcgcctgcagcagcgcgggcagctgcccctgccggatccggatctgggggccgacctgatggacctcaccggggagcagctgcggagcgccggctacggccgctacgagatctccaattacgccctgcctgggcacgcctcccgccacaaccgcgtctactggagcggggccggttggtggggtttcggcctcggggccacgtcggccccctacggccagcgcctggccaggccccgcacccgggaggcctatgccgcctggctgcagaccggagcggccagcacggcggcggggcagccgccgttcgatgagtggctgatggtgggtctgcgccggcgcgaaggggtgaacctggagcggctcgccaaggccgcgggcctgagcatggctgatcgcgcgtcgctgctgggctggatggccccctggcgcgagcgggggctgctgctggtggagggccggcgctggcggctggcggatccgcagggactggccctcagcaatgcggtgctgagggagcttctggcctggtgggaagcccatcaacctcccgagacgcaactggcggagtcgccgattgcagccagcccctga

SEQ ID NO: 11930 - protein, 406 aa, Synechococcus sp. WH 5701
MTAPRAAYLHIPFCHRRCFYCDFAVVPLGDHADGAHSASIAAYLPLLQAEIAASPNPAPLSTVYIGGGTPSLLTPEQMGELLDGLRQRFGFSPGAEITLEMDPASFDRPRLEGMLALGINRVSLGGQSFDDAVLERLGRRHRRRHLLQAAAWLRQAQAAADLASWSLDLIQGLPEQDLPHWRQQLQQALELEPPHLSVYDLIVEPGTVFERLQQRGQLPLPDPDLGADLMDLTGEQLRSAGYGRYEISNYALPGHASRHNRVYWSGAGWWGFGLGATSAPYGQRLARPRTREAYAAWLQTGAASTAAGQPPFDEWLMVGLRRREGVNLERLAKAAGLSMADRASLLGWMAPWRERGLLLVEGRRWRLADPQGLALSNAVLRELLAWWEAHQPPETQLAESPIAASP

SEQ ID NO: 11931 - DNA, 1299 bp, Synechococcus sp. WH 7805
  CDS (1)..(1299): transl_table=11
atgtccgcacttgcgcccagaagtgcgtatctccatattcccttctgccatcgccgctgcttttactgcgatttcgcagtggttcctcttggcgatcgcgtcaatgcccagaacggtcccggcagtctcaccatcaaggcttatctggagctgattcttaaggagatccgctcgtcgccaccaggtcctcccttggcgacgatctacatcggcggcggcacgccatctctgctcacgcctgatcaggtgcgatgtttgctcgacgctctcgctgatcggtttggcgtgcagagaggggctgaaatcacgttggagatggatccagccagcttctctcttgaggaactcagggcgctggtccgccacggcgtgaatcgggtgagccttggtgggcagagctttgatgacgttgttctcgctgggctgggacgccggcatcgccgcaaggatgtgcttgaggcctgccactggatgcagcggtttctgcaagacggacgtcttcggagctggagccttgatctgattcgaaatctcccgaatcaagatgatgaggcctgggctgatgtgctgacgcaggctgtggagctgcagcctccgcatttatccatttacgacctcagcgttgaacccggcaccgtgtttgccaggcgcgagcagcagggggtgctcatgcttcccgatgaggacggtgcggccgatcggatcgctttcacgacgcagtatctctctgacgcgggctattgccgctacgagatttccaatttctccagaccggggcacgcctcccgccataaccgtgtgtactggagcggtgccggatggtgggcttttggccttggcgctaccagtgcaccctggggagagcgtttcgccaggccgcgcacccgggaggcttatgccgagtggcttaaccggcaagaactggatgggccccattcctctctgttgtcacagagtgccactccgctctcgttggaagaccgactattggtggggctgcgttgccgagaaggggtggatctgcagcagcaggctcaacactgtgggtggactgcccatcgctgttctttgcatcttccccagctggcagaacgctgggagcagttcctgaaccagggcttgatggagagacgagggggacgctggcgactcacagacccccttggcatggccctcagcaatcagatcctggtggaggtggtgcagtggtgggagtcgttgccgatccacgctgaccctccaaccaggaccggagtgcttcgacgcccagagtcctcccctccaggagtgcagggctga

SEQ ID NO: 11932 - protein, 432 aa, Synechococcus sp. WH 7805
MSALAPRSAYLHIPFCHRRCFYCDFAVVPLGDRVNAQNGPGSLTIKAYLELILKEIRSSPPGPPLATIYIGGGTPSLLTPDQVRCLLDALADRFGVQRGAEITLEMDPASFSLEELRALVRHGVNRVSLGGQSFDDVVLAGLGRRHRRKDVLEACHWMQRFLQDGRLRSWSLDLIRNLPNQDDEAWADVLTQAVELQPPHLSIYDLSVEPGTVFARREQQGVLMLPDEDGAADRIAFTTQYLSDAGYCRYEISNFSRPGHASRHNRVYWSGAGWWAFGLGATSAPWGERFARPRTREAYAEWLNRQELDGPHSSLLSQSATPLSLEDRLLVGLRCREGVDLQQQAQHCGWTAHRCSLHLPQLAERWEQFLNQGLMERRGGRWRLTDPLGMALSNQILVEVVQWWESLPIHADPPTRTGVLRRPESSPPGVQG

SEQ ID NO: 11933 - DNA, 1110 bp, Pseudoalteromonas tunicata D2
  CDS (1)..(1110): transl_table=11
gtgcacattccttggtgtgtacaaaaatgcccttattgtgactttaatagccacggccaaaaaggtgagatcccgcaggcagattatgtggcgcatttactggctgatttacgtcaagatttgcactatgcccaaggacgtaaactgcactctatttttattggcggtggcacaccaagcttaatgagcgaacaatcaattagtgaattattacacggtattgaagcgctgattccttttaatgaacaaatcgaaataaccctcgaggccaaccctggcacagttgaagcaggaagattccaaggttacgtaaaagccggagtcaaccgaatttcaatcggcgtgcaaagcatgcaaaacgacaaattaaaagcccttggccgtattcatgatgctaatgaagctgtaaaagctgctgagcaagcccatcttgcgggtctaaacagctttaaccttgatttaatgcacggattacctggccaaagcattgatgatgcgctctctgatttaaaacaaattattgccttacaacctaaacacatttcatggtaccagctcaccattgagcccaatactcagtttcattcaaagccgcctgttttacccgaagacgacattttatgggatattcaagagcaaggtcatgcaattttagaggcggctggatatgagcaatatgaagtgtcgggctacagtaaagcgggctaccaatgtcagcataatctcaattactggcgctttggtgactatttaggcatcggctgtggtgcacacggcaaaatcactctcccagcacaaaataagctgattcgtaccgaaaaagtaaaacatcccaaaggctatatggaagagactcagccttatttatacaaacaatggcaagttgagcaaagcgatttatcgtttgaattttttatgaatcgccttcgtttacacgaaagctgtgcaaaaacagcatttagtgaactaaccggtttacctatttcgcgcttagaaggtgcttttgataaagccatcgaacaaggattattgcaacaaaacgcagaagtttggcaagtgaccgcaaaaggacgccgttacctcaatgacttgttagaattgttcgtctag

SEQ ID NO: 11934 - protein, 369 aa, Pseudoalteromonas tunicata D2
MHIPWCVQKCPYCDFNSHGQKGEIPQADYVAHLLADLRQDLHYAQGRKLHSIFIGGGTPSLMSEQSISELLHGIEALIPFNEQIEITLEANPGTVEAGRFQGYVKAGVNRISIGVQSMQNDKLKALGRIHDANEAVKAAEQAHLAGLNSFNLDLMHGLPGQSIDDALSDLKQIIALQPKHISWYQLTIEPNTQFHSKPPVLPEDDILWDIQEQGHAILEAAGYEQYEVSGYSKAGYQCQHNLNYWRFGDYLGIGCGAHGKITLPAQNKLIRTEKVKHPKGYMEETQPYLYKQWQVEQSDLSFEFFMNRLRLHESCAKTAFSELTGLPISRLEGAFDKAIEQGLLQQNAEVWQVTAKGRRYLNDLLELFV

SEQ ID NO: 11935 - DNA, 1164 bp, Photobacterium sp. SKA34
  CDS (1)..(1164): transl_table=11
atgcttgtacctccaccactgagtttatatgtccacatcccttggtgtgtacaaaagtgtccttattgtgatttcaactctcacgccttaaagacagatcttcctgagcttgattatattgatgccttaattgacgacttagaaaccgatcttagtgcttatcagctaatcaatggggcacgtcctctacactcaatttttattggtggaggcacgcctagcttgatctctccaagtgagattggtcgtttattaaaagccattgagcaacgcattctatttagtgatgatattgaaatcactatggaagccaaccctggcacggtggaggcgggtcgttttgaagcttatcgccaagccggtgtaaaccgtatttctattggtattcaaagttttcaaaatgaaaagctcgaccgtcttggccgtattcatggcgcagatgaagcgattcgtgctgctgggcttgccaagaaggcgggattaaatagctttaatgtcgatcttatgcatggcttaccggatcaaagcgtgagtgatgcgatcagtgatttaaaacaagcgatcgcactcgatccaccgcacttgtcttggtatcagctgacaattgaacccaataccctgtattactcaaaaccaccgacattgcctgatgatgatgacttgtgggatatttttgagcaaggtcatcagcttttaacagaagccggttatcagcaatatgaaatatcaggctacagcaagacgggaaaacaatgtcagcataaccttaactattggcgttttggtgattaccttggcattggttgtggcgcacatggcaaaattagttttgctgatgggcaaattatccgtaccgttaaagtcaaacatcctcgtgggtatttacaagcagataagccatatttaacacaagagaatcaggttgctgatggcgaacgtccattcgagttctttatgaatcgttttcgtttactagaatcctgtccaaagcaagattttgttgcaagaactggtttagccttaacaaccatagagccgacaattgattgggcgataacgcaaaactatctccaagatacaggcgatcattggcaaataaccgaacacggaaaattattcttaaatgatctcttagcagccttcgttgacgatgagaacgaataa

SEQ ID NO: 11936 - protein, 387 aa, Photobacterium sp. SKA34
MLVPPPLSLYVHIPWCVQKCPYCDFNSHALKTDLPELDYIDALIDDLETDLSAYQLINGARPLHSIFIGGGTPSLISPSEIGRLLKAIEQRILFSDDIEITMEANPGTVEAGRFEAYRQAGVNRISIGIQSFQNEKLDRLGRIHGADEAIRAAGLAKKAGLNSFNVDLMHGLPDQSVSDAISDLKQAIALDPPHLSWYQLTIEPNTLYYSKPPTLPDDDDLWDIFEQGHQLLTEAGYQQYEISGYSKTGKQCQHNLNYWRFGDYLGIGCGAHGKISFADGQIIRTVKVKHPRGYLQADKPYLTQENQVADGERPFEFFMNRFRLLESCPKQDFVARTGLALTTIEPTIDWAITQNYLQDTGDHWQITEHGKLFLNDLLAAFVDDENE

SEQ ID NO: 11937 - DNA, 1143 bp, Oceanospirillum sp. MED92
  CDS (1)..(1143): transl_table=11
atgagcctgcaactaccgccactctcactctacattcatgtaccttggtgcattcgtaaatgcccatactgtgattttaactcccatgcacagcgtggagagctcccagaacaggcctacattgaatgtctgcttgaagatctgcgaagtgaacttcactttgctcagggcagaaccattcagagcatttttatcggtggcggcacccccagcctgttccaggcagacagttttaaaaggctcctgctgggtatcaacgcaatcattcctatcgagcgggatgcagagatcacgcttgaagccaaccctgggacctttgagcaagaaaagttcataggctacaaagatgccgggattaacagattatcaatcggtattcagagctttaataataaccacctacaagccctgggccgtattcattcatcagacgaggcggttcgagcagccacattagctcgagagatttttccccgattaaatctcgatttgatgcacgggctgcctagtcagtccgaaaccgacgctattgctgaccttcaacaagcgatcgatttagaccctgatcacctctcctggtatcagctgacgatcgaacccaatactgagttctactctaaatctccgtcactccctgtagatgaaaccttgtggggcatccaggaacaaggtcaacagctcctggcggaccacctattagcgcaatatgagatctccgcttacgctaaaggcgaacagtttaaatcccgccacaatctcaactactggagcttcggggactatatcggcatcggggcgggagcacatggcaaaataacattgcccgatgaagaccgtatcatccgccgctggaagcaaaaacaacccaaagcctatatgcagtcaaccacgcgattgacgggcgatcaacctatcaccagggaagagcgtgcatttgaatttatgatgaatgccctcagactttatcacggtgttccagttgaactcttcgccgagaggacaggcctgccgttaactgacgtttcagcattacttgataatgcgcgcggcaaaggcttacttgaaaaaggcaccgacagactggcccccactcagcatggaaggctttttttaaacgacctcctatcacttttcctacattaa

SEQ ID NO: 11938 - protein, 380 aa, Oceanospirillum sp. MED92
MSLQLPPLSLYIHVPWCIRKCPYCDFNSHAQRGELPEQAYIECLLEDLRSELHFAQGRTIQSIFIGGGTPSLFQADSFKRLLLGINAIIPIERDAEITLEANPGTFEQEKFIGYKDAGINRLSIGIQSFNNNHLQALGRIHSSDEAVRAATLAREIFPRLNLDLMHGLPSQSETDAIADLQQAIDLDPDHLSWYQLTIEPNTEFYSKSPSLPVDETLWGIQEQGQQLLADHLLAQYEISAYAKGEQFKSRHNLNYWSFGDYIGIGAGAHGKITLPDEDRIIRRWKQKQPKAYMQSTTRLTGDQPITREERAFEFMMNALRLYHGVPVELFAERTGLPLTDVSALLDNARGKGLLEKGTDRLAPTQHGRLFLNDLLSLFLH

SEQ ID NO: 11939 - DNA, 1134 bp, Flavobacteria bacterium BBFL7
  CDS (1)..(1134): transl_table=11
atgagtggtatatatatccatattcctttttgcaaacaagcctgtcactattgcgattttcattttagtactaacatgaagtataaaaatgatatggttgccgcactatgtgaagaaatacgcttacgcaaaaacgaatatgaagataccactgtgcaaactatctacttcggtggtggaacgcctagtgtgcttgagctatctcaaatcaatcaaatcattgatacagtgtatcaaaattatcgagttagcgacaatccagaaatcacactagaggcaaatcccgatgatataactagtgaaaaactagaacaactaaatgaatcaccagtaaatcgtttgagtataggaattcaatccttttttgaagaagatttaaagttaatgaaccgtgctcacaatgctcaagaagcactgtcttgtatagttcaagcacaaatttattttgataatatatctatagacctcatttatggtattcccgacatgacggtggatcgatggagagaaaatatctataaagcaatagaactaggtgttccacatatatccagttatgctttaactgtagaagataatacagcactcaaatcattcattgaaaaagggctcattcctaaggtagatgatgaactcgcccaagagcatttccatatacttcttgatgcgatgcaactgcacggttatagcaattatgagttttcaaactttggtaaagaaggctatttttcaaaaaataataccgcatactggaccggtaaaagttatataggtataggaccaagtgcacacagttttgatgggaaaagacgcggctggaacattaataataatgtaaagtatcttaaatctattcaagctagtgaattacctatcgagatagaagaactgacaactgtagatcgttataatgaatatgttatgactggattacgtactatatatggtgtttcattaaataaaatagaacaggaatatggtgcaaattttaaagattacttattagatcaagcatctgattttttaaaagaccatttactatatttagatggcgatacattaatagtaactcgtaagggtaagtttttaagtgatggaatcgctagtgagttattcatgctcaatttgaattaa

SEQ ID NO: 11940 - protein, 377 aa, Flavobacteria bacterium BBFL7
MSGIYIHIPFCKQACHYCDFHFSTNMKYKNDMVAALCEEIRLRKNEYEDTTVQTIYFGGGTPSVLELSQINQIIDTVYQNYRVSDNPEITLEANPDDITSEKLEQLNESPVNRLSIGIQSFFEEDLKLMNRAHNAQEALSCIVQAQIYFDNISIDLIYGIPDMTVDRWRENIYKAIELGVPHISSYALTVEDNTALKSFIEKGLIPKVDDELAQEHFHILLDAMQLHGYSNYEFSNFGKEGYFSKNNTAYWTGKSYIGIGPSAHSFDGKRRGWNINNNVKYLKSIQASELPIEIEELTTVDRYNEYVMTGLRTIYGVSLNKIEQEYGANFKDYLLDQASDFLKDHLLYLDGDTLIVTRKGKFLSDGIASELFMLNLN

SEQ ID NO: 11941 - DNA, 1215 bp, delta proteobacterium MLMS-1
  CDS (1)..(1215): transl_table=11
atggtggccattttgtccgacccaacccctgccgcagtcaacgcgccgcttgccccccgggaggcggccaccgccccggggatttacctccatatcccgttttgccaccgcaagtgtgactactgcgcctttgtctcgctgccctgccggcggccgccggtttcctatctgcaggctctgcggcgccaggcccggcaactggcggagctgccctggagccggcggcaaaccttcggcaccatctttatcggcggcggcacccccaccagctatccggccgcgcaactggcggccctgctggccgagttgcgctccctgttttgctgccggggcgctgccggcgatgagccggaaatcaccgtcgagtgcaatcccggcaccattaccctggaaggtctgcggcaactgcgggccgccggggtcaaccggctcagtatcggcatccagagctttgccgaccacctgctgacggcggtggggcggggccatgaccgggccgccgccctggccgcccttaaactggtgcgccaggtcggttttgaggattacaacctggatttgatgtatggcctgcccggccagagcatcgccgatttcaaggccgacctgctcaccgccctggaggccgaaccgacccacctggcgctctaccagttgacccccgaagcgggcaccccgctggccgtccgtctggaggccggccagcaggccctgcccagcgatgaggcctgcgccaccatggaagcccaggctcgggaactgcttaccgaaatggtctacgagcagtacgaggtggccaattactctctgccgggctaccagtgccgccacaaccttaactactggcacaacggctcttacctggggctgggggcggcggcctttagcagtcttgccggactgcggctgggtaatgttaacgggccggggcactatcgccgccggctggccgccggccgggccccctacgccaccgccgaggccctggggcgggaggccgccttccgggagacggtgatcatggggctgcgtctgagccggggggtggagatcgccgagttgcagcgccgctttgctttgacccccgccgactattatggaacaatgctgaacaatctgctggccgccggcctgctggtcgccgataacggccggctggccttaagccggcgggctttcccgctggccaatcaggtgttgtcccaattggtctaa

SEQ ID NO: 11942 - protein, 404 aa, delta proteobacterium MLMS-1
MVAILSDPTPAAVNAPLAPREAATAPGIYLHIPFCHRKCDYCAFVSLPCRRPPVSYLQALRRQARQLAELPWSRRQTFGTIFIGGGTPTSYPAAQLAALLAELRSLFCCRGAAGDEPEITVECNPGTITLEGLRQLRAAGVNRLSIGIQSFADHLLTAVGRGHDRAAALAALKLVRQVGFEDYNLDLMYGLPGQSIADFKADLLTALEAEPTHLALYQLTPEAGTPLAVRLEAGQQALPSDEACATMEAQARELLTEMVYEQYEVANYSLPGYQCRHNLNYWHNGSYLGLGAAAFSSLAGLRLGNVNGPGHYRRRLAAGRAPYATAEALGREAAFRETVIMGLRLSRGVEIAELQRRFALTPADYYGTMLNNLLAAGLLVADNGRLALSRRAFPLANQVLSQLV

SEQ ID NO: 11943 - DNA, 1215 bp, delta proteobacterium MLMS-1
  CDS (1)..(1215): transl_table=11
atggtggccattttgtccgacccaacccctgccgcagtcaacgcgccgcttgccccccaggaggcggccaccgccccagggatttacctccatatcccgttttgccaccgcaagtgtgactactgcgcctttgtctcgctgccctgccggcggccgccggtttcctatctgcaggctctgcggcgccaggcccggcaactggcggagctgccctggagccggcggcaaaccttcggcactatctttatcggcggcggcacccccaccagctatccggccgcgcaactggcggccctgctggccgagttgcgctccctgttttgctgccggggcgctgccggcgatgagccggaaatcaccgtcgagtgcaatcccggtaccattaccctggaaggtctgcggcaactgcgggccgccggggtcaaccggctcagtatcggcatccagagctttgccgaccacctgctgacggcggtggggcggggccatgaccgggccgccgccctggccgcccttaaactggtgcgccaggccggttttgaggattacaacctggatctgatgtatggcctgcccggccagagcatcgccgatttcaaggccgatctgctcaccgccctggaggccgaaccgacccacctggcgctctaccagttgacccccgaagcgggcaccccgctggccgcccgtctggaggccggccagcagaccctgcccagcgatgaggcctgtgccaccatggaagcccaggcccgggaactgcttaccgaaatggtctacgagcagtacgaggtggccaattactctctgccgggctaccagtgccgccacaaccttaactactggcacaacggctcttacctggggctgggggcggcggcctttagcagtcttgccggactgcggctgggtaatgttaacgggccggggcactatcgccgccggctggccgccggccaggccccctacgccaccgccgaggccctggggcgggaggccgccttccgggagacggtgatcatggggctgcgtctgagccggggggtggagatcgccgagttgcagcgccgctttgctttgacccccgccgactattatggaacaatgctggacaatctgctggccgccggcctgctggtcgccgccaacggccggctggccttaagccggcgggctttcccgctggccaatcaggtgctgtcccaattggtataa

SEQ ID NO: 11944 - protein, 404 aa, delta proteobacterium MLMS-1
MVAILSDPTPAAVNAPLAPQEAATAPGIYLHIPFCHRKCDYCAFVSLPCRRPPVSYLQALRRQARQLAELPWSRRQTFGTIFIGGGTPTSYPAAQLAALLAELRSLFCCRGAAGDEPEITVECNPGTITLEGLRQLRAAGVNRLSIGIQSFADHLLTAVGRGHDRAAALAALKLVRQAGFEDYNLDLMYGLPGQSIADFKADLLTALEAEPTHLALYQLTPEAGTPLAARLEAGQQTLPSDEACATMEAQARELLTEMVYEQYEVANYSLPGYQCRHNLNYWHNGSYLGLGAAAFSSLAGLRLGNVNGPGHYRRRLAAGQAPYATAEALGREAAFRETVIMGLRLSRGVEIAELQRRFALTPADYYGTMLDNLLAAGLLVAANGRLALSRRAFPLANQVLSQLV

SEQ ID NO: 11945 - DNA, 1215 bp, delta proteobacterium MLMS-1
  CDS (1)..(1215): transl_table=11
atggtggccattttgtccgacccaacccctgccgcagtcaacgcgccgcttgccccccgggaggcggccaccgccccggggatttacctccatatcccgttttgccaccgcaagtgtgactactgcgcctttgtctcgctgccctgccggcggccgccggtttcctatctgcaggctctgcggcgccaggcccggcaactggcggagctgccctggagccggcggcaaaccttcggcaccatctttatcggcggcggcacccccaccagctatccggccgcgcaactggcggccctgctggccgagttgcgctccctgttttgctgccggggcgctgccggcgatgagccggaaatcaccgtcgagtgcaatcccggcaccattaccctggaaggtctgcggcaactgcgggccgccggggtcaaccggctcagtatcggcatccagagctttgccgaccacctgctgacggcggtggggcggggccatgaccgggccgccgccctggccgcccttaaactggtgcgccaggtcggttttgaggattacaacctggatttgatgtatggcctgcccggccagagcatcgccgatttcaaggccgacctgctcaccgccctggaggccgaaccgacccacctggcgctctaccagttgacccccgaagcgggcaccccgctggccgtccgtctggaggccggccagcagaccctgcccagcgatgaggcctgcgccaccatggaagcccaggcccgggaactgcttaccgaaatggtctacgagcagtacgaggtggccaattactctctgccgggctaccagtgccgccacaaccttaactactggcacaacggctcttacctggggctgggggcggcggcctttagcagtcttgccggactgcggctgggtaatgttaacgggccggggcactatcgccgccggctggccgccggccgggccccctacgccaccgccgaggccctggggcgggaggccgccttccgggagacggtgatcatggggctgcgtctgagccggggggtggagatcgccgagttgcagcgccgctttgctttgacccccgccgactattatggaacaatgctgaacaatctgctggccgccggcctgctggtcgccgataacggccggctggccttaagccggcgggctttcccgctggccaatcaggtgctgtcccaattggtataa

SEQ ID NO: 11946 - protein, 404 aa, delta proteobacterium MLMS-1
MVAILSDPTPAAVNAPLAPREAATAPGIYLHIPFCHRKCDYCAFVSLPCRRPPVSYLQALRRQARQLAELPWSRRQTFGTIFIGGGTPTSYPAAQLAALLAELRSLFCCRGAAGDEPEITVECNPGTITLEGLRQLRAAGVNRLSIGIQSFADHLLTAVGRGHDRAAALAALKLVRQVGFEDYNLDLMYGLPGQSIADFKADLLTALEAEPTHLALYQLTPEAGTPLAVRLEAGQQTLPSDEACATMEAQARELLTEMVYEQYEVANYSLPGYQCRHNLNYWHNGSYLGLGAAAFSSLAGLRLGNVNGPGHYRRRLAAGRAPYATAEALGREAAFRETVIMGLRLSRGVEIAELQRRFALTPADYYGTMLNNLLAAGLLVADNGRLALSRRAFPLANQVLSQLV

SEQ ID NO: 11947 - DNA, 1128 bp, Desulfitobacterium hafniense DCB-2
  CDS (1)..(1128): transl_table=11
atgccttctctttatatccatgttcctttttgtgtgcagaaatgcaattattgtgctttttattcggagccctggcagagagctaaggctgaggattatttggcaagcttaaaccgcgaggttgtgttaagacagcatgagatttcagaggagattgagaccctttttatcgggggagggacacctacggcattgccggaagcggaattggacgcactcttaagcatcatccatggtaagctgaggtttaaggatggggcggaaaaaactacagaagccaatccggggactcttaccgctgaaaagctccagatcctccatacacaagggatcaatcgcatatctctgggagttcaatcctttaatgacgacttattgaaacggatcggcagaattcatcaagctgaagaggttgcggatggggtgcgcctgatccgggaggcaggctttaagaaccttaatctggatttaatgttcgggctgccggggcagacccaggcaaattggcgggatactttggaagaggctctcaggatccggcctgagcatctttctgtttatgggctgatggtcgaagagggtacgcctatggccctaaattcggaagcgattacgaatttgccggatgatgacagccaggctgagatgtaccacgtggcccgggagattctgggccaggcgggataccggcattatgaagtgtccaattacgccctcccgggctatgaatgccggcataaccttggctactggcgcaggcaggagtatttagggatagggccaagcgccgtgtcttgcctgaataaccatcgttatcagaatgttgaagatattaatgcctatgaaaccatgctatctcaagggaaacttccggtggatccccaggaagatgaatttctttcaaaacatgagcaaatggcagaacttttaatgctgggtctgcgtcttaaagatggggtgaatttgctgcagttcaaaaaggaggtcggtgccgatctttttgaactctatcctgctgttttggagcgttaccttaaggccagtgttttaaaaatcgaagaaggctcccttctcttgcgaccagagtattggtttgtcgccaatggggtgctgcaggaattcgtgtga

SEQ ID NO: 11948 - protein, 375 aa, Desulfitobacterium hafniense DCB-2
MPSLYIHVPFCVQKCNYCAFYSEPWQRAKAEDYLASLNREVVLRQHEISEEIETLFIGGGTPTALPEAELDALLSIIHGKLRFKDGAEKTTEANPGTLTAEKLQILHTQGINRISLGVQSFNDDLLKRIGRIHQAEEVADGVRLIREAGFKNLNLDLMFGLPGQTQANWRDTLEEALRIRPEHLSVYGLMVEEGTPMALNSEAITNLPDDDSQAEMYHVAREILGQAGYRHYEVSNYALPGYECRHNLGYWRRQEYLGIGPSAVSCLNNHRYQNVEDINAYETMLSQGKLPVDPQEDEFLSKHEQMAELLMLGLRLKDGVNLLQFKKEVGADLFELYPAVLERYLKASVLKIEEGSLLLRPEYWFVANGVLQEFV

SEQ ID NO: 11949 - DNA, 1335 bp, Synechococcus sp. RS9916
  CDS (1)..(1335): transl_table=11
atggttcggcttttggcagctcattccagctgcaggcagcatgcaccatcctccgacggatggcctgggcagatgtccgcaccgcgcagcgcctatgtgcacattcccttctgccatcggcgttgcttctactgcgatttcgccgttgtccccctgggggatcacgccggcaccccatccggaaccggcagtgggtcaatccgcacctatctcagccagctgcacaaggaaatcgcccttgcccccaagggtcccccccttgccacgctctacatcgggggcggaacgccctcactgctgacaccaatccagatccgggacctgctggaagccctacgccgccaattcggctttcaagccggcgcggaaatcaccctggaaatggatccagccagctttgacctcagcgatctgcaggccttgatcaaggctggggtgaaccgggtcagcctggggggccaaagcttcgatgatcgggtgttggaaggactcggtcgtcgccatcgccgcggcgacctgcagaagtgctgccgttggctccgggacggcttacgcgatggcgccctgcggagttggagcctggacctgatccgcaacctgcctgaacaaaccctggaggcctggagcgctcagctggaactggcgctgaccaccggtgccccccatctgtcgatctacgacctggccgtggaacccggcacggtgttcgcctggcgccagcagcgcggtgaactacctctgcccgacgatgacctggcggtggcgttgatgaccagcaccagtgaccgactgggaagggctggcttctgccgctacgagatctccaattacgcccagcccgggcacgcctcccgccacaaccgcgtgtattggagtggtgcgggctggtggggtttcggcatgggcgccaccagtgccccctggggagagcgactggcccggccccgcacccgggagggttatgccagctggctcgaggagcagcagcgggggttgcacccctcactgcagcactccatggccgcagcgttgcccctggatgaccggctgctggtggggttacgccggcgtgaaggggtgcagctccgacagcaagcacggagctgtgggtggagtgatgcgtgctgcgatcagcacctgcccactctggaagcgcgctggcaggaggccctcaaccgaggccttctgatccatgcgtcagggcgctggagactgagtgaccctgaaggcatggcgctcagcaaccaggtgctggtggagctggtgtgttggtgggaggaactgccgacggagctgcaaggtgcggcgcctgctgctggctcacccaacctttga

SEQ ID NO: 11950 - protein, 444 aa, Synechococcus sp. RS9916
MVRLLAAHSSCRQHAPSSDGWPGQMSAPRSAYVHIPFCHRRCFYCDFAVVPLGDHAGTPSGTGSGSIRTYLSQLHKEIALAPKGPPLATLYIGGGTPSLLTPIQIRDLLEALRRQFGFQAGAEITLEMDPASFDLSDLQALIKAGVNRVSLGGQSFDDRVLEGLGRRHRRGDLQKCCRWLRDGLRDGALRSWSLDLIRNLPEQTLEAWSAQLELALTTGAPHLSIYDLAVEPGTVFAWRQQRGELPLPDDDLAVALMTSTSDRLGRAGFCRYEISNYAQPGHASRHNRVYWSGAGWWGFGMGATSAPWGERLARPRTREGYASWLEEQQRGLHPSLQHSMAAALPLDDRLLVGLRRREGVQLRQQARSCGWSDACCDQHLPTLEARWQEALNRGLLIHASGRWRLSDPEGMALSNQVLVELVCWWEELPTELQGAAPAAGSPNL

SEQ ID NO: 11951 - DNA, 1371 bp, Vibrio sp. Ex25
  CDS (1)..(1371): transl_table=11
atgagcgtcgatatcgataaatttgacgaatcagtgttgggaagcgatagccctgacccattgcgatttgcctttgttaagaaacattcggcgcacgctggcggagcgagcgtgcctgtacctccacctcagcaaccggcgattttttcaagcgttaccgctaactcggttaaagcgaccaataaacgttgtctttatattcacgttccattttgtcgcgtacgttgcaccttttgtaacttctttcaaaatgctgcgagccgcgcactggttgatgagtactttgacgcactgatgcaggagctcaaggagaaagctgcattgccttggacacaaaacggtatttttcatgctgtgtatattggtggtggaacgccaacggatctgtctccagcacaggttcgcgtgttaggtcaggcgattcatgatcactttcctttggctgcggattgtgaaatcaccttagaaggtcgcatcaaccgtttttctgatgagctataccaaggcgctctcgacggtggatttaatcgtttctcttttggtgtacaaagttttaatacacaagtgcgtcgcagcgcgaaacgattagatgatagagaagatgtgctaaggcgagttagcgagattgccaacgaagacaaaattcctgtcattatcgatttactctacggcttgccttatcaaaccaaagaagtgttagagcaagatttaaatgattttctctcgactggcgcacacgggttggacttatatcagttggtagtcggtggttcagcacccatgcttaaccttgtagaaaaaggaaaaatccccccaccagctaccacgccagaaaaagcaggcatgtatgagctcggtgtgaactttatggccaaacaccatatgaagcaactgagtgtgaaccattgggcaatcgataaccgtgaacgtagtttatacaacagtttagccaagacatatgcagaggtactgccaattggctgtggcgctggaggtaatatcggtggttacgggatgatgcaacatcgcacattggcgacctatattaaagccatcaaagaagggcaaagtaccattgctatgatgatgaagcaaagccctctagagccactatttgctgcactcaaatctgggtttgatcgcggtatcgttcaggcaaaccaactgccatcgtttatgggggaggacacgttcgggtttttaatgcctctatttaaagtgtggcagcaaaaaggtttagtggaactgcatgaacgtagcctacttcttactcttgcaggcagtttctgggccgtttcattggctcaaggttgtattcagatacttacgtcagagatgaacgaaaccgtaccgaaagtatccaataattaa

SEQ ID NO: 11952 - protein, 456 aa, Vibrio sp. Ex25
MSVDIDKFDESVLGSDSPDPLRFAFVKKHSAHAGGASVPVPPPQQPAIFSSVTANSVKATNKRCLYIHVPFCRVRCTFCNFFQNAASRALVDEYFDALMQELKEKAALPWTQNGIFHAVYIGGGTPTDLSPAQVRVLGQAIHDHFPLAADCEITLEGRINRFSDELYQGALDGGFNRFSFGVQSFNTQVRRSAKRLDDREDVLRRVSEIANEDKIPVIIDLLYGLPYQTKEVLEQDLNDFLSTGAHGLDLYQLVVGGSAPMLNLVEKGKIPPPATTPEKAGMYELGVNFMAKHHMKQLSVNHWAIDNRERSLYNSLAKTYAEVLPIGCGAGGNIGGYGMMQHRTLATYIKAIKEGQSTIAMMMKQSPLEPLFAALKSGFDRGIVQANQLPSFMGEDTFGFLMPLFKVWQQKGLVELHERSLLLTLAGSFWAVSLAQGCIQILTSEMNETVPKVSNN

SEQ ID NO: 11953 - DNA, 1110 bp, Alteromonadales bacterium TW-7
  CDS (1)..(1110): transl_table=11
gtgcatgtaccatggtgcgtgcaaaaatgtccttattgcgactttaacagccatgggcaaaaaggcgacattcctgaagctgaatatgttcagcatttaattgacgacttaaaagccgatttgcacttggtacaagggcgtaaaattcacagtatatttattggtggcggtacgccaagtttattaactggtgatgcttacacacgcctactaagcgaagtagatagccttataggcctcactgataactgtgaaataaccctcgaagcaaacccaggtacagtagaaacaggccgctttaaagagtacgtaaaagcgggtataaaccgcatttcaattggcatacaaagcctgcaaagcgacaagttaaaagcgcttggccgcattcatggtgctaacgaagcgacctatgcagcagagcaagccaaagaggctggtttaaatagttttaatcttgatttaatgcacggcttaccagggcaaaccctagacgatgcattaagtgatttaaagcaaattattgcgctcgatcccccacatatttcgtggtaccaactcactattgaacctaatacccagtttgcatctaaaccgccaacactgcctcaagatgaaactctgtgggatattcaagagcaaggccaagccttacttgcaaaggcaggttatatacaatacgaaatttcagggtatgcaaaaccgggatatcaatgccaacataacttaaattattggcggtttggcgattatctagggattggctgtggtgctcatggtaaggtcaccaatgcaaaaactggcataatcacccgaactgaaaaggtcaaacatccccgtggctacatggatatggtaaaaccttatttgtacaaaagttggcacgttgagcaagacgatttggctttcgagttttttatgaatcgctttcgccttgtcgaaccatgcccgattgaagactacagtgcgctgactaatcagccattgcaaagccaacaagcagctttaaataaagccataaacaccggtttattaatagaaaaagacggtcactggcaagtgagccttaaagggcatcgctttttaaatgacctgctagaattgttcgtataa

SEQ ID NO: 11954 - protein, 369 aa, Alteromonadales bacterium TW-7
MHVPWCVQKCPYCDFNSHGQKGDIPEAEYVQHLIDDLKADLHLVQGRKIHSIFIGGGTPSLLTGDAYTRLLSEVDSLIGLTDNCEITLEANPGTVETGRFKEYVKAGINRISIGIQSLQSDKLKALGRIHGANEATYAAEQAKEAGLNSFNLDLMHGLPGQTLDDALSDLKQIIALDPPHISWYQLTIEPNTQFASKPPTLPQDETLWDIQEQGQALLAKAGYIQYEISGYAKPGYQCQHNLNYWRFGDYLGIGCGAHGKVTNAKTGIITRTEKVKHPRGYMDMVKPYLYKSWHVEQDDLAFEFFMNRFRLVEPCPIEDYSALTNQPLQSQQAALNKAINTGLLIEKDGHWQVSLKGHRFLNDLLELFV

SEQ ID NO: 11955 - DNA, 1152 bp, marine gamma proteobacterium HTCC2143
  CDS (1)..(1152): transl_table=11
gtgagcataacgcctaacatctccaaattgcctccactgagtttatatattcacattccttggtgcgtacggaaatgcccgtattgtgattttaattctcacaccacaagcgtaattcccgagtcgctctacatcgacgtcttaatcgaggatcttactcaagaactagccaatgtacagggccgcagccttcattcgatttttttcggcgggggtactcccagtctattttcggctgcgggaattgcgagaatactgaccgaagtagagcgacggatttcattttgtagggacatcgaaattacactcgaggcaaaccccggctcggcagaacaacacaaattttccggatatagtgccgccggtgtaaatagattatcgatcggcgtgcagagcttcaatccggttcatctttcatccttagggcgcattcacagcaatacggaggcaatcgcagctgccgacgccgcaagacgagcgggcattagcaatttcaatattgatttgatgcatggactaccggaccaaacccagcctgaaggtcttgccgacatccaacaggcgattgacctagagccaacacatatttcgtggtatcagctgaccattgagcccaacaccgtattttacaactcacctcccaccctacccagtgacgatcagctggccgacattcaggacgcgggcgacgagatgctaggtaacgcagcattcagccagtatgagatatctgcctatagtcgcgacaatcagttttcaaagcacaataccaactattggttattcggcgactacatcggtattggtgcaggcgcgcatggcaaaatcactgacatctgcagccaacaaatagttaggcggtggaaaacccgatcgccgaaggactacctgtcttctgacactggcctcatcgcgggcgaccgacagctaatagcagcagagctgccactcgagttcttaatgaacggattaagacttaatgatggatttgaaacggacctttttaccgctcgtacgggattggcttgggagagtatgcagccgaagctcgaccagctcatccagagaaaactgctgaagcatcagagtggcaatctgcgtgccacagcggccggaaagcgatttctcaatacgattctggaagagttttag

SEQ ID NO: 11956 - protein, 383 aa, marine gamma proteobacterium HTCC2143
MSITPNISKLPPLSLYIHIPWCVRKCPYCDFNSHTTSVIPESLYIDVLIEDLTQELANVQGRSLHSIFFGGGTPSLFSAAGIARILTEVERRISFCRDIEITLEANPGSAEQHKFSGYSAAGVNRLSIGVQSFNPVHLSSLGRIHSNTEAIAAADAARRAGISNFNIDLMHGLPDQTQPEGLADIQQAIDLEPTHISWYQLTIEPNTVFYNSPPTLPSDDQLADIQDAGDEMLGNAAFSQYEISAYSRDNQFSKHNTNYWLFGDYIGIGAGAHGKITDICSQQIVRRWKTRSPKDYLSSDTGLIAGDRQLIAAELPLEFLMNGLRLNDGFETDLFTARTGLAWESMQPKLDQLIQRKLLKHQSGNLRATAAGKRFLNTILEEF

SEQ ID NO: 11957 - DNA, 1155 bp, marine gamma proteobacterium HTCC2080
  CDS (1)..(1155): transl_table=11
ttgaacgctagcgatattccattagccctttacgtgcacctgccatggtgtgaacgaaagtgcccctactgtgactttaactctcatgagcagtttgatagcagcttagaaactggttacatcgacgcattactgacagatttgcgccagcagcttgtcagtgtagggtcccggcctcttttttcggtttttttggggggaggtacgcctagccttttcagtggcgccagtatcgcgcgattactcaacggcatcgaccaaatctggagtatcggactcacaactgagatcaccatggaggccaatcctggcagtgctgaggcctctagatttgccgattaccgcagcgcaggtgttaaccgactcagtctcggcattcaatcctttgctgacgcacaactgatggccctggggcgtgttcatgacagcgctcaggctatgcaagctattcacttggcgaaacagcatttcgaccgctttaatctcgatattatgcatgggctaccggggcaaaaaatcgaaacagcccttgatgatttagaacgtgcaatcgaccactcccagggtcacgtttcttggtaccaattgaccattgagcccaacaccacgttttggtcacggccgcccagacttcctaacgatgacattctgactgatattcaggatgcaggagaggcgcgttttctagaatctggtctcacccagtacgaggtatcggcttgggcatcccaccagcagatgtcgcaacacaatcttaactattggacctttggcgactacataggtatcggcgcaggtgcccatggaaaaatcacgaaagaaaatggcagcattattagaactcgtcgaagccgatctcctcgagattatctgacgggcatcgccgaaggcgttccgcctcatcagcagcaactcccgcaaacggagctgcccgtcgaattcatgcttaacgcactccgccttaaaaacggtgtaccggcgtccctctttaaagcgaacacgggtcttgaattagctgtggttgagccgcagattgaaaagctcgtggccaacggcctgctatccgctgatactgagcgtatcggtaccaccgatcatggatataggtttttaaacgatgtagtggccagtttcatggataacggcgctagataa

SEQ ID NO: 11958 - protein, 384 aa, marine gamma proteobacterium HTCC2080
MNASDIPLALYVHLPWCERKCPYCDFNSHEQFDSSLETGYIDALLTDLRQQLVSVGSRPLFSVFLGGGTPSLFSGASIARLLNGIDQIWSIGLTTEITMEANPGSAEASRFADYRSAGVNRLSLGIQSFADAQLMALGRVHDSAQAMQAIHLAKQHFDRFNLDIMHGLPGQKIETALDDLERAIDHSQGHVSWYQLTIEPNTTFWSRPPRLPNDDILTDIQDAGEARFLESGLTQYEVSAWASHQQMSQHNLNYWTFGDYIGIGAGAHGKITKENGSIIRTRRSRSPRDYLTGIAEGVPPHQQQLPQTELPVEFMLNALRLKNGVPASLFKANTGLELAVVEPQIEKLVANGLLSADTERIGTTDHGYRFLNDVVASFMDNGAR

SEQ ID NO: 11959 - DNA, 1242 bp, Candidatus Desulfococcus oleovorans Hxd3
  CDS (1)..(1242): transl_table=11
atgtgccggccgattacctggaactcaaccagcaggcctttgccctggggtacgaacttggtgcaccctacgccatgtgacacttatcccggtgtcgataataccggcctgtatcttcacattcccttttgcgcaaaaaagtgccggtactgcgactttttttccctggccgctccggaccggattttctcttttgtcaaggcgctgttaagggaaattcagctgtcaggcccccttgttcccggcatggtggacacggtctacatcggcggcggcaccccttcgctgctttccgccgctcaggttgatgttgtgctttccacggttcgggacaattttcgcctttccaccgatgccgagatcaccatggaggtcaaccccgactcggcgacccccgcctggcttgcggcagtccggcaggccggcgtcaaccggatcaacatcggcatccagtctttcgatgatgccaggcttgcctttctgggccggattcattcggcccgacaggccgaagacgccctggaagcgtcccgtcggtgcgggtttgacaacatcggcgcggacatcatttatgcgattcccggccagacccgacgggacctggaaaaggacctggaccggacgctttccttttcccccgaccacatctcctgttatatgcttacctgtgagccgggtacccccctggcccgggcacttgaaaaccgtgaatttgacccgctgccggaccggcaggccgccgacctgtttgacacggtcagccgctatctgaccggccgcgggtatcttcactacgagatttccaatttcgccacaagcccggacaccatggcccggcacaacaccaagtactggcgccgggtgccttatgtgggcctgggcccgtcggcccactcttataccggtacgcatcgctggtggaaccaccgcgatcttgacgcctatgagaaggcccttcagcagggccgtccgccccggcaggaggcagaaaccctgaccccggcccagcagatgctggaggcgatctacctgggccttcgcacagccgacggcattttgatggccgcttttgaagcggagttcggtgtcgacttttgcgcctgttttgcgcaaccgcttgcccaatgccgggaccagggcctggtggtgctttctcgtggccgctgcatgcccacccgccgtggcatgcgctttcacgagaccgtgacggcccggtttgtcggccggattgacctgccttga

SEQ ID NO: 11960 - protein, 413 aa, Candidatus Desulfococcus oleovorans Hxd3
MCRPITWNSTSRPLPWGTNLVHPTPCDTYPGVDNTGLYLHIPFCAKKCRYCDFFSLAAPDRIFSFVKALLREIQLSGPLVPGMVDTVYIGGGTPSLLSAAQVDVVLSTVRDNFRLSTDAEITMEVNPDSATPAWLAAVRQAGVNRINIGIQSFDDARLAFLGRIHSARQAEDALEASRRCGFDNIGADIIYAIPGQTRRDLEKDLDRTLSFSPDHISCYMLTCEPGTPLARALENREFDPLPDRQAADLFDTVSRYLTGRGYLHYEISNFATSPDTMARHNTKYWRRVPYVGLGPSAHSYTGTHRWWNHRDLDAYEKALQQGRPPRQEAETLTPAQQMLEAIYLGLRTADGILMAAFEAEFGVDFCACFAQPLAQCRDQGLVVLSRGRCMPTRRGMRFHETVTARFVGRIDLP

SEQ ID NO: 11961 - DNA, 1176 bp, Pseudomonas putida GB-1
  CDS (1)..(1176): transl_table=11
atgatcgcaacgctgtccactcccggcgcggtgcgcttcaccagcctgccgccgctggcgctgtacatccacatcccgtggtgcgtacgcaaatgcccttactgcgacttcaactcccacgctgccgggcctgaactgccggaagacgcctacgtcacagcactgctggacgacctcgaccaggaactggccgccgtgcaaggccgcccgatcagctcgatctttttcggtggcggtacgcccagcctgttcagcgccaacgcccttggccgtttgctgcgcggcgtggaacagcgcatcccgtttgcgccagacatcgaaattaccctggaagccaacccaggcaccttcgagcaggacaagttcaaggcctaccggcaaaccggcatcaaccgcctgtccatcggtgtgcagagcttccaaccggccaagctggaggcgctggggcgcattcacaacggcgatgaagcggtgcgtgccgccggcatggcacgcgccgccggcttcgacaacttcaacatggacctgatgcacggcctgcccgaccagtcgctggatgatgcgctgggcgacctgcgccaggccattgacctggggccgacgcacctgtcgtggtaccagctgaccgtggaaccaaacacggtattctggaaccaaccgccagagctgcccgaagacgacatcctctgggacatccaggaagccggccaggcgctgatgaccgagcacggttaccgccagtacgaggtatcggcgtatgcgcaggcaggccgcgccgcccggcacaacctcaactactggcgcttcggcgacttcatcggcatcggtgcaggtgcccacggcaagctcaccttcgccgacgggcgcatcctgcgcacctggaagacccgcctgcccaaggactacctgaacctggccaagccgttcaaggccggcgagaagctattgccggtggacgagctgccgttcgagttcctgatgaacgccctgcggcttaccgatggcgtggaagccgaactgtttacccaacgcacgggcttgccattggaacaactgcgcgaggcacgccgcgccgccgaacaaaagggccttttgcaggtcgaaccggatcgactggtggccacgccaaggggccagttgttcctcaatgacctgctgcagtatttcttgacctaa

SEQ ID NO: 11962 - protein, 391 aa, Pseudomonas putida GB-1
MIATLSTPGAVRFTSLPPLALYIHIPWCVRKCPYCDFNSHAAGPELPEDAYVTALLDDLDQELAAVQGRPISSIFFGGGTPSLFSANALGRLLRGVEQRIPFAPDIEITLEANPGTFEQDKFKAYRQTGINRLSIGVQSFQPAKLEALGRIHNGDEAVRAAGMARAAGFDNFNMDLMHGLPDQSLDDALGDLRQAIDLGPTHLSWYQLTVEPNTVFWNQPPELPEDDILWDIQEAGQALMTEHGYRQYEVSAYAQAGRAARHNLNYWRFGDFIGIGAGAHGKLTFADGRILRTWKTRLPKDYLNLAKPFKAGEKLLPVDELPFEFLMNALRLTDGVEAELFTQRTGLPLEQLREARRAAEQKGLLQVEPDRLVATPRGQLFLNDLLQYFLT

SEQ ID NO: 11963 - DNA, 1152 bp, Marinobacter sp. ELB17
  CDS (1)..(1152): transl_table=11
ttgaatttaaaccggacacctgcggccgttgagcctgcgctgagcctgtatctgcacgttccttggtgcgtgcgcaaatgcccctattgcgacttcaattcccatgccattaccggggatatccctgaaagcgtgtatttaaaggccctgctggacgatctcgatcaggatttgcgcctagccgcaggccgcgtcatacaaacggtgtttattggcggtggcacgccatcgctgatgagcggtggtttttacagcgatctgtttcgccagctgaaaacaaggctggaatttgcggcagacgctgaaatcactctggaggcaaatcctggcactctcgagcagggccgttttgaggcgttccgcgaggccggtatcaaccggctgtcgataggcgtgcaaagctttaacccagagcagttaaaggtgcttgggcgcattcacgacagccaggccgcccacaacgccataacagcggcgcgccaggccggttttgacaacttcaatatcgaccttatgcacggcttgccagggcaaacgcctgaacaggcactggacgacctggctcaggccctatcgtatcaaccaccgcacttgtcttggtatcaacttacagtagaacccaacaccgagttctacagccagccaccggagctgccagacgacgatcgactgtgggatatttacagccagggcggcgactacctgcgcagccacggttttaccgattacgaggtatccgcctggagccaacataatatggcatcgcgccataatctgaattactggacgtttggcgactatttggccctgggcgccggaggacacggtaaaatcagccagccggatggccagattttgcgctactggaaaacccgccaaccgcaagcctatttaaatcgaataggcagccgcaccgccggcagtgaggcaatagcagtggcagagcggccgctggagtttctgatgaacgcgctgcgccttggcgcgggcgtgcccgaaaacctgtttcaacaacgcacgggtttacccttaagcacgattgcggtacaacttgaagcattaaggcaggagggtttgatgcaccctcaacgcattcaggccaccgaactcggccaacgctatttgaacagcctgttgcagcggtttttgtag

SEQ ID NO: 11964 - protein, 383 aa, Marinobacter sp. ELB17
MNLNRTPAAVEPALSLYLHVPWCVRKCPYCDFNSHAITGDIPESVYLKALLDDLDQDLRLAAGRVIQTVFIGGGTPSLMSGGFYSDLFRQLKTRLEFAADAEITLEANPGTLEQGRFEAFREAGINRLSIGVQSFNPEQLKVLGRIHDSQAAHNAITAARQAGFDNFNIDLMHGLPGQTPEQALDDLAQALSYQPPHLSWYQLTVEPNTEFYSQPPELPDDDRLWDIYSQGGDYLRSHGFTDYEVSAWSQHNMASRHNLNYWTFGDYLALGAGGHGKISQPDGQILRYWKTRQPQAYLNRIGSRTAGSEAIAVAERPLEFLMNALRLGAGVPENLFQQRTGLPLSTIAVQLEALRQEGLMHPQRIQATELGQRYLNSLLQRFL

SEQ ID NO: 11965 - DNA, 1158 bp, Magnetospirillum gryphiswaldense
  CDS (1)..(1158): transl_table=11
gtgcttccagtaaccccctcccccggcttcggggtttatgtgcactggccgttctgcctgtccaagtgcccctattgcgatttcaacagccatgctgccgacaccatcgaccaggatcgctggcgccgcgccctgctggccgagcttgagcatttcgccgcccgcaagcccgaggcagaggtcacctcgatctttttcggcggcggcacccccagcctgatggacccggccaccattgccgccctgatcgaccgtatccatcagctttggccctgtgatcccctgatcgaaatcaccctggaagccaatccatcgacggtagaggcccagcgtttccgcgatttccgcgccgccggcatcaatcgcctgtccttgggggtgcaggccctgaacgatgccgacctgcatttcctcggtcgccgccacgatgccgccgaggcgctggcggcgctggatgtggccgccgccactttcgagcgcttcagcttcgacctcatctatgcccgccccggccagaccatggcagcgtggcaaaccgaattgacccaagccctggccctgaccggcggtcatctgtcggcctatcaactgaccatcgaggaaggcaccgccttttaccccatccatgcgcgcggtgagttccagctacctgacgaagatctggccgccgatttgttcgcgctgacccggtccatggccgccgaagccggcctccccgcctacgagatttccaaccacgcccgtcccggccaggaaagccgccataatttgacctattggcgcggcggcgattatgtcggcatcggccccggcgcccatggccgcttgaaccacagggccacccgccaacaccgcgcccccgatgtatggctgcgccgggtcgaagcccacggccacgcctgccagggcgaggaagccctggacgcccgcacccgagcggaagagttggtgatgatggggttacggctgaacgaaggcatccacgccgatcatttccgcgaccagtgcggcttggacctgtggcaggtcatcgacgtccaggcccatgcgcaccttgaacaagacggtctgttgaggcgcacagcccacggcatcgccgccaccgaagccggtctattggtgctgaattccctgaccggggcattgctgcgggcttga

SEQ ID NO: 11966 - protein, 385 aa, Magnetospirillum gryphiswaldense
MLPVTPSPGFGVYVHWPFCLSKCPYCDFNSHAADTIDQDRWRRALLAELEHFAARKPEAEVTSIFFGGGTPSLMDPATIAALIDRIHQLWPCDPLIEITLEANPSTVEAQRFRDFRAAGINRLSLGVQALNDADLHFLGRRHDAAEALAALDVAAATFERFSFDLIYARPGQTMAAWQTELTQALALTGGHLSAYQLTIEEGTAFYPIHARGEFQLPDEDLAADLFALTRSMAAEAGLPAYEISNHARPGQESRHNLTYWRGGDYVGIGPGAHGRLNHRATRQHRAPDVWLRRVEAHGHACQGEEALDARTRAEELVMMGLRLNEGIHADHFRDQCGLDLWQVIDVQAHAHLEQDGLLRRTAHGIAATEAGLLVLNSLTGALLRA

SEQ ID NO: 11967 - DNA, 1080 bp, Spiroplasma citri
  CDS (1)..(1080): transl_table=4
atgattgagcatttatatgtacatattcctttttgtgaccatatttgtttttattgtgatttttttaaaattaaaaaatcacgtccaataatgattgatgaatatttaacttcattagagcaagaaattactcaacctcaccctaattttgctttaaaaacaatttatttaggaggaggaacacccaatagtttagatgacattcaattagagcggttactacaacttttacaaaaagttgtgcaaggttcaataattgaatatacaattgaactaaatccagaaaagattacaaaaagtcaattacaacttttaaagaaatatcatattaaccgtctttcaattggggttgaaacttttaatgatcagttattaaaaaaagttaatcgttatcataatagtgctgatgttgttaataattattacttagctcggcaagaaggctttgataatatttcgtttgacttaatttataatttatttgaccaaacacaagttgacattgaagcagatttattaatgattcaaaaattacaacctgatcatattagttgatattcgttaattttaaaagaaaattcatattggggcaaaacaaaacttaaattaccagagtatgatattgcatttgatgaaattattaatactgcattaactaaaataggttatgaaagatacgaaatttcaaattacactaataacaagaaaaaatcacgacataatttggcatattgaactaataaatctttttgattacttggtcctagtgcagctggttttattaataatgatggatattatttattacaaaattcgcgaaaatatgctaattgaacacaaactaaaacagaattatcgttaaaggattattattttcaaattttaatgatggggttacgtgttttagatggcattgatttagtaaaggttaaagatgcaaagaaagcagtcaattactatcaaagtaaaattgatgtagaagtacaaaaaaataatttattttttgataataatcatttacgttgtacaagtcaaggattaaacattttaaatgatattttagttaatattatggattaa

SEQ ID NO: 11968 - protein, 359 aa, Spiroplasma citri
MIEHLYVHIPFCDHICFYCDFFKIKKSRPIMIDEYLTSLEQEITQPHPNFALKTIYLGGGTPNSLDDIQLERLLQLLQKVVQGSIIEYTIELNPEKITKSQLQLLKKYHINRLSIGVETFNDQLLKKVNRYHNSADVVNNYYLARQEGFDNISFDLIYNLFDQTQVDIEADLLMIQKLQPDHISWYSLILKENSYWGKTKLKLPEYDIAFDEIINTALTKIGYERYEISNYTNNKKKSRHNLAYWTNKSFWLLGPSAAGFINNDGYYLLQNSRKYANWTQTKTELSLKDYYFQILMMGLRVLDGIDLVKVKDAKKAVNYYQSKIDVEVQKNNLFFDNNHLRCTSQGLNILNDILVNIMD

SEQ ID NO: 11969 - DNA, 1425 bp, Pseudomonas aeruginosa
  CDS (1)..(1425): transl_table=11
atgagtaccgatgtcatgacgagttcgatgagtttcaaccgcgcgctggtggagaagtacgaccgccccggcccgcgctatacctcctatcccaccgcgccgcaattccatgacgccttcgccgccgacgactaccgggcggccgcccagcgcagcaacctcggcagcagctctggcagtgaccagggcccggccaagccgctgtcggtctatatccatatcccattctgcaagagcctctgctactactgcgcctgcaacaagatcatcacccagaagacccaccgcgctgtggaatacctggactacctcaagcgcgagatcgccatgcaggccgcgttgttcgacggcagccgaaaactcacccaactgcacctgggtggcggcacgccgacctatctgaccagccaacagttgggtgaggtgatggacagcctgcgccagcacttcaacctcgacgaaagcgacaaccatgagttctccatcgaagtcgacccacgcaccatcagcgccgagcgcatcgccgagctgcgcgcgcagggtttcaatcgcctgagtttcggtgtgcaggattttgacgaacaggtgcagcagtcggtcaaccgcgtgcagagcgaacaacaggttttcgaactcgtggcggcagcgcgccaggcgaagttcaagtcggtgtccgtggacctgatctacggcctgccgttgcagaccgtggcgagcttcgacaccactctgtcgaagatcatcgccctgcgccccgaccgcatcgccgcctacagctatgcgcacttgcccgagcgggtgcgcgcgcagcggctgatccgtcgcgaggacatgccgccgccagagcgcaagctggagttgctggaactgaccatccagcgcctgaccgaggccggctacgtgtacatcggcatggaccacttcgccctgcccgacgacgaactcaccctggcccgcagcaacggcaccctgcagcgcaacttccagggctattccacccacgctgactgcgacctgatcgccctcggcgtgtcgtccatcagcaaggtcggcgacacctacgggcagaacgtcaaggagctgtcgcagtactacgcgcggctcgacgaaggcctgctaccggtgcacaagggctaccgcctgagcgacgacgaccacctgcgccgcgaggtgatcaacgcgctgatgtgccatggccgcgtggactatgccccgctggaagagtgccatggcattcgtttcgccgagtatttcgccggccccttgaaacagttgcaggagcaggccggcgacggcctgatcgaactgcatgacgacgccctggtgctgcttccccagggccaactgatgatgcgcagcgtggcaatggccttcgacgcctatctgggtagtgcgcagcaggagcgcttctcgcgcaccatctga

SEQ ID NO: 11970 - protein, 474 aa, Pseudomonas aeruginosa
MSTDVMTSSMSFNRALVEKYDRPGPRYTSYPTAPQFHDAFAADDYRAAAQRSNLGSSSGSDQGPAKPLSVYIHIPFCKSLCYYCACNKIITQKTHRAVEYLDYLKREIAMQAALFDGSRKLTQLHLGGGTPTYLTSQQLGEVMDSLRQHFNLDESDNHEFSIEVDPRTISAERIAELRAQGFNRLSFGVQDFDEQVQQSVNRVQSEQQVFELVAAARQAKFKSVSVDLIYGLPLQTVASFDTTLSKIIALRPDRIAAYSYAHLPERVRAQRLIRREDMPPPERKLELLELTIQRLTEAGYVYIGMDHFALPDDELTLARSNGTLQRNFQGYSTHADCDLIALGVSSISKVGDTYGQNVKELSQYYARLDEGLLPVHKGYRLSDDDHLRREVINALMCHGRVDYAPLEECHGIRFAEYFAGPLKQLQEQAGDGLIELHDDALVLLPQGQLMMRSVAMAFDAYLGSAQQERFSRTI

SEQ ID NO: 11971 - DNA, 1125 bp, Thermotoga sp
  CDS (1)..(1125): transl_table=11
  misc_feature (50)..(50): y is t or c
atgaaactggcagtgtacgttcacatacccttctgcaagaaaaagtgcgygtactgtgatttctactccgttgcctccgaagattttgaagagtatctgtctctcgtctttgaagagatagaactctacagggatgtactgaaagaaagtgagatagagacggtgtacttcggtgggggaacaccttcccttgttcccccttcttttctggagaagattttagagaaactgaaagaggtctcaaagaagttttcaccgcttgagacaacgatcgaggtcaatccggagtccgttgaccgggaaaaactgagatcttacagaaagatgggtataaacagaatcagcctgggcgttcagtcctgtgacgatggagtgctgaaaaagtgtggccgtctgtacgatgagaagatgctcaaggaaaaagcggaactcgttctggcggaattcgacaacgtcaatttcgatttcatactcggccttcccggtgaaacagatgaaacactggagaaaaaccttcattttcttgaagagttcaccccgcagcacgtgtccctttacttcctcgaagtggatgaaaacaccccgctatacagccttttaaagaagaatcttctgacactgccagactctgatgaagtggaaagaaggcacgatgtgttcgtcgaatttttgaagtccagaggttttgaaagatacgaaatctcgaactttgccagaccggaaagagaatcaaggcacaatctattttactggagaaatcatgactatctgggttttggtccctctgcaggtggccaccttggaagattccgatacaccaacgtttccgacctttccatgtacgcaaaaatggtgaaggaaaaaacctttccatacgactaccggcatgaaaattcggaggatgaggaagcgctggagacccttttcatgggactcagaacgaaagaaggagtggaactgaaacgcgtggaaaggctcatgtttctggtggagaagttacaaaaagagtatgcttgttatgtgaaggtgaaagatggtaaaatttttttgagcgaggagggtatggacctgtcgaaaaagatcttcgaagatctgatcgaatggtacagggaggctgaaaaatga

SEQ ID NO: 11972 - protein, 374 aa, Thermotoga sp
  misc_feature (17)..(17): The Xaa at location 17 stands for Ala, or Val.
MKLAVYVHIPFCKKKCXYCDFYSVASEDFEEYLSLVFEEIELYRDVLKESEIETVYFGGGTPSLVPPSFLEKILEKLKEVSKKFSPLETTIEVNPESVDREKLRSYRKMGINRISLGVQSCDDGVLKKCGRLYDEKMLKEKAELVLAEFDNVNFDFILGLPGETDETLEKNLHFLEEFTPQHVSLYFLEVDENTPLYSLLKKNLLTLPDSDEVERRHDVFVEFLKSRGFERYEISNFARPERESRHNLFYWRNHDYLGFGPSAGGHLGRFRYTNVSDLSMYAKMVKEKTFPYDYRHENSEDEEALETLFMGLRTKEGVELKRVERLMFLVEKLQKEYACYVKVKDGKIFLSEEGMDLSKKIFEDLIEWYREAEK

SEQ ID NO: 11973 - DNA, 1152 bp, Tetragenococcus halophilus
  CDS (1)..(1152): transl_table=11
atggaaaaagttctacaaaatacctcttcatatattcatattcctttttgtgaacatatttgcttttactgtaattttaataaagtatttttaaaagggcagcctgtcgatgagtatatccaagggttattaaaagaaatacaattaacacttgatcttcatcctacagatgccagtcaaacgatttatatcggaggaggtacgcccacttgtctatctgctaagcaattagatgatttactcagtggcatcactcaattgctgcccgttgaaactaccaaagaatttacaattgaagcaaatcctggtgatttgacgcaagaaaaactaaatgtcattaaaaattatggaattaatcgcctttcaatgggggtgcaaacattcgataatcgtcttctaagaagaattggccgtaaacatactgctgaagatgtataccaaacattaaaattaatagaaaaaaatcagatagacaacctttcaatcgatttaatttatgctctgcctgcacaaagcattgcagattttcttattactttagaaaaagcgatcgctcttgatttacctcactatgcgatttattccttaattttagaaaataaaacaatgtttatgaattgggtaagaagaggaaaaattgaattgcccgaacaagaagaagaagcaaaaatgttcgagctagcgataaatgagatggaaaaagccggattttctcactatgaagttagtaatttcgctaaaaaaggatgggaatcaaagcataatctagtttattggaataatgagcattattatggttttggcgctggtgctagcagctacctaaaccaacaacgttataaaaatttcggtcctattcaacattacttaaacctgttacgtaataatcagttacctatcattgaaacagaaaacctttcttttaagaaccaaattgaagaggaattatttttaggattaaggaaaaaagaaggcgtatccttgcatcgttttaaagaaaaattcaacttagaacttaccgatttataccaggaagttcttcctgaactattcgatgcgcaattattaacttttaaaaacgatcatctcaagttgactcgtaaaggtttatttctaggaaacgaagtatttgaaaaattcttgctctcataa

SEQ ID NO: 11974 - protein, 383 aa, Tetragenococcus halophilus
MEKVLQNTSSYIHIPFCEHICFYCNFNKVFLKGQPVDEYIQGLLKEIQLTLDLHPTDASQTIYIGGGTPTCLSAKQLDDLLSGITQLLPVETTKEFTIEANPGDLTQEKLNVIKNYGINRLSMGVQTFDNRLLRRIGRKHTAEDVYQTLKLIEKNQIDNLSIDLIYALPAQSIADFLITLEKAIALDLPHYAIYSLILENKTMFMNWVRRGKIELPEQEEEAKMFELAINEMEKAGFSHYEVSNFAKKGWESKHNLVYWNNEHYYGFGAGASSYLNQQRYKNFGPIQHYLNLLRNNQLPIIETENLSFKNQIEEELFLGLRKKEGVSLHRFKEKFNLELTDLYQEVLPELFDAQLLTFKNDHLKLTRKGLFLGNEVFEKFLLS

SEQ ID NO: 11975 - DNA, 1128 bp, Mycobacterium tuberculosis
  CDS (1)..(1128): transl_table=11
atgcccggacaaccgttcggggtctacctgcacgtcccgttctgcctgacccgttgcgggtactgcgacttcaatacctacaccccggcccagctgggtggcgtcagcccggaccgttggctgctggcgctgcgggcggagctcgaactggcggccgccaagctggacgcaccgacggtgcataccgtgtatgtgggtggcgggacgccatcgctgctcgggggggagcgcctggccacgttgctggacatggtgcgggaccactttgtgctggcgcccgacgccgaagtcagcaccgaggccaaccccgagtcgacgtggccggagttcttcgccacgatccgcgcggccggttacacgcgggtgtcgctcggcatgcagtcggtggccccgagggtgctggcaaccttggaccgggtgcactcgccgggccgggcggcggccgcggccaccgaggcgatagcggagggcttcacacacgtcaacctcgacctgatctatggaaccccgggggagtccgacgacgacctggtgcgctcagtggacgccgcggtgcaggccggtgtggatcatgtgtccgcgtatgccttggtcgtcgagcacggcacggcactggctcgccgggttcggcgtggtgagctggccgcgcccgatgacgacgtgctggcgcatcgctacgagttggtcgatgctcggctgtcggcggccgggtttgcctggtacgaggtgtccaattggtgtcgaccgggcggcgagtgccggcacaacctgggttattgggacggtggccagtggtggggcgcaggtccgggcgcgcacggctacattggcgtgacacgctggtggaatgtcaagcaccccaacacttacgccgagatactggccggggcgacgttgccggtagcgggcttcgagcagctgggcgccgacgctttgcacaccgaagacgtgttgctgaaggtccggctgcgccaggggctaccgctcgcccggctaggggctgccgaacgggaacgtgccgaggcggtgttggccgacggattgctggactaccacggcgaccgactggtcctcaccggccgggggcgattgctggccgacgcggtggtgcgcactctgctgggctaa

SEQ ID NO: 11976 - protein, 375 aa, Mycobacterium tuberculosis
MPGQPFGVYLHVPFCLTRCGYCDFNTYTPAQLGGVSPDRWLLALRAELELAAAKLDAPTVHTVYVGGGTPSLLGGERLATLLDMVRDHFVLAPDAEVSTEANPESTWPEFFATIRAAGYTRVSLGMQSVAPRVLATLDRVHSPGRAAAAATEAIAEGFTHVNLDLIYGTPGESDDDLVRSVDAAVQAGVDHVSAYALVVEHGTALARRVRRGELAAPDDDVLAHRYELVDARLSAAGFAWYEVSNWCRPGGECRHNLGYWDGGQWWGAGPGAHGYIGVTRWWNVKHPNTYAEILAGATLPVAGFEQLGADALHTEDVLLKVRLRQGLPLARLGAAERERAEAVLADGLLDYHGDRLVLTGRGRLLADAVVRTLLG

SEQ ID NO: 11977 - DNA, 1152 bp, Haemophilus influenzae
  CDS (1)..(1152): transl_table=11
atgccaaaacttcctccactttccctttatatacacattccatggtgcgttcaaaaatgcccttattgtgattttaattcgcacgcacaaaaaagcgatataccagaacaagactatatttatcatcttctgcaagatttgcaggctgatttgcaacgctttaaagattctattcaacaacgaaaactccattcaatttttattggtggcggtacaccaagtttgttctcggcagaaagcattgcgtatctcttaaaagaaataaaaaaacagattgattttgaagataatattgaaatcacattagaagctaatcctggcacggtagaagctgaacgttttaaaggttatgtatccgcaggcattatgcgaatttctatgggaattcaaagtttcaatgatgataaattacaacgtcttgggcggattcataatgcagcagaagcaaaaagtgcggtcaatttagcgaaagtttctgggctaaaaagttttaatttggatttaatgcacggtttgcctaaccaaacgttggaagaagccttagatgatcttcgtcaagcaattgagctatctcctccccatatttcttggtatcagctgactattgaaccaaatacgatgtttgcttatcgcccacctaaattaccagatgatgacgcactttgggacatttttgagcaaggtcaccaacttttaacgatggcaggctaccagcaatatgaaacctcagcttacgcaaaagcaggttttcaatgtaaacataatttgaattattggcgatttggggattatttagccattggctgtggcgcacacgggaaattgacgtttccgactggcgagattactcgcttttctaaaaccaagcacccgaaaggttatttgcgtggcgaatatctttacgaagaaaaaaacgtgccaaaaattgaccgcccttttgagttttttatgaatcgctttcgtttgttagaagcggtacccaaacaagaatttgaagattacacaggcttgtcgcaaagtgcggtgaaaaatcaaattgattttgccattcaacaaaactatattgtggaaaacgctgattcttggcaaatcactgaacacggcaagttatttctcaatgaacttttggaattatttttaacggaagaatag

SEQ ID NO: 11978 - protein, 383 aa, Haemophilus influenzae
MPKLPPLSLYIHIPWCVQKCPYCDFNSHAQKSDIPEQDYIYHLLQDLQADLQRFKDSIQQRKLHSIFIGGGTPSLFSAESIAYLLKEIKKQIDFEDNIEITLEANPGTVEAERFKGYVSAGIMRISMGIQSFNDDKLQRLGRIHNAAEAKSAVNLAKVSGLKSFNLDLMHGLPNQTLEEALDDLRQAIELSPPHISWYQLTIEPNTMFAYRPPKLPDDDALWDIFEQGHQLLTMAGYQQYETSAYAKAGFQCKHNLNYWRFGDYLAIGCGAHGKLTFPTGEITRFSKTKHPKGYLRGEYLYEEKNVPKIDRPFEFFMNRFRLLEAVPKQEFEDYTGLSQSAVKNQIDFAIQQNYIVENADSWQITEHGKLFLNELLELFLTEE

SEQ ID NO: 11979 - DNA, 1131 bp, Buchnera aphidicola subsp
  CDS (1)..(1131): transl_table=11
atgtttaaacttccacctattagcttatatatccatattccttggtgtataaaaaaatgtggatattgtgatttttattcgtacgttaacaaaagttttattccagaaaaagaatatatcgatcatttattaaaagatttagaaaaagatttaagcttgataaaagaaagagaaataaacagtatttttatcggtggtggaacacctagtttacttaaaagtagttcaataaaaaaaatgatgagggaaataaaaaaaagaataaatatttctaatacagcagagattaccatagaagcaaatccaacaacattagaatacaaacgtttttttaattataaaaaatcaggtatcaatcgtttttctataggtgttcaaacgtttaactcagatttattaaaaaaaatagaacgtacatataataaaagagaagcaattctagcagtagaagaaataaaaaaaatcaataaaaattttaatctagatattatgtatggactacctaatcaatctttaaaagatgtattgttggatttacaatacgctgttaaatataatccaacacatatatcatggtatcaattaactttagaacctaatactcctttttatgtaaaaaaattaaatttacccaacgagaacaatatttttaaaatgttagtagaaggagagaaatttttaaaacaatcaggatataaaaaatatgagatatcttcatatgcaaaattaaactatgaatgtcaacataatcttaattactggaattttggagattatataggaataggttgtagtgctcatggtaaaataactcaaattaatggagatattattagaactataaaaaataagaatataaacgattttatgaatggtaaatatttgaaacacaaaaattttgtgttaaaaaaagataaaccttttgaatactttatgaatatctttagactttacaaacctgtcttaaaaagacaatttgaagaaagaacaaatattaatcaaaattatataaaagaaaaaataaaaaaagcaatagaaaaaggatacctaaaaaataaaattgatttttgggatacaacaaaaaaaggaaaaatgtttcttaattcattattaaagatttttttagattaa

SEQ ID NO: 11980 - protein, 376 aa, Buchnera aphidicola subsp
MFKLPPISLYIHIPWCIKKCGYCDFYSYVNKSFIPEKEYIDHLLKDLEKDLSLIKEREINSIFIGGGTPSLLKSSSIKKMMREIKKRINISNTAEITIEANPTTLEYKRFFNYKKSGINRFSIGVQTFNSDLLKKIERTYNKREAILAVEEIKKINKNFNLDIMYGLPNQSLKDVLLDLQYAVKYNPTHISWYQLTLEPNTPFYVKKLNLPNENNIFKMLVEGEKFLKQSGYKKYEISSYAKLNYECQHNLNYWNFGDYIGIGCSAHGKITQINGDIIRTIKNKNINDFMNGKYLKHKNFVLKKDKPFEYFMNIFRLYKPVLKRQFEERTNINQNYIKEKIKKAIEKGYLKNKIDFWDTTKKGKMFLNSLLKIFLD

SEQ ID NO: 11981 - DNA, 1131 bp, Buchnera aphidicola subsp
  CDS (1)..(1131): transl_table=11
atgtttacattgcctcctattagtctgtatattcatatcccgtggtgtctaaaaaaatgtggatattgtgatttttactcctatgttagtaaagaaatcattcctgaaaataaatatatagaacatttattaagagactttgaaagggacctatctctaattaataacagaaacattaatactatttttattggtggtggaacacctagtttattaaaaaatacatcaataaaaaatttattgaatggtattaaaaaaagaaagataatttctaaaaatatagaaattagtatagaagctaatcctaaaacgctagaatatcaaaattttattcaatataaaaattcaggtattaatcgcttttctttaggtattcaaacatttaattcaaaaatgctaaaaaaaatagaacgtacatataattcaaaagatgcgatgaatgcaatcatagaatcaaaaaaaattagtgataatattaatttagatttaatgtatggtttacctggtcagtcattagaagaggcattatcagatttacagatcgcaattcaatgcaacccatctcatatatcatggtaccaactaacaatcgaacctaatactgtattttatgcaaaaaaaatacaaacacctcatcaagatgtagtatttaatatgttgattgaaggagataagctattaaaaaaagctggatataaaaaatatgaaatatcatcatattcgaaattcaactatcaatgtcaacataatctaaattattggaattttggagattatataggaataggctgcggttctcatggtaaaattacgcaaaaaaatggggaaattattagaactattaaaaacaaaaacataaatgattttttaagtggaaaatatatcaattctgtatatcaagtgtctaaaagagataaaatattcgaatattttatgaacgtttttagactatataaacctattttcaaaaaacatttcagagaaaacactaatatagaagaaagttttatagaaaaaaatattcaaatcgctatacaagaaggattcttaattaatcaatcagattgttggcatacaacaaaaaagggaaagaattttttaaattcgctattagaaatatttttaaaataa

SEQ ID NO: 11982 - protein, 376 aa, Buchnera aphidicola subsp
MFTLPPISLYIHIPWCLKKCGYCDFYSYVSKEIIPENKYIEHLLRDFERDLSLINNRNINTIFIGGGTPSLLKNTSIKNLLNGIKKRKIISKNIEISIEANPKTLEYQNFIQYKNSGINRFSLGIQTFNSKMLKKIERTYNSKDAMNAIIESKKISDNINLDLMYGLPGQSLEEALSDLQIAIQCNPSHISWYQLTIEPNTVFYAKKIQTPHQDVVFNMLIEGDKLLKKAGYKKYEISSYSKFNYQCQHNLNYWNFGDYIGIGCGSHGKITQKNGEIIRTIKNKNINDFLSGKYINSVYQVSKRDKIFEYFMNVFRLYKPIFKKHFRENTNIEESFIEKNIQIAIQEGFLINQSDCWHTTKKGKNFLNSLLEIFLK

SEQ ID NO: 11983 - DNA, 24 bp, Artificial sequence
  primer
atgaatacaggtacatatttaatg

SEQ ID NO: 11984 - DNA, 20 bp, Artificial sequence
  primer
ttaaaaatcttcttccagag

SEQ ID NO: 11985 - protein, 483 aa, Artificial sequence
  consensus sequence
  Variant (2)..(2): Xaa in position 2 is any amino acid
  Variant (4)..(4): Xaa in position 4 is any amino acid
  Variant (6)..(6): Xaa in position 6 is any amino acid
  Variant (8)..(10): Xaa in position 8 to 10 is any amino acid
  Variant (12)..(12): Xaa in position 12 is any amino acid
  Variant (17)..(50): Xaa in position 17 to 50 is any amino acid
  Variant (51)..(73): Xaa in position 51 to 73 is any or no amino acid
  Variant (79)..(98): Xaa in position 79 to 98 is any amino acid
  Variant (99)..(107): Xaa in position 99 to 107 is any or no amino acid
  Variant (109)..(109): Xaa in position 109 is any amino acid
  Variant (111)..(111): Xaa in position 111 is any amino acid
  Variant (113)..(113): Xaa in position 113 is any amino acid
  Variant (116)..(129): Xaa in position 116 to 129 is any amino acid
  Variant (130)..(131): Xaa in position 130 to 131 is any or no amino acid
  Variant (133)..(133): Xaa in position 133 is any amino acid
  Variant (136)..(136): Xaa in position 136 is any amino acid
  Variant (138)..(138): Xaa in position 138 is any amino acid
  Variant (140)..(140): Xaa in position 140 is any amino acid
  Variant (142)..(147): Xaa in position 142 to 147 is any amino acid
  Variant (149)..(151): Xaa in position 149 to 151 is any amino acid
  Variant (154)..(154): Xaa in position 154 is any amino acid
  Variant (156)..(176): Xaa in position 156 to 176 is any amino acid
  Variant (177)..(185): Xaa in position 177 to 185 is any or no amino acid
  Variant (188)..(191): Xaa in position 188 to 191 is any amino acid
  Variant (193)..(193): Xaa in position 193 is any amino acid
  Variant (195)..(202): Xaa in position 195 to 202 is any amino acid
  Variant (203)..(205): Xaa in position 203 to 205 is any or no amino acid
  Variant (207)..(212): Xaa in position 207 to 212 is any amino acid
  Variant (213)..(214): Xaa in position 213 to 214 is any or no amino acid
  Variant (216)..(216): Xaa in position 216 is any amino acid
  Variant (218)..(218): Xaa in position 218 is any amino acid
  Variant (220)..(220): Xaa in position 220 is any amino acid
  Variant (222)..(223): Xaa in position 222 to 223 is any amino acid
  Variant (225)..(226): Xaa in position 225 to 226 is any amino acid
  Variant (228)..(230): Xaa in position 228 to 230 is any amino acid
  Variant (231)..(245): Xaa in position 231 to 245 is any or no amino acid
  Variant (247)..(262): Xaa in position 247 to 262 is any amino acid
  Variant (263)..(265): Xaa in position 263 to 265 is any or no amino acid
  Variant (267)..(269): Xaa in position 267 to 269 is any amino acid
  Variant (272)..(272): Xaa in position 272 is any amino acid
  Variant (274)..(282): Xaa in position 274 to 282 is any amino acid
  Variant (283)..(293): Xaa in position 283 to 293 is any or no amino acid
  Variant (296)..(297): Xaa in position 296 to 297 is any amino acid
  Variant (300)..(305): Xaa in position 300 to 305 is any amino acid
  Variant (306)..(307): Xaa in position 306 to 307 is any or no amino acid
  Variant (309)..(309): Xaa in position 309 is any amino acid
  Variant (311)..(311): Xaa in position 311 is any amino acid
  Variant (314)..(320): Xaa in position 314 to 320 is any amino acid
  Variant (321)..(355): Xaa in position 321 to 355 is any or no amino acid
  Variant (357)..(381): Xaa in position 357 to 381 is any amino acid
  Variant (382)..(400): Xaa in position 382 to 400 is any or no amino acid
  Variant (402)..(406): Xaa in position 402 to 406 is any amino acid
  Variant (407)..(407): Xaa in position 407 is any or no amino acid
  Variant (409)..(411): Xaa in position 409 to 411 is any amino acid
  Variant (413)..(441): Xaa in position 413 to 441 is any amino acid
  Variant (442)..(482): Xaa in position 442 to 482 is any or no amino acid
YXHXPXCXXXCXYCDFXXXXXXXXXXXXXXXXXXXXXXXXXXXXXXXXXXXXXXXXXXXXXXXXXXXXXXXXXGGGTPXXXXXXXXXXXXXXXXXXXXXXXXXXXXXEXTXEXNPXXXXXXXXXXXXXXXXGXNRXSXGXQXXXXXXLXXXGRXHXXXXXXXXXXXXXXXXXXXXXXXXXXXXXXDLXXXXPXQXXXXXXXXXXXAXXXXXXXXHXSXYXLXXEXXTXXXXXXXXXXXXXXXXXXPXXXXXXXXXXXXXXXXXXXGXXXYEXSXXXXXXXXXXXXXXXXXXXXHNXXYWXXXXXXXXGXGXGAXXXXXXXXXXXXXXXXXXXXXXXXXXXXXXXXXXXXXXXXXXRXXXXXXXXXXXXXXXXXXXXXXXXXXXXXXXXXXXXXXXXXXXXEXXXXXXRXXXGXXXXXXXXXXXXXXXXXXXXXXXXXXXXXXXXXXXXXXXXXXXXXXXXXXXXXXXXXXXXXXXXXXXXXXG

SEQ ID NO: 11986 - protein, 24 aa, Artificial sequence
  protein pattern
  Variant (2)..(3): Xaa in position 2 to 3 is any amino acid
  Variant (5)..(5): Xaa in position 5 is Phe, Ile, Leu or Val
  Variant (7)..(7): Xaa in position 7 is Phe, Ile, Leu or Met
  Variant (9)..(9): Xaa in position 9 is any amino acid
  Variant (11)..(11): Xaa in position 11 is Ala, Ser or Thr
  Variant (12)..(16): Xaa in position 12 to 16 is any amino acid
  Variant (18)..(20): Xaa in position 18 to 20 is any amino acid
  Variant (21)..(21): Xaa in position 21 is Asp, Glu, Gly or Asn
  Variant (23)..(23): Xaa in position 23 is any amino acid
GXXRXSXGXQXXXXXXLXXXXRXH

SEQ ID NO: 11987 - protein, 14 aa, Artificial sequence
  protein pattern
  Variant (2)..(2): Xaa in position 2 is any amino acid
  Variant (4)..(4): Xaa in position 4 is Phe or Trp
  Variant (6)..(8): Xaa in position 6 to 8 is any amino acid
  Variant (10)..(10): Xaa in position 10 is any amino acid
HXPXCXXXCXYCDF

SEQ ID NO: 11988 - protein, 20 aa, Artificial sequence
  protein pattern
  Variant (2)..(3): Xaa in position 2 to 3 is any or no amino acid
  Variant (5)..(6): Xaa in position 5 to 6 is any or no amino acid
  Variant (9)..(12): Xaa in position 9 to 12 is any amino acid
  Variant (13)..(13): Xaa in position 13 is Phe, Trp or Tyr
  Variant (14)..(14): Xaa in position 14 is any amino acid
  Variant (16)..(16): Xaa in position 16 is any amino acid
  Variant (18)..(18): Xaa in position 18 is any amino acid
  Variant (19)..(19): Xaa in position 19 is Ala, Gly or Ser
  Variant (20)..(20): Xaa in position 20 is Ala or Ser
HXXNXXYWXXXXXXGXGXXX

SEQ ID NO: 11989 - protein, 13 aa, Artificial sequence
  protein pattern
  Variant (2)..(2): Xaa in position 2 is Ile, Leu or Val
  Variant (4)..(4): Xaa in position 4 is any amino acid
  Variant (6)..(6): Xaa in position 6 is any amino acid
  Variant (8)..(9): Xaa in position 8 to 9 is any amino acid
  Variant (11)..(12): Xaa in position 11 to 12 is any amino acid
HXSXYXLXXEXXT

SEQ ID NO: 11990 - DNA, 1095 bp, Synechocystis sp.
  CDS (1)..(1095): transl_table=11
atgtttaggagtggcaacagcatcatgacgagccatcagctcaacgggcaacggagttaccttcagccgatccgcatcggggtgattggggtgggcaatatgggacagcaccataccagagtcctgagcctgatgaaggatgtggagtttgtgggtattgccgatgtcaatgtggaacggggcctagacaccgccagtaagtatcgggtgcatttttttgaagattatcaggagatgttgccccatgtggatgcggtttgtgtggcggttcccactaggctccatcacgatgtgggcatgaattgtttgcaaaataatgtccatactctgattgaaaaacccattgccgctagcattgctgaagcggaatccctggttaatgccgccgccgatgccaattgcattctccaagtggggcacattgaacgcttcaacccggcatttttagagctaaccaaaattctcaaaacggaagagttattggcgatcgaagcccatcgcatgagtccctattcccagcgggccaatgatgtctccgtggtattggatttgatgatccatgacattgacctgttgctggaattggtgggttcggaagtggttaaactgtccgccagtggcagtcgggcttctgggtcaggatatttggattatgtcaccgctacgttaggcttctcctccggcattgtggccaccctcaccgccagtaaggtcacccatcgtaaaattcgttccatcgccgcccactgcaaaaattccctcaccgaagcggattttctcaataacgaaattttgatccatcgccaaaccaccgctgattggagcgcggactatggccaggtattgtatcgccaggatggtctaatcgaaaaggtttacaccagtaatattgaacctctccacgctgaattagaacattttattcattgtgttaggggaggtgatcaaccctcagtggggggagaacaggccctcaaggccctgaagttagccagtttaattgaagaaatggccctggacagtcaggaatggcatgggggggaagttgtgacagaatatcaagatgccaccctggccctcagtgcgagtgtttaa

SEQ ID NO: 11991 - protein, 364 aa, Synechocystis sp.
MFRSGNSIMTSHQLNGQRSYLQPIRIGVIGVGNMGQHHTRVLSLMKDVEFVGIADVNVERGLDTASKYRVHFFEDYQEMLPHVDAVCVAVPTRLHHDVGMNCLQNNVHTLIEKPIAASIAEAESLVNAAADANCILQVGHIERFNPAFLELTKILKTEELLAIEAHRMSPYSQRANDVSVVLDLMIHDIDLLLELVGSEVVKLSASGSRASGSGYLDYVTATLGFSSGIVATLTASKVTHRKIRSIAAHCKNSLTEADFLNNEILIHRQTTADWSADYGQVLYRQDGLIEKVYTSNIEPLHAELEHFIHCVRGGDQPSVGGEQALKALKLASLIEEMALDSQEWHGGEVVTEYQDATLALSASV

SEQ ID NO: 11992 - DNA, 948 bp, Pyrococcus abyssi GE5
  CDS (1)..(948): transl_table=11
atgagagttggggtcgttggtgttgggaaaatgggctaccaccacgctagaatatactctgagctagctaaggagggcaaagttgaactcattggagtagcggacataaacttcgaaagagccaaggaagtcgccgaaacgttcaagacaagagcgtttaaagattacagagagcttataaaagagggcgtcgatgcagtaagcatagccgttccaacttcactacacagggaagttacaatggacttcatagagaacgaggtaagtgtcctcgtggaaaaaccaatagcagaaagcatagaaagtgcccaggagatcataaaggcagcaaagaaaatgaacgtggtactcatggttggtcatgtcgagagatttaatccagccgttcttaagttgaaggaaacgatagagagaggaatgctcggcgagatagtgacgatgacggcaaagagagtcggccctatggtcacgaggatctcggatgtaggggttataatagacctagcagttcacgacatagacgttatgagcttcttaactacctcgagggttatcgaggtttacgccaaagctagaaacgtaaagcatcccgccaaggttgaagattacgctcttatcctattaagcttcgagaacggagccaatggaataatagaaactaaccgattaacaccccacaagacgagaactctaaacgtcgtcggaaccgaggggatcgcttacctcgattacataaatcaggagttaacattgtacaacgaggaatggatttacaaggctaaaataaacaaggaagagcctcttaaacttgaaatcgaacacttcctggagtgtgttaaggagggtaaaaagccattggtcggtggagaagaaggattacatgccctaaaagttgccgtgaaagccttagaaagctccaaaaaagacgaagttgtgagggtgagttaa

SEQ ID NO: 11993 - protein, 315 aa, Pyrococcus abyssi GE5
MRVGVVGVGKMGYHHARIYSELAKEGKVELIGVADINFERAKEVAETFKTRAFKDYRELIKEGVDAVSIAVPTSLHREVTMDFIENEVSVLVEKPIAESIESAQEIIKAAKKMNVVLMVGHVERFNPAVLKLKETIERGMLGEIVTMTAKRVGPMVTRISDVGVIIDLAVHDIDVMSFLTTSRVIEVYAKARNVKHPAKVEDYALILLSFENGANGIIETNRLTPHKTRTLNVVGTEGIAYLDYINQELTLYNEEWIYKAKINKEEPLKLEIEHFLECVKEGKKPLVGGEEGLHALKVAVKALESSKKDEVVRVS

SEQ ID NO: 11994 - DNA, 1098 bp, Nostoc sp. PCC 7120
  CDS (1)..(1098): transl_table=11
gtggttgaggagagaacaatagtgcaaaatagcatgtcagtggcagaaccaaattcacatacacagcgcaaccagccacgaccgatacgcgtaggcgtaatcggcgtaggtaacatgggacaacatcacacccgtgtactcagttcaatgaaagatgttgaactagttggtgtttccgacatcaacgtcgaacgaggcctagaaaccgctagtaaatacaaagtgcggtttttcgaagattactgtgacctgcttccccatgtggaagctgtgtgcatagctgttcccactcgcttacactatgctgtaggcatcaactgtttgttagcgggaattcacgttttaattgaaaagccgatcgctgctagtatttctgaagcagaatcacttgtcaatgctgccgccgagtctcaatgtatcctccaagttgggcatattgagcgcttcaacccagcttttagagaactgagcaaagtgatgaaaactgaagaagttctcgcactagaagctcaccgcatgagtccttactcagaccgcgccaatgatgtttcagtcgtgctggatttaatgatccatgatattgatttactgctagaattggctgcttcaccagtaacaaaattaactgccagtggaactcgcgccttagactctggctatttggattatgtgactgcaactctagggtttgctaatgggatcgttgcaactctaactgccagcaaagtgactcatcgaaaaatccgtcgcatagttgcccattgtaaaaactctttcactgaagcagattttctcaaaaacgaaattttgatacaccgtcaaactgctgctagctcagtaaatgaccatcgccattacaggcaagatggtttaattgagaaagtttatactactaacgttcaacccttgagtgcagagcttgagcattttgtcaactgtgtacacggtgggaatcaaccttctgtgggtggtgaacaagctcttaaagccctcagattagcaagtttaattgagcaaatggctttagaagagcgggtatggaacccgttagactggcaatcagaatcaagggtacaatcactgactcaaagcatataa

SEQ ID NO: 11995 - protein, 365 aa, Nostoc sp. PCC 7120
MVEERTIVQNSMSVAEPNSHTQRNQPRPIRVGVIGVGNMGQHHTRVLSSMKDVELVGVSDINVERGLETASKYKVRFFEDYCDLLPHVEAVCIAVPTRLHYAVGINCLLAGIHVLIEKPIAASISEAESLVNAAAESQCILQVGHIERFNPAFRELSKVMKTEEVLALEAHRMSPYSDRANDVSVVLDLMIHDIDLLLELAASPVTKLTASGTRALDSGYLDYVTATLGFANGIVATLTASKVTHRKIRRIVAHCKNSFTEADFLKNEILIHRQTAASSVNDHRHYRQDGLIEKVYTTNVQPLSAELEHFVNCVHGGNQPSVGGEQALKALRLASLIEQMALEERVWNPLDWQSESRVQSLTQSI

SEQ ID NO: 11996 - DNA, 951 bp, Pyrococcus furiosus DSM 3638
  CDS (1)..(951): transl_table=11
atgctcagggtgggcgttgtaggcgttggaaacatggggtttcatcacgcaagggtctactctgaattggccagagaggggaaagtagagctcgtgggagttgctgatgtgaactttgaaagggctagagaggttgcaaagaagttcaacacaatcccgtacgctgactacaaggagctcgcaaaggaggatctagatgccgttagtatagcggttccaacgtccctccacaagcaggtggccatagaattcatggagaggggaataaacgtcctggtagagaagccgatagctgagagcatcgagagcgctagggaaatgattagggtagcaaaagagaataaagttattctaatggttggccacatagagaggttcaatccagccgtcatcaagctcaaggagagcatagagaagggcctcctaggagaagttatctccattagtgctaagagagtgggcccaatggcaattaggatcagggatgttgggataataatagatttgggggttcacgatatagatgtaataagttacctcttcaatgatagggttaggaaggtatacgccagggctggaaacgtgaagcatcctgctggagtggaagatcacgcgctcataatgctcggtttttcaaacggaaagagtgggataatagagacgaactggttaactccacataagacgagaacgttgacggccgttggaacggaggggatagcgtacctagactacatccagcagaagctcgtaatatacaacgatgaatgggagaaaatagcgaagatcgagagaagggaacccttaaagaacgagatcgagcacttcatagagtgcatcaaggaaaacaaggaacccttgatatctggtgaagatggattgcacgttcttaaggttgccctgaaggctttggagagctcaaaaagagatgaggtcttggaggtggaataa

SEQ ID NO: 11997 - protein, 316 aa, Pyrococcus furiosus DSM 3638
MLRVGVVGVGNMGFHHARVYSELAREGKVELVGVADVNFERAREVAKKFNTIPYADYKELAKEDLDAVSIAVPTSLHKQVAIEFMERGINVLVEKPIAESIESAREMIRVAKENKVILMVGHIERFNPAVIKLKESIEKGLLGEVISISAKRVGPMAIRIRDVGIIIDLGVHDIDVISYLFNDRVRKVYARAGNVKHPAGVEDHALIMLGFSNGKSGIIETNWLTPHKTRTLTAVGTEGIAYLDYIQQKLVIYNDEWEKIAKIERREPLKNEIEHFIECIKENKEPLISGEDGLHVLKVALKALESSKRDEVLEVE

SEQ ID NO: 11998 - DNA, 1035 bp, Chlorobium tepidum TLS
  CDS (1)..(1035): transl_table=11
atgcgcataggcgttgctggcgtcggcaagctcggcgagttccataccaacctgttgaagcagattgcagccgaagcttcggacgttgagttttccggcgtgttcgacctgaaccccgagcggttgcaggagatcggcaaaaaatacggtgtcgcgtgtttctcgacgctggaggaactggccgcttcgtgcgacgccgccgtcatcgcgacaacgaccagctcgcactacgccatcgcaaggcagcttctcgaagcgaggctgcacctcttcatcgagaaaccgatcacggcgacgctggaagaagccgacaagctgatccgcatcgagcaggagaagggactgaccatccaggtaggtcacatcgagcgcttcaacccggcgctgctggcggtcgagccgtatatcggcgagccgatgtacatccaggccgagcgcctgagcggcttttcgcgccgcgtgaccgacgtatcggtggtactcgatctgatgattcacgatatcgacctcgtgctctcgcttatcaagtccgacatccgcagcatcgcggcctcgggcgtgaaggtcttctcgaacgagctggacatggcaacggcgcgcatcgagttcgagaacggggccatcgccaacgtgacggcaagccggctgagccgcagcaaactccgcaaaatgcgctttttcactcgcaacccgaaaagctatgcctcgctcgacttcaccagcggcaagtcggaggtgtttcggctggttccgcccgaccagctctcttcgaaaaacccgatcaaaaatttcgcgacaaaaaaaattctcgaacagttcggggaaattcaggagtcactgaaggagatggcgctcgattacgtcagccccgatgtcccgaaaatcaacgcgctgaaagaagagctcgaacagttcatcgatgccatccgcaaaggtaagccggcgaaagtcacctccgaagagggacgccgcgcgttgatggtggccggaaaaatcaccgatgaaatccggaataatacggcagaccttgactga

SEQ ID NO: 11999 - protein, 344 aa, Chlorobium tepidum TLS
MRIGVAGVGKLGEFHTNLLKQIAAEASDVEFSGVFDLNPERLQEIGKKYGVACFSTLEELAASCDAAVIATTTSSHYAIARQLLEARLHLFIEKPITATLEEADKLIRIEQEKGLTIQVGHIERFNPALLAVEPYIGEPMYIQAERLSGFSRRVTDVSVVLDLMIHDIDLVLSLIKSDIRSIAASGVKVFSNELDMATARIEFENGAIANVTASRLSRSKLRKMRFFTRNPKSYASLDFTSGKSEVFRLVPPDQLSSKNPIKNFATKKILEQFGEIQESLKEMALDYVSPDVPKINALKEELEQFIDAIRKGKPAKVTSEEGRRALMVAGKITDEIRNNTADLD

SEQ ID NO: 12000 - DNA, 1050 bp, Thermosynechococcus elongatus BP-1
  CDS (1)..(1050): transl_table=11
gtgaaatcaatagacatgagttctgtcgtccgtccccagcccgaaccactgcgcattggcgtcattggtgttggcaacatgggtcagcaccacacccgtgttttgagtttactcaaagatgtcgaacttgtgggcatctccgatgtcaatctagagcggggcattgacacggctagcaaatatcgggtcaaattctttgaaaactatgtggatttgctgccccacgttgaggcggtctgtattgctgtgcccacccgtctccatcatgaggtggggattacctgcctgcgccacggggttcacgtcttggtggaaaaacccattgccgccagtattagcgaagcagagtcccttgttaacgcagcagcagagtgtcaatgcatcctccaagtcggacatattgagcgatttaaccctgcctttcaagagctcagcaaagtcctgcgtacggaggaaatccttgcccttgaggcggatcgcatgagtccctactccgagcgcgccaatgatgtctcagtggttctcgacttaatgatccacgacattgacctgctgttggaactcaccaattcccctgtagtgcgcctgacggcagcaggcagtcgctctgccaactccgggtatctagactatgtgaccgccaccttgggttttgccaatggtattattgccacgctcactgccagtaaggttacccaccgcaagcaacggcgcattgccgcccattgcaaaaattcccttacagaggcagatttcctcaaaaacgagattctcattcaccgcaaaaccaccgcatcctgccgtgccgatcatggccaagtcctttaccgccaagacggcctaattgagaaggtctatacgagtaacattgaacctctgcatgcggagctggagcactttgtcaactgcgttcgtggtggtcaagccccgtcggtgggtggggaacaggccctcaaggcattgcgcttggccagtctcatcgagcaattagcccttgatggccacagttgggggcacttagatacctccttggcgtccctcatgcgctaa

SEQ ID NO: 12001 - protein, 349 aa, Thermosynechococcus elongatus BP-1
MKSIDMSSVVRPQPEPLRIGVIGVGNMGQHHTRVLSLLKDVELVGISDVNLERGIDTASKYRVKFFENYVDLLPHVEAVCIAVPTRLHHEVGITCLRHGVHVLVEKPIAASISEAESLVNAAAECQCILQVGHIERFNPAFQELSKVLRTEEILALEADRMSPYSERANDVSVVLDLMIHDIDLLLELTNSPVVRLTAAGSRSANSGYLDYVTATLGFANGIIATLTASKVTHRKQRRIAAHCKNSLTEADFLKNEILIHRKTTASCRADHGQVLYRQDGLIEKVYTSNIEPLHAELEHFVNCVRGGQAPSVGGEQALKALRLASLIEQLALDGHSWGHLDTSLASLMR

SEQ ID NO: 12002 - DNA, 1005 bp, Prochlorococcus marinus subsp. marinus str. CCMP1375
  CDS (1)..(1005): transl_table=11
atgacccccgccatgattccggtgaaggttggggtaataggtataggtaacatgggttggcaccatgcaagagtgctaagtctgctaaaagatgctgaattaattggggttgctgatcttgactccaagcgtgggcaactagcaaaagaacaattcaattgttcatggtttgcaaactaccaagatttgcttgaagaagttgaggcagtatgcattgctgttcctaccttgtttcatcacgaggtgggcattaattgtttaaaagctggaaaacatgtcttaatagaaaaaccaatagcagcaagtcagcaagaagcctctgaacttatcgaggcttctaacgctgccaaaaggttattgcaagtaggccatattgaacggttcaatccagcctttaaagagcttacaaaagttgttactgatgaagaagtagttgttctagaagctaggcgtcatagccctcatccagatcgtgccaatgatgtatctgttgttttagatcttatgatccatgatctggatctagttcttgaattagctaatgctcctgtaacaagacttgccgctgttggaggatgcagtttcaatggtccaattgattatgtaaatgcaacacttggttttagtaatggtgtaattgcaagtcttactgccagcaaaatgagccacagaaaaattcgcactctcagtgctcattgtaaaaaaagtcttgtagaaacagattttttaaatcacacacttcatattcatcgaagagcacatgaatggtattcggctgatcatggcgaattgctttatagaactgacggattcgttgaagaagtaagcactacttcaatagaacctctttatgcagaactagaacatttcttacaatgcgttcgagggcttgagacgccagcagttgatggactgcaagcatctagggcattagttcttgcagacttaattgaaaaagctgtagaaaaaccagctaaagagatatccctagaaaaaccaatctaa

SEQ ID NO: 12003 - protein, 334 aa, Prochlorococcus marinus subsp. marinus str. CCMP1375
MTPAMIPVKVGVIGIGNMGWHHARVLSLLKDAELIGVADLDSKRGQLAKEQFNCSWFANYQDLLEEVEAVCIAVPTLFHHEVGINCLKAGKHVLIEKPIAASQQEASELIEASNAAKRLLQVGHIERFNPAFKELTKVVTDEEVVVLEARRHSPHPDRANDVSVVLDLMIHDLDLVLELANAPVTRLAAVGGCSFNGPIDYVNATLGFSNGVIASLTASKMSHRKIRTLSAHCKKSLVETDFLNHTLHIHRRAHEWYSADHGELLYRTDGFVEEVSTTSIEPLYAELEHFLQCVRGLETPAVDGLQASRALVLADLIEKAVEKPAKEISLEKPI

SEQ ID NO: 12004 - DNA, 1005 bp, Prochlorococcus marinus subsp. pastoris str. CCMP1986
  CDS (1)..(1005): transl_table=11
atgaaaccaacctcatcctcagtaaaggttggagtaatcggtataggaaatatgggatggcatcatgctcgagtgcttagtttgctaagagatgcagatttagttggagttgccgatccagacgaaagcagaggtaaattagcagtagagcaatttcaatgtgagtggtttaaagattatcatgatcttatttctaaagtggatgcaatttgtattgctgtccctacacttctccatcacaaagtaggcctagattgtcttaaggcaggtgttaatgttcttattgaaaaacctattgcagctactgagctagaggctaaatctttaataaatgcctctaaaattaataactgtcttctacaagttggacatattgaaagatttaaccctgcttttagggagttaaataaaataattcaaaatgaagatattgttgttttagaagcaagaaggcacagtcctcatgctgacagagcaaatgatgtgtcagtagttatggatttaatgattcatgatattgatctagtgcttgaattagttaattcaaagatacagaaattagccgccgtcggaggaagaaatagtgatggcttaatagattatgtaaatgctactttggttttcaagaataatattattgcaagcttaactgccagcaaaatgagtcataaaaaaattaggaatttaagtgcacattgccaaaatggtctagttgaaacagacttcttaaatcattctctacaaatccatagaaaagcgcatgaatcctatacagcagagcatggagaattagtttatcgaaatgatggttatgttgaagaagtaagcacaacctctatcgaacctttatatgcagaattagaacattttcttaagtgcgtacaaggtaaagagttaccagaagtggacggagaacaagcatcaagagcgttaaaaattgcagattttattgaatgtgcagtagaaaactctggtgatgcaatatcccttgaaatacccttctga

SEQ ID NO: 12005 - protein, 334 aa, Prochlorococcus marinus subsp. pastoris str. CCMP1986
MKPTSSSVKVGVIGIGNMGWHHARVLSLLRDADLVGVADPDESRGKLAVEQFQCEWFKDYHDLISKVDAICIAVPTLLHHKVGLDCLKAGVNVLIEKPIAATELEAKSLINASKINNCLLQVGHIERFNPAFRELNKIIQNEDIVVLEARRHSPHADRANDVSVVMDLMIHDIDLVLELVNSKIQKLAAVGGRNSDGLIDYVNATLVFKNNIIASLTASKMSHKKIRNLSAHCQNGLVETDFLNHSLQIHRKAHESYTAEHGELVYRNDGYVEEVSTTSIEPLYAELEHFLKCVQGKELPEVDGEQASRALKIADFIECAVENSGDAISLEIPF

SEQ ID NO: 12006 - DNA, 1038 bp, Prochlorococcus marinus str. MIT 9313
  CDS (1)..(1038): transl_table=11
ttgataatttccccgatgcgccatggcctgccgatgaccgatcccatggttccggtgaaggtcggtgtgatcgggattggcaatatgggttggcatcatgcccgtgtgctcagtctgcttaaggatgcgcagttggtggcagtcgctgatcccgatcctgagcgtggtcagctggcaactgaacagtttggatgcgattggttccctgactaccacagcttgctaggcgaggtcgaagccgtctgcattgctgtgccgacattgcttcatcacaaggtcgggcaggcctgcttggaggcaggcctgcatgtgttaatcgaaaaaccgattgcggccagtcaggaggaggcatccgcattgattgtggcggcgaataaggctggacggctcttgcaggttggccatattgaacgctttaaccctgcctttcgagagttgatcaaggtggtggaaaatgaggaggttgtggttcttgaggctcgtcgccatagcccccatggtgaccgagcgaatgatgtgtcggtggtgcttgatctgatgattcatgacctcgacttggttcttgagctggcgggtgctccggtggtaggtctggctgctgcagggggccgcactgccgagggcccgatcgattacgtcaatgccacgcttggcttcagcaatggtgtggtggctagcctcactgctagcaagatgagccaccgcaaaattcgcagtctcagtgcccattgtcggggcagtcttgttgagactgatttcctgaatcacaccctgcatatacatcgtcgtgctcatgagtggtattcagccgatcacggtgagttgttgtatcgcaatgacggttttatcgaagaggtcagcacgacttctattgagcctctctatgccgagttggagcattttcttcagtgtttgcgaggtcgtgagacaccagccgttgatggggagcaggcttcgcgcgcgcttcgtttggctgacctgattgaacatgccgtcgaacaccccggcatggggctttccttggaggagcccatctga

SEQ ID NO: 12007 - protein, 345 aa, Prochlorococcus marinus str. MIT 9313
MIISPMRHGLPMTDPMVPVKVGVIGIGNMGWHHARVLSLLKDAQLVAVADPDPERGQLATEQFGCDWFPDYHSLLGEVEAVCIAVPTLLHHKVGQACLEAGLHVLIEKPIAASQEEASALIVAANKAGRLLQVGHIERFNPAFRELIKVVENEEVVVLEARRHSPHGDRANDVSVVLDLMIHDLDLVLELAGAPVVGLAAAGGRTAEGPIDYVNATLGFSNGVVASLTASKMSHRKIRSLSAHCRGSLVETDFLNHTLHIHRRAHEWYSADHGELLYRNDGFIEEVSTTSIEPLYAELEHFLQCLRGRETPAVDGEQASRALRLADLIEHAVEHPGMGLSLEEPI

SEQ ID NO: 12008 - DNA, 1008 bp, Synechococcus sp. WH 8102
  CDS (1)..(1008): transl_table=11
atgtctcccgaccccatgcgtccggtcaaggtcggggtcatcggcattggaaacatgggctggcatcacgccagggtgctgagcctcctgaaagatgctcatctcgtgggtgtagctgaccccgatggcgatcgcggtgccctggcggtggagcaattcggctgccgttggttcgccgactaccgcacgatgctcagcgaggtggaggccgtttgtattgccgtgccgaccctgctgcaccatccagtcggcctggcctgcctggaagccggtctgcatgtgctgatcgagaagccgatcgctgccagtcaggacgaagcaacggcactgatcagcgctgcaaacgacgccggccgtctgctgcaggtgggtcacatcgagcgcttcaatcccgccttccgcgaactcacgaaagtggtggccaatgaggaggtggtggtcctggaggggcggcgccacagcccccatgcagaccgtgccaatgatgtgtcagtggtgctggatctgatgattcacgacatcgacctgatgctggaactggctcaggcgccggtggtgcggctcgccgccgccggaggtcgcagtgccgatggaccgatcgattacgtcaacgcgaccctcgggtttgagaacggtgtggtggccagtctcacggccagcaagatgagccaccgcaagatccgcagcctcagtgcgcactgccgttccagcttggttgagaccgacttcctgaatcacaccctgcacatccaccgccgcgcccacgagtggtattccgccgatcacggtgaattgctgtaccgcaacgatggcttcatcgaggaggtcagcaccacgtcgatcgaaccgctctatgccgagctcgagcattttctgcagtgtgtccgtggccgtgaaacgcccgctgtggacggcctgcaggcctccagagcactgcgtttggccgatctgatcgagcaggcggtggaacatcccgacatgggtgtgccccttaccgatccgatctga

SEQ ID NO: 12009 - protein, 335 aa, Synechococcus sp. WH 8102
MSPDPMRPVKVGVIGIGNMGWHHARVLSLLKDAHLVGVADPDGDRGALAVEQFGCRWFADYRTMLSEVEAVCIAVPTLLHHPVGLACLEAGLHVLIEKPIAASQDEATALISAANDAGRLLQVGHIERFNPAFRELTKVVANEEVVVLEGRRHSPHADRANDVSVVLDLMIHDIDLMLELAQAPVVRLAAAGGRSADGPIDYVNATLGFENGVVASLTASKMSHRKIRSLSAHCRSSLVETDFLNHTLHIHRRAHEWYSADHGELLYRNDGFIEEVSTTSIEPLYAELEHFLQCVRGRETPAVDGLQASRALRLADLIEQAVEHPDMGVPLTDPI

SEQ ID NO: 12010 - DNA, 1032 bp, Gloeobacter violaceus PCC 7421
  CDS (1)..(1032): transl_table=11
atgctgcaaaatacgggtgactccgtgcccatccgcgtcggtgtcatcggcgtgggcaacatgggccagcaccatacccgggtgctgagtctgctcaaggatgtgaccctggtcggcattgccgatgtcgacgaagcgcgcggcctggatgtagccagtaaataccgggtgcagttttttaaagactaccgtgaactgatcgagcacgtcgaggccgtctgcatcgcggtgcccacccgcctgcactacaccgtcgggcaggagtgtctcaaatcgcggcggcacattttgatcgaaaagccgattgccgcccacatctccgaggccgaagaactggtcaacctcgccgcccaaaacggccgcattttgcaagtgggccacatcgagcgcttcaacccggcctttcgcgagttgcgcaacgtcctcaagcaagaagaactgctcgccttcgaagcccaccgcatgagcccctattcatcgcgggccaacgacgtttcggtggtcttcgacttgatgatccacgacatcgacttgcttttagaactggtgccctacccgatggccaagatgaccgccgccggcaaccgcgccacccactcgggctatctcgactacgtgaccgccacggtcgtcttctccaacggcaccgtcgccaacctcaccgcgagcaaagtcacccaccgcaagatccgcaccctctcggcccactgcaaaaacagcctggtggaggccgattttttgagcggcgaagtgctcatccaccgcccccccgagtcggactacaccaccgagtacggccaggtgctctaccgccaggcgggcctgatcgagaaggtccagaccagcaatatcgagccattaagcgccgaactcgaacactttattcactgtgtgcgcggtggcaaccagccttcggtggggggcgagcaggccctcaaggccctgcgcctggcggcccagatcgagcaggtggccctcgacggcaaaatgtggtatggtaccgacccagatttggcggagatcctcgcttga

SEQ ID NO: 12011 - protein, 343 aa, Gloeobacter violaceus PCC 7421
MLQNTGDSVPIRVGVIGVGNMGQHHTRVLSLLKDVTLVGIADVDEARGLDVASKYRVQFFKDYRELIEHVEAVCIAVPTRLHYTVGQECLKSRRHILIEKPIAAHISEAEELVNLAAQNGRILQVGHIERFNPAFRELRNVLKQEELLAFEAHRMSPYSSRANDVSVVFDLMIHDIDLLLELVPYPMAKMTAAGNRATHSGYLDYVTATVVFSNGTVANLTASKVTHRKIRTLSAHCKNSLVEADFLSGEVLIHRPPESDYTTEYGQVLYRQAGLIEKVQTSNIEPLSAELEHFIHCVRGGNQPSVGGEQALKALRLAAQIEQVALDGKMWYGTDPDLAEILA

SEQ ID NO: 12012 - DNA, 969 bp, Leptospira interrogans serovar Copenhageni str. Fiocruz L1-130
  CDS (1)..(969): transl_table=11
atgacagaaagagttaaactcggcgtgatcggaaccggtcatatgggccagtatcacgtaaacgttgccaaaacccttaacgacgcaaccctagttggaatttacgactcggatttagaaagagcaaaacaaatcgcagaaaaacataaaactctagcattctctacaatcgacgaattaatttcaaaaacagatgcggttgtaattgcagttcctacttttttgcatcatgaaattgccaaaaaagcattagaagccaacaaacacgtattagtcgaaaaacctattgctgaaactaccaatcaagccaaggaactcgtaaaaatcgctggggaaaaaaatttagttcttcttgtaggccacgtggaaagatttaacggagcagtattagaattaagtaaaattgtaaaagatcctttgttgatagaatctagaagactagctccctctaattctagaattaaagacgtcggagttgtcctagatatgatgattcacgatattgatattgtgctgaacctggtaaattctcccgttaaaaaactctctgcctcaggtaaaaaggtatcatccgatcacgaagacgttgcaaatgtgttactcgaatttgaaaacggatgcctagcaagtattactgcgtccagagcaactcaagcaaaaattagaaccttgaatatcactcagaaagacgtctatatcatgctcgattttacggatcaagaaatagaactacatagacaagccacttcggacattcttcttttatccgaagagatcaaatatcgccaggaatcaatcgtggaaaaaatattcgttcataaagacaatcctctcaaacaagaacacgaacattttatccgttgtatcagaaaagaaatagaaccgatcgtgaatagaaattcggacgtttctactttagaaattgcttatcaaattctttcggaaattcacggaacttctaataagtaa

SEQ ID NO: 12013 - protein, 322 aa, Leptospira interrogans serovar Copenhageni str. Fiocruz L1-130
MTERVKLGVIGTGHMGQYHVNVAKTLNDATLVGIYDSDLERAKQIAEKHKTLAFSTIDELISKTDAVVIAVPTFLHHEIAKKALEANKHVLVEKPIAETTNQAKELVKIAGEKNLVLLVGHVERFNGAVLELSKIVKDPLLIESRRLAPSNSRIKDVGVVLDMMIHDIDIVLNLVNSPVKKLSASGKKVSSDHEDVANVLLEFENGCLASITASRATQAKIRTLNITQKDVYIMLDFTDQEIELHRQATSDILLLSEEIKYRQESIVEKIFVHKDNPLKQEHEHFIRCIRKEIEPIVNRNSDVSTLEIAYQILSEIHGTSNK

SEQ ID NO: 12014 - DNA, 1005 bp, Prochlorococcus marinus str. MIT 9515
  CDS (1)..(1005): transl_table=11
atgaaaccaacctcatcttcagtaaaggttggagtaatcgggataggaaatatgggatggcatcatgctcgtgtgcttagtttgctgaaagatgcagatttagtaggagttgcagatccaaacgaaaacagaggtaaattggcggtagagcaatttcaatgtgagtggtttaaagattatcatgagcttctttcaaaagttgatgcgatttgtatagctgtccctacgcttcttcaccacaaagtaggtctagattgtcttaaggccggtattaatgttcttatagagaaacctattgcagctaatgagttggaagcaaaatctttaatcaatgcctctaaagttagtaattgtcttctacaagttgggcatattgaaagatttaatcctgcttttagagagttaaataaaatagttcaaaatgaagaaattgttgttttagaagcaagaaggcacagtcctcatgcagatagagcaaatgatgtatcagttgtaatggatttaatgattcatgatattgatctagttcttgaattagtaaattcaaaaatacagaaattagcggctgtaggaggaagaaacagtgagggcttaatagattatgtaaatgctactttagttttcaacaataatattattgcgagtttgactgccagcaaaatgagtcataaaaaaatcaggagtttaagtgcacattgccagaatggtcttgtggaaacggacttcttaaaccattcattacaaatccatagaaaggctcatgaatcctatacagcagagcatggagaattagtttatagaaatgatggttatgttgaggaagtaagcacaacctctattgaacctttgtatgcagagttagagcactttcttaagtgcgtacaaggtaaagaatctcccgaggtggatggagaacaagcctcaagggcattaaaaattgcagattttattgagtgtgcagtagaaaactcaggtgatgcaatatcacttgaaatacctttctaa

SEQ ID NO: 12015 - protein, 334 aa, Prochlorococcus marinus str. MIT 9515
MKPTSSSVKVGVIGIGNMGWHHARVLSLLKDADLVGVADPNENRGKLAVEQFQCEWFKDYHELLSKVDAICIAVPTLLHHKVGLDCLKAGINVLIEKPIAANELEAKSLINASKVSNCLLQVGHIERFNPAFRELNKIVQNEEIVVLEARRHSPHADRANDVSVVMDLMIHDIDLVLELVNSKIQKLAAVGGRNSEGLIDYVNATLVFNNNIIASLTASKMSHKKIRSLSAHCQNGLVETDFLNHSLQIHRKAHESYTAEHGELVYRNDGYVEEVSTTSIEPLYAELEHFLKCVQGKESPEVDGEQASRALKIADFIECAVENSGDAISLEIPF

SEQ ID NO: 12016 - DNA, 1023 bp, Prochlorococcus marinus str. NATL1A
  CDS (1)..(1023): transl_table=11
atgaaaaaaatttccaagatcaacgaaaatattattcctgtaaaagttggcgtaataggaattgggaatatggggtggcatcatgcgagagtacttagtcttctcaaagatgctgagctaattggagttgcggatttagacgaagaacgaggaaagttggctatggagcaatttaattgtaattggtatggaaactataaggatttattacatcaagtagaagctgtatgtattgctgtacctacgttatttcaccatgaagttggtctagaatgtctaaagtctggtaaacatgttttaattgaaaaaccgatagcagcaaataaagaagaagcatcatctttgatcaatgcttcaaacaatgcaaaaaaattattacaagttggtcatatagaaagatttaatcctgcatttagagaattgacaaaagtagttgcgaatgaagaagttgtagttcttgaagcaagaaggcatagtcctcatcccgagagagctaatgatgtatcggtcgttttagacttaatgattcatgatattgatttagttattgaactagcaaattcaaaagtaataaggcttgctgccgttggaggatgcagtggagacggacctatggattacgttaacgcaacactgggttttcaaaacggggtggttgcaagtttgactgcaagcaaaatgagtcacaaaaaaatcagaagtttgagcgctcattgcaaagaaagtcttattgaaacagatttcctaaatcacaatattcacatccataggaaggctcatgaatggtattcagctgatcatggagaattactttatagaaacgatggttttattgaagaagtgagtacaacatcaattgagccgttgtatgcagaactggagcattttctacaatgcgtcagagggaaggagaagccagctgtagacggtcttcaagcttctagagcacttcatctggctgatttaattgaaaaggcagtatcaataccaagtgaagacattttgctaagcaaagggatctag

SEQ ID NO: 12017 - protein, 340 aa, Prochlorococcus marinus str. NATL1A
MKKISKINENIIPVKVGVIGIGNMGWHHARVLSLLKDAELIGVADLDEERGKLAMEQFNCNWYGNYKDLLHQVEAVCIAVPTLFHHEVGLECLKSGKHVLIEKPIAANKEEASSLINASNNAKKLLQVGHIERFNPAFRELTKVVANEEVVVLEARRHSPHPERANDVSVVLDLMIHDIDLVIELANSKVIRLAAVGGCSGDGPMDYVNATLGFQNGVVASLTASKMSHKKIRSLSAHCKESLIETDFLNHNIHIHRKAHEWYSADHGELLYRNDGFIEEVSTTSIEPLYAELEHFLQCVRGKEKPAVDGLQASRALHLADLIEKAVSIPSEDILLSKGI

SEQ ID NO: 12018 - DNA, 1023 bp, Prochlorococcus marinus str. MIT 9303
  CDS (1)..(1023): transl_table=11
atgcgccatggcttgccgatgaccgatcccatggttccggtgaaggtcggtgtgatcgggattggcaatatgggttggcatcatgcccgtgtgctcagtctgcttaaggatgcgcagctggtggcagtcgctgatcccgatcctgagcgtggtcagctggcaactgaacagtttggatgcgattggtttcctgactaccacagcttgctaggcgaggtcgaagcggtctgcattgctgtgccgacattgctccatcacaaggtcgggcaggcctgcttggaggcaggcctgcatgtgttaatcgaaaaaccgattgcggccagtcaggaggaggcatccgcattgattgtggcggctaataaggctggacggctcttgcaggttggccatattgaacgttttaaccctgcctttcgagagttgatcaaggtggtggaaaatgaggaggtggtggttcttgaggctcgtcgccatagcccccatggtgaccgagccaatgatgtgtcggtggtgcttgatctgatgattcatgacctcgacttggttcttgagctggcgggtgctccggtggtaggtcttgctgctgcagggggccgcactgccgagggtccgatcgattacgtcaatgccacgcttggcttcagcaatggtgtggtggctagcctcacggctagcaagatgagccaccgcaaaattcgcagtctcagtgctcattgtcggggcagtcttgttgagactgatttccttaatcacaccttgcatatacatcgtcgtgctcatgagtggtattcagccgatcacggtgagttgttgtatcgcaatgacggttttatcgaagaggtcagcacgacttctattgagcctctctatgccgagttggagcattttcttcagtgtttgcgaggtcgtgagacaccagccgtggatggggagcaggcttcgcgcgcgctgcgtttggctgacctgattgaacatgccgtcgaacaccccggcatggggctttccttggaggagcccatctga

SEQ ID NO: 12019 - protein, 340 aa, Prochlorococcus marinus str. MIT 9303
MRHGLPMTDPMVPVKVGVIGIGNMGWHHARVLSLLKDAQLVAVADPDPERGQLATEQFGCDWFPDYHSLLGEVEAVCIAVPTLLHHKVGQACLEAGLHVLIEKPIAASQEEASALIVAANKAGRLLQVGHIERFNPAFRELIKVVENEEVVVLEARRHSPHGDRANDVSVVLDLMIHDLDLVLELAGAPVVGLAAAGGRTAEGPIDYVNATLGFSNGVVASLTASKMSHRKIRSLSAHCRGSLVETDFLNHTLHIHRRAHEWYSADHGELLYRNDGFIEEVSTTSIEPLYAELEHFLQCLRGRETPAVDGEQASRALRLADLIEHAVEHPGMGLSLEEPI

SEQ ID NO: 12020 - DNA, 960 bp, Methylococcus capsulatus str. Bath
  CDS (1)..(960): transl_table=11
atgaatcctttgaaatgtgccgtgatcggcgttggttatctcggtaagttccacgcggaaaaatatgctgccctgccgggctgcgaactggtcgccgtggtcgacgccgatccggtcaccgcagcggagatcggcgatcgcctgggtgtccgcggcctgactgatcatcgtgccctgctgggcaaggtggatgcggtgagcgtcgtggtgccgaccagtctgcaccaccgcgtcgcccgggattttctcgaggccggcgcgcacgtgctggtggagaagcccatcaccgtgacggtggaggaggccgacgagctgatccggatcgccaaggaaaaacagcgcgtgctgatggtcggccacctggagcgcttcaatgccgccgtgctggggctggacctggatcaccacaagccgctgttcatcgaatcgcaccggctggcgccgttcaagccccgcgccaacgatgtcagcgtcgtgctggacctgatgatccacgacatcgacatcatcctcgacatggtcgattccgaggtggagcgtatcgatgccaagggtgtggccgtgctcaccggcgacatcgacatcgccaacgcccgcctccagttcaagagcggctgtgtcgccaatgtcaccgccagccgggtgagcctgaaggtcgaacgcaagatgcgcatgttcatgcccaacgcctatgtttcggtcgatttccagaaccgcgtgctggcccgccatcgcaagggcgagggcgagatgttccccggcgtgccggaaatcctcagcgaagaatcggtgttcgagaacggcgacgccctgatggaggaaatccgccatttcctcgattgcatccgcgagcaccgggagccgctggtgtccggagcggccgggcgccgggcgctggcgacggccatcgaaatcacgaatttgctgaaagttcaagaatcgaggagttgtaccgcatga

SEQ ID NO: 12021 - protein, 319 aa, Methylococcus capsulatus str. Bath
MNPLKCAVIGVGYLGKFHAEKYAALPGCELVAVVDADPVTAAEIGDRLGVRGLTDHRALLGKVDAVSVVVPTSLHHRVARDFLEAGAHVLVEKPITVTVEEADELIRIAKEKQRVLMVGHLERFNAAVLGLDLDHHKPLFIESHRLAPFKPRANDVSVVLDLMIHDIDIILDMVDSEVERIDAKGVAVLTGDIDIANARLQFKSGCVANVTASRVSLKVERKMRMFMPNAYVSVDFQNRVLARHRKGEGEMFPGVPEILSEESVFENGDALMEEIRHFLDCIREHREPLVSGAAGRRALATAIEITNLLKVQESRSCTA

SEQ ID NO: 12022 - DNA, 939 bp, Methanosarcina barkeri str. Fusaro
  CDS (1)..(939): transl_table=11
ttgattagagtaggagtaataggtacaggtgctatgggacagaaccacgtaagaatttacagtgaaatgaatgacgtggagcttgccggaatctcggatgtagaccagaagcgtgttgaagcaatggctacacaattcaagacaaaagcctttacagattataagaaaatgttagctgaagggcttgatgcggtaagtgtggttgtgcccaccaagctgcataagcaggtcgtacttgatgctcttgaggcaggtgtacatgtccttgtagaaaagccgattgcagatacgactgaaaacgcggacttgatgatagcagctgcacaaaaagcgggaaaaatccttatggttgggcacatcgagcgctttaatcccgcagttataaaactcaaagagattataaattcaggcattttgggaaagatagtctcaatctcaaccaaacgagtaggcccctataacccgagaataagagacgtgggagtaatcctggatattggcgtccatgatatagatgtgatctcatatctttacggtaagaaaataaatagtgtttatgcaattgcaggtgctgacattcactcatttgaagatcacgcctcaattatcctgcgtatggaccataattttgcaggggttgtggaaacaaactggctgactccgcacaagataaggcagttaacagcgattgggattaagggagttgcctatctggactatattaatcagacagtacagctacatgataacgaatggataagaaaagccaaagtagaacatagcgaacccctgaaaaatgaactcacttattttatagattgtgctacaaagggtagaaaacctaacccctgtggagaagacggaaaacatgcccttgaagtcgcaatggcagctataaaatcctaccaggaagaaagattaattgaagtaggacaataa

SEQ ID NO: 12023 - protein, 312 aa, Methanosarcina barkeri str. Fusaro
MIRVGVIGTGAMGQNHVRIYSEMNDVELAGISDVDQKRVEAMATQFKTKAFTDYKKMLAEGLDAVSVVVPTKLHKQVVLDALEAGVHVLVEKPIADTTENADLMIAAAQKAGKILMVGHIERFNPAVIKLKEIINSGILGKIVSISTKRVGPYNPRIRDVGVILDIGVHDIDVISYLYGKKINSVYAIAGADIHSFEDHASIILRMDHNFAGVVETNWLTPHKIRQLTAIGIKGVAYLDYINQTVQLHDNEWIRKAKVEHSEPLKNELTYFIDCATKGRKPNPCGEDGKHALEVAMAAIKSYQEERLIEVGQ

SEQ ID NO: 12024 - DNA, 1065 bp, Anabaena variabilis ATCC 29413
  CDS (1)..(1065): transl_table=11
atgtcagtggcagaaccaaattcacatacacagcgtaaccagccacgaccgattcgcgtaggcgtaatcggcgtaggtaacatgggacaacatcacacccgtgtactcagttcaatgaaagatgttgaactggtcggtgtttccgacatcaacgtcgaacgaggcctagaaaccgctagtaaatacaaggtgcggttttttgaagattactgtgacctgcttcctcatgtagaagccgtgtgcatagccgttcccactcgcttacactacgctgtaggcatcaactgtttgttagcgggaattcacgttttaattgaaaagccgatcgctgctagtatttctgaagcagaatcccttgtcaatgctgccgccgagtctcaatgtatcctccaagttgggcatattgagcgcttcaacccagcttttagagaactgagcaaagtgatgaaaactgaagaagttctcgcactagaagctcaccgtatgagtccttactcagaccgcgccaatgatgtttcagtggtactggatttaatgatccatgacattgatttactgctagaattagctgcctcaccagtaacaaaattaactgccagtggaacccgcgccttagactctggttatttggattatgtgactgcaactctagggtttgctaatgggattgtggcaactctaactgccagcaaagtaactcaccgaaaaatccgtcgcatagttgcccattgtaaaaactctttcactgaagcagattttctcaaaaacgaaattttgatacaccgtcaaacttctgctagcccggtcaatgaccatcgccattacaggcaagatggtttaatcgagaaagtttatactactaacattcaacctttgagcgcagaacttgagcattttgtcaactgtgtacacggtgggaatcaaccttctgtgggtggtgaacaagcccttaaagctctcagattagcaagtttaattgagcaaatggctctagaagaaagggtatggaacccgttagactggcaatcagaatcaagagtacaatcactgactcaaagcgtatag

SEQ ID NO: 12025 - protein, 354 aa, Anabaena variabilis ATCC 29413
MSVAEPNSHTQRNQPRPIRVGVIGVGNMGQHHTRVLSSMKDVELVGVSDINVERGLETASKYKVRFFEDYCDLLPHVEAVCIAVPTRLHYAVGINCLLAGIHVLIEKPIAASISEAESLVNAAAESQCILQVGHIERFNPAFRELSKVMKTEEVLALEAHRMSPYSDRANDVSVVLDLMIHDIDLLLELAASPVTKLTASGTRALDSGYLDYVTATLGFANGIVATLTASKVTHRKIRRIVAHCKNSFTEADFLKNEILIHRQTSASPVNDHRHYRQDGLIEKVYTTNIQPLSAELEHFVNCVHGGNQPSVGGEQALKALRLASLIEQMALEERVWNPLDWQSESRVQSLTQSV

SEQ ID NO: 12026 - DNA, 1008 bp, Synechococcus sp. CC9605
  CDS (1)..(1008): transl_table=11
atgtctcccgaccccatggtcccagtcaaggtcggggtgatcggcatcggcaacatgggttggcatcacgctcgggtgctcagtcttctgcgggatgccgatctggttggagtcgcggatccggatgctgagcgcggcaagctcgccactgagcaattcggctgccgctggttcgccgactactacgccatgctttcggaggtggaggccgtttgcatcgcggttcccacggtgctgcaccatcccgtcggtctggcctgcctgcgtgcgggcgtacacgttctgatcgaaaagccgattgcggcaagtcaggatgaagccaccgcactgattgaggccgcttctgcggcgggatgtctgctgcaggtgggccacatcgagcggttcaacccagcctttcgtgagctcaccaaggtggtggccaacgaggaggtggtggttcttgaggcccgtcgccacagtccccactccgatcgggccaatgacgtctccgtggtgctggatctgatgatccatgacatcgacctcgtgctggagctggcgaaggcaccagtggtgcagctcgccgctgccggtggtcgcagtgccgaaggcccgatcgattacgtcaacgccacgttgggtttcaagaacggtgttgtggccagcctcatggccagcaaaatgagccaccgcaaaatccgcagcctcagtgcgcactgccgttcgagcctggtggagacggacttcctcaaccacactctgcacatccaccgccgggcccatgagtggtattccgccgatcatggtgagctgctctatcggaatgacggcttcatcgaggaggtgagcaccacctcgatcgagccgctctatgccgagctcgagcattttctgcagtgcgtgcgcggccgtgagacccctgcggtggatggtcttcaggcctcgcgggctctcaagttggcagacctgatcgagcaggccgttgaacacccggatacgggagcgcccctgtgcgcaccgatctga

SEQ ID NO: 12027 - protein, 335 aa, Synechococcus sp. CC9605
MSPDPMVPVKVGVIGIGNMGWHHARVLSLLRDADLVGVADPDAERGKLATEQFGCRWFADYYAMLSEVEAVCIAVPTVLHHPVGLACLRAGVHVLIEKPIAASQDEATALIEAASAAGCLLQVGHIERFNPAFRELTKVVANEEVVVLEARRHSPHSDRANDVSVVLDLMIHDIDLVLELAKAPVVQLAAAGGRSAEGPIDYVNATLGFKNGVVASLMASKMSHRKIRSLSAHCRSSLVETDFLNHTLHIHRRAHEWYSADHGELLYRNDGFIEEVSTTSIEPLYAELEHFLQCVRGRETPAVDGLQASRALKLADLIEQAVEHPDTGAPLCAPI

SEQ ID NO: 12028 - DNA, 1005 bp, Prochlorococcus marinus str. MIT 9312
  CDS (1)..(1005): transl_table=11
atgcacccaacctcatcccccgtaaaggttggagtcataggtataggaaatatgggctggcatcatgctcgagtacttagtttacttaaagatgcaaatctcgttggagttgcagatccaaatgaagagagaggcaaattagctattgagcaatttcaatgtgaatggttcaaagattataaagacttaattcctaaagttgatgctatatgtatcgctgtcccaacactactacatcacaaagttggattggattgtctaaagggaggttccaacgttcttattgaaaaaccaattgcagctaacgagtcagaagcacaatctttaatagatgcctctaatgcaagtaattgtctattacaagttggccatattgaaagatttaatcccgcttttagggagctaaataaaatagtgcataatgaagaaattgttgttttggaagcaagaagacatagtcctcacgcagatagagcaaatgatgtatcggtagtaatggatttaatgattcatgatattgatcttgttttagagcttgtaaactcaaaaatacaaaaattagcagctgttggaggcagaaatagtgaaggattaatagattatgtaaatgccactttggtttttaaaaataatgttattgcaagcttaactgcaagcaaaatgagccataaaaaaattagaagtttaagcgctcactgtcaaaatgggcttgtagaaactgatttcttaaatcactctctacaaatccatcgaaagtcacatgaatcatatactgcagagcatggcgaattagtttataggaatgacgggtatgtcgaagaagttagcacaacttccattgagcctctttatgcagaattggaacattttcttaaatgcgttcaaggcaaagaaacacctgaggtagatggtgagcaggcctcaagagctttaaaaatagcagattttatagagagtgctgtagaaaattctggagatgcgattttacttgaaaatccattctaa

SEQ ID NO: 12029 - protein, 334 aa, Prochlorococcus marinus str. MIT 9312
MHPTSSPVKVGVIGIGNMGWHHARVLSLLKDANLVGVADPNEERGKLAIEQFQCEWFKDYKDLIPKVDAICIAVPTLLHHKVGLDCLKGGSNVLIEKPIAANESEAQSLIDASNASNCLLQVGHIERFNPAFRELNKIVHNEEIVVLEARRHSPHADRANDVSVVMDLMIHDIDLVLELVNSKIQKLAAVGGRNSEGLIDYVNATLVFKNNVIASLTASKMSHKKIRSLSAHCQNGLVETDFLNHSLQIHRKSHESYTAEHGELVYRNDGYVEEVSTTSIEPLYAELEHFLKCVQGKETPEVDGEQASRALKIADFIESAVENSGDAILLENPF

SEQ ID NO: 12030 - DNA, 1062 bp, Synechococcus elongatus PCC 7942
  CDS (1)..(1062): transl_table=11
atgagtgcagctgctgcgcaagccctcagcaagcgggtcaagccgatccgcgtcggcgtgattggcgtcggtcacatgggccaacaccatgcccgtgtccttagctttttgaaagatgttgagctcgttggaatcgctgatgttgatgtcgagcgaggcctagaaactgccagcaactatcggattcgctacttcgaagactatcgggagcttttaacgctggtcgatgcggtctgtatcgccgttcccaccaagctgcatcacgatgtgggcatgacctgtttggcggctggcgtccatgtactgatcgaaaaaccgatcgcagccagcttggccgaggcagaatccttggtcaatgcagcagcggaagcccaatgcattctccaagtcggccatatcgagcgctttaaccccgctttccaagagctgagcaaagtcctcaagactgaagaaattctggctttggaagctcatcggatgagcccctacgctcagcgggctaacgatgtctccgttgtcttggatttgatgatccatgacattgacttgttactggctctagctaatgcacccgtcacccaagtcagtgcgcgcggcagcaaggctttgggttctgagcaactggactatgtgacagcgaccctgagttttgctaacggcatcatcgctactctgacggccagcaaagtcacccatcgcaagatccgccgcattgctgctcactgccgcaactgcctgactgaagcagattttctcaacagcgaaattctgattcaccgccaaacaacgacccatctgtcgagtgactatggccaagtgctctaccgccaagatggtctgattgagaaagtttcaaccagcaatatcgaaccgttgcacgctgagctggagcatttcgtcaactgcgtgcgtggcggcgaccagccctccgttggcggtgagcaggcaattaaagcgctgcgcttggcccgcgaaattgaaacgatggcgctggatgggcgaccttggcaaagcgggcgtgaagcaggagtggccacagagatcacgccaattcttccctag

SEQ ID NO: 12031 - protein, 353 aa, Synechococcus elongatus PCC 7942
MSAAAAQALSKRVKPIRVGVIGVGHMGQHHARVLSFLKDVELVGIADVDVERGLETASNYRIRYFEDYRELLTLVDAVCIAVPTKLHHDVGMTCLAAGVHVLIEKPIAASLAEAESLVNAAAEAQCILQVGHIERFNPAFQELSKVLKTEEILALEAHRMSPYAQRANDVSVVLDLMIHDIDLLLALANAPVTQVSARGSKALGSEQLDYVTATLSFANGIIATLTASKVTHRKIRRIAAHCRNCLTEADFLNSEILIHRQTTTHLSSDYGQVLYRQDGLIEKVSTSNIEPLHAELEHFVNCVRGGDQPSVGGEQAIKALRLAREIETMALDGRPWQSGREAGVATEITPILP

SEQ ID NO: 12032 - DNA, 951 bp, Syntrophus aciditrophicus SB
  CDS (1)..(951): transl_table=11
atgaaaaaaattcgagtgggcgttgtcggcatcggtcatctgggaaactatcatctgcagaaatatgcgaaaattgaggatgtggagatcgtcggggcatcggacagcctgcctgaacgagcccggaaggcggcggatctcttcggctgcgaggcctttaacgatcaccggcagctcctcgggcgggtggacgccgtgagcgttgctgtgccgacaggggcgcattattccgtgacccgtgattttctggaggccggcgctcatgtgctccttgagaaaccgatcacggaaacgctggcgcaggccgatgaactggtcgctctggcggagaaaggcggactcgtttttcagatcggatttgtggagcgcttcaatccggctattgccgctctggaaggtgttatgaaaaagccggtctttatcgaggctcaccgtctccatccttttttcgaacgcggaacggacgttgacgttgttcttgacctcatggttcacgatctggatctcatccttcactttgtgaaatcttccgtaaagcatgttgatgccgtcggggtgtctgttctttccgacaaagtggacattgccaatgcgcgtcttaccttcacgaacgggtgtgtggcgaatgtaaccgccagcagggtgaccgccaaaaccatgcagaagatccggttttttgaaaccaacggttatcattcagccgattgcgctgccaggaaggttcagtctctgcagaagaaaacgcatccggacggcaggatcgagattgcggaagttcctttgaacatcccctcccacgatcctctcgaggctgaagtccggtcctttgttcaggctatacagaccggatcgccgcctcccgtgaccggaagggaggggcggcagtccctggaagtggccttgaaaattgtagatcgcattcaagaggccaggcgggcctctggcggataa

SEQ ID NO: 12033 - protein, 316 aa, Syntrophus aciditrophicus SB
MKKIRVGVVGIGHLGNYHLQKYAKIEDVEIVGASDSLPERARKAADLFGCEAFNDHRQLLGRVDAVSVAVPTGAHYSVTRDFLEAGAHVLLEKPITETLAQADELVALAEKGGLVFQIGFVERFNPAIAALEGVMKKPVFIEAHRLHPFFERGTDVDVVLDLMVHDLDLILHFVKSSVKHVDAVGVSVLSDKVDIANARLTFTNGCVANVTASRVTAKTMQKIRFFETNGYHSADCAARKVQSLQKKTHPDGRIEIAEVPLNIPSHDPLEAEVRSFVQAIQTGSPPPVTGREGRQSLEVALKIVDRIQEARRASGG

SEQ ID NO: 12034 - DNA, 942 bp, Methanococcoides burtonii DSM 6242
  CDS (1)..(942): transl_table=11
atgatcatgatccgcgtaggtgtcattggcgtaggtgcaatgggacaacatcatgtcaggatatacagtgaaatggaagaagttgaacttgtaggcatttcagatgttgaccaaaaaagagttcaggaactggcagaccaatatggagtcaaggcgtttacagatcataacaaactcttagatgaaggcctggatgccgtaagtatcgttgtacctacaacccttcataaaaaagttactctcgatgctataaattcaaataccaacgtacttgtggaaaagccaattgcagacacgcttgaaaatgctgacataatgatagaagcagcggagaaagcaggccttacactgatggtaggtcatatagagagattcaatccagctacttcaaaaatgaaagaaataatcgaaagcggacttctcggaagaatcgtttccatatctacaagaagagtaggaccgtataatccgagaatacgggatgtgggcatcatcctcgatcttggtgtacatgacattgatgcgatctcctacatgtatgcaagcaacgtatcagaagtctatgcgatcgcaggaaaagacgtgcattcacaggaagaccatgcatccataatgcttcgttttgaagataatagagcaggagttgctaacactaactggctgaccccgcataaagtaaggaaaatggaagtaattggcgtggatggtgtcggatatctggattatatcgaccagaccgtgacaatacatgatgcaaactgggtaagggatgcaaaggtcgaaaaaggtgaacccctggcaaaagaacttgagcatttcattgaatgcaccagaacaggtaaaagacctattgtatcgggtattgaaggcaaacatgcattgaatgttgccctcgctgccatagagtcatataatacgaataagctcgtcaagatcaaatga

SEQ ID NO: 12035 - protein, 313 aa, Methanococcoides burtonii DSM 6242
MIMIRVGVIGVGAMGQHHVRIYSEMEEVELVGISDVDQKRVQELADQYGVKAFTDHNKLLDEGLDAVSIVVPTTLHKKVTLDAINSNTNVLVEKPIADTLENADIMIEAAEKAGLTLMVGHIERFNPATSKMKEIIESGLLGRIVSISTRRVGPYNPRIRDVGIILDLGVHDIDAISYMYASNVSEVYAIAGKDVHSQEDHASIMLRFEDNRAGVANTNWLTPHKVRKMEVIGVDGVGYLDYIDQTVTIHDANWVRDAKVEKGEPLAKELEHFIECTRTGKRPIVSGIEGKHALNVALAAIESYNTNKLVKIK

SEQ ID NO: 12036 - DNA, 1041 bp, Acidobacteria bacterium Ellin345
  CDS (1)..(1041): transl_table=11
ttgtccaagcctatccgtgtcgccgtgattggagcgggagcgttcggcaagaaccatgcccgtgtttattccgaactgcatcgtgagacccaggccggcaccctgccgcagggcacgcccggcgtagaactcgtcggcattgtcgacagcgacaccgctcgcgccgcgcagatcgccgccactcacgaaactcgcgcttatgcttcgatccgcgaactgctggcgcacggcggagccgatgccgtctccattgcggtgcccacgaaattccatcgcaatgtggcgcgtgaagctctcgaagccggcttcgacgtgctgattgaaaagccgctcgccgccacgctcgaagaagcagacgagatcattgacctcgcggccgagcatcgccgcatcgcgcaggtcggacacctcgaacgcttcaatcctgctgtccgcgcgacgatcccgctcatcaccaagcccatgtttttcgagattcaccgcctgagcctcttcggtccgcgcgctctcgacgtggatgtcgtcctcgacctcatgatccacgacatcgacatcatcctgtcgttcgttgcaggcgaagtggttgaagtgcgcgccgtcggtctgccggtgctctcgcagaaggtggatatcgccagcgtgcgcctgcaattcgcaaacggatgcatcgccaatctcactgcgagccgagtttcgacggaacgcgtgcgcaaactgcgcttcttccagcccaaccaatacgtgtcgatcgattacgcgcgccaggatgtgctggtgtttacggtgaacaagatggcgcagcacacgcccaacgatggtggcctgccgcaaatgccggatgtaatgccgtcgaaaccgccggtggtgccggaagagccgctgcgctcggaaatcctcagcttcctgcaagcagtgcaaactcgggaaacgccagtggtgtcgttggaagatggccgccgagctttggcggttgcgttggaaattcagaaggcgattgaagaacacgccgagcgggcgcatctggatgcgctgacgaagtag

SEQ ID NO: 12037 - protein, 346 aa, Acidobacteria bacterium Ellin345
MSKPIRVAVIGAGAFGKNHARVYSELHRETQAGTLPQGTPGVELVGIVDSDTARAAQIAATHETRAYASIRELLAHGGADAVSIAVPTKFHRNVAREALEAGFDVLIEKPLAATLEEADEIIDLAAEHRRIAQVGHLERFNPAVRATIPLITKPMFFEIHRLSLFGPRALDVDVVLDLMIHDIDIILSFVAGEVVEVRAVGLPVLSQKVDIASVRLQFANGCIANLTASRVSTERVRKLRFFQPNQYVSIDYARQDVLVFTVNKMAQHTPNDGGLPQMPDVMPSKPPVVPEEPLRSEILSFLQAVQTRETPVVSLEDGRRALAVALEIQKAIEEHAERAHLDALTK

SEQ ID NO: 12038 - DNA, 1071 bp, Trichodesmium erythraeum IMS101
  CDS (1)..(1071): transl_table=11
atgtcaacactatattcaactgattttaccaaaaatagtcaagcaaaactacttcgtgtaggggtaattggggtcggtaatatggggcagcatcatacccgtgtcctaagcttgctcaaagatactgaattagtaggtgtagcagatatcaatgttgaaaggggactagatactgccagtaagtatggagttcgtttttttgaggagtatcaagagcttttgcctcatgttgatgctgtctgtgtcgctgtgcccactcttcaacattatgctgtaggaatgacctgcttaaaggcgggagttcatgtactaatggaaaaacccatcgctgccagtattggtgaggcggagtttttggttaatactgctgctgaaacaaatagaattttacaggtgggtcatatagaaaggtttaatcctgcttttcaagaactcagtaaagttctgaaaacggaagaattactggccttggaagctcatcggatgagtccttattctcatagggctaatgatgtgtctgtagtgttggacttgatgattcatgatattgatttattactagagttggtggctgccccagttgtcaaactgactgctagtggtagtagtgcttctagttcgggaaatttagattacgttacggctactcttggctttgctaatggtattgtggctactttaacggccagtaaggtgacacataaaaaacttcgttccatcgttgcccactgtaaaaattctttgacagaggcagattttctcaacaatgaaattctgattcaccgtcaaacaacaggagattatgtgactgactatggtcaggttctttatcgtcaggatggtttaattgaaagggtttatactagcaatattgaacctcttcatgcagaattagagcattttgtttattgtgtaggtggaggaaataaaccttcagttggaggagaacaagctcttaaggcattaagattaggtagtttgattgagaaaatagctattgatgatttggcttaccatccagtagattcagaatttaatttgttgaataattctatgctgaaagtggggtaa

SEQ ID NO: 12039 - protein, 356 aa, Trichodesmium erythraeum IMS101
MSTLYSTDFTKNSQAKLLRVGVIGVGNMGQHHTRVLSLLKDTELVGVADINVERGLDTASKYGVRFFEEYQELLPHVDAVCVAVPTLQHYAVGMTCLKAGVHVLMEKPIAASIGEAEFLVNTAAETNRILQVGHIERFNPAFQELSKVLKTEELLALEAHRMSPYSHRANDVSVVLDLMIHDIDLLLELVAAPVVKLTASGSSASSSGNLDYVTATLGFANGIVATLTASKVTHKKLRSIVAHCKNSLTEADFLNNEILIHRQTTGDYVTDYGQVLYRQDGLIERVYTSNIEPLHAELEHFVYCVGGGNKPSVGGEQALKALRLGSLIEKIAIDDLAYHPVDSEFNLLNNSMLKVG

SEQ ID NO: 12040 - DNA, 1005 bp, Synechococcus sp. CC9311
  CDS (1)..(1005): transl_table=11
atgaccgaccctatggttccggtaaaggtcggagtgatcggaatcggcaacatgggttggcatcatgcccgtgtgctcagtcttttgaaggatgcggatctggttggtgtttccgatccggatgccaaacgcggagcgctggcaaaagaccagtttgattgccgctggtttgcggattaccgcgagatgctgtctgaggtcgaagcggtttgtattgctgtgccgaccctgcttcaccatgccgttggtttggcctgcttagaggctggactccacgttttgatcgaaaagccgattgcggccagtcaggaggaagcggcttccctcagcgagtcggcaagccgggttgatcggctgttgcaggtgggacatatcgaacgcttcaatcccgcgtttcgtgagttgaccaaggtggttgcgaatgaggaagttgtcgtgctggaagcccgacgtcatagcccccattccgatcgagccaatgatgtttcggtggttcttgatttgatgatccacgatttggatcttgtgttagagctcgctggggcgtctgttgtgcatttatcggcggccggcggaaggagctcccaaggccccatcgattacgtcaacgccacattgggcttcgataacggtgtggtggcaagtctgactgccagcaaaatgagccatcgcaagatcaggagcctgagtgctcactgccgagggagcctggtggaaacagatttcttgaatcacaccttgcacattcatcggcgcgctcatgagtggtattcggctgaccacggcgagctgttgtatcgcaacgatggtttcatcgaagaggtgagcaccacttccatcgagccgctttacgctgagctggagcatttcctgcaatgtgttcgaggtcgtgaaaccccggccgtggatggccagcaggcgtctcgggctctgcgccttgccgacatgattgagcaggctgtggagcggccaggagttggcattgctctggacgctccgatttga

SEQ ID NO: 12041 - protein, 334 aa, Synechococcus sp. CC9311
MTDPMVPVKVGVIGIGNMGWHHARVLSLLKDADLVGVSDPDAKRGALAKDQFDCRWFADYREMLSEVEAVCIAVPTLLHHAVGLACLEAGLHVLIEKPIAASQEEAASLSESASRVDRLLQVGHIERFNPAFRELTKVVANEEVVVLEARRHSPHSDRANDVSVVLDLMIHDLDLVLELAGASVVHLSAAGGRSSQGPIDYVNATLGFDNGVVASLTASKMSHRKIRSLSAHCRGSLVETDFLNHTLHIHRRAHEWYSADHGELLYRNDGFIEEVSTTSIEPLYAELEHFLQCVRGRETPAVDGQQASRALRLADMIEQAVERPGVGIALDAPI

SEQ ID NO: 12042 - DNA, 939 bp, Alkalilimnicola ehrlichei MLHE-1
  CDS (1)..(939): transl_table=11
atgacgggcaagctgcgctgtgccgtggtcggaaccgggcacttggggcggtttcacgccgacaaatacgccgctctgccggactgtgagttggtggccgtggtggacgtggacgaggccgccggccgggcggtggccgacaagcatggcgtaccgctgctggacgaccatcgggcgctgctgggccaggtcgacgccgtcagcgtggcggcacccacgtcgctgcactaccggatcacccgggacctgctctccgccggggtccacgtgctggtggaaaagcccatcaccaccaccctggatgaggccgacgagttgattgaactggcccaccggcacggtgccctgctccaggtggggcacctggagcggttcaatgcggcgctgatggacctggacatgaagaacaagccgccccggttcatcgaatgccaccgactggcaccgttcaagccgcgggccacggatgtcagcgtggtcctcgatctgatgatccacgacatcgacatcattctctcgctggtcaacgagacgccggagcggatcgatgccaagggcgtgccggtgctcacccaggacaccgacatcgccaatgcccggctgcagttccccgggggctgcgtggccaacgtcaccgccagccgggtcagcatgaaggtggagcgcaaggtgcggctcttcctgccccacggctatgtctccgtggacttccagaaccgggtgttgacccaccaccggcccggtgaccgggagatgttcccgggcataccggagatcatcagcgaggagtcggtgttcgaggatggcgacgccctgatggcggagatccgcgacttcacggcatgtatccgggaggggcgaacgccgctggtggacggccacgccggtcgccgggcactggccacggccatccagatcagcaaacaactgcagtactaa

SEQ ID NO: 12043 - protein, 312 aa, Alkalilimnicola ehrlichei MLHE-1
MTGKLRCAVVGTGHLGRFHADKYAALPDCELVAVVDVDEAAGRAVADKHGVPLLDDHRALLGQVDAVSVAAPTSLHYRITRDLLSAGVHVLVEKPITTTLDEADELIELAHRHGALLQVGHLERFNAALMDLDMKNKPPRFIECHRLAPFKPRATDVSVVLDLMIHDIDIILSLVNETPERIDAKGVPVLTQDTDIANARLQFPGGCVANVTASRVSMKVERKVRLFLPHGYVSVDFQNRVLTHHRPGDREMFPGIPEIISEESVFEDGDALMAEIRDFTACIREGRTPLVDGHAGRRALATAIQISKQLQY

SEQ ID NO: 12044 - DNA, 957 bp, Solibacter usitatus Ellin6076
  CDS (1)..(957): transl_table=11
atgagccaggaaactagagtcgccgtgatcggcgccggagccttcggacagaatcactgccgcgtggtccacgaatccgagcgcgcgcagcttgcggccatcgtcgataccgatgccgcgcgtgccggcgccgccgccgcgcagtatcagaccgaggcgctcaccgacgcgcgcgaactggcgggcaaaatcgacgcggccatcatcgcggcgcccaccacgttccactccgacattggctgcgcgctgctcgaagccggcatcgacgtgctggtggagaaacccatcgcgcatgatctcgccggggccgaccgcctggtggaaaccgccgaacgccacggccgcatcctgcaggtgggacatctggagcggtttaaccccgccgtggttgcgctggaacagcgggcttccctgcccctgtttttcgaaatccaccggatgaacctgttcagcccgcgcagcctggacgtggacgtggtcctggacctgatgatccacgacgtggatatcgtcctttccctggccaacgcggagcctgaagaaatccgcgcagccgggatctcgattctttccggcaaggtggatatcgccaatgtccgcctgcagtttcccaacggctgcgtcgccaacctgaccgccagccgcatctccacggagcgcgtccgcaaactccgcctcttccagccgcatcaatacctttcgctggactatgggcggcaggatctggcggttttcagtgtctcgggcgaacgccagatcggcttcgaacaggcgacggtggtcaagggcgaacccctgaagctgcagttcgaggccttcctggattccgtggccacacgcaaatctccgaaatcttccgggcccgcggcgcgtcgaacattagcggctgctctggcgattcttgataaaatcaaggagcactccgaaattgtctccaaaaccttggttgatggatga

SEQ ID NO: 12045 - protein, 318 aa, Solibacter usitatus Ellin6076
MSQETRVAVIGAGAFGQNHCRVVHESERAQLAAIVDTDAARAGAAAAQYQTEALTDARELAGKIDAAIIAAPTTFHSDIGCALLEAGIDVLVEKPIAHDLAGADRLVETAERHGRILQVGHLERFNPAVVALEQRASLPLFFEIHRMNLFSPRSLDVDVVLDLMIHDVDIVLSLANAEPEEIRAAGISILSGKVDIANVRLQFPNGCVANLTASRISTERVRKLRLFQPHQYLSLDYGRQDLAVFSVSGERQIGFEQATVVKGEPLKLQFEAFLDSVATRKSPKSSGPAARRTLAAALAILDKIKEHSEIVSKTLVDG

SEQ ID NO: 12046 - DNA, 996 bp, Magnetococcus sp. MC-1
  CDS (1)..(996): transl_table=11
atgacacatgatatcaatccctatgcgggacgtgctttgcgggctggggttattggtgtaggttatcttggtcgttttcacgcacaaaagttcaacaaaatagctggggttgagctggcggtggtggtggataacgatgccgcgcgcgcgcgcatggtgggggaagaattaggcgtaccctatagcaccgattatcgggatgtgctggctgatctggatctggtctctgtggttgtgccaaccccctatcactacaaagtggccagccactgccttgcagctggggtgcatgtgctcctcgaaaagcccatcacggtcacggtcgaagaggccgacgagctggttacgctggccgagcagaacaacatggtattgcaggttggacatcttaagcggtttcaccctgctgtggttgcgctcaagcagagcggtttgttgaaaaaaagcccgcgctttatccaagcgcagcggctggcccctttcaagtcgcgggcattagatgtggatgtggtgctggatttgatgattcatgacgtggatctgatactcaatttcatggatgccgaagtggcatcggtggaggccattggtgcccctgtgctcacctcgcatattgatatggccaatgctcgcttgcactttaccaacggctctattgccgatatcacggcatcgcgggtggcccgcaatgcggtgcggcagatccgcatgtttcaggatgacgcctatatcaaactcgattttattaccaagggcatccgcatctctaaacgggttgagggcaacatgcaactggatggggtaaccgtacctgccatggttgaagagcagcttcccatacaggattatgatacactggaagccgaggtaagcgccttttgcgcggctgttgcaggagggacgccgcctttggtaagtggccgggatggtcgcaaggcacttgaggttgtggagcgcattcggcagagcatctttggccgtaacgccagtcagtaa

SEQ ID NO: 12047 - protein, 331 aa, Magnetococcus sp. MC-1
MTHDINPYAGRALRAGVIGVGYLGRFHAQKFNKIAGVELAVVVDNDAARARMVGEELGVPYSTDYRDVLADLDLVSVVVPTPYHYKVASHCLAAGVHVLLEKPITVTVEEADELVTLAEQNNMVLQVGHLKRFHPAVVALKQSGLLKKSPRFIQAQRLAPFKSRALDVDVVLDLMIHDVDLILNFMDAEVASVEAIGAPVLTSHIDMANARLHFTNGSIADITASRVARNAVRQIRMFQDDAYIKLDFITKGIRISKRVEGNMQLDGVTVPAMVEEQLPIQDYDTLEAEVSAFCAAVAGGTPPLVSGRDGRKALEVVERIRQSIFGRNASQ

SEQ ID NO: 12048 - DNA, 1071 bp, Nostoc punctiforme PCC 73102
  CDS (1)..(1071): transl_table=11
atgtcagtggcagaaccgaatctatatacacagcgcaaccagccacgaccgatccgcataggcgtgattggagtgggtaacatgggacaacaccacgctcgcgtgctgagttcaatgaaagatgttgaactggtcggagtggcagatattaacgtcgaacgaggattagaaactgccagcaagtacaaggtgcgtttttttgaagattactgtgacctgctaccccttgtggaagcagtttgtgtagctgttcccacccgtctgcactatgccgtgggtattagctgtctgctagcgggaattcatgttttgattgaaaaaccgatcgcagccagtatttctgaggcagagtctctagtaaatgcggcggcagagtctcagtgtatcctgcaagtaggtcatattgagcgtttcaacccagcttttaaagaactgagccaagttctgaaaacggaggaattgctagcgctagaagcccatagaatgagtccttactcagatcgggcaaacgatgtttcggttgtgctggatttaatgatccatgacatcgacctacttttagaattagctgcttccccagtcacaaaattgactgctagcggtactcgctccttggactctggttatttagattacgtaactgccactttgggatttgccaatggtattgttgctactctgactgccagtaaagtcactcaccgaaaaattcgccggattgtcgcccattgcaaaaattcatttactgaggcggattttctcaagaatgaaattttgattcaccgacaaacagctgccaattctctcaccgaccaccgacaagtactttacaggcaagatggtgtgattgaaaaagtctacaccagcaatattcaacctttgagcgcagaattagaacattttgtcaactgtgtacatggtggcaatcaaccctcagtaggtggcgaacaagctctcaaagccctgagactggcaagtttgattgagcagatggcgctggaagatcgagtttggaatccattagactggcaatcggaaccaagggtacaatcactgaccccgacagcctag

SEQ ID NO: 12049 - protein, 356 aa, Nostoc punctiforme PCC 73102
MSVAEPNLYTQRNQPRPIRIGVIGVGNMGQHHARVLSSMKDVELVGVADINVERGLETASKYKVRFFEDYCDLLPLVEAVCVAVPTRLHYAVGISCLLAGIHVLIEKPIAASISEAESLVNAAAESQCILQVGHIERFNPAFKELSQVLKTEELLALEAHRMSPYSDRANDVSVVLDLMIHDIDLLLELAASPVTKLTASGTRSLDSGYLDYVTATLGFANGIVATLTASKVTHRKIRRIVAHCKNSFTEADFLKNEILIHRQTAANSLTDHRQVLYRQDGVIEKVYTSNIQPLSAELEHFVNCVHGGNQPSVGGEQALKALRLASLIEQMALEDRVWNPLDWQSEPRVQSLTPTA

SEQ ID NO: 12050 - DNA, 1062 bp, Crocosphaera watsonii WH 8501
  CDS (1)..(1062): transl_table=11
atgtcagagacacaacaacccctaaaatctcaaagaggcacctttgaacccattcgtattggtgttatcggagtagggaacatggggcaacatcatagccgaattcttagcctactcaaagatgtgcaattagtgggcgtgtctgatgtcaatgtggaacgggggatcgatattgccagtaaatatagagtccgtttttttgaacattaccaggatctgcttccccatgtagatgcagtatgtattgcagttcccactcgcttgcatcattccgttggtatggactgtttacaagctggtgttcacaccctcattgaaaaacccatcgctgctagtattgctgaagctgaatctttagttaaccaggctgctagttctcatggtattttgcaggtgggtcatatcgaacgctttaaccctgctttccaagaactgagtaaagtcctaaaaacagaagaggtattagccttagaggcacatcgtatgagtccttattctcaaagggctaatgatgtttctgtggttttggatttaatgatccatgacattgacttattattagagttggttaaatcaccagtggttaagttaaccgccagtggcagttgtggctcaaattctcgtcatcttgattatgtaaccgcgacactagggtttgctaatggtattgtcgctaccctaaccgctagtaaagtaactcatcgtaaaatccgccgtttagcagcacactgcaaaaattgtttaaccgaagcggattttcttaacaacgatattttaattcaccgacaaaccacagctaactatagcaccgactatggacaagtattataccgtcaggacggcttaattgaaaaagtccataccactaagatagaacctttacacgcagaattagagcattttgttcattgtgtgcggggaggggatcaaccctctgtaggagggactcaggctttaaaagccctgcgtttagccagttccattgaacaaatggctttagatggtaaagtctgggaaaactctgatgttagctatcaatatctaaatccttctgtttcctga

SEQ ID NO: 12051 - protein, 353 aa, Crocosphaera watsonii WH 8501
MSETQQPLKSQRGTFEPIRIGVIGVGNMGQHHSRILSLLKDVQLVGVSDVNVERGIDIASKYRVRFFEHYQDLLPHVDAVCIAVPTRLHHSVGMDCLQAGVHTLIEKPIAASIAEAESLVNQAASSHGILQVGHIERFNPAFQELSKVLKTEEVLALEAHRMSPYSQRANDVSVVLDLMIHDIDLLLELVKSPVVKLTASGSCGSNSRHLDYVTATLGFANGIVATLTASKVTHRKIRRLAAHCKNCLTEADFLNNDILIHRQTTANYSTDYGQVLYRQDGLIEKVHTTKIEPLHAELEHFVHCVRGGDQPSVGGTQALKALRLASSIEQMALDGKVWENSDVSYQYLNPSVS

SEQ ID NO: 12052 - DNA, 960 bp, Croceibacter atlanticus HTCC2559
  CDS (1)..(960): transl_table=11
atgctaaaagcaggagttcttggcgcaggacatttaggaaaaatacacttgcgtcttttacaggaatctaaccgatatgaccttgttggtttttacgattcaaataaagattacggaaaagaaatagcagcgcaatttggctataggcagtttgacacaattgaagaattgttggaaaatgtagatatggtagatgttgtaacacctacaacatttcatttcgaaaatgccaaacaaattattaaggctggtaaacacctttttgtagaaaagcctataacaagtacagttgaagaggctcaagaattacttcagttagctaaagactataatgtaaaaggacaggtaggacacgtagagcgttttaatcctgcatttaaatctgttaaagatgaaatctccaatactatgtttattgaagcacatagattggcagagtttaatcctagaggaacagatgttcctgtagtattagatcttatgatacatgatatagatgcaatcttaagtgttgtaaaatcaaaagttaaacacgtaagcgcaagtggtgtttctgttattagcgacacgccagatattgcaaatgctcgtatagagtttgaaaacggttgcgttgccaatcttacagctagtagaatttctttaaaaaacatgcgtaaagcaagatttttccaaaaagatgcatacatctctgtcgattttctaactaagaaatgtgaggttgtaaaaatgaaagatgctccagaacaaccaggagattttgatatgattttgcagaatgccgaaggtgttaaaaaacaaatctattttgacaatccagaagttactgaaaataatgccattttagatgagttagagacatttgcagacgcaattgaaaataacacgacgccaattgtaactttagaacaaggtgcagaagctctacgtgtggcaaaactaattataaacgaattttaa

SEQ ID NO: 12053 - protein, 319 aa, Croceibacter atlanticus HTCC2559
MLKAGVLGAGHLGKIHLRLLQESNRYDLVGFYDSNKDYGKEIAAQFGYRQFDTIEELLENVDMVDVVTPTTFHFENAKQIIKAGKHLFVEKPITSTVEEAQELLQLAKDYNVKGQVGHVERFNPAFKSVKDEISNTMFIEAHRLAEFNPRGTDVPVVLDLMIHDIDAILSVVKSKVKHVSASGVSVISDTPDIANARIEFENGCVANLTASRISLKNMRKARFFQKDAYISVDFLTKKCEVVKMKDAPEQPGDFDMILQNAEGVKKQIYFDNPEVTENNAILDELETFADAIENNTTPIVTLEQGAEALRVAKLIINEF

SEQ ID NO: 12054 - DNA, 1005 bp, Prochlorococcus marinus str. MIT 9211
  CDS (1)..(1005): transl_table=11
atgaccccagccatgactcctgtaaaggttggggtaataggaattgggaacatgggctggcaccatgcccgtgttttaagccttcttaaagatgcagagctaattggtgtggctgatttagatcccgatcgaggccaacttgctactgagcaatttaattgtgaatggtatgaaaactacgagagcttgctagatcaagtagaggctgtctgcattgcagttcctacgttgcttcatcataaagttggtcttaattgtcttgaggctaaaaagcatgttcttatagaaaagccaattgcggcaagtcaattagaagcttcagatctcatagccgcatcaaataaagccaatcgattacttcaagttggtcatatagaaaggtttaatccagcttttaaagaattaacgaaagtagtcactaacgaggaagttgttgttttagaagcaagacgtcatagtcctcatgcagatagagctaatgatgtttctgtggtgttagatctaatgattcatgatcttgatctagtacttgagcttgctaatgcccctgtagttaggttggctgcagttggtggccgtagcggagatggtcctatggattatgtaaatgcaactcttggttttagtaatggtgtggtggcgagtcttactgcaagcaaaatgagtcataaaaagattcgtagtcttaccgcacattgcaagaaaagtcttgttgaaacagatttcctaaaccacacactgcacattcatcgtcgatcacatgaatggtattcggcagatcatggagaattgctatatagaaatgatggatttattgaagaagttagtaccacttcaattgaacctttatacgcagagcttgaacattttcttcaatgcgtaagaggcttagaaactcctgctgtagatgggcagcaagcatctagagcactttttcttgcagatctaatagaacacgctgttgatcatcctggagagggaatctcattagaaaaagccatttag

SEQ ID NO: 12055 - protein, 334 aa, Prochlorococcus marinus str. MIT 9211
MTPAMTPVKVGVIGIGNMGWHHARVLSLLKDAELIGVADLDPDRGQLATEQFNCEWYENYESLLDQVEAVCIAVPTLLHHKVGLNCLEAKKHVLIEKPIAASQLEASDLIAASNKANRLLQVGHIERFNPAFKELTKVVTNEEVVVLEARRHSPHADRANDVSVVLDLMIHDLDLVLELANAPVVRLAAVGGRSGDGPMDYVNATLGFSNGVVASLTASKMSHKKIRSLTAHCKKSLVETDFLNHTLHIHRRSHEWYSADHGELLYRNDGFIEEVSTTSIEPLYAELEHFLQCVRGLETPAVDGQQASRALFLADLIEHAVDHPGEGISLEKAI

SEQ ID NO: 12056 - DNA, 1005 bp, Synechococcus sp. RS9917
  CDS (1)..(1005): transl_table=11
atgaccgaccccatggttccggtgaaggtcggcgtgatcggcatcggcaacatggggtggcaccacgcccgggtgctcagcttgctcaaggacgcggagctggtcggcgttgcagatcccgacgccaagcggggccagctggccactgaacagttcgcgtgtcgctggttcgcggattacaacgcgatgctcacggaggtggaggcggtctgcatcgcggtgcccaccctgctccaccaggccgttggtctggcctgtctggatgccggcctgcatgtgctgatcgaaaagccgatcgccgccagccaggacgaggccgccaccctgatcgcggcggccagccgcaacggtcgcctgcttcaggtgggtcacatcgagcgcttcaatcccgccttccgcgaactcaccaaggtggtggccaatgaggaagtggtggtgctcgaggcacggcgccacagtccccatgccgatcgcgccaacgatgtgtcggtggtgctggatctgatgattcacgacctcgaccttgtgctggagctggccagggcgccggtcgtgcgcctcgctgctgccggtggagccagcgctgaaggaccgctggattacgtgaatgccacgctcggattcgccaacggtgtggtggcgagcctcaccgccagcaagatgagtcaccgcaagatccgcagcctcagcgcccactgccgggccagcctggtggaaaccgatttcctcaatcacacccttcacattcatcggcgcgcccacgagtggtattccgctgatcatggtgagttgctctatcgcaacgatggcttcatcgaggaggtgagcaccacctcgatcgaaccgctttacgccgaactggagcacttcctgcagtgtgttcgcggccgtgaaacgccggcagtggacggtcagcaggcttcacgcgccctgcgtctggccgatctgatcgaacaggccgtcgcccaccccggcatgggcgttcccctcagcgagccgatctga

SEQ ID NO: 12057 - protein, 334 aa, Synechococcus sp. RS9917
MTDPMVPVKVGVIGIGNMGWHHARVLSLLKDAELVGVADPDAKRGQLATEQFACRWFADYNAMLTEVEAVCIAVPTLLHQAVGLACLDAGLHVLIEKPIAASQDEAATLIAAASRNGRLLQVGHIERFNPAFRELTKVVANEEVVVLEARRHSPHADRANDVSVVLDLMIHDLDLVLELARAPVVRLAAAGGASAEGPLDYVNATLGFANGVVASLTASKMSHRKIRSLSAHCRASLVETDFLNHTLHIHRRAHEWYSADHGELLYRNDGFIEEVSTTSIEPLYAELEHFLQCVRGRETPAVDGQQASRALRLADLIEQAVAHPGMGVPLSEPI

SEQ ID NO: 12058 - DNA, 1008 bp, Synechococcus sp. WH 5701
  CDS (1)..(1008): transl_table=11
atgagcagcgatcccatcaccccggtcaaggtgggggtcatcggcatcggcaacatggggtggcaccacgctcgggtcctgagcttgctgcgggacgccgagctggttggtgttgctgatcccgatcagcgtcgcggtcagctggcggtcgagcagttcggctgccgctggttcgagaacttcgacgatctgctgcctgaggtcgaggcggtctgcatcgccgtgcccaccctgctgcaccatcgggtgggcatggcctgcctgcaggccggcctgcatgtgctgatcgagaagccgatcgccgccagccaggaggaggccagcgaactgatcggggctgcggaactggcgggacgacagcttcaggtgggccatatcgagcgcttcaatcccgcctttcgcgaactgctcaaggtggtggcgaacgaggaagtggtggtgctggaggcacggcgccacagtccccatgccgatcgcgccaacgatgtgtcggtggtgctcgatctgatgatccacgacatcgacctggtgctcgagctcgctggttcgcaggtggtgcggctggcggcggcgggtgggcgcagttccgatggcccgatcgattacgtcaatgccaccctcggtttcagcaatggggtggtggccagcctcacggccagcaagatggcccaccgcaagatccgcagcctcagcgcccattgccgcgccagcctggtggaaaccgatttcctcaaccgccggctgcacatccaccggcgcgcccatgagtggatctccgccgaccacggcgagttgctgtatcgcaacgatggtttcatcgaggaagtgagcaccacctcgatcgagccgctctatgctgagctggagcacttcctgctctgcctgcgcggccgcgaggtgccggccgtcgatggccagcaggcctccagggccctgatgctggccaacctgatcgagctggcagtggatcagccctcgctttgcatggccctcgacgcaccgatctga

SEQ ID NO: 12059 - protein, 335 aa, Synechococcus sp. WH 5701
MSSDPITPVKVGVIGIGNMGWHHARVLSLLRDAELVGVADPDQRRGQLAVEQFGCRWFENFDDLLPEVEAVCIAVPTLLHHRVGMACLQAGLHVLIEKPIAASQEEASELIGAAELAGRQLQVGHIERFNPAFRELLKVVANEEVVVLEARRHSPHADRANDVSVVLDLMIHDIDLVLELAGSQVVRLAAAGGRSSDGPIDYVNATLGFSNGVVASLTASKMAHRKIRSLSAHCRASLVETDFLNRRLHIHRRAHEWISADHGELLYRNDGFIEEVSTTSIEPLYAELEHFLLCLRGREVPAVDGQQASRALMLANLIELAVDQPSLCMALDAPI

SEQ ID NO: 12060 - DNA, 984 bp, delta proteobacterium MLMS-1
  CDS (1)..(984): transl_table=11
atgcaaaaaatccgggtgggggtgatcggggtggggcatctgggccgccatcatgccgccaagtacgccgccatggctgccgacggggtcgaactggtgggcgtggccgatatcaacagtgaacaggcggcggcggtggcccgggattgcggttgccgcgcctttggcgattatcgcgagctattggcgctggttgatgccatcagcgtggtggtgcccaccgtcgatcatcatcgggtggcccttgcttgcctgcggcagggggtcgatatcatgctggaaaagccgatgaccaccaccctggccgaggccgacgagctgattgccgtggccgaagccggtgagcggattctccaggtcgggcatatcgaacgctacaacccggcggtgagtgcgctccatcggttcctgacccggccgctctttatcgaatcccaccggctgcacacctttaaaccacgggggcttgatgtcgacgtggttcttgatctgatgatccacgatatcgacatcatcctaagtatcgtcgattccccggtcgaatccctgcataccgtgggggtgccggtggccaccccgatcaccgatatcgccaacgcccggctgatttttgaaaatggctgcactgccaatatcaccgtcagccggatctccaaggagaatatccggcgtttgcggatctttcagccccagagttatatctcccttgattataccgaaaaatcactgctgtccatcaagcttaaagacgaactcgatgagcaggggttgccggtggaagaggtaaccaaaatcgccctgccggaggaggacgccctggaggccgaattgcgggattttgtggataatgtccgtaagcgcaccacccccagggtggccggccggcaggggcgcctggccctggacctggcccagcggatcatggcacagatcgcggttaattttgagaaatatcgcgacatcatcaagcatccccggggctga

SEQ ID NO: 12061 - protein, 327 aa, delta proteobacterium MLMS-1
MQKIRVGVIGVGHLGRHHAAKYAAMAADGVELVGVADINSEQAAAVARDCGCRAFGDYRELLALVDAISVVVPTVDHHRVALACLRQGVDIMLEKPMTTTLAEADELIAVAEAGERILQVGHIERYNPAVSALHRFLTRPLFIESHRLHTFKPRGLDVDVVLDLMIHDIDIILSIVDSPVESLHTVGVPVATPITDIANARLIFENGCTANITVSRISKENIRRLRIFQPQSYISLDYTEKSLLSIKLKDELDEQGLPVEEVTKIALPEEDALEAELRDFVDNVRKRTTPRVAGRQGRLALDLAQRIMAQIAVNFEKYRDIIKHPRG

SEQ ID NO: 12062 - DNA, 1005 bp, Synechococcus sp. RS9916
  CDS (1)..(1005): transl_table=11
atgaccgatccaatggtgccggtgaaggtgggtgtgattggcatcggcaacatgggctggcatcacgccagggtgctgagcctgctgaaagatgcggatctggtgggagtcgctgatcctgatcctgaacgggggcaattggccaccgagcaatttgattgccgttggtttgccgattaccgggacatgctcgcggaggtcgaggcggtgtgcattgcggtgccgaccctgttgcaccaccccgttggtctggcctgcctggatgctggcctgcatgtgctgattgaaaagccgatcgctgccagccaggaagaggcttcatccctgattgccgccgcaaaccgtaacggccgcttgctgcaggtgggccatatcgaacgcttcaatccagccttcagagagctcaccaaagtggtggccaacgaagaagttgtggtgctggaagctcgccgccacagcccccatgccgatcgcgccaacgatgtgtcggtggtgctcgatctgatgatccacgacctcgacctggtgcttgagctggctcaggcgccggtggtgagcctggcggctgccggcggtcgcacggctgatggtccgatcgactacgtcaacgccacgcttgggtttgccaacggtgtggtggccagcctcaccgcgagcaagatgagccaccgcaagatccgcagtctcagtgcccactgccgatccagccttgtcgagaccgatttcctcaaccacaacctgcatattcatcgcagggcgcatgagtggtattccgctgaccatggtgagttgctgtatcgcaacgacggcttcatcgaggaagtgagcaccacttcgatcgagcccctctatgccgagctcgagcattttctgcagtgtgtgcggggtcgtgaaaccccggcagtggacggcctgcaagcctcccgggctctcaagctggctgatttgatcgagcacgccgttgagcaccctgggatcggagtgcctctcaacgatccgatctga

SEQ ID NO: 12063 - protein, 334 aa, Synechococcus sp. RS9916
MTDPMVPVKVGVIGIGNMGWHHARVLSLLKDADLVGVADPDPERGQLATEQFDCRWFADYRDMLAEVEAVCIAVPTLLHHPVGLACLDAGLHVLIEKPIAASQEEASSLIAAANRNGRLLQVGHIERFNPAFRELTKVVANEEVVVLEARRHSPHADRANDVSVVLDLMIHDLDLVLELAQAPVVSLAAAGGRTADGPIDYVNATLGFANGVVASLTASKMSHRKIRSLSAHCRSSLVETDFLNHNLHIHRRAHEWYSADHGELLYRNDGFIEEVSTTSIEPLYAELEHFLQCVRGRETPAVDGLQASRALKLADLIEHAVEHPGIGVPLNDPI

SEQ ID NO: 12064 - DNA, 20 bp, Artificial sequence
  primer
atgtttaggagtggcaacag

SEQ ID NO: 12065 - DNA, 20 bp, Artificial sequence
  primer
ttaaacactcgcactgaggg

SEQ ID NO: 12066 - protein, 347 aa, Artificial sequence
  consensus sequence
  Variant (5)..(5): Xaa in position 5 is any amino acid
  Variant (7)..(8): Xaa in position 7 to 8 is any amino acid
  Variant (10)..(11): Xaa in position 10 to 11 is any amino acid
  Variant (13)..(13): Xaa in position 13 is any amino acid
  Variant (15)..(23): Xaa in position 15 to 23 is any amino acid
  Variant (24)..(36): Xaa in position 24 to 36 is any or no amino acid
  Variant (38)..(38): Xaa in position 38 is any amino acid
  Variant (40)..(41): Xaa in position 40 to 41 is any amino acid
  Variant (43)..(46): Xaa in position 43 to 46 is any amino acid
  Variant (48)..(71): Xaa in position 48 to 71 is any amino acid
  Variant (72)..(73): Xaa in position 72 to 73 is any or no amino acid
  Variant (76)..(77): Xaa in position 76 to 77 is any amino acid
  Variant (82)..(83): Xaa in position 82 to 83 is any amino acid
  Variant (85)..(86): Xaa in position 85 to 86 is any amino acid
  Variant (88)..(91): Xaa in position 88 to 91 is any amino acid
  Variant (93)..(94): Xaa in position 93 to 94 is any amino acid
  Variant (96)..(97): Xaa in position 96 to 97 is any amino acid
  Variant (100)..(100): Xaa in position 100 is any amino acid
  Variant (106)..(109): Xaa in position 106 to 109 is any amino acid
  Variant (112)..(113): Xaa in position 112 to 113 is any amino acid
  Variant (115)..(117): Xaa in position 115 to 117 is any amino acid
  Variant (119)..(124): Xaa in position 119 to 124 is any amino acid
  Variant (130)..(130): Xaa in position 130 is any amino acid
  Variant (137)..(139): Xaa in position 137 to 139 is any amino acid
  Variant (141)..(150): Xaa in position 141 to 150 is any amino acid
  Variant (151)..(155): Xaa in position 151 to 155 is any or no amino acid
  Variant (157)..(158): Xaa in position 157 to 158 is any amino acid
  Variant (160)..(161): Xaa in position 160 to 161 is any amino acid
  Variant (163)..(165): Xaa in position 163 to 165 is any amino acid
  Variant (167)..(168): Xaa in position 167 to 168 is any amino acid
  Variant (171)..(171): Xaa in position 171 is any amino acid
  Variant (181)..(181): Xaa in position 181 is any amino acid
  Variant (183)..(184): Xaa in position 183 to 184 is any amino acid
  Variant (186)..(186): Xaa in position 186 is any amino acid
  Variant (188)..(196): Xaa in position 188 to 196 is any amino acid
  Variant (198)..(198): Xaa in position 198 is any amino acid
  Variant (200)..(207): Xaa in position 200 to 207 is any amino acid
  Variant (208)..(209): Xaa in position 208 to 209 is any or no amino acid
  Variant (211)..(213): Xaa in position 211 to 213 is any amino acid
  Variant (215)..(215): Xaa in position 215 is any amino acid
  Variant (217)..(217): Xaa in position 217 is any amino acid
  Variant (219)..(219): Xaa in position 219 is any amino acid
  Variant (222)..(223): Xaa in position 222 to 223 is any amino acid
  Variant (225)..(226): Xaa in position 225 to 226 is any amino acid
  Variant (230)..(236): Xaa in position 230 to 236 is any amino acid
  Variant (238)..(250): Xaa in position 238 to 250 is any amino acid
  Variant (251)..(252): Xaa in position 251 to 252 is any or no amino acid
  Variant (254)..(276): Xaa in position 254 to 276 is any amino acid
  Variant (277)..(311): Xaa in position 277 to 311 is any or no amino acid
  Variant (314)..(315): Xaa in position 314 to 315 is any amino acid
  Variant (317)..(317): Xaa in position 317 is any amino acid
  Variant (319)..(319): Xaa in position 319 is any amino acid
  Variant (321)..(322): Xaa in position 321 to 322 is any amino acid
  Variant (324)..(329): Xaa in position 324 to 329 is any amino acid
  Variant (331)..(331): Xaa in position 331 is any amino acid
  Variant (333)..(333): Xaa in position 333 is any amino acid
  Variant (335)..(339): Xaa in position 335 to 339 is any amino acid
  Variant (342)..(343): Xaa in position 342 to 343 is any amino acid
  Variant (345)..(346): Xaa in position 345 to 346 is any amino acid
GVIGXGXXGXXHXRXXXXXXXXXXXXXXXXXXXXXXLXGXXDXXXXRXXXXXXXXXXXXXXXXXXXXXXXXXXAVXXAVPTXXHXXVXXXXLXXGXXVLXEKPIAXXXXEAXXLXXXAXXXXXXLQVGHXERFNPAXXXLXXXXXXXXXXXXXXXEXXRXXPXXXRXXDVXVVLDLMIHDXDXXLXLXXXXXXXXXAXGXXXXXXXXXXDXXXAXLXFXNGXXAXXTASXXXXXXXRXXXXXXXXXXXXXXXDXXXXXXXXXXXXXXXXXXXXXXXXXXXXXXXXXXXXXXXXXXXXXXXXXXXXXXXXXXPLXXEXEXFXXCXXXXXXPXVXGXXXXXALXXAXXI

SEQ ID NO: 12067 - protein, 29 aa, Artificial sequence
  protein pattern
  Variant (2)..(2): Xaa in position 2 is any amino acid
  Variant (3)..(3): Xaa in position 3 is Ala or Val
  Variant (4)..(4): Xaa in position 4 is Asn, Ser or Thr
  Variant (5)..(5): Xaa in position 5 is Ala or Val
  Variant (6)..(6): Xaa in position 6 is any amino acid
  Variant (7)..(7): Xaa in position 7 is Ile, Leu or Val
  Variant (8)..(8): Xaa in position 8 is any amino acid
  Variant (10)..(10): Xaa in position 10 is any amino acid
  Variant (11)..(11): Xaa in position 11 is Gly, Asn or Ser
  Variant (12)..(12): Xaa in position 12 is Gly or Asn
  Variant (13)..(13): Xaa in position 13 is any amino acid
  Variant (14)..(14): Xaa in position 14 is Ile, Leu or Val
  Variant (16)..(16): Xaa in position 16 is Asn, Ser or Thr
  Variant (17)..(17): Xaa in position 17 is Ile, Leu or Val
  Variant (21)..(28): Xaa in position 21 to 28 is any or no amino acid
DXXXXXXXFXXXXXAXXTASXXXXXXXXK

SEQ ID NO: 12068 - protein, 25 aa, Artificial sequence
  protein pattern
  Variant (4)..(4): Xaa in position 4 is any amino acid
  Variant (6)..(6): Xaa in position 6 is any amino acid
  Variant (7)..(7): Xaa in position 7 is Phe, Leu or Met
  Variant (9)..(9): Xaa in position 9 is any amino acid
  Variant (10)..(10): Xaa in position 10 is any or no amino acid
  Variant (12)..(12): Xaa in position 12 is any amino acid
  Variant (13)..(13): Xaa in position 13 is Glu, Asn, Gln, Arg or Ser
  Variant (14)..(23): Xaa in position 14 to 23 is any amino acid
  Variant (24)..(24): Xaa in position 24 is Ala, Ile or Val
  Variant (25)..(25): Xaa in position 25 is Ala, Gly or Val
VIGXGXXGXXHXXXXXXXXXXXXXX

SEQ ID NO: 12069 - protein, 15 aa, Artificial sequence
  protein pattern
  Variant (2)..(2): Xaa in position 2 is any amino acid
  Variant (3)..(3): Xaa in position 3 is Pro or Val
  Variant (4)..(4): Xaa in position 4 is Ala, Cys, Asp, Gly, Ser or Thr
  Variant (5)..(5): Xaa in position 5 is Gly or Leu
  Variant (6)..(6): Xaa in position 6 is any amino acid
  Variant (7)..(7): Xaa in position 7 is Ala, Asp, Glu or Gln
  Variant (8)..(8): Xaa in position 8 is Ala or Gly
  Variant (9)..(10): Xaa in position 9 to 10 is any amino acid
  Variant (13)..(14): Xaa in position 13 to 14 is any amino acid
PXXXXXXXXXALXXA

SEQ ID NO: 12070 - DNA, 474 bp, Synechocystis sp.
  CDS (1)..(474): transl_table=11
atggctgaatctaaccaagttgtacaagcctataacggcgatccttttgtggggcatctttccacccccatttccgactccgctttcacccgcacttttatcggcaatttgcccgcctatcgcaaaggcctttcccccatcctcagaggtttggaagtgggcatggcccacggttacttcttgattggcccctggaccctgctgggcccgctgcgggattctgagtaccagtacattggtggtctgatcggagctttggctttgatcctggtggctaccgctgctcttagtagctatggactggttaccttccaaggggaacagggttccggcgacactctgcaaacagccgatggttggagccaatttgctgctggcttttttgtgggtggcatgggaggtgcctttgtggcttacttcctgttggaaaacctcagcgttgtggatgggattttccggggtctatttaactaa

SEQ ID NO: 12071 - protein, 157 aa, Synechocystis sp.
MAESNQVVQAYNGDPFVGHLSTPISDSAFTRTFIGNLPAYRKGLSPILRGLEVGMAHGYFLIGPWTLLGPLRDSEYQYIGGLIGALALILVATAALSSYGLVTFQGEQGSGDTLQTADGWSQFAAGFFVGGMGGAFVAYFLLENLSVVDGIFRGLFN

SEQ ID NO: 12072 - DNA, 1173 bp, Sorghum bicolor
  CDS (173)..(808)
gcacgaggacgccggcgggccgcagcagagcccacccgcgcggtgtgcgagtgttcctaaggttgacaccacgacgtcgcttgagggccagcatcgtgcggggcagcagcagagccgatcccgtgcgtgtgcgagtgtgagtgagatcgacaccactagctaggtcgagaccatggctacagcttacgctcccatggcgagccaggtgatgaagagcagcctgcagctgcactccaagccgaggggcttgtccggcgctgccctcaccaccaccaggcgtccccggttcaccgtcaaggccatccagcccgagaaggcgacgtaccaggtggtgcagccgatcaacggcgacccgttcatcggcagcctggagacgccggtgacctcgagcccgctggtggcgtggtacctctccaacctgccggcgtaccgcacggccgtgagcccgctgctgcggggcatcgaggtggggctggcgcacggctacctcctcgtggggccgttcgcgctcacgggcccgctccgcaacacgcccgtgcacggacaggcgggcgcgctcggcgccgcggggctcgtcgccatcctcagcgtctgcctcaccatgtacggcgtcgcgtccttcaacgagggggaaccctccacggcgcccacgctcacgcttacggggaggaagaaggaggccgacaagctgcagaccgccgacggatggtctaagttcaccggagggttcttcttcggcggcatctccggcgtgctctgggcttacttcctcctctacgtgctcgacctcccctactacttcaagtagaagttgattaataaagatccatatatatatatatatagctccgatgctgcgatgcatgcgatcctcctctctgcgtcggcggcatgcgtggttatgtaggtgatggggtccttgtttcacttcagcagtgatgagcaccgtgtataaatgtaattcctctgcacatggatggattgggatgtaacttgaaactataaattttttttttaagggagaggaagagaggatttcgtgtccagagttagaacagagttgtatgttgtgcgactgctttgtaagtctgaactgaacctatgtgagcttctatcagaggacctgagaaagcttgggcatctgtttttggaataaaatgggcccttataggg

SEQ ID NO: 12073 - protein, 211 aa, Sorghum bicolor
MATAYAPMASQVMKSSLQLHSKPRGLSGAALTTTRRPRFTVKAIQPEKATYQVVQPINGDPFIGSLETPVTSSPLVAWYLSNLPAYRTAVSPLLRGIEVGLAHGYLLVGPFALTGPLRNTPVHGQAGALGAAGLVAILSVCLTMYGVASFNEGEPSTAPTLTLTGRKKEADKLQTADGWSKFTGGFFFGGISGVLWAYFLLYVLDLPYYFK

SEQ ID NO: 12074 - DNA, 941 bp, Arabidopsis thaliana
  CDS (169)..(807)
cacaacaatcttaagaaacagatcctctgtcttgccacatcagcaaacgcaatctcaagtttcgtagattgcttatttcttcatcacacacttcaaactcgattttattttaattttcataagagaacaaccaagacaaaaagaacaatggcagcgagtgcatctccaatggcgagccagctaaggagcagcttctcctccgcttctctttctcagcgtctcgccgtcccgaagggcatctccggtgctcctttcggtgtttctccgaccaaaagagtctcttccttcactgtccgagctgttaaatccgacaagacaacattccaagtagttcaaccaatcaacggtgatccattcatcggaagtttggaaactccggtgacatcaagcccattgatcgcgtggtacctttccaacctccctggataccgtaccgccgtcaaccctctcctccgcggtgtggaagtgggcctggcccatggtttcttcttagtgggcccattcgtcaaagctggcccattaaggaacactgcttacgccgggtcagccgggtctttagccgcggctgggctggtagtcatcctcagcatgtgcctcaccatctacggtatctcttctttcaaggaaggagagccatcgatcgcaccgagtttgactttgactgggcggaagaagcagcctgaccagcttcaaacggctgatggatgggctaagttcactggaggattcttctttggagggatctctggggtgacttgggcttacttccttctctacgttcttgaccttccttacttcgtcaagtaaatgtagatcaaaatatatcgagtgtactttcaactctcttgcatcattgttttttactctttgtcttgatcaagaatcttgaaactcaggattgttaatgtatattactctttctttatcttattgacattaat

SEQ ID NO: 12075 - protein, 212 aa, Arabidopsis thaliana
MASQLRSSFSSASLSQRLAVPKGISGAPFGVSPTKRVSSFTVRAVKSDKTTFQVVQPINGDPFIGSLETPVTSSPLIAWYLSNLPGYRTAVNPLLRGVEVGLAHGFFLVGPFVKAGPLRNTAYAGSAGSLAAAGLVVILSMCLTIYGISSFKEGEPSIAPSLTLTGRKKQPDQLQTADGWAKFTGGFFFGGISGVTWAYFLLYVLDLPYFVK

SEQ ID NO: 12076 - DNA, 627 bp, Oryza sativa (japonica cultivar-group)
  CDS (1)..(627)
atggccactgcttatgctcccatggcgagccagctgatgaagagcagcttggtgtgctccaagccgagggggctgtctggtgcttcgctgacaaggaggccccgcttcacagtcaaggccatccagtctgagaagccaacgtaccaggtggtgcagcccatcaatggcgaccccttcatcggcagcctggagacgccggtgacctccagcccgctggtcgcctggtacctctccaacctcccggcgtaccgcaccgccgtcagcccgctgctccgcggcatcgaggtcggcctcgcccacggctacctcctcgtcgggcccttcgcgctcaccggcccgctccgcaacacgccggtgcacggccaggccggcgccctcggcgccgcaggcctcgtcgccatcctcagcgtctgcctcaccatgtacggcgtcgcctccttcggcgagggcgagccgtccacggcgccgacgctgacgctcaccggccgcaagaaggaggccgacaagctgcagaccgccgacggctgggccaagttcaccggcggcttcttcttcggcggcatctccggcgtcctctgggcctacttcctcctctacgtgctcgacctcccgtacttcttcaagtag

SEQ ID NO: 12077 - protein, 208 aa, Oryza sativa (japonica cultivar-group)
MATAYAPMASQLMKSSLVCSKPRGLSGASLTRRPRFTVKAIQSEKPTYQVVQPINGDPFIGSLETPVTSSPLVAWYLSNLPAYRTAVSPLLRGIEVGLAHGYLLVGPFALTGPLRNTPVHGQAGALGAAGLVAILSVCLTMYGVASFGEGEPSTAPTLTLTGRKKEADKLQTADGWAKFTGGFFFGGISGVLWAYFLLYVLDLPYFFK

SEQ ID NO: 12078 - DNA, 600 bp, Prochlorococcus marinus subsp. pastoris str. CCMP1986
  CDS (1)..(600): transl_table=11
atgagcgactttcaaaaatcattctcagaatcaacaagttctattaaatttgatgaaaaatatatagataattctgttcagccaaatgacattggtattgcaaatcaatgggctgtaaaaccagtttcagatccatgtgttggaaatcttgcaacacctgttaatagtggttactttacaaaggcatttattaataatttacctttttatagagaagggatttctccaaatttcagaggtttagaaactggagcagcatttggatatcttttatatggtccattttctatgactggtccgttaagaaattctgatttcgcattaacagcaggattacttgcaacaataggtgctgtgcacatattgacagggcttttggttctttataatgctccaggaaaagctcctaatgttcaacctccagatgccacagtatataatcctcctgcagacttgtttactagaacaggctgggccgattttacaagcgggttttggttaggtggttgtggtggtgctgtgtttgcatggcttcttgtaggaactctccatttagataccataatgccaattgttaaaaatatttggactactggttga

SEQ ID NO: 12079 - protein, 199 aa, Prochlorococcus marinus subsp. pastoris str. CCMP1986
MSDFQKSFSESTSSIKFDEKYIDNSVQPNDIGIANQWAVKPVSDPCVGNLATPVNSGYFTKAFINNLPFYREGISPNFRGLETGAAFGYLLYGPFSMTGPLRNSDFALTAGLLATIGAVHILTGLLVLYNAPGKAPNVQPPDATVYNPPADLFTRTGWADFTSGFWLGGCGGAVFAWLLVGTLHLDTIMPIVKNIWTTG

SEQ ID NO: 12080 - DNA, 564 bp, Prochlorococcus marinus str. MIT 9313
  CDS (1)..(564): transl_table=11
atgactgacgagaacctgcccctaggccccaagacgctcaacgaaaagtaccgtgaccgagggcacgtagaagagtgggctgtgcagcctgctgctgacccctgcgtcggaaacctggccactccagtcaatagtggctacttcgtgaaagccttagtcaacaatcttcccctctatcgcgagggtatttctgcaaacttccgcggcttggaaactggtgccgcgatcggctacttcatttacggtcccttccttgtaatgggtccgttaagaacaaccgattttgctacaacagcagctttattggcaacagttggagcagtgcatatccttactgctcttttagtgctttacaacgtccccggcaaggcacccaccgtgccacccccggacgtcactgttgctaaccctcctgccgacctgttcacaaggaaaggctgggcagacttcacaagtggcttttggctgggtggctgcgcgggcgcggcctttgcatggttcctatgcaacactttgcacatgcaaccactgctgaatgttcccatgaatgtctgggcttcttaa

SEQ ID NO: 12081 - protein, 187 aa, Prochlorococcus marinus str. MIT 9313
MTDENLPLGPKTLNEKYRDRGHVEEWAVQPAADPCVGNLATPVNSGYFVKALVNNLPLYREGISANFRGLETGAAIGYFIYGPFLVMGPLRTTDFATTAALLATVGAVHILTALLVLYNVPGKAPTVPPPDVTVANPPADLFTRKGWADFTSGFWLGGCAGAAFAWFLCNTLHMQPLLNVPMNVWAS

SEQ ID NO: 12082 - DNA, 492 bp, Synechococcus sp. WH 8102
  CDS (1)..(492): transl_table=11
atgaccgtcactcccgtctctgacccctgcgtcggcaacctcgccaccccggtcaacagcggctatttcattaagggcctgatcaacaacctgcccctataccgtcccggcatctcccccaacttccgtggactggagaccggcgcagccttcggctacctgctgtacggccccttcaccatctgcggtcccctgcgggccacggagtatcagcagaccgcaggtctgctagccgccatcggtgctgttcacatccttagcctgttgttcctgctgtacaaccagcccggcaagcagcccaacatcccccccgccgacgccaccgtcgagaacccaccggctgatctgttcacccgcaccggctgggccgatttcaccagcggtttctggctgggtggttgcggcggcgccgtgttcgcctggttcctctgcaacacggtgcacgttcaggacctgttcaaaatcgctgctggcgtctggagcgtcggctga

SEQ ID NO: 12083 - protein, 163 aa, Synechococcus sp. WH 8102
MTVTPVSDPCVGNLATPVNSGYFIKGLINNLPLYRPGISPNFRGLETGAAFGYLLYGPFTICGPLRATEYQQTAGLLAAIGAVHILSLLFLLYNQPGKQPNIPPADATVENPPADLFTRTGWADFTSGFWLGGCGGAVFAWFLCNTVHVQDLFKIAAGVWSVG

SEQ ID NO: 12084 - DNA, 600 bp, Prochlorococcus marinus str. MIT 9301
  CDS (1)..(600): transl_table=11
atgagcgactttcaaaaatcattctcagaatcaacaagttctattaaatttgatgagaaatacatagatacttctgtacaaccaaatgatattggcgtagcagaacaatgggcagtaaaaacagttgctgatccttgtgttggtaatttagctactcctgttaatagtggttattttacaaaagcctttataaataatttacctttttatagagaaggtatttctcctaattttagaggtttagaaactggagcagcttttggatatcttctatacggaccttttactatgactggcccattaagaaattctgaatttgctctaacagctggacttctcgctactattggagctgttcatattttgacagcactttttgttctatacaatgcacctggtaaagcacctaatgttcaacctccagatgccactgttaataatccgccaaaggacttatttacaagagctggttgggctgattttacgagtggattttggttaggaggctgtggaggagctgtttttgcttggttacttgttgggacattacacttagattccatcatgccaatcattaaaaatatttggactgctggttaa

SEQ ID NO: 12085 - protein, 199 aa, Prochlorococcus marinus str. MIT 9301
MSDFQKSFSESTSSIKFDEKYIDTSVQPNDIGVAEQWAVKTVADPCVGNLATPVNSGYFTKAFINNLPFYREGISPNFRGLETGAAFGYLLYGPFTMTGPLRNSEFALTAGLLATIGAVHILTALFVLYNAPGKAPNVQPPDATVNNPPKDLFTRAGWADFTSGFWLGGCGGAVFAWLLVGTLHLDSIMPIIKNIWTAG

SEQ ID NO: 12086 - DNA, 591 bp, Prochlorococcus marinus str. MIT 9312
  CDS (1)..(591): transl_table=11
atgagcgattcacaaacaccattaggagccaatcctaaatttcccgaaaaatatatagatcaaagtgtcctgcctacagatattggtatcgcagaacaatgggctgttaaaactgttgctgatccgtttgttgggaatttggctaccccagttaatagtggttattttaccaaagtttttataaataatttacctttttatagagaaggcatttctccaaattttagaggtttagaaactggagcggctttaggttatctcttatatggtccatttactatgactggtcctttaagaaattctgatttcgcattaaccgcaggattacttgctgctattggcgcggttcatattttgacagcacttttagttctttataacgccccaggtaaagcacctaatgtgcaacctcctgatgctactgttaataatcctcctgcagatttatttactagagcagggtgggctgactttacaagtggattttggctaggcggttgcggtggtgcagtttttgcatggcttcttgttggaacactgcatttgaacaacataatgcaactaattcagaatatttggactactggttaa

SEQ ID NO: 12087 - protein, 196 aa, Prochlorococcus marinus str. MIT 9312
MSDSQTPLGANPKFPEKYIDQSVLPTDIGIAEQWAVKTVADPFVGNLATPVNSGYFTKVFINNLPFYREGISPNFRGLETGAALGYLLYGPFTMTGPLRNSDFALTAGLLAAIGAVHILTALLVLYNAPGKAPNVQPPDATVNNPPADLFTRAGWADFTSGFWLGGCGGAVFAWLLVGTLHLNNIMQLIQNIWTTG

SEQ ID NO: 12088 - DNA, 486 bp, Trichodesmium erythraeum IMS101
  CDS (1)..(486): transl_table=11
atgacacaagcaacagattcaggattcgttcaaccttacaaaggagatccttttgtaggccatttatccactcctatcagtgattctgactttaccagagcatttatcggtaacttgccgatttaccgtccaggtctatccccaattctacggggtctagaagtaggtatggctcacggttattttatcgttggcccttggacaaaactcggtccattacgagattccgcagtggctaacttaggtggactaatttctacgatcgctctagttttaattgccactatttgtttatctgcttatggcctagtttctttccaaggaaaaagtcctgaaggagcagacccattaaaaacttctgaaggttggagtcaatttactggtggttttttcattggtgcaatgggtggtgccgttgtggctttcttcctactagaaaactttgagcttgtggactccattttccgaggtttatttaacagctaa

SEQ ID NO: 12089 - protein, 161 aa, Trichodesmium erythraeum IMS101
MTQATDSGFVQPYKGDPFVGHLSTPISDSDFTRAFIGNLPIYRPGLSPILRGLEVGMAHGYFIVGPWTKLGPLRDSAVANLGGLISTIALVLIATICLSAYGLVSFQGKSPEGADPLKTSEGWSQFTGGFFIGAMGGAVVAFFLLENFELVDSIFRGLFNS

SEQ ID NO: 12090 - DNA, 522 bp, Nostoc punctiforme PCC 73102
  CDS (1)..(522): transl_table=11
atggcacaagctgtagacgcatcaaagaatctccccagcgatcccagaaatcgggaagttgttttccctgcatttcgcgatccgcaactgggaaacctagaaacgccggttaatgcttctcccttgagcaagtggttcattaataacttacctgcctatcgcccaggtctgtctcctgctagacgcggtttagaagttggcatggctcatggttactggatatttggcccctttgccaaattgggcccactgcgagatacagataatgcgaatttagctggtttactggcagccattggcttggttgttcttcttaccggggccctatccctgtattccaatagcaatccgccgaaagcacttcctagcgttaccgtacccaatcctccggtagatgcttttaactctaaagaaagctggaacaattttgctagttctttcttgattggtggtattggtggtgcagtggttgcttactttttgactagtaacctgggaataattcaaggtttatttggttaa

SEQ ID NO: 12091 - protein, 173 aa, Nostoc punctiforme PCC 73102
MAQAVDASKNLPSDPRNREVVFPAFRDPQLGNLETPVNASPLSKWFINNLPAYRPGLSPARRGLEVGMAHGYWIFGPFAKLGPLRDTDNANLAGLLAAIGLVVLLTGALSLYSNSNPPKALPSVTVPNPPVDAFNSKESWNNFASSFLIGGIGGAVVAYFLTSNLGIIQGLFG

SEQ ID NO: 12092 - DNA, 477 bp, Crocosphaera watsonii WH 8501
  CDS (1)..(477): transl_table=11
atggcaatcgacgtaattcaacatggtggagaccctcaagtaggcaacttagccactcctgttaactcttcagggttctctcttgcttttatcagaaatcttcctgcttaccgccaaggattatcccccaaccgtcgaggtttagagattggcatggctcacggttattttatctatggaccatttgcccttctcggacccctgcgtaacacagaatacgccagcacagcaggtttattagctgcggtaggtttggttgctattttaaccgtcgctctatctatgtacgcttccgtgggtgttaccaaacccacagaaactttaaccactcctgatacccccgaggctttagcaacttctgagggttggggtgagtttgccaatggtttctttattggtggtgcaggtggggcattttttgcctatctcctctgccaaagtccgtatattgacttagttcaacaaattttaggctag

SEQ ID NO: 12093 - protein, 158 aa, Crocosphaera watsonii WH 8501
MAIDVIQHGGDPQVGNLATPVNSSGFSLAFIRNLPAYRQGLSPNRRGLEIGMAHGYFIYGPFALLGPLRNTEYASTAGLLAAVGLVAILTVALSMYASVGVTKPTETLTTPDTPEALATSEGWGEFANGFFIGGAGGAFFAYLLCQSPYIDLVQQILG

SEQ ID NO: 12094 - DNA, 492 bp, Synechococcus sp. RS9917
  CDS (1)..(492): transl_table=11
atgaccgtgacccccgtcgccgatcccaccgtcggcaacctggccactccggtgaacagcagctacttcgccaaggccttcctcaacgcccttccggcctatcggccggccctctcccccaaccgtcgcggcctggaagtgggcatggcccatggcttcttcctctacggcccctttgcggtctgcggccccctgcgcaacaccgactacgccgccaccgctggcctgctcgccgccatcggccttgtttcgatcctgaccgtgtgcctgtcgatctacggcacagccggtcatggcccgagcgtgcagcccgctgacgccacgatcgacaatcctcccgccgatctgttcaccaaggctggctgggctgaattcgccagcggcttctggctgggtggctgcggcggcgccgccttcgcctggttcctggcaggcaccgccatcgtggccccgctggtgaacattgctggtggtgtctggagcgtcggctga

SEQ ID NO: 12095 - protein, 163 aa, Synechococcus sp. RS9917
MTVTPVADPTVGNLATPVNSSYFAKAFLNALPAYRPALSPNRRGLEVGMAHGFFLYGPFAVCGPLRNTDYAATAGLLAAIGLVSILTVCLSIYGTAGHGPSVQPADATIDNPPADLFTKAGWAEFASGFWLGGCGGAAFAWFLAGTAIVAPLVNIAGGVWSVG

SEQ ID NO: 12096 - DNA, 492 bp, Synechococcus sp. WH 5701
  CDS (1)..(492): transl_table=11
atgaccgtgcatcccgtggccgaccccaccgtcggcaatctcgccacccccattaacagcagctacttcaccaaggcgttcctgaacgctctgcccgcctaccgaccggcgctgtcccccaaccgccgaggacttgaagtgggaatggcccacgggtttttcctctacgggcccttcgccctcaccggccccctgcggcacacggaatacgccaccaccgcaggcctgctggccacgatcggcctagtgacaattctcacgatctgcctgtcgatctacggcaccgccggcactggccccaacgtgcagccccccgacgcaacgatcgacaacccgcccgctgatctgttcaccaaggccggctgggcagaattcgccagcggtttctggcttggtggctgcggtggcgccgccttcgcctggttcctggccagcacggctctggtttcccctctggtcgaccttgtcggtggcggctggagcggtggctga

SEQ ID NO: 12097 - protein, 163 aa, Synechococcus sp. WH 5701
MTVHPVADPTVGNLATPINSSYFTKAFLNALPAYRPALSPNRRGLEVGMAHGFFLYGPFALTGPLRHTEYATTAGLLATIGLVTILTICLSIYGTAGTGPNVQPPDATIDNPPADLFTKAGWAEFASGFWLGGCGGAAFAWFLASTALVSPLVDLVGGGWSGG

SEQ ID NO: 12098 - DNA, 552 bp, Synechococcus sp. WH 7805
  CDS (1)..(552): transl_table=11
ttgatcggccgcgcgcccttcagaccgcttcagagctccgcacctcaattcatttatcccatgaccgtgacccccgtagccgaccccacagttggcaacctggccaccccggtgaacagcagctatttcgccaaggcctttctcaacgcacttcctgcatacagacctgcgctttctcccaaccgtcgcggtttggaagttggcatggcccacggctttttcctgtatggccccttcacaatctgtggccccctgcgactcaccgagtactccaccaccgctggattgctggccaccattggtttggtgtccatcctgaccgtgtgcctctccatctacggaaccgcaggcaacggccccaatgttcagccggctgacgccacaatcgacaaccctcctgccgacctgttcaccaaggccggatgggccgagttcgccagtggcttctggctcggaggctgtggtggcgcagcttttgcctggttcctcaccggcactgcgcttgtcgctcctctggtgaacatcgccggcggtgtctggagcgtgaactaa

SEQ ID NO: 12099 - protein, 183 aa, Synechococcus sp. WH 7805
MIGRAPFRPLQSSAPQFIYPMTVTPVADPTVGNLATPVNSSYFAKAFLNALPAYRPALSPNRRGLEVGMAHGFFLYGPFTICGPLRLTEYSTTAGLLATIGLVSILTVCLSIYGTAGNGPNVQPADATIDNPPADLFTKAGWAEFASGFWLGGCGGAAFAWFLTGTALVAPLVNIAGGVWSVN

SEQ ID NO: 12100 - DNA, 645 bp, Medicago truncatula
  CDS (1)..(645)
atggcagctgcttctcctatggcaagccaactcaagtccagcttcactagacctttggtcacacctagaggactttgtggctcttccccactccatcaattaccttctagaaggcaatttaacttcactgttaaggccatccaatctgaaaagccaaactaccaagtgattcaaccaatcaatggtgatccattcattggaagccttgaaactccagttacatcaagcccacttgttgcatggtacctctccaacctaccaggctacagaactgcagtgaacccactacttaggggaattgaagttggcttagcccacggattcttcctcgtaggcccgttcgttaaagccgggcctctaaggaacaccgaatacgccggatcagcaggctctcttgcagctgctgggctaattgttatcctcagcatttgccttacaatctatggagtttcatcattcaatgaaggtgatccatcaattgctccatctttgaccttaacgggccgtaagaagcagcccgatccactccaaacagctgatggttggtccaagttcactggtgggtttttctttggaggaatttctggtgttacttgggcttacttccttctttatgttttggatcttccatactttgttaagtaa

SEQ ID NO: 12101 - protein, 214 aa, Medicago truncatula
MAAASPMASQLKSSFTRPLVTPRGLCGSSPLHQLPSRRQFNFTVKAIQSEKPNYQVIQPINGDPFIGSLETPVTSSPLVAWYLSNLPGYRTAVNPLLRGIEVGLAHGFFLVGPFVKAGPLRNTEYAGSAGSLAAAGLIVILSICLTIYGVSSFNEGDPSIAPSLTLTGRKKQPDPLQTADGWSKFTGGFFFGGISGVTWAYFLLYVLDLPYFVK

SEQ ID NO: 12102 - DNA, 852 bp, Nicotiana attenuata
  CDS (56)..(718)
ttttttttttgttatattttcttaactgacctaagtgtctaacaatatttcaaaaatggcaactgctgcttcccccatggcaagccagctcaagagcaaatttgcttcttctttaacaagaggcagtggacttgttactcccaaaggcatttctggttctccttttaaaatctttccttcaactagaaagtcttgcttcactatcaaagctgtccaaactgacaaacccacttaccaagtgattcagcccctgaatggtgaccctttcattggtagtcttgaaactccagtgacctcaagcccattgattgcttggtacctatccaacttaccggcctaccggaccgcagtgaacccacttctccgaggagtagaagtgggcctggcccatggattcctacttgttggcccatttgtaaaggctggtccattaagaaacactgaatatgcagggggagctggttcattggcagcagcaggacttgtagtgatccttagcatgtgtttgactatttatggaatatcatcattcaaagaaggagaagcatcaacagcaccagcattgacattgactggcaggaaaaaggtgccagaccaattgcaaactgcagagggatggtcaaagttcacaggtggattcttttttggtggaatttctggtgtcacttgggcttatttcctcctttatgtccttgatcttccttactatgttaagtagatcttttaaatcttgcaattgatgtaactattttgaatattgaattggaaatcaaagttgtatattgaacatgtgagctcttcgaggagtgtaatcaatttttacattatcactataaaaaaaaaaaaaaaaaa

SEQ ID NO: 12103 - protein, 220 aa, Nicotiana attenuata
MATAASPMASQLKSKFASSLTRGSGLVTPKGISGSPFKIFPSTRKSCFTIKAVQTDKPTYQVIQPLNGDPFIGSLETPVTSSPLIAWYLSNLPAYRTAVNPLLRGVEVGLAHGFLLVGPFVKAGPLRNTEYAGGAGSLAAAGLVVILSMCLTIYGISSFKEGEASTAPALTLTGRKKVPDQLQTAEGWSKFTGGFFFGGISGVTWAYFLLYVLDLPYYVK

SEQ ID NO: 12104 - DNA, 519 bp, Anabaena variabilis
  CDS (1)..(519): transl_table=11
atggcgcaagcagtagacgcatcaaaaaatctccccagtgaccccagaaatcgggaagtggtttttccggcaggacgcgatcctcaatggggcaacctagaaaccccggttaacgcttctcccttagtcaagtggtttattaacaacctacccgcctatcgcccaggtctcaccccttttagacgtggattagaagtaggtatggctcatggttactttctgtttggcccctttgccaaattaggtccactgcgggatgcagctaatgctaacttagcaggtttgttaggtgctataggtttggtggtgcttttcacactttctctgtctttgtacgctaatagcaatccacccaaggctcttgccagtgttactgtacccaatcctcctgatgctttccaatccaaagaaggctggaataactttgccagtgcttttttaattggtggtattggtggcgcggtagttgcttactttttgactagtaattttgctttaattcaaggtctagtaggctaa

SEQ ID NO: 12105 - protein, 172 aa, Anabaena variabilis
MAQAVDASKNLPSDPRNREVVFPAGRDPQWGNLETPVNASPLVKWFINNLPAYRPGLTPFRRGLEVGMAHGYFLFGPFAKLGPLRDAANANLAGLLGAIGLVVLFTLSLSLYANSNPPKALASVTVPNPPDAFQSKEGWNNFASAFLIGGIGGAVVAYFLTSNFALIQGLVG

SEQ ID NO: 12106 - DNA, 660 bp, Arabidopsis thaliana
  CDS (1)..(660)
atggcagcgagtgcatctccaatggcgagccagctaaggagcagcttctcctccgcttctctttctcagcgtctcgccgtcccgaagggcatctccggtgctcctttcggtgtttctccgaccaaaagagtctcttccttcactgtccgagctgttaaatccgacaagacaacattccaagtagttcaaccaatcaacggtgatccattcatcggaagtttggaaactccggtgacatcaagcccattgatcgcgtggtacctttccaacctccctggataccgtaccgccgtcaaccctctcctccgcggtgtggaagtgggcctggcccatggtttcttcttagtgggcccattcgtcaaagctggcccattaaggaacactgcttacgccgggtcagccgggtctttagccgcggctgggctggtagtcatcctcagcatgtgcctcaccatctacggtatctcttctttcaaggaaggagagccatcgatcgcaccgagtttgactttgactgggcggaagaagcagcctgaccagcttcaaacggctgatggatgggctaagttcactggaggattcttctttggagggatctctggggtgacttgggcttacttccttctctacgttcttgaccttccttacttcgtcaagtaa

SEQ ID NO: 12107 - protein, 219 aa, Arabidopsis thaliana
MAASASPMASQLRSSFSSASLSQRLAVPKGISGAPFGVSPTKRVSSFTVRAVKSDKTTFQVVQPINGDPFIGSLETPVTSSPLIAWYLSNLPGYRTAVNPLLRGVEVGLAHGFFLVGPFVKAGPLRNTAYAGSAGSLAAAGLVVILSMCLTIYGISSFKEGEPSIAPSLTLTGRKKQPDQLQTADGWAKFTGGFFFGGISGVTWAYFLLYVLDLPYFVK

SEQ ID NO: 12108 - DNA, 812 bp, Cucumis sativus
  CDS (81)..(734)
aaaaaaaatctcacctcaatcttcttctctgccactgatccttccacaagccaaaggcagcagaagcaaaagcagcagccatggccactgcaacctctcccactgccagccagctcagttccagcttcgcttcatccaacacgagagctttgatctctcctaaaggcctctccgcttcgcccctccgacgcatccctacaagaacacactccttcaccatcagagccatccaagctgataagccgactttccaagtgattcagccgatcaatggagacccattcattggaagccttgagactccagtaacctcaagcccactgatagcatggtatctttcaaacctcccagcctacagaacagcagtcagcccattgctgaggggaatagaagtgggcctggctcacggtttctttctggttggtccatttgtcaaagctggccctctaaggaacacagcctacgccggaggagcaggctcgctggctgctgggggtctcattgtcattttgagcgtctgcttgacaatgtatggtgttgcatcattcaatgaaggagagccatctaccgcaccatcattgactttgactggccggaagaagacccctgatcctctccaaacagccgatgggtgggcaaaattctcaggcgggtttttcttcggtggtatctccggtgtgatctgggcatacttcctcctctatgtcttggacctcccttactacgtcaagtagatttcgtatcactttctgtttctacaatgcaacttccatgtctgtattatggaaacataaaattgtatattttctgcc

SEQ ID NO: 12109 - protein, 217 aa, Cucumis sativus
MATATSPTASQLSSSFASSNTRALISPKGLSASPLRRIPTRTHSFTIRAIQADKPTFQVIQPINGDPFIGSLETPVTSSPLIAWYLSNLPAYRTAVSPLLRGIEVGLAHGFFLVGPFVKAGPLRNTAYAGGAGSLAAGGLIVILSVCLTMYGVASFNEGEPSTAPSLTLTGRKKTPDPLQTADGWAKFSGGFFFGGISGVIWAYFLLYVLDLPYYVK

SEQ ID NO: 12110 - DNA, 444 bp, Gloeobacter violaceus
  CDS (1)..(444): transl_table=11
atgaccctggcacgctatgtctacacaccggatccgcaggaggggacgctgcttaccccggtgaacaattccacggcgatccgctggttcatcgacaatctgcccatcaaccgggtggggatggacgagtttacccgcgggttggaaattggcatggcccacggttactggctcatcggtcctttcgcgctgctcggtcctctacgcaacaccgaactgggtctggtggccgggctggtctcgaccatcggcctgctgctcatctcgaccattgggctttcgggttacgcctcgctggtcgaagacgtgccgaccgaattcgaccgcaagggctggagccggcttgccggcggttttctggtgggcggtgtcgggggggccatcttcgcctttgcgattttgcagtttttcccgctggtctcagccatcgcccgcatcccctaa

SEQ ID NO: 12111 - protein, 147 aa, Gloeobacter violaceus
MTLARYVYTPDPQEGTLLTPVNNSTAIRWFIDNLPINRVGMDEFTRGLEIGMAHGYWLIGPFALLGPLRNTELGLVAGLVSTIGLLLISTIGLSGYASLVEDVPTEFDRKGWSRLAGGFLVGGVGGAIFAFAILQFFPLVSAIARIP

SEQ ID NO: 12112 - DNA, 777 bp, Hordeum vulgare
  CDS (34)..(663)
ttgagcgtgtgggagtcgaaggaggacatcgagatggccactgcatatgctcctcccatggcgagccaggtgatgaagagcggcttggcgtgctccaagccgcggggcatgtccggcgcttcgctcacccggaggccccgcttcgtcgtcaaggctgtcaagtctgacaagccgacgtaccaagtggtccagcccatcaacggcgacccgttcatcggcagcctggagacgccggtcacctccagccccctcgtcgcgtggtacctctccaacctccccgcctaccgcaccgccgtcagcccgctcctccgcggcatcgaggtcggcctcgcccatggctacctcctcgtcggccccttcgcgctcactggcccgctccgcaacacgcccgtgcacggacaggccggcacactcggcgccatcggactcgtctccatcctcagcgtctgcctcaccatgtacggcgtcgcctccttcaacgagggcgagccgtccaccgcgccggtgctcaccctcaccggacgcaagaaggaggccgacaagctccagaccgccgaagggtggtcgcagttcaccggaggcttcttcttcggcggtgtatccggcgccgtctgggcatacttcctcctctacgtgctcgacctcccatacttcttcaagtagattaataggtggcatgcatgtacgatgtctccagatcatgccatctcttctcggtggttgcctgaacgagtcttctatgtataaatgaatttttacatattcctcataaaaaaa

SEQ ID NO: 12113 - protein, 209 aa, Hordeum vulgare
MATAYAPPMASQVMKSGLACSKPRGMSGASLTRRPRFVVKAVKSDKPTYQVVQPINGDPFIGSLETPVTSSPLVAWYLSNLPAYRTAVSPLLRGIEVGLAHGYLLVGPFALTGPLRNTPVHGQAGTLGAIGLVSILSVCLTMYGVASFNEGEPSTAPVLTLTGRKKEADKLQTAEGWSQFTGGFFFGGVSGAVWAYFLLYVLDLPYFFK

SEQ ID NO: 12114 - DNA, 456 bp, Phaeodactylum tricornutum
  CDS (1)..(456): transl_table=11
atggctaatttcattaaaccctataatgatgatccgtttgtgggtcatttagcaacgccaataacatcatctgcagtaacacgagcaattctacaaaatttaccagcctatcgtttcggtttaacgccattattacgtggcttagaaattggtttagcacatggttactttttaatgggcccctttgttaaattagggccattgcgtgattctgagattggattgctagctggttttctttcaacagttggtttgattgtaattttaactttaggtctaacgatttacggtgtagctgcgtttggccaagaaaagacgcaatcatctaatgaaaatgatttacaaacaaagaaggcttgggaccaatttaaaggtgggttctttgttggggcatgtggaagtgcaggctttgcatttatttgtctatctagtatccctagctttataacaaattaa

SEQ ID NO: 12115 - protein, 151 aa, Phaeodactylum tricornutum
MANFIKPYNDDPFVGHLATPITSSAVTRAILQNLPAYRFGLTPLLRGLEIGLAHGYFLMGPFVKLGPLRDSEIGLLAGFLSTVGLIVILTLGLTIYGVAAFGQEKTQSSNENDLQTKKAWDQFKGGFFVGACGSAGFAFICLSSIPSFITN

SEQ ID NO: 12116 - DNA, 1118 bp, Prochlorococcus marinus
  CDS (365)..(964): transl_table=11
ggccgttgctgtcgccaaatcccaaaagcgttatagtaatcagcaaggcagcacctgcagcgaaaaattgattcatcgatttagaagtgatagatgtgtcattgattcgtattggattgaacttttatgtcaccaatggggtctttacgtttctattacacgttaactctatacagtaatggtggaacttttggtatttccaatgtctagcgagtttgccgcgacctggcttcctgctgtcttcgtccctcttatagggcttgtgacaccagcagtctttattgtgctcattggtcggtacatcacagcaaccgactgaaacacattttgtttcccttaagtcaacaaagttctttatacgcccatgactgaattccaagacccttttttaaagtcatctgaacctgtcaaattcaacgaaaaatacgttgacagctcagttcgccctggagacataggaattgtcgatcagtgggctgtaacaccagtctctgatccatgcgttggtaatttgtcgacacctgttaacagtggatattttacaaaagcattcctaaataatcttcccttttataggggtggactttctccaaattttcgtggcctagaagtaggcgcggcttttggatatttactttacggtccttatgcaatgactgggccgttaagaaatacagattatgctcttaccgctggattattaggaaccattggagcagttcacatacttacagctttattggttttatataatgccccaggcaaggcacctaatatccaaccctcggactgcactattaacaatccaccagcagatttatttacgagatctggctgggcagattttaccagtggattctggctaggtggttgcggtggagcagtatttgcctggttactgtgtggcacgcttcatctagatacaataatgcctatcgttagaggagtttgggcagctggttagtatcattaattgttgatcgaaaaaattgcccgagaaggtttaaacactttctcgggcaatttttttcgatcagctacaactttgaatatcctttaaatgattttaattgaaaagcataaacaattcatttcttggtatcaaaaaaagcttggcc

SEQ ID NO: 12117 - protein, 199 aa, Prochlorococcus marinus
MTEFQDPFLKSSEPVKFNEKYVDSSVRPGDIGIVDQWAVTPVSDPCVGNLSTPVNSGYFTKAFLNNLPFYRGGLSPNFRGLEVGAAFGYLLYGPYAMTGPLRNTDYALTAGLLGTIGAVHILTALLVLYNAPGKAPNIQPSDCTINNPPADLFTRSGWADFTSGFWLGGCGGAVFAWLLCGTLHLDTIMPIVRGVWAAG

SEQ ID NO: 12118 - DNA, 834 bp, Spinacia oleracea
  CDS (84)..(734)
accctattatattctcttctcccaaatttttaatttttggttcaaagtagattttattattgttttagggtgggctacaaaaaatggctgcaaccacctcaccaatggctagccaattaaagagtgggttcaccactaaggctcttgtggttcctaagggcatttctggtcctgctttgagagggttcccttctcctaggaggcacacttcttttaccgttagggctattaagaccgaaaagccaacataccaagtaatccagcctctaaatggagacccattcattggtgggcttgagaccccagtaacatccagcccattgattgcctggtacctatccaacctcccagcctacaggactgcagtcaacccacttctacgtggtgttgaggtgggcttggcccatgggtttttattggtaggcccatttgtgaaggccggcccattaagaaacacagagtatgctggtgctgcaggttccttggctgctgcaggacttgtagtgatccttagcatgtgtttgactatgtatggcattgcttccttcaaggagggagaaccgtctatcgccccggctttgactttgaccggtaggaagaagcaacccgaccaactccaatccgcggacgggtgggccaagttcaccggagggttcttcttcggtggtgtttccggtgttacatgggcttgcttcctcatgtatgttcttgaccttccttactacttcaagtgagtgagtggtatgcttttgtttgtaagggtctaaacttctatgattgtgaagatgggaaaagatattgtatatttcaagaaaaatactttgcactaaaaaa

SEQ ID NO: 12119 - protein, 216 aa, Spinacia oleracea
MAATTSPMASQLKSGFTTKALVVPKGISGPALRGFPSPRRHTSFTVRAIKTEKPTYQVIQPLNGDPFIGGLETPVTSSPLIAWYLSNLPAYRTAVNPLLRGVEVGLAHGFLLVGPFVKAGPLRNTEYAGAAGSLAAAGLVVILSMCLTMYGIASFKEGEPSIAPALTLTGRKKQPDQLQSADGWAKFTGGFFFGGVSGVTWACFLMYVLDLPYYFK

SEQ ID NO: 12120 - DNA, 600 bp, Oryza sativa
  CDS (1)..(600)
atggccactgcttatgctcccatggcgagccagctgatgaagagcagcttggtgtgctccaagccgagggggctgtctggtgcttcgctgacaaggaggccccgcttcacagtcaaggccatccagtctgagaagccaacgtaccaggtggtgcagcccatcaatggcgaccccttcatcggcagcctggagacgccggtgacctccagcccgctggtcgcctggtacctctccaacctcccggcgtaccgcaccgccgtcagcccgctgctccgcggcatcgaggtcggcctcgcccacggctacctcctcgtcgggcccttcgcgctcaccggcccgctccgcaacacgccggtgcacggcctcgtcgccatcctcagcgtctgcctcaccatgtacggcgtcgcctccttcggcgagggcgagccgtccacggcgccgacgctgacgctcaccggccgcaagaaggaggccgacaagctgcagaccgccgacggctgggccaagttcaccggcggcttcttcttcggcggcatctccggcgtcctctgggcctacttcctcctctacgtgctcgacctcccgtacttcttcaagtag

SEQ ID NO: 12121 - protein, 199 aa, Oryza sativa
MATAYAPMASQLMKSSLVCSKPRGLSGASLTRRPRFTVKAIQSEKPTYQVVQPINGDPFIGSLETPVTSSPLVAWYLSNLPAYRTAVSPLLRGIEVGLAHGYLLVGPFALTGPLRNTPVHGLVAILSVCLTMYGVASFGEGEPSTAPTLTLTGRKKEADKLQTADGWAKFTGGFFFGGISGVLWAYFLLYVLDLPYFFK

SEQ ID NO: 12122 - DNA, 645 bp, Oryza sativa
  CDS (1)..(645)
atggcagctgcttccccaatggcaagccaactcaagtccaccttcactaggactcttgtagctcccaagggcctctctgcctcttcaccacttcacctcgtgccttctagaaggcaatttagcttcactgttaaggccatccaatcagagaagccaacctatcaagtgattcagccaatcaacggtgacccattcattggaagcctggaaaccccagttacatccagccctttgatcgcatggtacttgtccaacctgcccgcatacagaaccgcagtgagcccactactaagagggatcgaggtgggcctggcccacggataccttctggtgggcccattcgtgaaggccgggcctcttaggaacaccgagatcgccgggcaagcgggctctctggccgccggtgggcttgtggtgatcctcagcctttgcctcacaatctatgggatttcatccttcaacgaaggagccccatccactgctccgtcgctgaccttgacgggccgcaagaaggagcccgatcagctccaaactgctgatgggtgggccaagttcaccggaggcttcttcttcggaggcatttcgggtgttatttgggcctacttcctcctctacgtcttggaccttccatactacatcaaatga

SEQ ID NO: 12123 - protein, 214 aa, Oryza sativa
MAAASPMASQLKSTFTRTLVAPKGLSASSPLHLVPSRRQFSFTVKAIQSEKPTYQVIQPINGDPFIGSLETPVTSSPLIAWYLSNLPAYRTAVSPLLRGIEVGLAHGYLLVGPFVKAGPLRNTEIAGQAGSLAAGGLVVILSLCLTIYGISSFNEGAPSTAPSLTLTGRKKEPDQLQTADGWAKFTGGFFFGGISGVIWAYFLLYVLDLPYYIK

SEQ ID NO: 12124 - DNA, 645 bp, Oryza sativa
  CDS (1)..(645)
atggcagctgcttctcctatggcaagccaactcaagtccaccttcactaaaactcttgtagctcccaagggcctctctgcctcttcaccactccacctcctgccttctaagaggcaatttagcttcactgttagggccatccaatcagaaaagccaacctatcaagtgattcaaccaatcaacggtgatcccttcattggaagccttgaaaccccagttacatccagccccttgattgcatggtacttatcgaacctccccgcatacaggaccgcagtgagcccactactaagagggatcgaggtgggcctggcccatggctaccttctggtgggcccattcgtgaaggccgggcctctgaggaacaccgagatcgccgggcaagcgggctctctcgccgctggtgggcttgtggtgatcctcagcctttgcctcacaatctatgggatttcatcttttaacgaaggagacccatccactgccccgtcactgaccttgacgggccgcaagaaggagcccgatcagctccaaactgctgatgggtgggccaagttcaccggaggcttcttcttcggaggcatttcgggtgttatttgggcctacttcctcctctacgtcttggaccttccatactacatcaagtga

SEQ ID NO: 12125 - protein, 214 aa, Oryza sativa
MAAASPMASQLKSTFTKTLVAPKGLSASSPLHLLPSKRQFSFTVRAIQSEKPTYQVIQPINGDPFIGSLETPVTSSPLIAWYLSNLPAYRTAVSPLLRGIEVGLAHGYLLVGPFVKAGPLRNTEIAGQAGSLAAGGLVVILSLCLTIYGISSFNEGDPSTAPSLTLTGRKKEPDQLQTADGWAKFTGGFFFGGISGVIWAYFLLYVLDLPYYIK

SEQ ID NO: 12126 - DNA, 633 bp, Zea mays
  CDS (1)..(633)
atggccacagcttacgctcccatggcgagccaggtgatgaagagcagcctcgtcgtgcactcgaggccgaggggcctgtcaggcgctgctgcgctcacgaggcggccccggttcaccgtcaaggccatccagcccgagaaggcaacgtaccaggtggtgcagcccatcaacggcgaccccttcatcggcagcctggagacgccggtcacctcgagcccgctcgtggcgtggtacctctccaacctcccggcctaccgcaccgccgtgagcccgctgctgcggggcgtcgaggtcggcctcgcgcacggctacctcctcgtggggcccttcgcgctcacgggcccgctccgcagcacgcccgtgcacggccaggccggcgcgctcggcgccgccggcctcgtcgccatcctcagcgtctgcctcaccatgtacggcgtcgcctccttcaacgagggggacccgtccacggcgccctcgctcacgctcaccggcaggaagaaggaggccgacaagctgcagaccgccgacggctgggccaagttcaccggggggttcttcttcggcggcatctccggcgtgctctgggcctactttctcctctacgtgctcgacctcccctacttcttcaagtag

SEQ ID NO: 12127 - protein, 210 aa, Zea mays
MATAYAPMASQVMKSSLVVHSRPRGLSGAAALTRRPRFTVKAIQPEKATYQVVQPINGDPFIGSLETPVTSSPLVAWYLSNLPAYRTAVSPLLRGVEVGLAHGYLLVGPFALTGPLRSTPVHGQAGALGAAGLVAILSVCLTMYGVASFNEGDPSTAPSLTLTGRKKEADKLQTADGWAKFTGGFFFGGISGVLWAYFLLYVLDLPYFFK

SEQ ID NO: 12128 - DNA, 660 bp, Brassica napus
  CDS (1)..(660)
atggcaacgactgcatctccaatggcgagccagctaagattaagcttctgttctgctactaatgcgaggcgtctcgctgttcctaagggcatctccggggctcctttcggcgtttcaccgaccaagaaaacgttttctttcaccgtccgagctctccagtcagacaagccaacattccaagtggtccaaccaatcaacggagatccattcatcggaagtttagaaaccccagtgacgtcaagcccattgatcgcgtggtatctctccaacctcccggcttaccgcacggccgtcaaccctctcctccgtggtgtcgaagtgggtttggctcatggtttcctcttagtgggtccgtttgtcaaagcaggtccattaaggaacactgcttacgctggctccgccggctctttggccgctgctgggcttgtagtcatcctcagcatgtgcctcactatctatggaatctcttcgttcaaggaaggagagccgtcgattgcaccaagtttgactttgaccgggcggaagaagcaaccggaccagcttcagacagcagagggatgggctaagtttactggagggttcttcttcggagggatctcaggtgtgacttgggcttacttccttctctacgttcttgaccttccttattacgtcaaatga

SEQ ID NO: 12129 - protein, 219 aa, Brassica napus
MATTASPMASQLRLSFCSATNARRLAVPKGISGAPFGVSPTKKTFSFTVRALQSDKPTFQVVQPINGDPFIGSLETPVTSSPLIAWYLSNLPAYRTAVNPLLRGVEVGLAHGFLLVGPFVKAGPLRNTAYAGSAGSLAAAGLVVILSMCLTIYGISSFKEGEPSIAPSLTLTGRKKQPDQLQTAEGWAKFTGGFFFGGISGVTWAYFLLYVLDLPYYVK

SEQ ID NO: 12130 - DNA, 660 bp, Brassica napus
  CDS (1)..(660)
atggcagcaagtgcatctccaatggcgagccagctaaggagcagcttctcctccacttcaattgctaggcgtctagccgtccctaaggggatctccggcccttctttcggcgtttatccgaccaagagaatctcttccttcactgtccgagctgttcagtccgacaagccaacatttcaagtggtccaaccaatcaacggcgatccattcatcggaagtttggagactcctgtaacgtcaagcccattgattgcgtggtatctttccaacctcccggcttaccgcaccgccgtcaaccctctcctccgtggtgtcgaagtgggcttggcacatggtttcctcttagtgggcccattcgtcaaagctggcccattaaggaacactgcttacgctggttccgccggctccttagccgccgctgggcttgtagtcatcctcagcatgtgcctcactatctacggaatctcttcgttcaaggaaggtgagccttcaattgctccgagtttgacgttgactgggcggaagaagcagcccgaccagcttcagacagctgagggatgggcaaaattcacgggagggttcttcttcggagggatctctggtgtgacttgggcttactttctgctctacgttcttgaccttccatattacgtcaaatga

SEQ ID NO: 12131 - protein, 219 aa, Brassica napus
MAASASPMASQLRSSFSSTSIARRLAVPKGISGPSFGVYPTKRISSFTVRAVQSDKPTFQVVQPINGDPFIGSLETPVTSSPLIAWYLSNLPAYRTAVNPLLRGVEVGLAHGFLLVGPFVKAGPLRNTAYAGSAGSLAAAGLVVILSMCLTIYGISSFKEGEPSIAPSLTLTGRKKQPDQLQTAEGWAKFTGGFFFGGISGVTWAYFLLYVLDLPYYVK

SEQ ID NO: 12132 - DNA, 636 bp, Zea mays
  CDS (1)..(636)
atggccacagcttacgctcccatggcgagccaggtgatgaagagcagcctcgtcgtgcactcgaggccgaggggcctgtcaggcgctgctgcgctcacgaggcggcccggccggttcaccgtcaaggccatccagcccgagaaggcaacgtaccaggtggtgcagcccatcaacggcgacccgttcatcggcagcctggagacgccggtcacctccagcccgctcgtggcgtggtacctctccaacctcccggcctaccgcaccgccgtgagcccgctgctgcggggcgtcgaggtcggcctcgcgcacggctacctcctcgtggggcccttcgcgctcacgggcccgctccgcagcacgcccgtgcacggccaggccggcgcgctcggcgccgccggcctcgtcgccatcctcagcgtctgcctcaccatgtacggcgtcgcctccttcaacgagggggacccgtccacggcgcccacgctcacgctcaccggcaggaagaaggaggccgacaagctgcagaccgccgacggctgggccaagttcaccggggggttcttcttcggcggcatctccggcgtgctctgggcctactttctcctctacgtgctcgacctcccctacttcttcaagtag

SEQ ID NO: 12133 - protein, 211 aa, Zea mays
MATAYAPMASQVMKSSLVVHSRPRGLSGAAALTRRPGRFTVKAIQPEKATYQVVQPINGDPFIGSLETPVTSSPLVAWYLSNLPAYRTAVSPLLRGVEVGLAHGYLLVGPFALTGPLRSTPVHGQAGALGAAGLVAILSVCLTMYGVASFNEGDPSTAPTLTLTGRKKEADKLQTADGWAKFTGGFFFGGISGVLWAYFLLYVLDLPYFFK

SEQ ID NO: 12134 - DNA, 633 bp, Zea mays
  CDS (1)..(633)
atggccacagcttacgctcccatggcgagccaggtgatgaagagcagcctcgtcgtgcactcgaggccgaggggcctgtcaggcgctgctgcgctcacgaggcggccccggttcaccgtcaaggccatccagcccgagaaggcaacgtaccaggtggtgcagcccatcaacggcgaccccttcatcggcagcctggagacgccggtcacctcgagcccgctcgtggcgtggtacctctccaacctcccggcctaccgcaccgccgtgagcccgctgctgcggggcgtcgaggtcggcctcgcgcacggctacctcctcgtggggcccttcgcgctcacgggcccgctccgcagcacgcccgtgcacggccaggccggcgcgctcggcgccgccggcctcgtcgccatcctcagcgtctgcctcaccatgtacggcgtcgcctccttcaacgagggggacccgtccacggcgcccacgctcacgctcaccggcaggaagaaggaggccgacaagctgcagaccgccgacggctgggccaagttcaccggggggttcttcttcggcggcatctccggcgtgctctgggcctactttctcctctacgtgctcgacctcccctacttcttcaagtag

SEQ ID NO: 12135 - protein, 210 aa, Zea mays
MATAYAPMASQVMKSSLVVHSRPRGLSGAAALTRRPRFTVKAIQPEKATYQVVQPINGDPFIGSLETPVTSSPLVAWYLSNLPAYRTAVSPLLRGVEVGLAHGYLLVGPFALTGPLRSTPVHGQAGALGAAGLVAILSVCLTMYGVASFNEGDPSTAPTLTLTGRKKEADKLQTADGWAKFTGGFFFGGISGVLWAYFLLYVLDLPYFFK

SEQ ID NO: 12136 - DNA, 22 bp, Artificial sequence
  primer
atggctgaatctaaccaagttg

SEQ ID NO: 12137 - DNA, 25 bp, Artificial sequence
  primer
ttagttaaatagaccccggaaaatc

SEQ ID NO: 12138 - protein, 141 aa, Artificial sequence
  consensus sequence
  Variant (3)..(4): Xaa in position 3 to 4 is any amino acid
  Variant (6)..(6): Xaa in position 6 is any amino acid
  Variant (8)..(8): Xaa in position 8 is any amino acid
  Variant (12)..(12): Xaa in position 12 is any amino acid
  Variant (15)..(22): Xaa in position 15 to 22 is any amino acid
  Variant (26)..(26): Xaa in position 26 is any amino acid
  Variant (29)..(32): Xaa in position 29 to 32 is any amino acid
  Variant (34)..(35): Xaa in position 34 to 35 is any amino acid
  Variant (38)..(38): Xaa in position 38 is any amino acid
  Variant (40)..(40): Xaa in position 40 is any amino acid
  Variant (42)..(42): Xaa in position 42 is any amino acid
  Variant (46)..(47): Xaa in position 46 to 47 is any amino acid
  Variant (49)..(49): Xaa in position 49 is any amino acid
  Variant (53)..(55): Xaa in position 53 to 55 is any amino acid
  Variant (60)..(64): Xaa in position 60 to 64 is any amino acid
  Variant (65)..(66): Xaa in position 65 to 66 is any or no amino acid
  Variant (69)..(69): Xaa in position 69 is any amino acid
  Variant (71)..(73): Xaa in position 71 to 73 is any amino acid
  Variant (77)..(77): Xaa in position 77 is any amino acid
  Variant (80)..(82): Xaa in position 80 to 82 is any amino acid
  Variant (84)..(85): Xaa in position 84 to 85 is any amino acid
  Variant (87)..(94): Xaa in position 87 to 94 is any amino acid
  Variant (95)..(111): Xaa in position 95 to 111 is any or no amino acid
  Variant (113)..(117): Xaa in position 113 to 117 is any amino acid
  Variant (118)..(118): Xaa in position 118 is any or no amino acid
  Variant (121)..(122): Xaa in position 121 to 122 is any amino acid
  Variant (124)..(125): Xaa in position 124 to 125 is any amino acid
  Variant (128)..(129): Xaa in position 128 to 129 is any amino acid
  Variant (132)..(133): Xaa in position 132 to 133 is any amino acid
  Variant (135)..(137): Xaa in position 135 to 137 is any amino acid
  Variant (139)..(140): Xaa in position 139 to 140 is any amino acid
DPXXGXLXTPVXSSXXXXXXXXNLPXYRXXXXPXXRGXEXGXAHGXXLXGPFXXXGPLRXXXXXXXAGXLXXXGLVXILXXXLXXYXXXXXXXXXXXXXXXXXXXXXXXXXDXXXXXXGWXXFXXGFXXGGXXGXXXAXXL

SEQ ID NO: 12139 - protein, 30 aa, Artificial sequence
  protein pattern
  Variant (2)..(7): Xaa in position 2 to 7 is any or no amino acid
  Variant (10)..(10): Xaa in position 10 is Ala or Ser
  Variant (11)..(11): Xaa in position 11 is any amino acid
  Variant (13)..(13): Xaa in position 13 is Ala, Ser or Thr
  Variant (14)..(14): Xaa in position 14 is Ala, Gly or Ser
  Variant (17)..(17): Xaa in position 17 is Phe or Trp
  Variant (18)..(18): Xaa in position 18 is Phe, Leu or Val
  Variant (21)..(21): Xaa in position 21 is any amino acid
  Variant (22)..(22): Xaa in position 22 is Ala, Gly or Ser
  Variant (24)..(24): Xaa in position 24 is Ala or Val
  Variant (25)..(26): Xaa in position 25 to 26 is any amino acid
  Variant (28)..(28): Xaa in position 28 is any amino acid
  Variant (29)..(29): Xaa in position 29 is Phe or Leu
DXXXXXXGWXXFXXGFXXGGXXGXXXAXXL

SEQ ID NO: 12140 - DNA, 750 bp, Synechocystis sp.
  CDS (1)..(750): transl_table=11
atgtcccatactctgactaagctcgatctacccaccttacaaacggagctggaaaatgccaccgcccaacagatcattacctgggcggcccaaacctttggccctggcttggtgatgagtactagttttggcattcaggcggcggtgatgctccatttagtgactagcattgtgcccaatattcctgttatctggattgacacgggctatttaccgctggaaacctatcaatttgcggatcagttgaccggacggctacagctaaatttaaaggtttaccaatctcccctcagcccagctcgcatggaagctctgtacggcaagctctggcaacaaaaagacgtggaatccctcaaccgttatgatcaaatccgcaaagttgaaccgatgcagagggcattaaaagaactagaggcgatcgcctggttgacggggttaaggagggatcaaactcggcaccgccagaatttgaaaccagtggatctccagggtaatcagtataaagttctccccattttggactggaattctaagatggtttacgaatatctcaccgcccacgatttaccctaccatccgttttttgaccagggttacgtctctgtgggggattggcattctagccggcccctgatggcccacgatgaagatgaaagggatacccgtttccacggcctcaaacaggaatgtggtttacatttacccctgtccccggaagctggccagagtttggattccagtgctttgtaa

SEQ ID NO: 12141 - protein, 249 aa, Synechocystis sp.
MSHTLTKLDLPTLQTELENATAQQIITWAAQTFGPGLVMSTSFGIQAAVMLHLVTSIVPNIPVIWIDTGYLPLETYQFADQLTGRLQLNLKVYQSPLSPARMEALYGKLWQQKDVESLNRYDQIRKVEPMQRALKELEAIAWLTGLRRDQTRHRQNLKPVDLQGNQYKVLPILDWNSKMVYEYLTAHDLPYHPFFDQGYVSVGDWHSSRPLMAHDEDERDTRFHGLKQECGLHLPLSPEAGQSLDSSAL

SEQ ID NO: 12142 - DNA, 1428 bp, Oryza sativa (japonica cultivar-group)
  CDS (1)..(1428)
atggcttccgctaccgcttccatctcgtcccactccgtcgccctccgcgacctcaaagctgcgaggattggagccgtgaagcagcaggtggccgcggccccggcggcgggcacggcggcggcgagggcccagcgcgcgagggcggtgcgcccgctgcgcgcggcggagccggcgaggcagcccgtctccgcctccgcggcggcggcgccggccgccgcgcccgtggcggaggacgccgccgccgccgccgtcgacgcccctgctccggccgtggactacgaggccctggcccaggagctgcagggcgcgtcgccgctggagatcatggatcgggcactcgccatgttcggatccgacatcgccatcgccttcagcggggcggaggacgtggcgctgatcgagtacgcgaagctgacggggcgtccgttccgcgtgttcagcctggacacggggcggctgaacccggagacgtaccagctgttcgacaaggtggagaagcactacgggatccggatcgagtacatgttcccggacgccggcgaggtgcaggcgctggtgcgcgccaagggcctcttctccttctacgaggacggccaccaggagtgctgccgcgcccgcaaggtgcgcccgctccgccgcgcgctccgcggcctcagggcctggatcaccggccagcgcaaggaccagtccccgggcacccgcgccgccatccccgtcgtccaggtcgacccctccttcgagggcctcgctggcggcgccggcagcctcgtcaagtggaaccccgtcgccaacgtcgacggcaaggacgtgtggaccttcctccgcgccatggatgtccccgtcaacgccctgcacgcccaggggtacgtctcgatcgggtgcgagccgtgcaccaggcccgtgcttcccggccagcacgagcgggaagggcggtggtggtgggaggacgccaaggccaaggagtgcggcctccacaaggggaacatcgacgaccagggtggggcggcggcggcggcggcgcacaaggccggcggcgccaacggcaacgggtcggccggcgcgccggacatcttcgagagcagcggcgtggtgagcctcacccgcgccggcgtcgagaacctgctccgcctggagagccgcgcggagccgtggctggtggtgctgtacgcgccgtggtgccccttctgccaggccatggaggcgtcctacctggagctcgccgagaggctgggcggcgcgggcggcggcgtgaaggtgggcaagttccgcgccgacggcgagcagaaggcgttcgcgcagcaggagctgcagctgcagagcttcccgaccatcctcctcttcccgagccgcaccgcgaggccgatcaagtacccgtcggagaagcgggacgtcgactcgctcctcgccttcgtcaacagcctccgatga

SEQ ID NO: 12143 - protein, 475 aa, Oryza sativa (japonica cultivar-group)
MASATASISSHSVALRDLKAARIGAVKQQVAAAPAAGTAAARAQRARAVRPLRAAEPARQPVSASAAAAPAAAPVAEDAAAAAVDAPAPAVDYEALAQELQGASPLEIMDRALAMFGSDIAIAFSGAEDVALIEYAKLTGRPFRVFSLDTGRLNPETYQLFDKVEKHYGIRIEYMFPDAGEVQALVRAKGLFSFYEDGHQECCRARKVRPLRRALRGLRAWITGQRKDQSPGTRAAIPVVQVDPSFEGLAGGAGSLVKWNPVANVDGKDVWTFLRAMDVPVNALHAQGYVSIGCEPCTRPVLPGQHEREGRWWWEDAKAKECGLHKGNIDDQGGAAAAAAHKAGGANGNGSAGAPDIFESSGVVSLTRAGVENLLRLESRAEPWLVVLYAPWCPFCQAMEASYLELAERLGGAGGGVKVGKFRADGEQKAFAQQELQLQSFPTILLFPSRTARPIKYPSEKRDVDSLLAFVNSLR

SEQ ID NO: 12144 - DNA, 720 bp, Sulfolobus tokodaii str. 7
  CDS (1)..(720): transl_table=11
atgataagcagagaagaacttgaaaaactcaacagttacttcgaagagaaagagccaatagaaatcttaaaatggggtatagaaaagttccaccctaaaataacattagcgtgcagtcttcaagcagaagatttagtaatattagacatgcttagtaaaatagtgaaaagaccaaaggttttcataatagatactgggagattacatcaagaaacttacgatttgatagaacagattacaagtaaatacgacgtagatttatcgatatacttcccagattataaagaggtagaggaaatggtcaaaaaatatggaataaatctattttataaaagtatcgagcttagaaaattatgctgtgaaattaggaaagtaaggcctttaaagagagctttagaggggatggatgcatggataacagggcttagaagggaacaaaatttcactagaagcaaaataaggaaaattgaaattgatgagattaatggaggaatagtaaaactaaatcctttagcagattgggtttatgaacaagtatgggattatataaagaagaataacgttccttacaataagctttacgataagggctataagagcattggctgtgtaccatgtacgagacctgtaaagccttgggaacaccctagggcaggtagatggtggtgggaacaaagtggagataaagaatgtggattacattatagggaggtgaagtga

SEQ ID NO: 12145 - protein, 239 aa, Sulfolobus tokodaii str. 7
MISREELEKLNSYFEEKEPIEILKWGIEKFHPKITLACSLQAEDLVILDMLSKIVKRPKVFIIDTGRLHQETYDLIEQITSKYDVDLSIYFPDYKEVEEMVKKYGINLFYKSIELRKLCCEIRKVRPLKRALEGMDAWITGLRREQNFTRSKIRKIEIDEINGGIVKLNPLADWVYEQVWDYIKKNNVPYNKLYDKGYKSIGCVPCTRPVKPWEHPRAGRWWWEQSGDKECGLHYREVK

SEQ ID NO: 12146 - DNA, 735 bp, Caulobacter crescentus CB15
  CDS (1)..(735): transl_table=11
gtggcctacgaccagacgagcgcgacggctccaggccttgccgcccggctggacgccgagctgcgcgacgcccatcccagcgagatcctccgcacggcccatgagcacttcggcgacaagctggcgctggtgtcgtcgttcggcgccgagtcggcggtgctgctgcatctggcctcgcgcgtctcgccgggcctgccggttctgttcctcgacaccgggatgctgtttggccagacgctggactatcgaaagaatatcgcggcccagttcggcctgaccgatgtccgcgatctgcggccggctttcgcggacctggcgacccaggaccctaactccgacctctggcgcaccagcgtcgacggctgctgccacattcgcaaggttctgccgctggatcgcgcgttgggcggcttcgacgcctggatcaccggtcgcaagcgcttccacggcggtgatcgcctgagcctgccagtggtcgaagaggccgacggcaagatcaagttcaacccgttggccaactggtccaaggccgagctcgacgcctatgtcgccgaacatgacctgccggcccacccgctggtggcccagggctatgcctcggtcggctgttggccgtgcacgcagccttccgacgacggaaggtccgggcgctgggcgggtcaggaaaagaccgagtgcggcatccacgtcgcgcgggcgcccggtgtcgcgccgaacgtgggcggggatatctga

SEQ ID NO: 12147 - protein, 244 aa, Caulobacter crescentus CB15
MAYDQTSATAPGLAARLDAELRDAHPSEILRTAHEHFGDKLALVSSFGAESAVLLHLASRVSPGLPVLFLDTGMLFGQTLDYRKNIAAQFGLTDVRDLRPAFADLATQDPNSDLWRTSVDGCCHIRKVLPLDRALGGFDAWITGRKRFHGGDRLSLPVVEEADGKIKFNPLANWSKAELDAYVAEHDLPAHPLVAQGYASVGCWPCTQPSDDGRSGRWAGQEKTECGIHVARAPGVAPNVGGDI

SEQ ID NO: 12148 - DNA, 726 bp, Nostoc sp. PCC 7120
  CDS (1)..(726): transl_table=11
atgacagcttctacggcatttaaaacccaaacaaacgaatttaatttagatgaattaaatcaacagtttgaaactgccactcctaaagaaattctggcatggtctatagagcatatccccacagggttggtacaaactagcgcctttaatgtggatgacttagtaattacccatatcctttatagtgaactcaagcaaccagtacctgtaatctttctcgatactctgttccactttcaacaaactttagaactcgttgctaaagcgaaagaaatatataatctagatttacaaacctacaaaactccagatgtagatacccgtgaagcctttactgctaaatacggcgaagcgctttgggataaagatattacgcaattccaccacgttaccaaaattgaacctctacaacgtggtttagatgaacttaataccgttgcttggattactggccgtcgtcgcgatcaagccgttacccgcgcgaatatgcctgtatttgaattagatggcaaaggtcgtttgaaagtaaatcccttagcagcttggacacgtcaagatagctgggattacgtagctgaacataaagtaatttataatcctctacacgatcaaggttatcccagtattggcgatgaacccatcaccaccaaggtaggcgaaggcgaagacgaacgcgccggacgctggagaggaagcaataaaactgaatgtgggattcacatttag

SEQ ID NO: 12149 - protein, 241 aa, Nostoc sp. PCC 7120
MTASTAFKTQTNEFNLDELNQQFETATPKEILAWSIEHIPTGLVQTSAFNVDDLVITHILYSELKQPVPVIFLDTLFHFQQTLELVAKAKEIYNLDLQTYKTPDVDTREAFTAKYGEALWDKDITQFHHVTKIEPLQRGLDELNTVAWITGRRRDQAVTRANMPVFELDGKGRLKVNPLAAWTRQDSWDYVAEHKVIYNPLHDQGYPSIGDEPITTKVGEGEDERAGRWRGSNKTECGIHI

SEQ ID NO: 12150 - DNA, 804 bp, Pyrobaculum aerophilum str. IM2
  CDS (1)..(804): transl_table=11
atgaggcgcgagtggactgatttagaagtggaagagctgtccctaaggtttgagaattctacggctgaggaattattaagctgggctcttaatgaattctatcccaatatagcattggcctttagtggtcaagctgaggatgtagtagtgctagacattatgcacaaagtagctcccgataagattagagtttttatgctggataccggccgtttgcccgaagaaatatatgagttagtggacaaagtacgcgaacactacggcgttgagatagaaatttactatccagatactaaagaaattgaggaatttgtaaagagatatggcattaatccattctatcgtgacgtagagcttaggcatttatgttgtaaaatacgaaaagtgaatcccttactgagggctctgtcaggactagacgcgtggatcacaggcttacgtagagatcaattccccacaagagctacaacaaggaaaatccaaatcgatcacgatcattacggaatattaaaaatatcgcctatatgtgattggacgtgggacgaagtgtggcagtatataaagaaatataatttgccatactgcaaattatacgatcgcggctatactagcatagggtgcgagccctgtacaaggcctacctttgtaagcctcggggatgtgacaggagaggagctaagaaaagggcgttggtggtgggagaaaaacgctccgaaagagtgcggaatacattgctcgctggaggcaggctcatttgaaaggcacatggaaacggtgtttaagctgaagatcaaaattaaatga

SEQ ID NO: 12151 - protein, 267 aa, Pyrobaculum aerophilum str. IM2
MRREWTDLEVEELSLRFENSTAEELLSWALNEFYPNIALAFSGQAEDVVVLDIMHKVAPDKIRVFMLDTGRLPEEIYELVDKVREHYGVEIEIYYPDTKEIEEFVKRYGINPFYRDVELRHLCCKIRKVNPLLRALSGLDAWITGLRRDQFPTRATTRKIQIDHDHYGILKISPICDWTWDEVWQYIKKYNLPYCKLYDRGYTSIGCEPCTRPTFVSLGDVTGEELRKGRWWWEKNAPKECGIHCSLEAGSFERHMETVFKLKIKIK

SEQ ID NO: 12152 - DNA, 696 bp, Corynebacterium glutamicum ATCC 13032
  CDS (1)..(696): transl_table=11
ttgtcaccagaggtagcaaaacataacgaggaactcgtcgaaaagcatgctgctgcgttgtatgacgccagcgcgcaagagatcctggaatggacagccgagcacgcgccgggcgctattgcagtgaccttgagcatggaaaacaccgtgctggcggagctggctgcgcggcacctgccggaagctgatttcctctttttggacaccggttaccacttcaaggagacccttgaagttgcccgtcaggtagatgagcgctattcccagaagcttgtcaccgcgctgccgatcctcaagcgcacggagcaggattccatttatggtctcaacctgtaccgcagcaacccagcggcgtgctgccgaatgcgcaaagttgaaccgctggcggcgtcgttaagcccatacgctggctggatcaccggcctgcgccgcgctgatggcccaacccgtgctcaagcccctgcgctgagcttggatgccaccggcaggctcaagatttctccaattatcacctggtcattggaggaaaccaacgagttcattgcggacaacaacctcatcgatcacccacttacccatcagggttatccatcaattggatgcgaaacctgcacccttcctgttgctgaaggacaagaccctagggccggccgttgggctggaaacgccaagacagaatgcggacttcactcatga

SEQ ID NO: 12153 - protein, 231 aa, Corynebacterium glutamicum ATCC 13032
MSPEVAKHNEELVEKHAAALYDASAQEILEWTAEHAPGAIAVTLSMENTVLAELAARHLPEADFLFLDTGYHFKETLEVARQVDERYSQKLVTALPILKRTEQDSIYGLNLYRSNPAACCRMRKVEPLAASLSPYAGWITGLRRADGPTRAQAPALSLDATGRLKISPIITWSLEETNEFIADNNLIDHPLTHQGYPSIGCETCTLPVAEGQDPRAGRWAGNAKTECGLHS

SEQ ID NO: 12154 - DNA, 711 bp, Streptomyces coelicolor A3(2)
  CDS (1)..(711): transl_table=11
atgacggcggttcaggaagagcgtacgaccgaggaactcaaggcgctggccgagcgggcgggccgcgagctggaggacgccacggcgctggaaatcctccggtgggcggccgagaccttcggcgaccggttctgcgtgacctcctccatggaggacgcggtcgtcgcccatctcgcctcccgcgccctgcccggcgtggacgtggtgttcctcgacaccggctaccacttcccggagaccatcggcacccgcgacgcggtcgaggccgtgatggacgtgaacgtcatcacgctcaccccgcgccagacggtcgccgagcaggacgccgagtacggcccgaagctgcacgaccgcgaccccgacctgtgctgcgcgctgcgcaaggtgaagccgctggaggaggggctggccggctaccgggcctgggcgaccgggctgcgccgcgacgagtccgagacccgggcgaacacgccggtcgtgggctgggacgagaagcggggcaaggtgaagatctcgcccatcgccaagtggtcacaggaagatgtgcaaacgtacgtcaccgagcacggcgtcctcacgaacccgctgctgacggacggctatgcctccgtgggctgcgcgccctgcacccgtcgtgtgctggagggcgaggacgcccgcgccggacgctgggcgggccgctcgaagaccgagtgcggactgcacggctga

SEQ ID NO: 12155 - protein, 236 aa, Streptomyces coelicolor A3(2)
MTAVQEERTTEELKALAERAGRELEDATALEILRWAAETFGDRFCVTSSMEDAVVAHLASRALPGVDVVFLDTGYHFPETIGTRDAVEAVMDVNVITLTPRQTVAEQDAEYGPKLHDRDPDLCCALRKVKPLEEGLAGYRAWATGLRRDESETRANTPVVGWDEKRGKVKISPIAKWSQEDVQTYVTEHGVLTNPLLTDGYASVGCAPCTRRVLEGEDARAGRWAGRSKTECGLHG

SEQ ID NO: 12156 - DNA, 741 bp, Thermosynechococcus elongatus BP-1
  CDS (1)..(741): transl_table=11
atgttttctaaaaccatgctaacaccgcctatggctgcctccgtaagctttgacctcgatgccctcaaccaacgctttgaaggggcacatccccgtgacattttggcatgggccgtcacagaaattccccaggggctggtgcagaccagtgcctttaacgtagatgacatggtgattacagatctgctgtaccgtgatctgcgccccaatccaccggtgcccgttctctttttggacacgctccatcactttgccgagaccctagcatttgtgcagcaggccaaggaaaaatacagtctggatttgcgcacctacaaaatccctgatgttgacagccgcgaagcctttgctgcccgctatggcgacaaactttgggaaaccaatgttgagcagtttcaccatctcactaaaattgaaccgctgcaacggggcttggcagaactgcatactgtggcttggattaccggccggcgtcgcgatcaagcgctcacccgtgccaatatgccctatgtggaactggacaaagagggtcgtctgaaaattaatccccttgctgcttggacacggaaacaaacttgggcctatgtgatggagcacggggtgatttacaatcccctccacgatcgcggctatgccagcattggcgatgagcccctcaccacccctatcgccgagggggaagatgaacgggccggtcgctggcgcggcatgggcaaaaccgagtgcgggattcacatctaa

SEQ ID NO: 12157 - protein, 246 aa, Thermosynechococcus elongatus BP-1
MFSKTMLTPPMAASVSFDLDALNQRFEGAHPRDILAWAVTEIPQGLVQTSAFNVDDMVITDLLYRDLRPNPPVPVLFLDTLHHFAETLAFVQQAKEKYSLDLRTYKIPDVDSREAFAARYGDKLWETNVEQFHHLTKIEPLQRGLAELHTVAWITGRRRDQALTRANMPYVELDKEGRLKINPLAAWTRKQTWAYVMEHGVIYNPLHDRGYASIGDEPLTTPIAEGEDERAGRWRGMGKTECGIHI

SEQ ID NO: 12158 - DNA, 735 bp, Pseudomonas putida KT2440
  CDS (1)..(735): transl_table=11
atgagccaacccttcgacgtcgccgccctggccgcgacctatgccaacaagtccccgcaggacatcctcaagcttgccttcgagcacttcggtgatgacctgtggatctccttcagcggcgccgaggatgtggtgctggtcgacatggcctggaagctgaacaagcaggtaaaggtattcagcctcgacactgggcgcctgcacccggagacctaccggttcatcgaccaggtacgcgaacagtacaacctgcccatcgagatcctcagccccgaccgcgccaagctcgacccgttcgtcaaggaaaagggcctgttcagcttctacaaggacggccatggcgagtgctgcggcattcgcaagatcgagccgctgcgacgcaagctggccaccgtcagcgcctgggccaccggccagcgccgcgaccaaagcccgggcacccgcagccaggtggcggcactggaaatcgacagcgccttttccacgcctgagcgcacgctgtacaagttcaacccactggcgcagatgagcagtgaagaggtatggggttatatccgcatgctcgagctgccgtacaacagcctgcacgagcgtggcttcatcagcattggctgcgagccatgcacccgcccggtgctgccaaaccagcatgagcgtgaagggcgctggtggtgggaagagtcgacgcagaaggaatgcgggttgcatgcgggcaacctgatcagcaaggcttga

SEQ ID NO: 12159 - protein, 244 aa, Pseudomonas putida KT2440
MSQPFDVAALAATYANKSPQDILKLAFEHFGDDLWISFSGAEDVVLVDMAWKLNKQVKVFSLDTGRLHPETYRFIDQVREQYNLPIEILSPDRAKLDPFVKEKGLFSFYKDGHGECCGIRKIEPLRRKLATVSAWATGQRRDQSPGTRSQVAALEIDSAFSTPERTLYKFNPLAQMSSEEVWGYIRMLELPYNSLHERGFISIGCEPCTRPVLPNQHEREGRWWWEESTQKECGLHAGNLISKA

SEQ ID NO: 12160 - DNA, 738 bp, Streptomyces avermitilis MA-4680
  CDS (1)..(738): transl_table=11
atgaggacggttcaggccgacacggacaccggcacagagcgtgcgaccggccgcgacgcggagctgaagacgctcgccgagcaggccgggcgcgacctggaggacgcctccgccctggagatcctccagtgggcggcggacaccttcggcaagaagttctgcgtgacctcctccatggaggacgccgtggtcgcccacctcgcctcccggaccttccccggtgtggacgtggtcttcctcgacaccggctaccacttcccggagaccatcggcacccgcgacgcggtcgaggccgtgatggacgtcaacgtcatcacgctcaccccgcgccggacggtcgccgagcaggacgcggagtacggcccgaagctgcacgaccgcgaccccgacctgtgctgcaagctccgcaaggtccagccgctggagcagggcctgaccgcgtacgacgcctgggcgacgggcctgcgccgcgacgagtccccgacccgggcgaacaccccggtcgtcagctgggacgagaagcgccgcaaggtgaagatctcgccgatcgcccgctggacccaggacgacgtggacgcgtacgtcgcggagcacggcgtgctgaccaacccgctgctgatggacggctacccctccgtgggctgcgcgccctgcacccgccgtgtgctggagggcgaggacgcgcgcgccggccgctgggcgggcagcaccaagaccgagtgcgggctgcacggatga

SEQ ID NO: 12161 - protein, 245 aa, Streptomyces avermitilis MA-4680
MRTVQADTDTGTERATGRDAELKTLAEQAGRDLEDASALEILQWAADTFGKKFCVTSSMEDAVVAHLASRTFPGVDVVFLDTGYHFPETIGTRDAVEAVMDVNVITLTPRRTVAEQDAEYGPKLHDRDPDLCCKLRKVQPLEQGLTAYDAWATGLRRDESPTRANTPVVSWDEKRRKVKISPIARWTQDDVDAYVAEHGVLTNPLLMDGYPSVGCAPCTRRVLEGEDARAGRWAGSTKTECGLHG

SEQ ID NO: 12162 - DNA, 741 bp, Candidatus Blochmannia floridanus
  CDS (1)..(741): transl_table=11
gtgaatcgttgttggtgtgttgaagaattggatgtattgggtgtagttgaacgtgcattaatattaaatgagataaatcagtatttagaatctgtaacaatagaagataggataatgtgggttatgaagtatttatctgggcaattagtattatcttcaagttttggtattcattcttatgtaagtttgcatttaatgactaattattatccttctgttccagtgattttaattgatacgggttatttgtttccagaaacatatcaatttattgatcgattgacggaaaaaatgaaattaaatttgcatgtttttcgtcctgataaatctcctgcttggcaggaagcacgttatggaaaattgtgggagcaaggaattgaaggaattagacagtataattttatgaataaagtaaaacctatgcgttatgctttaaaaaaacttaaagttagagtatgggtgtcggggttaaggagatatcaatcttgtagtcgtaaaaatttgttaattttggatatgcaaaatggtatgtttaaatttttaccaattgttgattgggatcataatcaagtacatcaatatattaaaagatatgatttagaatatcatccattatggaaacaagggtatgtatcagtaggtgatgtacatactactattaaaaaagaacctggtatgaaggatgaagaaactcgtttttttggattacaacgagaatgtgggttacatgttattgattaa

SEQ ID NO: 12163 - protein, 246 aa, Candidatus Blochmannia floridanus
MNRCWCVEELDVLGVVERALILNEINQYLESVTIEDRIMWVMKYLSGQLVLSSSFGIHSYVSLHLMTNYYPSVPVILIDTGYLFPETYQFIDRLTEKMKLNLHVFRPDKSPAWQEARYGKLWEQGIEGIRQYNFMNKVKPMRYALKKLKVRVWVSGLRRYQSCSRKNLLILDMQNGMFKFLPIVDWDHNQVHQYIKRYDLEYHPLWKQGYVSVGDVHTTIKKEPGMKDEETRFFGLQRECGLHVID

SEQ ID NO: 12164 - DNA, 801 bp, Prochlorococcus marinus str. MIT 9313
  CDS (1)..(801): transl_table=11
atgactgatggctccattgatacggtttccactgccacgtctactgcggcaggccaatctccgagtgtgcaggttgcctcgactctcgagatgcctctggaggatgcacggatacaccttgccaatctttctgcccagaagcgtcttgagtgggcactgaaacagtttggtcaaggctttgttctgacaacgagcttcggcattcaatcagctgttctgctgcacatgctccatggtcttgatggtggttcggtggtccctgtggtctgggtggatacgggctatctaccagcagagacctatttctatgcggatcagctcacgcgtcagcttgggttggatttaaaggtggttcaaagcacaatgtctcccgctcggatggaggctatctatggccggctctgggagacaggttcggtgaaggatctggagacatatcaccgtattcgcaaggtggagcccctcgagcaggctctggatgatctccgtgtgcattgctgggccagtggggtgcgcagtgatcagaccgactatcggcgctcaatggcttttttggacctgattcgtgatcgcctttcattgaggcctttactcgactggactcccaaggaggttttctattacatgcaggagcatcagttgccgcagcatcctctgtttgaaaagggttactccacggtcggcgattggcattccagtgctcccgatggggggggggcttctggacgggagacacgctttggaggtcttaagcaggaatgcggccttcacctcccaggtgtgttgggcgaaggcatctaa

SEQ ID NO: 12165 - protein, 266 aa, Prochlorococcus marinus str. MIT 9313
MTDGSIDTVSTATSTAAGQSPSVQVASTLEMPLEDARIHLANLSAQKRLEWALKQFGQGFVLTTSFGIQSAVLLHMLHGLDGGSVVPVVWVDTGYLPAETYFYADQLTRQLGLDLKVVQSTMSPARMEAIYGRLWETGSVKDLETYHRIRKVEPLEQALDDLRVHCWASGVRSDQTDYRRSMAFLDLIRDRLSLRPLLDWTPKEVFYYMQEHQLPQHPLFEKGYSTVGDWHSSAPDGGGASGRETRFGGLKQECGLHLPGVLGEGI

SEQ ID NO: 12166 - DNA, 765 bp, Synechococcus sp. WH 8102
  CDS (1)..(765): transl_table=11
atggatggggtccgcggcatgacgggcgtgttggttcgggacaatctcgatgcggaccgcggcagcctggagccgttgagtcctcaagatcgactggcttgggcacaccagcgcttcggatccggatttgctctcaccaccagcttcggcatccaatcggcggtgctgctgcacatgctcagtcaactgccggagggtgacgccgttcctgtgatctgggtggacactggctatctgccggaggagacctaccgctatggcgcccagctcacgaagctgctcagcatccgcctggtggtggctcaaagcgccatgtcgccggctcggatggaggctctgcatggccgcctctgggacaccggacagctcgatgatcttgagaaataccaccagatccgcaaggtggagcccctggatcgggctttggcgcaactggaggtgagctgctgggccagtggcgtgcgtcgcggccagactgaccaccgccgcgcgatgaccgtgctggacccgatccgagagcggctgtctctgcgtccgctgttggattggacccagaaggacatctactactacatgcaggacaacaacctgccgcaacacccgttgttcgagcagggatactcaaccgtgggggattggcactccagtgctccggatggcgctgagctcagcggacgtaacacccgtttcgggggcctgaaacaggaatgtgggatccacgttccccaggaggccgtggaaggcttgatgggggatgggatctag

SEQ ID NO: 12167 - protein, 254 aa, Synechococcus sp. WH 8102
MDGVRGMTGVLVRDNLDADRGSLEPLSPQDRLAWAHQRFGSGFALTTSFGIQSAVLLHMLSQLPEGDAVPVIWVDTGYLPEETYRYGAQLTKLLSIRLVVAQSAMSPARMEALHGRLWDTGQLDDLEKYHQIRKVEPLDRALAQLEVSCWASGVRRGQTDHRRAMTVLDPIRERLSLRPLLDWTQKDIYYYMQDNNLPQHPLFEQGYSTVGDWHSSAPDGAELSGRNTRFGGLKQECGIHVPQEAVEGLMGDGI

SEQ ID NO: 12168 - DNA, 840 bp, Vibrio vulnificus YJ016
  CDS (1)..(840): transl_table=11
ttggcgatttcactgttcgtgttggcattattgaagaagttatcatttctaaaagggatttctatgcttgattctgttgcttcaacgctgcagctatcagaattactctcgttaaccaaggcggagcaaagtatccgccttgccgaaatcaacgttgagttagagatgctgtcagctcaagagagggtcgcttgggctctgcaaaatttggaaggggcacacgctgtttcgtcgagttttgggattcaagcggctgtcatgctgcatttgttatcgaagcagcaagccgatattcccgtcattttgaccgatacgggctacctatttcctgaaacgtatcaatttattgatgagttaactaaatctctaaacctaaacctcaaagtataccgagcgaatgagagtgcaaactggcaggaagctcgatacggtaaactgtgggagcaaggtatagaaggaatagaaaaatacaacaagcttaataaagtcgaacctatgcgtcgtgcactgaatgagcttaatgttaaaacctggttttccggattacgccgagagcaatctcaatcccgagcaggcctacctattctgtcgatacaaaatggagtgtttaaattcttgcctgtagttgattggagtaacaaagacgtacactactatttaaaagaacacggtctttcatatcatcccctttgggagcagggctatctttctgtaggagatacgcatacaactcaaaaatgggagccagggatgagtgaagaagaaactcgtttctttggcttgaagcgtgagtgtggacttcacgaagaagataatgaacaagatggttctggtatttaa

SEQ ID NO: 12169 - protein, 279 aa, Vibrio vulnificus YJ016
MAISLFVLALLKKLSFLKGISMLDSVASTLQLSELLSLTKAEQSIRLAEINVELEMLSAQERVAWALQNLEGAHAVSSSFGIQAAVMLHLLSKQQADIPVILTDTGYLFPETYQFIDELTKSLNLNLKVYRANESANWQEARYGKLWEQGIEGIEKYNKLNKVEPMRRALNELNVKTWFSGLRREQSQSRAGLPILSIQNGVFKFLPVVDWSNKDVHYYLKEHGLSYHPLWEQGYLSVGDTHTTQKWEPGMSEEETRFFGLKRECGLHEEDNEQDGSGI

SEQ ID NO: 12170 - DNA, 708 bp, Geobacter sulfurreducens PCA
  CDS (1)..(708): transl_table=11
atggccatagagaagcattcatcactgccccagatccctgaaaatgccactccactggagatactcagaattggtatcgaagcggcgggcggtgccgtgagccttgcctgctccttttcagtcgaagacgtaatcatcatcgacctgatcacgtcccatgatcttccggtgggaatcttcgccatagacaccgggcggcttcccgaggagacccatgaggtcgccgaggctatcgtctccaggtacggagtgggcattgactggtatttcccccgcaacgacgaggtggagcggctgctgcgggggaaagggccgttttcgttccgtgaaagccttgtcaatcgccaccagtgttgtcatatccgcaaagtggagccgctggggcgtgccctggcggggctggccggctgggtgacgggcgtgcggcgggcccacggtgtgacacgggctaatctcgctcctcttgagattgatgacaccaacggcggtatcgtgaagatcaatcccctcctggactggaccgactcccaggtatgggcgtatgcggaggcacggcggctaccggtgaatcgcctccatcaccaggggtatccgtccatcggctgcgccccctgcacccgggccgttaccccaggccagcccccccggtcggggcgctggtggtgggaagatcctgagcacaaggaatgcgggctgcaccggcgctga

SEQ ID NO: 12171 - protein, 235 aa, Geobacter sulfurreducens PCA
MAIEKHSSLPQIPENATPLEILRIGIEAAGGAVSLACSFSVEDVIIIDLITSHDLPVGIFAIDTGRLPEETHEVAEAIVSRYGVGIDWYFPRNDEVERLLRGKGPFSFRESLVNRHQCCHIRKVEPLGRALAGLAGWVTGVRRAHGVTRANLAPLEIDDTNGGIVKINPLLDWTDSQVWAYAEARRLPVNRLHHQGYPSIGCAPCTRAVTPGQPPRSGRWWWEDPEHKECGLHRR

SEQ ID NO: 12172 - DNA, 744 bp, Mycobacterium avium subsp. paratuberculosis K-10
  CDS (1)..(744): transl_table=11
atgagcgacgtggcaaccgacttcaccgaggaacagctgcgcgagctggccgagcgcggcgcctcggagctggagggcgccagcgcgatcgacatcctgcgctggaccgacgagcacttcgggcccgtcgacgggccgcgcggctgggccacctgcaaatacgtggtggcctgcaacatgcaggacgcggtgacggtgtcgctggcctcagacgtgcgccccggcgtgccggtgttgttcctggacaccggctatcacttcgccgagaccatcggcacccgcgacgccgtcgaggcggtctacgacatccacctgctcaacgtcaccccggagcacaccgtggccgagcaggacgagctgctgggcaaggacctgttcgcccgggaccccaacgaatgctgccggctgcgcaaggtggagccgctgcgcagggcgctgcgcggctacgcggcgtgggtgagcgggctgcgccgggtggaggcgcccacccgcgccgacgccccgctgatcagcttcgacgagtcgttcaaggtggttaaggtcaacccgatcgccgcctggaccgacgagcaggtcgacgaatacatcgagcgcaaccgggttttggtcaacccgctggtgcaggagggctacccgtcgatcggctgcgccccgtgcaccgccaagccggcaccgggcgaggatccgcgcagcgggcgttggcggggacgaaacaaggtcgaatgcgggttacacgcctcatga

SEQ ID NO: 12173 - protein, 247 aa, Mycobacterium avium subsp. paratuberculosis K-10
MSDVATDFTEEQLRELAERGASELEGASAIDILRWTDEHFGPVDGPRGWATCKYVVACNMQDAVTVSLASDVRPGVPVLFLDTGYHFAETIGTRDAVEAVYDIHLLNVTPEHTVAEQDELLGKDLFARDPNECCRLRKVEPLRRALRGYAAWVSGLRRVEAPTRADAPLISFDESFKVVKVNPIAAWTDEQVDEYIERNRVLVNPLVQEGYPSIGCAPCTAKPAPGEDPRSGRWRGRNKVECGLHAS

SEQ ID NO: 12174 - DNA, 705 bp, Bacillus cereus ATCC 10987
  CDS (1)..(705): transl_table=11
atgttgacgtatgaaacgtgggaagaaaatgatgtttcattttcagaagaagatgaaacgaaaggcgcgttatctgtattaagttgggcttataaagaatataaaagtgaaattgtatacgcatgtagcttcggagtggaagggatggtactgctgcatcttattaaccaagtaaatccatctgctaaagttgtttttttagatacaaacgtacattttcaagaaacgtatgaattaattcaaaaagtgcgggaacgatttccgtcattaaatattatagaaaaacaaccagaacttacacttgatgaacaagccaacttgcatggtgacaagctatgggaaagcaaccccaatctctgttgtaagattagaaaaattttgcctttagaagaatcattagcgaatgaaaaagcgtggatatcgggactgaggagggaacaatcagaaacccgtaagcatacaaagtttataaatcaagatcatcgctttcgatctattaaagtttgtccgctcattcattggacgtggaaagaagtatggcgatatgtatacaagcatagcttgccgtataacccattacatgatattggatatccaagtattgggtgtgagaagtgtacgttgcctgtaggagagggtggcgattcgagagatggtagatgggccgggaaagtaaaaactgaatgtggccttcattatcaataa

SEQ ID NO: 12175 - protein, 234 aa, Bacillus cereus ATCC 10987
MLTYETWEENDVSFSEEDETKGALSVLSWAYKEYKSEIVYACSFGVEGMVLLHLINQVNPSAKVVFLDTNVHFQETYELIQKVRERFPSLNIIEKQPELTLDEQANLHGDKLWESNPNLCCKIRKILPLEESLANEKAWISGLRREQSETRKHTKFINQDHRFRSIKVCPLIHWTWKEVWRYVYKHSLPYNPLHDIGYPSIGCEKCTLPVGEGGDSRDGRWAGKVKTECGLHYQ

SEQ ID NO: 12176 - DNA, 1029 bp, Magnaporthe grisea 70-15
  CDS (1)..(1029)
atgaagcccctccacgtcaagttcgaggacgccgcagagatggactcgggctactgctcggccagctcgtcgacggcatctctccctcaggtttccttcacaccctctcacctgcgccatatcaacgaccagctcgagaagatgcaagccatggacatcctccgcttctgccgcgtcctcttcccaaacctataccagacgacggcctttggcctgacggggctcgtgacgcttgacatgctatccaagatggagaaggagtcttccttcctgccttcggtcgaactcatattcctcgacaccctgtaccactttgacgagacgtaccagctcgtcgagagggtcaaggagcggtacagcaacgtcaagatgcacgtgtacaagccggcagactgcgggacggtggccgacttcgagacgaagtacggcgagaagctgtatgagactagcgccgagttctacgactgggtggccaaggtcgagccccagcagcgcgcctactcggacctcaacgtcggtgccgtcctcaccggccgccgcaggtctcagggcggccagcgcaacaagatccccatcgtcgaggtcgacaacgagacaggcatcgtcaagatcaaccccctcgtcaactggtcgttccaggacgtgcaaaagtacatcaaggagaacgacgtcccgtacaacgtcctgctcgacagggggtacaagtcggtcggcgactggcactcgaccagccccgtggctgagggagaggacgagagggccggaaggtggaagggtcagaacaagaccgagtgcggaatccataacaagaagtcgcgttacgcccagtttcttgaggaggccgacaggaaggctgcggaggctgccaaggctgccaaggctgctacggcggcggccatgcaagactcgccggtcggcagcgagattgcagatgatgctcgctggcacgctgcgaggaggccaggtgctcgccggcgccaacatcatcaccaggaccatgtcccttctgccgtcacctcatccgcttga

SEQ ID NO: 12177 - protein, 342 aa, Magnaporthe grisea 70-15
MKPLHVKFEDAAEMDSGYCSASSSTASLPQVSFTPSHLRHINDQLEKMQAMDILRFCRVLFPNLYQTTAFGLTGLVTLDMLSKMEKESSFLPSVELIFLDTLYHFDETYQLVERVKERYSNVKMHVYKPADCGTVADFETKYGEKLYETSAEFYDWVAKVEPQQRAYSDLNVGAVLTGRRRSQGGQRNKIPIVEVDNETGIVKINPLVNWSFQDVQKYIKENDVPYNVLLDRGYKSVGDWHSTSPVAEGEDERAGRWKGQNKTECGIHNKKSRYAQFLEEADRKAAEAAKAAKAATAAAMQDSPVGSEIADDARWHAARRPGARRRQHHHQDHVPSAVTSSA

SEQ ID NO: 12178 - DNA, 951 bp, Gibberella zeae PH-1
  CDS (1)..(951)
atgcctaccttcatctctgaatcatcctcgcaggtgtccctccccgacatgaagcttgaatgcgagtcaggctatgtctctggacaaaactcagaatactcttcaccatcatcatcaaccactcttcctcgagtcactctcacaaagccccatattgaccacctcaacaacatgcttgaggacatgcaccccatggacattctccgattctgcaaggtcatgttccctaacctgtaccaatcgactgcttttggcttgaccggtctcgccaccatggacatgctctccaagattcaaaaggagcaccccaacactcccactgtcgacctcatcttcttggataccttgtaccacttcaaggagacacacgacctcgtcgaccgagtcaaggcccggtaccccaacgttcccgttcacatttacaagcctgacggtgtcaacaacgccgaagaattcgaggacatgtacggcaaggagatgtggaacaccgctagcgaaatgtatgactggattgtcaaggttgagccccttcagcgagcgtacgatgagctcaaggttgctgccgtcctcaacggtcgccgacgatctcagggtgctgcccgcggctccatccccatcatcgagattgatgatgagcgtggtgttgtcaagatcaaccccttggccacttggtctttcaagcaggttgatgcatacatcaaggagaacaacgtcccctacaacgctctcctcgatcaaggctacaagtctgtcggcgactggcactccaccgtccccgtcaaggagggcgaagatgagcgagccggccgatggaagggccaggacaagaccgagtgtggtattcacaacaagcaatctcgctactccgagtttgttgccatgatggagcgcaagcaacaagaggaaaagctcgctgctgctcttgagaaagtggctctgcccacagtctaa

SEQ ID NO: 12179 - protein, 316 aa, Gibberella zeae PH-1
MPTFISESSSQVSLPDMKLECESGYVSGQNSEYSSPSSSTTLPRVTLTKPHIDHLNNMLEDMHPMDILRFCKVMFPNLYQSTAFGLTGLATMDMLSKIQKEHPNTPTVDLIFLDTLYHFKETHDLVDRVKARYPNVPVHIYKPDGVNNAEEFEDMYGKEMWNTASEMYDWIVKVEPLQRAYDELKVAAVLNGRRRSQGAARGSIPIIEIDDERGVVKINPLATWSFKQVDAYIKENNVPYNALLDQGYKSVGDWHSTVPVKEGEDERAGRWKGQDKTECGIHNKQSRYSEFVAMMERKQQEEKLAAALEKVALPTV

SEQ ID NO: 12180 - DNA, 780 bp, Candida glabrata CBS 138
  CDS (1)..(780)
atgaaagtatataacttgaataacgggatatcggtcactgaggagcagcttgcgcactggaaccaggcgctgtcgcagctggagccacaagaaatactgaagtggtcactggccacattcccacacttattccagaccactgcgtttgggctcactggtctggctacgatagacatgctttccaagctcggtgccgatgcgctagtgccgttgattaccattgacacattgcacttattcccacagactgtgacactgagggagaacgtcgaagataagtactacaggcctcatggcaagacgatccacgtctacaagcccatcggttgcgacaccgagcagcagtttgcggacaagtacggtgagttcctgtgggagaccgacgacgacaagtacgactacctggttaaagtggaaccggcagccagggcctacaaggacttgcaagtaaccgctgtgttcactggcaggagaaagtcgcaagggtcagccagatcggagctgcagttcgttgagatcgaggaactcacgggaatcataaagatcaacccgttggccaattggacatttgaccaggtcaagcagtacatcgacgacaacgcagtcccatacaatgagctactcgacctaggctacaagtccatcggtgactaccattcaactgtacctgtcaaggaaggtgaagacgagagaagtggcagatggaagggcaaagccaagacggagtgcgggatccacgagacgagcaggttcgccaagttcctgaaacaggatacctga

SEQ ID NO: 12181 - protein, 259 aa, Candida glabrata CBS 138
MKVYNLNNGISVTEEQLAHWNQALSQLEPQEILKWSLATFPHLFQTTAFGLTGLATIDMLSKLGADALVPLITIDTLHLFPQTVTLRENVEDKYYRPHGKTIHVYKPIGCDTEQQFADKYGEFLWETDDDKYDYLVKVEPAARAYKDLQVTAVFTGRRKSQGSARSELQFVEIEELTGIIKINPLANWTFDQVKQYIDDNAVPYNELLDLGYKSIGDYHSTVPVKEGEDERSGRWKGKAKTECGIHETSRFAKFLKQDT

SEQ ID NO: 12182 - DNA, 795 bp, Kluyveromyces lactis NRRL Y-1140
  CDS (1)..(795)
atgagtcaacaagtgtttcagctgaataacgcagtaacggtaactcaagaagaaatcgatcattggaatgaaaagttaagtgaattgtcacctgaagaaattatacgttgggctatcgttactttcccacatttatttcaaaccactgcgtttggcttaactgggttggctactatcgatatgctttctaagattaatcaaaatgaaacagaaccaatcgttccattaatatttattgatacattgcaccatttccctcagacgttagagcttttgaaagtggtagaaactcggtattacaagccaagaggacagaatgtcaatgtatatcagccgaaagattgtggttcggagcaagaatttgctgccaaatacggtgatttcttatgggatacagacgatgataaatacgatttcctagtcaaggtggaacctgctcatagagcttataaggaattgcaagtgactgctgtattcactggtagaagaaagagtcaaggtggtgcaaggtcgaatctgaaattcatcgaattggacgaattcaatcatatcatcaagatcaacccgctagcgaactgggacttcaaccaagtgcaaagttatatccgtgataataacgtaccttacaatgaattgctagatctaggataccggtcgattggtgattatcactctacacaacctgttcaagaaggtgaggatgagagatcaggcaggtggaagggtaaggcaaagacggaatgtgggattcacgagacaagcagatttgcacaatatctcaaacaaagagaatga

SEQ ID NO: 12183 - protein, 264 aa, Kluyveromyces lactis NRRL Y-1140
MSQQVFQLNNAVTVTQEEIDHWNEKLSELSPEEIIRWAIVTFPHLFQTTAFGLTGLATIDMLSKINQNETEPIVPLIFIDTLHHFPQTLELLKVVETRYYKPRGQNVNVYQPKDCGSEQEFAAKYGDFLWDTDDDKYDFLVKVEPAHRAYKELQVTAVFTGRRKSQGGARSNLKFIELDEFNHIIKINPLANWDFNQVQSYIRDNNVPYNELLDLGYRSIGDYHSTQPVQEGEDERSGRWKGKAKTECGIHETSRFAQYLKQRE

SEQ ID NO: 12184 - DNA, 783 bp, Debaryomyces hansenii CBS767
  CDS (1)..(783)
atgacaataacagggcctgtaaacttatctgctgagcatttgcaacatttgaacgaaaaacttcaggagttatcaccagaggaaatcatcaagtgggcttatattacttttccaaacttatatcaaaccactgcttttggattaacaggattagttaccatagatatgatctcaaagttaaaaccagaagaagatcatttcatagaccttatttttattgacactttgcatcactttcctcaaacttatgatttggttaacaacgtaagcaaaaagtataattctaagatccacacattcaaaccgttaaacgtcgaaactgaatctgaatttgcacaaagatacggagatcaactatgggaaaccaacgactcgtattatgatttcttaataaaggttgagccttctcaacgagcatataaagatttgcaagtggttgcagtgttgacaggtagaagaaagtcccaaggtggggcccgtggctcattgccggtgattgaaattgaagaatcgagtggtaccatcaagattaacccgttgtgtaactgggacttcaataaggtgaaaagctacatcgacgaaaataacgtgccgtataatgaattattagatttaggctacaaatcgatcggtgactggcactcgactgtccccgttgccgaaggtgaagatgaaagaagtggtagatggaagggtaaagccaagactgaatgtgggattcacgaaactagcaagtttgcccaatatttaaaatcgaatgagaatcctaccatcaattcttag

SEQ ID NO: 12185 - protein, 260 aa, Debaryomyces hansenii CBS767
MTITGPVNLSAEHLQHLNEKLQELSPEEIIKWAYITFPNLYQTTAFGLTGLVTIDMISKLKPEEDHFIDLIFIDTLHHFPQTYDLVNNVSKKYNSKIHTFKPLNVETESEFAQRYGDQLWETNDSYYDFLIKVEPSQRAYKDLQVVAVLTGRRKSQGGARGSLPVIEIEESSGTIKINPLCNWDFNKVKSYIDENNVPYNELLDLGYKSIGDWHSTVPVAEGEDERSGRWKGKAKTECGIHETSKFAQYLKSNENPTINS

SEQ ID NO: 12186 - DNA, 768 bp, Yarrowia lipolytica CLIB122
  CDS (1)..(768)
atgtctatctctgtgtcgacgtcgcaactggaccactacaacgcgctgctgagtcagctggagccgcaacagatcattcaatgggcggtgctcaccttccccaacttgttccagaccacggcgtttggactcacgggattagtcagcactgacatgatcagcaagctggagcagtcacgtggcggccacgctgtcgatcttatttttctcgacaccctgtaccatttcgacgaaacgctgcagctggtcgaccgggtccaggccaagtacccatcggcgaaaatccacagattccgacccgagggcttcgagtcgcgtgcggagtttgaaaaggtgtatggcgattcccttttcgacacaaacgacgatctctatgattatctggtcaaggtagagccttctcagcgggcctacaaggagctggatgttgttgctgttctgaccgggcgtcgcaagtcccagggagacgcacgtgactctctaaagattgtggagattgaagccgagaccaatctcatcaaaatcaaccctcttgccaactggtcgtttgcccaggtcaagaattatatcgattccaacgacgtgccttacaactccttgttggataaggggtaccgatctgtgggcgattttcactcaactgtgccggtcaaggagggcgaaaatgagcgagccggacgatggaagggtaaacagaagactgagtgtggcattcatcagcagaaacgatttgctcagttctcgggggtcaatgttcgggctatttaa

SEQ ID NO: 12187 - protein, 255 aa, Yarrowia lipolytica CLIB122
MSISVSTSQLDHYNALLSQLEPQQIIQWAVLTFPNLFQTTAFGLTGLVSTDMISKLEQSRGGHAVDLIFLDTLYHFDETLQLVDRVQAKYPSAKIHRFRPEGFESRAEFEKVYGDSLFDTNDDLYDYLVKVEPSQRAYKELDVVAVLTGRRKSQGDARDSLKIVEIEAETNLIKINPLANWSFAQVKNYIDSNDVPYNSLLDKGYRSVGDFHSTVPVKEGENERAGRWKGKQKTECGIHQQKRFAQFSGVNVRAI

SEQ ID NO: 12188 - DNA, 909 bp, Aspergillus nidulans FGSC A4
  CDS (1)..(909)
atgcattccaactacccctccgattcggagactgcggaactaagagactctactgagtcgggctatgtcagtggtggctcaagtgaagagtatctaccagagattgtcttcaccaaacctcatcttcagttcctcaaccgacaacttcaattccttgaaccccaagatgtcctcagatggtgtgtcacttcgctacctcacctgtatcagaccaccgcctttggtcttactggtcttgtgatcatggatatgctttccaaactgtccatccctcgccctcaaatggtcaacctcatcttcctcgacactctgcaccacttccccgagacattgaaacttgtcgacaatgtccgcaagaggtacccgctacagcacatccatgtctacaagccccagggtgttgagaccgaagaggagtttgctaagaagcacggtgaacgcctgtgggaaaaggatgaccagctgtacgactggattgccaaggtcgagcctgctcaacgtgcctaccgtgagctcaacgttcacgcagtcctcaccggacgccgccgcagccaaggaggcaagcgtggagacctggacattattgaggtggacgaagccggcctcattaagatcaaccctctcgccaactggacctttgaccaggtcaagcagtatgtcaaggagaatgatatcccctacaacgagttactcgacaagggctacaagagcgttggtgactatcactctacatcccccgtcaaggagaacgaagacgaacgatcaggccgctggaagggccaggcgaaaaccgagtgtggtatccacaaccctcggtcaaagtacgcccagtacttgatggatatggaacgcaagcgacaggaggaagctttgtctcaagcgttgcagaacaagcttaccaccgcttaa

SEQ ID NO: 12189 - protein, 302 aa, Aspergillus nidulans FGSC A4
MHSNYPSDSETAELRDSTESGYVSGGSSEEYLPEIVFTKPHLQFLNRQLQFLEPQDVLRWCVTSLPHLYQTTAFGLTGLVIMDMLSKLSIPRPQMVNLIFLDTLHHFPETLKLVDNVRKRYPLQHIHVYKPQGVETEEEFAKKHGERLWEKDDQLYDWIAKVEPAQRAYRELNVHAVLTGRRRSQGGKRGDLDIIEVDEAGLIKINPLANWTFDQVKQYVKENDIPYNELLDKGYKSVGDYHSTSPVKENEDERSGRWKGQAKTECGIHNPRSKYAQYLMDMERKRQEEALSQALQNKLTTA

SEQ ID NO: 12190 - DNA, 759 bp, Candida albicans SC5314
  CDS (1)..(759): transl_table=12
atgggaaacatagttcaattaacaccagagcatatttcgtttcttaacgagcacttgaaaactctttcggcatacaatattatcaaatgggcatactttactttccccaatttgtatcagacaacagcttttggattaacagggttggtgactgtcgacatcatatctaaattatcccaggaattggaaaaggatcacttgattgatttgatctttcttgacacattgtaccatttcccacaaactcatgaattggttcaaaaggtcgaacaaaaatatcgcccaaaattacatgtctacaaaccaaaggatgtgagcacggaacaagaatttgctgcaaaatatggtgaccagttgtgggaatcaaatgacgcatattacgatttcttggtaaaggtggaaccgagccaacgtgcttacaaagagttgggagtttcggctgtgctaactggaagaagaaagtctcaaggtggtgcccgtagtgaattgacagttttagaatacgaggaaacaagtggaattatcaagattaacccattatggaattgggatttcaaacaggtaaaggcgtatattgatgataataaggttccatacaatgaactattagatttaggttacaagtctattggtgattggcattctactgtacctgtagctgacggtgaagatgaaagaagtggacgatggaaaggtaaggcaaagactgaatgtggaatccatgtaactacaaagtacacggaatatatgaaggaatag

SEQ ID NO: 12191 - protein, 252 aa, Candida albicans SC5314
MGNIVQLTPEHISFLNEHLKTLSAYNIIKWAYFTFPNLYQTTAFGLTGLVTVDIISKLSQELEKDHLIDLIFLDTLYHFPQTHELVQKVEQKYRPKLHVYKPKDVSTEQEFAAKYGDQLWESNDAYYDFLVKVEPSQRAYKELGVSAVLTGRRKSQGGARSELTVLEYEETSGIIKINPLWNWDFKQVKAYIDDNKVPYNELLDLGYKSIGDWHSTVPVADGEDERSGRWKGKAKTECGIHVTTKYTEYMKE

SEQ ID NO: 12192 - DNA, 819 bp, Cryptococcus neoformans var. neoformans B-3501A
  CDS (1)..(819)
atgtccagtgaagacatcctcactccccagtacacccctgaagaaatcgagcgatttaacgccgaactcgacggcaagactcctcaggagatcttgacctgggctgtcgacaacgtcgatggcttgtaccagactactgctttcgggctgactggtaccgccgctgtagatatgatttccaagatttctttggaccgcgaagaaactcaccttgttccccttatcttccttgacacccttcaccacttccctgaaactcttgctctcgctcaaaccatggccgacacctacctcgctccgttacacatttacactccccccggcgtttctactgctgaagaattcgccgtcaagtatggcgagaagctctgggagactgatgaaggcgcctacgattatctggtgaaggttgaacctgcagccagggcttacaaggagctgggcgtccgggcggtcatcactggtaggcgaagaagccaaggcgccgatcgagcagacttgaaggtgctcgaagtcgatgagaggggattgctcaagatcaaccctttgatcggatggagctttaaagaggtcaaggaatacattgacaaggaaggagttccttacaacccacttctcgacaagggctaccgatctatcggtgacgtccactccaccgccccccctgaccccaacgccgccagtgatgctgctgaacgaagtggtcgatggcaaggtaaggccaagaccgaatgtggtttacacagcaactattttgagatgaagaagaagtttgaagagaaagcggccgctgcgggcgaagcttccaagcagtcataa

SEQ ID NO: 12193 - protein, 272 aa, Cryptococcus neoformans var. neoformans B-3501A
MSSEDILTPQYTPEEIERFNAELDGKTPQEILTWAVDNVDGLYQTTAFGLTGTAAVDMISKISLDREETHLVPLIFLDTLHHFPETLALAQTMADTYLAPLHIYTPPGVSTAEEFAVKYGEKLWETDEGAYDYLVKVEPAARAYKELGVRAVITGRRRSQGADRADLKVLEVDERGLLKINPLIGWSFKEVKEYIDKEGVPYNPLLDKGYRSIGDVHSTAPPDPNAASDAAERSGRWQGKAKTECGLHSNYFEMKKKFEEKAAAAGEASKQS

SEQ ID NO: 12194 - DNA, 723 bp, Prochlorococcus marinus str. MIT 9301
  CDS (1)..(723): transl_table=11
atgattgaaaaaatccacaaaaatattcaaactaacttgatgaaatataatcaagagcttgtaaatatgaagcctcaagaaattcttacatggggttatgaaaagtttgatgatcaatttgctattacaacaagttttggtatacagtcatcagtccttttacatatggtcagcaaattatctctacaaaaaaaaatcaaaatattttggatagatacaggttacctacctacagaaacataccattacgctgaaaatcttattgatcgtttatccttaaaagttgaagttctgcaaagtgaattatctccagcaagaatggaggccaaatacggaaaactttgggaaacaaataaagtgagtgatttagacaagtatcatgaattaagaaagataaaacctctagaaaatggtctagaaaaatatagtatttattgctgggcaagcggagttagagcaggccaaacagaaactagaaacaaaatgaaattcatagacgtaattcgtcaaagactctctttaagacctttattaaattggacaaataaagatattttttattatatggaagagaataatttacctgcccatccactttttatcaaaggttattcttctgtaggagattggcattcaagcagtcccgatggtatggaaacaaagggcagagatacaagatttggagggattaaacaagaatgtggaatacacactaataattaa

SEQ ID NO: 12195 - protein, 240 aa, Prochlorococcus marinus str. MIT 9301
MIEKIHKNIQTNLMKYNQELVNMKPQEILTWGYEKFDDQFAITTSFGIQSSVLLHMVSKLSLQKKIKIFWIDTGYLPTETYHYAENLIDRLSLKVEVLQSELSPARMEAKYGKLWETNKVSDLDKYHELRKIKPLENGLEKYSIYCWASGVRAGQTETRNKMKFIDVIRQRLSLRPLLNWTNKDIFYYMEENNLPAHPLFIKGYSSVGDWHSSSPDGMETKGRDTRFGGIKQECGIHTNN

SEQ ID NO: 12196 - DNA, 735 bp, Erwinia carotovora subsp. atroseptica SCRI1043
  CDS (1)..(735): transl_table=11
atggccgaatttaaccttgaggcgctcaacgcgttaccgaaagatgaacaggtggccgcgttggcggctgtgaatggccagcttgaacagctgtccgcgcaggagagggtgagctgggcgctggagaatttgccgggcgatttcgttttgtcgtccagtttcggcattcaggctgcgatatcgctgcatctggtgacgcaacagcggccggatattccggtcatccttacggataccggctatctgtttcctgaaacctaccagtttattgatgcactgacggaacagctgaagctgaatctgcacgtgtatcgcgccgcagagtctccagcatggcaagagtctcgttatggcaagctgtgggatcagggcgtggaaggtattgagcgctacaacctgctgaataaagttgagccgatgaatcgggcgttgagtgagctaaacgctgggacgtggtttgctggcctgcgccgtgaacagtccggcagccggggggagttgcccgtgctggcgattcagcgcggcgtctttaaattcctgccgattatcgattgggataaccggacggtgtatcagtatctgaaagaaaacggcctgagttaccatccgctgtgggatcagggctatttgtccgtcggcgatacgcacaccactcgcaaatgggagccgggcatgagcgaagaagaaacccgcttcttcggcttaaagcgcgagtgcgggttgcacgaagggtaa

SEQ ID NO: 12197 - protein, 244 aa, Erwinia carotovora subsp. atroseptica SCRI1043
MAEFNLEALNALPKDEQVAALAAVNGQLEQLSAQERVSWALENLPGDFVLSSSFGIQAAISLHLVTQQRPDIPVILTDTGYLFPETYQFIDALTEQLKLNLHVYRAAESPAWQESRYGKLWDQGVEGIERYNLLNKVEPMNRALSELNAGTWFAGLRREQSGSRGELPVLAIQRGVFKFLPIIDWDNRTVYQYLKENGLSYHPLWDQGYLSVGDTHTTRKWEPGMSEEETRFFGLKRECGLHEG

SEQ ID NO: 12198 - DNA, 735 bp, Yersinia pseudotuberculosis IP 32953
  CDS (1)..(735): transl_table=11
gtgagtcaatttaatctgagcgaactgaatgcgttgccgaaagccaagcaagcggcagcgctggtgctggtgaatggtcaactcgagcatttgaccgcgcaggagcgtgtcagttgggcattggataatttgcctggcgaatttgtcctttcctccagttttgggattcaggctgcggtttgtttgcatctggtgacccgtcagcgtcctgatattccggtgatcttgaccgataccggttacctgttcccagaaacatatcgttttattgatgatttgaccgagaagcttcaacttaatttacaggtgtttcgtgccgcacacagccctgcctggcaggaagcccgttatggcaagttatgggagcagggggtggagggtattgagcgttataacaccctcaataaagttgaaccaatgaatcgggcgttggaggctttaggtgcgcaaacctggtttgcgggtttgcgccgtgagcaatctggcggccgctcacaattgccggtattggcgcttcagcgtggcatatttaagctgttgcctattattgattgggataatcgccaagtttatcaatacctcacacaacatggcctgagttatcacccactgtgggagcaaggttacttatctgtcggcgatacccatacaacccgcaaatgggaaccgggcatgagtgaggaagaaacccgtttctttggtctgaaacgcgagtgtggtttgcacgaaggttaa

SEQ ID NO: 12199 - protein, 244 aa, Yersinia pseudotuberculosis IP 32953
MSQFNLSELNALPKAKQAAALVLVNGQLEHLTAQERVSWALDNLPGEFVLSSSFGIQAAVCLHLVTRQRPDIPVILTDTGYLFPETYRFIDDLTEKLQLNLQVFRAAHSPAWQEARYGKLWEQGVEGIERYNTLNKVEPMNRALEALGAQTWFAGLRREQSGGRSQLPVLALQRGIFKLLPIIDWDNRQVYQYLTQHGLSYHPLWEQGYLSVGDTHTTRKWEPGMSEEETRFFGLKRECGLHEG

SEQ ID NO: 12200 - DNA, 702 bp, Symbiobacterium thermophilum IAM 14863
  CDS (1)..(702): transl_table=11
atggctgaaaagagatggagcccggaggagatcgccgccgcggcccggtccctggaggggcaggggcctgtcgcggcgctccgctgggcctacgaacagtttgcaccggaggagatcgccttcgcgtgctccttcggggccgaggacgtggccctggcccacatgatcagccgggtggcgcccggcgcccaggtcttctacctggacaccgactttctgttccccgagacctaccggaccatcgaggcggtccgggccgcctatcccctgcggatccggcgggtgtcccccgcgctcacgccccgggagcaggcggagcggtacggcgacgaactgtggagccgcgaccccgatctctgctgcagcctgcggaaggtggagcctctccgggaggtgctccgggggctgaaggcgtggatcaccggcatccgccgggcgcagtcgcccacccgggccggggcgcaggtggtggagtgggacaggaagttcggcctggtgaaggtcaaccccctggtggactggaaggacgcggacgtctggaagtacatcctcgagcacaacgtgccgtacaacccgctgcacgaccggggctacccctccatcggctgcacgcattgcacccgtccggtcaggccgggggaggatccccgggccggccgctggtccggcttcgccaagaccgagtgcgggctgcaccagtga

SEQ ID NO: 12201 - protein, 233 aa, Symbiobacterium thermophilum IAM 14863
MAEKRWSPEEIAAAARSLEGQGPVAALRWAYEQFAPEEIAFACSFGAEDVALAHMISRVAPGAQVFYLDTDFLFPETYRTIEAVRAAYPLRIRRVSPALTPREQAERYGDELWSRDPDLCCSLRKVEPLREVLRGLKAWITGIRRAQSPTRAGAQVVEWDRKFGLVKVNPLVDWKDADVWKYILEHNVPYNPLHDRGYPSIGCTHCTRPVRPGEDPRAGRWSGFAKTECGLHQ

SEQ ID NO: 12202 - DNA, 723 bp, Methylococcus capsulatus str. Bath
  CDS (1)..(723): transl_table=11
atgacacagaccgagatcgacacgctccaggccgaactggccggccgctccccccgcaccattctggaaacggcattgagccgcttccagcggatcgcggtatcgttcagcggggcggaagacgtcgttttggtggaaatggccgcgcggttgcgaccgggcatcgaggtcttcaccctggacacgggacgcctgcatccggagacctaccgcttcatcgaagaagtgcgcgagcgctttgccgtccgcctcgacgtgctgtcaccggacgccgcggaactggaagcaatggtgcgggaaaaaggactgttcagcttctaccgcgacggtcatcaggaatgctgcggaatccgcaaggtccggcccttgcgccggaagctggcgacgctcgatgcatggatcaccggtcagcgccgggaccagaacccgacccggcaggcggtccctgaagtggaagccgatccagcttttgcgactggacatcaccccctcgtgaaattcaatccgctggcagcctggacttccgcccaggtatgggattacatcacggcctgcgaaatcccgttcaacgccctgcatctcaaagggtatgtcagcatcggctgcgaaccctgcacccgcccggtccgcccgggccaacacgaacgcgagggccgctggtggtgggaggatgcactcaagaaggaatgcggcctgcacatcggcgacgcttccagggtttga

SEQ ID NO: 12203 - protein, 240 aa, Methylococcus capsulatus str. Bath
MTQTEIDTLQAELAGRSPRTILETALSRFQRIAVSFSGAEDVVLVEMAARLRPGIEVFTLDTGRLHPETYRFIEEVRERFAVRLDVLSPDAAELEAMVREKGLFSFYRDGHQECCGIRKVRPLRRKLATLDAWITGQRRDQNPTRQAVPEVEADPAFATGHHPLVKFNPLAAWTSAQVWDYITACEIPFNALHLKGYVSIGCEPCTRPVRPGQHEREGRWWWEDALKKECGLHIGDASRV

SEQ ID NO: 12204 - DNA, 726 bp, Bacillus clausii KSM-K16
  CDS (1)..(726): transl_table=11
atggcttacgtttttgagcaaatggaggctaccgactatgaaaaggtaaataccaagttgaaaaatcgggatagcctggatattttgcgctgggcgaatcaaacgtatggtgaaaagctcgtgtatgcttgcagttttggagccgaggccatggtgctgcttgacttgttgtcaaaaatacaaaaagaagcccacattttgtttttagatacagattttcattttgccgaaacgtacgaattgatcgaacgtgtaaaggaacgatacccgacatttcgtattaacatggctaaacctgctttgtctccagaggaacaagcggaacgttacggcgatgaactatggcttaaaaatccagaccagtgctgtcaaattcgaaaattggatgtgctggcccgtgagcttgagccttacgatgcttggctttcaggcttaaggcgtgagcagtctccaacacgagcaaataccgagtttgttaatcaggataagcgctttaaaaaggtgaaggtttgtccgttgattcattggacggaagaagaaatatggatgtacatcaaattgcatcaattgccctacaatgagttgcacgaccagcactatccgagcattggctgtacgtactgcacgaaagcggtcatgcctggggaagatgctcgaagcggccgctgggcgggaacaggaaaaacggaatgcgggttgcatgcaccaacgaaaggagattcatga

SEQ ID NO: 12205 - protein, 241 aa, Bacillus clausii KSM-K16
MAYVFEQMEATDYEKVNTKLKNRDSLDILRWANQTYGEKLVYACSFGAEAMVLLDLLSKIQKEAHILFLDTDFHFAETYELIERVKERYPTFRINMAKPALSPEEQAERYGDELWLKNPDQCCQIRKLDVLARELEPYDAWLSGLRREQSPTRANTEFVNQDKRFKKVKVCPLIHWTEEEIWMYIKLHQLPYNELHDQHYPSIGCTYCTKAVMPGEDARSGRWAGTGKTECGLHAPTKGDS

SEQ ID NO: 12206 - DNA, 786 bp, Corynebacterium glutamicum ATCC 13032
  CDS (1)..(786): transl_table=11
atgagctttcaactagttaacgccctgaaaaatactggttcggtaaaagatcccgagatctcacccgaaggacctcgcacgaccacaccgttgtcaccagaggtagcaaaacataacgaggaactcgtcgaaaagcatgctgctgcgttgtatgacgccagcgcgcaagagatcctggaatggacagccgagcacgcgccgggcgctattgcagtgaccttgagcatggaaaacaccgtgctggcggagctggctgcgcggcacctgccggaagctgatttcctctttttggacaccggttaccacttcaaggagacccttgaagttgcccgtcaggtagatgagcgctattcccagaagcttgtcaccgcgctgccgatcctcaagcgcacggagcaggattccatttatggtctcaacctgtaccgcagcaacccagcggcgtgctgccgaatgcgcaaagttgaaccgctggcggcgtcgttaagcccatacgctggctggatcaccggcctgcgccgcgctgatggcccaacccgtgctcaagcccctgcgctgagcttggatgccaccggcaggctcaagatttctccaattatcacctggtcattggaggaaaccaacgagttcattgcggacaacaacctcatcgatcacccacttacccatcagggttatccatcaattggatgcgaaacctgcacccttcctgttgctgaaggacaagaccctagggccggccgttgggctggaaacgccaagacagaatgcggacttcactcatga

SEQ ID NO: 12207 - protein, 261 aa, Corynebacterium glutamicum ATCC 13032
MSFQLVNALKNTGSVKDPEISPEGPRTTTPLSPEVAKHNEELVEKHAAALYDASAQEILEWTAEHAPGAIAVTLSMENTVLAELAARHLPEADFLFLDTGYHFKETLEVARQVDERYSQKLVTALPILKRTEQDSIYGLNLYRSNPAACCRMRKVEPLAASLSPYAGWITGLRRADGPTRAQAPALSLDATGRLKISPIITWSLEETNEFIADNNLIDHPLTHQGYPSIGCETCTLPVAEGQDPRAGRWAGNAKTECGLHS

SEQ ID NO: 12208 - DNA, 762 bp, Colwellia psychrerythraea 34H
  CDS (1)..(762): transl_table=11
atgcttaataccacaacaggtattgccgataaagagcttaccagcccttttgaagtaacctttcctcatcctgctataggagagtggaatcaatctttggaaaaacaaacagcgattgctcgtgcagagtgggcaatggaaaacttgccaggtcagtttgttttatcttcaagctttggtattcaatctgcggtgatgttgcatttacttacccaagtagatagcaatattccggtattgataacggatacaggacatttatttcctgaaacctatcgattcattgagcagttgactgatcgtttgaacttgaacttacaagtctatcaagcaaaagaaagtgccgcatggcaacaagccaagtacggtgatgaatgggcgcaaagtgatgatgcacttaaagcctataatcgccgtaataaagttgaaccgctagagcgcgggttatctgacttaaatgctaatacttggttttctggtgttcgtcgtcaacaatcagctcaccgagaaggtttgtctgttgtgggtacactgcgtggtcgttataaagtacatccaataattgattggagtaataaagacgtacatgagtacttaactaagcacaacttaccataccatcccctttgggatgaaggttatgtatcggttggtgatgtacatagcacaaaaccattaacattgggtatgagtgaaagtgatactcgcttcggcggcggtcaacgtgaatgtggtttgcatactgatggtgatggtatttaa

SEQ ID NO: 12209 - protein, 253 aa, Colwellia psychrerythraea 34H
MLNTTTGIADKELTSPFEVTFPHPAIGEWNQSLEKQTAIARAEWAMENLPGQFVLSSSFGIQSAVMLHLLTQVDSNIPVLITDTGHLFPETYRFIEQLTDRLNLNLQVYQAKESAAWQQAKYGDEWAQSDDALKAYNRRNKVEPLERGLSDLNANTWFSGVRRQQSAHREGLSVVGTLRGRYKVHPIIDWSNKDVHEYLTKHNLPYHPLWDEGYVSVGDVHSTKPLTLGMSESDTRFGGGQRECGLHTDGDGI

SEQ ID NO: 12210 - DNA, 720 bp, Dechloromonas aromatica RCB
  CDS (1)..(720): transl_table=11
atgacccccagcctgctcaacatcacgccagaactgaccgccagcgttgccgtcaagaccaaaacggtcaaagcactgctcgccgacatcgcgaccaactggtcgagcgccgccttcgccaacagcctgggcgccgaggacatggtactgactgacctgatcgtcaaggccaagctgccgatcgaaatcttcagcctcgacaccggccgcctgccgctcgaaacctacgacctgatcgccgcggtcgacaagcattacggcctgaaactgaagctctatttcccgcaggccgaagaagtcgaaagctacgtccgcaaccacggcatcaacgccttctacgaatcggtcacgctgcgcaaggcctgctgttacgcccgcaaggtcgagccgctgaaacgcgccctggctggcaagcgagcctggatcaccggcatgcgcgccgagcaggcggcgactcgcgggaacctcgccatccgcgagtacgatgaaggcaatggtctggaaaaattcaatccgctgtcggactggaccgagaaggaagtctggacctacatcaagcagaacgccgtgccctacaacgccctgcacgacaagttctaccccagcatcggctgcgccccctgcacccgcgccatttcgcccggcgaagacatccgggctggccgctggtggtgggagaatcctgagtccaaggagtgcggactgcacgtcaagggctga

SEQ ID NO: 12211 - protein, 239 aa, Dechloromonas aromatica RCB
MTPSLLNITPELTASVAVKTKTVKALLADIATNWSSAAFANSLGAEDMVLTDLIVKAKLPIEIFSLDTGRLPLETYDLIAAVDKHYGLKLKLYFPQAEEVESYVRNHGINAFYESVTLRKACCYARKVEPLKRALAGKRAWITGMRAEQAATRGNLAIREYDEGNGLEKFNPLSDWTEKEVWTYIKQNAVPYNALHDKFYPSIGCAPCTRAISPGEDIRAGRWWWENPESKECGLHVKG

SEQ ID NO: 12212 - DNA, 783 bp, Thermobifida fusca YX
  CDS (1)..(783): transl_table=11
gtgcgcccgagtcttccgcctctccttcgtcgggctccacgccgcggcgttccccccttccactacgacgccgaccggggaggagcagcgttgaacatcacggccgacggcgcggcgttcgccgctgaggctgccgcccgcctggaagaagccagcgccaccgagatcatccagtgggccgccgacacgttcggcgaccggctgtgcctgaccgcgtcgatggcggacgccgtcatggtggacctggtctcgaaagtagtcccgggcatcgacgtgatcttcctggacaccggctaccacttcccggagacgctggggacccgcgacgcggtcgcgcagacctacccgatcaacctgatcacggtcacccccagccggaccgtagcggaacaggatcgcgacctcggtccccggctgtacgcccgcaaccccgacctctgctgctacctgcgcaaagtagagccgctgcagcgggcgttgcagtcctacgacgcctggctgaccgggctgcgccgcgacgaggcggtgacccgccgcaccgtgggggtcgtgcagtgggacgcccgcaagaagaagatcaaagtcaatccgatcgcccgctggacccaagagcaggtggactcctacatcgctgagcacggggtgctcgtcaacccgctgcaggacgacggctacccctcgatcgggtgtgcgccgtgcactcagcgggtgccggaaggcgccgacccccgcagcggtcgctgggcgggaacagggaaagtcgaatgcggtctccacagttga

SEQ ID NO: 12213 - protein, 260 aa, Thermobifida fusca YX
MRPSLPPLLRRAPRRGVPPFHYDADRGGAALNITADGAAFAAEAAARLEEASATEIIQWAADTFGDRLCLTASMADAVMVDLVSKVVPGIDVIFLDTGYHFPETLGTRDAVAQTYPINLITVTPSRTVAEQDRDLGPRLYARNPDLCCYLRKVEPLQRALQSYDAWLTGLRRDEAVTRRTVGVVQWDARKKKIKVNPIARWTQEQVDSYIAEHGVLVNPLQDDGYPSIGCAPCTQRVPEGADPRSGRWAGTGKVECGLHS

SEQ ID NO: 12214 - DNA, 768 bp, Prochlorococcus marinus str. NATL2A
  CDS (1)..(768): transl_table=11
atgaagaaagaatctaaagacaattacatcaatgatttgagaaacgccgctcaattgcctcaacctgctctgatgaaatcaattaatgagacaagcaaagatctagagaaactctcccctcaggatcaacttcaatgggcttttgaggaatttgatgagagctttgttgttaccacaagttttgggatccaatccgctgtcttgcttcacatgacgaaggaattgaaatccagtcaaaagccaaaagttatttgggttgatactggctatttgccaaaagaaacatatgattacgcagaaaaattaacaacacttttcgaattaaatttagtaattgcccaaagtcccgtatctccagcgagaatggaggccttaaatggtcgtctgtgggaaacaggagtacaaaaagatcttgataaatatcatcagattcggaaagttgcacctcttgaaaaagccttctcagacctcaacgttctctgctgggcaagtggcgtgagaaaaggccaaacccagaacagacaatcaatgtctaatatcgattgcattagagaacgtttaacgctccgaccacttttaacctggtctaaaaaagatattttctattacatggagaaaaataaattacctcaacatccattatttgaacaaggttattccactgtaggagattggcattcaagcggagcagaaaatactaataccaaaggaaggtcaacgagatttggaggtctcagtgaagaatgtggaatccatttaaatacgtaa

SEQ ID NO: 12215 - protein, 255 aa, Prochlorococcus marinus str. NATL2A
MKKESKDNYINDLRNAAQLPQPALMKSINETSKDLEKLSPQDQLQWAFEEFDESFVVTTSFGIQSAVLLHMTKELKSSQKPKVIWVDTGYLPKETYDYAEKLTTLFELNLVIAQSPVSPARMEALNGRLWETGVQKDLDKYHQIRKVAPLEKAFSDLNVLCWASGVRKGQTQNRQSMSNIDCIRERLTLRPLLTWSKKDIFYYMEKNKLPQHPLFEQGYSTVGDWHSSGAENTNTKGRSTRFGGLSEECGIHLNT

SEQ ID NO: 12216 - DNA, 726 bp, Anabaena variabilis ATCC 29413
  CDS (1)..(726): transl_table=11
atgacagcttctacggcatttaaaacccaaacaaacgaatttaatttagatgaattaaatcaacagtttgaaactgccactcctaaagaaattctggcatggtctatagagcatatccccacagggttggtacaaactagcgcctttaatgtggatgacttagtaattacccatatcctttatagtgaactcaagcaaccagtacctgtaatctttctcgatactctgttccactttcaacaaactctagaactcgttgcaaaagcgaaagaaatatacaacctagatttacaaacctacaaaactccagatgtagacacccgcgaagcctttactgctaaatatggcgaggcgctttgggataaagatattacacaatttcaccaagttaccaaaattgaacctctacaacggggtttagatgaactcaacacagttgcgtggattactggtcgtcgccgtgatcaagcagttacccgcgctaatatgcctgtatttgaattagatggcaaaggtcgtttgaaagtaaatcccctagctacttggacacgtcaagatagttgggcttacgtagccgaacatggtgtgatttacaacccactccacgaccaaggttatcccagcattggcgatgaacccatcaccaccaaagtgggcgaaggcgaagacgaacgcgccggacgctggagaggaagcaataaaactgaatgtgggattcacatttag

SEQ ID NO: 12217 - protein, 241 aa, Anabaena variabilis ATCC 29413
MTASTAFKTQTNEFNLDELNQQFETATPKEILAWSIEHIPTGLVQTSAFNVDDLVITHILYSELKQPVPVIFLDTLFHFQQTLELVAKAKEIYNLDLQTYKTPDVDTREAFTAKYGEALWDKDITQFHQVTKIEPLQRGLDELNTVAWITGRRRDQAVTRANMPVFELDGKGRLKVNPLATWTRQDSWAYVAEHGVIYNPLHDQGYPSIGDEPITTKVGEGEDERAGRWRGSNKTECGIHI

SEQ ID NO: 12218 - DNA, 747 bp, Synechococcus sp. CC9605
  CDS (1)..(747): transl_table=11
atggtgtccatggcggtgcaaaacgagttgctcgaagggcgcaagctgctggagtcgatggagccgcagcagcgtttggcctggggattggagcagttcggggagaactttgctctcaccacaagttttgggatccaatcggctgtgcttttgcacatgttgagcaccctccccgggggtgatgcggtgccagtgatctggatcgataccggttatttgcctcctgatacctacacctacgccgctcaactcacccagcaactcaggattcgtctggtggtgagtcagagcgagatgtccccggctcggatggaggccctgcacgggcggctctgggagtccggtcgcgtcgaagacctcgagacctatcaccggattcgcaaggttgaacccctagagcgtgcgctcaacgatctagagacgcgctgttgggccagcggcgtgcgtcgagggcagaccgatcaccgccgctcgatgaccgccttggatccgattcgggagcgttggtccctgcgccccttgctcgagtggacgcagcgagacgtttattactacatgcaatcgaacaacctcccccagcacccattgttcgagcagggctattccaccgttggcgactggcattccagtggcccggacgtgggagatctgagtggccgcgacacccgcttcggcgggttgaagcaggagtgtggaattcatgtgccccaggaggccaacgaagggctgatgggcgatggcatctga

SEQ ID NO: 12219 - protein, 248 aa, Synechococcus sp. CC9605
MVSMAVQNELLEGRKLLESMEPQQRLAWGLEQFGENFALTTSFGIQSAVLLHMLSTLPGGDAVPVIWIDTGYLPPDTYTYAAQLTQQLRIRLVVSQSEMSPARMEALHGRLWESGRVEDLETYHRIRKVEPLERALNDLETRCWASGVRRGQTDHRRSMTALDPIRERWSLRPLLEWTQRDVYYYMQSNNLPQHPLFEQGYSTVGDWHSSGPDVGDLSGRDTRFGGLKQECGIHVPQEANEGLMGDGI

SEQ ID NO: 12220 - DNA, 723 bp, Myxococcus xanthus DK 1622
  CDS (1)..(723): transl_table=11
atgtcgcccccgcagccccaggcctcggccctgctcgccgaagccgctgaagtgaaggacgcccccgcgcaggacctcctcgcctggaccgagcgccgcttcggtgcgcgcgcggccatcgcctccagcttcggcgtggaggacatggtcctcatcgacctggcgcgccagcatgcgcccagcctgcgcctcttcacgctcgacaccggacgcctgcccccggagacgtacgaactcatggaggtggtgcgtaagcgctacggcgtcaccgtggagacgtacttccccgagcgcgcgcgcgtggaggcgttggagtccacgaacggctacttctccttccgccagagcctagaggcacgcaaggcgtgctgcgccatccgcaaggtggagcccctgtcgcgcgcgctcgcgggtcaacaggcgtgggtgacgggattgcgccgtgagcagtccgtcacccgcaccgacgtggcgacgttagaggtggacagcgcgcatgggctgctcaagctcaacccgctggccacgtggagcagccgggacatctgggcctacgtccgggcgaagagcgtgccctacaacgcgctccatgaccgtggctacccgtccatcggctgtgcgccctgcacgcgcgcggtgaaaccctacgaggacgagcgcgcgggccgctggtggtgggagtccgcggagaaccgcgagtgcggcctccacccggtccgatga

SEQ ID NO: 12221 - protein, 240 aa, Myxococcus xanthus DK 1622
MSPPQPQASALLAEAAEVKDAPAQDLLAWTERRFGARAAIASSFGVEDMVLIDLARQHAPSLRLFTLDTGRLPPETYELMEVVRKRYGVTVETYFPERARVEALESTNGYFSFRQSLEARKACCAIRKVEPLSRALAGQQAWVTGLRREQSVTRTDVATLEVDSAHGLLKLNPLATWSSRDIWAYVRAKSVPYNALHDRGYPSIGCAPCTRAVKPYEDERAGRWWWESAENRECGLHPVR

SEQ ID NO: 12222 - DNA, 756 bp, Rubrobacter xylanophilus DSM 9941
  CDS (1)..(756): transl_table=11
atgccggaggctcccgcgaaggagcgcaagaagcaacgagaggcccgcgaggaggtgttgcgtgccgccggggagctggagggggccgcgccgcaggaggttctgcgttgggcggtcgggttcttcggcaggaggctcaccctctccgtctccttcggggggccggaggggatggtccttctggacatgctctcgcggataaccgacgacgtctgggtcttcacgctggacaccggctttctcttcgaggagaccgtccggttccgggaggaggccatgcgccgctaccggctgccgctccgggtggtgcgtccggagctctccgtggaggagcaggtggaacgctacgggccgcggctctggagctgcgcgccggacatctgctgcgaggtccgcaaggtcgagccgcagcggcggtggctctccaacttcgacgcctgggtcaccggcatccggagggaccagacggcggcgcgggcggacacccccgtcgtcggctgggacgagttcttcggggtgttcaagatagcccccctggcctcctggagcagggagcgggtgctgcggtacgccggggagcacggggtgccgctcaacccgctgctctccagggggtacgccagcatcggctgcgagccgtgcacccgccccgtccgggagggcgaggacgagcgcgccggccggtggccggggatggagaagaccgagtgtggcctgcacatagcaaacgggaaggtgcgtcgtgcggtttcttag

SEQ ID NO: 12223 - protein, 251 aa, Rubrobacter xylanophilus DSM 9941
MPEAPAKERKKQREAREEVLRAAGELEGAAPQEVLRWAVGFFGRRLTLSVSFGGPEGMVLLDMLSRITDDVWVFTLDTGFLFEETVRFREEAMRRYRLPLRVVRPELSVEEQVERYGPRLWSCAPDICCEVRKVEPQRRWLSNFDAWVTGIRRDQTAARADTPVVGWDEFFGVFKIAPLASWSRERVLRYAGEHGVPLNPLLSRGYASIGCEPCTRPVREGEDERAGRWPGMEKTECGLHIANGKVRRAVS

SEQ ID NO: 12224 - DNA, 738 bp, Mesorhizobium sp. BNC1
  CDS (1)..(738): transl_table=11
atggcagcgaagccaaagccgcttgacgccgaaatcgaggcgctggaactcgatgcgcgttacggccatttggcggccgaggcgatcgtcgagcttgccgtgaaccggttccgcgacgagggcggtattgccaccgtctcctctttcggtgccgattcggccgtgcttcttcacatggtcgccagcgtcgacaagagcttgcccgtgctcttcctcgataccggccagcattttggtgagacgatcgaatatcgcgaccagttggcgtcggatcttggcctgtcaaacctggtggtcgttcacccgaagtccgagatgctgagcgcgcgcgatccgggtaatgatcttcacaagagcgactccgatctgtgctgcgagattcgcaaggtggagcccatggcgcgcgcggtggagccgtattccgcctggttcaccggccgcaagcgccaccaggcggagtcgcgggcgcaaatgccggtattcgaggcggttggtccgcgcattcgcatcaacccgctcgcccgctggaccacggccgaccaggccgcctatatgcgcgcgaacgacctgcgcgagaatccgctggtggcctatggctatctctcgatcggctgctttccctgcacgcagcccgtgaagcccggcgaggatcaacgcagcgggcgctgggcaggcttggctaaaaccgaatgcggcatccatctgccgggtcttgaagctctcaccaacgcggcgtga

SEQ ID NO: 12225 - protein, 245 aa, Mesorhizobium sp. BNC1
MAAKPKPLDAEIEALELDARYGHLAAEAIVELAVNRFRDEGGIATVSSFGADSAVLLHMVASVDKSLPVLFLDTGQHFGETIEYRDQLASDLGLSNLVVVHPKSEMLSARDPGNDLHKSDSDLCCEIRKVEPMARAVEPYSAWFTGRKRHQAESRAQMPVFEAVGPRIRINPLARWTTADQAAYMRANDLRENPLVAYGYLSIGCFPCTQPVKPGEDQRSGRWAGLAKTECGIHLPGLEALTNAA

SEQ ID NO: 12226 - DNA, 708 bp, Rhodococcus sp. RHA1
  CDS (1)..(708): transl_table=11
ttgaatctcgccacagccacccaggacgaccttcggctccttgccgtgcagggggcggcaagtctcgagggtgcctccgcgcaggaactgctgcagtggaccgaggacacgttcggaagcgactacatcgtcgcctccaacatgcaggacggcgttctggtccacctcgccgcccaggtccatcccggtgtggacgtgctgttcctcgacaccggttaccacttcgcggagaccatcggcacccgtgacgccgtcgagcaggtgtacggcgtcaacgtgatcaacgcgcgggccgaggcgagtgtcgccgagcaggatgcggcggagggcaaggatctgttcgcccgcgaacccaaccggtgctgcgcactgcggaaggtcgccccgctgaagaacaccctctccggatacaaggcgtgggtcaccggcatccggcgtgtcgaggcgcccacccgcgccaacgcccccctgatctcgttcgacgacgcgttcggtctggtgaagatcaatccgatcgccgcgtggtccgacgaagacatgcagtcctacatcgacgagcactcgattctggtgaatccgctcgtcgacgagggatatccgtccatcgggtgcgctccgtgcaccagcaagccagcccccggcagcgatccgcgcagcggccgctgggccggtcaggccaagacagaatgcgggttgcacgcctcatga

SEQ ID NO: 12227 - protein, 235 aa, Rhodococcus sp. RHA1
MNLATATQDDLRLLAVQGAASLEGASAQELLQWTEDTFGSDYIVASNMQDGVLVHLAAQVHPGVDVLFLDTGYHFAETIGTRDAVEQVYGVNVINARAEASVAEQDAAEGKDLFAREPNRCCALRKVAPLKNTLSGYKAWVTGIRRVEAPTRANAPLISFDDAFGLVKINPIAAWSDEDMQSYIDEHSILVNPLVDEGYPSIGCAPCTSKPAPGSDPRSGRWAGQAKTECGLHAS

SEQ ID NO: 12228 - DNA, 804 bp, Trichodesmium erythraeum IMS101
  CDS (1)..(804): transl_table=11
atgctacaacagagtttaatcagactcaataaaaatggacaatacaattatcaagattacaggtatttaccagaactagatcttggggttgttaatcaggaacttagtcaagcagatcctcacactttagtacagtgggggttaaaaatttttaaggaaggtctggttatgagtaccagttttggtattcaggctgctgttatgttacacctagttacaagtgttatacctaatattcctgttatctggattgatacaggatatttaccagccgaaacctataaatttgctgaagagttgatagaacgactgaaacttaatgtgaaagtttatcagtcacatattagtccaggtcggatggaagctttatatggcagactttgggcagaaaaagatcttgaggctcttaaccgctatgaccaaattcgcaaagtagaacccatgcaacgagcattgagagagctgaaggccactgcttggttagctgggttaaggggagaacaaaccaagcaccgccaaagtttagatcgcattagtaaacagtcgaatatatataaaattttaccaatactcaattggaatgcacgggatatttatcaatatttaactgctcataatttaccatatcatccattttttgatttgggatacactactgtaggagattggcattctagtcggcctcttactactgatgatcaagatgaacgggatactcgcttttatggtcttaagcaggagtgtgggctacatttgcctcaaacacaagaagaggctcaaagtcttgattctagtttattgtaa

SEQ ID NO: 12229 - protein, 267 aa, Trichodesmium erythraeum IMS101
MLQQSLIRLNKNGQYNYQDYRYLPELDLGVVNQELSQADPHTLVQWGLKIFKEGLVMSTSFGIQAAVMLHLVTSVIPNIPVIWIDTGYLPAETYKFAEELIERLKLNVKVYQSHISPGRMEALYGRLWAEKDLEALNRYDQIRKVEPMQRALRELKATAWLAGLRGEQTKHRQSLDRISKQSNIYKILPILNWNARDIYQYLTAHNLPYHPFFDLGYTTVGDWHSSRPLTTDDQDERDTRFYGLKQECGLHLPQTQEEAQSLDSSLL

SEQ ID NO: 12230 - DNA, 798 bp, Shewanella sp. MR-7
  CDS (1)..(798): transl_table=11
atggctgatcttgattctggggtgacgggttccggcttgccgaacgcgttgcagagcgtagtaagtcacagcgaactgaaagcgctgctgacggcgcctaaggatgtgcagcgagcggaactggaacgcattaatcacttcttggccggattgacggctcaagagcgagtgctctggggcttagcctatttgccggggaatcacgcgctgtcatccagttttgggatccaggcggcggtgatgctgcatatggtgagtcaggtgcaatcggatattccggtgatcttaacggatactgggtatctctttcctgagacatatcagtttattgaccagctcaccgagcgcttatccttaaacctcaaggtttaccaagcgccgatgacctcggcatggcaggaagcgcgttttggcaagctgtgggagcagggcttagatgggctcgagcgttataatcgactgaataaagtggagccgatgcaacgtgctttggcagaacttgaagtcagcacttggtttgcaggacttcgtcgtagccagtcgagcactcgcgaagagttaccgatattggctatccacggtactcgctttaagctgctgccgattatcgaatggtcgaacaaagatgtgcacttgtatctgacgcaatttgacttgccttaccatccgctatgggatcaagggtatgtttctgttggggatacccattcgagtaaacccttagaattagggatgactgaagaagaaacccgctttaatggtctaaaacgtgaatgcggtttgcattacgaaatatag

SEQ ID NO: 12231 - protein, 265 aa, Shewanella sp. MR-7
MADLDSGVTGSGLPNALQSVVSHSELKALLTAPKDVQRAELERINHFLAGLTAQERVLWGLAYLPGNHALSSSFGIQAAVMLHMVSQVQSDIPVILTDTGYLFPETYQFIDQLTERLSLNLKVYQAPMTSAWQEARFGKLWEQGLDGLERYNRLNKVEPMQRALAELEVSTWFAGLRRSQSSTREELPILAIHGTRFKLLPIIEWSNKDVHLYLTQFDLPYHPLWDQGYVSVGDTHSSKPLELGMTEEETRFNGLKRECGLHYEI

SEQ ID NO: 12232 - DNA, 738 bp, Alkalilimnicola ehrlichei MLHE-1
  CDS (1)..(738): transl_table=11
atggccaacagaccacaggcattgaagatccacccccagccggttctcgcccccggggagctcgactcggtccgacggcaactggcggcggcatcggcgcaggagcgtgtgcgctggggcctcgcccgcttccccggacgcattgtcctcgcctccagcttcggggcgcaggccgcggtgtccctgcacctggtgacccgtgaacagcccgacatccccgtggtactggtggataccggctatctcttcccggagacctaccgctttgtggacgagctcactgaacggctcggtctcaaccttcaagtcgcccgcccggcgcactccgcggcctggcaggaggcgcgcttcggccgtctctgggagcagggcgtcgaggggatcgaacgctacaatcggatgaacaaggtcgagcccatgcagcaggccctggagaccttgggggccgacgcctggtttgccgggctgcgccggcagcaggcgcactcgcggcaacaacggcaggtggtcgagatccagaacgaccgggtcaaggtgcatccgatcatcgactggacagaccgggatgtccaccgctacctgacccgccacgacctgccctaccaccccctctggcacgaaggctacgtctccatcggcgacgtccacaccacccgccggctcgccgacggcatgagcgaggaggagacgcgcttcttcggcctgcgccgggagtgcggtctgcacgacctggtctga

SEQ ID NO: 12233 - protein, 245 aa, Alkalilimnicola ehrlichei MLHE-1
MANRPQALKIHPQPVLAPGELDSVRRQLAAASAQERVRWGLARFPGRIVLASSFGAQAAVSLHLVTREQPDIPVVLVDTGYLFPETYRFVDELTERLGLNLQVARPAHSAAWQEARFGRLWEQGVEGIERYNRMNKVEPMQQALETLGADAWFAGLRRQQAHSRQQRQVVEIQNDRVKVHPIIDWTDRDVHRYLTRHDLPYHPLWHEGYVSIGDVHTTRRLADGMSEEETRFFGLRRECGLHDLV

SEQ ID NO: 12234 - DNA, 735 bp, Hyphomonas neptunium ATCC 15444
  CDS (1)..(735): transl_table=11
atggcctttgaaaccgacacattcgaggagcccaaagaccggctcgcgcgccttaacggagaactccggaatgcgtccgcgcaggaaatcctccgcgccgccatttcccgcgaatggcccggcgggctcacctatgtgtccagtttcggcgccgaaagcgtcgtcatgctcgccctcatcgctgaggtcgatccctccctgccaatcgtcttcatcgacaccggcatgcatttccctcagacgctggactataaagacgaggtcatcgaacgcctcggcctcaccggcgtgcgcaatatcacgcccagcgagactgagcgcaaagtgctcgaccccaagaacatgctctggaaaaccgatgccgacgcctgctgcgccctgcgcaaggtgcgcccgctggagccggcgctggagggcttcggcgcctgggtcacgggccgtaaacgcttccatggcggcgtccggatgagcctgccggtgtttgaatttgccgatggccgctacaaggtgaacccgctcgccaactggacgcaaggcgacgtggacgcctatctcgaagagaaaaacctgccccgccacccgctggtctcgcaaggctatccttcgatcggctgctggccctgcacccagcctgccgcagaccccaacgacccccgttcgggccgctgggtcggccaggaaaagtccgaatgcggactgcacgtcgaacgcaatgaacggccacgggttttctga

SEQ ID NO: 12235 - protein, 244 aa, Hyphomonas neptunium ATCC 15444
MAFETDTFEEPKDRLARLNGELRNASAQEILRAAISREWPGGLTYVSSFGAESVVMLALIAEVDPSLPIVFIDTGMHFPQTLDYKDEVIERLGLTGVRNITPSETERKVLDPKNMLWKTDADACCALRKVRPLEPALEGFGAWVTGRKRFHGGVRMSLPVFEFADGRYKVNPLANWTQGDVDAYLEEKNLPRHPLVSQGYPSIGCWPCTQPAADPNDPRSGRWVGQEKSECGLHVERNERPRVF

SEQ ID NO: 12236 - DNA, 804 bp, Pseudomonas aeruginosa UCBPP-PA14
  CDS (1)..(804): transl_table=11
atgccgccctttgctaccattcccgccacagagcgcaacagcgccgcccagcaccaggaccccagcccgatgagccagcctttcgaccttcccgccctcgcttccagccttgccgacaaatccccccaggacatcctgaaagccgccttcgagcacttcggcgacgagctgtggatctccttcagcggcgccgaggacgtcgtcctggtagacatggcctggaagctcaaccgcaacgtgaaggtgttcagcctcgacaccggtcgcctgcacccggaaacctatcgtttcatcgaccaggtccgcgaacactacggcatcgccatcgacgtgctttcccccgacccgcgcctgctcgaacccctggtgaaggaaaagggcctgttcagcttctaccgggacggccacggcgagtgctgcggcatccgcaagatcgaaccgctcaagcgcaagctcgccggcgtgcgcgcctgggccaccggccaacgccgcgaccagagccccggcacgcgcagccaggtggcggtgctggaaatcgacggtgccttttccacgccagaaaagccgctgtacaagttcaacccgctgtcgtccatgaccagcgaggaagtctggggctatatccgcatgctcgaactgccctacaacagcctgcacgaacgcggctatatcagcatcggctgcgaaccctgcacccgtccggtgctgcccaaccagcacgagcgcgagggccgctggtggtgggaggaagccacccacaaggagtgcgggctgcacgccggcaacctgatcagcaaggcctga

SEQ ID NO: 12237 - protein, 267 aa, Pseudomonas aeruginosa UCBPP-PA14
MPPFATIPATERNSAAQHQDPSPMSQPFDLPALASSLADKSPQDILKAAFEHFGDELWISFSGAEDVVLVDMAWKLNRNVKVFSLDTGRLHPETYRFIDQVREHYGIAIDVLSPDPRLLEPLVKEKGLFSFYRDGHGECCGIRKIEPLKRKLAGVRAWATGQRRDQSPGTRSQVAVLEIDGAFSTPEKPLYKFNPLSSMTSEEVWGYIRMLELPYNSLHERGYISIGCEPCTRPVLPNQHEREGRWWWEEATHKECGLHAGNLISKA

SEQ ID NO: 12238 - DNA, 744 bp, Mycobacterium avium 104
  CDS (1)..(744): transl_table=11
atgaccgaacgaacgaccaaacttccagaggccgaactgcgtgaactagccgcccgcggcgccgccgagctcgaaggcgccagcgccagcgacgtgttgcgttggaccgacgaaacattcggcggcgtcaacgggccacgcggatgggccacctgcaactacgtggtggcctcgagcatgcaggaagcggtgttgatcgacctggccgccaaggtccgccccggtgtgccggtggtcttcctggacaccggctaccacttcgccgagaccatcgggacccgggatgcgatcgaatccgtctacgacatccgggtgctcaacgtcactcccgagcacagcgtcgccgagcaggacaaactgctgggcaaggacctgttcgcgcgcgaccccggcgaatgctgccggctgcgcaaggtcgccccgctgggcaagacgctgcgcggatactcggcctgggtgaccggcctgcgccgctcggaggccgcgacacgggccaacgcgccggtgatcggcttcgacgagggcttcaagctggtcaaggtcaaccccatggccacctggaccgacgaggacgtgcagaactacatcgacgagcacaacgtgctggtcaatccgcttatctacgaaggctattcgtcgatcggctgcgccccctgcacggccaagccgctggccggcgccgacccgcgcagcgggcgctggcagggcctggccaagacggaatgcgggctgcacgcctcgtaa

SEQ ID NO: 12239 - protein, 247 aa, Mycobacterium avium 104
MTERTTKLPEAELRELAARGAAELEGASASDVLRWTDETFGGVNGPRGWATCNYVVASSMQEAVLIDLAAKVRPGVPVVFLDTGYHFAETIGTRDAIESVYDIRVLNVTPEHSVAEQDKLLGKDLFARDPGECCRLRKVAPLGKTLRGYSAWVTGLRRSEAATRANAPVIGFDEGFKLVKVNPMATWTDEDVQNYIDEHNVLVNPLIYEGYSSIGCAPCTAKPLAGADPRSGRWQGLAKTECGLHAS

SEQ ID NO: 12240 - DNA, 702 bp, Nocardioides sp. JS614
  CDS (1)..(702): transl_table=11
atgaagacaccctccgagatcagcaggcttcgctcgctggtggcacagcgcgcgcgcgatctggaaggcgcctccgctgaggccgtgatcagctgggcgcaggagaccttcggagcccggctgtgcgcgacgtcctcgatgggcgacgtcgtcatcgtgcaccaggtgtctcggtacgcaccgggtctggatgtgctcttcctggataccggctaccacttcgcggagacgctggcctttcgtgagctcgtgtcgtcgtcgtacgacgtgaacgtggtcgacctccgaccggaacgcagcgtcgaagagcagttgcagctctgggaccgcgacctgttcgactccgatccggacggttgctgccggcttcggaaggtccttcccctgcggcgcgcactgacggggtatgacgcgtgggtcaccgggatcaggagggcggactccccgcggcgggcggagactccagtgctggcgtgggacgaggtcaaccaggtcgtgaaggtggcgcctttggcgacctggacccgcgagatggtggagggctacctcgaggaccacgcactcccccgcaaccggctaacggagctcggttacacgtcgatcggatgccaaccctgcacctctctgcccaccgggctggacccgcggtctggccggtggcccgggctgcagaagaccgagtgcggactccatcggacctag

SEQ ID NO: 12241 - protein, 233 aa, Nocardioides sp. JS614
MKTPSEISRLRSLVAQRARDLEGASAEAVISWAQETFGARLCATSSMGDVVIVHQVSRYAPGLDVLFLDTGYHFAETLAFRELVSSSYDVNVVDLRPERSVEEQLQLWDRDLFDSDPDGCCRLRKVLPLRRALTGYDAWVTGIRRADSPRRAETPVLAWDEVNQVVKVAPLATWTREMVEGYLEDHALPRNRLTELGYTSIGCQPCTSLPTGLDPRSGRWPGLQKTECGLHRT

SEQ ID NO: 12242 - DNA, 747 bp, Nocardioides sp. JS614
  CDS (1)..(747): transl_table=11
atgaccgcggcgaccacgaactcggctcgcaacttccgtggcatcgagaccgctggccgctcctccgaggagctgcgcgagctggtgtcccactggggcgccgagctcgagctcgcgcccgccgaggacatcgtcgagtgggcggtggcgaccttcggcgagaggttctgcgtgacgtcgtcgatggcggatgccgtcctcgcgcacctggtctcccgcgtcgcgccggggatcgacgtgctcttcctggacaccggctaccacttcgccgagacgatcgggacccgggacgcggtccaggcgacgctgccggtcaacctgatcacgatcaccccggtgcagtcggtcgccgagcaggacgcggcgtacggcacggacctctacaagaccgaccccgacctgtgctgcgcgctgcgcaaggtgcagccgctcgcggacgccctcgaggggtacgacgcgtgggcgaccgggctgcgccgcgccgagacccagcaccgcgtgatcgccccggtcatcggctgggacgccaagcgcggcaaggtcaaggtctcgccgctggcacgctggaccgacgaggagatcgagcgctacatcgccgaccacgacgtgctggtgaacccgctcgcgtacgacggctacccgtccatcggctgctggccctgcacacgccgcgtggctcccggcgaggacccacgcagcggccgttgggccggcaccaccaagaccgagtgcgggatccactcatga

SEQ ID NO: 12243 - protein, 248 aa, Nocardioides sp. JS614
MTAATTNSARNFRGIETAGRSSEELRELVSHWGAELELAPAEDIVEWAVATFGERFCVTSSMADAVLAHLVSRVAPGIDVLFLDTGYHFAETIGTRDAVQATLPVNLITITPVQSVAEQDAAYGTDLYKTDPDLCCALRKVQPLADALEGYDAWATGLRRAETQHRVIAPVIGWDAKRGKVKVSPLARWTDEEIERYIADHDVLVNPLAYDGYPSIGCWPCTRRVAPGEDPRSGRWAGTTKTECGIHS

SEQ ID NO: 12244 - DNA, 849 bp, Nocardioides sp. JS614
  CDS (1)..(849): transl_table=11
atgacgacgtacgacaggagaagcacggtgaccatcgtcgacgcgaggactgcctccaacccggccgagcgcgtggtcttcgacgacctcgagatcggcgagatcgccgtcgacctcgatgaccaggagcccgaggacgtcatcgcctgggcactcgaggagctcggtgatcggatcgccatcgtgacggccctgcaggtggacggcatggtcgtgctggacatggcgacccgtctccggccggacatccgggtcgtgacggtcgacaccggccggctcccggacgcaaccctgcgcttcatcgacgaggcccgggcgcactacccccggacccgctgggacgtgctccacccggacgcggccgaggtccaggcgatggtcgccgagcgcggcgtcgacctgtttcgctccagtgtcgccgaccggatgcggtgctgccaggtccggaaggtccggccgctcacccaggcgctgcgcgggctggacgggtggttcaccgggttgcggcgcgaccagtgggcctcgcgcgcggcgatcaagaaggtcgagctggaccacgaccacggtggcatcgtgaaggtcaacgccctggccgactgggcgagcgccgacgtgtggggctacgtcgaggagcacggtgtcccagtgcatccgctgtacgcgcagggttacacgagcctgggctgcggcccctgcacccgacctgtcgcggtgggagaggacgaccgtgccggtcgctggtggtgggagaagggcgcgcccaaggagtgcggcatccactgcccgatcgagaccggcagcttcgagcacgaggcggcagagatcctggcgtcgtcgacgcacgcgtga

SEQ ID NO: 12245 - protein, 282 aa, Nocardioides sp. JS614
MTTYDRRSTVTIVDARTASNPAERVVFDDLEIGEIAVDLDDQEPEDVIAWALEELGDRIAIVTALQVDGMVVLDMATRLRPDIRVVTVDTGRLPDATLRFIDEARAHYPRTRWDVLHPDAAEVQAMVAERGVDLFRSSVADRMRCCQVRKVRPLTQALRGLDGWFTGLRRDQWASRAAIKKVELDHDHGGIVKVNALADWASADVWGYVEEHGVPVHPLYAQGYTSLGCGPCTRPVAVGEDDRAGRWWWEKGAPKECGIHCPIETGSFEHEAAEILASSTHA

SEQ ID NO: 12246 - DNA, 831 bp, Crocosphaera watsonii WH 8501
  CDS (1)..(831): transl_table=11
atgccccaatctaatctacatctcatcaactctcatgtagataaccatcaggtttccgaacatcactacaacaagcaaactcatcaagcttataaacctgaattatccttaaaagaagttaaccaaagcctagaaaatgccaacgctcaacaggttgtagaatggactagggagacctttggggaaggattagtcatgagtaccagttttggtattcaagctgctgtgatgctgcatctagtgaccgaagtagtgccagatattcccgttatctgggtggatacaggctatcttcctgctgaaacctatcgctttgccgaagaattaaccgaacggctcaaactcaatctcaaggtttatcagtctcctttcacccctgcgagaatggaagcactgtatggtaaactctggaatcaacacgatctaaattctcttaatcgttacgattttctccgaaaagtagaacccatgcaacgagctttgaaagaacttcaagccactgcttggttggcggggttacgtcgtcaacaaacggaacatagacagtccttagaaaaagttgaattacaaggggaaaagtacaaagtttatcctattttaacctgggattctcgcgatatttatcattatttaactgctcatgatttgccttatcatccttattttgataaaggctatgttacggtaggagactggcattctagtcgtccgttgatggctgatgatgaaagtgaaagagatagtcgttttcatggtgttaaacaagagtgtggcctccatttaaacttgtctcctggagcagcagaaagtttagattctagcaccctttaa

SEQ ID NO: 12247 - protein, 276 aa, Crocosphaera watsonii WH 8501
MPQSNLHLINSHVDNHQVSEHHYNKQTHQAYKPELSLKEVNQSLENANAQQVVEWTRETFGEGLVMSTSFGIQAAVMLHLVTEVVPDIPVIWVDTGYLPAETYRFAEELTERLKLNLKVYQSPFTPARMEALYGKLWNQHDLNSLNRYDFLRKVEPMQRALKELQATAWLAGLRRQQTEHRQSLEKVELQGEKYKVYPILTWDSRDIYHYLTAHDLPYHPYFDKGYVTVGDWHSSRPLMADDESERDSRFHGVKQECGLHLNLSPGAAESLDSSTL

SEQ ID NO: 12248 - DNA, 714 bp, Xylella fastidiosa Dixon
  CDS (1)..(714): transl_table=11
atgaccgtacttcccgccttacctcctctggacgatctggaaacgctcaacgtccacctagaaacgctgagtgctgaaaatcgcgtgtgctgggcactgcagcacgcccctgaccaccctgcactgtcttccagcttcggcgcgcaatcggccgtcatgctgcatctactcacccggtttgcaccggatatcccggtcattctggtcgacaccggctatcttttcccagaaacctaccgtttcgccgacacgctgaccgaacgactcaaactcaatctgaaggtataccagccgctgcgtagcggcacttggacggaagcccgtcatggtcgactatgggaacaagggatcgacggaattaatcaatacaacaccctgcacaaggtcgaaccgatgcgccgggcattagaggaattgcaagtcggcacctggtttaccggcctacgtcgcggacaatccagtacccgtacccaaacatcaatcgtgcaacgacgtgacgagcggtacaaaatcagtccaattgtcgactggaccgaccgtgatatctgggaatacatgaaacaccatgatctgccctatcacccgctttgggaacagggctacgtttcaatcggtgacattcacacgacacgccccttggaaccagacatgcgcgaagaagacacacgcttcttcggattcaaacgtgagtgcgggattcacgagaacatctaa

SEQ ID NO: 12249 - protein, 237 aa, Xylella fastidiosa Dixon
MTVLPALPPLDDLETLNVHLETLSAENRVCWALQHAPDHPALSSSFGAQSAVMLHLLTRFAPDIPVILVDTGYLFPETYRFADTLTERLKLNLKVYQPLRSGTWTEARHGRLWEQGIDGINQYNTLHKVEPMRRALEELQVGTWFTGLRRGQSSTRTQTSIVQRRDERYKISPIVDWTDRDIWEYMKHHDLPYHPLWEQGYVSIGDIHTTRPLEPDMREEDTRFFGFKRECGIHENI

SEQ ID NO: 12250 - DNA, 714 bp, Xylella fastidiosa Ann-1
  CDS (1)..(714): transl_table=11
atgaccgtacttcccgccttacctcctctggacgatctagaaatgctcaacgtccacctagaaacgctgagtgctgaaaatcgcgtgcgctgggcactggagcacggtcctgaccaccctgcactgtcttccagcttcggcgcgcaatcggccgtcatgctgcatctactcacccggtttgcaccggatatcccggtcattctggtcgacaccggctatcttttcccagaaacctaccgtttcgccgacacgctgaccgaacgactcaagctcaatctgaaggtataccaaccgctgcgtagcggcgcttggacggaagcccgtcatggtcgactatgggaacaagggatcgacggaattaatcaatacaacaccttgcacaaggtcgaaccgatgcgccgggcattagaggaattgcaagtcggcacctggtttacaggcctacgtcgcggacaatccagtacccgtacccaaacatcaatcgtgcaacgacgtgacgagcggtacaaaatcagtccaattgtcgactggaccgaccgtgatatctgggaatacatgaaacaccatgatctgccctatcacccgctttgggaacagggctacgtttcaatcggtgacattcacacgacacgccccttggaaccagacatgcgcgaggaagacacacgcttcttcggattcaaacgtgagtgcgggattcacgagaacatctaa

SEQ ID NO: 12251 - protein, 237 aa, Xylella fastidiosa Ann-1
MTVLPALPPLDDLEMLNVHLETLSAENRVRWALEHGPDHPALSSSFGAQSAVMLHLLTRFAPDIPVILVDTGYLFPETYRFADTLTERLKLNLKVYQPLRSGAWTEARHGRLWEQGIDGINQYNTLHKVEPMRRALEELQVGTWFTGLRRGQSSTRTQTSIVQRRDERYKISPIVDWTDRDIWEYMKHHDLPYHPLWEQGYVSIGDIHTTRPLEPDMREEDTRFFGFKRECGIHENI

SEQ ID NO: 12252 - DNA, 804 bp, Erythrobacter sp. NAP1
  CDS (1)..(804): transl_table=11
atgaataagccccccgaacgtctcgaagcgccattcaccaccgacgaagcccgcgcacgtgcagtcgaccggctcgacacggggccgcgcttcaccgaacacgatgcggtgcgcctcaatcgcatgttccgcggctcatcgacgcaagagatgctcgaggcggtgatccagggacatctcgctggcgatatagcgatcgtatcgagtttcggtgccgagagcgcggtgctgctgcacctcgttgcgcaggtgaagccggacattccggtcctctttctcgacaccggcaagcattttgccgagacccttgaatatcgcgacgaggtggtcgcaaagatcggcctcaccaatctccagattctcactccggacgaagcggagctggccgaaaaggacgaaagcggtcttcgctggtcctacgaccccgatggctgctgcgagatccgcaaggtcaaaccgctggcgaaagcgctcgaccagttcgatgcaagctttaccgggcgcaaggcgttccagtcctcgaccagagccaatctgccgcgtttcgaaatcgacacgtccgacgcgcagggccgtctcaagatcaatccgctgatcgactgcagcgcagaggatatcggcgcctatttcgaggagcacgacctgcctcgccacccgctggtcgcacgtggcttcccctcgatcgggtgcgagccgtgcactcacaaggtcgcgccgggcgaagatccgcgctcaggccgttggaagggctgggacaagaccgaatgcggcatccacaagccgggcgaggaaccgttcttataa

SEQ ID NO: 12253 - protein, 267 aa, Erythrobacter sp. NAP1
MNKPPERLEAPFTTDEARARAVDRLDTGPRFTEHDAVRLNRMFRGSSTQEMLEAVIQGHLAGDIAIVSSFGAESAVLLHLVAQVKPDIPVLFLDTGKHFAETLEYRDEVVAKIGLTNLQILTPDEAELAEKDESGLRWSYDPDGCCEIRKVKPLAKALDQFDASFTGRKAFQSSTRANLPRFEIDTSDAQGRLKINPLIDCSAEDIGAYFEEHDLPRHPLVARGFPSIGCEPCTHKVAPGEDPRSGRWKGWDKTECGIHKPGEEPFL

SEQ ID NO: 12254 - DNA, 762 bp, Synechococcus sp. WH 5701
  CDS (1)..(762): transl_table=11
atgatggaggccatgatcagcctcaccacgaccccgttgccgacggatcggctgggccggactgtcgagccggaaccggccctgcgccttctggagccccttgatgccgctgggcaactggcctggggttacgaaaccttcggcgaggggttcgcgctcaccaccagtttcgggatccagtcggcggtgctgctgcacatggccagccgcctcagcgagaggatccccgtgctctgggtggacacgggctacctgcccagcgagacctacctctatgccgacaggctctgcaccgccctcaatctgaatctcaaggtggcgcaggcggatctctccccggcccggatggaggcgctctacggccgcctctgggaaaccggtggggtggaagaccttcagacttaccaccgcctgcgcaaggtggagcccctggatcggctcttccaggagctgggtgtgcattgctgggccagtggggtgcgcggtggccagaccgatcaccgcggcgccatggcccccctcgatggggtgcgcgggcgctggtcgcttcgacccctgctctcctgggggcctcgccaggtcttctattacatggagagccatgccctgccccagcacccgctgttcgagcagggctactccagcgtgggcgactggcattccagccgacctgacgatggtgacggccgcgccagccgcttcggggggctgaagcaggaatgcggcatccatctgccgggagtgatgggcgagggcatctga

SEQ ID NO: 12255 - protein, 253 aa, Synechococcus sp. WH 5701
MMEAMISLTTTPLPTDRLGRTVEPEPALRLLEPLDAAGQLAWGYETFGEGFALTTSFGIQSAVLLHMASRLSERIPVLWVDTGYLPSETYLYADRLCTALNLNLKVAQADLSPARMEALYGRLWETGGVEDLQTYHRLRKVEPLDRLFQELGVHCWASGVRGGQTDHRGAMAPLDGVRGRWSLRPLLSWGPRQVFYYMESHALPQHPLFEQGYSSVGDWHSSRPDDGDGRASRFGGLKQECGIHLPGVMGEGI

SEQ ID NO: 12256 - DNA, 753 bp, Synechococcus sp. WH 7805
  CDS (1)..(753): transl_table=11
atgacgagcgctgccgcggacttggactccagtggtgaatccgcgctcttgacgcatcagagagtccacctggaggcactcgagcctgttcaacgcttgcagtgggcgaagcagcacttcggtgcgggtttcgcaatgacaacgagcttcggcattcagtcttccgtgcttctccacatgctgagctctctgccggacgctgaggcagttccagtgatctgggtggataccggttacttaccgccggatacttatcaatatgcagacaaattgtgtgagctgttccacctccaaccggttgtggtccagtcaccgatgtctccggcaaggatggaagccctgcacgggcgtctctgggaaaccggaaaagacagcgaccttgacctctatctgcgtctacgcaagcttgagccgcttgaaagtgcactcgatcagttggctgtgacctgctgggccagtggggtgcgcagcgggcagaccgaccaccgacgcacgatgacggtgatcgatgaaatccgcggtcgctactccctcaggccgctcctgcattggaccaaccgagacatgtattactacatgcaagagcatgagcttccccagcaccctctgtttgaacgtggatactccaccgtcggtgattggcattcgagtgcgcctgacagcggcactgtcgtgggtcgcagcacacgcttcggagggcagagacaggaatgcggaattcacctgccgggggtgatgggcgaaggcatctga

SEQ ID NO: 12257 - protein, 250 aa, Synechococcus sp. WH 7805
MTSAAADLDSSGESALLTHQRVHLEALEPVQRLQWAKQHFGAGFAMTTSFGIQSSVLLHMLSSLPDAEAVPVIWVDTGYLPPDTYQYADKLCELFHLQPVVVQSPMSPARMEALHGRLWETGKDSDLDLYLRLRKLEPLESALDQLAVTCWASGVRSGQTDHRRTMTVIDEIRGRYSLRPLLHWTNRDMYYYMQEHELPQHPLFERGYSTVGDWHSSAPDSGTVVGRSTRFGGQRQECGIHLPGVMGEGI

SEQ ID NO: 12258 - DNA, 741 bp, Pseudoalteromonas tunicata D2
  CDS (1)..(741): transl_table=11
atgaatactttcaaacaaattttaacgcttgacccgcaaagccaaaccgaactattggctgaagcgaatgcgctgcttgctgataaaacagcagagcaacgagtagcttgggcgcttgaaaatctcccagacactcattttctatcatctagttttggcatccaagcggctgttatgttgcatttactcacaagccaaaaaccagatattcctgtggttttaaccgatactggttacctatttcctgaaacatatcagttcattgactcattaactgagcgcttaaatctcaacctcaaagtctatcgctcaacacatagccctgcatggcaagaagccaaatatggcaaattgtgggagcaagagggtgaaggtttaaagcaatataattacttaaataaagtagagccaatgacacgcgcgttaaaagagcttaacgctggcacttggtatagtggtttgcgacgcgggcaatcatcaacccgtgcagataaaaatattgttgaactaagccgtggcacggtaaagttttatccaatcattgattggcacaaccgcgacgtttatcaatacctgacaaaacatgaattaccttatcaccctctttgggagcatggttatgtgtctatgggtgatgtacacaccactcgtaaactagagcctggtatgaccgaagaagaaacccgcttctttggtttaaatcgcgaatgtggtcttcacatcgatggtgatggcatctaa

SEQ ID NO: 12259 - protein, 246 aa, Pseudoalteromonas tunicata D2
MNTFKQILTLDPQSQTELLAEANALLADKTAEQRVAWALENLPDTHFLSSSFGIQAAVMLHLLTSQKPDIPVVLTDTGYLFPETYQFIDSLTERLNLNLKVYRSTHSPAWQEAKYGKLWEQEGEGLKQYNYLNKVEPMTRALKELNAGTWYSGLRRGQSSTRADKNIVELSRGTVKFYPIIDWHNRDVYQYLTKHELPYHPLWEHGYVSMGDVHTTRKLEPGMTEEETRFFGLNRECGLHIDGDGI

SEQ ID NO: 12260 - DNA, 765 bp, Photobacterium sp. SKA34
  CDS (1)..(765): transl_table=11
atggctaaatttcaactggctgagttacttgagctgcctaaagtgagtcaaattattcagctggctgaaatcaatgccgagctggaggatatgacggcagagcagcgagtaagctgggctatcgacaaccttgaaggtggattttcactagcatcaagttttggtattcaatctgctgttatgttgcatttagttacaacagtaaagcccgatattcctgtggtattaaccgatacggggtatttatttcctgaaacgtatcagtttattgatagcttaacgaaacgattagatcttaatcttcatgtctacagcgcaaaacaaagcgccgcatggcaagaagcacgttatggtcaactgtggttgcaaggggttgatggcattaagcaatataatttgcttaataaagttgagccaatgcgtcgagcattagatgaactgcaagtgaaaacatggttttctgggctacgtcgtgaacaatcaaactcacgtgcgacattgccagtattagcgatccaaaatgggcgctttaagttcctgccattaattgattggagtaatgagcaaatcgatctgtatttacaacagcatgatttgccttatcacccattaaaagcgcaagactatctttctgtcggtgatatccatacgacagttaagtggcaaccggggatgaaagaagaagaaacgcgattcttcggtctaaaacgtgagtgtggtttacatgaagacagcgacacagaagcggatggttcaggaatttaa

SEQ ID NO: 12261 - protein, 254 aa, Photobacterium sp. SKA34
MAKFQLAELLELPKVSQIIQLAEINAELEDMTAEQRVSWAIDNLEGGFSLASSFGIQSAVMLHLVTTVKPDIPVVLTDTGYLFPETYQFIDSLTKRLDLNLHVYSAKQSAAWQEARYGQLWLQGVDGIKQYNLLNKVEPMRRALDELQVKTWFSGLRREQSNSRATLPVLAIQNGRFKFLPLIDWSNEQIDLYLQQHDLPYHPLKAQDYLSVGDIHTTVKWQPGMKEEETRFFGLKRECGLHEDSDTEADGSGI

SEQ ID NO: 12262 - DNA, 723 bp, Oceanospirillum sp. MED92
  CDS (1)..(723): transl_table=11
atgagtgagcaactaactgcagagctgcaagctaaagttgaagcaacagcggctctactgaacaaaggccatgctgatcatgagggatcgctggtttttgcaaacagcctgggggctgaagatgtcgtcattgctgacctgatcagcaagcactgtcctgaaattcgtaactttgtcttggatacaggtcgcttacctgaagagacattgaagcttctcgatgatgtacgtaagcaatatccagcgttgcaggttgatgtttattaccctgaagctgcggatgtcgaaggctatgtcgctgaaaatggcatcaacgctttctacgactctcaggatctgcgtaagggctgctgctttgtacgtaaaatcaagcccttaaaacgtgcactttccggcaacaaggcctggattacaggcctgcgccgtgaacagtccgtaacccgtgatgagattcagttcgaagagtgggatgaaggcaacaacatgcacaaactcaaccctctggctgactggtctgagaaagaagtttgggcatatatcaaagcttatgatgtcccttacaacgagctgcatgacaagcattaccccagcataggctgcgcaccttgtacacgcgccatctcaatgggtgaagatgtacgttctggtcgttggtggtgggaaaaccctgaaaatcgcgagtgcggattacatcctgcaacaccgctgaatttcaagaagtaa

SEQ ID NO: 12263 - protein, 240 aa, Oceanospirillum sp. MED92
MSEQLTAELQAKVEATAALLNKGHADHEGSLVFANSLGAEDVVIADLISKHCPEIRNFVLDTGRLPEETLKLLDDVRKQYPALQVDVYYPEAADVEGYVAENGINAFYDSQDLRKGCCFVRKIKPLKRALSGNKAWITGLRREQSVTRDEIQFEEWDEGNNMHKLNPLADWSEKEVWAYIKAYDVPYNELHDKHYPSIGCAPCTRAISMGEDVRSGRWWWENPENRECGLHPATPLNFKK

SEQ ID NO: 12264 - DNA, 789 bp, Synechococcus sp. RS9916
  CDS (1)..(789): transl_table=11
atgactgaaggcctcaccactgccgccgcggcacgacaaacgtcatccgcggctgccgggtcggccgaggatgcggcattgctggagcagcttgctcctgtcgaacggttggcctgggcgcacgaacgctttggcaatggttttgcgatcaccaccagttttgggatccagtcgtcggtcttgctgcacatgctcagcaccttggatggtgccgaggcaatcccggtgatctgggtcgacactggatatcttcccgaggagacctaccgctacgccgctcagctgtgcgatcgctttcagctcaacctccgggtggcccagagcgagctttcccctgcgcggatggaagctctgcacggccagctgtgggacaccggcaaagtcgaagacctgcagctctatcaccagatccgcaaagtggagcctttggaagccgcaatggcctccctcgacgtccagtgctgggccagtggtgtgcgtcgggggcagacggatcaccgcagctccatggagtggctcgaacccattcgaggtcgtctttccttgaggcctttgctcagctggaccccgcgagacgtcttctattacatgcaggagcacgaactaccgcagcatcccctgttcgatcagggctactccactgttggcgattggcactccagtgctcctgacggtgccgaacaatccgggcgaagcacccgtttcggtgggctcaagcaggaatgcggcattcatctgccggggagcgggtccgagggtctctcgggtttggctggcgaaggcatctag

SEQ ID NO: 12265 - protein, 262 aa, Synechococcus sp. RS9916
MTEGLTTAAAARQTSSAAAGSAEDAALLEQLAPVERLAWAHERFGNGFAITTSFGIQSSVLLHMLSTLDGAEAIPVIWVDTGYLPEETYRYAAQLCDRFQLNLRVAQSELSPARMEALHGQLWDTGKVEDLQLYHQIRKVEPLEAAMASLDVQCWASGVRRGQTDHRSSMEWLEPIRGRLSLRPLLSWTPRDVFYYMQEHELPQHPLFDQGYSTVGDWHSSAPDGAEQSGRSTRFGGLKQECGIHLPGSGSEGLSGLAGEGI

SEQ ID NO: 12266 - DNA, 780 bp, Vibrio sp. Ex25
  CDS (1)..(780): transl_table=11
atgcttgattctgtagcatccaggcttgagcttacagagttattgacattaacaaagacggagcaaatcctccgtcttgctcaaattaatgtcgagctcgaaaagctttcggcacaagatagagtaaagtgggctttagaaaatctagagggcgagtttgcggtttcttctagttttggtattcaagccgcggttatgcttcatttagtgactcaagtcaaagcggatatccccgtcattctaaccgatacaggatacctgtttgctgaaacctatcaattcattgatgagctgacagatgctctcaacctaaacttaaaagtttatcgagcgaaagaaagtgcgaattggcaagaggctcgatatggaaagttatgggagcagggtgtagagggaattgaaaaatacaacaagctcaataaagtggagccaatgcgtcgagcgctaaaagagcttaatgttggaacgtggttctctggactgcgtcgagagcaaagtaaatctcgtgcaggtttaccgattctatcaattcagaacggtgtgtttaaatttctaccagtaattgattggactaataaagacgttcattactacttagaacaacacggccttaaataccacccattgtgggatgaaggttacctttcagttggtgatacacataccactcgtaaatgggagccgggaatgtcagaggaagaaactcgattctttggcttaaagcgagaatgtggcctacacgaagatgatggttctgaacaagatgggtctggcatatag

SEQ ID NO: 12267 - protein, 259 aa, Vibrio sp. Ex25
MLDSVASRLELTELLTLTKTEQILRLAQINVELEKLSAQDRVKWALENLEGEFAVSSSFGIQAAVMLHLVTQVKADIPVILTDTGYLFAETYQFIDELTDALNLNLKVYRAKESANWQEARYGKLWEQGVEGIEKYNKLNKVEPMRRALKELNVGTWFSGLRREQSKSRAGLPILSIQNGVFKFLPVIDWTNKDVHYYLEQHGLKYHPLWDEGYLSVGDTHTTRKWEPGMSEEETRFFGLKRECGLHEDDGSEQDGSGI

SEQ ID NO: 12268 - DNA, 741 bp, Alteromonadales bacterium TW-7
  CDS (1)..(741): transl_table=11
atgagtgaatttaaaaatatattacagctagataaacaaagccaagcggctatgttagctgatgctaatggtgtattagcaaatatgagcgcagagcaacgtgttgcgtgggcgcttgaaaatttacccgataccgcgtttctatcgtcaagctttgggattcaagctgcggtgatgttgcatttaatgacaacccaacgcccagacattcctgttgtattaacagacaccggttatttgttccctgagacgtaccagtttattgagcaaatgagcgagcgtttgtcacttaatttaaaagtgtacaaggcgcagctgagcccagcatggcaagaagctaagtttggaaagttatgggagcaaggtgaggacggtattaagcaatataatcagcttaataaagttgagccaatgactcgcgctttaaaagaaattgaagcgggtacctggtttagtggtttacgtcgcgatcaatcttctacccgtgcagataagcagtttgtagaaataagccgtggtacggtaaaagtgtacccgattattgaatggtcaaaccgcgatgtatatcaatacctaactaagcatgacttaccttaccacccattatgggagcaagggtatgtatcaatgggcgatgtacacactacacgcaaactagagccaggcatgactgaagaagaaacccgcttttttggtttaaaccgtgaatgcggtcttcatatggatggtgatggtatttag

SEQ ID NO: 12269 - protein, 246 aa, Alteromonadales bacterium TW-7
MSEFKNILQLDKQSQAAMLADANGVLANMSAEQRVAWALENLPDTAFLSSSFGIQAAVMLHLMTTQRPDIPVVLTDTGYLFPETYQFIEQMSERLSLNLKVYKAQLSPAWQEAKFGKLWEQGEDGIKQYNQLNKVEPMTRALKEIEAGTWFSGLRRDQSSTRADKQFVEISRGTVKVYPIIEWSNRDVYQYLTKHDLPYHPLWEQGYVSMGDVHTTRKLEPGMTEEETRFFGLNRECGLHMDGDGI

SEQ ID NO: 12270 - DNA, 735 bp, Klebsiella pneumoniae
  CDS (1)..(735): transl_table=11
atgtccgtactcgatctaaacgcgcttaatgcattgccgaaagtggaacgcattctggcactcgcggaaaccaacgcccaactggaaaagcttgacgccgaagggcgtgtggcgtgggcgctggaaaatctgccgggaaactatgtgctgtcgtcgagctttggcattcaggcggcagtcagtttgcatctggtgaatcagatccgcccggatattccggtgatcctcaccgataccggctacctgttcccggaaacctatcagtttattgacgagctgacggacaagctcaagctgaacctgaaggtctaccgcgcggctgaaagcgcagcctggcaggaggcgcgctacggcaagctgtgggagcagggcgttgagggcattgagaaatacaatgagatcaacaaggttgagccgatgaaccgggcgctgaaagagctcaacgcgcagacgtggtttgccggtctgcgccgcgagcagtcgggcagccgggctacgcttccggtgctggcggtccagcgcggggtgttcaaggtgctaccgattatcgactgggataaccgcacggtgtatcagtacctgcagaagcacgggctgaagtaccatccgctgtgggatcagggctatctctcggtaggcgatacccacaccacccgcaaatgggagccgggcatggcagaagaagagacccggttcttcgggcttaaacgcgagtgcggattgcacgagggttaa

SEQ ID NO: 12271 - protein, 244 aa, Klebsiella pneumoniae
MSVLDLNALNALPKVERILALAETNAQLEKLDAEGRVAWALENLPGNYVLSSSFGIQAAVSLHLVNQIRPDIPVILTDTGYLFPETYQFIDELTDKLKLNLKVYRAAESAAWQEARYGKLWEQGVEGIEKYNEINKVEPMNRALKELNAQTWFAGLRREQSGSRATLPVLAVQRGVFKVLPIIDWDNRTVYQYLQKHGLKYHPLWDQGYLSVGDTHTTRKWEPGMAEEETRFFGLKRECGLHEG

SEQ ID NO: 12272 - DNA, 927 bp, Aspergillus oryzae
  CDS (1)..(927)
atgcctgcaaagatgcctgatacctacccctcccacgctgaggactttgagtccaaggacaatgccacggactctgattatgttagtggtagctcgagtgacgattatctccccgagattgtcttcacgaaaccacatttgcagtttctcaacagacagctgcagttccttgagcctcaagatgtcttgagatggtgtgttacatcactccctcaccttttccagaccaccgcgtttggtcttactggactcgtcactcttgatatgctttccaagctggaggtccctcgccctcagatggtcgacctcatcttcctggacactcttcatcacttctcggaaacccttactctggtcgacaagattcgccagaagtaccccttgaacaacatccatgtctacaagcccaagggcctcaactctgaagaagagtttgccaagaagtacggtgcccgtctatgggaacgggatgatcagctctacgactgggccgccaaggtagagcccgcccagcgtgcctaccgtgaactgaacgttcatgctgtcctcaccggccgtcgccgtagccagggtggtaagcgtggtgaccttgacatcatcgaggttgacgaggctggtcttatcaagatcaaccctctggccaactggactttcgatcaagtcaagcagtacatcaaagacaacgatgtgccctacaatgagctgcttgaccgcggctacaagagcattggtgactaccactctacccaacccgtcaaggaaaacgaggatgaacggtccggtcgctggaagggccaagccaagaccgaatgtggcatccacaaccctcgctccaagtatgcccaatacctgatggagcttgagcgcaagcggcaggaggaggccctgtctcaggcgctgcagaaccaaatgaccactgctcaatga

SEQ ID NO: 12273 - protein, 308 aa, Aspergillus oryzae
MPAKMPDTYPSHAEDFESKDNATDSDYVSGSSSDDYLPEIVFTKPHLQFLNRQLQFLEPQDVLRWCVTSLPHLFQTTAFGLTGLVTLDMLSKLEVPRPQMVDLIFLDTLHHFSETLTLVDKIRQKYPLNNIHVYKPKGLNSEEEFAKKYGARLWERDDQLYDWAAKVEPAQRAYRELNVHAVLTGRRRSQGGKRGDLDIIEVDEAGLIKINPLANWTFDQVKQYIKDNDVPYNELLDRGYKSIGDYHSTQPVKENEDERSGRWKGQAKTECGIHNPRSKYAQYLMELERKRQEEALSQALQNQMTTAQ

SEQ ID NO: 12274 - DNA, 1395 bp, Catharanthus roseus
  CDS (1)..(1395)
atggctttggctttcacttcttcaactgcaattcatggctctctgtcttcttcatttgaacaaacaaaagcagcagcggcgcagtttggttcatttcagcctttggatcggccacatactatatcaccttcggtgaatgtttctcgtagacgtttggccgttaagccaattaacgctgagcctaaaaggaatgagtcaattgtcccctccgcagcaaccaccgttgctcccgaggttgaagagaaagttgatgtggaagactatgagaaattggctgatgagcttcaaaatgcctctcctcttgagatcatggacaagtccctggctaagtttggcaatgatatagctattgctttcagtggggccgaagacgttgccttgatagagtatgcacacttgactggtcgaccattcagagtatttagcttggacacagggagattgaatccggagacatataaattttttgatacggttgagaaacagtatggaattcatattgagtacatgtttcctgatgctgtcgaagttcaggctttagttaggagcaaggggcttttttctttctacgaagatggccaccaagagtgctgccgggtgaggaaggtcaggcccctgcgaagagcccttaagggattacgcgcatggatcactgggcagaggaaagatcagtctcctggcactaggtctgaaattccagttgtccaggttgaccctgtttttgaaggaatggatggtggtgtaggcagcttggtgaagtggaatcctgtggctaatgtggaaggaaaggatatctggaacttcctccgagccatggatgtgccggtgaacacattgcactcacaaggttatgtctcaattggctgtgagccgtgcacgaggccagtccttccagggcagcacgagagggaaggaaggtggtggtgggaagatgccaaagcaaaggaatgtgggttacacaaagggaatatcaaggaggaaactctgaataataatgggaatggagctgttaatggaaatggaagtgatactattgctgatatctttgataccaataatgtaacgagcttgagtaggcctgggattgagaatttgctgaagttggaggaaaggagagaggcatggctagttgtactttacgcaccttggtgccgtttttgccaggcaatggaaggatcatatcttgaattggcagaaaagttggctggttctggtgtaaaagttggaaagtttaaggcagacggtgatcagaaggcatttgcacagcaagaattgcagctgaatagcttccctacaattcttttcttcccaaagcactcatctaagcccataaaatatccatcagagaagagggatgtagactcattgatggcttttgttaatgccctgcgatga

SEQ ID NO: 12275 - protein, 464 aa, Catharanthus roseus
MALAFTSSTAIHGSLSSSFEQTKAAAAQFGSFQPLDRPHTISPSVNVSRRRLAVKPINAEPKRNESIVPSAATTVAPEVEEKVDVEDYEKLADELQNASPLEIMDKSLAKFGNDIAIAFSGAEDVALIEYAHLTGRPFRVFSLDTGRLNPETYKFFDTVEKQYGIHIEYMFPDAVEVQALVRSKGLFSFYEDGHQECCRVRKVRPLRRALKGLRAWITGQRKDQSPGTRSEIPVVQVDPVFEGMDGGVGSLVKWNPVANVEGKDIWNFLRAMDVPVNTLHSQGYVSIGCEPCTRPVLPGQHEREGRWWWEDAKAKECGLHKGNIKEETLNNNGNGAVNGNGSDTIADIFDTNNVTSLSRPGIENLLKLEERREAWLVVLYAPWCRFCQAMEGSYLELAEKLAGSGVKVGKFKADGDQKAFAQQELQLNSFPTILFFPKHSSKPIKYPSEKRDVDSLMAFVNALR

SEQ ID NO: 12276 - DNA, 1687 bp, Arabidopsis thaliana
  CDS (98)..(1465)
aacgaagaagacgaagcaaatctaaaccaaagatctccattttcgtagcttctttaagctttttcagtatcatagagacactttttttttattacaaatggctttagctgttacttcttcttcaactgcaatctctggatcgactttctctcgttctggagcttcttctgaatctaaagctcttcaaatatgttcgattaggttatctgatcgaaaccatttgtctcagagacgttactctatgaaacccttaaacgctgagtcatcacatacaagaagcgaatcttgggttcttcgtgcttcaactctaattgctcctgaagttgaagagaaagaaggagaagttgaagactttgagcaacttgctaaaaagcttgaagatgcttctccacttgaaatcatggataaagctcttgagaaatttggagacgaaatcgcaattgcttttagtggagctgaagatgttgcattgattgaatatgctcgtttaactggaaagccatttagggtttttagtttagatacagggagattaaacccggaaacgtacaggctctttgacgcagtcgagaagcagtacgggattcgaattgagtacatgtttcctgatgcagttgaggttcaagctttagtgaggaacaagggtttgttctcattctatgaagatggtcatcaagagtgttgccgtgtgaggaaagttagacctttgcgtcgtgctcttaagggtcttaaagcttggattacaggacagaggaaagaccaatctccgggtacgagatctgagatccctattgttcaggttgatccagtgtttgaagggttagatggcggtgttggaagtcttgtgaagtggaatcctttggctaatgttgaaggagctgatgtgtggaactttctgagaactatggatgttccggtgaatgcattgcatgcacaaggatatgtgtcaatcgggtgtgagccgtgtactaggcctgtgcttccaggtcagcatgaaagagaaggaaggtggtggtgggaagatgctaaagctaaagaatgtggtctacacaaagggaacatcaaggaggaagatggtgctgcagactcaaagcctgctgctgtgcaagagatatttgaaagcaacaatgtggttgcattgagcagaggaggggttgagaatcttttgaagctagagaaccgtaaagaggcgtggctggtcgtactttacgctccttggtgccctttctgccaggcgatggaagcatcgtacgtcgaattggctgagaaacttgcgggaaaaggagttaaagtggcgaaattccgagctgacggtgagcagaaggagtttgctaagcaagagcttcagttaggaagcttcccgacgatacttctctttccgaaaagagctccacgggctattaagtacccttcagagcatagagatgttgattcactcatgtcgtttgtgaatcttcttcggtgagttatgagattagaaaagaaaaacagtgtgatgaagaatgaaagagaattgagatgaaggagtgatttcatcttggttataatattgtggacggcagagaataaacaagagttattactcttctacatgactttgtatatttgtattgtaggggtttttatagactctttttgttacctctatgtatcttttttggtctacttttgagttctactattgttt

SEQ ID NO: 12277 - protein, 455 aa, Arabidopsis thaliana
MALAVTSSSTAISGSTFSRSGASSESKALQICSIRLSDRNHLSQRRYSMKPLNAESSHTRSESWVLRASTLIAPEVEEKEGEVEDFEQLAKKLEDASPLEIMDKALEKFGDEIAIAFSGAEDVALIEYARLTGKPFRVFSLDTGRLNPETYRLFDAVEKQYGIRIEYMFPDAVEVQALVRNKGLFSFYEDGHQECCRVRKVRPLRRALKGLKAWITGQRKDQSPGTRSEIPIVQVDPVFEGLDGGVGSLVKWNPLANVEGADVWNFLRTMDVPVNALHAQGYVSIGCEPCTRPVLPGQHEREGRWWWEDAKAKECGLHKGNIKEEDGAADSKPAAVQEIFESNNVVALSRGGVENLLKLENRKEAWLVVLYAPWCPFCQAMEASYVELAEKLAGKGVKVAKFRADGEQKEFAKQELQLGSFPTILLFPKRAPRAIKYPSEHRDVDSLMSFVNLLR

SEQ ID NO: 12278 - DNA, 1923 bp, Zea mays
  CDS (75)..(1475)
gtcgaaacacattttcttgctccagagaatttaaccgctgcgaattcaattcgaaagccccaagagaagcatccatggcttccgctaccacctccatctcgtcgcaccccgccgccctccgcgacgtcaaagctgcgaggattggcgggctgaggcagcagcaggcgagcgtggccccgtcggcggcggcagcgcgtggccagcgcgctcgggcggtgcgatcgctgcgcgcggcggagcctgcgaggcagccggtggcggcttccgcggccgcggcggcgccggccgcgcccgtggccgacgaggcggcggcccttgcggccgtggactacgaggccctggcgcgtgagctggagggcgcgtcgccgctggagatcatggatcgggcgctggccatgttcggctccgaaatcgccatcgccttcagcggcgcggaggacgtggcgctgatcgagtacgccaagctgacggggcgtccgttccgggtgttcagcctggacacggggcgtctgaacccggagacgtaccagctattcgacaaggtggagaagcactacggcatccgcatcgagtacatgttcccggacgcgagcgaggtgcaggagctggtgcgcaccaagggcctcttctccttctacgaggacggccaccaggagtgctgccgcgtgcgcaaggtgcggcccctgcgcagggcgctcagggggctcagggcgtggatcaccggccagaggaaggaccagtcccccggcaccagggccagcatccctctggtccaggttgacccttccttcgaaggcctggacggcggggctggtagcttggtcaagtggaaccccgtggccaacgtcgacggcaaggacatctggactttcctgcggaccatggacgtccctgtcaacgccctgcacgcccagggctacgtgtccatcgggtgcgagccgtgcaccaggcctgtcctgccggggcagcacgagcgggaaggccggtggtggtgggaggacgccaaggccaaggagtgcggcctccacaagggcaacatcgacaaggacggccaggcggcggcggcggcggcggcccccaggactgccaacggcaacggctcggcgggcgccccggacatcttcgagagccccgccgtcgtgtccctcacccgcgccggggtcgagaacctgctgcgcctggagagccgcgccgagccgtggctcgtggtgctgtacgcgccctggtgcccgttctgccaggccatggaggcctcctacgtggagctggccgagaggctggcggggtccggcggcgtgaaggtggcccggttccgcgccgacggcgagcagaagccgttcgcgcaggccgagctgcagctgcagagcttccccaccgtgctcctgttccccagccgcaccgcccggcccatcaagtacccgtcggagaagagggacgtcgactcgctcctcgccttcgtcaacagcctccggtgaggcccgccagtgagcgagaaccatcgttctctgtcagtatgtactgtattacatgttggtatccatctaggtgcgctgtacgtagagagggaggcggagggaactgggatgctagaaaaaacagatgcaggtgttgcttgtaactgcagaatgatggtaggtatgcatgaagtctgaggtcctgtgttatttggcagctgagggagagatttgtgcgtgcttgtagttgtagctagtggcgatggagtattctaaggaaaatcaaataagaatcgaagttttgagaaaaaatgtttgttcatgttggctgtcaattatgtagacagtagaaagcgaatcagtttaatcccagcaagaatctgggaattttctgttgttgctttgtgctcgcacgagcagcagagctagcactggcatgcatggcactgttgtgaattggaattctacg

SEQ ID NO: 12279 - protein, 466 aa, Zea mays
MASATTSISSHPAALRDVKAARIGGLRQQQASVAPSAAAARGQRARAVRSLRAAEPARQPVAASAAAAAPAAPVADEAAALAAVDYEALARELEGASPLEIMDRALAMFGSEIAIAFSGAEDVALIEYAKLTGRPFRVFSLDTGRLNPETYQLFDKVEKHYGIRIEYMFPDASEVQELVRTKGLFSFYEDGHQECCRVRKVRPLRRALRGLRAWITGQRKDQSPGTRASIPLVQVDPSFEGLDGGAGSLVKWNPVANVDGKDIWTFLRTMDVPVNALHAQGYVSIGCEPCTRPVLPGQHEREGRWWWEDAKAKECGLHKGNIDKDGQAAAAAAAPRTANGNGSAGAPDIFESPAVVSLTRAGVENLLRLESRAEPWLVVLYAPWCPFCQAMEASYVELAERLAGSGGVKVARFRADGEQKPFAQAELQLQSFPTVLLFPSRTARPIKYPSEKRDVDSLLAFVNSLR

SEQ ID NO: 12280 - DNA, 1386 bp, Zea mays
  CDS (1)..(1386)
atggcttccgctaccacctccatctcgtcccaacacgccgccctccgcgacgtcaaagctgcgaggattggcgggctgaggcagcagcaggcgagcgtggccccgtcggcggcggcggcgcgtggccagcgcgctcgggcggtgcgatcgctgcgcgcggcggagcctgcgaggcagccggtggcggcttccgcggccgcggcggcgccggtcgcgcccgtggccgacgaggcggcggcccttgcggccgtggactacgaggccctggcgcgtgagctggagggcgcgtcgccgctggagatcatggatcgggcgctggccatgttcggctccgaaatcgccatcgccttcagcggcgcggaggacgtggcgctgatcgagtacgccaagctgacggggcgtccgttccgggtgttcagcctggacacggggcggctgaatccggagacgtaccagctattcgacaaggtggagaagcactacggcatccgcatcgagtacatgttcccggacgcgagcgaggtgcaggagctggtgcgcaccaagggcctcttctccttctacgaggacggccaccaggagtgctgccgggtgcgcaaggtgcggcccctgcgcagggcgctcaaggggctcagggcatggatcaccggccagaggaaagaccagtcccccggcaccagggccagcatccccattgtccaggttgatccttccttcgaaggcctggatggcggggccggtagcttggtcaagtggaaccccgtggccaacgtcgacggcaaggacatctggactttcctgcggaccatggacgtacctgtcaacaccctgcatgctcagggctacgtgtccatcgggtgcgagccgtgcaccaggcccgtcctgccggggcagcacgagcgtgaaggccggtggtggtgggaggacgccaaggccaaggagtgcggcctccacaagggcaacattgacaaggacgcccaggcggcggcccccaggtccgccaacggcaacggctcggcgggcgccccggacatcttcgagagccccgccgtggtgtccctcacccgcaccgggatcgagaacctgctgcgcctggagaaccgcgccgagccgtggctcgtggtgctgtacgcgccctggtgcccgttctgccaggccatggaggcctcctacgtggagctggccgagaagctggcggggtccggggtgaaggtggccaagttccgcgcggacggcgagcagaagccgttcgcgcaggccgagctgcagctgcagagctttcccaccgtgctcctgttcccgggccgcaccgccaggcccatcaagtacccgtcggagaagagggacgtcgactcgctcctcgccttcgtcaacagcctccggtga

SEQ ID NO: 12281 - protein, 461 aa, Zea mays
MASATTSISSQHAALRDVKAARIGGLRQQQASVAPSAAAARGQRARAVRSLRAAEPARQPVAASAAAAAPVAPVADEAAALAAVDYEALARELEGASPLEIMDRALAMFGSEIAIAFSGAEDVALIEYAKLTGRPFRVFSLDTGRLNPETYQLFDKVEKHYGIRIEYMFPDASEVQELVRTKGLFSFYEDGHQECCRVRKVRPLRRALKGLRAWITGQRKDQSPGTRASIPIVQVDPSFEGLDGGAGSLVKWNPVANVDGKDIWTFLRTMDVPVNTLHAQGYVSIGCEPCTRPVLPGQHEREGRWWWEDAKAKECGLHKGNIDKDAQAAAPRSANGNGSAGAPDIFESPAVVSLTRTGIENLLRLENRAEPWLVVLYAPWCPFCQAMEASYVELAEKLAGSGVKVAKFRADGEQKPFAQAELQLQSFPTVLLFPGRTARPIKYPSEKRDVDSLLAFVNSLR

SEQ ID NO: 12282 - DNA, 1386 bp, Solanum lycopersicum
  CDS (1)..(1386)
atggctttgactttcacttcttcatctgcaattcatggctctttgtcttcttcatcttcttcttatgaacaacccaaagtatcccaattgggtacctttcagccattggataggcctcaactattgtcgtcaactgttttgaattctcggaggcgttcggcagtgaagccattgtatgctgaacctaagaggaatgattcaatagttccgtcagcagctaccatcgtggctcctgaggtaggagagagtgttgaggcagaggactttgagaaattggctaaggagcttcaaaatgcttcccctcttgaggttatggacaaagcacttgagaaatttggagatgacattgctattgctttcagtggtgctgaagatgttgctttgatagagtacgcacatttaactggacgaccatacagagtattcagccttgatactgggaggttgaacccggagacataccaattatttgacacagtggagaagcactatggcattcgcattgaatacatgttccctgattcagttgaagttcaggcgttggttaggaccaaagggcttttctctttctatgaggatggccaccaagagtgttgccgtgtaaggaaggttaggcctttgaggagagctctaaagggcttacgcgcctggatcacaggccagcgtaaagatcagtcccctggaactcgatcagaaatccccattgttcaggtggacccttcttttgaggggttggatggcggtgctggtagcttggtgaagtggaaccctgtggctaatgtggacggaaaagatatttggaacttcctgcgtgccatgaatgtgcctgtgaactcattgcattcacaaggatatgtatccattggatgcgaaccttgcacaaggccagttctaccagggcaacacgagagagagggaagatggtggtgggaagatgccaaggccaaggagtgtggcttgcacaagggcaacatcaaggatgaaactgtaaatggcgctgcccaaacaaatggtactgctaccgttgctgatatttttgataccaaggacattgttaccttgagtaagcctggagttgagaacctagtaaaattggaagaccgaagagagccttggctcgttgttctttatgcaccttggtgccaattttgccaggcaatggaaggatcctatgttgaattggctgagaagttggctggttctggtgtgaaagtagggaaattcagggcagatggtgaccagaaagcatttgcacaagaagaattgcagcttggcagcttccctacaatactcttcttcccaaagcactcttcaaaggccattaagtacccttcagagaagagggacgtagactccttgctggcttttgtgaatgctctcagatga

SEQ ID NO: 12283 - protein, 461 aa, Solanum lycopersicum
MALTFTSSSAIHGSLSSSSSSYEQPKVSQLGTFQPLDRPQLLSSTVLNSRRRSAVKPLYAEPKRNDSIVPSAATIVAPEVGESVEAEDFEKLAKELQNASPLEVMDKALEKFGDDIAIAFSGAEDVALIEYAHLTGRPYRVFSLDTGRLNPETYQLFDTVEKHYGIRIEYMFPDSVEVQALVRTKGLFSFYEDGHQECCRVRKVRPLRRALKGLRAWITGQRKDQSPGTRSEIPIVQVDPSFEGLDGGAGSLVKWNPVANVDGKDIWNFLRAMNVPVNSLHSQGYVSIGCEPCTRPVLPGQHEREGRWWWEDAKAKECGLHKGNIKDETVNGAAQTNGTATVADIFDTKDIVTLSKPGVENLVKLEDRREPWLVVLYAPWCQFCQAMEGSYVELAEKLAGSGVKVGKFRADGDQKAFAQEELQLGSFPTILFFPKHSSKAIKYPSEKRDVDSLLAFVNALR

SEQ ID NO: 12284 - DNA, 1075 bp, Selaginella lepidophylla
  CDS (10)..(933)
gttgaggagatggcaacgacaacgacggcggctatggcgctagggcaggtatcgtccttgttcaatcaacctcaacatgcacgatcgtctctcagctggaggggcggtgtgcgagtcaacttcgttcaagcttgcgcttctaagagcgctgtcaatgccgccagtgcaaccgaggtgaaggagagcgtcgacatcaagcagtggaatgagcaaatatacgaaggtagacagcagcacttgcaatcgcaggctatggatgcactgaagaagtcactgtcgagcttcaaaaatccgacgttcccgtgtgcgttgattctgggggatgtggttcttttggatcttctacacagagttggtgctttagagaatggagctgtcaaagttgtatttattgacaccttccatttgtttccggagacatatgacttcctgaagactgttgaggaacggtacaagttcaaggcgcatgttttccatgcagcgggcttcaagaatcgggaagagtacgtcgcaaagcatggttccgacctctacatccgagatgttgatgagtacgacaagatctgcaaagttgagccttttaatcgagcactggcaacgctagaggtggatgcgatgataaacgggagacgaagagatcacggtgcagaaagggctcatttggaggttgttcaagacggtaagatggtgagcgttcagcctttggcgtactgggaattcagggactgctggaactatttaacaaagaacaacataccgtatcatccccttcacgataagggctatccaagcgttggagatatccagagcacattgcctgttccgaaagagaaatggttcgagtatggggcagagcggtctggacgttttcagggaatgacgaacaaggatggttcgctgaagactgaatgtggaattcattcgcagaagtagttgctgtccgattctttttggggtccgagcttttgatttgagagagcttttgatttgagagagctaagtatactgcttctaacatccttgcagtaaagaataagtcgatgggatttcttatcgcctttccaaatttccaaaa

SEQ ID NO: 12285 - protein, 307 aa, Selaginella lepidophylla
MATTTTAAMALGQVSSLFNQPQHARSSLSWRGGVRVNFVQACASKSAVNAASATEVKESVDIKQWNEQIYEGRQQHLQSQAMDALKKSLSSFKNPTFPCALILGDVVLLDLLHRVGALENGAVKVVFIDTFHLFPETYDFLKTVEERYKFKAHVFHAAGFKNREEYVAKHGSDLYIRDVDEYDKICKVEPFNRALATLEVDAMINGRRRDHGAERAHLEVVQDGKMVSVQPLAYWEFRDCWNYLTKNNIPYHPLHDKGYPSVGDIQSTLPVPKEKWFEYGAERSGRFQGMTNKDGSLKTECGIHSQK

SEQ ID NO: 12286 - DNA, 708 bp, Streptomyces sp
  CDS (1)..(708): transl_table=11
atgacggtcactcaggacgcgaccgcggccgacctgaaggcactcgccgagcaggccggccgtgatctggaggacgcctccgcgctggagatcctccgctgggccgtggacaccttcggcgaccgcttctgcgtcacctcctccatggaggacgcggtcgtcgcccacctcgcctcccgggtccgccccggcgtggacgtggtcttcctcgacacgggctaccacttcgaggagaccatcggcacccgcgacgccgtggacgccgtcatggacgtcaacgtcatcaccctgaccccccttcagacggtggccgagcaggacgcggagcacggtccgaggctccacgaccgcgaccccgacctgtgctgcgcgctgcgcaaggtcaagccgctggaggacggtctcaccgcctacggcgcgtgggccaccggcctgcgccgcgacgagtcccccacccgggcgaacaccccggtcgtcggctgggacgagaagcggcagaaggtcaaggtctcccccatcgcccgctggacgcaggacgacgtcgacgcgtacgtcacggagcacggcgtcctcaccaacccgctcctcatggacgggtacgcctcggtcggctgcgccccctgcacccggcgcgtcctggagggcgaggacgcccgcgccggacgctgggccggacgggccaagaccgaatgcgggctgcacggatga

SEQ ID NO: 12287 - protein, 235 aa, Streptomyces sp
MTVTQDATAADLKALAEQAGRDLEDASALEILRWAVDTFGDRFCVTSSMEDAVVAHLASRVRPGVDVVFLDTGYHFEETIGTRDAVDAVMDVNVITLTPLQTVAEQDAEHGPRLHDRDPDLCCALRKVKPLEDGLTAYGAWATGLRRDESPTRANTPVVGWDEKRQKVKVSPIARWTQDDVDAYVTEHGVLTNPLLMDGYASVGCAPCTRRVLEGEDARAGRWAGRAKTECGLHG

SEQ ID NO: 12288 - DNA, 744 bp, Rhodococcus erythropolis
  CDS (1)..(744): transl_table=11
atgacagtggacatttcgcgagcaaccgccgacgagcttcggtccatcgccgagcgcggtgccgtagaactcgacggagccagcgcacaggaactgttgcagtggaccgaggacacgttcggcgacggggcgagcgcagcgacgggggaacgtagcggttacattgttgcgtcgaacatgcaggatggagtgctggttcaccttgccgcacaggtgcatccgggcgtcgacgtactcttcctcgacaccggctaccacttccccgagaccatcggcacgcgtgacgcggtcgagcaggtctacggcgtcaacgtcatcaatgcacgcgcgctggcaagcgtcgccgagcaggatgtcgccgagggcaaggatctgttcgcccgtgatcccaaccgctgctgcgcattgcgcaaggtcgcacccctcaagcagacactgtccggctacagcgcgtgggtgaccggcatccgccgcgtcgaagcgcccacccgcgccaacgcccccctgatctccttcgacgaggccttcggcctcgtgaagatcaacccgatcgctccgtggtcggacgaggagatgcagaactacatcgacaccaattccatcctcgtcaatcctcttgtcgacgagggctatccgtccatcggctgcgcaccctgcaccagcaagccagcccccggcagcgatccgcgtagcggtcgttgggccggtgcctccaagacagaatgcgggttgcacgcatcatga

SEQ ID NO: 12289 - protein, 247 aa, Rhodococcus erythropolis
MTVDISRATADELRSIAERGAVELDGASAQELLQWTEDTFGDGASAATGERSGYIVASNMQDGVLVHLAAQVHPGVDVLFLDTGYHFPETIGTRDAVEQVYGVNVINARALASVAEQDVAEGKDLFARDPNRCCALRKVAPLKQTLSGYSAWVTGIRRVEAPTRANAPLISFDEAFGLVKINPIAPWSDEEMQNYIDTNSILVNPLVDEGYPSIGCAPCTSKPAPGSDPRSGRWAGASKTECGLHAS

SEQ ID NO: 12290 - DNA, 1398 bp, Arabidopsis thaliana
  CDS (1)..(1398)
atggcaatgtctgtaaatgtttcttcttcttcgtcttctgggatcataaactctcgtttcggtgtttcattggagccaaaagtttcgcaaattggttcgttgaggttattggatcgtgttcatgttgctcctgtgtctctgaatctatctgggaagcgatcatcatctgttaaacctttaaacgctgaaccaaagacaaacgattcaatgattcctcttgcggcaacaatggtagcagaaattgcagaggaagttgaagtggttgagattgaggattttgaagagcttgctaagaagttagagaatgcttcacctcttgagattatggacaaagctcttgagaaatacgggaacgatatcgccattgcatttagtggtgcagaagatgttgctcttattgagtacgctcatttgactgggaggccatttagagtatttagtttggatacagggaggttgaatcctgagacgtatcggtttttcgatgcggtggagaagcactatgggattaggattgagtatatgtttcctgattctgttgaggttcaaggtttggttaggagcaagggattgttctctttttatgaggatggtcatcaggagtgttgccgtgttcgaaaggtgagacctttgaggcgtgctctcaagggtttaaaggcttggattactggtcagaggaaagatcaatctccggggacaaggtctgagattccggttgttcaggttgatccggtgtttgaaggtttggatggtggagttggtagtttggtgaagtggaatccggttgcgaatgttgaagggaatgatgtttggaacttcttgaggactatggatgttccggttaacacattgcatgcggcagggtatatatcgattggatgtgagccttgcacgaaagcggttttaccgggtcagcacgagagagaagggagatggtggtgggaagatgctaaagccaaggaatgtggacttcacaaagggaatgtcaaagaaaactccgatgatgctaaagtgaacggggaatcgaaatccgctgttgcagatatctttaagagtgagaatcttgtgactttgagcaggcaggggattgagaatttgatgaagttggagaaccgtaaagagccttggatcgtcgtgctttatgctccgtggtgccccttttgtcaagccatggaagcatcgtatgatgaactggcggataaattggctggaagtgggattaaggttgccaaattcagagcagatggtgaccagaaggagtttgctaagcaggaattgcagctcggtagcttccctaccattctggttttccctaagaactcatcgagaccgatcaagtatccgtctgagaagagagatgttgagtctttgacttcgttcttgaatcttgtccgataa

SEQ ID NO: 12291 - protein, 465 aa, Arabidopsis thaliana
MAMSVNVSSSSSSGIINSRFGVSLEPKVSQIGSLRLLDRVHVAPVSLNLSGKRSSSVKPLNAEPKTNDSMIPLAATMVAEIAEEVEVVEIEDFEELAKKLENASPLEIMDKALEKYGNDIAIAFSGAEDVALIEYAHLTGRPFRVFSLDTGRLNPETYRFFDAVEKHYGIRIEYMFPDSVEVQGLVRSKGLFSFYEDGHQECCRVRKVRPLRRALKGLKAWITGQRKDQSPGTRSEIPVVQVDPVFEGLDGGVGSLVKWNPVANVEGNDVWNFLRTMDVPVNTLHAAGYISIGCEPCTKAVLPGQHEREGRWWWEDAKAKECGLHKGNVKENSDDAKVNGESKSAVADIFKSENLVTLSRQGIENLMKLENRKEPWIVVLYAPWCPFCQAMEASYDELADKLAGSGIKVAKFRADGDQKEFAKQELQLGSFPTILVFPKNSSRPIKYPSEKRDVESLTSFLNLVR

SEQ ID NO: 12292 - DNA, 1377 bp, Arabidopsis thaliana
  CDS (1)..(1377)
atggcactagcaatcaacgtttcttcatcttcttcttctgcgatctcaagctctagcttcccttcttcagatctcaaagtaacaaaaatcggatcattgaggttattgaatcgtaccaatgtctctgcggcttctctgagtttgtccgggaagagatcctccgtgaaagctcttaatgtgcaatcaattacaaaggaatccattgttgcttctgaggttacagagaagctagatgtggtggaagttgaagactttgaggaactagcaaagagattagagaatgcttctcctcttgagatcatggataaagctcttgagaagtttgggaatgacattgctattgcttttagtggagctgaagatgttgctctgattgagtatgctcatttaactggaagaccttatagggtattcagtttggatacagggagattgaatccagaaacatatagactcttcgataccgtggagaaacattacggtattcggattgagtatatgtttcctgatgctgttgaggttcaagctttagttaggaacaagggtttgttctctttctatgaagatggtcaccaggagtgttgccgtattagaaaggtgagacctttgaggcgtgcgttgaagggtttacgtgcttggatcactggtcagaggaaagatcaatcacccgggacaagatcggagattcctgttgttcaggttgatccagtgtttgaaggattagatggtggagttggtagtttggtgaagtggaatccggttgctaatgttgaagggaatgatgtttggaatttcttgaggacgatggatgttcctgtcaacacgcttcacgctgcgggttatgtttcaatcggatgtgagccatgcacgagagcggttttgccgggtcagcatgagagagaagggagatggtggtgggaagatgctaaggctaaagagtgtggccttcacaaagggaatatcaaggagaataccaatggaaacgcaaccgctaatgtcaacgggacagccacagtcgcggatatcttcaatagcgagaatgttgtgaacttgagcaggcaagggattgagaatttgatgaagttagagaaccggaaagaggcttggatcgttgtgctttatgcaccgtggtgcccgttttgtcaggcaatggaagcttcattcgatgaattggcggataagctgggaggaagtggtgtgaaggttgctaagtttagagctgatggtgaccagaaggactttgccaaaaaggagttgcagcttggaagctttccaacaatacttgtgttcccaaagaactcttcaagaccaatcaagtatccatcagagaagagagatgttgattctttgacatctttcttgaatcttgttcggtaa

SEQ ID NO: 12293 - protein, 458 aa, Arabidopsis thaliana
MALAINVSSSSSSAISSSSFPSSDLKVTKIGSLRLLNRTNVSAASLSLSGKRSSVKALNVQSITKESIVASEVTEKLDVVEVEDFEELAKRLENASPLEIMDKALEKFGNDIAIAFSGAEDVALIEYAHLTGRPYRVFSLDTGRLNPETYRLFDTVEKHYGIRIEYMFPDAVEVQALVRNKGLFSFYEDGHQECCRIRKVRPLRRALKGLRAWITGQRKDQSPGTRSEIPVVQVDPVFEGLDGGVGSLVKWNPVANVEGNDVWNFLRTMDVPVNTLHAAGYVSIGCEPCTRAVLPGQHEREGRWWWEDAKAKECGLHKGNIKENTNGNATANVNGTATVADIFNSENVVNLSRQGIENLMKLENRKEAWIVVLYAPWCPFCQAMEASFDELADKLGGSGVKVAKFRADGDQKDFAKKELQLGSFPTILVFPKNSSRPIKYPSEKRDVDSLTSFLNLVR

SEQ ID NO: 12294 - DNA, 1413 bp, Glycine max
  CDS (1)..(1413)
atggctctcgccgtttccactacttcttcctcttcagcagctgctgcagcttctagctccttcttctctcgtctcggatcttcctccgacgcaaaagctcctcaaatcggttcgtttcggtttccggagaggtcgcttgtttcgtctgttgttgtcaatgtaactcaacgacgctccttggtgaggccactcaacgccgaaccgcaacggaacgattctattgttcctcttgcagcaactatcgttgctcctgaggttgagaaggaagaggaagattttgagcaaatagcgaaagaccttgaaaatgcatctcctcttgaaattatggatagggccctcgagaaatttgggaacgacatcgctattgcatttagtggtgctgaagatgttgctttgattgagtatgcacatttgacgggtcgaccctacagagtgtttagtcttgacactgggagactgaatccagaaacctacaaattttttgatgcggttgagaagcattatggaattcacattgagtacatgttccctgatgcggttgaggttcaggcattagtaagaactaaagggctcttctcattttacgaggatgggcatcaagagtgctgccgagtaaggaaggtgaggcccttgaggagagcccttaagggtctcaaagcatggatcactggacagagaaaagatcagtctcctggtactaggtctgaaatccctgttgtccaggttgatcctgtttttgagggactggatggtggaattggcagcctggtgaagtggaacccggttgcaaatgttaatggtctagacatatggagcttccttaggaccatggatgttcctgtaaattcattgcattcccaaggatatgtttcgattggctgtgagccgtgcacaaggccagttttaccgggtcaacatgaaagagaaggaaggtggtggtgggaggatgccaaagccaaggagtgtggtcttcacaaaggtaatataaaacatgaagatgctgcccagcttaatggaaatggggcctcccaagcaaatggatctgccactgtcgctgacattttcaactcccaggatgtggtcagcttgagcaggtctgggattgagaatttggcaaaattggagaaccgaaaagaaccctggcttgttgtgctctatgcaccatggtgccgcttctgtcaggctatggaggaatcatatgttgatttggcagaaaagttagctgggtcaggagtgaaggttgcaaaattcagagcggatggagaccagaaggaatatgcaaagactgaactgcagttgggaagcttccccacaatactactcttccccaaacactcttctcaaccaattaagtacccttcggaaaagagagatgttgattcattgacggcattcgtgaatgctttacggtga

SEQ ID NO: 12295 - protein, 470 aa, Glycine max
MALAVSTTSSSSAAAAASSSFFSRLGSSSDAKAPQIGSFRFPERSLVSSVVVNVTQRRSLVRPLNAEPQRNDSIVPLAATIVAPEVEKEEEDFEQIAKDLENASPLEIMDRALEKFGNDIAIAFSGAEDVALIEYAHLTGRPYRVFSLDTGRLNPETYKFFDAVEKHYGIHIEYMFPDAVEVQALVRTKGLFSFYEDGHQECCRVRKVRPLRRALKGLKAWITGQRKDQSPGTRSEIPVVQVDPVFEGLDGGIGSLVKWNPVANVNGLDIWSFLRTMDVPVNSLHSQGYVSIGCEPCTRPVLPGQHEREGRWWWEDAKAKECGLHKGNIKHEDAAQLNGNGASQANGSATVADIFNSQDVVSLSRSGIENLAKLENRKEPWLVVLYAPWCRFCQAMEESYVDLAEKLAGSGVKVAKFRADGDQKEYAKTELQLGSFPTILLFPKHSSQPIKYPSEKRDVDSLTAFVNALR

SEQ ID NO: 12296 - DNA, 930 bp, Penicillium chrysogenum
  CDS (1)..(930)
atgccggccaagatgcccaactactcttccgagatggagggcgttgacaatcacgataacatgactgagtcgggctatgtcagtgctggttctggctctagcgaggactatgttcccgagattgttttcaccaagccccatcttcagttcctcaaccgccagttgcaattccttgaacctcaagagatcttgagatggtgcattacttcgcttcctcatctcttccagaccactgcctttggtctcacaggtcttgttacattagacatgctgtcgaagctggaggtgcctcgtccccagatggtcgacctcgtcttcctcgacactctctatcacttcgatgagacaatgtccctagtagaccgtgtacgccgcaggtaccccaacaacaatgtgcacatctacaagcccgctggcgttgaaaccactgccgaattcgaagccaagtacggcgctaagctctgggaagtcgacgaccaactctacgactgggtggccaaggttgagcccgctcagcgtgcctaccgtgagatgaatgttcatgccgttctcactggtcgccgccgcagccaaggaggcaaacgtggtgaccttgacatcattgaagtcgacgaggccggcctcatcaagatcaacccaatagccaactggtcctttgaccaggtcaagcagtacgtcaaggagaacgatgtgccctacaacgagctcctcgaccgtggttataagagcattggtgactggcactccacccagcccgttgctgagggagaggacgagcgctctggtcgttggaagggacagcagaagaccgagtgtggtattcacaaccctcggtccaagtatgcccagtacttgatggagatggagcgcaagcgtcaagaggaggccctctcacaggccttgcaaacgcagttgacgcctgttgtctga

SEQ ID NO: 12297 - protein, 309 aa, Penicillium chrysogenum
MPAKMPNYSSEMEGVDNHDNMTESGYVSAGSGSSEDYVPEIVFTKPHLQFLNRQLQFLEPQEILRWCITSLPHLFQTTAFGLTGLVTLDMLSKLEVPRPQMVDLVFLDTLYHFDETMSLVDRVRRRYPNNNVHIYKPAGVETTAEFEAKYGAKLWEVDDQLYDWVAKVEPAQRAYREMNVHAVLTGRRRSQGGKRGDLDIIEVDEAGLIKINPIANWSFDQVKQYVKENDVPYNELLDRGYKSIGDWHSTQPVAEGEDERSGRWKGQQKTECGIHNPRSKYAQYLMEMERKRQEEALSQALQTQLTPVV

SEQ ID NO: 12298 - DNA, 900 bp, Aspergillus terreus
  CDS (1)..(900)
atgcccgcgaagatgcctgacaactaccccactgagtctgaggcctacgatgccaaagatactaccaccgaatccggatatgtcagtggtagctccagcgaggactatctcccggagattgtcttcaccaagcctcatctccagttcctcaaccgccagctgcagttcctcgagcctcaagatgtcctgagatggtgtgtcacatcactgcctcatctctttcagaccaccgccttcggtctgaccggcctggtcacgctggacatgctctccaagctggacgtgccccggccccaggtggtcgacctggtcttcctcgacaccctccaccacttcaaggagaccttggctctggttgacaaggtccgccagcgatacccgaacgtcaccatccacgtctacaagcccaagggcctggagacggaagaggaatttgccaagaagtacggtgcccgtctctgggagcgggatgaccagttctacgactgggtggccaaggtcgagccggctcagcgggcctaccgtgaactcaacgtccacgccgtgctgactggccgtcgtcgcagccagggtggcaagcggggagacctcgacatcatcgaagtcgacgaggctggtctcatcaagatcaacccgctggctaactggacctttgagcaggtcaaggcctacatcaaggagaacaacgtgccctacaacgagctccttgaccgcgggtacaagagcatcggggactaccactccacccagcccgtcagcgagaacgaggatgaacgctcgggccgctggaagggccaggagaagaccgagtgtggcatccacaaccctcgctccaagtacgcccagtacctgctggacatggagcgcaacggcaggaggaggctctctcacaggcgttga

SEQ ID NO: 12299 - protein, 299 aa, Aspergillus terreus
MPAKMPDNYPTESEAYDAKDTTTESGYVSGSSSEDYLPEIVFTKPHLQFLNRQLQFLEPQDVLRWCVTSLPHLFQTTAFGLTGLVTLDMLSKLDVPRPQVVDLVFLDTLHHFKETLALVDKVRQRYPNVTIHVYKPKGLETEEEFAKKYGARLWERDDQFYDWVAKVEPAQRAYRELNVHAVLTGRRRSQGGKRGDLDIIEVDEAGLIKINPLANWTFEQVKAYIKENNVPYNELLDRGYKSIGDYHSTQPVSENEDERSGRWKGQEKTECGIHNPRSKYAQYLLDMERNGRRRLSHRR

SEQ ID NO: 12300 - DNA, 1365 bp, Brassica juncea
  CDS (1)..(1365)
atggccttagctgtcacttcttcttcaactgccatctctggatcaagtttctcacgctctggaccttgttctgatcgtaaagctcttcaaatctgttcgtttaggttatctgatctatcccatgtctctcaaagacgttactctctaaaggctgagtcaccacctacacgcaacgactctttggttacccgtgcttcgaccctaatcactcctggagtggaagagaaggaagaagacgttgaggatttcgagcaactcgcgaagaagctcgaagaggcttctccacttgaaatcatggacaaagctctccagagattcggaagcaacatcgcaattgctttcagtggtgcggaagatgttgcactgatcgaatacgctcggttaaccggaaggcccttcagggttttcagcttagacacagggaggttaaaccccgaaacctacaggctcttcgatgccgtggagaagcagtacgggatccgaatcgagtacacgttccctgatgcggtcgaggttcaagctttggtgaggaacaagggtttgttctctttctacgaggacggtcaccaggagtgttgccgtgtgaggaaagtaagacccttgcgccgcgctctcaagggtctcaaagcttggatcactggacagaggaaagatcagtctccagggacgagatcagagatcccgatcgttcaggtcgatccggtgtttgaagggttggatggtggtgttgggagtcttgtcaagtggaatcctttggctaatgtcgaaggtggtgatgtttggaacttcttgaggacgatggacgttccggtgaatgcattgcacgcgcaagggtatgtttctattgggtgtgagccgtgcactaggcccgtgcttccgggtcagcacgagagagaaggaaggtggtggtgggaagatgctaaagctaaagaatgtggtctgcacaaagggaacatcaagaaggaagatgactccaccaccgcggatttagcacctgctattgtgcatgatatcttcgaaagcagcaatgtggttgcattgagcagaggagggattgagaatctgttgaagcttggtaaccgcaaagagccgtggttggttgtgctttacgctccttggtgcccgttttgccaggccatggaagcttcctacgtcgaattggctgagaaactggcggtcaaagggattaaggtggccaagtttcgggctgatggtgaccagaaggagtttgccaagcaagagcttcaattaggaagcttcccgacgatacttctcttcccgaaaagcgctccgcgggcaattaagtacccgtcagagcatagagatgtggattcgcttatgtcatttgtcaatcttctccggtga

SEQ ID NO: 12301 - protein, 454 aa, Brassica juncea
MALAVTSSSTAISGSSFSRSGPCSDRKALQICSFRLSDLSHVSQRRYSLKAESPPTRNDSLVTRASTLITPGVEEKEEDVEDFEQLAKKLEEASPLEIMDKALQRFGSNIAIAFSGAEDVALIEYARLTGRPFRVFSLDTGRLNPETYRLFDAVEKQYGIRIEYTFPDAVEVQALVRNKGLFSFYEDGHQECCRVRKVRPLRRALKGLKAWITGQRKDQSPGTRSEIPIVQVDPVFEGLDGGVGSLVKWNPLANVEGGDVWNFLRTMDVPVNALHAQGYVSIGCEPCTRPVLPGQHEREGRWWWEDAKAKECGLHKGNIKKEDDSTTADLAPAIVHDIFESSNVVALSRGGIENLLKLGNRKEPWLVVLYAPWCPFCQAMEASYVELAEKLAVKGIKVAKFRADGDQKEFAKQELQLGSFPTILLFPKSAPRAIKYPSEHRDVDSLMSFVNLLR

SEQ ID NO: 12302 - DNA, 1365 bp, Arabidopsis thaliana
  CDS (1)..(1365)
atggctttagctgttacttcttcttcaactgcaatctctggatcgagtttctctcgttctggagcttcttctgaatctaaagctcttcaaatatgttcgattaggttatctgatcgaacccatttgtctcagagacgttactctatgaaacctttaaacgctgagtcacattcacgaagcgaatcttgggttactcgtgcttcaactctaattgctcctgaagttgaagagaaaggaggagaagttgaagactttgagcaacttgctaaaaagcttgaagatgcttctccacttgaaatcatggataaagctcttgagagattcggagaccaaatcgcaattgcttttagtggagctgaagatgttgcattgattgaatatgcacgtttaactggaaagccatttagggtttttagtttagatacagggagattaaaccctgaaacgtacaggctctttgacgcagtcgagaagcagtacgggattcgaattgagtacatgtttcctgatgcagttgaggttcaagctttagtgaggaacaagggtttgttctcattctatgaagatggtcatcaagagtgttgccgtgtgaggaaagttagacctttgcgtcgtgctcttaagggtcttaaagcttggattacaggacagaggaaagaccaatctccgggtacgagatctgagatccctattgttcaggttgatccagtgtttgaagggttagatggcggtgttggaagtcttgtgaagtggaatcctttggctaatgttgaaggagctgatgtgtggaactttctgagaactatggatgttccggtgaatgcattgcacgcacaagggtatgtgtcaatcgggtgtgagccgtgtactaggccggtgcttccaggccaacatgagagagaaggaaggtggtggtgggaagatgctaaagctaaagaatgtggtctacacaaagggaacatcaaggaggaagatggtgctgcagactcaaagcctgctgctgtgcaagagatatttgaaagcaacaatgtggttgcattgagcaaaggaggggttgagaatcttttgaagctagagaaccgtaaagaggcgtggttggtcgtactttacgctccttggtgccctttctgccaggcgatggaagcatcgtacatcgaattggctgagaaacttgcgggaaaaggagttaaagtggcgaaattccgagctgacggtgagcagaaggagtttgctaagcaagagcttcagttagggagcttcccgacgatacttctctttccgaaaagagctccacgggctattaagtacccttcagagcatagagatgttgattcactcatgtcgtttgtgaatcttcttcggtga

SEQ ID NO: 12303 - protein, 454 aa, Arabidopsis thaliana
MALAVTSSSTAISGSSFSRSGASSESKALQICSIRLSDRTHLSQRRYSMKPLNAESHSRSESWVTRASTLIAPEVEEKGGEVEDFEQLAKKLEDASPLEIMDKALERFGDQIAIAFSGAEDVALIEYARLTGKPFRVFSLDTGRLNPETYRLFDAVEKQYGIRIEYMFPDAVEVQALVRNKGLFSFYEDGHQECCRVRKVRPLRRALKGLKAWITGQRKDQSPGTRSEIPIVQVDPVFEGLDGGVGSLVKWNPLANVEGADVWNFLRTMDVPVNALHAQGYVSIGCEPCTRPVLPGQHEREGRWWWEDAKAKECGLHKGNIKEEDGAADSKPAAVQEIFESNNVVALSKGGVENLLKLENRKEAWLVVLYAPWCPFCQAMEASYIELAEKLAGKGVKVAKFRADGEQKEFAKQELQLGSFPTILLFPKRAPRAIKYPSEHRDVDSLMSFVNLLR

SEQ ID NO: 12304 - DNA, 702 bp, Bacillus subtilis
  CDS (1)..(702): transl_table=11
atgttaacgtatgataattgggaagaaccaacgattacatttccggaagacgatccttataaaggagcgctgtcagttttaaaatgggcatacggccattacggcgatcagcttgtttatgcctgcagtttcggaattgagggaatcgttctgattgacttaatttataaagtgaaaaaagacgcagagattgtgtttcttgatacaggacttcattttaaagaaacctatgaaacaattgaacgagtgaaagagcgttatccgggtcttaatatcatcctgaaaaaaccagatctcacccttgaggaacaagccgaagaacatggtgacaaactatgggaaagagagccgaatcagtgctgctatcttagaaaggtcgttcctttaagagaggcgctttcaggacatccagcctggctttccggcctgcgccgtgatcaagggccaagccgtgccaatacgaatttcttaaacaaagatgaaaaattcaagtcagtaaaagtttgcccgcttatccattggacttggaaagacatttggagatatacatcccggaatgaactggactacaatccgcttcatgaccaaggctatccaagtattggctgtgcgccttgcacttctcccgcttttacagcagaagatttgcgctcaggcagatggaatggtatggcgaaaacagaatgcggactgcatgaataa

SEQ ID NO: 12305 - protein, 233 aa, Bacillus subtilis
MLTYDNWEEPTITFPEDDPYKGALSVLKWAYGHYGDQLVYACSFGIEGIVLIDLIYKVKKDAEIVFLDTGLHFKETYETIERVKERYPGLNIILKKPDLTLEEQAEEHGDKLWEREPNQCCYLRKVVPLREALSGHPAWLSGLRRDQGPSRANTNFLNKDEKFKSVKVCPLIHWTWKDIWRYTSRNELDYNPLHDQGYPSIGCAPCTSPAFTAEDLRSGRWNGMAKTECGLHE

SEQ ID NO: 12306 - DNA, 681 bp, Bacillus anthracis
  CDS (1)..(681): transl_table=11
atgttgacgtatgaaacgtgggaagaaaatgaaacgaaaggcgcgctatcagtattaagttgggcgtataaagaatataaaagtgaaattgtatacgcatgtagcttcggagtggaagggatggtactactggatcttattaaccaagtaaatccatctgctaaagttgtatttttggatacaaacgtacattttcaagaaacgtatgaattaattcaaaaagtgcgggaacgatttccttcattgaatattatagaaaaacagccaaaacttacacttgatgaacaagacaaattgcatggtgacaagctatgggaaagcaatcctaatctctgttgtaagattagaaaaattttaccgttagaagaatcattagcgaatgaaaaagcgtggatatcagggttgaggagagaacaatcagaaacgcgtaagcatacaaagtttataaatcaagatcatcgttttcaatctattaaagtttgtccgctcattcattggacgtggaaagaagtatggcgatatgtatacaagcatagcttgccgtataactcattacatgatattggatatccaagtattgggtgtgagaagtgtacgttgcctgtaggagagggtggcgattcgagagatggtagatgggctgggaaagtgaaaactgaatgtggtcttcattatcaataa

SEQ ID NO: 12307 - protein, 226 aa, Bacillus anthracis
MLTYETWEENETKGALSVLSWAYKEYKSEIVYACSFGVEGMVLLDLINQVNPSAKVVFLDTNVHFQETYELIQKVRERFPSLNIIEKQPKLTLDEQDKLHGDKLWESNPNLCCKIRKILPLEESLANEKAWISGLRREQSETRKHTKFINQDHRFQSIKVCPLIHWTWKEVWRYVYKHSLPYNSLHDIGYPSIGCEKCTLPVGEGGDSRDGRWAGKVKTECGLHYQ

SEQ ID NO: 12308 - DNA, 705 bp, Bacillus cereus
  CDS (1)..(705): transl_table=11
atgttgacgtatgaaacgtgggaagaaaatgttgtttcgttttcggaagaagatgaaacaaaaggtgcgttatcagtattaaattgggcttataaagaatataaagatgaggttgtctacgcatgtagctttggggtggaaggtatggtattgctgcacattataaaccaagtaaatccatctgctaaagttgtatttttggatacaaatgttcattttcaagaaacgtatgaattaattcgaaaagtgcgggaacgatttccttcattgaatattatagaaaaacagccagaacttacacttgatgaacaggcgaagttgcatggtgaaaaactgtgggagagcaatccgaatctttgttgtaagattagaaaaattttacctttagaaaaatcattagtcgtggaaaaagcatggatatcgggcttaagaagggaacaatcagaaacacgtaagcatacaaagtttataaatcaagatcatcgttttcaatctattaaagtttgtccactcattcattggacgtggaaagaagtttggcgatatgtatacaaacatagcttgccgtataacccgttgcatgatgttggctatccaagtattgggtgtgagaaatgtacgttacctgtaggggatggtggcgattcaagagatggtagatgggctggaaaagtgaaaactgaatgtggtcttcattaccaataa

SEQ ID NO: 12309 - protein, 234 aa, Bacillus cereus
MLTYETWEENVVSFSEEDETKGALSVLNWAYKEYKDEVVYACSFGVEGMVLLHIINQVNPSAKVVFLDTNVHFQETYELIRKVRERFPSLNIIEKQPELTLDEQAKLHGEKLWESNPNLCCKIRKILPLEKSLVVEKAWISGLRREQSETRKHTKFINQDHRFQSIKVCPLIHWTWKEVWRYVYKHSLPYNPLHDVGYPSIGCEKCTLPVGDGGDSRDGRWAGKVKTECGLHYQ

SEQ ID NO: 12310 - DNA, 696 bp, Bacillus halodurans
  CDS (1)..(696): transl_table=11
gtggaccaatcaatccaagtgaatataaacgaagtcaatcaagccttggagcgtaaagatagcctcgatgtgattaagtgggcgtacaaaacatatggagataagctcgtgtacgcctgtagcatgggggcggaaggaatggttctaatcgatcttattagtaaagtgaggcccgacgctccagtcatttttctcgatacagattttcatttttcagaaacatatgaattgattgaacgggtcaaggagcggtacccgaagcttcagctgaagttagtgaagccggaacttacacctgaggagcaagcagaaacatacggtgatcgcctgtgggaacgtcaaccagacctttgctgtaagttgcggaagctcgtcccgttggagaaggaacttgcccaatacgacgcatggatgtcagggctacgccgagatcaatcaccgactcgaacaaatactcaatttgtgaatgaggatcgccgctttggttcaacgaaaatttgtcctttaatccattggaccagtgaggaaatttggatgtatatcgagcttcatcaattaccgtataatgaccttcatgataagcagtatccaagtatcggctgcgagtattgcacgcgtcctgtaaaagaaggagaagatgaacgagcaggtcgctggtccaacacatcaaaaacagagtgtggattgcaccaataa

SEQ ID NO: 12311 - protein, 231 aa, Bacillus halodurans
MDQSIQVNINEVNQALERKDSLDVIKWAYKTYGDKLVYACSMGAEGMVLIDLISKVRPDAPVIFLDTDFHFSETYELIERVKERYPKLQLKLVKPELTPEEQAETYGDRLWERQPDLCCKLRKLVPLEKELAQYDAWMSGLRRDQSPTRTNTQFVNEDRRFGSTKICPLIHWTSEEIWMYIELHQLPYNDLHDKQYPSIGCEYCTRPVKEGEDERAGRWSNTSKTECGLHQ

SEQ ID NO: 12312 - DNA, 735 bp, Escherichia coli
  CDS (1)..(735): transl_table=11
atgtccaaactcgatctaaacgccctgaacgaactgccgaaggtagatcgcattctggcgctggcggaaactaacgccgaactggaaaaactggacgctgaaggccgcgtagcctgggcgctggataatctgcccggtgaatatgtactttcttccagctttggcattcaggcggcggtgagcctgcatctggtgaatcaaattcgcccggatattccggtgatcctcaccgatacgggttacttgttcccggaaacctaccgctttattgacgagttaacggacaaactcaagctcaacctgaaagtgtaccgtgctaccgaaagcgcagcctggcaggaagcacgctacggaaaactgtgggagcagggcgttgaaggcattgaaaagtacaatgacatcaacaaagtcgaaccgatgaaccgggctctgaaagaactgaatgcgcaaacctggtttgctggcctgcgccgtgaacaatccggcagtcgtgccaatttaccggtgctggcaattcagcgtggcgtatttaaagtgctgccgattatcgactgggataaccgaactatttatcagtacctgcaaaaacatggcctgaaatatcacccattatgggatgaaggatatttatcggtgggcgatacccatacaacccgtaaatgggaacccggcatggcggaagaagaaacgcgtttctttggcttaaaaagggaatgtgggttacacgaagggtaa

SEQ ID NO: 12313 - protein, 244 aa, Escherichia coli
MSKLDLNALNELPKVDRILALAETNAELEKLDAEGRVAWALDNLPGEYVLSSSFGIQAAVSLHLVNQIRPDIPVILTDTGYLFPETYRFIDELTDKLKLNLKVYRATESAAWQEARYGKLWEQGVEGIEKYNDINKVEPMNRALKELNAQTWFAGLRREQSGSRANLPVLAIQRGVFKVLPIIDWDNRTIYQYLQKHGLKYHPLWDEGYLSVGDTHTTRKWEPGMAEEETRFFGLKRECGLHEG

SEQ ID NO: 12314 - DNA, 798 bp, Rhizobium meliloti
  CDS (1)..(798): transl_table=11
atgacgacgcaatccctcaaagcagaagcggtggccctcgaagcagacgtgatggccctcgatgcggaggcgaaggccctcaacgacaagctcgaaagcctggatctcgccggccggctggcgctcattgccgggcttgaaggccgcgcggtctttaccacgtcgctcggcatcgaggaccaggtcattaccgccgcgatcggcagcaaccgtctcgacatcgaagtcgcgacgctgaagacgggccgcctcttcaacgagacggtggcgctgatcgaccagaccgaggaaacctatgacatcctcatcaagcgctattatcctgagaaagccgacatcgacgcctatgtggcgcaatacggcatgaacgggttctacgaaagcgtggaagcccggcatgcctgttgcggcgtgcgcaagctgaagccgcttgcgcgcgcgctcgacggagcaagctattggatcacgggcctgcgccgcgggcagtcgggcaaccgtgccacgacccctttcgctgaagccgacgtcgagcgcggactcatcaagatcaatccgctcgccgactggggcatcgagacgatccaggcccatgtcgcggcagagggcattcccgtcaacccgctgcacagtcgcggctatccgtcgatcggttgcgagccctgcacccgtgccatcaagcccggcgagccggagcgcgccggccgctggtggtgggagaacgacgagaagcgcgaatgcggcctgcatgtgccggaagcggcttcctcgatcatccccaacgccagcaacgcggcctga

SEQ ID NO: 12315 - protein, 265 aa, Rhizobium meliloti
MTTQSLKAEAVALEADVMALDAEAKALNDKLESLDLAGRLALIAGLEGRAVFTTSLGIEDQVITAAIGSNRLDIEVATLKTGRLFNETVALIDQTEETYDILIKRYYPEKADIDAYVAQYGMNGFYESVEARHACCGVRKLKPLARALDGASYWITGLRRGQSGNRATTPFAEADVERGLIKINPLADWGIETIQAHVAAEGIPVNPLHSRGYPSIGCEPCTRAIKPGEPERAGRWWWENDEKRECGLHVPEAASSIIPNASNAA

SEQ ID NO: 12316 - DNA, 735 bp, Salmonella typhimurium
  CDS (1)..(735): transl_table=11
atgtcccaactcgatctcaacgcattgaatgaattgccaaaagtcgatcgcgtaatggctctggcggaaaccaacgcccaactggaaaaactgagcgccgaagaacgcgtggcctgggcgctggaaaatctgcccggcgaatacgtgctctcctcaagctttggcatccaggcggcggtgagcctgcacctggtgaaccagattcgcccggatatcccggtgatcctcaccgataccggctatttgttcccggaaacctaccagtttattgatgagctaacggacaaactcaaactcaacctgaaagtttaccgcgcgggcgaaagtccggcctggcaggaagcgcgctacggcaagctgtgggagcagggcgttgagggcattgagaaatacaatgagatcaacaaagtcgagccgatgaaccgggcgctaaaagagctgaaagcgcagacgtggtttgcgggtctgcgtcgcgagcagtccggcagccgcgcgcatttacccgttctcgctatccagcgcggcgtgtttaaagtgctaccgattatcgactgggataatcgcaccgtttaccagtacctgcaaaagcatggcctgaaataccatccgctgtgggatcagggctatctgtcggtgggcgatacgcacaccacccgcaaatgggagccgggtatggcggaagaagagacacgcttcttcgggctgaagcgcgagtgcgggctgcatgaagggtaa

SEQ ID NO: 12317 - protein, 244 aa, Salmonella typhimurium
MSQLDLNALNELPKVDRVMALAETNAQLEKLSAEERVAWALENLPGEYVLSSSFGIQAAVSLHLVNQIRPDIPVILTDTGYLFPETYQFIDELTDKLKLNLKVYRAGESPAWQEARYGKLWEQGVEGIEKYNEINKVEPMNRALKELKAQTWFAGLRREQSGSRAHLPVLAIQRGVFKVLPIIDWDNRTVYQYLQKHGLKYHPLWDQGYLSVGDTHTTRKWEPGMAEEETRFFGLKRECGLHEG

SEQ ID NO: 12318 - DNA, 735 bp, Shigella flexneri
  CDS (1)..(735): transl_table=11
atgtccaaactcgatctaaacgccctgaacgaactgccgaaggtagatcgcattctggcgctggcagaaactaacgccgaactggaaaaactggacgctgaaggccgcgttgcctgggcgctggataatctgcccggtgaatatgtactttcttccagctttggcattcaggcggcggtgagcctgcatctggtgaatcagattcacccggatattccggtgatcctcaccgacaccggctatctgttcccggaaacctaccgctttattgacgagttaacggacaaactcaagctcaacctgaaagtgtaccgcgctaccgaaagcgccgcctggcaggaagcacgctacggcaaactgtgggaacagggcgttgaaggcattgaaaagtacaatgacatcaacaaagtcgaaccgatgaaccgggcgctgaaagaactgaatgcgcaaacgtggtttgctggcctgcggcgtgaacaatccggcagccgtgccaatttaccggtgctggcaattcagcgtggcgtatttaaagtgctgccgattatcgactgggataaccgaactatttatcagtacctgcaaaaacatggcctgaaatatcacccattatgggacgaaggatatttatcggtgggcgatacccatacaacccgtaaatgggaacccggcatggcggaagaagaaacgcgtttctttggcttaaaaagggaatgtggattacacgaagggtaa

SEQ ID NO: 12319 - protein, 244 aa, Shigella flexneri
MSKLDLNALNELPKVDRILALAETNAELEKLDAEGRVAWALDNLPGEYVLSSSFGIQAAVSLHLVNQIHPDIPVILTDTGYLFPETYRFIDELTDKLKLNLKVYRATESAAWQEARYGKLWEQGVEGIEKYNDINKVEPMNRALKELNAQTWFAGLRREQSGSRANLPVLAIQRGVFKVLPIIDWDNRTIYQYLQKHGLKYHPLWDEGYLSVGDTHTTRKWEPGMAEEETRFFGLKRECGLHEG

SEQ ID NO: 12320 - DNA, 720 bp, Thiocapsa roseopersicina
  CDS (1)..(720): transl_table=11
atgagtaagcccgatctcgacgccttcctccacggcgacgacgccgccttgcgagagaccaaccgccggctggagtccatgcccgcggaggaccgcgtgcgctgggccctggagcatctcccgccccagcacgtgctctcctccagcttcggaacacaatcggccgtaatgctgcacctggtcagccgccagatgcccgagatccccgtgattctggtcgacacgggctatctctttcccgagacctatcgactcgtcgacgcgctcacggaccggttcggcctgaacctaaaggtctatcgccccgcgctctccccggcctggcaggaggcgggcctggggcgtctgtgggagcagggagcggacggcatcgagcgctacaatcggctcaacaagatcgacccgatggagcgcgcgctgcgcgacttggacgccggcacctggtttgcggggctgcgtcgacaacaggccaactcccgcgccgagctgccggtacttcgacgccaggacggccgcatcaaattccatccgatcatcgactggcacaggcctcgacgtgcacgctacctgcgccgtcatgatctgcccgaccatccgttgcgggatcaaggctatgtctcgatcggggatgtccacaccacggtgccgctgctgccggggatgttggaggaagagacacgcttcttcggcatcaagcgcgagtgcggattgcatcgttag

SEQ ID NO: 12321 - protein, 239 aa, Thiocapsa roseopersicina
MSKPDLDAFLHGDDAALRETNRRLESMPAEDRVRWALEHLPPQHVLSSSFGTQSAVMLHLVSRQMPEIPVILVDTGYLFPETYRLVDALTDRFGLNLKVYRPALSPAWQEAGLGRLWEQGADGIERYNRLNKIDPMERALRDLDAGTWFAGLRRQQANSRAELPVLRRQDGRIKFHPIIDWHRPRRARYLRRHDLPDHPLRDQGYVSIGDVHTTVPLLPGMLEEETRFFGIKRECGLHR

SEQ ID NO: 12322 - DNA, 777 bp, Vibrio vulnificus
  CDS (1)..(777): transl_table=11
atgcttgattctgttgcttcaacgctgcagctatcagaattactctcgttaaccaaggcggagcaaagtatccgccttgccgaaatcaacgttgagttagagatgctgtcagctcaagagagggtcgcttgggctctgcaaaatttggaaggggcacacgctgtttcgtcgagttttgggattcaagcggctgtcatgctgcatttggtatcgaagcagcaagccgatattcccgtcattttgaccgatacgggctacctatttcctgaaacgtatcaatttattgatgagttaactaaatctctaaacctaaaccttaaagtataccgagcgaatgagagtgcaaactggcaggaagctcgatacggtaaactgtgggagcaaggtatagaaggaatagaaaaatacaacaagcttaataaagtcgaacctatgcgtcgtgcactgaatgagcttaatgttaaaacctggttttccggattacgccgagagcaatctcagtcccgagcaggcctacctattctgtcgatacaaaatggagtgtttaaattcttgcctgtagttgattggagtaacaaagacgtacactactatttaaaagaacatggtctttcatatcatcccctttgggagcagggctatctttctgtaggagatacgcatacaactcaaaaatgggagccagggatgagtgaagaagaaactcgtttctttggcttgaagcgtgagtgtggacttcacgaagaagataatgaacaagatggttctggtatttaa

SEQ ID NO: 12323 - protein, 258 aa, Vibrio vulnificus
MLDSVASTLQLSELLSLTKAEQSIRLAEINVELEMLSAQERVAWALQNLEGAHAVSSSFGIQAAVMLHLVSKQQADIPVILTDTGYLFPETYQFIDELTKSLNLNLKVYRANESANWQEARYGKLWEQGIEGIEKYNKLNKVEPMRRALNELNVKTWFSGLRREQSQSRAGLPILSIQNGVFKFLPVVDWSNKDVHYYLKEHGLSYHPLWEQGYLSVGDTHTTQKWEPGMSEEETRFFGLKRECGLHEEDNEQDGSGI

SEQ ID NO: 12324 - DNA, 726 bp, Xanthomonas campestris pv
  CDS (1)..(726): transl_table=11
atgaccgcgctgcctgccacatcgatcgccgctccttcgctggacgacctggacgcgctcaacgcgcacctggagacgctgcgcgccgacgaacgcgttgcctgggcgctgcagcacggcccgcagcaggcggcgctgtcgtccagcttcggcgcgcagtcggcggtgacgctgcacctgctcacccagcagcgcccggacatcccggtgatcctgatcgacaccggctacctgttcccggagacctaccgctttgccgatgcattgaccgaacgcctttcgctcaacctgcaggtgtatcgcccgctggtcagccgcgcctggatggaggcacgccatggccgtctgtgggaacagggcatggtgggcatcgaccagtacaacaacctgcgcaaggtcgaaccgatgcgccgcgcactggacgaactcaacgtcggcacctggttcaccggcctacgccgcagccagtccggtgggcgtgcgcagacgccgatcgtgcagaagcgcggggaccgctacaagatcagcccgatcgccgactggaccgaccgcgacgtctggcaatacctgcaggcgcacgcactgccgtatcacccgctgtgggaacagggctatgtgtcgattggtgacttccacaccacccgtcgctgggagccgggcatgcgcgaagaagacacgcgcttctttgggctcaagcgcgagtgcggcatccacgaagacatctga

SEQ ID NO: 12325 - protein, 241 aa, Xanthomonas campestris pv
MTALPATSIAAPSLDDLDALNAHLETLRADERVAWALQHGPQQAALSSSFGAQSAVTLHLLTQQRPDIPVILIDTGYLFPETYRFADALTERLSLNLQVYRPLVSRAWMEARHGRLWEQGMVGIDQYNNLRKVEPMRRALDELNVGTWFTGLRRSQSGGRAQTPIVQKRGDRYKISPIADWTDRDVWQYLQAHALPYHPLWEQGYVSIGDFHTTRRWEPGMREEDTRFFGLKRECGIHEDI

SEQ ID NO: 12326 - DNA, 801 bp, Schizosaccharomyces pombe
  CDS (1)..(801)
atgagctcaatcgatacgcctgctaataaattgcaagcgaaaaccttgtttcacccagaacatctcgaatacatcaacaagcagttatcggagcttagtcctcaagatatcttaaaatggtgccgttggacacttccttctttgtttcaaacatctgcgttaggactgtccgggcttgttattatggacatgttatcgaaaatggatatgaatgttcctctgatttttatcaacacacttcatcatttcccagaaacactggatcttcttgaaaaagtcaaaactaagtatcctaacgtgcctgttcacgtctatcgttgtgctgaagcagccaacgaaaaggaatttgctcagaagtttggtgagaagctttgggagacagatgaatctcggtatgactttttagtcaaagtggaaccagcaagtcgtgcttattctgacttaaatgtacttgctgtgtttactggccgccgccgtagtcaaggtggagagcgcggatctttgcccattgttcagctggatggaccagtattaaagatcaaccccttggctaactggtcttttactgaagttcataattatattattacaaacaacgttccatataatgaacttctgaacaagggttacagatcagttggtgactggcactctactcaaccagttagagaaggtgaagatgaacgtgccggacgttggcgcggtcgagagaaaacagaatgtggattacacagtcatcctcaaagtaaattcgcacaatatatggcggagcttaaaaagaaggagacggctgatcagtga

SEQ ID NO: 12327 - protein, 266 aa, Schizosaccharomyces pombe
MSSIDTPANKLQAKTLFHPEHLEYINKQLSELSPQDILKWCRWTLPSLFQTSALGLSGLVIMDMLSKMDMNVPLIFINTLHHFPETLDLLEKVKTKYPNVPVHVYRCAEAANEKEFAQKFGEKLWETDESRYDFLVKVEPASRAYSDLNVLAVFTGRRRSQGGERGSLPIVQLDGPVLKINPLANWSFTEVHNYIITNNVPYNELLNKGYRSVGDWHSTQPVREGEDERAGRWRGREKTECGLHSHPQSKFAQYMAELKKKETADQ

SEQ ID NO: 12328 - DNA, 786 bp, Saccharomyces cerevisiae
  CDS (1)..(786)
atgaagacctatcatttgaataatgatataattgtcacacaagaacagttggatcattggaatgaacaactaatcaagctggaaacgccacaggagattattgcatggtctatcgtaacgtttcctcaccttttccaaaccactgcatttggtttgactggcttggttactatcgatatgttgtcaaagctatctgaaaaatactacatgccagaactattatttatagacactttgcaccatttcccacaaactttaacactaaaaaacgagattgagaaaaaatactaccagcctaaaaatcaaaccattcacgtatataagccggatggatgtgaatcggaggcagattttgcctcgaaatacggggatttcttatgggagaaagatgatgacaagtacgattatctggccaaagtggaacctgcacatcgtgcctacaaagagctacatataagtgctgtgtttactggtagaagaaaatcacaaggttctgcccgctcccaactgtcgattattgaaatagacgaacttaatggaatcttaaaaataaatccattgatcaattggacgttcgagcaggttaaacagtatatagatgcaaacaatgtaccatacaacgaacttttggaccttggatatagatccattggtgattaccattccacacaacccgtcaaggaaggtgaagatgagagagcaggaagatggaagggcaaggccaagaccgagtgtggaattcatgaagccagccgattcgcgcaatttttaaagcaagatgcctag

SEQ ID NO: 12329 - protein, 261 aa, Saccharomyces cerevisiae
MKTYHLNNDIIVTQEQLDHWNEQLIKLETPQEIIAWSIVTFPHLFQTTAFGLTGLVTIDMLSKLSEKYYMPELLFIDTLHHFPQTLTLKNEIEKKYYQPKNQTIHVYKPDGCESEADFASKYGDFLWEKDDDKYDYLAKVEPAHRAYKELHISAVFTGRRKSQGSARSQLSIIEIDELNGILKINPLINWTFEQVKQYIDANNVPYNELLDLGYRSIGDYHSTQPVKEGEDERAGRWKGKAKTECGIHEASRFAQFLKQDA

SEQ ID NO: 12330 - DNA, 1395 bp, Brassica napus
  CDS (1)..(1395)
atggcactagcaatcaacgtttcttcatcttcttctgcgatctcaacctctagcttcccttcttcagacctcaaagctccacaaatcggttcgttgaggttatcagatcgtatcaatgtctcatcagcgtctctaggtctatccgggaaacgatcctcggtgaaagctctgaacgtgcagtcaatcacaaaggaatctacggttcctcctcaagcagcatccatggttgcctctgagattagagagaaagtagatgtgatcgaagtggaagactttgaggagctagcaaagaagctagagaccgcttctcctcttgaaatcatggacaaggctcttgaaaaattcggaaacgatattgcaattgcctttagtggagctgaagatgttgctcttattgagtatgctcatttaacaggaagaccttacagagtattcagcttagacacagggagattgaatccagaaacatacagactcttcgacaccgtggagaaacactacggtattcgaatcgagtacatgtttcctgacgcagttgaggttcaagctttggttagaaacaaaggtctgttctctttctacgaagacggtcaccaagagtgttgccgcatcagaaaagtgagaccgttgaggcgtgctttaaaaggtttacgcgcttggatcacgggacaaagaaaagatcaatcaccagggacaagatcagagatccccgtcgttcaagtcgatccagtgtttgaaggactagacggtggagttggcagtttggtgaagtggaacccggttgcgaacgtagaagggaacgatgtttggagctttttgaggactatggatgttcccgtcaacacgctgcacgctgcggggtatgtttccatagggtgcgagccgtgcacgagggcggttttgccaggtcagcacgagagggaagggaggtggtggtgggaagacgctaaggctaaagagtgtggacttcacaaagggaacatcaaagagagtaacgcaacggttaatgtcaatggaacaacatcaacggtcgatgatattttcagaagcgagaacgttgtgagcttgagcaggcaagggattgagaatctgatgaagctggagaacaggaaggaggcgtggatcgttgtgctttatgcgccttggtgcccgttttgccaagcgatggaggcttcgtttgatgagttggcggataagttgaagggaggagatggcgtgaaggtggctaagtttagagcggatggtgagcaaaaggagtttgctaagagtgagttgcagctagggagctttccgacgatacttgtgttcccaaagaactcttcaagacctatcaagtatccatctgagaagagggatgttgattctttgacatctttcttgaatcttgttaggtaa

SEQ ID NO: 12331 - protein, 464 aa, Brassica napus
MALAINVSSSSSAISTSSFPSSDLKAPQIGSLRLSDRINVSSASLGLSGKRSSVKALNVQSITKESTVPPQAASMVASEIREKVDVIEVEDFEELAKKLETASPLEIMDKALEKFGNDIAIAFSGAEDVALIEYAHLTGRPYRVFSLDTGRLNPETYRLFDTVEKHYGIRIEYMFPDAVEVQALVRNKGLFSFYEDGHQECCRIRKVRPLRRALKGLRAWITGQRKDQSPGTRSEIPVVQVDPVFEGLDGGVGSLVKWNPVANVEGNDVWSFLRTMDVPVNTLHAAGYVSIGCEPCTRAVLPGQHEREGRWWWEDAKAKECGLHKGNIKESNATVNVNGTTSTVDDIFRSENVVSLSRQGIENLMKLENRKEAWIVVLYAPWCPFCQAMEASFDELADKLKGGDGVKVAKFRADGEQKEFAKSELQLGSFPTILVFPKNSSRPIKYPSEKRDVDSLTSFLNLVR

SEQ ID NO: 12332 - DNA, 1401 bp, Glycine max
  CDS (1)..(1401)
atggccctcgctttcacttcttcaatttccgcaccaacttccaccttcccatcatcggaacccaaacttccgcaaattgggtcaattaggatttcggagaggcccattggaggcgccgttaatttcaatttatctcaaagacggagcttggtaaagcccgttaacgccgaacctccacgcaaggattccattgttcctctcgcagcaacaaccatcgttgcttctgcttctgagacgaaagaggaagattttgaacagatagccagtgatctcgacaatgcttcacctcttgaaatcatggatagagccctcgacaaattcggcaacgacatagctattgccttcagtggtgctgaagatgttgctttgattgagtatgcgaaattgacgggtcgaccctttagggttttcagtttggacactgggagactgaacccagaaacttatcaactttttgatgcggttgagaagcattatggaattcgcattgagtacatgttccctgatgctgttgaggttcaggcattggtgaggagtaaggggttattctctttctacgaggatgggcaccaagagtgttgcagggtgagaaaggtgaggcctttaaggagggcccttaagggtctcagagcatggataactggtcagaggaaagaccagtcacctggtactaggtctgaaataccggttgttcaggttgatccggtttttgagggaatggatggtggaattggaagcttggtgaagtggaaccctgttgcaaatgtgaagggccatgacatatggaacttccttaggaccatgaatgtgcctgtgaattccttgcatgcaaaaggatatgtttccattgggtgtgagccctgcactaggcctgttttacctgggcaacatgaaagggaagggaggtggtggtgggaggatgccaaagctaaggaatgtggtcttcacaaaggaaatgtaaagcagcagaaagaggaggatgttaatggaaatgggctatcccaatcccatgcaaatggtgatgctaccactgtgcctgacattttcaacagcccgaatgtagttaacttgagcaggactggaattgagaatttggcaaaattggaggaccgaaaggaaccatggcttgttgtgctttatgcaccatggtgcccctactgccaggctatggaggaatcttatgttgacttagcagacaagttagcagggtcaacagggatgaaggttggaaaatttagagcagatggagaacagaaagaatttgcaaagagtgaactgcaattgggaagcttccctacgatattatttttcccaaagcattcgtctcggccaacaataaagtatccctcagaaaagagagatgttgattccttgatggcatttgtaaatgccttaagatga

SEQ ID NO: 12333 - protein, 466 aa, Glycine max
MALAFTSSISAPTSTFPSSEPKLPQIGSIRISERPIGGAVNFNLSQRRSLVKPVNAEPPRKDSIVPLAATTIVASASETKEEDFEQIASDLDNASPLEIMDRALDKFGNDIAIAFSGAEDVALIEYAKLTGRPFRVFSLDTGRLNPETYQLFDAVEKHYGIRIEYMFPDAVEVQALVRSKGLFSFYEDGHQECCRVRKVRPLRRALKGLRAWITGQRKDQSPGTRSEIPVVQVDPVFEGMDGGIGSLVKWNPVANVKGHDIWNFLRTMNVPVNSLHAKGYVSIGCEPCTRPVLPGQHEREGRWWWEDAKAKECGLHKGNVKQQKEEDVNGNGLSQSHANGDATTVPDIFNSPNVVNLSRTGIENLAKLEDRKEPWLVVLYAPWCPYCQAMEESYVDLADKLAGSTGMKVGKFRADGEQKEFAKSELQLGSFPTILFFPKHSSRPTIKYPSEKRDVDSLMAFVNALR

SEQ ID NO: 12334 - DNA, 1401 bp, Glycine max
  CDS (1)..(1401)
atggccctcgctttcacttcttcaatttccgcaccaacttccaccttcccatcatcggaacccagacttccgcaaattgggtcaattaggatttcggagaggcccattggaggcgccggtaatttcaatttatctcaaagacggagcttggtaaagcccgttaacgccgaacctccacgcaaggattccattggtcctctcgcagcaacaaccatcgttgcttctgcttctgagacgaaagaggaagattttgatcagatagccagtgatctcgacaatgcttcacctcttgaaatcatggatagagccctcgacaaattcggcaacgacatagctattgccttcagtggtgctgaagatgttgctttgattgagtatgcgaaattgacgggtcgaccctttagggttttcagtttggacactgggagactgaacccagaaacttatcaactttttgatgcggttgagaagcattatggaattcgcattgagtacatgttccctgatgctgttgaggttcaggcattggtgaggagtaaggggttattctctttctacgaggatgggcaccaagagtgttgcagggtgagaaaggtgaggcctttaaggagggcccttaagggtctcagagcatggataactggtcagaggaaagaccagtcacctggtactaggtctgaaataccggttgttcaggttgatccggtttttgagggaatggatggtggaattggaagcttggtgaagtggaaccctgttgcaaatgtgaagggccatgacatatggaacttccttaggaccatgaatgtgcctgtgaattccttgcatgcaaaaggatatgtttccattgggtgtgagccctgcactaggcctgttttacctgggcaacatgaaagggaagggaggtggtggtgggaggatgccaaagctaaggaatgtggtcttcacaaaggaaatgtaaagcagcagaaagaggaggatgttaatggaaatgggctatcccaatcccatgcaaatggtgatgctaccactgtgcctgacattttcaacagcccgaatgtagttaacttgagcaggactggaattgagaatttggcaaaattggaggaccgaaaggaaccatggcttgttgtgctttatgcaccatggtgcccctactgccaggctatggaggaatcttatgttgacttagcagacaagttagcagggtcaacagggatgaaggttggaaaatttagagcagatggagaacagaaagaatttgcaaagagtgaactgcaattgggaagcttccctacgatattatttttcccaaagcattcgtctcggccaacaataaagtatccctcagaaaagagagatgttgattccttgatggcatttgtaaatgccttaagatga

SEQ ID NO: 12335 - protein, 466 aa, Glycine max
MALAFTSSISAPTSTFPSSEPRLPQIGSIRISERPIGGAGNFNLSQRRSLVKPVNAEPPRKDSIGPLAATTIVASASETKEEDFDQIASDLDNASPLEIMDRALDKFGNDIAIAFSGAEDVALIEYAKLTGRPFRVFSLDTGRLNPETYQLFDAVEKHYGIRIEYMFPDAVEVQALVRSKGLFSFYEDGHQECCRVRKVRPLRRALKGLRAWITGQRKDQSPGTRSEIPVVQVDPVFEGMDGGIGSLVKWNPVANVKGHDIWNFLRTMNVPVNSLHAKGYVSIGCEPCTRPVLPGQHEREGRWWWEDAKAKECGLHKGNVKQQKEEDVNGNGLSQSHANGDATTVPDIFNSPNVVNLSRTGIENLAKLEDRKEPWLVVLYAPWCPYCQAMEESYVDLADKLAGSTGMKVGKFRADGEQKEFAKSELQLGSFPTILFFPKHSSRPTIKYPSEKRDVDSLMAFVNALR

SEQ ID NO: 12336 - DNA, 21 bp, Artificial sequence
  primer
atgtcccatactctgactaag

SEQ ID NO: 12337 - DNA, 23 bp, Artificial sequence
  primer
ttacaaagcactggaatccaaac

SEQ ID NO: 12338 - protein, 262 aa, Artificial sequence
  consensus sequence
  Variant (2)..(15): Xaa in position 2 to 15 is any amino acid
  Variant (16)..(37): Xaa in position 16 to 37 is any or no amino acid
  Variant (39)..(58): Xaa in position 39 to 58 is any amino acid
  Variant (59)..(66): Xaa in position 59 to 66 is any or no amino acid
  Variant (69)..(73): Xaa in position 69 to 73 is any amino acid
  Variant (76)..(106): Xaa in position 76 to 106 is any amino acid
  Variant (107)..(112): Xaa in position 107 to 112 is any or no amino acid
  Variant (114)..(126): Xaa in position 114 to 126 is any amino acid
  Variant (127)..(131): Xaa in position 127 to 131 is any or no amino acid
  Variant (134)..(134): Xaa in position 134 is any amino acid
  Variant (136)..(139): Xaa in position 136 to 139 is any amino acid
  Variant (141)..(145): Xaa in position 141 to 145 is any amino acid
  Variant (146)..(147): Xaa in position 146 to 147 is any or no amino acid
  Variant (149)..(150): Xaa in position 149 to 150 is any amino acid
  Variant (152)..(152): Xaa in position 152 is any amino acid
  Variant (154)..(155): Xaa in position 154 to 155 is any amino acid
  Variant (157)..(159): Xaa in position 157 to 159 is any amino acid
  Variant (160)..(160): Xaa in position 160 is any or no amino acid
  Variant (162)..(173): Xaa in position 162 to 173 is any amino acid
  Variant (174)..(184): Xaa in position 174 to 184 is any or no amino acid
  Variant (186)..(187): Xaa in position 186 to 187 is any amino acid
  Variant (189)..(191): Xaa in position 189 to 191 is any amino acid
  Variant (193)..(199): Xaa in position 193 to 199 is any amino acid
  Variant (201)..(210): Xaa in position 201 to 210 is any amino acid
  Variant (212)..(214): Xaa in position 212 to 214 is any amino acid
  Variant (217)..(217): Xaa in position 217 is any amino acid
  Variant (219)..(219): Xaa in position 219 is any amino acid
  Variant (221)..(224): Xaa in position 221 to 224 is any amino acid
  Variant (226)..(234): Xaa in position 226 to 234 is any amino acid
  Variant (235)..(243): Xaa in position 235 to 243 is any or no amino acid
  Variant (245)..(250): Xaa in position 245 to 250 is any amino acid
  Variant (251)..(257): Xaa in position 251 to 257 is any or no amino acid
  Variant (261)..(261): Xaa in position 261 is any amino acid
LXXXXXXXXXXXXXXXXXXXXXXXXXXXXXXXXXXXXGXXXXXXXXXXXXXXXXXXXXXXXXXXXXDTXXXXXETXXXXXXXXXXXXXXXXXXXXXXXXXXXXXXXXXXXXXGXXXXXXXXXXXXXXXXXXKVXPXXXXLXXXXXXXWXXGXRXXQXXXXRXXXXXXXXXXXXXXXXXXXXXXXKXXPXXXWXXXXXXXYXXXXXXXXXXLXXXGYXSXGXXXXTXXXXXXXXXXXXXXXXXXRXXXXXXXXXXXXXECGXH

SEQ ID NO: 12339 - protein, 41 aa, Artificial sequence
  protein pattern
  Variant (2)..(3): Xaa in position 2 to 3 is any amino acid
  Variant (4)..(4): Xaa in position 4 is Ala or Pro
  Variant (5)..(5): Xaa in position 5 is Ile, Leu, Met or Val
  Variant (6)..(15): Xaa in position 6 to 15 is any amino acid
  Variant (16)..(16): Xaa in position 16 is Phe, His or Tyr
  Variant (17)..(21): Xaa in position 17 to 21 is any amino acid
  Variant (22)..(22): Xaa in position 22 is Ile, Leu or Val
  Variant (23)..(26): Xaa in position 23 to 26 is any amino acid
  Variant (27)..(27): Xaa in position 27 is Phe or Leu
  Variant (28)..(30): Xaa in position 28 to 30 is any amino acid
  Variant (33)..(33): Xaa in position 33 is any amino acid
  Variant (35)..(35): Xaa in position 35 is Ile, Leu, Met or Val
  Variant (37)..(37): Xaa in position 37 is Cys or Asp
  Variant (38)..(40): Xaa in position 38 to 40 is any amino acid
  Variant (41)..(41): Xaa in position 41 is Ser or Thr
KXXXXXXXXXXXXXXXXXXXXXXXXXXXXXGYXSXGXXXXX

SEQ ID NO: 12340 - protein, 15 aa, Artificial sequence
  protein pattern
  Variant (2)..(5): Xaa in position 2 to 5 is any amino acid
  Variant (6)..(7): Xaa in position 6 to 7 is any or no amino acid
  Variant (9)..(9): Xaa in position 9 is any amino acid
  Variant (10)..(10): Xaa in position 10 is any or no amino acid
  Variant (14)..(14): Xaa in position 14 is Ile or Leu
RXXXXXXKXXECGXH

SEQ ID NO: 12341 - DNA, 1527 bp, Synechocystis sp.
  CDS (1)..(1527): transl_table=11
atgaccaccgattacctcgaaagaattcttaaagcccgggtttacgatgtggcgatcgaaactccgttggatttggcggccaatttatcgaagcggctgggtaaccgggtttactttaagcgggaagacctacagccggtcttttcctttaagttacggggggcctataacaaaatggcccagttatcaccggaattattggcaaaaggagtaattgcagcttcggcgggtaaccatgcccagggagtggccctaggagcttccaagttgggtaccagggcgattattgttatgcccgaaaccactcctcaggtgaaagtggaggcggtcaaagctcggggcggtgtggtggtgctctatggcgaaacctatgacgatgcctatggccatgcccgacagttggagcaggaaaaagggctaacttttatccatccttttaatgatcccgacgtgattgctggccaaggcaccattggcatggaaattctacgtcagtatcaacagcccattgatgccatttttgtggcgatcggtggcggtgggctgattgcgggggtagcggcctacgttaaacgcctctatccagaaattaaaattatcggcgtggaaccaacggatgccgatgctatgcgccaatctttggcggcgggaaaacgggtcaagctaaaccaagtgggactgtttgcggatggtgtggcggtgcgggaagtgggggatttaacttttcccctctgtcagcaatatgtggatgatattttgctggtggatacggacgacacctgtgcggccatcaaagattgctttgaagatacccgctcaattttggagccggcgggagcgttggccattgcgggactgaaacaatatgtccaaaagcaaggctgtcgagaccaaaccctagtggcgatcgcctgtggggcgaatatgaactttgaccgattgagatttgtggcggaacgggccgagtatggggaacagcgagaggccatttttgcagtgaccattcccgaacaaaggggcagtttaagaaaattttgtgaagggttagggaaacataacattaccgaatttagttaccgcattgcggaggggcccgatgctcatatttttgtcggcattcaggtgcaaaaccgcagtgatgcgtcccaactggccgccagctttaaccgccaaggttttaaaaccctcgatttaaccgatgacgaactgacgaagctccatttgcgccatatggtggggggccgtcccccccaggtgacccaattggaaaatcaacgggaattactctaccgatttgaatttcctgagcggccaggggcattgatgaaatttttgggctgtatggatccagcctggaatattagtttgttccattaccgtaaccacggggccgactacggcagaattgtcgtcggcatgcaggttcccttggcagaaatggaacagtggcaacagtttttagccaatttaggctatcgctattgggacgagagtgataatccggtttatcgtctctttcttcgctaa

SEQ ID NO: 12342 - protein, 508 aa, Synechocystis sp.
MTTDYLERILKARVYDVAIETPLDLAANLSKRLGNRVYFKREDLQPVFSFKLRGAYNKMAQLSPELLAKGVIAASAGNHAQGVALGASKLGTRAIIVMPETTPQVKVEAVKARGGVVVLYGETYDDAYGHARQLEQEKGLTFIHPFNDPDVIAGQGTIGMEILRQYQQPIDAIFVAIGGGGLIAGVAAYVKRLYPEIKIIGVEPTDADAMRQSLAAGKRVKLNQVGLFADGVAVREVGDLTFPLCQQYVDDILLVDTDDTCAAIKDCFEDTRSILEPAGALAIAGLKQYVQKQGCRDQTLVAIACGANMNFDRLRFVAERAEYGEQREAIFAVTIPEQRGSLRKFCEGLGKHNITEFSYRIAEGPDAHIFVGIQVQNRSDASQLAASFNRQGFKTLDLTDDELTKLHLRHMVGGRPPQVTQLENQRELLYRFEFPERPGALMKFLGCMDPAWNISLFHYRNHGADYGRIVVGMQVPLAEMEQWQQFLANLGYRYWDESDNPVYRLFLR

SEQ ID NO: 12343 - DNA, 1809 bp, Oryza sativa (japonica cultivar-group)
  CDS (1)..(1809)
atggcggccgccgccaccgccgcggccgcggccacctccaccttcaccgccgccgtgccgcgcgcgcgcgggcgcaggcatccaacgcgcgtggcggcggcggcggcggcgacggcgtcgtcaccggaggcggcgatggcggcggcggcgccgccgttgccgatgatgcgggtggcgcccgagacgctgcagcggcagagcgggtacctcgtgcggggccgcggggaggaggggattggggagggggaggcggaggcggtgggaggggacgcggcgggagggctcggcgcgatggagtacctgaccagcgtgctctcgtccaaggtgtacgacgtcgccatcgagtcgccgctccagctcgccaccaagctctccgagcgcctcggcgtcaacttgtggatcaagcgcgaggacctgcagcccgtattctcattcaagttgagaggagcatacaatatgatggcaaagctctcgcgtgaacagttggagaggggtgtcatctgctcctctgctgggaaccatgcccagggagtggccctttccgctcaaagactcggttgcgatgctgttattgtcatgcctgtgacaacgcctgaaatcaagtggcgatcggtggagagattgggtgcaacagttgtactcaaaggggactcatatgatgaagctcaatcatatgcaaaacaaagatgcgagcaggaaggccgcacattcatacctccttttgaccatcctgatgttataagtggacaaggaacgattggcatggaaattgttcggcagttgcaaggcccacttcatgccatatttgtacctgtaggaggaggtggattaattgctgggatcgctgcctatgtaaaaagggttcgcccagaggtgaaaataattggagtggagccatcagatgcaaatgcaatggcattgtccttgtgtcatggtcaaagggtcatgctggagcaagttggtgggtttgctgatggtgtggctgtcaaagttgtaggggaggaaacatttcgcttgtgccgggaacttgtagatggtattgttcttgtcagtcgagatgctatttgtgcttcaataaaggatatgtttgaggagaaaagaagcatacttgaacctgctggtgcccttgcgctggcaggagctgaagcttactgcaaatactatggcttgaaaggggaaaatgttgttgcaataactagtggagcaaatatgaactttgatcggctcagattagtaactgagctggctgatgttggtcgaaaacgagaagcagttcttgccacatttttgccagaggagcagggaagcttcaaaaagtttgcagagctggttggccggatgaatattactgaattcaaatacagatacgattgcaatgcaaaagatgcccttgtcctttacagtgttggcatctacactgacgatgaacttaaagcaatggtggaacgtatggaatcttcaaaattgagaactgttgatcttactgacaatgatttggcaaaggatcatctaagatactttattggtggcaggtcagaagtaacagatgaacttgtttaccggttcattttcccagaaaggcctggtgcacttatgaaatttttggatgcattcagcccccgctggaatatcagccttttccattaccgtgcacagggtgaaaccggagcgaatgttttggttggcatacaagtgccgccggaggagtttgacgaattcaagagccgtgctgacaatcttgggtacgagtacatgtcggagcagaacaacgagatataccggctcctcttgcgcgatccgaagatctaa

SEQ ID NO: 12344 - protein, 602 aa, Oryza sativa (japonica cultivar-group)
MAAAATAAAAATSTFTAAVPRARGRRHPTRVAAAAAATASSPEAAMAAAAPPLPMMRVAPETLQRQSGYLVRGRGEEGIGEGEAEAVGGDAAGGLGAMEYLTSVLSSKVYDVAIESPLQLATKLSERLGVNLWIKREDLQPVFSFKLRGAYNMMAKLSREQLERGVICSSAGNHAQGVALSAQRLGCDAVIVMPVTTPEIKWRSVERLGATVVLKGDSYDEAQSYAKQRCEQEGRTFIPPFDHPDVISGQGTIGMEIVRQLQGPLHAIFVPVGGGGLIAGIAAYVKRVRPEVKIIGVEPSDANAMALSLCHGQRVMLEQVGGFADGVAVKVVGEETFRLCRELVDGIVLVSRDAICASIKDMFEEKRSILEPAGALALAGAEAYCKYYGLKGENVVAITSGANMNFDRLRLVTELADVGRKREAVLATFLPEEQGSFKKFAELVGRMNITEFKYRYDCNAKDALVLYSVGIYTDDELKAMVERMESSKLRTVDLTDNDLAKDHLRYFIGGRSEVTDELVYRFIFPERPGALMKFLDAFSPRWNISLFHYRAQGETGANVLVGIQVPPEEFDEFKSRADNLGYEYMSEQNNEIYRLLLRDPKI

SEQ ID NO: 12345 - DNA, 1302 bp, Mesorhizobium loti MAFF303099
  CDS (1)..(1302): transl_table=11
atgacaggggggccgcgcagacatgcggcacaaggtggctttccgatgaacagtttttcctcccgcgtcgccaccgctgcggcggcgatccgccagatctttccggaaacgccgctgcaggaaaacgactatctgtcgaagaagaccggcgcgcgggtgctgctgaagcgggaggacctgtcgccggtgcgctcctacaagatccgtggcgccttcaacttcttccgcaaggcgctcggcgagggcaaccaggcagagctgttcgtctgtgcgtccgccggcaaccatgcccagggttttgccttcgtctgccgccatttcggcaaaaagggcgtggtgttcatgccggtgacaacgccgcagcagaagatcgacaagaccaggctgttcggcggtgatttcgtcgagatcaggctggtcggcgactttttcgacgactgctatcgcgccgccttcgaattcaccgaaaggtcgggtgcccacatggtgccgcccttcgaccacaaggacattatcgagggccaggcgacggtcgcctatgagatcgcggcccagatggcgggtgcgcgcatgcctgacatcgtcatgctgccggtcggcggtggcgggctcgccgccggcgtcacgcactatttcgccgatcagggccgcgaggcgcgttttgtcttctgcgagccggccggcgcgccgagcctgcacgacagcctcgcggccggaaaacggctgaagctcgccaaggtcgacaacttcgtcgacggcgcggcggtggccgaaatcggccgcgaacccttgcggtttctcaaggaattcgctgctgacaccgtgcggctgatcccggaaaaccggctctgcgccaccatgatcgagatgctcaatgtcgaaggcgtcgtgctcgagccggccggcgcattggccatcgacgcattgaaggatttttccaggaaggagatccgtggcaagaccattgtcgccgtggtctcaggcggcaatttcgatttcgagcggctgccggatgtcaaggaacgggcgctgcgcttcgaaggcctgaagaaatatttcatcatccgcttcccgcagcggccgggcgcgctgcgcgacttcctcgaaatgctgggacccgacgacgacattgcccgcttcgagtatctgaagaagtccgcgcgcaatttcggctcggtgctgatcggcatcgaaaccaaggaccgtcgcaatttcgacctgctcaaggcaaatttcgaggccgagggcgtccagtatcaggacatcaccgacaacgagacattggcgggcttcatcatatga

SEQ ID NO: 12346 - protein, 433 aa, Mesorhizobium loti MAFF303099
MTGGPRRHAAQGGFPMNSFSSRVATAAAAIRQIFPETPLQENDYLSKKTGARVLLKREDLSPVRSYKIRGAFNFFRKALGEGNQAELFVCASAGNHAQGFAFVCRHFGKKGVVFMPVTTPQQKIDKTRLFGGDFVEIRLVGDFFDDCYRAAFEFTERSGAHMVPPFDHKDIIEGQATVAYEIAAQMAGARMPDIVMLPVGGGGLAAGVTHYFADQGREARFVFCEPAGAPSLHDSLAAGKRLKLAKVDNFVDGAAVAEIGREPLRFLKEFAADTVRLIPENRLCATMIEMLNVEGVVLEPAGALAIDALKDFSRKEIRGKTIVAVVSGGNFDFERLPDVKERALRFEGLKKYFIIRFPQRPGALRDFLEMLGPDDDIARFEYLKKSARNFGSVLIGIETKDRRNFDLLKANFEAEGVQYQDITDNETLAGFII

SEQ ID NO: 12347 - DNA, 1059 bp, Mesorhizobium loti MAFF303099
  CDS (1)..(1059): transl_table=11
gtgtggcgacgagacgccgcgccccgaatttgggcagctgatgacgcttcctctgccgcgcgattgatgatcatgacgaccgtctcccttaacgatatccgcgccgcgcgtgagcgtattgccagcaaggtcgagtacacgccgactgttttatcctcgagcctttcggaacgtctcggtgtccccgtccatctcaagctcgagcatcgccagactaccggcagcttcaagctccgcggcgccacgaatgccgtctcttcgctgagcgcggaagaaaaggcaggcggtgtggtcgcggcctcgaccggcaaccatggccgggcgctggcacatgctgcgaagctcgaaggcatgcgcgcggtgatctgcatgtcgcggctggtgccccagaacaagctcgacgaaatccgccggctcggcgccgaggtccacatcgtcggcaacagccaggacgatgcccagcaggaggttgagcggctggtggcgcagcaggggctggtgatgctgccgcctttcgacaatcccgccatcatcgccgggcaaggcacgctcgggctggagatgatcgagcaggtcccggatgccgctctggtgcttgtgcaactctccggcggtggcctggcttccggcgtcgccacagccgtcaagggcatcaggcccgggacagaagtcatcggcgtttcgatggcgcggggtgctgcgatgaaggcgagcctcgatgccggccggcctgtcctggtggaggaactgccgacgttggcggactcgctgggtggcggcatcggcctcgacaacaggctgaccttcgccatgtgccgcgacctgctcgacgaaatcatcttgctcagcgaggacgagatcgccgcaggtatctgccatgcctatgcgcaggagcgcgagatcgtcgagggcgccggcgcggtcggcatcgcagcgcttctcgccggcaaggtcaaggcgaaagggccgatggtcgtacttctctccggccgcaacatcgacatgaatgcgcaccgccggatcatctgcggcgaggcaatcggggagcgcgccgcatga

SEQ ID NO: 12348 - protein, 352 aa, Mesorhizobium loti MAFF303099
MWRRDAAPRIWAADDASSAARLMIMTTVSLNDIRAARERIASKVEYTPTVLSSSLSERLGVPVHLKLEHRQTTGSFKLRGATNAVSSLSAEEKAGGVVAASTGNHGRALAHAAKLEGMRAVICMSRLVPQNKLDEIRRLGAEVHIVGNSQDDAQQEVERLVAQQGLVMLPPFDNPAIIAGQGTLGLEMIEQVPDAALVLVQLSGGGLASGVATAVKGIRPGTEVIGVSMARGAAMKASLDAGRPVLVEELPTLADSLGGGIGLDNRLTFAMCRDLLDEIILLSEDEIAAGICHAYAQEREIVEGAGAVGIAALLAGKVKAKGPMVVLLSGRNIDMNAHRRIICGEAIGERAA

SEQ ID NO: 12349 - DNA, 1221 bp, Thermoplasma volcanium GSS1
  CDS (1)..(1221): transl_table=11
atggaaaacctcgaaataccttcatttgatgagataatagaggcacagagatacctcgaaggcaaagtcaacaggactcctctcataagatcgactactatcggaaaagaatatggagcagatatttatttcaaacttgaaaattttcagaagacaggttcttttaagtcgaggggtgctatatttaggttttcaaagctatctgaagatgaaaaaaggcatggtgtaataactgccagtgcaggaaaccatgcacaaggggtagcctacgcagctatgataaacggcatagatgccaagatagttatgccagaatacacgataccgcaaaaagtaaacgcagttataagctacggggcccacgtcattttaaaaggatccgattatgatgaagcgcataggtacgcggacgagattgcaaaacaggagggtaggatcttcatagaggcattcaacgaccgttgggttatttcagggcaaggcacaataggcctggagataatggaggatttgccagatgttgatataatactcgttccggtaggtggcggcggcctcatctccggaatagcactggcagcaaagcatgcaagcaacaaggtcaaagtaataggaatagaatcagagctgtccgattctatgaaagcatcactccgggaaggaaagatagtggcacatactagcggagtcagcatatgcgacggcatctccgtcaagtatccaggagtcctcacatttgacatagcaagaaagtacgttgatgacatagtaacagtaactgaagaatatgtttctaaggctatctacaaactcttcgagagaaacaagatcgtagccgagccttcaggggcagtaggtctcgccgccataatggagggcaaggtagatgttaagggaaagaaggtcgctatagttgtttccggaggaaacataaacccgctgctcatgtcaaagataatatataaagaattggaaaaccttggccaacttgtacgcatagagtgtactataccagatcggcctgggaacctttacaggatagctatggctatagcagaaaacggcggtaatatataccatgccgaagtagataaccttaggaaggagacgccgccaggattccagtcagttacatttacggtaaatgtcagaggccaagatcacttggatcgtataataggaagcttgagggagatgggctatttatttaggataacatga

SEQ ID NO: 12350 - protein, 406 aa, Thermoplasma volcanium GSS1
MENLEIPSFDEIIEAQRYLEGKVNRTPLIRSTTIGKEYGADIYFKLENFQKTGSFKSRGAIFRFSKLSEDEKRHGVITASAGNHAQGVAYAAMINGIDAKIVMPEYTIPQKVNAVISYGAHVILKGSDYDEAHRYADEIAKQEGRIFIEAFNDRWVISGQGTIGLEIMEDLPDVDIILVPVGGGGLISGIALAAKHASNKVKVIGIESELSDSMKASLREGKIVAHTSGVSICDGISVKYPGVLTFDIARKYVDDIVTVTEEYVSKAIYKLFERNKIVAEPSGAVGLAAIMEGKVDVKGKKVAIVVSGGNINPLLMSKIIYKELENLGQLVRIECTIPDRPGNLYRIAMAIAENGGNIYHAEVDNLRKETPPGFQSVTFTVNVRGQDHLDRIIGSLREMGYLFRIT

SEQ ID NO: 12351 - DNA, 1533 bp, Vibrio cholerae O1 biovar eltor str. N16961
  CDS (1)..(1533): transl_table=11
atggggttaaccaatcaaactggcgcagagtatctgcgccagatcttgcgctctccggtgtatgaggtagcgaacgtcacgccattgcaaaccatgccgcgtctttcggcgcggattggtaaccaagtgcagatcaaacgtgaagatcgccagccagtacactcgtttaaactgcgcggcgcttacaacatggtgtcgcacctaaccgaagcacaaaaagccgcgggcgtaattgccgcttccgcaggtaatcatgcccaaggtatggcgctgtcaggaacgaaacttggcatcaaaaccaccatcgtcatgccacgcaccacgccagacattaaagttgaagcggtacgcggatttggcggcgaagtactgctgcatggcagcaatttcgatgaagccaaagccgaagccgaacgtttatccaaagagcaaggctacacctttgtacctccgttcgatcaccctttggtgattgccggtcaaggcacgattggcatggaaatgctgcagcaaaacggtcatttggattacatttttgtgccggtcggtggcggcggtttagcggcgggagtggcggttctggtcaaacagttgatgccggagatccaagtcatcgcggttgaaccggaagactcagcctgcctcaaagcagccttagatgcgggtaaacctgtggtgctggatcaagtcagcatgtttgctgatggtgtggcagtaaaacgaattggcgatgaaacctttcgcctttgccagcaatacattgacggccacgtgacggtgtccagtgatgaaatctgcgcggcggtgaaagacatttttgaagatacgcgcgccatcgctgaaccttctggcgcattggcgctggcgggactaaagaaatttgccgaacagcagcagctcaaaggcaaacagttgggtacggtactttctggcgccaacaccaacttccacggtttgcgttatgtgtcggagcgctgcgaactgggtgaaaaacgcgaaggcttactggcggtgaccattccagagcgcaaaggggcgtttttcgacttctgccaaattattggtaaccgcgccgtcaccgaatttaactaccgttacaatgatgatcaactggccaatatttttgtcggtgtgcgtttagtcggcggcccagatgagctgaaatcgatcattcacgagctgcgccaatccggctatccggtgcaagatctctcggatgatgaaatggccaagctacacattcgctacatgattggtggtcgcccttccaaaccactgaccgagcgtttgtacagctttgagtttcctgaataccccggcgcactgctcaaattcttgagcatgctcggcacccactggaacatcagcttgttcaactaccgcaaccacggcgcagactacggccgcgtgctgtgtggttttgaactggatacaccagacctagtgcgcttttcagagcatttggttgaactcggttatcgctataaagatgaaaccgataaccctgcgtatcgtttcttcctagctaaataa

SEQ ID NO: 12352 - protein, 510 aa, Vibrio cholerae O1 biovar eltor str. N16961
MGLTNQTGAEYLRQILRSPVYEVANVTPLQTMPRLSARIGNQVQIKREDRQPVHSFKLRGAYNMVSHLTEAQKAAGVIAASAGNHAQGMALSGTKLGIKTTIVMPRTTPDIKVEAVRGFGGEVLLHGSNFDEAKAEAERLSKEQGYTFVPPFDHPLVIAGQGTIGMEMLQQNGHLDYIFVPVGGGGLAAGVAVLVKQLMPEIQVIAVEPEDSACLKAALDAGKPVVLDQVSMFADGVAVKRIGDETFRLCQQYIDGHVTVSSDEICAAVKDIFEDTRAIAEPSGALALAGLKKFAEQQQLKGKQLGTVLSGANTNFHGLRYVSERCELGEKREGLLAVTIPERKGAFFDFCQIIGNRAVTEFNYRYNDDQLANIFVGVRLVGGPDELKSIIHELRQSGYPVQDLSDDEMAKLHIRYMIGGRPSKPLTERLYSFEFPEYPGALLKFLSMLGTHWNISLFNYRNHGADYGRVLCGFELDTPDLVRFSEHLVELGYRYKDETDNPAYRFFLAK

SEQ ID NO: 12353 - DNA, 1515 bp, Pseudomonas aeruginosa PAO1
  CDS (1)..(1515): transl_table=11
atgctcgaacaatacgtcaagaagatcctcacctcgcgcgtctacgacgtcgcggtggaaacgcccctgcaacccgcccgccagttgtccgaacgcctcggcaaccaggtcctgctcaagcgcgaggacctgcagccggtgttttccttcaagatccgcggcgcctacaacaaggtcgcgcagctcaccgaggaggagaaggcccgcggggtgatcgccgcctcggccggcaaccacgcccagggcctggccctggcggccaagcggcaggggatcagggcggtcatcgtgatgcccaagaccacccccgagatcaaggtccaggcggtgcgcgcccacggcgccaaggcggtgctgcacggcgacgccttccccgaggcgctggcccacgcgctgaagctggtcgacgagaagggctacaccttcgtccatccctacgacgatccggacaccatcgccggccagggcaccgtggccatggagattctccgccagcagcccggccgcctcgatgcgatcttcgtcccggtgggcggtggcggactggtcgccggcatcgccgcctacgtcaagtacctgcgtccggagatcaaggtgatcggcgtcgagccggacgagtcgaactgcctgcaggcggccatggccgccggcgagcgggtggtgctgggccaggtcgggctgttcgccgacggcgtggcggtggcgcagatcggccagcacaccttcgacatctgcaaggaccacgtcgacgaagtgatcaccgtcagcactgacgagatctgtgcggcgatcaaggacatctacgacgacacccgctcgatcaccgagccggccggcgcgctggcggtggccgggatcaagaagtacgtcgagcgcgagcgcgccgaggggcagaccctggtggcgatcgactccggcgccaacgtcaacttcgatcgcctgcggcatgtcgccgaacgcgccgaactgggcgagcgccgcgaagcgatcatcgcggtgaccattcccgagcggccgggcagcttcaaggccttctgcgaggcggtcggcaagcgccagatcaccgagttcaactatcgctaccacagcggcagcgaggcgcacatcttcgtcggcgtgcagacccacccggagaacgacccgcgcgaggcgctggtggcctatctgcgcgagaagggcttcccggtcctcgacctgaccgacaacgaactggccaagctgcacatccgccacatggttggcggccatgcggtgaaagtcagcgacgagatggtgttccgcttcgaattccccgagcggcccggcgcgctgttcaacttcctcaccaagctcggcgggcgctggaacatctcgatgttccactaccgtaaccatggtgcggccgacggccgggtggtggccgggttgcaggtgccggaagacgagcgccacctgatcccgcagaccctggaggcgatcggctatccgtactgggacgagaccgccaacccggcctaccagctgttcctcggctga

SEQ ID NO: 12354 - protein, 504 aa, Pseudomonas aeruginosa PAO1
MLEQYVKKILTSRVYDVAVETPLQPARQLSERLGNQVLLKREDLQPVFSFKIRGAYNKVAQLTEEEKARGVIAASAGNHAQGLALAAKRQGIRAVIVMPKTTPEIKVQAVRAHGAKAVLHGDAFPEALAHALKLVDEKGYTFVHPYDDPDTIAGQGTVAMEILRQQPGRLDAIFVPVGGGGLVAGIAAYVKYLRPEIKVIGVEPDESNCLQAAMAAGERVVLGQVGLFADGVAVAQIGQHTFDICKDHVDEVITVSTDEICAAIKDIYDDTRSITEPAGALAVAGIKKYVERERAEGQTLVAIDSGANVNFDRLRHVAERAELGERREAIIAVTIPERPGSFKAFCEAVGKRQITEFNYRYHSGSEAHIFVGVQTHPENDPREALVAYLREKGFPVLDLTDNELAKLHIRHMVGGHAVKVSDEMVFRFEFPERPGALFNFLTKLGGRWNISMFHYRNHGAADGRVVAGLQVPEDERHLIPQTLEAIGYPYWDETANPAYQLFLG

SEQ ID NO: 12355 - DNA, 1527 bp, Neisseria meningitidis MC58
  CDS (1)..(1527): transl_table=11
atgaacacgccccttccttattccgattacctcatccgcatcctgacggcatctgtctatgatgtggcggtcgaaacgcctttggaaccggcacgcagcctttctgtacgtttgaaaaacaacatccttttgaaacgcgaagatttgcagccggttttttcgttcaaaatacgcggcgcgtacaacaaaatgtccaagttgccgaaagatgcgctcgcttgcggcgtgattgcggcaagcgcgggcaatcatgctcaaggcgtggcattgtccgcacagcgtttgggctgccgtgccgttatcgttatgccggagactacgccgaaaatcaaagtggatgcggttaaaagccatggcggcgaggtggttttgcggggcgtttcatacaacgatgcctacgattatgcgatggagttggcggaaaaagaagggttaacctatatcgcgccgtttgatgatcctgatgtgattgcgggacaggggacggtggggatggaaattgtcagccagcatcccgatccaatccgcgccgtattcgtaccgataggcggtggcggtttggcggcgggcgtggcggcatttatcaagcaggtccgtcccgaaatcaaagttatcggcgttcagaccaacgattcctgctgtatgaagcagtcggtcgaagcgggtgaaatcgtccatttgaaagatgtcgggctgttttcagacggcactgcggtcaaagtcgtcggaaacgaaaccttccgcctctgcaaagaacttttggatgaaatcattacagtcgataccgatgcggtttgcggcgcggtcaaggatattttcgatgacacgcgcagcattaccgagccggcgggcgcgttggcgttggcgggtctgaaagcctatatcgcccgagaaggcgcggaaaaccaaaccctgattgccgttaccagcggtgcgaatatgaattttcaccgtttgcgccacgtttcggaacggagcgaattgggcgagggcaacgaaggtatttttgccgttaccatccctgaagaacgcggcagcttccttaagtttgtcaatatattgggaaataggaatattaccgagttcaactaccgctacggagacgatgaaaaagcgcatatctttgtcggacttcaagcggcaggcccgcaggatttggcggttatcggcagccggttggatgaggcgggattgcccaatgtcgatttgaccaacaatgagattgccaaaatccatatccgctatatggtcggagggcggacggacaaagtagaaaacgagcgtttggtcagttttgagtttccggagcgtccgggggcattggcacgctttttgaaccatatgcagggagggtggaatattacgcttttccattaccgcaaccacggtgcggattacgggcggattttggtcggtatcgatgtgccgccgcacgatgccgccgcatttgacggtttcttggaaagtctgggatacagctatcacgaggaaacgcaaaatgccgcgtacaagctgtttcttgcctga

SEQ ID NO: 12356 - protein, 508 aa, Neisseria meningitidis MC58
MNTPLPYSDYLIRILTASVYDVAVETPLEPARSLSVRLKNNILLKREDLQPVFSFKIRGAYNKMSKLPKDALACGVIAASAGNHAQGVALSAQRLGCRAVIVMPETTPKIKVDAVKSHGGEVVLRGVSYNDAYDYAMELAEKEGLTYIAPFDDPDVIAGQGTVGMEIVSQHPDPIRAVFVPIGGGGLAAGVAAFIKQVRPEIKVIGVQTNDSCCMKQSVEAGEIVHLKDVGLFSDGTAVKVVGNETFRLCKELLDEIITVDTDAVCGAVKDIFDDTRSITEPAGALALAGLKAYIAREGAENQTLIAVTSGANMNFHRLRHVSERSELGEGNEGIFAVTIPEERGSFLKFVNILGNRNITEFNYRYGDDEKAHIFVGLQAAGPQDLAVIGSRLDEAGLPNVDLTNNEIAKIHIRYMVGGRTDKVENERLVSFEFPERPGALARFLNHMQGGWNITLFHYRNHGADYGRILVGIDVPPHDAAAFDGFLESLGYSYHEETQNAAYKLFLA

SEQ ID NO: 12357 - DNA, 1212 bp, Campylobacter jejuni subsp. jejuni NCTC 11168
  CDS (1)..(1212): transl_table=11
gtgttagagcttaataaaatttacaaagcaaaacaacaaatttcaggatttgtaaacaaaactcctttcatatactcttcttttttaagtgatatttgtcaaagtgagatttatcttaaaaatgaaaatttacaaattacaggtgcttataaaattcgtggagcttacaataaaatagccaatcttagcactgaacaaaaacaacatggagtcattgcagcaagtgcgggaaaccatgctcaaggcgtggccattagtgcaaaaaaatttagcattaaagcagttatcgtaatgccagaatccactccactcttaaaagtttctgctacaaaagccttaggagcagaggtgatactcagaggagataattttgatgaagcctatgcttttgcaacctcttatgctaaagaaaataatcttagctttatccatccttttgaagatgaatttgtaatggcaggacaaggaactttaatgcttgaaatgcttgatgaaataagcgatcttgatatgattattgcacctgttggaggcggaggacttataagcggtatctcaagtacagctaaacaaatcaatcctaacattaaaatcatcggagttggagccaaaggagctcctgcaatgtatgaaagttttcatgctaaaaaaatcaaaaatgcgaaaagcgtacgcactatagccgatggtattgctgtgcgtgatgcaaatcctataaattttaacattatcttagaatgtgtagatgattttatccaagttgatgatgaagaaatagctaatgcggtattgtttttactcgaaaaacataaaatcatagtcgaaggtgcgggagctgcgagtgtagccgccctgcttcatcaaaaaataaatacacaaaatcataaaaaaattggcgtagttttaagcggaggcaatatcgatgcacaaatgctaaatatcatcatagaaaaaggtttatttaaatcttacagaaaaatgcaaatttatgttactttagtagataaacctggggcattattacaccttacagacagcttaaaaatagccaatgcaaatatagtaaaaatcgactatgatagattttctaccaagcttgattatggcgatgcgatgatttcaattactctagaaaccaaaggtaaagaacatcaagaagaaataagaaaaattttaacccaaaaggcttttaatttctatgaaagtttttaa

SEQ ID NO: 12358 - protein, 403 aa, Campylobacter jejuni subsp. jejuni NCTC 11168
MLELNKIYKAKQQISGFVNKTPFIYSSFLSDICQSEIYLKNENLQITGAYKIRGAYNKIANLSTEQKQHGVIAASAGNHAQGVAISAKKFSIKAVIVMPESTPLLKVSATKALGAEVILRGDNFDEAYAFATSYAKENNLSFIHPFEDEFVMAGQGTLMLEMLDEISDLDMIIAPVGGGGLISGISSTAKQINPNIKIIGVGAKGAPAMYESFHAKKIKNAKSVRTIADGIAVRDANPINFNIILECVDDFIQVDDEEIANAVLFLLEKHKIIVEGAGAASVAALLHQKINTQNHKKIGVVLSGGNIDAQMLNIIIEKGLFKSYRKMQIYVTLVDKPGALLHLTDSLKIANANIVKIDYDRFSTKLDYGDAMISITLETKGKEHQEEIRKILTQKAFNFYESF

SEQ ID NO: 12359 - DNA, 1527 bp, Neisseria meningitidis Z2491
  CDS (1)..(1527): transl_table=11
atgaacacgccccttccttattccaattacctcatccgcatcctgacggcatctgtctatgatgtggcggtcgaaacgcctttggaaccggcacgcagcctttctgtacgtttgaaaaacaacatccttttgaaacgcgaagatttgcagccggttttttcgttcaaaatacgcggcgcgtacaacaaaatgtccaagttgccgaaagatgcgctcgcttgcggcgtgattgcggcaagcgcgggcaatcacgcacaaggcgtggcattgtccgcacagcgtttgggttgccgtgccgttatcgtcatgccggagactacgccgaaaatcaaagtggatgcggtcaaaagccgtggcggcgaggtggttttgcgcggtgtttcatacaacgatgcttacgattatgcgatggagctggcggaacaggaagggctgacctatatcgcaccgtttgacgatcctgatgtgattgcaggacaagggacggtagggatggaaattgtcagccagcatcccgatccaatccgcgccgtattcgtaccgataggcggtggcggtttggcggcgggcgtggcggcatttatcaagcaggtccgtcccgaaatcaaagttatcggcgttcagaccaacgattcctgctgtatgaagcagtcggtcgaagcgggtgaaatcgtccatttgaaagatgtcgggctgttttcagacggcacggcggtcaaagtcgtcggaaacgaaaccttccgtctctgcaaagaacttttggatgaaatcattacagtcgataccgatgcggtttgcggcgcggtcaaggatattttcgatgacacgcgcagcattaccgagccggcgggcgcgttggcgttggcgggtctgaaagcctatatcgcccgagaaggcgcggaaaaccaaaccctgattgccgttaccagcggtgcgaatatgaattttcaccgtttgcgccacgtttcggaacggagcgaattgggcgagggcaacgaaggtatttttgccgttaccatccctgaagaacgcggcagcttccttaagtttgtcaatatattgggaaataggaatattaccgagttcaactaccgctacggggacgatgaaaaagcgcatatctttgtcggacttcaagcggcaggcccgcaggatttggcggttatcggcagccggttggatgaggcgggattgcccaatgtcgacctgaccgatgatgagattgccaaaatccatatccgctatatggtcggagggcggacggacaaagtagaaaacgagcgtctggtcagttttgagtttccggagcgtccgggggcgttggcgcgttttttgaaccatatgcagggcggttggaacattacgctcttccattaccgcaaccacggtgcggattacgggcggattttggtcggtatcgatgtgccgcctcacgatgccgccgcatttgacggtttcttggaaagtctgggatacagctatcacgaggaaacgcaaaatgccgcgtacaagctgtttcttgcctga

SEQ ID NO: 12360 - protein, 508 aa, Neisseria meningitidis Z2491
MNTPLPYSNYLIRILTASVYDVAVETPLEPARSLSVRLKNNILLKREDLQPVFSFKIRGAYNKMSKLPKDALACGVIAASAGNHAQGVALSAQRLGCRAVIVMPETTPKIKVDAVKSRGGEVVLRGVSYNDAYDYAMELAEQEGLTYIAPFDDPDVIAGQGTVGMEIVSQHPDPIRAVFVPIGGGGLAAGVAAFIKQVRPEIKVIGVQTNDSCCMKQSVEAGEIVHLKDVGLFSDGTAVKVVGNETFRLCKELLDEIITVDTDAVCGAVKDIFDDTRSITEPAGALALAGLKAYIAREGAENQTLIAVTSGANMNFHRLRHVSERSELGEGNEGIFAVTIPEERGSFLKFVNILGNRNITEFNYRYGDDEKAHIFVGLQAAGPQDLAVIGSRLDEAGLPNVDLTDDEIAKIHIRYMVGGRTDKVENERLVSFEFPERPGALARFLNHMQGGWNITLFHYRNHGADYGRILVGIDVPPHDAAAFDGFLESLGYSYHEETQNAAYKLFLA

SEQ ID NO: 12361 - DNA, 1548 bp, Escherichia coli O157:H7 EDL933
  CDS (1)..(1548): transl_table=11
  misc_feature (559)..(559): r is g or a
atggctgactcgcaacccctgtccggtgccccggaaggtgctgaatatttaagagcggtgctgcgcgcgccggtctacgaagcggcgcaggtcacgccgctacaaaaaatggaaaagctctcgtctcgtcttgataacgtgattctggtgaagcgcgaagatcgccagccagtgcacagctttaagctgcgcggcgcatacgccatgatggcgggcctgacggaagaacaaaaagcgcacggcgtgatcactgcttctgcgggtaaccacgcgcagggcgtcgcgttttcttctgcgcggttaggcgtgaaggccctgatcgttatgccaaccgccaccgccgacatcaaagtcgacgcggtgcgcggcttcggcggcgaagtgctgctccacggcgcgaactttgatgaagcgaaagccaaagcgatcgaactgtcacagcagcaggggttcacctgggtgccgccgttcgaccatccgatggtgattgccgggcaaggcacgctggcgctggaactgctccagcaggacgcccatctcgaccgcgtatttgtgccartcggcggcggcggtctggctgctggcgtggcggtgctgatcaaacaactgatgccgcaaatcaaagtaatcgccgtagaagcggaagactccgcctgcctgaaagcagcgctggatgcgggtcatccggttgatctgccgcgcgtggggctgtttgctgaaggcgttgcggtaaaacgcatcggcgacgaaaccttccgtttgtgccaggagtatctcgacgatatcatcaccgtcgatagtgatgcgatctgtgcggcgatgaaggatttattcgaagatgtgcgcgcggtggcggaaccctctggcgcgctggcgctggcgggaatgaaaaaatatatcgcccagcacaacattcgctggcgaactggcgtggcgcatattctttccggtgccaacgtgaacttccacggcctgcgctacgtctcggaacgctgcgaactgggcgaacagcgtgaagcgttgttggcggtgaccattccggaagaaaaaggcagcttcctcaaattctgccaactgcttggcgggcgatcggtcaccgagttcaactaccgttttgccgatgccaaaaacgcctgcatctttgtcggcgtgcgcctgagccgcggcctcgaagagcgcaaagaaattttgcagatgctcaacgacggcggctacagcgtggtggatctctccgacgacgaaatggcgaagttgcatgtgcgctatatggtcggcgggcgtccgtcacatccgttgcaggaacgcctctacagcttcgaattcccggaatcaccgggcgcgctgctgcgcttcctcaacacgctgggtacgcactggaacatttctttgttccactatcgcagccatggcaccgactacgggcgcgtactggcggcgttcgaacttggcgaccatgaaccggatttcgaaacccggctgaatgagctgggctacgattgccacgacgaaaccaataacccggcgttcaggttctttttggcgggttag

SEQ ID NO: 12362 - protein, 515 aa, Escherichia coli O157:H7 EDL933
  misc_feature (187)..(187): The Xaa at location 187 stands for Ile, or Val.
MADSQPLSGAPEGAEYLRAVLRAPVYEAAQVTPLQKMEKLSSRLDNVILVKREDRQPVHSFKLRGAYAMMAGLTEEQKAHGVITASAGNHAQGVAFSSARLGVKALIVMPTATADIKVDAVRGFGGEVLLHGANFDEAKAKAIELSQQQGFTWVPPFDHPMVIAGQGTLALELLQQDAHLDRVFVPXGGGGLAAGVAVLIKQLMPQIKVIAVEAEDSACLKAALDAGHPVDLPRVGLFAEGVAVKRIGDETFRLCQEYLDDIITVDSDAICAAMKDLFEDVRAVAEPSGALALAGMKKYIAQHNIRWRTGVAHILSGANVNFHGLRYVSERCELGEQREALLAVTIPEEKGSFLKFCQLLGGRSVTEFNYRFADAKNACIFVGVRLSRGLEERKEILQMLNDGGYSVVDLSDDEMAKLHVRYMVGGRPSHPLQERLYSFEFPESPGALLRFLNTLGTHWNISLFHYRSHGTDYGRVLAAFELGDHEPDFETRLNELGYDCHDETNNPAFRFFLAG

SEQ ID NO: 12363 - DNA, 1707 bp, Deinococcus radiodurans R1
  CDS (1)..(1707): transl_table=11
ttgccccccggcctattctcggcacaagacagcggcgctccgacgcctgacgcgggccgcttcctgggccagccctcctcccccgctgctggcgggggctgcgacttttgcccgtatgttctcctttctttgccgaggtttttcatgtcagacccccgccctgcccccgcccccgctcccttgcccggtacgctggacgggatggacgtgctgcggctcgcgctgaccagtcaggtctacggcgcggccaccgagacgccgctgagccccgccccgcgcctgagcgagcgcagcggcaaccgcgtgctgctcaagcgcgaggaccagcagcccattttctccttcaaattgcgcggcgcctataacaagatgagccagctcagcgccgaggaacgcgcccggggcgtgatttgcgcttcggcaggcaaccacgcacagggagtggcgtttgccggggagaagctcgggattcccgccgtcatcgtgatgcccgcgaccacgcccgacatcaaggtgcaggcgtgccgggcacggggggccgaggtgatcttgcacggcgactcgttcagcgacgccgaaaccttcgcactggcgctgcaacaggagcgcggcctgaccttcgtgcatccctacgacgacccgctggtgctggcggggcagggcaccatcgcgctcgaactgctgcggcaggtggaagaggacgactacgcggtgttcgtgccggtgggcggcggcggcctgatcgcgggggtggcgagcattctgaaagccctcaagcccggcgtgcgggtcatcggcgtggagcccgacgacagcgacgcgatgtaccagagcctgcaagcgggcgaacgggtgcggctcgacaccgtgggcattttcgtggacggggtggcggtcaagcaggtgggggcctacaccttcgacctgacccggcgttacgtggacgactgggtgcgggtgaacaccgacgaggtgtgcgccgccatcaaggacgtgttcgacgacacccgcgccgtgctggaacccgctggggcgctgagcgtggccgggctgaagaaatacgcggcgacccacggcctgcatgaccggacgctggtggcgctcacctgcggggcgaacatcaacttcgaccgcctgcgccacgtggccgagcgcaccgagataggcgagcagcgtgaggcgattctggccgtcacgattcccgagcggcccggcgcctttctggaatttatcgagctgatcggctcgcgggccatcaccgaattcaactaccgctacgctccgcgcgaagacgcccggatttttgtcggcgtgcagctcgggcagccgggcgagcgccaggaactgctgacgctgctgcgtgggcgcggctacgcggtgcttgacctcaccgaagacgaactcgccaaggtccacgtccgccacatggtcggtggccgcgcccccgaggcggtgaacgagcgggtctacgccttcaccttccccgagcggcccggcgccctgcacgactttttgacgcagctccagggcgagtggaacatcagcctctttcactaccgcaaccacggctcggcgcacgggcgggtgctggcgggcgtgcaggtgcctgacgcggcgctcacccgcttcggtgactttctcgctggcctcggctacccggcgcacgacgtgacgagcaatccggcgtaccggctgttcctgacctga

SEQ ID NO: 12364 - protein, 568 aa, Deinococcus radiodurans R1
MPPGLFSAQDSGAPTPDAGRFLGQPSSPAAGGGCDFCPYVLLSLPRFFMSDPRPAPAPAPLPGTLDGMDVLRLALTSQVYGAATETPLSPAPRLSERSGNRVLLKREDQQPIFSFKLRGAYNKMSQLSAEERARGVICASAGNHAQGVAFAGEKLGIPAVIVMPATTPDIKVQACRARGAEVILHGDSFSDAETFALALQQERGLTFVHPYDDPLVLAGQGTIALELLRQVEEDDYAVFVPVGGGGLIAGVASILKALKPGVRVIGVEPDDSDAMYQSLQAGERVRLDTVGIFVDGVAVKQVGAYTFDLTRRYVDDWVRVNTDEVCAAIKDVFDDTRAVLEPAGALSVAGLKKYAATHGLHDRTLVALTCGANINFDRLRHVAERTEIGEQREAILAVTIPERPGAFLEFIELIGSRAITEFNYRYAPREDARIFVGVQLGQPGERQELLTLLRGRGYAVLDLTEDELAKVHVRHMVGGRAPEAVNERVYAFTFPERPGALHDFLTQLQGEWNISLFHYRNHGSAHGRVLAGVQVPDAALTRFGDFLAGLGYPAHDVTSNPAYRLFLT

SEQ ID NO: 12365 - DNA, 1314 bp, Agrobacterium tumefaciens str. C58
  CDS (1)..(1314): transl_table=11
ttgtctccgacgccttcctatggcatagcgggtgccattatgaatttcaatggattgactatcgtggacaagcagcttgtggaagcagcgcggcgggaagtgcgggagatattcccggaaacgccgctgcagttgaatgaacatctcagccgtcgctatggcgcatcgatttggctgaagcgtgaggatctgtccccggttcgttcctacaagattagaggcgcattcaattttctccgcaaggcggtggccaaggctggcaaggacaaggttttcgtctgcgcgtccgccggcaaccacgcccagggctttgctttcgcctgccgccatttcggcgttcacggcgtcgttttcatgccggtgacgacaccgcagcagaagatcgaaaaaacccgcatctttggcggagagttcatcaagatccgtctggtgggcgatatcttcgaccagtgttacgccgctgcgcgtcagcatgtgcaggaccatgacggctacatggttccgccctttgaccatgaggatattatcgaaggccaggcgacggtcgccgccgagatcatggaccagctgcccgaaggcaccaaacctgacatcgtcgtgatgcctgtcggtggtggcggtctttcggccggcctgaccgggtttctggccggcacggtgaagaaggagaacttcgtgttctgcgagccggaaggcgcgcccagcctgaaaaagagcctggaacgtggcgaaccggtgacgctgaacaaggtcgacaattttgtcgatggtgccgccgttgcccgcatcggcgacctgaacttcaaggcgctgaaggattttccggccgagcaggtgatgctcatcccggaaaatgcgatctgcgtgacgatcatcgagatgctgaacctagaaggcgtggtgctggagcctgcgggcgccctgtccatcgccgcgctggaaaggctcggccgcgagaggctggaaggcaagacggtcatcgccgtggtctccggcggtaatttcgatttcgagcgcctgccggacgtcaaggaacgcgccatgcgttacaccggcgtgaagaagtacttcatcctgcgcctgccgcagcgccccggcgcgctgcgcgatttcctcaatctgctcggtccggacgacgatatcgcccgtttcgaatatctgaagaaatccgcccgcaatttcggctcgatcctgatcggcatcgagaccaatgcgcaggaaaacttcgccgggttgctggagcgcttcgaggcagccggtctcggctatgaggatattaccgaaaacgacatcttgtcgaacctgatcatctga

SEQ ID NO: 12366 - protein, 437 aa, Agrobacterium tumefaciens str. C58
MSPTPSYGIAGAIMNFNGLTIVDKQLVEAARREVREIFPETPLQLNEHLSRRYGASIWLKREDLSPVRSYKIRGAFNFLRKAVAKAGKDKVFVCASAGNHAQGFAFACRHFGVHGVVFMPVTTPQQKIEKTRIFGGEFIKIRLVGDIFDQCYAAARQHVQDHDGYMVPPFDHEDIIEGQATVAAEIMDQLPEGTKPDIVVMPVGGGGLSAGLTGFLAGTVKKENFVFCEPEGAPSLKKSLERGEPVTLNKVDNFVDGAAVARIGDLNFKALKDFPAEQVMLIPENAICVTIIEMLNLEGVVLEPAGALSIAALERLGRERLEGKTVIAVVSGGNFDFERLPDVKERAMRYTGVKKYFILRLPQRPGALRDFLNLLGPDDDIARFEYLKKSARNFGSILIGIETNAQENFAGLLERFEAAGLGYEDITENDILSNLII

SEQ ID NO: 12367 - DNA, 1215 bp, Sulfolobus tokodaii str. 7
  CDS (1)..(1215): transl_table=11
atgtcttatacaaaatattttgatgaaatagtaaaaattcaagatagaattaaacaatatattcatgagacgcctattgattactcaaaaaccttttctgatatgattggagctcaaatatatttaaagcttgaaaatttgcagaaaacaggttcttttaaggtaagaggagctttttcaaaattgacaagcctagccgaagaagaaaggaaaaaaggtgttatagcggtttccgcgggtaatcatgctcaaggtgttgcatatgctgcaaaagttttaggaattaaagcaactatagtaatgccagaaactgctccaatctcaaaatatcaagctacaaagtcatacggtgctcaagttattttgtatgggaaatttcttcatgagagtatgaaaaaagctgaggagattataagagaagaaggaagtattcttgttcatccttacggagatcttgatgtaattttgggtcaaggtacattaggactagaacttttgccatataatccagatattgttgttgttcctataggagggggaggactaatatcaggaatatctatagcattaaaagcaaaaaatccaaaaaccaaaataataggtgtacaatcttcagcttctccttcattaaaggtctcaaaagatcttcataggctagtagagattgagccctctttttcgatagcagatggaattctagtaaaatctccctctgaaataacgtttagcataatagatgaattagtggatgatattgttcttgttgatgatgaagaaatagcaaatgctatagtatatttattagaaagaaataaaacattagtagaaggagcagctgctgcttcattagcagcacttttatctggaaagattaaagttgcttataatcataaagctattccggttctaagtgggggcaatatagatctttcaatgttatccagaattatagataagatgcttttcaagaataaacgaatagtcaaagtgaaggtaatagtaccagataaacctggatatcttaataaagtattaagtagagtagcacaaataagagggaacgttatcgatgtagttcatgatagaacaagcagtgatgttaaacctggttatactaaaatttatgtaatgtttgaagtacctagtggtgatgctctttcagatttcatgtacaacttagctttagatggtattgaggctaaattagtagaatag

SEQ ID NO: 12368 - protein, 404 aa, Sulfolobus tokodaii str. 7
MSYTKYFDEIVKIQDRIKQYIHETPIDYSKTFSDMIGAQIYLKLENLQKTGSFKVRGAFSKLTSLAEEERKKGVIAVSAGNHAQGVAYAAKVLGIKATIVMPETAPISKYQATKSYGAQVILYGKFLHESMKKAEEIIREEGSILVHPYGDLDVILGQGTLGLELLPYNPDIVVVPIGGGGLISGISIALKAKNPKTKIIGVQSSASPSLKVSKDLHRLVEIEPSFSIADGILVKSPSEITFSIIDELVDDIVLVDDEEIANAIVYLLERNKTLVEGAAAASLAALLSGKIKVAYNHKAIPVLSGGNIDLSMLSRIIDKMLFKNKRIVKVKVIVPDKPGYLNKVLSRVAQIRGNVIDVVHDRTSSDVKPGYTKIYVMFEVPSGDALSDFMYNLALDGIEAKLVE

SEQ ID NO: 12369 - DNA, 1248 bp, Sinorhizobium meliloti 1021
  CDS (1)..(1248): transl_table=11
atgaagcaggatgttgaaaaagcggcagcggcgatgcgcgagatctttccgccgacgccgcttcagctcaacgagcacctgagcgcgcgctgtggggcgaccgtcttcctgaagcgcgaggacctttcgccggtgcgctcctacaagatccgcggcgccttcaatttcttccgcaagtcgctcggctccggagcggccgggaagaccttcgtttgcgcttccgcgggcaatcacgctcagggctttgctttcgtctgccgccacttcggcgttcccggagtcgtcttcatgcccgtgacgacgccccagcagaagatcgacaaaacgcgcatgttcggggccgagttcatcacgatccgcctcgtcggcgatattttcgatcaatgctacaaggcggcgcgcgagcatgtggaagcgatcggcggcgtcatggtgcctcccttcgaccatgacgatatcatcgaaggccaggccacggttgcagcggagatagccgaacaattgccggccggccccgttgccgatctcgtcgtcctgcccgtcggcggcggcggcttggccgcgggcgtgaccgggtatttgggcgacagcctctcggccgaccgttttctgttctgtgaaccggagggggcgccgagcttcaggcgcagcctggaactcggcggcgtcgtcacgctcgaccaggtggacaatttcgtcgatggcgcggcggtcgcacggatcggcgacctgaactttgctgcgctccggagattttcgccggaacaggtgatgctgctgcctgagaatgcgatctgcctgacgatcaccgaaatgctgaatgtcgagggcgtggttctcgaacccgccggcgcgcttgcaatcaccgcactggaagcgcttggccgcgatagtctcgaaggcaagatcgtcgtagcggtcgtttccggaggcaatttcgacttcgagcgcctgccggacgtgaaggagcgggccatgcgccatgcggggctcaagaaatacttcatcctgcgcatggcgcagcgtccgggcgcgcttcgcgatttcctcggtctcctgggagaggaggacgacatcgcccggttcgaatacctgaaaaagtctgctcgaaacttcggctccgtgctcatcggtatcgaaacgaaacacgcggagaatttccccgttctcaaacagcgtttcgatgcggcgggtctccgctaccaggacatcaccgagaacgagatgctggccaacttcgtcatttga

SEQ ID NO: 12370 - protein, 415 aa, Sinorhizobium meliloti 1021
MKQDVEKAAAAMREIFPPTPLQLNEHLSARCGATVFLKREDLSPVRSYKIRGAFNFFRKSLGSGAAGKTFVCASAGNHAQGFAFVCRHFGVPGVVFMPVTTPQQKIDKTRMFGAEFITIRLVGDIFDQCYKAAREHVEAIGGVMVPPFDHDDIIEGQATVAAEIAEQLPAGPVADLVVLPVGGGGLAAGVTGYLGDSLSADRFLFCEPEGAPSFRRSLELGGVVTLDQVDNFVDGAAVARIGDLNFAALRRFSPEQVMLLPENAICLTITEMLNVEGVVLEPAGALAITALEALGRDSLEGKIVVAVVSGGNFDFERLPDVKERAMRHAGLKKYFILRMAQRPGALRDFLGLLGEEDDIARFEYLKKSARNFGSVLIGIETKHAENFPVLKQRFDAAGLRYQDITENEMLANFVI

SEQ ID NO: 12371 - DNA, 1269 bp, Bacillus subtilis subsp. subtilis str. 168
  CDS (1)..(1269): transl_table=11
atgaaaccgttgcttaaagaaaactctctcatccaagtgaaagacattttgaaggctcaccaaaacgtaaaggacgttgtcattcacacacctttgcagaggaatgacagactttctgagagatatgaatgcaatatctatttaaaacgcgaagacttgcaagttgtcagatcttttaagctcagaggggcttatcataaaatgaaacagctttccagcgagcagacagagaacggagttgtgtgtgcaagtgccggaaaccacgctcaaggtgtggcattttcgtgtaaacatcttggcattcacgggaaaatttttatgccgtctactacaccgagacaaaaagtatctcaagttgaactattcggaaaaggatttatcgatattattttgacaggcgatacgtttgacgacgcgtataaaagcgctgctgaatgctgtgaggcggaatctcggacgtttatccatccgttcgatgatccggatgtgatggccggacagggaacgctcgcagtcgagattttaaacgacattgatacagaaccgcattttctttttgcaagtgtcggaggcggcggccttctctctggggtaggtacatatttgaaaaacgtgtctcctgatacaaaggtaattgctgttgagccggcgggagcggcatcctactttgaatcaaacaaagctgggcatgtcgtcacacttgataaaattgataagtttgtagatggggcggctgttaaaaaaattggcgaggaaaccttccggacgctggaaactgtcgttgatgacattctccttgtgcctgaaggaaaagtatgtacatccattcttgaattatataacgaatgtgcggttgttgctgaaccggctggagctctttctgtcgcagcgcttgatttgtacaaggatcaaattaaagggaaaaacgtggtgtgtgtggtaagcgggggcaataacgatatcggaagaatgcaggaaatgaaggagcgttccttgatttttgaaggccttcagcattattttatcgtcaattttccacaaagagcgggggcgctccgcgaatttcttgacgaagtcctcgggccgaatgatgacattacaaggtttgaatatacgaagaaaaataataaaagcaatggacctgctcttgtcggcatcgagctgcagaacaaagccgattatgggccgctgattgaacggatgaacaaaaaaccgtttcattatgtagaggtgaacaaggatgaggacttgttccatttgctaatctaa

SEQ ID NO: 12372 - protein, 422 aa, Bacillus subtilis subsp. subtilis str. 168
MKPLLKENSLIQVKDILKAHQNVKDVVIHTPLQRNDRLSERYECNIYLKREDLQVVRSFKLRGAYHKMKQLSSEQTENGVVCASAGNHAQGVAFSCKHLGIHGKIFMPSTTPRQKVSQVELFGKGFIDIILTGDTFDDAYKSAAECCEAESRTFIHPFDDPDVMAGQGTLAVEILNDIDTEPHFLFASVGGGGLLSGVGTYLKNVSPDTKVIAVEPAGAASYFESNKAGHVVTLDKIDKFVDGAAVKKIGEETFRTLETVVDDILLVPEGKVCTSILELYNECAVVAEPAGALSVAALDLYKDQIKGKNVVCVVSGGNNDIGRMQEMKERSLIFEGLQHYFIVNFPQRAGALREFLDEVLGPNDDITRFEYTKKNNKSNGPALVGIELQNKADYGPLIERMNKKPFHYVEVNKDEDLFHLLI

SEQ ID NO: 12373 - DNA, 978 bp, Caulobacter crescentus CB15
  CDS (1)..(978): transl_table=11
atgaccgtctcgctcgccgacatccaagccgccgccgtacgcctgaagggctcggccgtcgagacgccgctgatcgagagccccgccttgaacgacaggctgggcgggcggatcttcctcaagcccgagaccttgcaacgtgccggcgccttcaagtttcgcggcgcctacaaccgtctttctcagctcagcgatgaggaaaaggcgcgcggcgtcgtggccttctcgtccggcaatcacgcccaaggggtggcgctggcggccaggctgctgggcgtgccggcgctgattgtgatgccctccgattcgcccagcgtgaaggtcgaaggcacgcgcgggtttggcgcggacatccgcttctacgaccgcttcaccgaggaccgcgtcgccatcgccgaccagatcgcggccgagcgcggctgcgtggtcgtgccctcgtatgacgacccgcacatcatcgccggccagggcacggtgggtctggagatcgtcgcccaggccgccgcgcaaggcgcgacgctggaccgcctgatctgctgcgtcggcggcggcggtctgatcgccggaacctcgacggcggtgaaggccctctcgccggccaccgagatctggggcgtggagcccgccggcttcgacgagacgcggcgctcgctggaaagcggccggcgcgagaccatcgacaaggacgcccgctcgatctgcgacgccctgctgaccccgatccccggcgacctgacctggccgatcaaccagaaaaacctctcaggcgtggtcgcggtgaccgacgccgaggtggccgaggcgatgcgctatgcgttctcgaccttgaaactggtggtggagcccggcggctgcgtggccctgacggcggcgctgacaggcaaggtcgacgtcgccggcaagaccgtggcgatcgtgctgtcgggcggcaatgtcgatccggggttgttcgcgcaggtcttgggcggtcaaatctga

SEQ ID NO: 12374 - protein, 325 aa, Caulobacter crescentus CB15
MTVSLADIQAAAVRLKGSAVETPLIESPALNDRLGGRIFLKPETLQRAGAFKFRGAYNRLSQLSDEEKARGVVAFSSGNHAQGVALAARLLGVPALIVMPSDSPSVKVEGTRGFGADIRFYDRFTEDRVAIADQIAAERGCVVVPSYDDPHIIAGQGTVGLEIVAQAAAQGATLDRLICCVGGGGLIAGTSTAVKALSPATEIWGVEPAGFDETRRSLESGRRETIDKDARSICDALLTPIPGDLTWPINQKNLSGVVAVTDAEVAEAMRYAFSTLKLVVEPGGCVALTAALTGKVDVAGKTVAIVLSGGNVDPGLFAQVLGGQI

SEQ ID NO: 12375 - DNA, 1203 bp, Caulobacter crescentus CB15
  CDS (1)..(1203): transl_table=11
atgaccctcgacctcgccgctatccaggccgccgccggccgtctccagggccagatcgagcgcacgccgtgccgccactccaagaccctctcgaagatcaccggcgccgaggtgtgggtgaagttcgagaacctgcagttcaccgccgcctacaaggagcgcggcgcgctcaacaagctgatgctcctctcggagaccgagaagcagcgcggcgtcatcgccgccagcgccggcaaccacgcccagggcttggcctatcacggcgcgcgcctcggcgtgccggtcaccatcgtcatgcccaagaccacgcctttcgtgaaggtgcagcacacccgcgacttcggcgcgaccgtggtcatcgagggcgagacctatgacgacgccaacgcccatgcccgcaagctgcgcgacgagcagggcctgaccttcgtccacccgttcgacgactacgacatcatggccggacagggcaccatcgccctggaaatgctggaagacgcgcccgatctggagatcctgcccgtgccgatcggcggcggcggcctgatcagcggcgtggcgacggcggccaaggcgctgaagccggatatccgcatcatcggctgcgagccggccatgtatccgtccttcaccgccaagatgcgcggtgtcgccgcccactgcggcggccagaccatcgccgaaggggtcgcggtcaagcaggtcggcgagctgacctatggcgtcgttcgcccgttgctggacgacgtgctgctgctggaagagccctatctggagcaggccgtctcgctctattgcaatgtcgagaagaccatcgccgagggcgcgggcgcagcctcgctggccgctttgctggcctatcccgaacgcttccggggcaagaagtgcggcctgatcctgtgcggcggcaatatcgacacccgcctcttggcctcggtgctgacccgcgaactggtgcgcgcccagcgcctggccagcttgcgaatcatcggcgacgaccgtccgggcctgttgtcgaccgtcgcctcggtcatcggcgccatgggcgccaacatcatcgaagtgaatcacaaccgcctggccctggacgtgccggccaagggcgcggagttcgacatcaccatcgaaacccgcgacgcccagcacacccaggaggtcatggaggccctgcgcgagagcggctacccgccgcgggtggtttga

SEQ ID NO: 12376 - protein, 400 aa, Caulobacter crescentus CB15
MTLDLAAIQAAAGRLQGQIERTPCRHSKTLSKITGAEVWVKFENLQFTAAYKERGALNKLMLLSETEKQRGVIAASAGNHAQGLAYHGARLGVPVTIVMPKTTPFVKVQHTRDFGATVVIEGETYDDANAHARKLRDEQGLTFVHPFDDYDIMAGQGTIALEMLEDAPDLEILPVPIGGGGLISGVATAAKALKPDIRIIGCEPAMYPSFTAKMRGVAAHCGGQTIAEGVAVKQVGELTYGVVRPLLDDVLLLEEPYLEQAVSLYCNVEKTIAEGAGAASLAALLAYPERFRGKKCGLILCGGNIDTRLLASVLTRELVRAQRLASLRIIGDDRPGLLSTVASVIGAMGANIIEVNHNRLALDVPAKGAEFDITIETRDAQHTQEVMEALRESGYPPRVV

SEQ ID NO: 12377 - DNA, 1512 bp, Nostoc sp. PCC 7120
  CDS (1)..(1512): transl_table=11
atgttttgcgactacctggtacaaattctgactgcccgtgtgtatgatgttgcccaggaatcacctctggaatatgcccccaatctttcagccagactgaataataaactgttgctgaagcgtgaggatatgcagtctgtgttttcctttaagctgcggggtgcttacaacaagatggtgaatctaccgccggatttactggcacagggtgtaattgcggcttctgcggggaatcatgcccaaggtgtggctctaggcgcaaaacagctaggaacgagagcgattattgtcatgccggttactacaccccaggtgaaggtagatgcagttaaagcacgaggaggagaggtggtattgcatggggatacctatgatgatgcctatgcctacgcgcgccaattggaagcagagaaaggtttaacatttattcacccctttgatgatcctcatgtaattgcgggacagggaactattgggatggaaattctcagacaatatcagcaacctattcatgcaatttttgttgctattggcggcggcggtttgatttcggggattgctgcttatgtaaaacgcttacgtccagaaattaaaattattggggttgaaccggttgacgctgatgccatgaaccaatccttgcaagctggtaaacgggtgcgattgtcacaggtgggtttatttgccgatggggtagcagtgcgggaagtgggagaagaaaccttccggctgtgtcaggaatatgtggacgagattattttggtcgatacagatgacacctgtgcagcgattaaggatgtatttgaagataccagatctattttagaaccggcgggggcattggcgatcgccggcgctaaagcttatgtagaacgagaacaaatccaaggacaaactttagttgctgtcgcctgcggcgcaaatatgaattttgaccgtctgcgctttgttgcagaacgggcagaatttggtgaacgccgcgaagctatctttgcagtgacaattcctgaaacacctgggagtttgcggaagttttgcgaatgtattggtagacgcaatttgacagagtttaactatcgcattgctgatgaaaaaattgcccatatttttattgggatgcagattcaaaaccgtgctgataaaattcacatggtagagacttttgcagaatgtggttttgaaatcctcgatttaacagatgatgaactgacaaaactgcacttgcgccacatggtgggtggacattctcccctagcccataatgaattactctaccgttttgaatttccggaacgccctggcgcattgatgaaatttgttgcctccatgagtcctaattggaatatcagtatgtttcactaccgcaacaatggctcagactacgggcgcattgtggtaggaatgcaagtcccaccgcaggaaatggaagaatggcaagcatttctcgattccctcggctaccagtattgggatgaaagccagaacccagcctataagctatttttgggttag

SEQ ID NO: 12378 - protein, 503 aa, Nostoc sp. PCC 7120
MFCDYLVQILTARVYDVAQESPLEYAPNLSARLNNKLLLKREDMQSVFSFKLRGAYNKMVNLPPDLLAQGVIAASAGNHAQGVALGAKQLGTRAIIVMPVTTPQVKVDAVKARGGEVVLHGDTYDDAYAYARQLEAEKGLTFIHPFDDPHVIAGQGTIGMEILRQYQQPIHAIFVAIGGGGLISGIAAYVKRLRPEIKIIGVEPVDADAMNQSLQAGKRVRLSQVGLFADGVAVREVGEETFRLCQEYVDEIILVDTDDTCAAIKDVFEDTRSILEPAGALAIAGAKAYVEREQIQGQTLVAVACGANMNFDRLRFVAERAEFGERREAIFAVTIPETPGSLRKFCECIGRRNLTEFNYRIADEKIAHIFIGMQIQNRADKIHMVETFAECGFEILDLTDDELTKLHLRHMVGGHSPLAHNELLYRFEFPERPGALMKFVASMSPNWNISMFHYRNNGSDYGRIVVGMQVPPQEMEEWQAFLDSLGYQYWDESQNPAYKLFLG

SEQ ID NO: 12379 - DNA, 1524 bp, Ralstonia solanacearum GMI1000
  CDS (1)..(1524): transl_table=11
atggccatcgactatctcaagaagatcctgaccgccaaggtctacgacgtcgcgcaggaaaccgacctgcagcccgcgcccagcctgtcggcacgcatcggcaaccgcgtgtacctcaagcgcgaagacaaccagccggtgttctcgttcaagctgcgcggcgcctacaacaagatggcgtcgctgacgccggccgagcgcaagcggggcgtgattacggcatcggcgggcaaccatgcgcagggcgtggcgttcagcgccgcccggctcggctgcaaggcggtcatcaccatgccggtgacgacgccgcagctgaagatcgacggcgtgcgctcgcgcggcggcgagtgggtcgagatcgtgctgcacggcgaaagctatacggatgcgtacgaccacgccgtcaagctgcaggagaagcacggctacaccttcgtccacccgttcgacgatccggaggtgatcgcgggccagggcaccattgccgtggagatcctgcgccagcatccggagccgatccacgccatcttcgcggcgatcggcggcggcgggctggtgtcgggcatcgcggcctacgtgaaggcggtgcgcccggacatcaaggtgatcggcgtgcagacggcggattccgatgcgatggcctgctcggtggcggccggcaagcgggtgacgctgcgggacgtgggcctgttctcggacggcacggcggtcaagctggtcggcaaggaaaccttccgcctgacccgcgaactggtcgacgagatcatcaccgtggacaccgacgccatctgcgcggcgctcaaggacgtgttccaggacacccgcagcgtgctggagccggcgggcgcgctggcgctggccgggctcaagcagtacgcggcggaccgcaagctcaagagccagtcgctggtggcgatcgcgtccggcgccaacatgaacttcgaccgcctgcgcttcgtggccgagcgcgccgaggtgggcgaggcgcgcgaagccgtgttcgcggtgacgattccggaggagcgcggcagcttcaggcgcttctgcgaggtggtcggctggtcgcgcagcgtgaccgagttcaactaccgcatcgccgacaagaacgaggcgcacatcttcgtgggcgtgcagatcgcctcgcgcgccgagggcgacaagatcgccgacggcttccgcaagcacggcttcccgacgctggacctgtccaacgacgaactggccaagcagcacatccgctacatggtgggcgggcattcgccgctggccgagaacgagctgctgtaccgcttcgagtttcccgagcggcccggcgcgctgataaagttcctctcgagcatgagcccgaactggaacatcagcctgttccactaccgcaaccagggcgcggattcgagcaacatcctggtcggcatccaggtgccgaagaacgagaagcgcgcgttcaaggccttcctcgccacgctcggctacacgttctgggacgaaagcgagaacccggtctacggactgttcctgcgctga

SEQ ID NO: 12380 - protein, 507 aa, Ralstonia solanacearum GMI1000
MAIDYLKKILTAKVYDVAQETDLQPAPSLSARIGNRVYLKREDNQPVFSFKLRGAYNKMASLTPAERKRGVITASAGNHAQGVAFSAARLGCKAVITMPVTTPQLKIDGVRSRGGEWVEIVLHGESYTDAYDHAVKLQEKHGYTFVHPFDDPEVIAGQGTIAVEILRQHPEPIHAIFAAIGGGGLVSGIAAYVKAVRPDIKVIGVQTADSDAMACSVAAGKRVTLRDVGLFSDGTAVKLVGKETFRLTRELVDEIITVDTDAICAALKDVFQDTRSVLEPAGALALAGLKQYAADRKLKSQSLVAIASGANMNFDRLRFVAERAEVGEAREAVFAVTIPEERGSFRRFCEVVGWSRSVTEFNYRIADKNEAHIFVGVQIASRAEGDKIADGFRKHGFPTLDLSNDELAKQHIRYMVGGHSPLAENELLYRFEFPERPGALIKFLSSMSPNWNISLFHYRNQGADSSNILVGIQVPKNEKRAFKAFLATLGYTFWDESENPVYGLFLR

SEQ ID NO: 12381 - DNA, 1209 bp, Clostridium perfringens str. 13
  CDS (1)..(1209): transl_table=11
gtgattattttgtatttagaaaaaattattaaagcaaaaaaaaatatagaagatgtagttataaaaacacctttaatatatagcgaggtcttttcaaggaaatctggaaaccaagtgtatatgaaatgtgaaaatttacaattaacaggtgcttacaaaataagaggtgctttaaataaaataagatctttatcagatgaagaaaaatcaaaaggtgttgtttgttcttctgccggaaatcatgctcaaggcgtagcttttgcagcatcacaagctaatgttaaatcaactatagtaatgccaaagactactcctctactaaaaatccaatcaacaaaggatttaggagggaatgttgttttatcaggttatgtttatgatgatgcttttaatgaggctaaaagaattgaacaagaacaaggagccttatttatacatccatttaatgatattgatgtaatttgtggacaaggtacagtagccttagaaatatttgaagatttaaatgatgtagatattattctctgccctataggtggcggtggcttaataagtggagttaccctagctgctaaggctttaaaccctaatgttaaagtaattggagtacaggctgaaggtgcaaatgcaatggttaaaagttttaaggcaggagaaataattgctttagacgctgttgatactattgctgatggaattgcagtaaaaagacctggtgatttaacatttaaatttataaaagaatatgttgatgatataataactgtatcagatcatgaaattgttgaagcattctttacattaagtgaaaaacataaacttttagcagaagcttcaggagcagtctcattagcagcttctgctaaattaaattgtaaagataaaaatatagtatcagtaataagtggtggtaatatagatatggttactataacttcattaataaacagcgcattagtagctaaaggaagactttttggatttagtttagaagttcctcataaaccaggacaaatattgaagattgctaaagttcttgctgatactaatgctaatatagtaaaacttgaacatgatcattttaaagcaagggatgctcttaaaaatatggttatagaagtaactttagagacaaatggacactctcacatagaggaaataaaaaaagctttaacagatcaaaattatgtaataaaacaaatttattaa

SEQ ID NO: 12382 - protein, 402 aa, Clostridium perfringens str. 13
MIILYLEKIIKAKKNIEDVVIKTPLIYSEVFSRKSGNQVYMKCENLQLTGAYKIRGALNKIRSLSDEEKSKGVVCSSAGNHAQGVAFAASQANVKSTIVMPKTTPLLKIQSTKDLGGNVVLSGYVYDDAFNEAKRIEQEQGALFIHPFNDIDVICGQGTVALEIFEDLNDVDIILCPIGGGGLISGVTLAAKALNPNVKVIGVQAEGANAMVKSFKAGEIIALDAVDTIADGIAVKRPGDLTFKFIKEYVDDIITVSDHEIVEAFFTLSEKHKLLAEASGAVSLAASAKLNCKDKNIVSVISGGNIDMVTITSLINSALVAKGRLFGFSLEVPHKPGQILKIAKVLADTNANIVKLEHDHFKARDALKNMVIEVTLETNGHSHIEEIKKALTDQNYVIKQIY

SEQ ID NO: 12383 - DNA, 1803 bp, Schizosaccharomyces pombe 972h-
  CDS (1)..(1803)
atgactggaacgagtttttacacttcggtactcagattgggacgattggctcaacagggcctaaaattccaatctgtaaaacatattcgtccatcatgtttttcatcttttggattacaagctaaacgttggaactctactcaacaaaatgatagttctattgattgtttagaacctaagctgcaaggaattattgaagacaatatttctccctcgacggcacaaaaagaaatatcagacatcaagtttaatattccaaaggaaatgcttcttccagatggaactcctgattatttacgtttgactctcacgtctaacgtgtatgaagttatcaaggagactcctcttacaaagggtgttgtcatttctgaaagtaccggtgttccagtctacttaaaacgtgaagatctcactcctgtgttttcatttaaaattcgaggggctcataataaaatggcttctcttgataagcagtcattgaaaaatggagtcattgcttgttccgctggcaatcacgcccagggtgttgcttactccgctaggactcttggtgtaaaagctaccattgttatgcctcagaatactcctgaaatcaaatggaggaacgttaagagattgggcgctaatgttctcttacatggagctaattttgacattgctaaagcagaatgtgcacgtttggctaaagagcaaaatctcgaagttattcatccctttgacgatccttatgtaattgctggacaaggaaccattggacttgaaattcttcatcaaatagatcttcgcaagctggatgctatttactgcgctgttggcggtggtggtttaattgctggaatagctacttacgttaagcgtattgctccccatgttaaggtcattggtgtcgagacatttgacgctgatgctttaaaaaagtctttgaaggacaaaaagcgggtaacccttaaggaagttggcttattcgctgatggaactgctgtgaaacttgttggagaggaaaccttccgtcttgtctccaagaatattgacgatgtagttcttgttgacaaagatgagatttgtgcagccattaaggatgtttttttggatacccgttcagtggtcgaaccatcaggagctatggctgttgctggtatgaagcgttatgtcgctaaacacaagcctaaaaatcccaatgctgctcaggtttgcatcttaagtggtgccaatatggactttgatcgccttagatttattgctgagcgtgctgatcttggtttgaacaaggaagtattcttgagtgtcactattcctgagcgccctggttcatttgaagccctacacaacattattactccacgtagtattaccgaattttcttatcgttacgataatgatgactatgctaacatttacacatcgtttgtggtaaaggaccgtgcaactgaattgcctttgattcttcaacaaatctctgagcaaaatatggttgcagaagatatcagcgataatgaacttgctaaaactcatgcccgttatcttattggaggaaaatcatctgtttcaaaagagcgtttgtaccgattggatttccctgaacgccctggagctttatgtaagtttttgaggagtataaaggaagtttgcagcatttcccttttccattatcgtaattgtggtggagatatagctagtgtgcttgctggccttagagtttttgatggccaagtggaaaaacttcattcagttttggaagagattggatacaactgggtggacgaaacaaataatcccgtttacttgcgctatcttcgtaaatag

SEQ ID NO: 12384 - protein, 600 aa, Schizosaccharomyces pombe 972h-
MTGTSFYTSVLRLGRLAQQGLKFQSVKHIRPSCFSSFGLQAKRWNSTQQNDSSIDCLEPKLQGIIEDNISPSTAQKEISDIKFNIPKEMLLPDGTPDYLRLTLTSNVYEVIKETPLTKGVVISESTGVPVYLKREDLTPVFSFKIRGAHNKMASLDKQSLKNGVIACSAGNHAQGVAYSARTLGVKATIVMPQNTPEIKWRNVKRLGANVLLHGANFDIAKAECARLAKEQNLEVIHPFDDPYVIAGQGTIGLEILHQIDLRKLDAIYCAVGGGGLIAGIATYVKRIAPHVKVIGVETFDADALKKSLKDKKRVTLKEVGLFADGTAVKLVGEETFRLVSKNIDDVVLVDKDEICAAIKDVFLDTRSVVEPSGAMAVAGMKRYVAKHKPKNPNAAQVCILSGANMDFDRLRFIAERADLGLNKEVFLSVTIPERPGSFEALHNIITPRSITEFSYRYDNDDYANIYTSFVVKDRATELPLILQQISEQNMVAEDISDNELAKTHARYLIGGKSSVSKERLYRLDFPERPGALCKFLRSIKEVCSISLFHYRNCGGDIASVLAGLRVFDGQVEKLHSVLEEIGYNWVDETNNPVYLRYLRK

SEQ ID NO: 12385 - DNA, 1215 bp, Fusobacterium nucleatum subsp. nucleatum ATCC 25586
  CDS (1)..(1215): transl_table=11
atggctaagttagaagcttttataaaagcaaaagaaaaattatcaaaagtacttttagaaacacagttaatttacagtcctatattctcaaaagaatctggaaacaaagtattcatcaagcctgagaacttacaaaaaacaggttcatttaagataagaggagcatacaataaaatttctaatctaacagatgctgaaaagaaaagaggtgtaattgcctcatctgctggaaatcacgctcaaggtgttgcttatggtgctaaggaatctggtataaaggcagttattgtaatgcctaaatctactcctcttataaaagttgaatctacaaaacaatatggagcagaagttattttacatggtgatgtttatgatgatgcctttaaaaaagcaaaagaattagaagaaaaagaaggttatgtgtttgtccatccttttaatgatgaagatgttttagatgggcaaggaacaatagccctagaaattttagaagaacttcctgaaactgatattatacttgttcctattggtggtggtggtttaatttcaggtatagcttgtgctgcaaaaatattaaaacctgaaataaaaattattggtgttgaaccagaaggagctgcttctgcttatgaagctataaaggaaaataaagttgttgaacttaaagaagctaatacaatagctgatggaaccgctgtaaagaaaattggagacctaaactttgaatatattaaaaaatatgttgatgaaattataacagtatctgattatgaattgatggaagcatttttattattagtagaaaaacataaaattattgcagaaaattctggtatattatcaatagctgctacaaaaaaacttaaggaaaaaaataaaaaagttgtatctgtcataagtggtggtaatatagatgtcttaatgatttcatctatgattaataaaggacttatcagaagagatagaatctttaattttacagttagcattcctgataaaccaggtgaattagcaaaagttgtagatttaatcgctgaacagggggctaatgtgataaaacttgaacataatcaatttaaaaatctatcaagatttaaggacattgaattacaaattactgttgaaactaatggaagtgaacatgtccaaaatttaactcaagcttttgaagaaaaaggttatgaaatagtaagaatcaaatctaaaataaattaa

SEQ ID NO: 12386 - protein, 404 aa, Fusobacterium nucleatum subsp. nucleatum ATCC 25586
MAKLEAFIKAKEKLSKVLLETQLIYSPIFSKESGNKVFIKPENLQKTGSFKIRGAYNKISNLTDAEKKRGVIASSAGNHAQGVAYGAKESGIKAVIVMPKSTPLIKVESTKQYGAEVILHGDVYDDAFKKAKELEEKEGYVFVHPFNDEDVLDGQGTIALEILEELPETDIILVPIGGGGLISGIACAAKILKPEIKIIGVEPEGAASAYEAIKENKVVELKEANTIADGTAVKKIGDLNFEYIKKYVDEIITVSDYELMEAFLLLVEKHKIIAENSGILSIAATKKLKEKNKKVVSVISGGNIDVLMISSMINKGLIRRDRIFNFTVSIPDKPGELAKVVDLIAEQGANVIKLEHNQFKNLSRFKDIELQITVETNGSEHVQNLTQAFEEKGYEIVRIKSKIN

SEQ ID NO: 12387 - DNA, 978 bp, Streptomyces coelicolor A3(2)
  CDS (1)..(978): transl_table=11
gtgacgaccaccaccccgccggtcaccctcgacgacgtccgctccgccgcggcccgcatcaagggcgtcgcgcaccgcaccccggtgctgcgctcgcgcaccctcgacgccctcgtcggcgccgaggtccacctcaagtgcgagaaccagcagcgggtcggcgccttcaagttccgcggcgcctacaacgcggcctcccgcctcaccccggagcagctggccaggggcatcgccgcctactcctcgggcaaccacgcccaggcggtcgccctggccgcccgtgaactgggcacgaccgcggtgatcgtcatgcccgaggacgcgccgccctccaagcgggacgccaccgcgggctacggcgccgagatcgtcacctacgaccgctacaccggcgaccgtgtggccgtcgccgaagcgctggccgccgaccggggactgaccctgatcccgccctacgaacacccgcacgtcatcgcgggccagggcaccgccgccctcgaactggtcgaggagacgggggagctggacgcgctggtcgcccccgtcggcggcggcggcctgatcgccggaagcgccaccgcggtcaaggcactgcaccccggcatgcgggtgatcggcgtcgagccggaggccggggacgacaccaggcgctccctggccgcgggccggcgggtcagcgtgccggtcccgcgcaccatcgccgacggccaggcgctgcccacccccggcgagctgacgttctccctcaaccggcgcctgctcgacgggatcgtgctggtgtccgacgacgagatccgggacgcgatgcggttcgccttcgaacggctgaagaccgtcctcgaacccagcggcgccaccccgctggccgccctcctgaacggccggatcgacgccctgccgcgccgcgtcggcgtgatcctctccggcggcaacgtggacgccgcccggttcgccgaactctgcggcgcgccccgctga

SEQ ID NO: 12388 - protein, 325 aa, Streptomyces coelicolor A3(2)
MTTTTPPVTLDDVRSAAARIKGVAHRTPVLRSRTLDALVGAEVHLKCENQQRVGAFKFRGAYNAASRLTPEQLARGIAAYSSGNHAQAVALAARELGTTAVIVMPEDAPPSKRDATAGYGAEIVTYDRYTGDRVAVAEALAADRGLTLIPPYEHPHVIAGQGTAALELVEETGELDALVAPVGGGGLIAGSATAVKALHPGMRVIGVEPEAGDDTRRSLAAGRRVSVPVPRTIADGQALPTPGELTFSLNRRLLDGIVLVSDDEIRDAMRFAFERLKTVLEPSGATPLAALLNGRIDALPRRVGVILSGGNVDAARFAELCGAPR

SEQ ID NO: 12389 - DNA, 1227 bp, Brucella suis 1330
  CDS (1)..(1227): transl_table=11
atgacccccttcgtcaaatccgtggcccaggcagaaaaggcaatgcgcgcgctcttttgcgaaacgccattgcaacgcaacgattatctgtcgcggaaatatggtgcgcagatttggctgaaacgcgaagacctgacgccggtgcgctcctacaagctgcgcggtgccttcaattttatttccaaagccgttgaaacaacagataaaaatgccgttttcgtctgtgcttccgccggcaatcatgcgcagggctttgcattcgtctgccggcatttcgggcgcaagggcgtggttttcatgccagtcaccacgccgcagcagaaaatcgacaagacgcgcacctttggcggagaattcatcgaaatcaaacttgtcggcgatattttcgatgtctgttatgccgcctcgcaggaattcgcagccgccaacaagggcgtgatggtgccacccttcgaccatcccggcattgttgaagggcaggcgacagtcgcgctggaaatcgagcggcaattgccggacgacagcaagtcggacctcgtgctcctgccggttggcggtggcgggctttcaagcggcgtaacgcaatatatcgccgatcttggctggaaaaccgctttccgctttgtggagccgcagggcgcggcaagcctcaaggccagcctggaggcgggcaagcgggtcaagctttcgcatatcgataattttgtcgatggtgctgccgttgcagaaatccgcaaagaaaatttcaaacttctcaaaggcttcgatccgaaaactgtcataacggttccggaaaacaggctctgcgcgaccattgttgaaatgctgaatattgaaggtgttgtgctggaaccggccggtgcgctcggcatcgatgcgctcaaggatttcaagaaaagcgacatcaagggcaaacgcattgttatcgtcgtttctggcggcaatttcgatttcgagcggctgccggatgtgcgggaaagggcgcttcgttttgaagggctgaagaaatatttcattttccgctttcctcagcgccccggcgcattgcgctccttccttgaccttctggggccggatgacgatattgcgcgctttgaatatctcaagaaatcggcgcgaaatttcggctcggtgctaatcggtatcgaaaccagggacgcggcaaatttcaagcttctggagaagaagtttgccgaatccggctgggcatcaggatatcagcgataa

SEQ ID NO: 12390 - protein, 408 aa, Brucella suis 1330
MTPFVKSVAQAEKAMRALFCETPLQRNDYLSRKYGAQIWLKREDLTPVRSYKLRGAFNFISKAVETTDKNAVFVCASAGNHAQGFAFVCRHFGRKGVVFMPVTTPQQKIDKTRTFGGEFIEIKLVGDIFDVCYAASQEFAAANKGVMVPPFDHPGIVEGQATVALEIERQLPDDSKSDLVLLPVGGGGLSSGVTQYIADLGWKTAFRFVEPQGAASLKASLEAGKRVKLSHIDNFVDGAAVAEIRKENFKLLKGFDPKTVITVPENRLCATIVEMLNIEGVVLEPAGALGIDALKDFKKSDIKGKRIVIVVSGGNFDFERLPDVRERALRFEGLKKYFIFRFPQRPGALRSFLDLLGPDDDIARFEYLKKSARNFGSVLIGIETRDAANFKLLEKKFAESGWASGYQR

SEQ ID NO: 12391 - DNA, 1638 bp, Shewanella oneidensis MR-1
  CDS (1)..(1638): transl_table=11
atgttatctctcgcatcgtcgcaaacggaacaagcggagtctcagccagctcaggcttctcccgcttcagttgagaaaagtcagctagctcaacactatctgcaaaagatcctactatcgtcggtttatgatgttgcgaaagtgacaccactctcgagcctcaataaactctcggcgcgtttaggctgccaagtgtttttaaagcgtgaggatatgcaacccgtacattcctttaaactgcgtggcgcctataaccgcatcgcccagttgagccaagccgaatgccagcgtggcgtggtgtgcgcctcggcgggcaaccatgcccaaggtgtagccatgtcggcggcgagccgtggtgtggatgcggtgattgtgatgcccgaaaccacgccggatattaaagtcgatgcggtgcgccgcttgggtggcaacgtggtattgcacggccaagctttcgatcaagccaatggttttgcgatgacgatggcccagcaggaaggtcgggtgtatatcgcccccttcgatgatgaagccgtgatcgctggccaaggcactattgcccaagaaatgctgcaacagcagcgcgatcttgaagtgatttttgtgcccgtgggcggcggcggtttaattgcgggtattgctgcctactacaaggcggtgatgccacaggtgaaaattgtcggcgttgagcctgaagatgcggcctgcttaaaggcggcgatggaagcgggcgagcctgtgaccttatcccaagtgggcctgtttgccgacggggtcgcggttaagcgtattggtactgagccatttcgtgtcgccaaactgtgtgtagatgccgtggtgacggtcacgtccgacgaaatctgtgcagcggtgaaagatatttttgaagatacccgcgctattgccgaacccgcaggtgctttatctttagctgggcttaaaaaatatgtcagcactaatgctacaggtgagagtggtcgcggcgaaaaggtcgcggcgattttaagtggcgcgaatgtgaacttccacagtttgcgctatgtgtccgagcgctgcgagctgggtgagcaaaaagaagcggtgctggcggttaaagtgcccgagcgtccgggcagcttcctgcgtttttgtgagctgctcgaaaagcgggtgatgaccgaatttaattatcgctttagcagccgagatatggcggtggtatttgcgggtatccgtttgaccaaaggccatggtgaattagagcagatcatcaataccttagaagacaatggctttgaggtgcaggacttatccggtgatgaaactgcgaaattgcatgtgcgttatatggtcggtggtcatccgccagagccgttagaggagcgcctatttagctttgagtttcccgagcatccgggtgcactgctgaagtttttaaccaccttgcagagtaagtggaatatcagtctatttcattatcgcaaccacggcgcagcctttggccgagtgctggcggggtttgaagtgcccgcgagtgatgccttgccatttcagcagtttttaactgagctgggatttgtctatcaagaagagacccaaagccctgcttatcaactgtttttgaatgccggaaaaggaaaaaacaacctgcctgtgtag

SEQ ID NO: 12392 - protein, 545 aa, Shewanella oneidensis MR-1
MLSLASSQTEQAESQPAQASPASVEKSQLAQHYLQKILLSSVYDVAKVTPLSSLNKLSARLGCQVFLKREDMQPVHSFKLRGAYNRIAQLSQAECQRGVVCASAGNHAQGVAMSAASRGVDAVIVMPETTPDIKVDAVRRLGGNVVLHGQAFDQANGFAMTMAQQEGRVYIAPFDDEAVIAGQGTIAQEMLQQQRDLEVIFVPVGGGGLIAGIAAYYKAVMPQVKIVGVEPEDAACLKAAMEAGEPVTLSQVGLFADGVAVKRIGTEPFRVAKLCVDAVVTVTSDEICAAVKDIFEDTRAIAEPAGALSLAGLKKYVSTNATGESGRGEKVAAILSGANVNFHSLRYVSERCELGEQKEAVLAVKVPERPGSFLRFCELLEKRVMTEFNYRFSSRDMAVVFAGIRLTKGHGELEQIINTLEDNGFEVQDLSGDETAKLHVRYMVGGHPPEPLEERLFSFEFPEHPGALLKFLTTLQSKWNISLFHYRNHGAAFGRVLAGFEVPASDALPFQQFLTELGFVYQEETQSPAYQLFLNAGKGKNNLPV

SEQ ID NO: 12393 - DNA, 1251 bp, Streptococcus mutans UA159
  CDS (1)..(1251): transl_table=11
atgatttcagctaaagatgtggttgctgctaacaaagtcttaaaagatgttgttgttcaaacaccacttgattttgatcgctatttgtcagaaaaatatggagcgacaatttatttaaaacgtgaaaatatgcaaaaggtgcgttcttttaaaattcgtggcgcttattatgctatttcacaattatcagatgaagaaaaggctagaggagttgtttgtgcttctgccggaaatcatgctcaaggagttgcttatacctgtaatgaaatgaaaattcctgcaactattttcatgcctgtaacgactcctcatcaaaagattgggcaagttcaattttttggaggctcctttgtaactatcaaattggtaggtgatacttttgatgcttctgctcaggcagcccaagattatacgaaagctgaaggaatgacctttatcgatccctttgataatgacatggtacaagcgggtcaaggaacaattgcttatgaaatttatgatcaggctcaagaagatggtttgagctttgatgctattttagtacctgttggtggtggcggtcttatttcaggtgtatcagcctatgttaaagatgtggctcctgaaattgaggttattggcgttgaggcaatgggagcgcgcagcatgcgggcagcttttgataaaggacatcctgttaaattagagcatattgataaatttgcagatggcatagctgttcaaaaggttgggcgttctacctatgatgttgctagaaaatatgtggatcgcttgattggtgtagatgaaggtctcatttctgaaaccttgattgatatgtattctaaacaaggtattattgcagaaccagcaggagcagcttctattgcagctctggaagaaatgaaagatgatattaaaggcaaaactattgtctgtattatttctggtggaaataatgacattaaccgtatgcaagaaatggaagaacgtgcacttatttatgatggtgtgaagcattattttgttgtgaattttccacaacgcccaggagctctgcgggaatttgttaatgatattttaggaccaaatgatgatatcacccgttttgaatatattaaacgtgccaataaaggaacaggtccagtcctaatcggcattactttagcggataaaaatgattatcaggatctaattgatcgtttgggtgcttttgacccaggttatatcaatcttcatggcaatgaaagtctgtataatatgctcgtctga

SEQ ID NO: 12394 - protein, 416 aa, Streptococcus mutans UA159
MISAKDVVAANKVLKDVVVQTPLDFDRYLSEKYGATIYLKRENMQKVRSFKIRGAYYAISQLSDEEKARGVVCASAGNHAQGVAYTCNEMKIPATIFMPVTTPHQKIGQVQFFGGSFVTIKLVGDTFDASAQAAQDYTKAEGMTFIDPFDNDMVQAGQGTIAYEIYDQAQEDGLSFDAILVPVGGGGLISGVSAYVKDVAPEIEVIGVEAMGARSMRAAFDKGHPVKLEHIDKFADGIAVQKVGRSTYDVARKYVDRLIGVDEGLISETLIDMYSKQGIIAEPAGAASIAALEEMKDDIKGKTIVCIISGGNNDINRMQEMEERALIYDGVKHYFVVNFPQRPGALREFVNDILGPNDDITRFEYIKRANKGTGPVLIGITLADKNDYQDLIDRLGAFDPGYINLHGNESLYNMLV

SEQ ID NO: 12395 - DNA, 1593 bp, Pseudomonas putida KT2440
  CDS (1)..(1593): transl_table=11
ttgggcaacgtaaaaatagccaaggagtcatcgatgaccagcttcagtgtccctcgtactaccgtcaccccccagcaactgctgtcggagcaggtgcgtcgcattcttgcggcgccggtgtacgacctggccattgaaacgcccctgcaagcggccccggccttgtctgccgccctgggcaaccaggtgttgctcaagcgcgaagacctgcagcctacgttttcgttcaagatccggggtgcctacacccgcctgtcgcgactgaccgatgtgcagcgtgagcgcggggtgatcaccgcttcggcgggcaaccatgcccagggcgtggccttggccgcatcgcatctgggtatgaaggcaaccatcgtcatgcccaccaccacgccatcgttgaaagtggaaggcgtgcgttcgcgcggcgggcatgtggtgctgcatggcgagagcttcccgcatgcgctgacccacgcactgaagctggccgacagcgaaggcgcgaccttcgtgccaccgttcgatgacccggatgtgatcgccgggcagggtaccgtggccatggaaatcctccgtcagcgccctggggcgttggacgcgatctttgtgcccgtgggcggtggcggcttgatcgccgggatcgccgcctatgtgaagtacctgcgccctgacgtgaaggtgatcggtgtcgagccggcagattccaactgcctgcaggctgccatggccgtcggcgagcgcgtgatcctgccgcaggtgggcacctttgccgacggcgtggcggtggcgcagatcggcgcccattgcttcgagctgtgccgccacttcgtcgacgaggtggtgacggtgagcagtgacgagctgtgcgcggcgatcaaggatatctacgacgacacccgttcgatcaccgagccgtccggggccttggccgtggccggtatcaagaagtacgtggcgcgtgaaggtgtgcaggggcagaccctggtggccatcgactccggggccaacgtcaatttcgaccgcttgcgccatgtggccgagcgggccgagctgggtgagcagcgcgaggcgatcatcgccgtgacgattccggagcagccgggcagcttccgggccttttgccacgcactgggcaagcggcagatcaccgaattcaactaccgcttctaccccgggaaggaggcgcgcctgttcgtgggcgtgcagacccacccggtgcacgacccacgtgagcagttgctggccagcttgcgggagcaggggtacagcgtgctggacctgaccgacaacgagctggccaagctgcatgtgcgccataccgtcggcggacatgccgcgtcaggggctgatgagcgggtactgcgcttcgagttccccgaacggccaggggcgttgctggggtttctggagcggttgggcaagcgttggaacatcagcctgttccattaccgcaaccatggtgcggcggaggcgcgggtgttcgctgccttggaagtgccagcggacgagttggcgggcttgccgtcgacgctggacgagatggggtaccggtactgggacgagactgacaacccggcgtacaagctgttcctgggctga

SEQ ID NO: 12396 - protein, 530 aa, Pseudomonas putida KT2440
MGNVKIAKESSMTSFSVPRTTVTPQQLLSEQVRRILAAPVYDLAIETPLQAAPALSAALGNQVLLKREDLQPTFSFKIRGAYTRLSRLTDVQRERGVITASAGNHAQGVALAASHLGMKATIVMPTTTPSLKVEGVRSRGGHVVLHGESFPHALTHALKLADSEGATFVPPFDDPDVIAGQGTVAMEILRQRPGALDAIFVPVGGGGLIAGIAAYVKYLRPDVKVIGVEPADSNCLQAAMAVGERVILPQVGTFADGVAVAQIGAHCFELCRHFVDEVVTVSSDELCAAIKDIYDDTRSITEPSGALAVAGIKKYVAREGVQGQTLVAIDSGANVNFDRLRHVAERAELGEQREAIIAVTIPEQPGSFRAFCHALGKRQITEFNYRFYPGKEARLFVGVQTHPVHDPREQLLASLREQGYSVLDLTDNELAKLHVRHTVGGHAASGADERVLRFEFPERPGALLGFLERLGKRWNISLFHYRNHGAAEARVFAALEVPADELAGLPSTLDEMGYRYWDETDNPAYKLFLG

SEQ ID NO: 12397 - DNA, 1515 bp, Pseudomonas putida KT2440
  CDS (1)..(1515): transl_table=11
atgctcgaacagtacgtcaagaagatcctcacctcgcgcgtctatgacgttgccgtcgaaaccccgttgcagagcgccgggcagctgagcaagcgcctgggcaaccagattctgctcaagcgcgaagacctgcagccagtattctcgttcaagatccgcggcgcgtataacaagctggcccagctgagcccggaagaactggcccgcggggtggtgaccgcctctgccggcaaccacgcccaaggcctggccctggccgcgcgtgaaatgggcatcaaggccaccatcgtgatgcccaagaccactccggagatcaaggtcgaaggcgtgcgctcgcgcggtggcaaggtggtgctgcatggcgactcgttccctgaggcactggcctattcgctgaaactggtcgatgaaaagggcttcgtctacgttcacccttacgacgatccgcacaccatcgccgggcagggcaccgtcgccatggaaatcctgcgccagcaccctggccggctggatgcgatcttcgtgccggtgggcggtggcggcctgatcgccggcattgctgcctatgtgaagtacctgcgcccggaaatcaagataatcggtgtcgagccggacgattccaactgcctgcaggcggccatggctgccggtgagcgtgtggtgctgccgcaggtcgggctgttcgccgatggcgtggcggtggcgcagattggccagcacaccttcgatatctgccgccaccatgtggacgaagtcgtcactgtcagtaccgatgaaatctgcgcagcaatcaaggatatctacgacgatacccgctcgatcaccgagcctgctggcgcgctgggtgtggcgggcatcaagaagtacgtcgagctatacggcgtcagcggccagaccttggtggccatcgactccggtgccaacgtcaatttcgatcgcctgcgccatgtggccgaacgtgccgagctgggtgaaaagcgcgaggcgatcatcgccgtgaccatccctgagcgcccgggtagcttcaaggccttctgcgaggctatcggcaagcgtcagatcaccgagttcaactaccgcaagcacacctctgacgaagcgcatatcttcgttggggtgcagacccacccggaaaacgacccgcgcgcggcgctggtgcagcaactgaccgaacagggcttcccggttaccgatctgaccgacaacgaattggccaagctgcatattcgtcatatggtcggcggccactcggccggtgccagcgacgaaatggtgctgcgcttcgaattccccgagcggccaggggcactgttcaacttcctcaacaagctgggcgggcgctggaacatctcgatgttccactaccgcaaccatggcgcggctgacgggcgcgtggtggcggggctgcaggtgccggaggacgaacgtcacctggtgccggcagcgctggccaagatcggttacccgtactgggacgagaccgaaaacccggcctacaaactgttcctgggctga

SEQ ID NO: 12398 - protein, 504 aa, Pseudomonas putida KT2440
MLEQYVKKILTSRVYDVAVETPLQSAGQLSKRLGNQILLKREDLQPVFSFKIRGAYNKLAQLSPEELARGVVTASAGNHAQGLALAAREMGIKATIVMPKTTPEIKVEGVRSRGGKVVLHGDSFPEALAYSLKLVDEKGFVYVHPYDDPHTIAGQGTVAMEILRQHPGRLDAIFVPVGGGGLIAGIAAYVKYLRPEIKIIGVEPDDSNCLQAAMAAGERVVLPQVGLFADGVAVAQIGQHTFDICRHHVDEVVTVSTDEICAAIKDIYDDTRSITEPAGALGVAGIKKYVELYGVSGQTLVAIDSGANVNFDRLRHVAERAELGEKREAIIAVTIPERPGSFKAFCEAIGKRQITEFNYRKHTSDEAHIFVGVQTHPENDPRAALVQQLTEQGFPVTDLTDNELAKLHIRHMVGGHSAGASDEMVLRFEFPERPGALFNFLNKLGGRWNISMFHYRNHGAADGRVVAGLQVPEDERHLVPAALAKIGYPYWDETENPAYKLFLG

SEQ ID NO: 12399 - DNA, 1530 bp, Vibrio vulnificus CMCP6
  CDS (1)..(1530): transl_table=11
atgtcattaacccaacaaactggcgcagactacctgcgccagatactacgcgctcctgtgtatgaagtggcgaccgtcacccccttgcaagagatgccgcgtttgtccgcacgtattggcaacaatgtgcagatcaaacgtgaagaccgccagccggtgcattcgtttaaattacgtggcgcttacaatatggtggccaatctgtcgcaagcacagaaggacgcgggggtgattactgcctctgcgggcaaccatgcgcaaggcatggctctgtcaggcacacgccttggcattgaaaccaccatcgtgatgcctcgcacgacgccagatatcaaagtcgacgcagtgcgcggctttggcggcaaagtcgtcttgcacggcagcaacttcgatgaagccaaagccgaagccgagcgtctttcgcaagagaaaggctacacttttgtcccgcctttcgatcatcctttagtgattgctgggcaaggcaccatcggcatggaaatgctgcagcaaaacggccatctcgaccacattttcgtccctgttgggggcggtggcttagccgctggtgtggcggtgttggtgaaacagctgatgccagagatcaaagtcattgcggtggaacctgaagattctgcctgccttaaggcggcattggatgctggtgagcctgtggtgctggatcaagtcagtatgtttgctgatggtgtggcggtaaaacgcattggcgatgaaactttccgtctatgccagcactacattgacgatcacgtcaccgtctccagtgatgaaatctgcgcggcggtcaaagatattttcgaagacacccgtgcgattgctgagccttccggagcactggcgctggcggggctgaaaaagtatgccgagaaacacaaactcaaaggacacaacttgggtaccgtgctttcgggtgccaataccaacttccacggtttacgttatgtttccgagcgctgtgagctaggtgaaaaacgcgaaggcttacttgcggtgaccattccagagcgcaaaggggcgttttttgagttctgccatttgattggtggccgtgcggtgacggagttcaactaccgttacaacgacgactcgctggccaatatttttgtcggcgttcgtctgcaaaatggtcaagaggagttggatggtatcattcgcgacttacgcgaaggcggctacccagtggtggacctttctgaggatgaaatggccaagctgcacgtacgctatatgattggcggtaaaccctccaaaccactcaaagagcgcttatacagctttgagtttccagaatacccaggcgcgctgcttaagttcctgagcacgctgggcacacactggaacattagcctgtttaactaccgcaaccatggagccgattatggccgcgtactgtgtggttttgagcttgatgagagtgatttatcccgcttttcggcgcatttgcgcgaacttggctaccaatgcaaagatgtcacggataacccatcctaccgtttctttctttcctaa

SEQ ID NO: 12400 - protein, 509 aa, Vibrio vulnificus CMCP6
MSLTQQTGADYLRQILRAPVYEVATVTPLQEMPRLSARIGNNVQIKREDRQPVHSFKLRGAYNMVANLSQAQKDAGVITASAGNHAQGMALSGTRLGIETTIVMPRTTPDIKVDAVRGFGGKVVLHGSNFDEAKAEAERLSQEKGYTFVPPFDHPLVIAGQGTIGMEMLQQNGHLDHIFVPVGGGGLAAGVAVLVKQLMPEIKVIAVEPEDSACLKAALDAGEPVVLDQVSMFADGVAVKRIGDETFRLCQHYIDDHVTVSSDEICAAVKDIFEDTRAIAEPSGALALAGLKKYAEKHKLKGHNLGTVLSGANTNFHGLRYVSERCELGEKREGLLAVTIPERKGAFFEFCHLIGGRAVTEFNYRYNDDSLANIFVGVRLQNGQEELDGIIRDLREGGYPVVDLSEDEMAKLHVRYMIGGKPSKPLKERLYSFEFPEYPGALLKFLSTLGTHWNISLFNYRNHGADYGRVLCGFELDESDLSRFSAHLRELGYQCKDVTDNPSYRFFLS

SEQ ID NO: 12401 - DNA, 1275 bp, Staphylococcus epidermidis ATCC 12228
  CDS (1)..(1275): transl_table=11
atgacagtgacagtaagaactaaagtttcgacaaaagatatagatgaagcatatttacgtctaaaaaatatagtaaaagaaactcccttacaattcgaccattacttatctcaaaaatataattgtaatgtttatttaaaaagagaagatttacagtgggtacgatcctttaaattaagaggagcttataatgctatttcagtattatccaatgaagaaaaaaataaaggtattacttgcgcaagtgctggaaatcatgctcaaggtgttgcttatactgccaaaaaactcaatttaaaagctgttattttcatgccagtaactacaccacgacaaaaaatcaatcaagtcaaattcttcggggatagtaacgtagaaatagtattaattggcgatacatttgatcactgcttagcacaagctttaaactatacgaagcaacataaaatgaattttattgacccatttaataatgtatatactattgcaggacaaggcactttagctaaggaaatattaaatcaagctgaaaaagaggataaaacatttgattatgtatttgctgctataggtggtggcggtcttatttcaggagtgagcacatattttaaagcacattccccccatactaaaattattggtgttgaaccaaccggtgccagtagtatgtatcaatcagtcgttatcaaccatagtatagttactttagaaaatattgataagtttgttgatggagcttcagtagcaagagttggtgatattacctttgatattgcgaaagataaagtggatgattatgttcaagttgacgaaggagctgtttgctccacaattctggatatgtactctaaacaagcgattgttgctgaaccagctggtgctttaagtgtaagtgccttagaacaatataaaaagcagattgaaaataaaactattgtatgcatagtaagtggaggcaacaatgatattaatcgaatgaaagaaattgaggagcgttcccttctatttgaagaaatgaaacattactttattttaaatttcccacaaagacctggtgctttaagagaatttgtcaatgatgtcctcggacctcaagacgatattacaaaatttgaatatttaaagaaaacatcacaaaacactggaactgttattataggtatacagctgaaacatcatgatgatctcattcagttaaaagatcgcgtatgtcaatttgatccttctaatatttatatcaatgaaaataaaatgttatattcattacttatttaa

SEQ ID NO: 12402 - protein, 424 aa, Staphylococcus epidermidis ATCC 12228
MTVTVRTKVSTKDIDEAYLRLKNIVKETPLQFDHYLSQKYNCNVYLKREDLQWVRSFKLRGAYNAISVLSNEEKNKGITCASAGNHAQGVAYTAKKLNLKAVIFMPVTTPRQKINQVKFFGDSNVEIVLIGDTFDHCLAQALNYTKQHKMNFIDPFNNVYTIAGQGTLAKEILNQAEKEDKTFDYVFAAIGGGGLISGVSTYFKAHSPHTKIIGVEPTGASSMYQSVVINHSIVTLENIDKFVDGASVARVGDITFDIAKDKVDDYVQVDEGAVCSTILDMYSKQAIVAEPAGALSVSALEQYKKQIENKTIVCIVSGGNNDINRMKEIEERSLLFEEMKHYFILNFPQRPGALREFVNDVLGPQDDITKFEYLKKTSQNTGTVIIGIQLKHHDDLIQLKDRVCQFDPSNIYINENKMLYSLLI

SEQ ID NO: 12403 - DNA, 1524 bp, Pseudomonas syringae pv. tomato str. DC3000
  CDS (1)..(1524): transl_table=11
atgaccgatctgctcaatcactacgcccgcaaaatcctcacctcgcgcgtctacgacgtagcggtcgaaaccccgctgcatggcgcccgccagctgtccgagcggctgggcaatcaggtgctgctcaagcgcgaagatttgcagccggtgttctccttcaagattcgcggcgcgtacaacaagctcgcccaattgaccgcagaagaggccgcacgcggcgtggtcacggcctcggcgggcaatcacgcccagggcctggcgctggcggcgaaagagctgggcattctggccaccatcgtcatgccgcgcaccaccccggaaatcaaggtcgaaggggtgcgttcccgcggtgccacggtggtgttgcacggcgattccttccctgaagcgctggcctattcgctgaaactggtcgagcaacaaggcttcgtctacatccatccgtatgacgaccccgacaccattgccgggcaaggcactgtggcgatggaaatcctccgtcagcagccggggaagctggacgcgatctttgtgccggtcggtggcggcggcttgattgcagggattgcagcgtacgtgaaatacctgcggcctgagatcaaggtcatcggcgtcgagcccgacgactccaactgcctgcaagcggcgatggcggcgggcgagcgcgtggtgttgagccaggtcgggctgtttgccgatggcgtggcggtggcgcagatcggttatcacacctttgaagtgtgccgtcattacgtcgatgaagtgatcaccgtcagcaccgacgaaatctgcgcggcgatcaaggacatctacgacgacacccgctcgatcaccgagcctgcgggtgcgctgggtgttgcaggcatcaagaagtacgtcgagcagcgcggcgtgaccggccagacgctggtggccatcgactccggcgccaacgtcaactttgaccgcctgcgccacgtggccgagcgtgccgaactgggcgaaggccgcgaggcgatcattgccgtgaccattcccgagcagccgggcagcttcaaggcgttctgcgaagccatcggcaagcgccagatcactgaattcaactaccgctaccacaccgaccgtgaagcccatatcttcgtcggcgtgcagactcacccggagaacgacccacgcagcgcgctggtcgccagtctcaccgggcagggttttccggtgctggacctgaccgacaacgaactggccaaactgcacatccgccacatggttggcgggcatgccgagcgggtcaacgatgaggtggtgttgcgtttcgagttcccggagaggccgggcgcgctgttcaacttcctcaaccggctgggcgggcgctggaccatctcgatgttccactaccgcaaccacggggcagcggatggccgggtggtggcgggtctggtggtgcccgaggaagagcggcacctggtaggcgcggcgctggacgagattggttatcggtattgggacgagagcgagaacccggcgtatcggctgtttttgggctga

SEQ ID NO: 12404 - protein, 507 aa, Pseudomonas syringae pv. tomato str. DC3000
MTDLLNHYARKILTSRVYDVAVETPLHGARQLSERLGNQVLLKREDLQPVFSFKIRGAYNKLAQLTAEEAARGVVTASAGNHAQGLALAAKELGILATIVMPRTTPEIKVEGVRSRGATVVLHGDSFPEALAYSLKLVEQQGFVYIHPYDDPDTIAGQGTVAMEILRQQPGKLDAIFVPVGGGGLIAGIAAYVKYLRPEIKVIGVEPDDSNCLQAAMAAGERVVLSQVGLFADGVAVAQIGYHTFEVCRHYVDEVITVSTDEICAAIKDIYDDTRSITEPAGALGVAGIKKYVEQRGVTGQTLVAIDSGANVNFDRLRHVAERAELGEGREAIIAVTIPEQPGSFKAFCEAIGKRQITEFNYRYHTDREAHIFVGVQTHPENDPRSALVASLTGQGFPVLDLTDNELAKLHIRHMVGGHAERVNDEVVLRFEFPERPGALFNFLNRLGGRWTISMFHYRNHGAADGRVVAGLVVPEEERHLVGAALDEIGYRYWDESENPAYRLFLG

SEQ ID NO: 12405 - DNA, 1545 bp, Pseudomonas syringae pv. tomato str. DC3000
  CDS (1)..(1545): transl_table=11
ttgcccgcttcgtcagtgatgccgcccccgatgcttgaacaatacgtcaagaaaatcctcacctcgcgcgtctacgacgtagcggtcgaaaccccgctgcacggcgctcgtcagctgtccgagcggctgggcaatcaggtgctgctcaagcgcgaagatttgcagccggtgttctccttcaagattcgcggcgcgtacaacaagctcgcccaattgaccgcagaagaggccgcacgcggcgtggtcacggcctcggcgggcaatcacgcccagggcctggcgctggcggcgaaagagctgggcattctggccaccatcgtcatgccgcgcaccaccccggaaatcaaggtcgaaggggtgcgttcccgcggtgccacggtggtgttgcacggcgattccttccctgaagcgctggcctattcgctgaaactggtcgagcaacaaggcttcgtctacatccatccgtatgacgaccccgacaccattgccgggcaaggcaccgtggcgatggaaatcctccgtcagcagccggggaagctggacgcgatctttgtgccggtcggtggcggcggcttgattgcagggattgcagcgtacgtgaaatacctgcggcctgagatcaaggtcatcggcgtcgagcccgacgactccaactgtctgcaagcggcgatggcggcgggcgagcgcgtggtgttgagccaggtcgggctgtttgccgacggcgtggcggtggcgcagatcggttatcacacctttgaagtgtgccgtcattacgtcgatgaagtgatcaccgtcagcaccgacgagatctgcgcggcgatcaaggacatctacgacgacacccgctcgatcaccgagcctgcgggtgcgctgggtgttgcaggcatcaagaagtacgtcgagcagcgcggcgtgaccggccagacgctggtggccatcgactccggcgccaacgtcaactttgaccgcctgcgccacgtggccgagcgtgccgaactgggcgaaggccgcgaggcgatcattgccgtgaccattcccgagcagccgggcagtttcaaggcgttctgcgaagccatcggcaagcgccagatcactgaattcaactaccgctaccacaccgaccgtgaagcccatatcttcgtcggcgtgcagactcacccggagaacgacccacgcagcgcgctggtcgccagtctcaccgggcagggttttccggtgctggacctgaccgacaacgaactggccaaactgcacatccgccacatggttggcgggcatgccgagcgggtcaacgatgaggtggtgctgcgtttcgagttcccggagaggccgggcgcgctgttcaacttcctcaaccggctgggcgggcgctggaccatctcgatgttccactaccgcaaccacggggcagcggatggccgggtggtggcgggtctggtggtgcccgaggaagagcggcacttggtgggcgcggcgctggacgagattggttatcggtattgggacgagagcgagaacccggcgtatcggctgtttttgggctga

SEQ ID NO: 12406 - protein, 514 aa, Pseudomonas syringae pv. tomato str. DC3000
MPASSVMPPPMLEQYVKKILTSRVYDVAVETPLHGARQLSERLGNQVLLKREDLQPVFSFKIRGAYNKLAQLTAEEAARGVVTASAGNHAQGLALAAKELGILATIVMPRTTPEIKVEGVRSRGATVVLHGDSFPEALAYSLKLVEQQGFVYIHPYDDPDTIAGQGTVAMEILRQQPGKLDAIFVPVGGGGLIAGIAAYVKYLRPEIKVIGVEPDDSNCLQAAMAAGERVVLSQVGLFADGVAVAQIGYHTFEVCRHYVDEVITVSTDEICAAIKDIYDDTRSITEPAGALGVAGIKKYVEQRGVTGQTLVAIDSGANVNFDRLRHVAERAELGEGREAIIAVTIPEQPGSFKAFCEAIGKRQITEFNYRYHTDREAHIFVGVQTHPENDPRSALVASLTGQGFPVLDLTDNELAKLHIRHMVGGHAERVNDEVVLRFEFPERPGALFNFLNRLGGRWTISMFHYRNHGAADGRVVAGLVVPEEERHLVGAALDEIGYRYWDESENPAYRLFLG

SEQ ID NO: 12407 - DNA, 1548 bp, Vibrio parahaemolyticus RIMD 2210633
  CDS (1)..(1548): transl_table=11
atgatggaatctcaacccgaaaaaaaagcgaatcaatctggcgcagactatctgcgccaaatccttcgcgcacctgtttatgaagtcgcaacagtaacgccgctgcaagaaatgcctcgtttatcggcacgtatcgggaataacgtgcagatcaagcgtgaagaccgccaacccgtacactcgttcaaactgcgcggtgcctacaatatggtggcaagcctaactgaagcacagaaagccgcgggggtgattgcagcatcggcaggcaaccacgctcaaggcatggcactgtctggcagcaagctaggtatcaaaaccacgattgttatgccaaaaaccacaccagacatcaaagtcgatgcggtacgcagtttcggtggcaatgtggtgttgcacggcaacaactttgatgaagccaaagccgaggccgaacgcttgtcagaacaacacggttatacgttcgtgcctcctttcgaccacccgttggtgatcgcaggtcaaggcaccatcggcatggaaatgctgcagcaaaatggtcatctcgactacatcttcgtgccagttggaggcggtggcttggccgctggtgtagcggttctggtcaagcaactgatgccagaaatcaaagtcatcgccgtcgaacctgaagactcgtcttgtctgaaagcggcgcttgatgctggtgaacctgtcgtactagaccaagtcagcatgtttgctgatggtgtggcggtaaaacgcatcggtgaagaaacgttccgcttgtgtcagaaatacattgatggtcatgtggcggtttcaagcgatgaaatctgcgctgccgtaaaagacatttttgaggatactcgagcgattgctgaaccatccggggcgcttgcgcttgctggcttgaagaagtttgttgagcaaaaccaactggaaaataagaaccttgccacggtgctgtctggcgcgaataccaactttcatggtttacgctatgtttcagagcgttgtgaattaggtgagaagcgtgaaggtctattagccgtgacgattccagaacgccaaggcgctttctttgaattctgtaatctgattggcggccgcgctgtcaccgagtttaactaccgttacaacgatgatgaactggcgaatatctttgttggtgtacgcctgcaaggcggtcaggaagagctggataacatcattcgcgatctacgcgaaggtggctacccagtcgtggatttgtccgacgatgaaatggccaaactgcacattcgttacatgatcggtggcaagccctcgaaacaactgaaagagcgtctctatagctttgaatttcctgagtatccaggcgcactattgaagttcttaagcacgcttggcacccattggaacatcagcctattcaactaccgcaaccacggcgccgactacggacgtgttctgtgtggtttcgagttagatgaaagcgatttagcccaattttcagcgcatttacgagaacttggctaccaatgtaaggatgaaaccgataatccatcctacaagtttttcttgtcttaa

SEQ ID NO: 12408 - protein, 515 aa, Vibrio parahaemolyticus RIMD 2210633
MMESQPEKKANQSGADYLRQILRAPVYEVATVTPLQEMPRLSARIGNNVQIKREDRQPVHSFKLRGAYNMVASLTEAQKAAGVIAASAGNHAQGMALSGSKLGIKTTIVMPKTTPDIKVDAVRSFGGNVVLHGNNFDEAKAEAERLSEQHGYTFVPPFDHPLVIAGQGTIGMEMLQQNGHLDYIFVPVGGGGLAAGVAVLVKQLMPEIKVIAVEPEDSSCLKAALDAGEPVVLDQVSMFADGVAVKRIGEETFRLCQKYIDGHVAVSSDEICAAVKDIFEDTRAIAEPSGALALAGLKKFVEQNQLENKNLATVLSGANTNFHGLRYVSERCELGEKREGLLAVTIPERQGAFFEFCNLIGGRAVTEFNYRYNDDELANIFVGVRLQGGQEELDNIIRDLREGGYPVVDLSDDEMAKLHIRYMIGGKPSKQLKERLYSFEFPEYPGALLKFLSTLGTHWNISLFNYRNHGADYGRVLCGFELDESDLAQFSAHLRELGYQCKDETDNPSYKFFLS

SEQ ID NO: 12409 - DNA, 1512 bp, Nitrosomonas europaea ATCC 19718
  CDS (1)..(1512): transl_table=11
atggtaaatgattatctcgaaaggatactgactgcgcatgtctatgacgttgccagcgagacgccccttgatttcgctccgtcattatctgctcgtatccataaccgcgtattgctcaaaagagaggacatgcagcgggttttttccttcaagctgcgcggcgcctataacaaaatggccaggctctccccggatgtactgcaacagggtgtggtggccgcttcagcgggtaatcatgcacagggggtggcactggccgcacaaaagctgggctgttctgccaccatcgtgatgccggccaccacaccgcaaatcaaaatcaatgcggtgatggcaatgggtgcagccgtgctgctgcaaggagattcctataatgatgcctacgaatatgcacggaatctcgccgaagaaaaagaagctgaatttgtccatccttacgacgatcccgatgtaattgccggacagggcacgattgccatggaaattctgcgccagcatccgggcaggattcacgcaatttttgtaccgatcggtggcggagggctgatttcaggcattgccgcgtatgtgaaacggttgcgaccggatatcaaggtgatcggagtggagccggttgattcaaatgccatgtaccgctccctgcaggcaggctatcgtgtcgaactctcccaggtggggctgtttgcggatggcgtggctgtccgcctggtaggcgaggaaaccttccggctgtgccgtgagctggtggatgacatcatcctggtggattcggatgccatttgtgcagcgatcaaggatattttcgaggatacacgctccatcgttgaaccttcgggagcactttcaattgccgggttgaaggcatacgtcaaacaaaaaaacttgctgcacgaagtcctggttgcgattgcttccggcgcgaacatgaattttgaccgtttgcgtcatgtttctgaacgggcagaacttggtgagcagcgcgaagctatcctcgcagtcacgatccctgaaaaaccgggcagcttcaaaaaattctgcaatctgctgggcgctcgtaatatcactgaattcaattaccgctatgcggaccccgagatggcgcatgtctttgtcggtgtatcagtgcgcaatcgggaggaatcgttacatttgatcgagattctgcaggaaaacggtttgaaaaccgaagacatgaccgataacgaaatggccaaactgcatatccgtcacatggtgggcgggcgcagcagagaagtcatgcatgaaattttgtatcgcttcgaattccctgatcgcccgggtgcactcatgaattttctgaatcacatgagcgaccactggaacatcagcctgtttcactatcgtaatcatggtgccgatttcggccgtgtgctgatcggtatacaagttccgccggaagaaaaacaggaattcagggagttcctcgataaactgggctacagcttctgggatgaaaatgacaacccggcttaccagctttttctcgcctga

SEQ ID NO: 12410 - protein, 503 aa, Nitrosomonas europaea ATCC 19718
MVNDYLERILTAHVYDVASETPLDFAPSLSARIHNRVLLKREDMQRVFSFKLRGAYNKMARLSPDVLQQGVVAASAGNHAQGVALAAQKLGCSATIVMPATTPQIKINAVMAMGAAVLLQGDSYNDAYEYARNLAEEKEAEFVHPYDDPDVIAGQGTIAMEILRQHPGRIHAIFVPIGGGGLISGIAAYVKRLRPDIKVIGVEPVDSNAMYRSLQAGYRVELSQVGLFADGVAVRLVGEETFRLCRELVDDIILVDSDAICAAIKDIFEDTRSIVEPSGALSIAGLKAYVKQKNLLHEVLVAIASGANMNFDRLRHVSERAELGEQREAILAVTIPEKPGSFKKFCNLLGARNITEFNYRYADPEMAHVFVGVSVRNREESLHLIEILQENGLKTEDMTDNEMAKLHIRHMVGGRSREVMHEILYRFEFPDRPGALMNFLNHMSDHWNISLFHYRNHGADFGRVLIGIQVPPEEKQEFREFLDKLGYSFWDENDNPAYQLFLA

SEQ ID NO: 12411 - DNA, 1263 bp, Bacillus anthracis str. Ames
  CDS (1)..(1263): transl_table=11
atggtgcaaaaggtaaaggagagagtgaaaattgaagatatcttaatggcccatacttgtatgaaagatatcgttattaaaacaccgttacaacgtgatacagttttatctgagaaatatgattgtgacgtttatgtaaaacgcgaagacttacaattaattcgctctttcaaaattcgtggtgcgtacaatttaattcgaagtttatcgaaagaacaattacaaaacggtgttgtttgtgcaagcgctggtaatcatgcacaaggggtagcttatacgtgtaatttattgaagattccgtcaaaaattttcatgccaacaacaacacctaagcaaaaagtatcacaagttcaatttttcggtggtgatttcgcagagattgtattggttggtgatacattcgatagctcttttcaagaagcgcagcgttattgtgaagaaaatagaatgacatttgttcatccgtttgatgatccgtacgtagttgctggtcaagggacagtggcagttgaaattatgcatgatatggagaaaccggttgattatatctttacagcaatcggcggtggtggattagcatcaggtgttggtacatatgtgaaaggtgttagtcctgctacacaggtcattggggtagagccaatgggagctgcatctatgaaagaggcttttcttcaaaatgataatgtggcattggagaaaatagatagttttgttgatggggcagcggttaaaaaggtaggaaagttaacatttgaaacttgtaaagatgtaattgatgacattgttttagtaccagagggaaaggtttgtacgacgattttagaactgtataagaaaaatgcgattgtagctgaaccagctggtgcactctctattgcagcgcttgatttatacagagatgaaattaaaggtaaaacagttgtatgcacattaagtggtggaaacaatgatattgatagaatgcaagaaatgaaagaacgatctcttatttacgaagggttaaagcattatttcatcattgaattcccgcaacgttcaggtgcgttaagagaatttcttgataaaggattagggccagaagatgatattactcgctttgagtatattaagaaacataataaggaaaatggtccagcattagtcggagtagagttaaaacataaagaagattacgagcagttaattatccgttttaaagaaaataatattcaatttatggagcttaataaaaatcctgttttgtttgatttgcttatttaa

SEQ ID NO: 12412 - protein, 420 aa, Bacillus anthracis str. Ames
MVQKVKERVKIEDILMAHTCMKDIVIKTPLQRDTVLSEKYDCDVYVKREDLQLIRSFKIRGAYNLIRSLSKEQLQNGVVCASAGNHAQGVAYTCNLLKIPSKIFMPTTTPKQKVSQVQFFGGDFAEIVLVGDTFDSSFQEAQRYCEENRMTFVHPFDDPYVVAGQGTVAVEIMHDMEKPVDYIFTAIGGGGLASGVGTYVKGVSPATQVIGVEPMGAASMKEAFLQNDNVALEKIDSFVDGAAVKKVGKLTFETCKDVIDDIVLVPEGKVCTTILELYKKNAIVAEPAGALSIAALDLYRDEIKGKTVVCTLSGGNNDIDRMQEMKERSLIYEGLKHYFIIEFPQRSGALREFLDKGLGPEDDITRFEYIKKHNKENGPALVGVELKHKEDYEQLIIRFKENNIQFMELNKNPVLFDLLI

SEQ ID NO: 12413 - DNA, 1248 bp, Rhodopirellula baltica SH 1
  CDS (1)..(1248): transl_table=11
atgtcccctctgatcgccgccgacaaaattgaagcggctcgcaagcgaatcgccaaagtggttcgccacacgccattgatgcgaaacgctcggctctctgcactttatgatgcggagattttgctcaaacgtgaggacttgcaggaagttcgcagctacaaaattcgtggcgcgtacaaccggatgtcgcaactcagtgatgcacaacgtgccgcgggagtcgtttgcgctagtgccggaaatcacgcgcaaggattcgcctacgcctgccatgccatggggattcaggggcgagtttttatgccggcggtcacgccgaagcaaaaggtcgacaaagtcaagctgtttggacaggaacacgttgaggtcatcttgattggtgacacctttgacgacgccgccgcggaggctcatcgcgcagctgaggaaggcctgacgtacattcctccgtttgatgatcccgcgatcattgagggacaaggcaccgttggtgctgaaattttagaggaccattccgagccaattgatatggtgctcgttgccgtcggtggcggcggtctgatctcgggattgggcagcatcttcaaacagctttcaccgaaaacgaagatcatcggcattgaacccaccggtgcaccagcgatgcatgatagccttcgagcaggcgaggtgatcacgctggaaaagatcgacaacttcgttgatggagccgcggtcaggcgtgtcggagatttgaatttcaagatcgctcaacatgtgattgacgaaatgattttggtgccggaaggaaaggtgtgcagcgtgatgttgcagctctacaacgacgaaggtttggtcgtggaaccggctggcgcgttgtcgatcgccgcactggaccagctcgcatccgaaatttgcggcaaaactgttgtctgcgttgtcggcggaagcaacaacgacatcactcgcaccgaagaaattcgtgaccgagcaatgttgtacgaaggtttgcagcactacttcatcatcaagtttccgcagcgagccggggctttgcgagagttcctcaacaatgtgcttgggccaaccgacgacatcacacactttgagtacacacgaaagcacaatcgcgaaaccgggccggcgctcgttggtttgcaggtcgcccaccgcgacgactaccaaggcttgctcgaccggatggccgccagcaatatcgaataccaagtcgtcaacgaacaacgcatgctgttcgagttgttggtgtaa

SEQ ID NO: 12414 - protein, 415 aa, Rhodopirellula baltica SH 1
MSPLIAADKIEAARKRIAKVVRHTPLMRNARLSALYDAEILLKREDLQEVRSYKIRGAYNRMSQLSDAQRAAGVVCASAGNHAQGFAYACHAMGIQGRVFMPAVTPKQKVDKVKLFGQEHVEVILIGDTFDDAAAEAHRAAEEGLTYIPPFDDPAIIEGQGTVGAEILEDHSEPIDMVLVAVGGGGLISGLGSIFKQLSPKTKIIGIEPTGAPAMHDSLRAGEVITLEKIDNFVDGAAVRRVGDLNFKIAQHVIDEMILVPEGKVCSVMLQLYNDEGLVVEPAGALSIAALDQLASEICGKTVVCVVGGSNNDITRTEEIRDRAMLYEGLQHYFIIKFPQRAGALREFLNNVLGPTDDITHFEYTRKHNRETGPALVGLQVAHRDDYQGLLDRMAASNIEYQVVNEQRMLFELLV

SEQ ID NO: 12415 - DNA, 1542 bp, Prochlorococcus marinus subsp. marinus str. CCMP1375
  CDS (1)..(1542): transl_table=11
atggtggactatttacataaaattcttactgctcgtgtttacgacgtagcaagagaaacccccttagagaaggcatttaatctgagtaaaagagttcaaaatgatatttggctaaaaagagaggacctacagccagttttttccttcaaattaagaggggcatataaccgtatgtcgaatttgacacagaaagaactggaaaaaggtgtagttgcatctagcgctgggaatcacgcacaaggagtggccttaagtgcacaacacttaaaatgccgagctgtgatagtgatgcctataacaactcccccagtaaaaatacaagcagttaaatcattaaaagcaaaagtaatacttcatggagatacatacgatgaagcatatttagaagccatcaggctcagcaaggaagaagaactggttttcattcatccttttgacgatccacttgttattgcaggtcaaggcacaattggtgttgagattctaagacaaatagatcaaccaccttatgcaatctatgttgcagttggcgggggtggattaatagcaggagtcggagcttatattaaaaacttgtggcctgaagtaaagataattggcgtagagccagaagatgcatcagcaatgacatcttctttaaaagcaaataagagaattgaactttctaatgtaggtctatttgctgatggtgtagcagttaagcaagttggtgaagaaactttcaagctggctaaaaaatatgttgatgagatgatcacagtcaatactgatcaaatttgtgctgctattaaagatttttttgaggatactagaggaatactcgagcctgcaggtgccctagcaattgctggattaaaagctcatattcagaaaaatgatctaaaagataaacatcttgttgcaattacatgtggagcaaatatgaattttgaaaggctaaggtttgtagctgaaagagctctattaggtgaaagcaaagaggcaatgatggccatagaaatagaagaaaaagctggtagcttaaagatgttatgtaaggtaattgataatagaaatctaacagagtttagttatcgtatatcacaaaccaaaacagctaatatttttatggctgtagaagtagcaaacaaagaagatcgtatttctctctttaataaaataaaatcacatggatttaaaataatagaccttagtgatgatgaattatcaaaaatacatttaaggcatatgattggaggaaggttccctaatgttataagaaatcaaaaaaaatcttataaagagcttttatataggtttgagttccctgagcgcccaggggctttaatgaattttctcgaagcgatgaatccggaatggagtataagcatttttaactacagaaaccatggtgcagatataggaagaattgtcataggagtcttagtacatgacaaagatttagttgcatggaggaatttccttaatgaacttggttacaaatactgggaggagacagaaaatgcagcatataaactatttttgggtgcacaacacgaataa

SEQ ID NO: 12416 - protein, 513 aa, Prochlorococcus marinus subsp. marinus str. CCMP1375
MVDYLHKILTARVYDVARETPLEKAFNLSKRVQNDIWLKREDLQPVFSFKLRGAYNRMSNLTQKELEKGVVASSAGNHAQGVALSAQHLKCRAVIVMPITTPPVKIQAVKSLKAKVILHGDTYDEAYLEAIRLSKEEELVFIHPFDDPLVIAGQGTIGVEILRQIDQPPYAIYVAVGGGGLIAGVGAYIKNLWPEVKIIGVEPEDASAMTSSLKANKRIELSNVGLFADGVAVKQVGEETFKLAKKYVDEMITVNTDQICAAIKDFFEDTRGILEPAGALAIAGLKAHIQKNDLKDKHLVAITCGANMNFERLRFVAERALLGESKEAMMAIEIEEKAGSLKMLCKVIDNRNLTEFSYRISQTKTANIFMAVEVANKEDRISLFNKIKSHGFKIIDLSDDELSKIHLRHMIGGRFPNVIRNQKKSYKELLYRFEFPERPGALMNFLEAMNPEWSISIFNYRNHGADIGRIVIGVLVHDKDLVAWRNFLNELGYKYWEETENAAYKLFLGAQHE

SEQ ID NO: 12417 - DNA, 1545 bp, Candidatus Blochmannia floridanus
  CDS (1)..(1545): transl_table=11
atgatgaagaagtatcaggaatcattttcttgtcaggaaatgtgtccatcagagtatttgaaaattgctttgcattctcatgtatatgaagttgcacaagttactccgttgcaggtgatgcataagttatcgagtagacttaaaaatatagtgttagttaaacgtgaagatagacagccagtacatagttttaagttacgtggggcttatgctatgctttcgaatcttaccgaaaaacaacaatcgtctggggtaatcacagcttctgccggtaatcatgcccaaggagtggcattttcagctagtcatttaggaattagttctgtagttgtaatgcctgtgaatacggctgatataaaaattgatgcagtacgtcattttggaggaaaaccattgttgtttggatcaaattttgatgaagctaaagttaaagctatttatttagctgataagaattgtttgacttttattcctccttttgatcatccgtttgttattgcaggtcaaggtactgtggcgatggagttattacaacaagattcgcatttagatcgtatttttgtgccagtaggcggaggtggattagcagcaggtattgctgtattaattaaatatcttatgccaaaaattaaagttattggagtggaatcagaagaatcagcatctttatgtgcagctttggaagctgggtttccagtatatttaagtaaggtgggattatttgcagagggagtggcagtacgatgtataggtcatgaaacatttcgtttgtgtcaaaaatatcttgatgatgttattactgtagataatgattcaatttgtgctgcaataaaagatctatttgaagatgttcgagctatagctgaaccatcaggtgcgttagcgttagctggaatgaagaaatatattcagcgacatgcgatacatggagaaaaattagtacatgttctttccggggctaatattaattttcatgaattaagatatatttcagagcgttgtgaactaggagaacaaagagaggcgttaatggtagttactattccagaaaaaaaaggtagttttttagaattttttaaaattttagaagataaatcagtaacagaatttaattatcgttataatggatctaaaaatgtttgtgtatttattggtgtgcgtttacagaatggacgttgtgaacgagatagtatagtagaaaatattcttaatcatggatttcctgttgtagatttgtctgataatgaaatggctaaattacatgctagatatatggtgggatctcgttctttacagtcttttcgtgagcgaatttttagttttgagtttccagaagctccaggagcattattgaaatttttgaatactttaggaactgattggaatatttctttatttcattatcgtaatcatggtacggattatggtcgagttttagctggatttgaattatctcatcaggaactagaatttgatcagcatttatctaaattagggtatacatgtcatgatgtgactactaatccagtatttcaatttctttag

SEQ ID NO: 12418 - protein, 514 aa, Candidatus Blochmannia floridanus
MMKKYQESFSCQEMCPSEYLKIALHSHVYEVAQVTPLQVMHKLSSRLKNIVLVKREDRQPVHSFKLRGAYAMLSNLTEKQQSSGVITASAGNHAQGVAFSASHLGISSVVVMPVNTADIKIDAVRHFGGKPLLFGSNFDEAKVKAIYLADKNCLTFIPPFDHPFVIAGQGTVAMELLQQDSHLDRIFVPVGGGGLAAGIAVLIKYLMPKIKVIGVESEESASLCAALEAGFPVYLSKVGLFAEGVAVRCIGHETFRLCQKYLDDVITVDNDSICAAIKDLFEDVRAIAEPSGALALAGMKKYIQRHAIHGEKLVHVLSGANINFHELRYISERCELGEQREALMVVTIPEKKGSFLEFFKILEDKSVTEFNYRYNGSKNVCVFIGVRLQNGRCERDSIVENILNHGFPVVDLSDNEMAKLHARYMVGSRSLQSFRERIFSFEFPEAPGALLKFLNTLGTDWNISLFHYRNHGTDYGRVLAGFELSHQELEFDQHLSKLGYTCHDVTTNPVFQFL

SEQ ID NO: 12419 - DNA, 1509 bp, Bordetella parapertussis 12822
  CDS (1)..(1509): transl_table=11
atgtccaccgactacctcaaacgcatcctgacctccaaggtctacgacgtcgccgtcgaatcgccgctggagcgcgcgccgctgctgtcgcagcgcatcgcgaacaacgtgctgctcaagcgcgaggacacccaggcggtattcagcttcaagctgcgcggcgcctacaacaagatggccaacctgacgccggcggcgcgcagccgcggcgtgatcgccgcctcggcgggcaaccatgcccagggcgtggccctggcagccacccggctgggctgccgcgccgtcatcgtcatgcccaccaccagcccgcaggtcaaggtcgacgccgtgcgccggctcggcggcgaggtcgtactggccggcgacagcttcaccgacgcctacgaacacgcgcagcagctggaaaagagcgaaaagctgaccttcgtgcatcccttcgacgatcccgacgtgatcgccggccagggtacgatcggcatggaaatcctgcgccagcacccgggcgagatcgaagcgaccttcgtggccatcggcggcggcggcctgatcgccggcgtggccgcctacatcaagcagttgcggccggaaatcaagatcatcggcgtgcagaccgaagactccgacgccatggtccgcagcgtacgcgccggccggcgcgtgcagctcagcgatgtcggcctgttctcggacggcacggccgtcaagctggtgggcgccgaaacgttccggctggcgcgccagtacgtggacgacttcgtggtggtcaataccgacgcgatctgcgcggccatcaaggacgtgttccaggacacccgcagcgtgctggagcccgccggcgccatggcggtggccggcgccaagcagtacgcggccgagcacaagctcaagggcaagaccctggtggcggtggcatgcggcgccaacatgaatttcgaccggctgcgcttcgtggccgagcgcgccgaagtgggcgaaatgcgcgaggcggtgttcgccgtcaccatgcccgagcagcgcggcagcttccgccgcttctgcgagctggtcggcaaccgcagcgtcaccgagttcaactaccgcatctccgatgccgagcgtgcgcacgtcttcgtgggcgtgcaggtctccacgccggccgagccggaaaagatcgccgccaacttccgccggcacggcttcgacaccctggacctgacgcacgacgaactggccaagacgcacctgcgccacatggtcggcggccattcggcgctggcgcgcaacgaactgctctaccgcttcgagttccccgagcgcccgggcgcgttgatgcgctttctcaacgccatgaaccccgactggaacatcagcctgttccactaccgcaaccagggcgccgactacggcaacatcctgatcggcatccaggttccgcccaccgacaagaaactgttcaagaccttcgtcgccgaactgggctacccgcactggaacgaaacggacaacccggcgtacaggctgttcctgtag

SEQ ID NO: 12420 - protein, 502 aa, Bordetella parapertussis 12822
MSTDYLKRILTSKVYDVAVESPLERAPLLSQRIANNVLLKREDTQAVFSFKLRGAYNKMANLTPAARSRGVIAASAGNHAQGVALAATRLGCRAVIVMPTTSPQVKVDAVRRLGGEVVLAGDSFTDAYEHAQQLEKSEKLTFVHPFDDPDVIAGQGTIGMEILRQHPGEIEATFVAIGGGGLIAGVAAYIKQLRPEIKIIGVQTEDSDAMVRSVRAGRRVQLSDVGLFSDGTAVKLVGAETFRLARQYVDDFVVVNTDAICAAIKDVFQDTRSVLEPAGAMAVAGAKQYAAEHKLKGKTLVAVACGANMNFDRLRFVAERAEVGEMREAVFAVTMPEQRGSFRRFCELVGNRSVTEFNYRISDAERAHVFVGVQVSTPAEPEKIAANFRRHGFDTLDLTHDELAKTHLRHMVGGHSALARNELLYRFEFPERPGALMRFLNAMNPDWNISLFHYRNQGADYGNILIGIQVPPTDKKLFKTFVAELGYPHWNETDNPAYRLFL

SEQ ID NO: 12421 - DNA, 1581 bp, Bordetella bronchiseptica RB50
  CDS (1)..(1581): transl_table=11
atgtccgataccgccaccgccccgacgaccgccgagccgcgcaccgcgccgccggcgcgcgccgatctgcttgcccactacgcccgcaagacgctttccgcgccggtctacgacgtcgcgctggagacgccgctgcaagcggcgccgcgcctgtcgcgccagctggattgccgcgtgctgctcaagcgcgaggacctgcagccggtgttctcgttcaagatccgcggcgcctacaaccgcgtcgcgcaattgagtccggacgagcgcggccgcggcgtcatcgccgcctcggccggcaaccacgcgcaagggctggccctggccgccgcgcgtctgggcattccggcgctcatcgtcatgccgcgcaccgcgcccgagctgaagatcgacggcgtgctggcgcacggcgcgcaggtggcgctgcatggcgacgcctttccggcggcgctggcgcacgcgcaggaactggccgaacgcgagggccgcgtgttcatcccgccgtacgacgaccccgacgtgatcgccggccagggcacggtgggcatggagatcctgcgccagcacccgggccgcctggacgccattttcgtgccggtcggcggcggcagcctgatcgcgggcgtggccgcctacgtcaagcatgtgcgcccggagatccgcatcatcggcgtcgagccggtggattcgaactgcctgcaggccgcgctggcggcgggccggcgcgtggtgctcgaccgcgtgggcaccttcgccgacggcgtggcggtggcgcagatcggccatcacaatttcgagatctgccgcgaccatgtcgacgaggtgatctgcgtcaccaacgatgaaatctgcgccgccatcaaggacatctacgacgatacccgctccatcaccgaaccggccggcgcgctggcggtggcgggcctgcgcaagtacgccgagcgcggcgaggcggccgggcgcaccctggtggcgatcgactcgggcgccaacatcaacttcgaccgcctgcggcacgtggccgagcgcgccgcgctgggcgagcagcgcgaagccttgatcgcggtgaccatccccgagcggccgggcagcttcaaggccttctgcgcggcattggggccgcgccagatcaccgaattcaactatcgctaccatcccggcgacgaggcgcagatcttcgtcggggtgcggacccatcccgagcacgaccggcgcgatgcgctgctggccgggctgcgcggccagggcttcgcggtgcaggacctcagcgacgacgaactggccaagctgcacgtgcgccacatggtgggcgggcgcgccaaccagatcgacgacgagcaggtgttccgcttcgagttccccgagcgtcccggcgcgctgttcgacttcctgagcaaactgggcggccgctggaacatcaccatgttccactaccgcaaccacggctcggccgacggccgcgtggtggccggcctgcaggtgccggccgacgagcgccacctggtgccgcaggcattgacgcgcatcggctatccgttccgggacgagacggccaatccctcgtatcgcctgttcatccggtga

SEQ ID NO: 12422 - protein, 526 aa, Bordetella bronchiseptica RB50
MSDTATAPTTAEPRTAPPARADLLAHYARKTLSAPVYDVALETPLQAAPRLSRQLDCRVLLKREDLQPVFSFKIRGAYNRVAQLSPDERGRGVIAASAGNHAQGLALAAARLGIPALIVMPRTAPELKIDGVLAHGAQVALHGDAFPAALAHAQELAEREGRVFIPPYDDPDVIAGQGTVGMEILRQHPGRLDAIFVPVGGGSLIAGVAAYVKHVRPEIRIIGVEPVDSNCLQAALAAGRRVVLDRVGTFADGVAVAQIGHHNFEICRDHVDEVICVTNDEICAAIKDIYDDTRSITEPAGALAVAGLRKYAERGEAAGRTLVAIDSGANINFDRLRHVAERAALGEQREALIAVTIPERPGSFKAFCAALGPRQITEFNYRYHPGDEAQIFVGVRTHPEHDRRDALLAGLRGQGFAVQDLSDDELAKLHVRHMVGGRANQIDDEQVFRFEFPERPGALFDFLSKLGGRWNITMFHYRNHGSADGRVVAGLQVPADERHLVPQALTRIGYPFRDETANPSYRLFIR

SEQ ID NO: 12423 - DNA, 1509 bp, Bordetella bronchiseptica RB50
  CDS (1)..(1509): transl_table=11
atgtccaccgactacctcaaacgcatcctgacctccaaggtctacgacgtcgccgtcgaatcgccgctggagcgcgcgcccctgctgtcgcagcgcatcgcgaacaacgtgctgctcaagcgcgaggacacccaggcggtattcagcttcaagctgcgcggcgcctacaacaagatggccaacctgacgccggcggcgcgcagccgcggcgtgatcgccgcctcggcgggcaatcatgcccagggcgtggccctggcggccaccaggctgggctgccgcgcggtcatcgtcatgcccaccaccagcccgcaggtcaaggtcgacgccgtgcgccggctcggcggcgaggtcgtgctggccggcgacagcttcaccgacgcctacgaacacgcgcagcagctggaaaagcgcgaaaagctgaccttcgtgcatcccttcgacgatcccgacgtgatcgccggccagggcaccatcggcatggaaatcctgcgccagcatccgggcgagatcgaggcgatcttcgtggccatcggcggcggcggcctgatcgccggcgtggccgcctacatcaagcagttgcggccggaaatcaagatcatcggcgtgcagaccgaagactccgacgccatggtccgcagcgtacgcgccggccggcgcgtgcagctcagcgatgtcggcctgttctcggacggcacggccgtcaagctggtgggcgccgaaacgttccggctggcgcgccagtacgtggacgacttcgtggtggtcaataccgacgcgatctgcgcggccatcaaggacgtgttccaggacacccgcagcgtgctggagcccgccggcgccatggcggtggccggcgccaagcagtacgcggccgagcacaagctcaagggcaagaccctggtggcggtggcatgcggcgccaacatgaatttcgaccggctgcgcttcgtggccgagcgcgccgaagtgggcgaaatgcgcgaggcggtgttcgccgtcaccatgcccgagcagcgcggcagcttccgccgcttctgcgagctggtcggcaaccgcagcgtcaccgagttcaactaccgcatctccgatgccgagcgtgcgcacgtcttcgtgggcgtgcaggtctccacgccggccgaaccggaaaagatcgccgccaacttccgccggcacggcttcgacaccctggacctgacgcacgacgaactggccaagacgcacctgcgccacatggtcggcggccattcggcgctggcgcgcaacgaactgctctaccgcttcgagttccccgagcgcccgggcgcgttgatgcgctttctcaacgccatgaaccccgactggaacatcagcctgttccactaccgcaaccagggcgccgactacggcaacatcctgatcggcatccaggttccgcccaccgacaagaaactgttcaagaccttcgtcgccgaactgggctacccgcactggaacgaaacggacaacccggcgtacaggctgttcctgtag

SEQ ID NO: 12424 - protein, 502 aa, Bordetella bronchiseptica RB50
MSTDYLKRILTSKVYDVAVESPLERAPLLSQRIANNVLLKREDTQAVFSFKLRGAYNKMANLTPAARSRGVIAASAGNHAQGVALAATRLGCRAVIVMPTTSPQVKVDAVRRLGGEVVLAGDSFTDAYEHAQQLEKREKLTFVHPFDDPDVIAGQGTIGMEILRQHPGEIEAIFVAIGGGGLIAGVAAYIKQLRPEIKIIGVQTEDSDAMVRSVRAGRRVQLSDVGLFSDGTAVKLVGAETFRLARQYVDDFVVVNTDAICAAIKDVFQDTRSVLEPAGAMAVAGAKQYAAEHKLKGKTLVAVACGANMNFDRLRFVAERAEVGEMREAVFAVTMPEQRGSFRRFCELVGNRSVTEFNYRISDAERAHVFVGVQVSTPAEPEKIAANFRRHGFDTLDLTHDELAKTHLRHMVGGHSALARNELLYRFEFPERPGALMRFLNAMNPDWNISLFHYRNQGADYGNILIGIQVPPTDKKLFKTFVAELGYPHWNETDNPAYRLFL

SEQ ID NO: 12425 - DNA, 1542 bp, Prochlorococcus marinus subsp. pastoris str. CCMP1986
  CDS (1)..(1542): transl_table=11
atggaagattatttaaaaaaaatacttcaggctaaagtttatgaagtagctaaagaaacacctttagaaaaagcaaataatttaagtaaagcacttaaaaataatatttatttgaaaagagaagatcttcaagatgtattttcttttaaaataagaggtgcctttaataaaatgagacaattaccacaatcacaacttgctaatggagtcataacatcaagtgctggtaatcatgcacaaggagtagcactaagtgcattgaaattaaattgtagcgcaactatattaatgccaataactactcctttagtaaaagtaaatgctgttagaaatttaaaagcaaaagttatattattcggtgataattatgatgaaacctataaggaagcattacgccttagtgaagaaaataatttatgctttattcatccattcgatgatcctgaagtaatagctggccaaggaacaattgccattgaaatagaaaaacaagtcaaagaaccaccagaagcaatatatgttgcggttggaggaggaggtttaatagctggtatttctttatacataaaaaatatttggccacaagtaaaaataattggtgtagagcctgaagatgctgatgcgatgactaaatccctaaataactcaaaattaatagaattagcatcagttggtcaatttgctgatggcgtagcagtaaaaaaagttggagaaaaaacctttgaaatcggaagaaaatatatcgacaaaatgataactgtaaatactgatgaaatatgtgccgctattaaggatgtttttgaagataccagatcaatcctagaaccagctggagctctatctattgcaggaatgaaaaaggatatattcgaatctaaatacgcaaacaaaaatatgattgccatcgcatgtggtgcaaatatgaatttcgaaagactacgatttatagcagaaagatctgcacttggagagtacaaagaagcaatgtttgccgttgaaataccagaaaaagcgggcagcttaattaatttctgtagtttgttaaataatagaaatttaacagaatttagctataggatgtccaattcagttaatgctcaaatatttgtaggaatcgaggttaatggagtaatcgataaagatgaactattacaagaatttaggaaatcaaattatccttttatagatataagtaatgatgaattatctaaaaatcatctaagacatatggtaggtggtcgtttgcctcaaaaattcaccgtacttgaaaaatcaaaatatattgaattgctatatagatttgagtttccagaaaggccaggagcattaataaattttctaaaaaatatgaaatcaaattggacaataagcatctttcattatagaaatcatggttctgatgtaggaaaaattgttataggagtattaatagatcgtgctgaaattaattactggaataaatttgttgaattcttaggatataaatactgggacgaaactaataatcaaacatataaattattccttggtgcatctgattaa

SEQ ID NO: 12426 - protein, 513 aa, Prochlorococcus marinus subsp. pastoris str. CCMP1986
MEDYLKKILQAKVYEVAKETPLEKANNLSKALKNNIYLKREDLQDVFSFKIRGAFNKMRQLPQSQLANGVITSSAGNHAQGVALSALKLNCSATILMPITTPLVKVNAVRNLKAKVILFGDNYDETYKEALRLSEENNLCFIHPFDDPEVIAGQGTIAIEIEKQVKEPPEAIYVAVGGGGLIAGISLYIKNIWPQVKIIGVEPEDADAMTKSLNNSKLIELASVGQFADGVAVKKVGEKTFEIGRKYIDKMITVNTDEICAAIKDVFEDTRSILEPAGALSIAGMKKDIFESKYANKNMIAIACGANMNFERLRFIAERSALGEYKEAMFAVEIPEKAGSLINFCSLLNNRNLTEFSYRMSNSVNAQIFVGIEVNGVIDKDELLQEFRKSNYPFIDISNDELSKNHLRHMVGGRLPQKFTVLEKSKYIELLYRFEFPERPGALINFLKNMKSNWTISIFHYRNHGSDVGKIVIGVLIDRAEINYWNKFVEFLGYKYWDETNNQTYKLFLGASD

SEQ ID NO: 12427 - DNA, 1545 bp, Prochlorococcus marinus str. MIT 9313
  CDS (1)..(1545): transl_table=11
atggacgattatctacagaggattctgagggcacgtgtctatgacgtagcccatgaaacccccctggaactggccaaaaacctcagtcgccgttttcagaacaagatctggttgaaacgtgaggacctacagccagtcttctcattcaagctgcgtggtgcgtataaccgcatgtcccttctcagccaagaagagttgcagcgtggcgtgattgcttcaagtgctggaaaccacgctcagggagtggcactgagcgcctcttatctcaattgcagagctgtgattgtgatgcctatcaccacacccgaaatgaaggtacgggcagtccgtgctcttggcgctgaagtcgcacttcatggagagacctacgacgaggcctatcaagaggccatgcgtcgcagtgaaaaagatggactcacgtttatccacccgtttgatgatccagaggtgattgctgggcaagggacgattgctctagaaatcctgcgccagatccaagatccaccagatgcaatctatgtcgcagttggcggtggcggactgatcggagggattgccacctatgtcaaaagcttgtggccgcaagtcgaaattatcggtgtcgagccctacgacgctgcagcaatgaagctctctcttgaggctggtgaacgtattcagctgcccaatgttggcctatttgccgacggagtcgctgtacgtcaagtaggcaaactcaccttctcattagcccagatgcacgtagacgcgatggtgacggtaagcactgatgaaatctgtgcagcgatcaaagatgtttttgaagatacccgctcaattcttgaaccagctggcgcactggcaattgctggcatgaaggcagatatcgccaaacgtgatcttcaagaccgcactcttgtggccgtggcctgtggcgcaaacatgaactttgaacggcttcgttttgtcgccgaaagagcagagctaggggaagaaagggaagcaatactcgctgtggaaatcccagaacaggcaggcagcctgcgaaagctctgcaatgtccttgcagggaaaaatctcaccgaattcagttaccgaatggcagaaggggatagagcacaaatattcatcggggtacaggttttagacctggatgatcgaaccaagcttttaacgcgactgcagtcgtcaggattcgcatgccttgatctcagcaacgacgagctcaccaaagggcaccttcgtcacatggtgggtggtcggcttcctgcctcagccaaaaccctttgccgagatggatgtcgcgaactgctctatcgctttgagttccctgagcgaccaggagctcttatgacctttgttagtgcccttcaccctgaatggagtatcagcatcttccactaccgcaatcacggagcagatgtcggcaggatcgttgtaggtgtgttggttcaggacaacgaaatggacgattggcagcgctttcttgaagatctgggctacccaaactgggaagaaacaaacaaccccgcctactgcttatttctgggtgcacagaccgtttga

SEQ ID NO: 12428 - protein, 514 aa, Prochlorococcus marinus str. MIT 9313
MDDYLQRILRARVYDVAHETPLELAKNLSRRFQNKIWLKREDLQPVFSFKLRGAYNRMSLLSQEELQRGVIASSAGNHAQGVALSASYLNCRAVIVMPITTPEMKVRAVRALGAEVALHGETYDEAYQEAMRRSEKDGLTFIHPFDDPEVIAGQGTIALEILRQIQDPPDAIYVAVGGGGLIGGIATYVKSLWPQVEIIGVEPYDAAAMKLSLEAGERIQLPNVGLFADGVAVRQVGKLTFSLAQMHVDAMVTVSTDEICAAIKDVFEDTRSILEPAGALAIAGMKADIAKRDLQDRTLVAVACGANMNFERLRFVAERAELGEEREAILAVEIPEQAGSLRKLCNVLAGKNLTEFSYRMAEGDRAQIFIGVQVLDLDDRTKLLTRLQSSGFACLDLSNDELTKGHLRHMVGGRLPASAKTLCRDGCRELLYRFEFPERPGALMTFVSALHPEWSISIFHYRNHGADVGRIVVGVLVQDNEMDDWQRFLEDLGYPNWEETNNPAYCLFLGAQTV

SEQ ID NO: 12429 - DNA, 1530 bp, Synechococcus sp. WH 8102
  CDS (1)..(1530): transl_table=11
atgaccgactatctccagcggatcctgcgggctcgcgtctacgacgtcgcgcgggagacgccgcttgaccctgccccaaacctcagtcgccgacttggcaatgaggtgctgctgaagcgcgaagacctgcaaccggtgttctcgttcaagcttcgcggtgcttacaaccgcatggcccagctcacgccggaggaactcagtcgtggcgtgatcgcctccagcgcaggaaaccatgcccagggcgtggccctaagtgccaaaaaactcggctgccgcgccgtcatcgtgatgcccgccaccacacccgaggtgaaggtgcgggccgtgcgcaccattggcggggaagtcgtgctccatggggagacctacgacgaatgttcagcagaagcgagacaacgctgcgctgatgagggactcacctacatccatccctttgacgacccggaagtgatcgccggccagggaaccatcggtctggaaatcatgcggcagagccctgaaccgccggatgccatttatgtagcggtcggcggcggcggactaattgccggaatcgcggcttacgtcaaacagctgtggcccagcaccgagatcgtcggcgttgaaccggttgatgcggacgccatgacccagtcgttagagaagggagtacgggttgagctggcccaggtgggcctgttcgccgacggcgttgcggtccgcagggtgggggagcacacctttgccctggcccaacaatttgttgaccgcatggtgcgggtcgacaccgatgcgatctgtgccgccatcaaggacgtttttgaagacacgcgctccatcctcgaaccggctggagcacttgccgtggctgggctgaagcaggacgtggccgattgccaaatgacggaccgccgactggtggcggtggcctgcggcgccaacatgaacttcgatcgcctgaggttcatcgccgaacgctccgaactgggagaggaacgcgaggcgatgctggcggtggagatccctgagcaaccgggaagcctcagaaccctgtgtgatcacctacgcagccgcagcctcaccgaattcagttaccgaatgagtgagggcgcatcagcccacatcttcatcggcgtgcaggtgaacggcgcacaggatcgttaccagctcgtggatggactccagcagcagggcttctcctgtcttgacctcagcgacaacgaattgtccaaggttcacctccgccacatggttggcggtcgtcttccatccacttcgcaggacagttgcgctgggggctgcctcgaactgctgtaccgctttgaatttccagagaggccgggggcactgatgcgcttcgtcagcgctctcaatcccggttggagcatcagcatcttccactaccggaaccatggagctgacgtgggtcggatcgtggtgggtgtgctgataccggtggaagaacagccgcagtggacggccttcctcaatgagcttgggtatccctattggaatgaaaccgacaatccggcttacaccctgttcctctga

SEQ ID NO: 12430 - protein, 509 aa, Synechococcus sp. WH 8102
MTDYLQRILRARVYDVARETPLDPAPNLSRRLGNEVLLKREDLQPVFSFKLRGAYNRMAQLTPEELSRGVIASSAGNHAQGVALSAKKLGCRAVIVMPATTPEVKVRAVRTIGGEVVLHGETYDECSAEARQRCADEGLTYIHPFDDPEVIAGQGTIGLEIMRQSPEPPDAIYVAVGGGGLIAGIAAYVKQLWPSTEIVGVEPVDADAMTQSLEKGVRVELAQVGLFADGVAVRRVGEHTFALAQQFVDRMVRVDTDAICAAIKDVFEDTRSILEPAGALAVAGLKQDVADCQMTDRRLVAVACGANMNFDRLRFIAERSELGEEREAMLAVEIPEQPGSLRTLCDHLRSRSLTEFSYRMSEGASAHIFIGVQVNGAQDRYQLVDGLQQQGFSCLDLSDNELSKVHLRHMVGGRLPSTSQDSCAGGCLELLYRFEFPERPGALMRFVSALNPGWSISIFHYRNHGADVGRIVVGVLIPVEEQPQWTAFLNELGYPYWNETDNPAYTLFL

SEQ ID NO: 12431 - DNA, 1530 bp, Chromobacterium violaceum ATCC 12472
  CDS (1)..(1530): transl_table=11
atgagcaacaagcaagactatctggaacgcatcctcacctcgcgggtgtacgacgtggcggtggaaacgccgctggagctggcgcccaatctgtcgcgccgttaccgcaaccacatcctgctcaagcgcgaggatctgcagccagtgttctcgttcaagctgcgcggcgcttacaacaagatggccaagctgacgccggagcagcgcgcgcgcggcgtgatcaccgccagcgccggcaaccacgcccagggcgtggcgctgtcggccagcaagctcggctgcgaggcggtgatcgtgatgccggtcaccacgccgcagatcaagatagacgcggtgaagcagcgcggcggccaggtggtgctgtcgggagactccttcaacgaagcctacctgcatgcggtgaagctggccgaggagagcggccgcacctacatcccgcctttcgacgacccggacgtgatcgccggccaggggacggtgggcatggaaatcctgcgccagcatccggatgatctggatgccgtattcgtcgccatcggcggcggcggcctggcggccggcgtggccagcttcatcaaacggctgaagcccgagatcaagatcatcggcgtgcagcctgtcgactcggacgcgatgcgccagtccatagagaagggcgagcgggtcgagctgaaggatgtgggtttgttcgccgacggcgtggcggtgaagctggtgggcgaagagaccttccgcatctgccgcgagctgctggacgagatcatcctggtggattccgacgccatctgcgcggcgatcaaggatatttttgaagatacccgctccatcgtcgagccggccggcgcgctggcggtggcgggcgccaaggcctacatcgagcgcgagggctgcgagggccagtcgctggtggcgatctcctgcggcgccaacatgaatttcgaccgcctgcgccatgtctcggagcgatccgagctcggcgagcggcgcgaggccatcattgccgtcaccattccggagaagccgggcagctttaagcgcttctgttcggtgataggcggccgcaacatcaccgagttcaactaccgtttcgccgaccccagcgtcgcccatgtgttcgtcggcgtgcagatcgccggcaaggaggatgtggaaaagctgttgcgcgacttgcgcgcggcggagctggatggcatcgacctgaccgacaacgagctggccaagctgcacatccgccacttggtcggcggccacgcgccgcaactgaaggacgaacgcgtgctgcgcttcgagtttcccgaccgtcccggcgcgctgatgcgctttttggaggcgatgcgcaccgactggaacatcagcctgttccactaccgcaaccatggcgcggactatggccgggtgctggtcggcatccaggtgccgtccggcgacgcccaggcctttcagcaattcctcgacacgctcggatatccttatatagaggaaaccgaaaatccggcctatcgattgttccttggcaagaccatccgttga

SEQ ID NO: 12432 - protein, 509 aa, Chromobacterium violaceum ATCC 12472
MSNKQDYLERILTSRVYDVAVETPLELAPNLSRRYRNHILLKREDLQPVFSFKLRGAYNKMAKLTPEQRARGVITASAGNHAQGVALSASKLGCEAVIVMPVTTPQIKIDAVKQRGGQVVLSGDSFNEAYLHAVKLAEESGRTYIPPFDDPDVIAGQGTVGMEILRQHPDDLDAVFVAIGGGGLAAGVASFIKRLKPEIKIIGVQPVDSDAMRQSIEKGERVELKDVGLFADGVAVKLVGEETFRICRELLDEIILVDSDAICAAIKDIFEDTRSIVEPAGALAVAGAKAYIEREGCEGQSLVAISCGANMNFDRLRHVSERSELGERREAIIAVTIPEKPGSFKRFCSVIGGRNITEFNYRFADPSVAHVFVGVQIAGKEDVEKLLRDLRAAELDGIDLTDNELAKLHIRHLVGGHAPQLKDERVLRFEFPDRPGALMRFLEAMRTDWNISLFHYRNHGADYGRVLVGIQVPSGDAQAFQQFLDTLGYPYIEETENPAYRLFLGKTIR

SEQ ID NO: 12433 - DNA, 1212 bp, Wolinella succinogenes DSM 1740
  CDS (1)..(1212): transl_table=11
atgattccattatctaaaatcgttgaggcgcatgagcgtgtcaaaaaagtgatccaaaaaaccaaactcgcctacgcgccaagactaagtgagttaagcggagccaatgtctatctcaaaaaagagaatctccaacacacgggcgcctacaagctaagaggcgcttataatagaatcgccaccctgagccaagaggagcgagccaagggagtgattgccgctagtgcggggaatcacgctcaaggagtggcctatagcgccaaacaatttgggattcgtgcggtgattgtgatgcctgaggcaactccattgcttaaagtcacgggtgtgaagcgcttgggggctgaggtgatcttagcgggcaacaactacgatgaggcctatgcccatgcactagagtgcgccaaggagcaggagctgtgctttatccacccttttgctgatgatgaggtgatcgcagggcaggggacggtggctttggagatgatcgaggagaagagcaacatccaaaccgtagtgcttcctatcgggggcggggggctcatctcgggcgtggcagcggcgtataagcagatgcttcccaatgtgagaatcattggtgtgacggccaagggagcgccagccatgcacgattctttccatgccaagaaaatcgtttctgtcaaaggcgtgaagacaatcgccgatggaatcgccgtcagagatgtcactcctagaaattttgagtacatcttagagggcgtggatgatgtggtgcaagtggatgatgaggagatcgctaacgcggtcttgtatctattagagaatcaaaagcttgttgttgaaggcgcaggagcggttggtgtggcggctttgttgcacgagaagttgcccgtgagcaagggtgagaatgtcgctatcgtgctaagcggcgggaatatcgatgtgacgatgctcagtgtcatcatcgagaagggtctcatcaaatcccagcgcaagatgaagtttagcgtcatcttggtggacaagcctggaagcctcaaagggctcacggatattctctcgcaagtgggggctaatattgtgcgaatcgactatgatcgcacctctacctctttggcttacggggatgccaatgtcactatcgcgctagagaccaaggggggagagcaccaggaggagattcgccaagagctctggaaatatcactatcgattcgtcgaaatcgattag

SEQ ID NO: 12434 - protein, 403 aa, Wolinella succinogenes DSM 1740
MIPLSKIVEAHERVKKVIQKTKLAYAPRLSELSGANVYLKKENLQHTGAYKLRGAYNRIATLSQEERAKGVIAASAGNHAQGVAYSAKQFGIRAVIVMPEATPLLKVTGVKRLGAEVILAGNNYDEAYAHALECAKEQELCFIHPFADDEVIAGQGTVALEMIEEKSNIQTVVLPIGGGGLISGVAAAYKQMLPNVRIIGVTAKGAPAMHDSFHAKKIVSVKGVKTIADGIAVRDVTPRNFEYILEGVDDVVQVDDEEIANAVLYLLENQKLVVEGAGAVGVAALLHEKLPVSKGENVAIVLSGGNIDVTMLSVIIEKGLIKSQRKMKFSVILVDKPGSLKGLTDILSQVGANIVRIDYDRTSTSLAYGDANVTIALETKGGEHQEEIRQELWKYHYRFVEID

SEQ ID NO: 12435 - DNA, 1560 bp, Photorhabdus luminescens subsp. laumondii TTO1
  CDS (1)..(1560): transl_table=11
atggctgcatgtcttcccttaacttcctcaccaaatggtgcagagtatttgaaagcagcattaagcgcgcctgtttatgaagttgctcaggtgactcctttgcaggaaatggagaaaatttctgcccgcttgggaaatactattttggtaaagcgggaagatcggcaacctgttcacagtttcaagctccgtggtgcgtatgccatgattgcgagtttgactgaggaacaaaaaaaccgaggagtgattaccgcgtcagccggtaaccatgctcagggggttgcactttctgccaatcgtttgggaattaactctttgattgttatgccggttactactgcggatattaaagtcgatgcggtccggagtttcggtggtaaggctctgttgtatggtgctaattttgatgaggctaaagctaaagcgatagaaatggcacaacaggagggctatacctttgttcctccgtttgatcatcctgctgtaatcgcaggtcaggcaacactggcgatggaacttttgcaacaggatgtgcgtctggatcgaatctttgtacctgtcggtgggggggggttgattgctggcgttgctgtgttgattaagcaactgatgccagaaattaaaattattggggtggaagcggaagattcagcttgcctgaaagcagcaatggaggctggacatccggtagatttaccacgagttggtttgtttgctgaaggtgttgcggttaagcgtatcggtgatgaaacatttcgtttgtgtcagcaatatgtagatgatgttatcacggtagacagtgatgctatttgtgccgcggtaaaagatctgtttgaggatgtgcgtgcgattgctgagccatccggtgcattggcacttgctggattgaaaaagtatgttcagcagcatcagcttagaggtgagcgactggcacatattctttctggcgctaacgtaagcttccacgggttacgttatgtctctgagcgttgtgaattgggcgagcagcgggaagcattgctggcagtgactattcctgaacagaaagggagtttcctgagtttttgccagaaattgggcgatcgggtggtaacagagtttaattatcgttatacggatgcagatcctgatcaggcttgtcttttcgttggtgttcgcctgagtcgtggtgaggtagaacgacgggaaattatcgaggaattgcgtaccgcaggatatcaggttgccgatctctctgatgatgagatggcgaaattacatgttcgctatatgatcggcggtcgtccatctaagccattgaaagagcgcttatttagttttgaatttcctgaatcaccgggggctttgctaaagttcctccaaactttgggaactcactggaatattacgttattccattatcgcaattatggtacagattatggtcgggtgttagccgcatttgaattgtcaggagcggaagtgcgttttaagcgtcatcttgatgcattaggctatgcgtatcatgatgagacggatacccctgcgtttaaattctttttgatgtgccaaaacatttaa

SEQ ID NO: 12436 - protein, 519 aa, Photorhabdus luminescens subsp. laumondii TTO1
MAACLPLTSSPNGAEYLKAALSAPVYEVAQVTPLQEMEKISARLGNTILVKREDRQPVHSFKLRGAYAMIASLTEEQKNRGVITASAGNHAQGVALSANRLGINSLIVMPVTTADIKVDAVRSFGGKALLYGANFDEAKAKAIEMAQQEGYTFVPPFDHPAVIAGQATLAMELLQQDVRLDRIFVPVGGGGLIAGVAVLIKQLMPEIKIIGVEAEDSACLKAAMEAGHPVDLPRVGLFAEGVAVKRIGDETFRLCQQYVDDVITVDSDAICAAVKDLFEDVRAIAEPSGALALAGLKKYVQQHQLRGERLAHILSGANVSFHGLRYVSERCELGEQREALLAVTIPEQKGSFLSFCQKLGDRVVTEFNYRYTDADPDQACLFVGVRLSRGEVERREIIEELRTAGYQVADLSDDEMAKLHVRYMIGGRPSKPLKERLFSFEFPESPGALLKFLQTLGTHWNITLFHYRNYGTDYGRVLAAFELSGAEVRFKRHLDALGYAYHDETDTPAFKFFLMCQNI

SEQ ID NO: 12437 - DNA, 1530 bp, Vibrio vulnificus YJ016
  CDS (1)..(1530): transl_table=11
atgtcattaacccaacaaactggcgcagactacctgcgccagatactacgcgctccagtgtatgaagtggcaaccgtcacccctttgcaagagatgccgcgtttatcggcacgtattggtaacaatgtgcagatcaaacgtgaagaccgccagccggtgcattcgtttaagttacgtggcgcttacaatatggtggccaatctgtcgcaagcgcagaaggacgcgggggtgattgctgcctctgcgggcaaccatgcgcaaggcatggctctgtcaggaacgcgccttggcattgaaaccaccatcgtgatgcctcgcacgacgccggatatcaaagtcgacgcggtgcgcggttttggcggcaaagtcgtcttgcacggcagcaacttcgatgaagccaaagccgaagccgagcgtctttcgcaagagaaaggttacacttttgtcccacctttcgatcatcctttagtgattgctgggcaaggcaccatcggcatggaaatgctgcagcaaaacggccatctcgaccacattttcgtccctgttgggggcggtggtttagccgctggtgtggcggtgttggtgaaacagctgatgccagagatcaaagtcattgcggtggaacctgaagattctgcctgcctcaaggcggcattggatgcaggtgagcctgtggtgctggatcaagtcagtatgtttgctgatggtgtggcggtaaaacgcattggcgatgaaactttccgtctatgccagcactacattgacgatcacgtcaccgtctccagtgatgaaatctgcgcggcggtcaaagatattttcgaagacacccgtgcgattgctgagccttccggagcactggcgctggcggggctgaaaaagtatgccgagaaacacaaactcaaaggacacaacttgggtaccgtgctttcgggtgccaataccaacttccacggtttacgttatgtttccgagcgttgtgagctgggtgaaaaacgcgaaggcttgcttgcggtgaccattccagagcgcaaaggggcattttttgagttctgccatttgattggtggccgtgcggtgacggagttcaactaccgttacaacgacgactcgctggccaatatttttgtcggtgttcgtctgcaaaatggtcaagaggagttggatggtatcattcgcgacttacgcgaaggcggctacccagtggtggacctttctgaggatgaaatggccaagctgcacgtacgctacatgattggcggtaaaccctccaaaccactcaaagagcgcttatacagctttgagtttccagaatacccaggcgcactgcttaagttcctgagcacactgggcacacactggaacattagcctatttaactaccgcaaccatggggccgattatggccgcgtactgtgtggttttgagcttgatgagagtgatttatcccgcttttcggcgcatttgcgcgaacttggctaccaatgcaaagatgtcacggataacccatcctaccgtttctttctttcctaa

SEQ ID NO: 12438 - protein, 509 aa, Vibrio vulnificus YJ016
MSLTQQTGADYLRQILRAPVYEVATVTPLQEMPRLSARIGNNVQIKREDRQPVHSFKLRGAYNMVANLSQAQKDAGVIAASAGNHAQGMALSGTRLGIETTIVMPRTTPDIKVDAVRGFGGKVVLHGSNFDEAKAEAERLSQEKGYTFVPPFDHPLVIAGQGTIGMEMLQQNGHLDHIFVPVGGGGLAAGVAVLVKQLMPEIKVIAVEPEDSACLKAALDAGEPVVLDQVSMFADGVAVKRIGDETFRLCQHYIDDHVTVSSDEICAAVKDIFEDTRAIAEPSGALALAGLKKYAEKHKLKGHNLGTVLSGANTNFHGLRYVSERCELGEKREGLLAVTIPERKGAFFEFCHLIGGRAVTEFNYRYNDDSLANIFVGVRLQNGQEELDGIIRDLREGGYPVVDLSEDEMAKLHVRYMIGGKPSKPLKERLYSFEFPEYPGALLKFLSTLGTHWNISLFNYRNHGADYGRVLCGFELDESDLSRFSAHLRELGYQCKDVTDNPSYRFFLS

SEQ ID NO: 12439 - DNA, 1341 bp, Corynebacterium diphtheriae NCTC 13129
  CDS (1)..(1341): transl_table=11
gtgttaggaagcagtagtaccccgtggttaaaattgttgcccatgagtaaagaagcagaaaaccagcaggtcactttcggcgcaattcacgccgctgatattcaaatggcacagtctcgaatttctgcttctattgcaccgacgcccctgcagcattgcccacggttgtcgcaaatgacgggatgcgaagtctatctcaagcgcgaagaccttcaagacgttcggtcctataaaatccgtggtgctgtcaatgcgatctcgcaactgacagaggaacaacgagtggctgggatcgtggcggcgtcggcaggcaatcatgctcaaggtgtggctttcgcctgccgaaccatgggtatcaaaggtcgaatctacgttccggcagcaacgccaaagcaaaaacgcgaccgtatcatggtccatggtggcgacgctgtagaactcgtagtcaccggtgccaattttgatgaagcggcagctgctgcacgtgagtacgctcgcgttgaaggcgcaacgatggtggaaccattcgataaccgcgataccgttatcggccaaggaactgtagcagcagagatcttggcacaattaacaacgctgggtaaaacacttgataccgtcgtcgtgcccgttggtggtggtggattgctttccggcgttgtcagctatcttgctgatatggcgccacgcaccgcgatcgttggagtagaaccagaaggtgcggcatccatgcgcgccgctctggatgcgcacggtcctgtgaccttggataatgttgacccatttgtcgacggtgccgctgtgaaacgtatcggtgatcttaactatcacatcatcgaacacaaccaaggccgtattcaccccatcagcgttaatgaaggtgctgtatgtactgagatgcttgacttgtatcaaaacgagggcatcattacagaacctgcaggggcgctgtcagttactggattgaaagagctgtcacttggaagcagggacgtagttgtctgcatcatctctggtggtaacaacgatgtgctgcgttatggggaaatcatggagcgctccctcgttcatcgcggactcaagcactacttcctcgtcaatttcccacaggagccagggcagctacgtactttcctgaacgacatcttgggcccagatgacgacatcactttgtttgaatatctcaaacgcaacaaccgtgaaaccggaacagcgctcgtaggacttcaactcggagttgcttccgaacttgacggtttgctcgagcgaatgaatgcttcgcggattgattgccggcgactagaacctggaacgccagagtatagttacctcgttaatttgtaa

SEQ ID NO: 12440 - protein, 446 aa, Corynebacterium diphtheriae NCTC 13129
MLGSSSTPWLKLLPMSKEAENQQVTFGAIHAADIQMAQSRISASIAPTPLQHCPRLSQMTGCEVYLKREDLQDVRSYKIRGAVNAISQLTEEQRVAGIVAASAGNHAQGVAFACRTMGIKGRIYVPAATPKQKRDRIMVHGGDAVELVVTGANFDEAAAAAREYARVEGATMVEPFDNRDTVIGQGTVAAEILAQLTTLGKTLDTVVVPVGGGGLLSGVVSYLADMAPRTAIVGVEPEGAASMRAALDAHGPVTLDNVDPFVDGAAVKRIGDLNYHIIEHNQGRIHPISVNEGAVCTEMLDLYQNEGIITEPAGALSVTGLKELSLGSRDVVVCIISGGNNDVLRYGEIMERSLVHRGLKHYFLVNFPQEPGQLRTFLNDILGPDDDITLFEYLKRNNRETGTALVGLQLGVASELDGLLERMNASRIDCRRLEPGTPEYSYLVNL

SEQ ID NO: 12441 - DNA, 1227 bp, Mycoplasma mycoides subsp. mycoides SC str. PG1
  CDS (1)..(1227): transl_table=4
atgtcgcatccattttcagtagatgaaattaaacaaattcatcaagaaatttctaaaataattcattatacacctttacattatgcagataaattatcagctttaactggtaataatatttatttaaaattagaaaatttacaaaaaacaggaagctttaaattaagaggagcaactaataaaattaataaactaactaatgaagaaaaagaacatggaattattgcagctagtgctggaaatcatgcacaaggtgtagcttatgcagctactaatttagggttaaaatcaacaattgttatgcctgaaaatgccccaatggcaaaaattcaagcaacagaaaaatatggtggaaaagttgttctaagtggaagattttttgatgatgctttagctaaagcaattgaattaaaagaaaaagaaaatctaactttaattcatgcttttgatgatattgaaattattaaaggtcaagctactattacatatgaaattgatcaacaaattaaaaacatcgattattgtttagtaccaattggtggtggtggattaatgagtggtattgctacttatttaaaacaagttaatccaaatattaaaatgattggtgttgaagctgctaatgttaattcctatcaacaagcaaaagctttgagtagaccagtgatggttgattctaaaccatcaatagcagatggaattgctgttaaaaaagttagtgatttaactttttcaatattaaatcaatatgttgatgatgtagttgttgtaagtgaagaagaaattgctgaagcaatgttatttttaatggaaaattgtaagtttgtaactgaaggttcaggagcagttactgctgctgctttaatgtttgataaattaaatattaaaaatcaaaataaaacaatagttggtttagttagtggtggaaatattgatattgcaatggttggtaatattattaataaagctttaattaaaactaatagaagattagtattatcagttaatataacatcagataataaagaaatactaaaaataattaatattattaattcttgtggagctaaaatttttaaaataaaaactaatagagatattatgtatttagaattaagtgaaattcatgcaacatttattattgatttatcaaatactgatcaacaacagcaaatcattgacaaaattattcaagctaattacaaaattacaagcattacagattaa

SEQ ID NO: 12442 - protein, 408 aa, Mycoplasma mycoides subsp. mycoides SC str. PG1
MSHPFSVDEIKQIHQEISKIIHYTPLHYADKLSALTGNNIYLKLENLQKTGSFKLRGATNKINKLTNEEKEHGIIAASAGNHAQGVAYAATNLGLKSTIVMPENAPMAKIQATEKYGGKVVLSGRFFDDALAKAIELKEKENLTLIHAFDDIEIIKGQATITYEIDQQIKNIDYCLVPIGGGGLMSGIATYLKQVNPNIKMIGVEAANVNSYQQAKALSRPVMVDSKPSIADGIAVKKVSDLTFSILNQYVDDVVVVSEEEIAEAMLFLMENCKFVTEGSGAVTAAALMFDKLNIKNQNKTIVGLVSGGNIDIAMVGNIINKALIKTNRRLVLSVNITSDNKEILKIINIINSCGAKIFKIKTNRDIMYLELSEIHATFIIDLSNTDQQQQIIDKIIQANYKITSITD

SEQ ID NO: 12443 - DNA, 1857 bp, Magnaporthe grisea 70-15
  CDS (1)..(1857)
atggcggcgccctcagatctagaggtcacggcgacaaaaatcaacggttcttcctgccaggagaccgtcaccaatggtgacggtatcaacggccccaatggctgcagcgtggcgcccgcaacgcctgcgacgcccaccactccagttatgactgtaacgcgcccctcgcggacgcccagcttgaccggtctttcactcacagagtacagcgccaacccatcaccaccggcggagagcaaacgtcgaaaggcaaagaaggtgatacctgacgactacatactgccaagtggacaccctgactatctccgcctgatcttgacttccaaggtctacgaggtatgcaaggagacgtcactcacccatgccgtcaacctcagcaacaggctcgagtgcaaagtccttctgaagagggaggatgagcagcccgtcttcagcttcaagctgcgcggtgcatacaacaagatggctcacctcgaccgcgctcaatcatggcggggtgtcgtctgctgctcagctggcaaccacgctcagggggtagccttttctgcccgcaagctcaagatccccgccaccatcgtcatgcccgagggcacgccaagcatcaagcaccttgccgtggctcgtatgggtggccatgtcgtgctgcacgggcccgatttcgacgcggccaaggaggagtgcgcccggcgcgagaagcacgacgggcttatcaacatcccgccctttgacgatccctatgtcatcgccggccagggcaccattggcatggagctgctccgccagaccaacctgcagaagctagaggccatcttctgctgtgtgggcggaggcggtctcatcgccggcataggtgtctacgtaaaacggattgcaccgcacatcaagatcatcggcgtcgagacccatgacgccaacgctatgactcagtcgttggccaagggtgagcgtgtactcctcaaggacgtcggcctctttgcagatggtgccgccgtcaggacagtaggcgaagagaatttccgcatctgccaggaggtcatcgatgagatggtccaggtgactacggacgaggcgtgcgctgccatcaaggacatattcgaggataccaggtccgtcgtcgaacccgccggggctctggctctggccggactcaagaagtgggtcgcggccaacccgtccaccgactcgagccgttcccttgtcgccataactagcggtgcaaacatgaactttgaccggctgcgcttcgtagcagagcgtgccaacgttggtgagggccgcgaggcgctactggcggcccgcattcccgagaagccgggttctttcgccaagctcatcgaagccatcatgcccaacaacgtcaccgagttcacttaccggtacactgatggcgaggtggccaacataatgctgggactctcgctgacagcgccagtagcgcagcgtgcccaccagctgcagctactcatgggccgcatcgcagaggccggtatggaggtgacggacctgtcgggtgacgaactggccaaaagccacgtgcggtatcttgttggaggacgggccaaagtgcccaacgaaaggctgtacatgtttgagttcccggagcggcccggcgcgctggagaagttcctggcaacgctgcggccgcgttacaacatcagcctgttccagtaccgtaactacggcagcgacgtcggcaagatcttggcgggcatccagtgcccagacggagaaatgccggagctggtcaaattcctcaaggagattggatacccgtggtttgactgcacgcaatcggaggtggccaagacctttttgggtggtccaggggtcaacgaagagggggcagtccctctttag

SEQ ID NO: 12444 - protein, 618 aa, Magnaporthe grisea 70-15
MAAPSDLEVTATKINGSSCQETVTNGDGINGPNGCSVAPATPATPTTPVMTVTRPSRTPSLTGLSLTEYSANPSPPAESKRRKAKKVIPDDYILPSGHPDYLRLILTSKVYEVCKETSLTHAVNLSNRLECKVLLKREDEQPVFSFKLRGAYNKMAHLDRAQSWRGVVCCSAGNHAQGVAFSARKLKIPATIVMPEGTPSIKHLAVARMGGHVVLHGPDFDAAKEECARREKHDGLINIPPFDDPYVIAGQGTIGMELLRQTNLQKLEAIFCCVGGGGLIAGIGVYVKRIAPHIKIIGVETHDANAMTQSLAKGERVLLKDVGLFADGAAVRTVGEENFRICQEVIDEMVQVTTDEACAAIKDIFEDTRSVVEPAGALALAGLKKWVAANPSTDSSRSLVAITSGANMNFDRLRFVAERANVGEGREALLAARIPEKPGSFAKLIEAIMPNNVTEFTYRYTDGEVANIMLGLSLTAPVAQRAHQLQLLMGRIAEAGMEVTDLSGDELAKSHVRYLVGGRAKVPNERLYMFEFPERPGALEKFLATLRPRYNISLFQYRNYGSDVGKILAGIQCPDGEMPELVKFLKEIGYPWFDCTQSEVAKTFLGGPGVNEEGAVPL

SEQ ID NO: 12445 - DNA, 1746 bp, Gibberella zeae PH-1
  CDS (1)..(1746)
atgccttctgctgatcccatcgtggccgtccctgccaatggcgctgtcaatggcaccgccaatggaacaaatgacgactctcgtccgcagacgccgatgaccggaatggccttgaccgagtatagcgcaaacccctcgacaccgtccgcagagaagcaggctcgcctcaaagagattgttcccgaggaatacctcctccctactggataccctgactaccttcgtctcatcgccggcgctacttctcgagtctacgaggcctgcaaagtcactcccctcacccacgccatcaacctgagcaaccggctcgaatgcaatgtcctcctcaagcgtgaagacgagcagcccgttttcagcttcaagctgcgcggcgcttacaacaagatggcccatctcgaccccaagaagagctggaagggcgtagtctgctgctccgccggtaaccatgcccagggcgtcgcctattccgctcgcaagctcaagatccccgcgaccatcgtcatgcccgaagcgactcccagtatcaagcatctcaacgttgcccgtctcggcggccatgtcgtgttgcacggcgctgactttgacgccgccaaggaggagtgtgctcgacgagaggtccaggatggactcatcaacatcccccctttcgacgacccctatgtcattgctggtcagggcactatcggaaacgaattgttcggccaggtcaacatggccaaggtggaggctatcttctgctgtgtcggcggcggcggtctcattgctggaatcggtctctatgtcaagcgcatggctccccacgtcaagatcatcggtgtcgaggctcaggatgccaacgccatggcgcaatcgctaaagaagggcgagcgagttcttctcaaggaggtcggcctgttcgctgacggcgccgctgtcaagattcccggagaggaaactttccgcatctgcaaggaggttatcgacgatgttatcgaggtgtcaaccgacgagatctgcgccgctatcaaggacatgtacgacgacacccgttcaggtctcgagcccgccggtgccctttccatcgccggtctcaagaaatacgtcagccagaacccctcggacgattcgaagcgcaaccttatcgctgtgacgtccggcgccaacatgaactttgatcgcttgagatttgtcgctgaacgtgccaccatgggtgagggcaaggaagctcttctttctgtccagatccccgagcgtcctggtgctttctccgaactcatcaacaacatcatgccccacggtgtcacagagttcagctaccgatactccacagacgaagtcgccaacatcctcatcggtgtctccctcacagcccccgcccaccaacgatccgaagaactccgctccctcatcgaccgcatccaatcaaacaacatgaccgtgacagacctctcaaacgacgagctcgccaagagccacatccgatatctcgtcggtggacgatccggcgtccccaatgagcgcctctacatgttcaccttccccgagagaccaggagctctcgagaagttcctcgtcacgctccgtcccaagttcaacatcagcctgttccagtaccgtaactacggcggcgacgttggcaagatcgttaccggaatcctatgtcctgacgaagaggtcaccgagcttcacaactttttgcgcaagatcggttatccttacgaggactgcaccgagtcaccagtattcaagacatttttgcgatcatga

SEQ ID NO: 12446 - protein, 581 aa, Gibberella zeae PH-1
MPSADPIVAVPANGAVNGTANGTNDDSRPQTPMTGMALTEYSANPSTPSAEKQARLKEIVPEEYLLPTGYPDYLRLIAGATSRVYEACKVTPLTHAINLSNRLECNVLLKREDEQPVFSFKLRGAYNKMAHLDPKKSWKGVVCCSAGNHAQGVAYSARKLKIPATIVMPEATPSIKHLNVARLGGHVVLHGADFDAAKEECARREVQDGLINIPPFDDPYVIAGQGTIGNELFGQVNMAKVEAIFCCVGGGGLIAGIGLYVKRMAPHVKIIGVEAQDANAMAQSLKKGERVLLKEVGLFADGAAVKIPGEETFRICKEVIDDVIEVSTDEICAAIKDMYDDTRSGLEPAGALSIAGLKKYVSQNPSDDSKRNLIAVTSGANMNFDRLRFVAERATMGEGKEALLSVQIPERPGAFSELINNIMPHGVTEFSYRYSTDEVANILIGVSLTAPAHQRSEELRSLIDRIQSNNMTVTDLSNDELAKSHIRYLVGGRSGVPNERLYMFTFPERPGALEKFLVTLRPKFNISLFQYRNYGGDVGKIVTGILCPDEEVTELHNFLRKIGYPYEDCTESPVFKTFLRS

SEQ ID NO: 12447 - DNA, 1716 bp, Candida glabrata CBS 138
  CDS (1)..(1716)
atgatacccaagctgctgtgtggtaacacactgttgagtgcatctgttacaacaagtaggtctgtctatggcttatctaccagatattttactcaggatctcgcaccttcattggttaaactgcattccgagttaaagcctgatgagcttcttactgataacacaccagactatgtgcgtttggtgctaagatcatcggtctatgatgttataaaggaatcgccaatctcacatggtgttggtctatcgtctagactaaacacaaatgtccaactgaaaagagaagatttactaccagtgttctctttcaagctgcgtggtgcatacaacatgatagcgaagttagacgatactcagagaaatcaaggtgtcatcgcatgttccgcaggtaatcatgcacaaggtgtagcatatgccgctagacatttggatattccagcaactattgtcatgcctgtgtctactccatctataaaatatcaaaatgtgtcgagactgggttcacaagttgttctatatggtaatgattttgacgaagctaaagctgaatgtactaaactggcagaagagcgtggtttgactaacatccctccatttgatcatccatatgtcattgctggtcaaggaacagttgcgatggaaatcttgagacaggtctataactcaaataagatcggtgctgtctttgttccagttggtggtggtgggttgattgccggtgttggtgcctatttgaagagagtcactccacacatcaagattataggtgtggaaacacatgatgcagcaactttacacacatctcttcaaagaaataaaagaacaaatctagctagcgttggtacttttgctgatggtacttctgtgcgtattattggtgaagaaacctttagagttgccagagaagttgtcgatgaaattgtattggtcaatactgatgaaatttgtgctgcggttaaggatgtctttgaggataccagaagtattgttgaaccatctggtgctcttgcggttgctggtatgaagaagtatattactcaacttcatccagaaatagatcactctaagcaaacatatgtcccaattttgtcaggtgctaatatgaacttcgatagattaagatttgtttctgagcgtgctgtattaggtgaaggtaaggaagtttttatgctggttaccattcctgacgttccaggctctttcaaaaaaatgcagaaggttattcatccaagagctgttactgagttctgttaccgttataatgaacatcgtcatgaatcttctagtgaggttccaaaggcctatatctatacatctttcagtgtggtagaccgcgaaaaggagattaaacaagtaatgcagcaactgaacaccctcggttttgaagccgtcgatatttctgacaatgaattagcaaaatcacatggtagatatttagttggtggtgcgtcaaaggtcccaaatgaaagaattatttcgttcgaattcccagaaagacctggggccttaaccagattcttggcaggtttaagcgagtcttggaatttgacattgttccattacagaaaccatggtgctgatattggtaaagtattggctggtatttctgtgccacctagagaaaatttaactttccaaaaattcttggaagatttaggctataagtaccaagatgaaacagaaaatatggtatatcaaagactactgaaatattaa

SEQ ID NO: 12448 - protein, 571 aa, Candida glabrata CBS 138
MIPKLLCGNTLLSASVTTSRSVYGLSTRYFTQDLAPSLVKLHSELKPDELLTDNTPDYVRLVLRSSVYDVIKESPISHGVGLSSRLNTNVQLKREDLLPVFSFKLRGAYNMIAKLDDTQRNQGVIACSAGNHAQGVAYAARHLDIPATIVMPVSTPSIKYQNVSRLGSQVVLYGNDFDEAKAECTKLAEERGLTNIPPFDHPYVIAGQGTVAMEILRQVYNSNKIGAVFVPVGGGGLIAGVGAYLKRVTPHIKIIGVETHDAATLHTSLQRNKRTNLASVGTFADGTSVRIIGEETFRVAREVVDEIVLVNTDEICAAVKDVFEDTRSIVEPSGALAVAGMKKYITQLHPEIDHSKQTYVPILSGANMNFDRLRFVSERAVLGEGKEVFMLVTIPDVPGSFKKMQKVIHPRAVTEFCYRYNEHRHESSSEVPKAYIYTSFSVVDREKEIKQVMQQLNTLGFEAVDISDNELAKSHGRYLVGGASKVPNERIISFEFPERPGALTRFLAGLSESWNLTLFHYRNHGADIGKVLAGISVPPRENLTFQKFLEDLGYKYQDETENMVYQRLLKY

SEQ ID NO: 12449 - DNA, 1704 bp, Kluyveromyces lactis NRRL Y-1140
  CDS (1)..(1704)
atgctacaatctatagtgagaactcctagagttcttcgtgcttcaaatgcattaaaactttctgttcgctgtgttagcacggaccagttctctgataatttgcagaggatgtactcccatttgaaggctgacgaacgattggaagatggatctccagactacgtgcgtttaattttaaggtcttctgtttatgaagtcattgaagagacccccatttcacgtgcggtgtcattgtcctctagactaaacactaacgttaaattgaaaagagaggatttgttgccagtgttttccttcaagctgcgtggtgcttataacatgattgccaagctagacgaaacacagaagaatgctggtgttattgcgtgctctgctggtaatcacgcacaaggtgttgccttttcaagtaatcatatgaacattccagctaccattgtgatgcctgtttcaacaccatcaatcaaatatcaaaacgtgtcgagattaggtgcccaagtggttctatacggtgacgacttcgatgaagccaaattggaatgtgcgaggttagctgaagaacgtggtatgacagatattccaccatttgatcatccttacgttatcgctggtcaaggtactattgccatggagattctaagacaagtacaaaatgggtctaacatcggagcagtgttctgtgccgtaggtggtggtggtttgatttcaggtattggttcatacttgaagagaatcgcacctcatatcaaggttattggtgtggaaacttacgatgccgctacgttagatgtttcattaaagaacggtaaacgtaccccattgccaagtgttggaacgttcgctgatggtacctctgtgaggttaatcggtgaagaaacattccgtgtttgtcaagacgtagtcgatgaagttatcttggtgaacaccgatgaaatctgtgctgccgttaaagatgtgtttgaggacacaagatcaattgtcgaaccaagtggtgctcttgctgttgccggtttgaaaaaatatgtctctcaactacaccctgaaatagaccattctaagaagacatacgttccaattctttccggtgccaacatgaatttcgaccgtttaagattcgtctcagaacgtgctgtattgggtgaaggtaaagaagtgtttatgttggtcaccattccagatactccaggttctttcaagaagctacagaatgtgatccatccaagagctgtcactgaattctcataccgttataacgagcattgtcacgaaaatgactccgatgtaccaaccgcttgtatctacacatcttttaacgtcgttgaccgtgaaaaggaaatcaagcaagtggttcaacaattgcatgctttaggtttcgaagccgtagatatctctgacaacgaaatggccaagtctcacggtagatatttggtcggtggtgcttctaaaattgaaaatgagaaagtcattgcattcgaattcccagagagaccaggtgcactaactaaattcttatcaggattgaacgtttcctggaacttgactttattccattacagaaaccatggcgctgatattgggaaaattttggctggtatcagtgtgcctccacaagacaacgaaatcttccaaaagttcttggacgatctaggatataaatatcaagatgaaactgacaatatggtttaccagaagtttttgaagtactag

SEQ ID NO: 12450 - protein, 567 aa, Kluyveromyces lactis NRRL Y-1140
MLQSIVRTPRVLRASNALKLSVRCVSTDQFSDNLQRMYSHLKADERLEDGSPDYVRLILRSSVYEVIEETPISRAVSLSSRLNTNVKLKREDLLPVFSFKLRGAYNMIAKLDETQKNAGVIACSAGNHAQGVAFSSNHMNIPATIVMPVSTPSIKYQNVSRLGAQVVLYGDDFDEAKLECARLAEERGMTDIPPFDHPYVIAGQGTIAMEILRQVQNGSNIGAVFCAVGGGGLISGIGSYLKRIAPHIKVIGVETYDAATLDVSLKNGKRTPLPSVGTFADGTSVRLIGEETFRVCQDVVDEVILVNTDEICAAVKDVFEDTRSIVEPSGALAVAGLKKYVSQLHPEIDHSKKTYVPILSGANMNFDRLRFVSERAVLGEGKEVFMLVTIPDTPGSFKKLQNVIHPRAVTEFSYRYNEHCHENDSDVPTACIYTSFNVVDREKEIKQVVQQLHALGFEAVDISDNEMAKSHGRYLVGGASKIENEKVIAFEFPERPGALTKFLSGLNVSWNLTLFHYRNHGADIGKILAGISVPPQDNEIFQKFLDDLGYKYQDETDNMVYQKFLKY

SEQ ID NO: 12451 - DNA, 1719 bp, Debaryomyces hansenii CBS767
  CDS (1)..(1719)
atgatgattgccagaaacctattgaagggcatacacaagcctgtaaacagaagggtttgtataccaaaaattggttcgttaacttcggccaaattctattccactcaatctacggttcaacaatttccagaattgcaagaagctgattttacgcccgaaggtgagccagattatattaagttgatattgacatctcgggtttacgatgtcgtcgatgaaggtggatctcctctcactcatgctgttaacttatcacagaaatgcaataccaatatattcttaaagcgtgaagatttattaccggtattttcattcaagttacgtggagcatataatatgattgcacatttacattctaattcaaagtcaccagtatcaggggtaattgcatgttctgctggtaatcatgcacaaggtgttgctttctctgctagtaaattaaagattcaatctactatagtcatgccaacagctactccttctatcaaatataaaaatgtttctagattaggatcacaagttgttttatacggagacgattttgatagcgcgaagaaagaatgtgatcggttgagttcattgaacggattgaccaatatccctccttttaaccacccatatgtcatcgcaggtcaaggtactatagccctagaaatcaccagacaattgaggttagacaaacttgatgccttatttgttccagtaggtggaggtggattgatagctgggattgctgtttatttaaaaaagattgctccccatgtcaagattattggtgtcgagacttttgatgcagatgcattgtatcagtcattgcaaaaccatcaactgaagacattggatcaggttggagtttttgctgacggtactgctgtcaaggttcttggtgatgaaacttggaagctttgccataaatatgttgatgaagtagttagggttctgaccgatgaattatgtgcagcaattaaagatatttttgaagataccagactgattgttgaaccatctggagcgttatctgttgctgggttgaagagatatcttagtgataattctgaaattgatcataggaataagaattacgttccaattttaagtggagccaatatgaatttcgatagattaagatttgtaagtgaaagagctgtactcggtgaaggtaaggaagtatcattagctgtcaccattcctgagagacctggtgagtttgctatattacagaatataatcgacccaagagctattacagaattttcctatagatttaacaatagtggtcctgcaaatatttttgttagtttcaatgttaccaataaggacaaagaattagctcctattgttgaatctatgaagagtaatgattatgaagttattgatatctcagagaatgagttggcgaagactcatggtcgttatttagtcggcggaaaatctacaacggctaactgcaataagatttctaaagaaaggttattcagattcgaatttcctgaaagaccaggtgctttaacaaaatttttacaaaccttgaagtatgattgggatataaccttgtttcactatagaaatcatggccatgatgttgggaagattttgtgtggttttgtacttccagaaggcacaagcgatgaggacttccaggatttcttgaaaaaaattggttataattttgttgatgaaacagacaatgtcgtatataaaaaattcttacaaagctag

SEQ ID NO: 12452 - protein, 572 aa, Debaryomyces hansenii CBS767
MMIARNLLKGIHKPVNRRVCIPKIGSLTSAKFYSTQSTVQQFPELQEADFTPEGEPDYIKLILTSRVYDVVDEGGSPLTHAVNLSQKCNTNIFLKREDLLPVFSFKLRGAYNMIAHLHSNSKSPVSGVIACSAGNHAQGVAFSASKLKIQSTIVMPTATPSIKYKNVSRLGSQVVLYGDDFDSAKKECDRLSSLNGLTNIPPFNHPYVIAGQGTIALEITRQLRLDKLDALFVPVGGGGLIAGIAVYLKKIAPHVKIIGVETFDADALYQSLQNHQLKTLDQVGVFADGTAVKVLGDETWKLCHKYVDEVVRVLTDELCAAIKDIFEDTRLIVEPSGALSVAGLKRYLSDNSEIDHRNKNYVPILSGANMNFDRLRFVSERAVLGEGKEVSLAVTIPERPGEFAILQNIIDPRAITEFSYRFNNSGPANIFVSFNVTNKDKELAPIVESMKSNDYEVIDISENELAKTHGRYLVGGKSTTANCNKISKERLFRFEFPERPGALTKFLQTLKYDWDITLFHYRNHGHDVGKILCGFVLPEGTSDEDFQDFLKKIGYNFVDETDNVVYKKFLQS

SEQ ID NO: 12453 - DNA, 1590 bp, Yarrowia lipolytica CLIB122
  CDS (1)..(1590)
atgtccgaacccgactatctgaagctcatcttgaagagccgcgtctacgacgtgtgcaaggaaacacctgtgacatctgctcatggtctgagcgagaagctgggctgcaaagtgctgctcaagcgggaagatcttcagccggttttctcgttcaagctgcgaggagcctacaacatgatttcgcagctgagtgacgaggaaaagtggaagggagtgattgcgtgtagcgccggtaaccatgcccaaggagtcgccttttcagccaactatctcaacattccagcgactattgtcatgccgttggccactccttccatcaagcacagtaatgtttctagactaggtggcaaggtggttttgcacggagacgattttgattcggccaaggcccactgcaagcagctgtgtgagaaatatggactcacagatatccctccctttgatcacccccacgtgattgcaggccagggaactattggtatggagattcttcgtcaggcgtcggacaacctgaaggccgtgtttatctgtgttggaggcggcggtctgattgccggagtaggcgcttacatcaagcggatccagcccgatgtcaaaatcattgccgtggagacctatgatgcatgtgctctgaaacagagtctcatcaagggcgaacgggtgactctgcctgaagtcggtctgtttgccgatggagctgctgtcaagctgtgtggcgaggagactttccgactctgtcgcaagtacgttgatggagttgtgcttgtgaacacggacgagatctgcgccgctatcaaagatgtatttgaggccactagatcggtggtggagcctgctggtgctctgtcggtggctggtctcaagaagtactgctccgacccctcggccatttggtggtcacctgagtccgattccgcaaaggccaatggtatccccactaacgttgccatctcagaaaccgacgagtatctgtcaattctctctggagccaacatgaactttgaccggcttcgattcgtggccgaacgagctatgcttggagaaggaaccgaagtcttcatggtcgtcaccatccccgatattcccggagcgtttgaaaagctgcacgagatcattctccccagagctgtcaccgagttctcctacagaaagaagtccactgctgagaacgaagacgctaacatttttgtgtctttttcagtcaaaaaccgacaagaggaaattgcagacgtgctggaaaagctgcaagctgccggtatgagcggagtcgacgtttcagacaacgaactggcaaagacccacgctagatatctcgtgggaggccagccagacgtgcctaatgagagactgttccggttcgagttccctgaacgacccaacgcgctcaaaaacttcctcggaggtgtccagacaaagtggaatatcaccctgttccactacagaaacaacggcagtgatattggaaagattctgacagccttggacgtgccggaaagcgacaatgaggcgctcaaggagtttcttgagaagctcaagtacccctttgtggaggagacagacaatgtggtgtacaagcagtttatgaagtaa

SEQ ID NO: 12454 - protein, 529 aa, Yarrowia lipolytica CLIB122
MSEPDYLKLILKSRVYDVCKETPVTSAHGLSEKLGCKVLLKREDLQPVFSFKLRGAYNMISQLSDEEKWKGVIACSAGNHAQGVAFSANYLNIPATIVMPLATPSIKHSNVSRLGGKVVLHGDDFDSAKAHCKQLCEKYGLTDIPPFDHPHVIAGQGTIGMEILRQASDNLKAVFICVGGGGLIAGVGAYIKRIQPDVKIIAVETYDACALKQSLIKGERVTLPEVGLFADGAAVKLCGEETFRLCRKYVDGVVLVNTDEICAAIKDVFEATRSVVEPAGALSVAGLKKYCSDPSAIWWSPESDSAKANGIPTNVAISETDEYLSILSGANMNFDRLRFVAERAMLGEGTEVFMVVTIPDIPGAFEKLHEIILPRAVTEFSYRKKSTAENEDANIFVSFSVKNRQEEIADVLEKLQAAGMSGVDVSDNELAKTHARYLVGGQPDVPNERLFRFEFPERPNALKNFLGGVQTKWNITLFHYRNNGSDIGKILTALDVPESDNEALKEFLEKLKYPFVEETDNVVYKQFMK

SEQ ID NO: 12455 - DNA, 1395 bp, Apis mellifera
  CDS (1)..(1395)
atgaggaatttgaatcagaacggtcaggagttcgatctgatcgccgagagcgggagcaacgatttcgactcgtccgcaacaacgatccgtcaagaagagaacgacgaggacgatctgaacgatccgtactgcgtcgaggataatccccagaggatcactttcgaggacgtcacgtcggccgctttcaagatcaaatgcgggatcatcaacacgccatgcgtgaaatctcggctgtcggacacgatcggcgtagatctttacctgaagaaggatttcctccaagtaaccggaagcttcaaggagcgcggggcgaggtacgccctggtgatgctgtccgacgagcagaagaagatcggcgtgatctcggcctcgttgggcaaccacgcaggcgccctttgttatcatgggtacaagcttggcatacccgtgacagtggtgatgcccgtgatcgcgcctatcatgaagatcgtcgcttgtcgccagtacggcgccaacgtgatcgtcgatggcctcgacatggaggaggcgaggcgtatcgcgcttagacgggccaaggagaaagggctgacgtatataaacggatacgattatccggacgttatagcggggcaagggacgctggggctcgagatcgtggagcaagtttccaacatagacgctgtggtcgttccgataggaggcggcggtttgatcgcgggcgtagctctcgcggtgaagaatcttcatccgaacgtaacgattatcggcgtggagtcggagaagtgtcccagtttctacaaggcacgaaaggcggatcgaccgacgtatactcgtatagattcgaccctggcagatggcctggccgtgccagtggttggatacaacgctttcgcgaccgcgaatccgttgatcgacaaattggtggtggtgaaggaggaatggatcgcgatcgcgatcctgaaactggtcgagaacgagaagtgtatcgtggagggtgcaggcgccactggattggccgccatcttggctggtcaattggaagaactgaaaggaaaaagggtggtgctgcctttgtcgggcgggaacatcgacacgacgatcctcggcaggtgtttggaccgcggactggcggcggaaggcaggcttttgaagttcacagtgacggtatccgatcgaccgggcggaatcgcggagctttgccgaatgctggcgagcatcggtgtctcgataaaggacatcatgcacgagcgggcttggatcatgtcggacatcttcagcgtggacgtgaaagtggtctgcgagaccaggaatcgggaacacgcggaacaattgaagaacatgctgtatcagaaatatcagaaggttgtgttcgggaccagcgacgtggccacactgaatttgcccgcgagcgtgtaa

SEQ ID NO: 12456 - protein, 464 aa, Apis mellifera
MRNLNQNGQEFDLIAESGSNDFDSSATTIRQEENDEDDLNDPYCVEDNPQRITFEDVTSAAFKIKCGIINTPCVKSRLSDTIGVDLYLKKDFLQVTGSFKERGARYALVMLSDEQKKIGVISASLGNHAGALCYHGYKLGIPVTVVMPVIAPIMKIVACRQYGANVIVDGLDMEEARRIALRRAKEKGLTYINGYDYPDVIAGQGTLGLEIVEQVSNIDAVVVPIGGGGLIAGVALAVKNLHPNVTIIGVESEKCPSFYKARKADRPTYTRIDSTLADGLAVPVVGYNAFATANPLIDKLVVVKEEWIAIAILKLVENEKCIVEGAGATGLAAILAGQLEELKGKRVVLPLSGGNIDTTILGRCLDRGLAAEGRLLKFTVTVSDRPGGIAELCRMLASIGVSIKDIMHERAWIMSDIFSVDVKVVCETRNREHAEQLKNMLYQKYQKVVFGTSDVATLNLPASV

SEQ ID NO: 12457 - DNA, 1764 bp, Aspergillus nidulans FGSC A4
  CDS (1)..(1764)
atgaccgagaacgcgtccatgaatggcgctgcgacaccactttcctcgaggttgagcaatttggctctgacggaatactctgctattccgactcctacttcggagaaggaagaatacaaaggacccgacagtccacccgcgtgggatatccctgatgctttcttacttcccaatggctacccggatgtgcgacatgtccctgctgcctacccaaatcgttctaccgctaacaatcgttatctgcagtatcttaaactgattttgacttcccgcgtctacgagatcactaccgagtcccctctccaccatgcagtcaatctcagtaaccgaatggaatgtcgagtgcttctcaagcgggaagacctgctacctgtattcagcttcaaactccgcggagcatacaacaagatggctcatttgaccgacgagcagcgatggaaaggcgtgattgcttgctcagcaggcaatcatgctcagggtgtcgcgtactctgcccgcaagctcaaaattcccgctaccattgtcatgccctccggcaccccagcgatcaaacacttgaatgtcgctcgccttggcggtagtgttgtccttcatggaaacgatttcgacgctgccaaagaagaagctcaccgccgggaaaagcagcacggtcttacaagcattccccccttcgatgacccgtacgttattgctggacaaggaaccatcggaatggagatcttgcgccaagcgaatctggacaagctggaagctgtcttttgcgccgttggcggaggaggtctgatctccggtgttggcgtttacatcaagcgcattgcgccgcatgtcaaggtcattggtgtggagacccacgacgccaacgcaatggcccagtctcttgatgaaggctctcgtgtgttgctgaacgaggtcggcctctttgcagatggcgctgcggtcaagagtgtggggtcggaatgttggcgcgtggcccgcgaggtagtagatgagattatcttggtttcaaccgatgagacttgcgctgcgatcaaggatgcatttgaggatacacgctcgatcatcgaacccgctggtgcgctggccattgcaggattaaagaaatatgtcgccaagcgccccagccccaacaccagccgtgaactggttgcaatcacctcgggagcaaatatggattttgaccggctgcggtttgttgcggaacgcgctgccttgggggagaaaaaggaagctcttctgagcgtaaaaatccctgaacaaccgggcgctttcgccaagctagtggaggtcgtccttccgcatgctgtaaccgcattcaactaccggtatgctgatgaaacaactgccgatgttctcatgggtatctccttgtccgcttcaacaggtcaagaagacctggctaagattatgacggaattaacccgaaacggcatggactcgaaggatctcagcgatgatgagcttgctaaacggcacctgcgcttcttggttggcggacgcagtgaagtgaaggatgagcgcctgttcatgttcgagttccccgagcgtcccggagcgttagccaaatttctcaggacgcttcgtcctagccagaacatctctctattccactaccggaattacggcggcgatgttggcaaggttctggcgggtattcagtgcccggaatgcgagaaggaacaacttgaggctttcctcaaggaccttggatacccatttaccgaggagacgcaatccgaaacttacaagactttccttcgtcgttga

SEQ ID NO: 12458 - protein, 587 aa, Aspergillus nidulans FGSC A4
MTENASMNGAATPLSSRLSNLALTEYSAIPTPTSEKEEYKGPDSPPAWDIPDAFLLPNGYPDVRHVPAAYPNRSTANNRYLQYLKLILTSRVYEITTESPLHHAVNLSNRMECRVLLKREDLLPVFSFKLRGAYNKMAHLTDEQRWKGVIACSAGNHAQGVAYSARKLKIPATIVMPSGTPAIKHLNVARLGGSVVLHGNDFDAAKEEAHRREKQHGLTSIPPFDDPYVIAGQGTIGMEILRQANLDKLEAVFCAVGGGGLISGVGVYIKRIAPHVKVIGVETHDANAMAQSLDEGSRVLLNEVGLFADGAAVKSVGSECWRVAREVVDEIILVSTDETCAAIKDAFEDTRSIIEPAGALAIAGLKKYVAKRPSPNTSRELVAITSGANMDFDRLRFVAERAALGEKKEALLSVKIPEQPGAFAKLVEVVLPHAVTAFNYRYADETTADVLMGISLSASTGQEDLAKIMTELTRNGMDSKDLSDDELAKRHLRFLVGGRSEVKDERLFMFEFPERPGALAKFLRTLRPSQNISLFHYRNYGGDVGKVLAGIQCPECEKEQLEAFLKDLGYPFTEETQSETYKTFLRR

SEQ ID NO: 12459 - DNA, 1710 bp, Candida albicans SC5314
  CDS (1)..(1710): transl_table=12
atgtcaatcactcgactttcaagtgctaagcttttattaagtagcacgtcacgcaaactacaggtattaaggttaaatagtacaacgaccaaaccccttacccctagacaaaaatggccggaacttttggactctgatttcatagtgaattctcaaggtgaaaaacaacccgattatgtcaaattgatattaacttcaagagtgtacgatgttgtggacgaagccggtacaccattaaccaatgctatcaatttatctcatagatgtggtgccaatatctatcttaaaagagaggatttgttaccagttttttcgttcaagttgagaggtgcatataatatgattgcccatttgcattcaaattccccacaacctatatcaggggttattgcttgttcggcaggaaaccatgcccaaggagttgcattttcttcgagtaaattaaatatcccagccacaattgtcatgcctactccaacaccttctatcaagtacaccaatgtttcaagattaggtgcccaagttgtattgtatggagacgattttgattcagcaaaacaagagtgtgaaaggttgagcacagagcaaaatttaatcaacattccaccttttaaccatccttacgttattgctggtcagggtacaattgctttagagattgctagacaattgagattagataaattgaatgccatatttgttcctgtaggaggaggtggcttaattgcaggtgtggcagtgtatttgaagcatattgcccctcacgtcaaaatcataggagtagaaacgtatgatgccgatgcattgaaccagtctttaaagaatagtcgcctggttactttggaaaaagttggtttgtttgcagatggtactgccgtgaaagttcttggagatgaaacctggagattagcaaaagaatatgtagatgaagttgtgcttgtcaacactgatgaattgtgtgctgctattaaggatatttttgaagacacaaggctgattgtcgaaccttctggagcattgtctgttgctggattgaaaaagtacattgaagaacacccagagattgaccacagagataagacatatgttccagttttgtctggtgctaatatgaattttgatagattaaggtttgttagtgaaagagcagttttgggtgaaggaaaagaagtctcattggctgttaccattcctgagaaacctggtgagtttgccagattgcaaaaagttatcaatccacgtgctatcactgaattttcatacaggtacaacggtgaagaaaacgccgatatatttgtgtcctttaatgtagtggacaagaaaaaagaaaagtcttcagttatagcagcaatggaaaattgtggatttgaagttgttgatatttcagaaaacgaattggcaaaatctcatggacgttatttagttggtggtaagtcacaatctacaaaatcctcaaatgaaaaaatctatcaatttgaattccctgaaaaaccaaatgctttgtttaactttttacaagcattaaggagcgactggaatatcagcttgtttaattatagaaatcatggacatgatgtcggaaaaatcttgtgtgcatttactcttcctgaaggatctgaggaagacttccaagaatttttaaagaatgttggttacacttttgttgatgaatctgataacatcttttacaaaaaattcttgagaagctaa

SEQ ID NO: 12460 - protein, 569 aa, Candida albicans SC5314
MSITRLSSAKLLLSSTSRKLQVLRLNSTTTKPLTPRQKWPELLDSDFIVNSQGEKQPDYVKLILTSRVYDVVDEAGTPLTNAINLSHRCGANIYLKREDLLPVFSFKLRGAYNMIAHLHSNSPQPISGVIACSAGNHAQGVAFSSSKLNIPATIVMPTPTPSIKYTNVSRLGAQVVLYGDDFDSAKQECERLSTEQNLINIPPFNHPYVIAGQGTIALEIARQLRLDKLNAIFVPVGGGGLIAGVAVYLKHIAPHVKIIGVETYDADALNQSLKNSRSVTLEKVGLFADGTAVKVLGDETWRLAKEYVDEVVLVNTDELCAAIKDIFEDTRSIVEPSGALSVAGLKKYIEEHPEIDHRDKTYVPVLSGANMNFDRLRFVSERAVLGEGKEVSLAVTIPEKPGEFARLQKVINPRAITEFSYRYNGEENADIFVSFNVVDKKKEKSSVIAAMENCGFEVVDISENELAKSHGRYLVGGKSQSTKSSNEKIYQFEFPEKPNALFNFLQALRSDWNISLFNYRNHGHDVGKILCAFTLPEGSEEDFQEFLKNVGYTFVDESDNIFYKKFLRS

SEQ ID NO: 12461 - DNA, 2019 bp, Ustilago maydis 521
  CDS (1)..(2019)
atgtacgacaagcaagtacaagtggtgactcaatcctcagatcctccaagcatccctttccgccatacgctgcggagcatcgaccttgttttggtccgggaaacgcgcagcttgatacagccaccaactatggcggacaccgcttcgacgtcgtcgtcttcggcggcgtacctttcgggacccttcccctcggctcgagcactgaccgagaacgatgtcacaccgtcagtgccacccactcggtcagaggagaaatctgcgcctacgcatctctacacggatctgccgcctcatctgatgcaggcagacaacacacccgactatctgcggctcatcctcaatgcggacgtctacgatctagtaaagcagacaccgctacaggcgggagtcaacctgtcgtccaagttgggctgtcaagtgcttctcaagcgcgaagatttgcagcccgtgttcagcttcaagctgcgtggtgcgttcaacatgatgcagcagctcgattcggagcaaaagtggaagggggtgatcgcttgttcggctggcaaccacgcgcagggtgtagctatggcgggtgcgcatctcaagatcccgtgtacgattgtgatgcccaagggtacaccggagatcaagacggcgaatgtcaagaggctgggtgccaaagtggtgctgttcggacaggatttcgatgaggccaaggcagagtgtacgcggctgtccaaggcgtatgggttgacgattatcccgccgtttgatcatcctcgcgtgatcgcaggtcagggtacgatcgctgtcgagatctgccgtcagacagacatgtcgcaagtcgacgctatcttctgctgcgtaggtggcggaggcttgctggccggtgtggcggcttacattaaacgcatcgctccgccgcatgtcaaggtgatcggtgtcgagacgttcgatgcggatgcactggctcagtcgctcgaagctggacatcgcgttctattgaatgaagtcgggcttttcgccgacggtaccgcggtgcgcatcgtgggcgaggaatgtttccgcatctgccgcgataccgtcgacggcgtggtgcgtgtaacgaacgacgaaatctgcgccgctatcaaggacacgtttgaagacacacgctctatcccggaaccgtcaggtgctctcgccgtcgccggtatgaagcgctacattgccgcgcacaatctgcaaggctcgggcaagaaattcgtcgcgctcgtctcgggcgccaacatgaactttgggcgcttgcgcttcgttgcagaacgtgccgagctaggcgaaaacaaagaagcgctcttgagcgtcgagatcgcggaagaaccgggcgcgttcttgaagctgcacaaccatatcaacccgaggatggtgaccgaattcagttatcgatacggcgatagcagcaaggcacagatcttactgtcattcatgctgaacggcaccaacgcgcgtgctgctagcgcgagcagcgaatcgcaatcgcatgcgagcggcgccgtacctgtacctgaagtggtgacgaatacggcctcgactggtgatgcgtcgatctcgtcgtcaagcgcatcgatcgatacagatgtgaaccagctcgctcagtcggtggcgccatcgacactgtcgacgtcgagcgaactcgcgtcgatccttgccgctctcactgcggacggcatgacaccgatcgacctgtcaggcgacgaagtgtccaagtcgcacctccgctacctcgtcggcggcaagacgagcgtcgccaacgaacgcattttccgcttcgagtttccggaacgtcccggtgcgctgcgcaagttcttggtcggaatgcagagcggctggaacatcagcttgttccattaccgaaaccacggtgctgacatgggcaagatcttgctaggcatccaagcgccgaaacaagatgagatcaagtttgaaaccttcctcaaggagctcggataccagtatcatgaagagaccaacaaccctgtgctgaggagatatctcgcacaataa

SEQ ID NO: 12462 - protein, 672 aa, Ustilago maydis 521
MYDKQVQVVTQSSDPPSIPFRHTLRSIDLVLVRETRSLIQPPTMADTASTSSSSAAYLSGPFPSARALTENDVTPSVPPTRSEEKSAPTHLYTDLPPHLMQADNTPDYLRLILNADVYDLVKQTPLQAGVNLSSKLGCQVLLKREDLQPVFSFKLRGAFNMMQQLDSEQKWKGVIACSAGNHAQGVAMAGAHLKIPCTIVMPKGTPEIKTANVKRLGAKVVLFGQDFDEAKAECTRLSKAYGLTIIPPFDHPRVIAGQGTIAVEICRQTDMSQVDAIFCCVGGGGLLAGVAAYIKRIAPPHVKVIGVETFDADALAQSLEAGHRVLLNEVGLFADGTAVRIVGEECFRICRDTVDGVVRVTNDEICAAIKDTFEDTRSIPEPSGALAVAGMKRYIAAHNLQGSGKKFVALVSGANMNFGRLRFVAERAELGENKEALLSVEIAEEPGAFLKLHNHINPRMVTEFSYRYGDSSKAQILLSFMLNGTNARAASASSESQSHASGAVPVPEVVTNTASTGDASISSSSASIDTDVNQLAQSVAPSTLSTSSELASILAALTADGMTPIDLSGDEVSKSHLRYLVGGKTSVANERIFRFEFPERPGALRKFLVGMQSGWNISLFHYRNHGADMGKILLGIQAPKQDEIKFETFLKELGYQYHEETNNPVLRRYLAQ

SEQ ID NO: 12463 - DNA, 1542 bp, Prochlorococcus marinus str. AS9601
  CDS (1)..(1542): transl_table=11
atgaatgattattttgaaaaaatacttcaagctgaagtctatgaagttgcaaaaaaaacaccactagagaaagctcataatttaagtaacacacttaataatgaagtttttctaaaaagagaagatcttcaggatgtattttcattcaaaataagaggtgcatataacaaaatgagtaagctaactaattcacagcttgctcagggagtaattacttctagtgctggaaatcatgcccaaggggttgcacttagtgcccttaagttaaattgccaagcaaccatattaatgcccgttaccacacctatagtaaaagttaatgcagtaaaaagtttaaaagcaaaagttatattatatggtgacaactatgatgaaacatacaaagaggcaataaggattagccaagaaagaaatttatgctttattcatccctttgatgatccagaagtaatagcaggacaaggaactatagctatagaacttgaacagcagcttaaggaaaaaccttatgcaatttatattgctgtaggtggtgggggattgatatcaggaatatccatatacgttaaaaaaatatggccagaagtaaaaataattggtgtagaacctgaagatgctgacgctatgactaaatcattggaagaagaaaaaattgtggaactaccttctgtaggtcaatttgcagatggagtagcggtaaaaaaaattggtaaaaatacttttgatattggtagaaaatatatagataagatgattagggttaatactgacgaaatctgtgctgctataaaagatgtttttgaggatactagatccatattagagcccgcaggggccttatcaatagcgggaatgaaaaaagatattttaaattcgaatcattcaaatagaaaaatggttgcgattgcatgtggtgcaaatatgaattttgagaggcttagatttgtagcagaaagagcagaacttggagagtgcaaagaagtaatgatggctgttgaaattcctgaacgtgctggtagtctaattgatttttgtaagttacttgataatagaaatctaacagaatttagctataggatgtcgaattctaagaatgcacagatatttgtaggggttcaagtctatggtttaaatgataaaaaaaatttattaaatgtatttagaaattctgagtactcatttattgacataagtgatgatgaattatctaaaaatcatctcagacatatggtaggtggaagattaccaagggattttaaagagatggaatataaaaactttattgagcttttatacagatttgagtttcctgaaaggcctggcgcattaataaacttcttaaataatatgaaatctaattggtctataagcgtatttcactacaggaattatggagctgatgtagggaaaattgtcattggagttttgatcgataaaaatgagattttagagtggaataaatttgtaaaaattctaggttataaattctgggatgaaactcaaaacgatacatatagattgttccttggtgcatcagattaa

SEQ ID NO: 12464 - protein, 513 aa, Prochlorococcus marinus str. AS9601
MNDYFEKILQAEVYEVAKKTPLEKAHNLSNTLNNEVFLKREDLQDVFSFKIRGAYNKMSKLTNSQLAQGVITSSAGNHAQGVALSALKLNCQATILMPVTTPIVKVNAVKSLKAKVILYGDNYDETYKEAIRISQERNLCFIHPFDDPEVIAGQGTIAIELEQQLKEKPYAIYIAVGGGGLISGISIYVKKIWPEVKIIGVEPEDADAMTKSLEEEKIVELPSVGQFADGVAVKKIGKNTFDIGRKYIDKMIRVNTDEICAAIKDVFEDTRSILEPAGALSIAGMKKDILNSNHSNRKMVAIACGANMNFERLRFVAERAELGECKEVMMAVEIPERAGSLIDFCKLLDNRNLTEFSYRMSNSKNAQIFVGVQVYGLNDKKNLLNVFRNSEYSFIDISDDELSKNHLRHMVGGRLPRDFKEMEYKNFIELLYRFEFPERPGALINFLNNMKSNWSISVFHYRNYGADVGKIVIGVLIDKNEILEWNKFVKILGYKFWDETQNDTYRLFLGASD

SEQ ID NO: 12465 - DNA, 1542 bp, Prochlorococcus marinus str. MIT 9515
  CDS (1)..(1542): transl_table=11
atggaagattattttaaaaaaatacttcaggctcaagtctatgaagttgctaaaaaaacacctttagaaaaagcaaataatttaagtaaagcacttaaaaataatatttttttgaaaagagaggatcttcaagatgtattttctttcaaaataagaggagcttttaataaaatgaggcaactaactccatcacaacttacaaatggagtcataacatcaagtgctggtaatcatgcgcaaggggttgcattaagtgcgttaaaattaaattgtagtgcaacaatattgatgcctataacaacacctttagtaaaagtaaatgctgttagaaatttaaaagcaaaggtaatcttattcggcgacaattatgatgaagcatataaagaagccatacgtattagtgaagagaataatttatgttttattcatccatttgatgatacggatgtaatagctggtcaaggtactatcgctattgaattagaacaacaactacaagatccaccagaagcaatttacatcgctgtggggggaggaggactgatagctggtatttcaatatatataaagaagatttggcctaaagtacaaataattggtgtagagcctgaagatgctgctgcaatgtctaaatccttaaaaaggcttgaaataatagaattatcttcagttggtcagtttgctgatggtgtagcagtaaaaaaggttggagaaaaaacctttgaaattggcaaaacacatatagacaaaatgataactgtaaataccgatgaaatttgttccgctattaaggatgttttcgaagatacaagatcaatcttagagccagctggtgctttatccattgctggcatgaaaaaagatatatatgaatccaattacataaataaaaatatgattgctattgcctgtggagcaaatatgaattttgaaaggcttagatttgttgcggaaagagcagcacttggtgagtacaaagaatcaatgtttgcagttgaaataccagaaaaggcaggtagtttaattgatttctgtagtttgttaaatactagaaatttaactgaatttagttataggatgtccaactcaataaatgctcagatttttgtaggcatagaggttaatggagtaaatgacaaagaaaaacttttaaatgaattcaggaaatcaaattatccttttatagatatcagtaaagatgaattatctaaaaaccatttaagacatatggtaggtgggcgactaccccaaaaatttacaaaattagacaattcaaaacatatcgaattgttatatagatttgagtttccagaaagaccgggagcattaataaattttctaaaaaaaatgaaaacaaattggacaatcagcatatttcactatagaaatcatggatctgatgtaggaaaaattgttataggagtgttaatagataatgctgaaattaattactggaataaatttgttgaatttttaggatataaatattgggatgaaactaataatccaacatataaattgttccttggtgcatcagaataa

SEQ ID NO: 12466 - protein, 513 aa, Prochlorococcus marinus str. MIT 9515
MEDYFKKILQAQVYEVAKKTPLEKANNLSKALKNNIFLKREDLQDVFSFKIRGAFNKMRQLTPSQLTNGVITSSAGNHAQGVALSALKLNCSATILMPITTPLVKVNAVRNLKAKVILFGDNYDEAYKEAIRISEENNLCFIHPFDDTDVIAGQGTIAIELEQQLQDPPEAIYIAVGGGGLIAGISIYIKKIWPKVQIIGVEPEDAAAMSKSLKRLEIIELSSVGQFADGVAVKKVGEKTFEIGKTHIDKMITVNTDEICSAIKDVFEDTRSILEPAGALSIAGMKKDIYESNYINKNMIAIACGANMNFERLRFVAERAALGEYKESMFAVEIPEKAGSLIDFCSLLNTRNLTEFSYRMSNSINAQIFVGIEVNGVNDKEKLLNEFRKSNYPFIDISKDELSKNHLRHMVGGRLPQKFTKLDNSKHIELLYRFEFPERPGALINFLKKMKTNWTISIFHYRNHGSDVGKIVIGVLIDNAEINYWNKFVEFLGYKYWDETNNPTYKLFLGASE

SEQ ID NO: 12467 - DNA, 1536 bp, Prochlorococcus marinus str. NATL1A
  CDS (1)..(1536): transl_table=11
atggaggactatttacagaaaatactaagagctcgcgtttatgacgttgctgaagaaaccccactagaaaaggcgaaaaacttaagcaaaaaattcgaaaataacatttggtttaagagagaagaccttcaacctgtcttttcattcaagttaagaggtgcatttaaccgcatgtctcagctgagcaaggaagagctagataaaggagtaattgcatcaagcgctggaaaccatgcacagggagttgcgttaagtgcatcattcctgaaatgcagagcagtaattgttatgccactgacaactcccgttatgaaagtaagggcagttgaatcacacaaggcagaagttattcttttcggtgaaacttatgatgagtgctatgaaaaggcactagatatatctaagaaagaaaatctaactttcatacatccatttgatgatcctgaagtcatagcaggacaaggaacaataggtcttgaaatacttagacaaagtcaaactccgcctgatgcgatttacatagctgttggaggcgggggacttattgctggagtaagtgcgtacgtaaaagcaatatggccagatacaaagattattggtgttgaaccagaagatgcctgcgcaatgacactttcattaaaggcaaatgaacctattgagcttgagagtattggcctttttgcagacggagttgcggtaagaaaggtaggagaaaagactttctcgatttgcaaaaaaaatgttgatgaaatggttactgtaagtacagacgaaatttgtgccgcgataaaagatgttttcgaggatacaagatcaattcttgaaccagcaggtgcattatctatagctggcttaaaaaaacatgttgtaaataatcagttaaaaaacaacaaccttgttgcaatagcttgtggtgcaaatatgaattttgaacgactaagatttgtagcagaaagagccgaattaggtgaagaaaaagaagctatgattgcagtaggaattcctgaaaaagcgggcagtttaaaacttttatgcaaaacacttggttcacggagtctaactgaatttagttacaggatttcagaaggtaaaacagctcaaatatttatgggtgtagaagtttcgaataacaatgatagggaattattaacagctgagatcaaaaggggaggttttgattgtcatgatttaagtaatgatgaattatcaaaagttcatctcaggcatatggttggtggcaggctaccaagatcaataagtcaaatatctaaaggagaatacatagaattactatatagatttgagtttcctgaaaggcctggtgccttaatgagatttgttaactcaatgagaccagagtggacaataagcatcttccattatcgaaaccatggcgctgatactggaagaatagtaataggtgtactagtaaacgattccgagattcaagcttggaatgagtttgtcaaaaaaataggttataaaaattgggatgagacagataatccagcatataaattatttttaggtgcatag

SEQ ID NO: 12468 - protein, 511 aa, Prochlorococcus marinus str. NATL1A
MEDYLQKILRARVYDVAEETPLEKAKNLSKKFENNIWFKREDLQPVFSFKLRGAFNRMSQLSKEELDKGVIASSAGNHAQGVALSASFLKCRAVIVMPLTTPVMKVRAVESHKAEVILFGETYDECYEKALDISKKENLTFIHPFDDPEVIAGQGTIGLEILRQSQTPPDAIYIAVGGGGLIAGVSAYVKAIWPDTKIIGVEPEDACAMTLSLKANEPIELESIGLFADGVAVRKVGEKTFSICKKNVDEMVTVSTDEICAAIKDVFEDTRSILEPAGALSIAGLKKHVVNNQLKNNNLVAIACGANMNFERLRFVAERAELGEEKEAMIAVGIPEKAGSLKLLCKTLGSRSLTEFSYRISEGKTAQIFMGVEVSNNNDRELLTAEIKRGGFDCHDLSNDELSKVHLRHMVGGRLPRSISQISKGEYIELLYRFEFPERPGALMRFVNSMRPEWTISIFHYRNHGADTGRIVIGVLVNDSEIQAWNEFVKKIGYKNWDETDNPAYKLFLGA

SEQ ID NO: 12469 - DNA, 1545 bp, Prochlorococcus marinus str. MIT 9303
  CDS (1)..(1545): transl_table=11
atggacgattatctacagaggattctgagggcacgtgtctatgacgtagcccatgaaacccccctggaactggcaaaaaacctcagtcgccgtcttcagaacaagatctggttgaaacgtgaggacctacagccagtcttctccttcaagcttcgtggtgcgtataaccgcatgtcccttctcagtaaagaggagttgcagcgtggcgtgattgcttcaagtgctggaaaccacgctcagggagtggcactgagcgcctcttatctcaattgcagagctgtgattgtgatgccgatcaccacacccgaaatgaaagtacgcgcagtccgtgctcttggcgctgaagtcgcacttcatggagagacctacgacgaggcctatcaagaggccatgcgtcgaagcgaaaaagatggactcacatttatccacccgtttgatgatccagaggtgattgctgggcaagggacgattgctctagaaatcctgcgccagatccaagatccaccagatgcaatctatgtcgcagttggcggtggcggactgatcggcgggattgccacttatgtcaaaagcttgtggccgcaagtcgaaattattggtgtcgagccccacgacgctgcagcaatgacgctctctcttgaagctggtgaacgcattcagctgccaaaagtaggtctatttgccgacggagtcgctgtacgtcaagtaggcaaacacaccttctcattagctcagatgcacgtagacgcgatggtgacggtaagcactgatgaaatctgtgcagcgatcaaagatgtttttgaagatacccgctcaattcttgaaccagctggcgcactggcaattgctggcatgaaggcagatatcgccaaacgtgatcttcaagaccgcactcttgtggccgtggcctgtggcgcaaacatgaactttgaacggctccgttttgtcgccgaaagagcagagctaggggaagaaagggaagcaatactcgcggtagagatcccagagcaggcaggcagcctgcgaaagctctgcaacgtcctagcgggaaaaaatctcaccgaattcagttaccgaatggcagagggggatagagcccaaatattcatcggggtgcaggttttagacctcaatgatcgaaccaaacttttaacgcgactgcagtcgtcaggattcccatgccttgatctcagcaacgacgagctgaccaaagggcaccttcgtcacatggtgggtggccggcttcctgcctcagcaaaaaccctttgccgagatggatgtcgcgaactgctctatcgctttgagttccctgagcgcccaggagctcttatgacctttgttagtgcccttcaccccgaatggagtatcagcatcttccactaccgcaatcacggagcagatgtcggcaggatcgttgtaggtgtgttggtccaggacaacgaaatgaaaaattggcagcgctttcttgatgatctgggctatccaaactgggaagaaaccaacaaccccgcctactgcttatttctgggtgcacagaccgtttga

SEQ ID NO: 12470 - protein, 514 aa, Prochlorococcus marinus str. MIT 9303
MDDYLQRILRARVYDVAHETPLELAKNLSRRLQNKIWLKREDLQPVFSFKLRGAYNRMSLLSKEELQRGVIASSAGNHAQGVALSASYLNCRAVIVMPITTPEMKVRAVRALGAEVALHGETYDEAYQEAMRRSEKDGLTFIHPFDDPEVIAGQGTIALEILRQIQDPPDAIYVAVGGGGLIGGIATYVKSLWPQVEIIGVEPHDAAAMTLSLEAGERIQLPKVGLFADGVAVRQVGKHTFSLAQMHVDAMVTVSTDEICAAIKDVFEDTRSILEPAGALAIAGMKADIAKRDLQDRTLVAVACGANMNFERLRFVAERAELGEEREAILAVEIPEQAGSLRKLCNVLAGKNLTEFSYRMAEGDRAQIFIGVQVLDLNDRTKLLTRLQSSGFPCLDLSNDELTKGHLRHMVGGRLPASAKTLCRDGCRELLYRFEFPERPGALMTFVSALHPEWSISIFHYRNHGADVGRIVVGVLVQDNEMKNWQRFLDDLGYPNWEETNNPAYCLFLGAQTV

SEQ ID NO: 12471 - DNA, 1269 bp, Listeria monocytogenes str. 4b F2365
  CDS (1)..(1269): transl_table=11
atggaattagttgatttattagtaacagaagaagatgtcgaaaaggcctatgaagtcttaaaggcggtcgtcaaacatacgccactagaatatgatttttatctttcggaaaaatatcattgcaatgtctatctgaaacgcgaagatttgcaaagagtgcgttcttttaaattacgtggtgctttttatgctatttctagattatcagcggaacaattggaaaaaggtgtggtatgtgcaagtgcgggaaaccatgcgcaaggagttgcatatacgtgcaaacgaatgaccgtcccagctacgatttttatgccaacgactacgccgcaacaaaaagtatcacaagtaaaatttttcggtggtagtaatgtcgaagtggttttagttggcgatacgtttgatgcttctgcaactgccgcgaaagaatttgctgcaacgcatggccaaactttcatccctccgtttgatgatcctgatattatcgctggccaaggctctcttgctgtggagatggtgaaagatttaaataaagcacatgagcaagcagattatgtttttgcaggaatcggtggtggtggcttaattagcggtgttgcaacgtatctcaaagcaaagagcccgattacaaaaatcatcggggtagaacctgatggcgcgccttcaatgacagcagctttaaaacaaaatcaagtcgtaacactagataaaatcgataaatttgttgatggcgctgcggtaaaagaagttggtggcttaacgttccaacatgcgaaagtattagttgatgaagtgacaaccgtctctgagggagctgtttgttctacgattttggatatgtatacgaagcaagcaattgttgcagaacctgctggagcactatccgttgccgcacttgaaatttaccgtgaagagattaaagacaagaccgttgtctgtattgtaagtggcggaaacaacgacatcaaccggatgcaagaaattgaagagcgttccctcttacacgaaggattaaaacattattttatcgtcaatttctcgcagcgtcctggggctttgaaagaatttgttaacgatgtgctcggtccacatgacgatatcaccaaattcgaatatacgaaaaaagtgaatcgaggtaatgggcctgtaattatcggtgttttgttgcaagataaaaatgattatgaaggattgcttgagcgggttgctgcttttgacccgagctatattccgattaatgataatcaaaccctatacacattacttgtataa

SEQ ID NO: 12472 - protein, 422 aa, Listeria monocytogenes str. 4b F2365
MELVDLLVTEEDVEKAYEVLKAVVKHTPLEYDFYLSEKYHCNVYLKREDLQRVRSFKLRGAFYAISRLSAEQLEKGVVCASAGNHAQGVAYTCKRMTVPATIFMPTTTPQQKVSQVKFFGGSNVEVVLVGDTFDASATAAKEFAATHGQTFIPPFDDPDIIAGQGSLAVEMVKDLNKAHEQADYVFAGIGGGGLISGVATYLKAKSPITKIIGVEPDGAPSMTAALKQNQVVTLDKIDKFVDGAAVKEVGGLTFQHAKVLVDEVTTVSEGAVCSTILDMYTKQAIVAEPAGALSVAALEIYREEIKDKTVVCIVSGGNNDINRMQEIEERSLLHEGLKHYFIVNFSQRPGALKEFVNDVLGPHDDITKFEYTKKVNRGNGPVIIGVLLQDKNDYEGLLERVAAFDPSYIPINDNQTLYTLLV

SEQ ID NO: 12473 - DNA, 1263 bp, Bacillus thuringiensis serovar konkukian str. 97-27
  CDS (1)..(1263): transl_table=11
atggtgcaaaaggtaaaggagagagtgaaaattgaagatatcttaatggcccatacttgtatgaaagatatcgttattaaaacaccgttacaacgtgatacagttttatctgagaaatatgattgtgacgtttatgtaaaacgcgaagacttacaattaattcgctctttcaaaattcgtggtgcgtacaatttaattcaaagtttaccgaaagaacaattacaaaacggtgttgtttgcgcaagcgctggtaatcacgcacaaggggtggcttatacgtgtaatttattgaagattccgtcaaaaattttcatgccaacaacaacacctaagcaaaaagtatcacaagttcaatttttcggtggtgatttcgcagagattgtattggttggtgatacattcgatagctcttttcaagaagcacagcgttattgtgaagaaaatagaatgacatttgttcatccgtttgatgatccgtacgtagttgctggtcaagggacagtggcagttgaaattatgcatgatatggagaaaccggttgattatatctttacagcaatcggcggtggtggattagcatcaggtgttggtacatatgtgaaaggtgttagtcctgctacacaggtcattggggtagagccaatgggagctgcatctatgaaagaggcttttcttcaaaatgataatgtggcattggagaaaatagatagttttgttgatggggcagcggttaaaaaggtaggaaagttaacatttgaaacttgtaaagatgtaattgatgacattgttttagtaccagagggaaaggtttgtacgacgattttagaactgtataagaaaaatgcgattgtagctgaaccagctggtgcactctctattgcagcgcttgatttatacagagatgaaattaaaggtaaaacagttgtatgcacattaagtggtggaaacaatgatattgatagaatgcaagaaatgaaagaacgatctcttatttacgaagggttaaagcattatttcatcattgaattcccgcaacgttcaggtgcgttaagagaatttcttgataaaggattagggccagaagatgatattactcgctttgagtatattaagaaacataataaggaaaatggtccagcattagtcggagtagagttaaaacataaagaagattacgagcagttaattatccgttttaaagaaaataatattcaatttatggagcttaataaaaatcctgttttgtttgatttgcttatttaa

SEQ ID NO: 12474 - protein, 420 aa, Bacillus thuringiensis serovar konkukian str. 97-27
MVQKVKERVKIEDILMAHTCMKDIVIKTPLQRDTVLSEKYDCDVYVKREDLQLIRSFKIRGAYNLIQSLPKEQLQNGVVCASAGNHAQGVAYTCNLLKIPSKIFMPTTTPKQKVSQVQFFGGDFAEIVLVGDTFDSSFQEAQRYCEENRMTFVHPFDDPYVVAGQGTVAVEIMHDMEKPVDYIFTAIGGGGLASGVGTYVKGVSPATQVIGVEPMGAASMKEAFLQNDNVALEKIDSFVDGAAVKKVGKLTFETCKDVIDDIVLVPEGKVCTTILELYKKNAIVAEPAGALSIAALDLYRDEIKGKTVVCTLSGGNNDIDRMQEMKERSLIYEGLKHYFIIEFPQRSGALREFLDKGLGPEDDITRFEYIKKHNKENGPALVGVELKHKEDYEQLIIRFKENNIQFMELNKNPVLFDLLI

SEQ ID NO: 12475 - DNA, 1539 bp, Acinetobacter sp. ADP1
  CDS (1)..(1539): transl_table=11
atgctgtctcgtttggttcgacaaattttacaagcaacggtatatgacgttgcaatcgaaactccactcgaagcagcgccacgaattagtgaaaaactaaacaacaatattcgctttaaacgcgaagaccttcaacccgttttctctttcaaactacgcggtgcttataaccgtattagtcaattaccgaaatctcagttggaacgtggcgttattactgcttcagcaggtaaccatgctcaaggtgtggctttatctggtcaaaagctggggattcgcgccattatcgtgatgccaaaaacaacgccagatattaaggtacaagcagttaaacgtttgggtggcgaagtggttttgcatggtgattcttttgatgttgccaataaatacgcgattcagcgtgcgcaagatgaaggtatgacttttattccgccatatgatgatgaattggtgatggcaggtcagggcacgattgccaatgaaattctgcgtcagtggcgtgatgttgaatatgtatttgttgccgtaggtggtggtggactcattgcaggcgttgcagcgtatttgggtgatgttgctcctcacgtaaaaatcattccagtcgaatatgatgaatctgcttgcctgaaagccgcattcgaacacaatgaacgtgttattttgccacaagtcggtttatttgcagatggtactgcggttgcacaaattggtgaaaaaccctttgaagtaattcagcttcaaaaatcagataactctggtccaattgttgaacgcgatgtgatcttggtcaataccgatgaaatttgtgctgccatcaaagacacttttgatgaatgccgtagcattgtagaaccatctggtgcaatggcgctggcaggtatcaaaaaatatatcgaacaacatcaaattacagataaaaatatcgtttcgattgtttgcggtgcaaacatgaattttgaccgattgcgttatattgctgaacgtacagaacttggcgaacgtaaagaggccatttttgctgtcaccattcctgaacaaaaaggcgcctttttaaatttctgccgtgcattacatggacgcaatattacagaatttaactatcgtgcaagcgatagcgatgatgctcaagttttcgtcggaatcagtttaaaatctggcgaaaaagaacgtcatgacattcacgagttacttaaaagccaatataatgttgatgatttatccgatgacgaagttgctaagctgcatattcgctatcttatcggtggtcatgccaatatcgaaaatgaacgcttgtttcgtgttgaatttccagagcgacccggtgcacttctaaccttccttgaacgccttggacctagtcataatattagcctgttccattatcgtaatcacggtgctgccgaaggacgtgtattggtaggtttacaggctaccgatacgcaagaaaacccagatgtactaattgaaacattggaaaatattacttatccatatgaagaaattacacacaatgtgggttataaacgctttttgcagtaa

SEQ ID NO: 12476 - protein, 512 aa, Acinetobacter sp. ADP1
MLSRLVRQILQATVYDVAIETPLEAAPRISEKLNNNIRFKREDLQPVFSFKLRGAYNRISQLPKSQLERGVITASAGNHAQGVALSGQKLGIRAIIVMPKTTPDIKVQAVKRLGGEVVLHGDSFDVANKYAIQRAQDEGMTFIPPYDDELVMAGQGTIANEILRQWRDVEYVFVAVGGGGLIAGVAAYLGDVAPHVKIIPVEYDESACLKAAFEHNERVILPQVGLFADGTAVAQIGEKPFEVIQLQKSDNSGPIVERDVILVNTDEICAAIKDTFDECRSIVEPSGAMALAGIKKYIEQHQITDKNIVSIVCGANMNFDRLRYIAERTELGERKEAIFAVTIPEQKGAFLNFCRALHGRNITEFNYRASDSDDAQVFVGISLKSGEKERHDIHELLKSQYNVDDLSDDEVAKLHIRYLIGGHANIENERLFRVEFPERPGALLTFLERLGPSHNISLFHYRNHGAAEGRVLVGLQATDTQENPDVLIETLENITYPYEEITHNVGYKRFLQ

SEQ ID NO: 12477 - DNA, 1551 bp, Erwinia carotovora subsp. atroseptica SCRI1043
  CDS (1)..(1551): transl_table=11
atgctgatggctgtgtcacaacctcttcctgccgcgccgggaggcgcggagtacctgcgcgcgatcttgcgctcgccagtgtatgaaatcacgcaggtcacgccgctggagaagatggataagctctcttcgcggctgggtaatgtcattctagtaaaacgtgaagaccgacacgcggtgcacagctttaagctgcgtggcgcgtacgcaatgatggcgggtctgagcgatgaacagaaatcgcacggcgtggtgacggcgtcagccggtaaccatgcgcaaggtgttgcactctcctccagcaagctggggattaaatcgctgattgtgatgccggtggcgacagccgacatcaaggtggatgcggtgcgtggttttggcggagaagtgctgctacacggcgctaactttgatgaagccaaagccaaggcgattgagctgtcagagcaacaacatatgacttttctgccgccgttcgatcaccctgcggtgattgccgggcagggcacgctggcgatggagttgttacagcaggatgcgcatctggatcgcgtgtttgtgccagttggtggtggtggcttggcggcaggcgttgccgtactgattaaacagctgatgccgcagattcaggtgatcggcgtggaagcggaagattccgcctgtctgcgcgcggcgctggatgctgggcaaccagtcgatctgccgcgtgtcgggctgtttgccgaaggcgtggcggtgaagcgcatcggcgatgaaacgtttcgcctatgtcgggaatatctggatgacgtgattaccgtcgacagcgatgccatctgtgcggcagtgaaagatctgttcgaagatgtccgcgcgattgctgaaccgtctggtgcgctggcgttggcggggatgaaaaagtacatccaacagcatcagattcagggtgagcgcttggcgcatgttctgtccggtgcgaacgttaacttccacggattacgttacgtttccgaacgctgcgagctgggcgaacagcgcgaagccttgctggctgtgacgatccctgagcaacagggaagcttcctgaagttttgccaactgttgggtggtcgttctgtcacggagttcaactatcgctacgcggatgccaaagacgcctgcatttttgtcggtgtgcgcttgacgcgcggctatgcggaacggcaggagatcatcgctgagctttccgcagacggttatgaagtagtggatttgtccgatgatgaaatggcgaagctacacgttcgctatatggtcggcggacgtccttccaaaccgttgcaggaacgtctgtacagctttgaattcccagagtcgccgggtgcattactgaaattcctgcatacgctgggggcgcactggaatatttctctattccattaccgcagccacggcacggattttggccgcgttctggctgggttcgagctggaggcgggcgatcgggagtttgagcagcacttgctggcgctgggctatgaatgccatgacgaaaccaataacccggcattccgcttctttctagcgggttaa

SEQ ID NO: 12478 - protein, 516 aa, Erwinia carotovora subsp. atroseptica SCRI1043
MLMAVSQPLPAAPGGAEYLRAILRSPVYEITQVTPLEKMDKLSSRLGNVILVKREDRHAVHSFKLRGAYAMMAGLSDEQKSHGVVTASAGNHAQGVALSSSKLGIKSLIVMPVATADIKVDAVRGFGGEVLLHGANFDEAKAKAIELSEQQHMTFLPPFDHPAVIAGQGTLAMELLQQDAHLDRVFVPVGGGGLAAGVAVLIKQLMPQIQVIGVEAEDSACLRAALDAGQPVDLPRVGLFAEGVAVKRIGDETFRLCREYLDDVITVDSDAICAAVKDLFEDVRAIAEPSGALALAGMKKYIQQHQIQGERLAHVLSGANVNFHGLRYVSERCELGEQREALLAVTIPEQQGSFLKFCQLLGGRSVTEFNYRYADAKDACIFVGVRLTRGYAERQEIIAELSADGYEVVDLSDDEMAKLHVRYMVGGRPSKPLQERLYSFEFPESPGALLKFLHTLGAHWNISLFHYRSHGTDFGRVLAGFELEAGDREFEQHLLALGYECHDETNNPAFRFFLAG

SEQ ID NO: 12479 - DNA, 1251 bp, Leifsonia xyli subsp. xyli str. CTCB07
  CDS (1)..(1251): transl_table=11
gtgaccgatcccacgcgcaccccgttcgccggccccagcctggccgctttcgaggctgcgcgcgcgatcgtggcgacggtggcccagccgaccccgctggagagctcccgctatctcgcgggcgtgctcggtgcgcccgtcctgctgaagtgcgagaatctgcaacgcaccggctcctacaagatccgtggcgcctacaaccgcatgtccaagcttaccgccgaggaacgtaatcgtggggtcgtcgccgcctccgccggaaaccacgcacagggcgtggccttcgcggcccgggagctcggcatccacgccacgatcttcatgccggtcggtgtggccatccccaagttccaggcgacgcgggcgtacggcgctgatgtggtcctgagcggcagcattgtggatgaggcgctgcgcgcggcggcggatttcgcggccgagaccggcgctgtgctcatcccgccgttcgaccacccggacgtggtggccggtcagggcacgctcggcctcgagatcctcgacgaggtccccgacgtgagcacgatcgtcgtcccgatcggtggtggcggactcatctccggcatcgccagcgcggtcaagcagcgttccgcacgcgagggccgcacggtgcgcgtgatcggcgtgcaggccgccaacgccgccgcctacccgccctcactcgaagccggcgcccccaccgagatctccctcgtcgcgaccatcgccgacggcatcgccgtcagccgcccgggcgcgctcaacttccagatcgttcaggacgcggtggatgccgtggtcacggtcaccgaggacgacatcgcccgagccctcctcgtcctcctcgaacgcgcgaagctcgtggtcgagcccgccggggccgcggccgtcgccgccgtcctcgccgggcacatccccgccgatggcacgacggtcgtcatcctctccggtggcaacatcgacccgttgctgatgcagcgtgtgatcagccacggtctcgccgcctcagaccgctacctcaagctgtcgatcatgctgcccgaccggccgggccagctggctcgcatcgcggagatcctcgcgggcgtcaacgcgaatgtggtcgaagtgctgcacacccggcatggccgcgggctgcagctcagtcaggtcgaactcgatgtctccgtggagacccgcggctccgagcaccgtcagcaggtcatctccgttctccgcgccgcgggatacgatccggtcctcgaagaggactga

SEQ ID NO: 12480 - protein, 416 aa, Leifsonia xyli subsp. xyli str. CTCB07
MTDPTRTPFAGPSLAAFEAARAIVATVAQPTPLESSRYLAGVLGAPVLLKCENLQRTGSYKIRGAYNRMSKLTAEERNRGVVAASAGNHAQGVAFAARELGIHATIFMPVGVAIPKFQATRAYGADVVLSGSIVDEALRAAADFAAETGAVLIPPFDHPDVVAGQGTLGLEILDEVPDVSTIVVPIGGGGLISGIASAVKQRSAREGRTVRVIGVQAANAAAYPPSLEAGAPTEISLVATIADGIAVSRPGALNFQIVQDAVDAVVTVTEDDIARALLVLLERAKLVVEPAGAAAVAAVLAGHIPADGTTVVILSGGNIDPLLMQRVISHGLAASDRYLKLSIMLPDRPGQLARIAEILAGVNANVVEVLHTRHGRGLQLSQVELDVSVETRGSEHRQQVISVLRAAGYDPVLEED

SEQ ID NO: 12481 - DNA, 1506 bp, Desulfotalea psychrophila LSv54
  CDS (1)..(1506): transl_table=11
atgaaaaaaataattcgtgacatcctcacctcccgggtctatgaggcagcggtggagacaccacttgaacaggcagtacaactctcccaccaactcggaaacaaaatccttctaaaaagagaagatcaacaaccggtattctcctttaaaatacgcggcgcttacaataaaattgcccatctgagcgaagaggagcgagcacggggggttattaccgcctcggcgggaaatcatgcccaaggcgtggcctattctgccaagaaactcggcatctcagccctgatcgttatgcccaccaccacccctaagatcaaggtagatgcagttcgccgtatgggcggccaggttatcctccacggcgacaactactccgaggcagccacccacaccgaacagatcatggcggagacaggtagatactatatccccccctttgacgatgagttggtcattgccggtcaaggcactattgccgatgaaattcttcgccaaaatcccggaaaaattgacgcaatttttattcccgtgggtgggggcggactcattgccggcattgccgcctatatgaaaaatctccgtcctgagatcaggataatcggggtagagccgaccgatagcaatgccatgcactgctcccttaaggcgggtaaacgggtggaactctccaccgttggtatctttgccgatggcgttgccgtacggaaggttggagagcaaacctttgccctctgccaggagtatgtagatgagatcatcgaaatcagcagcgacgaactctgcagtggtatcaaggccatctaccaggcgacccgctccattgtcgaacctgcaggcggccttggcatggccggtctcttaaaatatatccgggagacaggctgcaaggacaagactcttattgccattaattccggagccaatatgaactttgagcgcctgcgttacgttgccgagcgcaccctgatcggggaggagcaggaggcactttttgcggtaaccatgcctgaagaggcgggaagcctgaaaacattctgccagaggatagttgaaaaacgaaatatcaccgaattcaactatcgccatatctctccagaaaaggcacatatctttgtcggtatctccatagaacaggcaaaagaacgacaagagttcagccaacagctcacggcagccggttatgaaaatatcgatctgaccgataacgatcttgccaaaaaccatatccgctatatggtgggtggcaaaccggcaagcgtccaagaggagagactctttcgtttctggtttcctgaaacacccggagcccttgtccgttttctcgacgccacccgtggcgcactctccatctccctcttccactaccgcatgcagggtggaaattatagccgggtacttgttggctttaactcctgccgggatgacgatgagctattggagagattagatatactgggctaccgctttaaagaagagacagacaatcccgcatacaagatgtttttatag

SEQ ID NO: 12482 - protein, 501 aa, Desulfotalea psychrophila LSv54
MKKIIRDILTSRVYEAAVETPLEQAVQLSHQLGNKILLKREDQQPVFSFKIRGAYNKIAHLSEEERARGVITASAGNHAQGVAYSAKKLGISALIVMPTTTPKIKVDAVRRMGGQVILHGDNYSEAATHTEQIMAETGRYYIPPFDDELVIAGQGTIADEILRQNPGKIDAIFIPVGGGGLIAGIAAYMKNLRPEIRIIGVEPTDSNAMHCSLKAGKRVELSTVGIFADGVAVRKVGEQTFALCQEYVDEIIEISSDELCSGIKAIYQATRSIVEPAGGLGMAGLLKYIRETGCKDKTLIAINSGANMNFERLRYVAERTLIGEEQEALFAVTMPEEAGSLKTFCQRIVEKRNITEFNYRHISPEKAHIFVGISIEQAKERQEFSQQLTAAGYENIDLTDNDLAKNHIRYMVGGKPASVQEERLFRFWFPETPGALVRFLDATRGALSISLFHYRMQGGNYSRVLVGFNSCRDDDELLERLDILGYRFKEETDNPAYKMFL

SEQ ID NO: 12483 - DNA, 1545 bp, Yersinia pseudotuberculosis IP 32953
  CDS (1)..(1545): transl_table=11
atggcagtttcgcaacccttatctgctgccccctgcggggcagaatatctgcgggcgatattacgtgcgccggtgtatgaggtggcgcaagtcaccccgttacaagtgatggagaaaatctcctcgcgcgtgggtaataccgttttagtgaagcgtgaagatcggcagccggtacacagctttaagttgcgcggtgcttacgcgatgatctccagcctgacggaagagcagaaagcctgtggcgtcgtcacggcttctgcgggtaaccatgctcaaggcgtggcgctttctgcccataaaatggggattaaagcgctgatcgtcatgcccgttgctactgcagatattaaagttgatgcggtacgtgcttttggcggcgaggtgctgctgtttggcgctaattttgatgaagccaaaaccaaagctatcgcgcttgctcaagagcagggctacacctttgtgccaccgtttgaccatccggcggtgattgccgggcaggggacgctggcgatggagttactgcaacaagatgcccatcttgatcgggtttttgtcccagtgggcggcggtgggctggtggccggtgtggcggtgcttatcaagcaattgatgccacagattaaagtgattggtgttgaagccgaggattctgcctgtttgcgggccgcgctggatgcggggcagccggtcgatttggcgcgtgtcgggctgtttgccgagggcgtggcagttaagcgtatcggtgacgagcctttccgcctgtgtcaggaatatctggacgatgtgatcaccgttgacagtgatgctatctgtgccgcagtcaaagatctgtttgaggatgttcgcgccattgctgagccttctggtgcgttggcattggcgggcctgaaaaaatatgtgcagcagcataatattcagggcgagcgtctggcacatgtgctttctggtgcaaacgtgaacttccatggtttgcgttatgtgtcagagcgttgcgagttaggtgagcagcgtgaagccctgctggcggtgactattccagagcaaaagggcagtttcctgcgtttctgtgaattactgggtggccgttcggtaacggaatttaactaccgttacgccgatgctgaaaacgcctgcatttttgttggggtacgtttgactcgtggttatgctgagcgggttgaaattcttgctgaattgcaggacaaaggttatcaggtggtcgatttatctgatgacgaaatggcgaaactgcatgtgcgttatatggttggtgggcggccctcgaaaccactgcgtgagcgcctgttcagctttgaattccccgagtcaccaggcgctttgctgaaattcctgcatacgttgggcactcactggaatatttctctgttccactaccgcagccatggcacagattttggccgggtattggcggcatttgagttgtcggctaccgaaccgcaatttgaagagcgcttagcggctctgggctactattgccacgatgaaacggataacccggcgtttaagttctttttagcgggttaa

SEQ ID NO: 12484 - protein, 514 aa, Yersinia pseudotuberculosis IP 32953
MAVSQPLSAAPCGAEYLRAILRAPVYEVAQVTPLQVMEKISSRVGNTVLVKREDRQPVHSFKLRGAYAMISSLTEEQKACGVVTASAGNHAQGVALSAHKMGIKALIVMPVATADIKVDAVRAFGGEVLLFGANFDEAKTKAIALAQEQGYTFVPPFDHPAVIAGQGTLAMELLQQDAHLDRVFVPVGGGGLVAGVAVLIKQLMPQIKVIGVEAEDSACLRAALDAGQPVDLARVGLFAEGVAVKRIGDEPFRLCQEYLDDVITVDSDAICAAVKDLFEDVRAIAEPSGALALAGLKKYVQQHNIQGERLAHVLSGANVNFHGLRYVSERCELGEQREALLAVTIPEQKGSFLRFCELLGGRSVTEFNYRYADAENACIFVGVRLTRGYAERVEILAELQDKGYQVVDLSDDEMAKLHVRYMVGGRPSKPLRERLFSFEFPESPGALLKFLHTLGTHWNISLFHYRSHGTDFGRVLAAFELSATEPQFEERLAALGYYCHDETDNPAFKFFLAG

SEQ ID NO: 12485 - DNA, 1233 bp, Symbiobacterium thermophilum IAM 14863
  CDS (1)..(1233): transl_table=11
gtgacggtaacctttgcggacatcgagaaggcgcgcattctgctgagcggacacatcaagcggacacccatgcttcagagccctggcatcaccgagcacctgggacttccggtctacctgaaggccgagaacctgcagcgggccgggtcgttcaaggtgcggggagcgctcaacaagatccactcgctgactgaggaagagaaggcgcgcggcgtcatcgcggcgtcggccggcaaccacgcgcagggcgtggccctggcggcgtccagtctcggcatccggtcggtcatctgcatgccggagggcgccccgatcgccaagctggaggcgacccagggctacggcgcccaggtggtcctgcacggcgagacctacgacgacgcctaccagaaggcgcgggcgctgcaggcggagcacgggtacacgttcatccacggcttcgatgacccgtacaccatcgccggccaggggacggtcgggctggagatcgtggaggacctgcccgacatcgcgacggtggtggtgccgatcggcggcggcggcctcatggcgggcgttgccctggcggtcaagtccctgaagcccggcgtacgggtggtgggggtccaggccgcgggcgcgccggcggtcttcctcagccggcagcagggcaagctggtggcgaccgactcggtccacaccatcgcggacggcattgccatcaagaagccgggggcgctgtgctgggagattatccgggaacacgtggacgacatcgtgctggtggacgaggaggagatcgcacagtcgatcctcttcctgctggagcgtgcgaaggtcatcgtcgagggcgccggcgccgtgggcatggccgcgctcctcggcgacaagatcccggatctgcagggaccggtctgcgtcgtgctctcgggcggcaacattgacgtgaacatcatctcccgcatcatcgagcgcggtctggtgaaggcggggcggtacatccggatctccacgttcgtgcccgaccggcccggcgggctgcagcagctcctcgcgaccgtggcccaggccggggccaacgtgatcgacgtgcgtcatgagcgctggctgaacaaggtgaccatcggcgaggtggagatcaccctggcgctggagactcgcaacgcccgccatgtcgatgagattctcgccaccctcaaggcgaaggggtatcatgtctggatcattccgccgtatcgtcccaacgactggtag

SEQ ID NO: 12486 - protein, 410 aa, Symbiobacterium thermophilum IAM 14863
MTVTFADIEKARILLSGHIKRTPMLQSPGITEHLGLPVYLKAENLQRAGSFKVRGALNKIHSLTEEEKARGVIAASAGNHAQGVALAASSLGIRSVICMPEGAPIAKLEATQGYGAQVVLHGETYDDAYQKARALQAEHGYTFIHGFDDPYTIAGQGTVGLEIVEDLPDIATVVVPIGGGGLMAGVALAVKSLKPGVRVVGVQAAGAPAVFLSRQQGKLVATDSVHTIADGIAIKKPGALCWEIIREHVDDIVLVDEEEIAQSILFLLERAKVIVEGAGAVGMAALLGDKIPDLQGPVCVVLSGGNIDVNIISRIIERGLVKAGRYIRISTFVPDRPGGLQQLLATVAQAGANVIDVRHERWLNKVTIGEVEITLALETRNARHVDEILATLKAKGYHVWIIPPYRPNDW

SEQ ID NO: 12487 - DNA, 1269 bp, Bacillus licheniformis ATCC 14580
  CDS (1)..(1269): transl_table=11
atgaaaccgttgcttaaagaaaactctctcatccaagtcaaagacattttaaaagcccaccaaaatgtaaaagatgttgttattcatacccctctccaaaaaaatgagaggctgtccgagaggtacgattgcaacgtatatttaaaaagagaagacctgcaggttgtccgctcttttaaactgagaggcgcctattataaaatgaagcagctttcaaaagaaacgacgaaaaacggggtggtctgcgccagtgcaggaaaccatgcgcagggagtcgctttttcctgcaaacatctcggtattcacggaaagatttttatgccgtcgacgaccccgaggcaaaaaatttcccaagtcgaattgttcggcaaggaatacgtcgagatcatcctgacaggcgacacgtttgatgatgcttatcaaagcgcagtcgcctgctgcgaggaagaaaagcgcgcatttatccacccgtttgacgatcctgccgtcatggctggccagggtacggtcgcggtcgaaatcttaaacgatatcgaaacggaaccccattatttattcgcaagcgtaggcggagggggtctgctttcaggagtgggaacctatatgaaaaacgtgtccccggatacaaagctgatcgcggttgagcctaaaggcgcgccggctctttttgaatcaaacaaaaaaggcgaagtcgtcatccttgagaaaatcgataaatttgtcgatggagccgctgtgcagaaaatcggcgaagagacatttaaaacgcttgaaaccgttgtcgatgatattttgctcgttcctgaaggaaaggtgtgcaccgcgattcttgagctgtacaaccaatgcgcgattgtcgccgaacctgcgggagcgctgccgatcgccgctttagatctttacagggatgaaattaaagggaaaaatgtcgtatgcattgtgagcggaggaaacaacgatatcggcagaatgcaggaaatcaaagacagatcgatgatgtatgaaggactccagcattatttcatcgtgaacttcccgcaaagggcgggagctttgcgcgaatttttagatgaagtgctcgggccgaccgacgatatcacccggtttgaatatacgaagaaaaataataaaagcagcggccctgcgctcgtcggcatcgaattgaagcagcgcgaagattacgagccgctgatcgcaagaatggacaggaaaggcttccgctatgtcgaagtcaataaagatgaagggctctttcatttgctgatttaa

SEQ ID NO: 12488 - protein, 422 aa, Bacillus licheniformis ATCC 14580
MKPLLKENSLIQVKDILKAHQNVKDVVIHTPLQKNERLSERYDCNVYLKREDLQVVRSFKLRGAYYKMKQLSKETTKNGVVCASAGNHAQGVAFSCKHLGIHGKIFMPSTTPRQKISQVELFGKEYVEIILTGDTFDDAYQSAVACCEEEKRAFIHPFDDPAVMAGQGTVAVEILNDIETEPHYLFASVGGGGLLSGVGTYMKNVSPDTKLIAVEPKGAPALFESNKKGEVVILEKIDKFVDGAAVQKIGEETFKTLETVVDDILLVPEGKVCTAILELYNQCAIVAEPAGALPIAALDLYRDEIKGKNVVCIVSGGNNDIGRMQEIKDRSMMYEGLQHYFIVNFPQRAGALREFLDEVLGPTDDITRFEYTKKNNKSSGPALVGIELKQREDYEPLIARMDRKGFRYVEVNKDEGLFHLLI

SEQ ID NO: 12489 - DNA, 1539 bp, Mannheimia succiniciproducens MBEL55E
  CDS (1)..(1539): transl_table=11
atggttaataatttatcgaacgccccgaccggggcggagtatttaagagcgatcttaatttctaaagtttatgaggcggcaaaagttactccgttgcaattaatgccgaaattgtcggaacgtttaggcaatcggatttatgttaaacgtgaagatcatcaacccgtacatagctttaaattacgcggcgcctacgccatgatttcaggtttaacccaggcgcagaaagaggccggcgtcattaccgcatcggcgggaaatcacgcgcaaggcgtagccctttcggcaaaaaatgccggtattcgtgcgctgattgtaatgccgcaaaatacgccttccattaaagtggatgcggtacgcggacacggcggcgaagtacttttacacggcgcgaatttcgatgaggccaaagccaaagcgattgaactttcgcaaacggagcaaatgacctttatcccgccttttgatcatcctgcggtgattgcggggcagggctccatcggtatggaattattgcagcaaaacggtcacatcaaccgcatttttgtaccggtaggtggcggcggtttgcttgcgggcgttgccgtgctgattaaacaattaatgccggaaattaaggtgatcggcgtagaagcgaaggattccgcctgtttatattatgcactgaaagcgggtcgtcccgttgatttagaacgcgtcggactttttgccgacggtgtggcggtaaaacgaatcggtgacgaaactttccgcatttgtcagcaatatgtggatgatgtgattctggtggatggtgatgaaatctgtgcggcgatgaaagatatgtttgaaaacgttcgtgcggtaccggaaccttcgggcgcattatcgctcgccggcttgaaaaaatatgctaaacagcataatttgcaaggcgaaaccttagtaaatctgctgtccggcgcgaatttaaatttccatacgctgcgttatgtttccgaacgttgtgaaatcggtgaaaaacatgaagccttatttgcggtaacgattccggaacaacggggcagcttcttaaaattctgtcagattttaggacaaaatgcggtgacggaattcaactatcgctatgctgatgaaaaacaggcttgtatttttgtcggtgtgcgcattaccggcgaacaggaaaaacaagttattatccagcaattaaaacagggcgggtatgacgtgcaggatttgtctgacgacgatattgctaaaactcatattcgttatatggtcggcggccgctcatccagtgatttaaacgaacgtctatatagctttgaatttccggaacaaaaaggcgcattgctgaagttcctggaaaccctcggcaccacggatgcgaatatttccctgttccattaccgcggacacggtgcggattacggcgatgtgttggcaggtttccaaattaatgacgcggatttaccggcatttaaacaacatttggaaaaattaggctatgcttatcaggatgttaccgacagcccgtcttatcggtatttcttaggatag

SEQ ID NO: 12490 - protein, 512 aa, Mannheimia succiniciproducens MBEL55E
MVNNLSNAPTGAEYLRAILISKVYEAAKVTPLQLMPKLSERLGNRIYVKREDHQPVHSFKLRGAYAMISGLTQAQKEAGVITASAGNHAQGVALSAKNAGIRALIVMPQNTPSIKVDAVRGHGGEVLLHGANFDEAKAKAIELSQTEQMTFIPPFDHPAVIAGQGSIGMELLQQNGHINRIFVPVGGGGLLAGVAVLIKQLMPEIKVIGVEAKDSACLYYALKAGRPVDLERVGLFADGVAVKRIGDETFRICQQYVDDVILVDGDEICAAMKDMFENVRAVPEPSGALSLAGLKKYAKQHNLQGETLVNLLSGANLNFHTLRYVSERCEIGEKHEALFAVTIPEQRGSFLKFCQILGQNAVTEFNYRYADEKQACIFVGVRITGEQEKQVIIQQLKQGGYDVQDLSDDDIAKTHIRYMVGGRSSSDLNERLYSFEFPEQKGALLKFLETLGTTDANISLFHYRGHGADYGDVLAGFQINDADLPAFKQHLEKLGYAYQDVTDSPSYRYFLG

SEQ ID NO: 12491 - DNA, 1524 bp, Burkholderia mallei ATCC 23344
  CDS (1)..(1524): transl_table=11
atggcctcccacgattatctgaagaaaatcctgaccgcccgggtgtacgacgtcgcgctcgaaaccgagctcgaacgcgcgcgcaacctgtccgcgcggctcaacaacgccgtctacctgaagcgcgaggacaaccagccggtgttctcgttcaagctgcgcggcgcgtacaacaagatggcgcacatcccggccgacgcgctcgcgcgcggggtgatcaccgcgtcggcgggcaaccatgcgcagggcgtcgcgttctcggccgcgcggatgaacgtgaaggcggtgatcgtcgtgccggtgacgacgccgcaggtgaaggtcgacgcggtgcgcgcgcacggcgggccgaccgtcgaggtgatccaggcgggcgaatcgtacagcgacgcgtacgcgcacgcggtgaaggtgcaggccgagcgcggcctcacgttcgtccatccgttcgacgatccgtacgtgatcgcgggccagggcacggtcgcgatggagatcctgcgccagcatcaggggccgattcacgcgatcttcgtgccgatcggcggcggcgggctcgcggcgggcgtggccgcgtacgtgaaggcggtgcgcccggagatcaaggtgatcggcgtgcagaccgacgattcgtgcgcgatgaagcaatcgctcgcggcgggccggcgcgtcgagctcaccgaggtagggctcttctccgacggcaccgcggtcaagctcgtcggcgaggagacgttccgcctctgcgcggcgtatctcgacgaggtcgtgaccgtcgataccgacgcgctttgcgcggcgatcaaggacgtgttccaggacacgcgcagcgtgctcgagccggccggctcgctcgcggtggcgggcgcgaagcggtatgcggagcaggcgggcatcgagggcgagacgctcgtggcggttacctccggcgcgaacatgaatttcgaccggatgcgcttcgtcgccgagcgcgccgaggtgggcgaggcgcgcgaggcagtgttcgcggtgacgattcccgaggagcgcggcagcttcaagcgcttctgcgcgctcgtcggcgagcgcaacgtgaccgagttcaactaccggatcgccgatgcgcgatcggcgcatctcttcgtcggcgtgcagatccggcggcgcgacgaatcggacgagatcgccgccaacttcgccgcgcacggtttcacgagcgtcgacctgtcgggcgacgagctgtcgaagcagcatatccgctacatggtgggcgggcgctcgccgctcgcgcacgacgagcggctgttccgcttcgagtttcccgagcggcccggcgcgctgatgaagttcctgtcgtcgatggcgcccgactggaacatcagcctgttccattaccggaaccagggcgccgactacagctcgatcctcgtcggcctgcaggtgccgcaggccgaccacgcggagttcgatcgcttcctcgcggcgctcggctatccgttctgggaagaaagcggcaatccggcgtatcgtctcttcctgtcgtaa

SEQ ID NO: 12492 - protein, 507 aa, Burkholderia mallei ATCC 23344
MASHDYLKKILTARVYDVALETELERARNLSARLNNAVYLKREDNQPVFSFKLRGAYNKMAHIPADALARGVITASAGNHAQGVAFSAARMNVKAVIVVPVTTPQVKVDAVRAHGGPTVEVIQAGESYSDAYAHAVKVQAERGLTFVHPFDDPYVIAGQGTVAMEILRQHQGPIHAIFVPIGGGGLAAGVAAYVKAVRPEIKVIGVQTDDSCAMKQSLAAGRRVELTEVGLFSDGTAVKLVGEETFRLCAAYLDEVVTVDTDALCAAIKDVFQDTRSVLEPAGSLAVAGAKRYAEQAGIEGETLVAVTSGANMNFDRMRFVAERAEVGEAREAVFAVTIPEERGSFKRFCALVGERNVTEFNYRIADARSAHLFVGVQIRRRDESDEIAANFAAHGFTSVDLSGDELSKQHIRYMVGGRSPLAHDERLFRFEFPERPGALMKFLSSMAPDWNISLFHYRNQGADYSSILVGLQVPQADHAEFDRFLAALGYPFWEESGNPAYRLFLS

SEQ ID NO: 12493 - DNA, 1524 bp, Burkholderia pseudomallei K96243
  CDS (1)..(1524): transl_table=11
atggcctcccacgattatctgaagaaaatcctgaccgcccgggtgtacgacgtcgcgctcgaaaccgagctcgaacgcgcgcgcaacctgtccgcgcggctgggcaacgccgtctacctgaagcgcgaggacaaccagccggtgttctcgttcaagctgcgcggcgcgtacaacaagatggcgcacatcccggccgacgcgctcgcgcgcggggtgatcaccgcgtcggcgggcaaccatgcgcagggcgtcgcgttctcggccgcgcggatgaacgtgaaggcggtgatcgtcgtgccggtgacgacgccgcaggtgaaggtcgacgcggtgcgcgcgcacggcgggccgaccgtcgaggtgatccaggcgggcgaatcgtacagcgacgcgtacgcgcacgcggtgaaggtgcaggccgagcgcggcctcacgttcgtccatccgttcgacgatccgtacgtgatcgcgggccagggcacggtcgcgatggagatcctgcgtcagcatcaggggccgattcacgcgatcttcgtgccgatcggcggcggcgggctcgcggcgggcgtggccgcgtacgtgaaggcggtgcgcccggagatcaaggtgatcggcgtgcagaccgacgattcgtgcgcgatgaagcaatcgctcgcggcgggccggcgcatcgagctcaccgaggtggggctcttctccgacggcaccgcggtcaagctcgtcggcgaggagacgttccgcctctgcgcggcgtatctcgacgaggtcgtgaccgtcgataccgacgcgctttgcgcggcgatcaaggacgtgttccaggacacgcgcagcgtgctcgagccggccggctcgctcgcggtggcgggcgcgaagcggtatgcggagcaggcgggcatcgagggcgagacgctcgtggcggttacctccggcgcgaacatgaatttcgaccggatgcgcttcgtcgccgagcgcgccgaggtgggcgaggcgcgcgaggcggtgttcgcggtgacgattcccgaggagcgcggcagcttcaagcgcttctgcgcgctcgtcggcgagcgcaacgtgaccgagttcaactaccggatcgccgatgcgcgatcggcgcatctcttcgtcggtgtgcagatccggcggcgcgacgaatcggacgagatcgccgccaacttcgccgcgcacggtttcacgagcgtcgacctgtcgggcgacgagctatcgaagcagcatatccgctacatggtgggcgggcgctcgccgctcgcgcacgacgagcggctgttccgcttcgagtttcccgagcggcccggcgcgctgatgaagttcctgtcgtcgatggcgcccgactggaacatcagcctgttccactaccggaaccagggcgccgactacagctcgatcctcgtcggcctgcaggtgccgcaggccgaccacgcggcgttcgatcgcttcctcgcggcgctcggctatccgttctgggaagaaagcggcaatccggcgtatcgtctcttcctgtcgtaa

SEQ ID NO: 12494 - protein, 507 aa, Burkholderia pseudomallei K96243
MASHDYLKKILTARVYDVALETELERARNLSARLGNAVYLKREDNQPVFSFKLRGAYNKMAHIPADALARGVITASAGNHAQGVAFSAARMNVKAVIVVPVTTPQVKVDAVRAHGGPTVEVIQAGESYSDAYAHAVKVQAERGLTFVHPFDDPYVIAGQGTVAMEILRQHQGPIHAIFVPIGGGGLAAGVAAYVKAVRPEIKVIGVQTDDSCAMKQSLAAGRRIELTEVGLFSDGTAVKLVGEETFRLCAAYLDEVVTVDTDALCAAIKDVFQDTRSVLEPAGSLAVAGAKRYAEQAGIEGETLVAVTSGANMNFDRMRFVAERAEVGEAREAVFAVTIPEERGSFKRFCALVGERNVTEFNYRIADARSAHLFVGVQIRRRDESDEIAANFAAHGFTSVDLSGDELSKQHIRYMVGGRSPLAHDERLFRFEFPERPGALMKFLSSMAPDWNISLFHYRNQGADYSSILVGLQVPQADHAAFDRFLAALGYPFWEESGNPAYRLFLS

SEQ ID NO: 12495 - DNA, 1608 bp, Burkholderia pseudomallei K96243
  CDS (1)..(1608): transl_table=11
atgcagtcagacgacgtcgtcacggaaacccccgaagcgcccccccgcgaagccgtcgcgcccacggcgatcgcgccgcgcgcgcgcacgctcgacgattacctgaagctggtcctgaacgcgcgcgtgtacgacgtcgcgcgcgagacggcgctcgaacgcgcgcgcaacctgtccgcgcggctgggcaacgccgtctacctgaagcgcgaggacaaccagccggtgttctcgttcaagctgcgcggcgcgtacaacaagatggcgcacatcccggccgacgcgctcgcgcgcggggtgatcaccgcgtcggcgggcaaccatgcgcagggcgtcgcgttctcggccgcgcggatgaacgtgaaggcggtgatcgtcgtgccggtgacgacgccgcaggtgaaggtcgacgcggtgcgcgcgcacggcgggccgaccgtcgaggtgatccaggcgggcgaatcgtacagcgacgcgtacgcgcacgcggtgaaggtgcaggccgagcgcggcctcacgttcgtccatccgttcgacgatccgtacgtgatcgcgggccagggcacggtcgcgatggagatcctgcgccagcatcaggggccgattcacgcgatcttcgtgccgatcggcggcggcgggctcgcggcgggcgtggccgcgtacgtgaaggcggtgcgcccggagatcaaggtaatcggcgtgcagaccgacgattcgtgcgcgatgaagcaatcgctcgcggcgggccggcgcgtcgagctcaccgaggtggggctcttctccgacggcaccgcggtcaagctcgtcggcgaggagacgttccgcctctgcgcggcgtatctcgacgaggtcgtgaccgtcgataccgacgcgctttgcgcggcgatcaaggacgtgttccaggacacgcgcagcgtgctcgagccggccggctcgctcgcggtggcgggcgcgaagcggtatgcggagcaggcgggcatcgagggcgagacgctcgtggcggttacctccggcgcgaacatgaatttcgaccggatgcgcttcgtcgccgagcgcgccgaggtgggcgaggcgcgcgaggcggtgttcgcggtgacgattcccgaggagcgcggcagcttcaagcgcttctgcgcgctcgtcggcgagcgcaacgtgaccgagttcaactaccggatcgccgatgcgcgatcggcgcatctcttcgtcggcgtgcagatcgagcatcgcggcgactcggcgacgatcgcggcgagcttcgtcgcgcacggcttcggcaccgtcgatctgagcggcgacgagctcgcgaaacagcacgtgcgacacatggtgggcgggcgctcgccgctcgcgcacgacgagcggctgttccgcttcgagtttcccgagcggcccggcgcgctgatgaagttcctgtcgtcgatggcgcccgactggaacatcagcctgttccattaccgcaatcagggcggcgacgcgagctcgatcctcgtcggcctgcaagtgccgcgggcggaccacgcggcgttcgatcgctttctcgcggcgctcggttatccgtatcgcgaggaaaccggtcatcccgcctatcggttgtttctcggttga

SEQ ID NO: 12496 - protein, 535 aa, Burkholderia pseudomallei K96243
MQSDDVVTETPEAPPREAVAPTAIAPRARTLDDYLKLVLNARVYDVARETALERARNLSARLGNAVYLKREDNQPVFSFKLRGAYNKMAHIPADALARGVITASAGNHAQGVAFSAARMNVKAVIVVPVTTPQVKVDAVRAHGGPTVEVIQAGESYSDAYAHAVKVQAERGLTFVHPFDDPYVIAGQGTVAMEILRQHQGPIHAIFVPIGGGGLAAGVAAYVKAVRPEIKVIGVQTDDSCAMKQSLAAGRRVELTEVGLFSDGTAVKLVGEETFRLCAAYLDEVVTVDTDALCAAIKDVFQDTRSVLEPAGSLAVAGAKRYAEQAGIEGETLVAVTSGANMNFDRMRFVAERAEVGEAREAVFAVTIPEERGSFKRFCALVGERNVTEFNYRIADARSAHLFVGVQIEHRGDSATIAASFVAHGFGTVDLSGDELAKQHVRHMVGGRSPLAHDERLFRFEFPERPGALMKFLSSMAPDWNISLFHYRNQGGDASSILVGLQVPRADHAAFDRFLAALGYPYREETGHPAYRLFLG

SEQ ID NO: 12497 - DNA, 1530 bp, Methylococcus capsulatus str. Bath
  CDS (1)..(1530): transl_table=11
atgctgcaaaaatacatagagaagattctgcgcgcccgtgtctacgacgttgcccaggagaccccgctggacccggcgcccggcctgtcgcggcggctggacaacacggtgctgatcaagcgcgaggacctgcagccggtgttctcgttcaagctgcgcggcgcctacaacaagatcgcctcgctcacacccgaggcgcgcgcggccggcgtgatcgcggcctccgccggcaaccacgcccagggcgtggcactggcggcgcagcggctgggcatccgcgccgtgatcgtgatgccttgcaccaccccgcatatcaaggtcgatgcggtgcgcaaccgaggcggtgaggtcgtactgcatggcgacgcctatgacgaagcctacgaacatgcgctggaactggcccgcgaccagtgcctgaccttcgtccacccctacgacgatccggaagtcatcgccgggcaaggcaccatcggcatggaaatcctgcgccagcaccaggacgccatccacgccatcttcgtgcctgtgggcggcggcggattgatcgccggcatcgccgcctacgtcaagttcgtgcgcccggacatccgcgtcatcggcgtggaaccagtggactccgactgcctgcaccgggcgctgaaagccaagcggcgggtgatcctgaagcaggtgggcctgttcgccgacggcgtcgcggtgaagcaggtcggcaaggaaccgttccatctcgcccaccagtgggtggacgaggtcgtgaccgtcgacaccgacgaaatctgcgccgccatcaaggacatcttcgacgacacccgctccatcgccgagccggcgggcgcgctgggcatcgccgggctcaagaaatacgtggccgaaacaggaatcaagaacgcgtgcctggtggcgatcgaaagcggcgccaacatcaacttcgaccggctgcgccacgtcgctgagcgcgccgagatcggcgaaaagcgcgaactgctgctggcagtgacgatccccgagcggcccggcagcttcctcgaattctgccgggtgctgggccgccgcaacatcaccgaattcaactaccgcttcttcgacgaaaaggccgcccaggtgttcgtcggcctcccggtggcgagcggcgcgatcgaccgcgaaagcctggtccgcgaattcgaacgccagggtttcggcgtgctcgacctgaccggcaacgaactcgccatcgaacacatccgctacatggtcggcggccacgcgccgaaactgctggacgaacaggtctacagcttcgaattccccgagcgacccggcgcgctgctgcgcttcctgtccatcatgggcgggcgctggaacatcagcctgttccattaccgcaaccacggcgccgccttcggccgggtactgatgggcatccaggtgccgaaaccggaacgcaaggccttccgggaattcctcgaagccatcggctacgccttcaaggaggaaacccaaaatcccgcctaccggctgttcgcggggggcagcgagcgggggtga

SEQ ID NO: 12498 - protein, 509 aa, Methylococcus capsulatus str. Bath
MLQKYIEKILRARVYDVAQETPLDPAPGLSRRLDNTVLIKREDLQPVFSFKLRGAYNKIASLTPEARAAGVIAASAGNHAQGVALAAQRLGIRAVIVMPCTTPHIKVDAVRNRGGEVVLHGDAYDEAYEHALELARDQCLTFVHPYDDPEVIAGQGTIGMEILRQHQDAIHAIFVPVGGGGLIAGIAAYVKFVRPDIRVIGVEPVDSDCLHRALKAKRRVILKQVGLFADGVAVKQVGKEPFHLAHQWVDEVVTVDTDEICAAIKDIFDDTRSIAEPAGALGIAGLKKYVAETGIKNACLVAIESGANINFDRLRHVAERAEIGEKRELLLAVTIPERPGSFLEFCRVLGRRNITEFNYRFFDEKAAQVFVGLPVASGAIDRESLVREFERQGFGVLDLTGNELAIEHIRYMVGGHAPKLLDEQVYSFEFPERPGALLRFLSIMGGRWNISLFHYRNHGAAFGRVLMGIQVPKPERKAFREFLEAIGYAFKEETQNPAYRLFAGGSERG

SEQ ID NO: 12499 - DNA, 1521 bp, Azoarcus sp. EbN1
  CDS (1)..(1521): transl_table=11
atgactgccgcaatcccggattatctggaaaaaaccctcaacgcccgcgtctatgacgtcgcggaagaaactccgctcgacctcgccccgaacctgtccgcacgcatccacaaccgcatctacctcaagcgcgaggacatgcagccggtattcagcttcaagctgcgcggggcctacaacaagatggcgcacctgccgccgcaggcgctcaagcggggggtgatctgcgcctcggccggcaatcatgcacaaggcgtcgcgctgtcggcgcagaagctcggggtgcgcgcggtgatcgtgatgccgacttcgacgccgcagatcaaggtcgacgcggtcagggcgcggggcggcgaggtggtgctcgccggtgactcctactcggacgcctacgcccactcgctggaactggaaaaggtggacaagctcactttcgtccatccttatgacgacccggacgtcatcgccggacagggcacgatcggcatggagatcctgcgcgcgcaccccgatccgatccacgcgattttctgcgccgttggcggcggcggactgatcgccggcgttgccgcctacgtgaagcggctgcggcccgaaatcaggatcgtcggcgtcgagacggtggacgccgacgcgatgacgcgctcgctcgcagcgggcgaacgggtcgttctcgaccaggtcggcctgttcgccgacggcaccgcggtcaagcagatcggcgaagagactttccggctgtgccgggagtatgtcgacgagatggtcctcgtcgacaacgacgcgatctgcgccgccctgaaagacgtcttcgaggacacgcgctcgatcctcgagccttccggcgcgctggcgatcgccggggcgaaggaatacgcgaagcgccacaatctgcatggcaagtgcctggtagcggtggcgtccggcgcgaacatgaatttcgatcgcctgcgtttcgttgccgaacgcgccgaagtgggcgagcaacgcgaggcggtgttcgccgtgacgatcccggaacgccccggctcgttccgcaaattctgcagcctcgtcggcgatcgccacatcaccgagttcaactatcgctacgccgacgccgaacaggcgcacatcttcgtcggcgtgtcggtgcacaaccgcgccgaggcgtcccgcctcatcgagatgctcgggcgccacgaactgccggcagtcgacctcaccgacgacgaaatggcgaagagccacgtccgctacatggtcggcggacacgcgccgcacatcgacaacgagctggtgtaccgcttcgaattccccgagcgccccggtgccctgatgaatttcctcacgaatctgcactcggactggaacatcagcctgttccactaccgcaaccacggctcggattcgggtcgcgtgctggtcggcatgcaggtgcctcccggcgacaagacggcattcagcgcgtttctcgaccggctcggctatgaatccgccgatgagtccgggaacccggcataccgcatgttcctcggctga

SEQ ID NO: 12500 - protein, 506 aa, Azoarcus sp. EbN1
MTAAIPDYLEKTLNARVYDVAEETPLDLAPNLSARIHNRIYLKREDMQPVFSFKLRGAYNKMAHLPPQALKRGVICASAGNHAQGVALSAQKLGVRAVIVMPTSTPQIKVDAVRARGGEVVLAGDSYSDAYAHSLELEKVDKLTFVHPYDDPDVIAGQGTIGMEILRAHPDPIHAIFCAVGGGGLIAGVAAYVKRLRPEIRIVGVETVDADAMTRSLAAGERVVLDQVGLFADGTAVKQIGEETFRLCREYVDEMVLVDNDAICAALKDVFEDTRSILEPSGALAIAGAKEYAKRHNLHGKCLVAVASGANMNFDRLRFVAERAEVGEQREAVFAVTIPERPGSFRKFCSLVGDRHITEFNYRYADAEQAHIFVGVSVHNRAEASRLIEMLGRHELPAVDLTDDEMAKSHVRYMVGGHAPHIDNELVYRFEFPERPGALMNFLTNLHSDWNISLFHYRNHGSDSGRVLVGMQVPPGDKTAFSAFLDRLGYESADESGNPAYRMFLG

SEQ ID NO: 12501 - DNA, 1212 bp, Campylobacter jejuni RM1221
  CDS (1)..(1212): transl_table=11
gtgttagagcttaataaaatttacaaagcaaaacaacaaatttcagggtttgtaaacaaaactcctttcatatactcttcttttttaagtgatatttgtcaaagtgagatttatcttaaaaatgaaaatttacaaattacaggtgcttataaaattcgtggagcttataataaaatagccaatcttagcgctgaacaaaaacaacacggagtcattgcggcaagtgcaggaaaccatgctcaaggcgtggccattagtgcaaaaaaatttggcattaaagcagttattgtaatgccagaatccactccgctcttaaaagtttctgctacaaaagccttaggagcagaggtgatactcaaaggagacaattttgatgaagcttatgtctttgcaacctcttatgctaaagaaaataatcttagttttatccatccttttgaagatgaatttgtaatggcaggacaaggaactttgatgcttgaaatgcttgatgaaataagcgatcttgatatgattatcgcacctgttggaggtggaggacttataagtggtatcgcaagtgcagctaaacaaatcaatccaaacattaaaatcatcggagttggagccaaaggagctcctgcaatgtatgaaagttttcatgccaaaaaaatcaaaaatgcaaaaagcgtacgcactatagccgatggtattgctgtgcgtgatgcaaatcctattaattttaatattattttagaatgcgtagatgattttatccaagttgatgatgaagaaatcgctaatgcggtattgtttttacttgaaaaacataaaatcatagttgaaggcgcaggagctgcgagtgtagccaccctacttcatcaaaaaataaatacacaaaatcataaaaaaattggcgtagttttaagcggaggcaatatcgatgcacaaatgctaaatatcatcatagaaaaaggtttatttaaatcctacagaaaaatgcaaattcatgttactttagtagataaacctggggcattattacaccttacagacagcttaaaaatagccaatgcaaatatagtaaaaatcgactatgatagattttccaccaagcttgattatggcgatgcgatgatttcaattaccctagaaaccaaaggtaaagaacatcaagaagaaataagaaaaattttaacccaaaaggcctttaatttctatgaaagtttttaa

SEQ ID NO: 12502 - protein, 403 aa, Campylobacter jejuni RM1221
MLELNKIYKAKQQISGFVNKTPFIYSSFLSDICQSEIYLKNENLQITGAYKIRGAYNKIANLSAEQKQHGVIAASAGNHAQGVAISAKKFGIKAVIVMPESTPLLKVSATKALGAEVILKGDNFDEAYVFATSYAKENNLSFIHPFEDEFVMAGQGTLMLEMLDEISDLDMIIAPVGGGGLISGIASAAKQINPNIKIIGVGAKGAPAMYESFHAKKIKNAKSVRTIADGIAVRDANPINFNIILECVDDFIQVDDEEIANAVLFLLEKHKIIVEGAGAASVATLLHQKINTQNHKKIGVVLSGGNIDAQMLNIIIEKGLFKSYRKMQIHVTLVDKPGALLHLTDSLKIANANIVKIDYDRFSTKLDYGDAMISITLETKGKEHQEEIRKILTQKAFNFYESF

SEQ ID NO: 12503 - DNA, 1527 bp, Neisseria gonorrhoeae FA 1090
  CDS (1)..(1527): transl_table=11
atgaacacgccccttccttattccgattacctcatccgcatcctgacggcatctgtctatgatgtagcggtcgaaacgcctttggaaccggcacgcagcctttctgtacgtttgaaaaacaacatccttttgaaacgcgaagatttgcagccggttttttcgttcaaaatacgcggcgcgtacaacaaaatgtccaagttgccgaaagatgcgctcgcttgcggcgtgattgcggcaagcgcgggcaatcacgcacaaggcgtggcgttgtccgcacagcgtttgggctgccgtgccgttatcgtcatgccggagactacgccgaaaattaaagtggatgcggttaaaagccgtggcggcgaggtggttttgcggggtgtttcatacaacgatgcctacgattatgcgatggagctggcggaacaggaagggctgacctatatcgcgccgtttgacgatcccgatgtgattgcgggacaggggacggtggggatggaaattgtcagccagcatcccgatccaatccgcgccgtattcgtaccgatagggggcggcggtttggcggcgggcgtggcggcatttatcaaacaggttcgtcccgaaattaaagttatcggcgtacagaccaacgattcctgctgtatgaagcagtcggtcgaagcaggcgaaatcgtccatttgaaagatgtcgggctgttttcagacggtacggcggtcaaagtcgtcggaaacggaaccttccgcctctgcaaagaacttttggatgaaatcattacagtcgataccgatgcggtttgcggcgcggtcaaggatattttcgatgacacgcgcagcattaccgagccggccggcgcgttggcgttggcgggtctgaaagcctatattgcccgagaaggtgcggaaaaccaaaccctgattgccgttaccagcggtgcgaatatgaattttcaccgtttgcgccacgtttcggaacggagcgaattgggcgagggcaacgaaggtatttttgccgttaccatccccgaagaacgcggcagcttccttaagtttgtcaatatattgggaaataggaatattaccgagttcaactaccgctacggcggcgatgaaaaagcgcatatctttgtcggacttcaagcggcaggcccgcaggatttggcggttatcggcagccggttggatgaggcgggattgcccaatgtcgatttgaccaataatgagattgccaaaatccatatccgctatatggtcggagggcggacggacaaagtagggcacgagcgtctggtcagttttgagtttccggagcgtccgggcgcgttggcgcgctttttgaaccatatgcagggcggttggaacattacgctcttccattaccgcaaccacggtgcggattacgggcggattttggtcggtatcgacgtgccgccgcacgatgccgccgcatttgacggtttcttggaaagtctgggatacagctatcacgaggaaacgcaaaatgccgcgtacaagctgtttcttgcctga

SEQ ID NO: 12504 - protein, 508 aa, Neisseria gonorrhoeae FA 1090
MNTPLPYSDYLIRILTASVYDVAVETPLEPARSLSVRLKNNILLKREDLQPVFSFKIRGAYNKMSKLPKDALACGVIAASAGNHAQGVALSAQRLGCRAVIVMPETTPKIKVDAVKSRGGEVVLRGVSYNDAYDYAMELAEQEGLTYIAPFDDPDVIAGQGTVGMEIVSQHPDPIRAVFVPIGGGGLAAGVAAFIKQVRPEIKVIGVQTNDSCCMKQSVEAGEIVHLKDVGLFSDGTAVKVVGNGTFRLCKELLDEIITVDTDAVCGAVKDIFDDTRSITEPAGALALAGLKAYIAREGAENQTLIAVTSGANMNFHRLRHVSERSELGEGNEGIFAVTIPEERGSFLKFVNILGNRNITEFNYRYGGDEKAHIFVGLQAAGPQDLAVIGSRLDEAGLPNVDLTNNEIAKIHIRYMVGGRTDKVGHERLVSFEFPERPGALARFLNHMQGGWNITLFHYRNHGADYGRILVGIDVPPHDAAAFDGFLESLGYSYHEETQNAAYKLFLA

SEQ ID NO: 12505 - DNA, 1536 bp, Pseudomonas syringae pv. syringae B728a
  CDS (1)..(1536): transl_table=11
atgagccaggacccgcacgctctgctcaactattacgcgcgcaaaatcctcacctcgcgcgtctacgacgttgccatcgaaacgccgctgcaaggcgctcgccagctgtccgaacggctgggcaatcaggtgctgctcaagcgcgaagacctgcagccggtgttctcgttcaagattcgcggtgcgtacaacaagctcgcgcaactgcccgcagagcagaccgcacggggcgtggtgacggcctcggcaggcaatcatgcccagggcctggcgctggcagcgcgtgagctggggatcaaggcgaccatcgtcatgccgcgcaccactccggagatcaaggtcgaaggcgtgcgctcgcggggagccaccgtggtgctgcatggcgattcgttcccggaagcgctggcctactcgctgaagctggtcgacgaacaaggtttcgtctacatccatccgtatgacgaccccgacaccatcgccgggcaaggcactgtggcgatggagatccttcgccagcaaccgggccagctggatgcgatctttgttccggtcgggggtggcggtctgattgctggtatcgcggcctacgtgaaatacctgcgcccggagatcaaggtgatcggcgtcgagccggacgattccaactgcctgcaggcggcgatggccgccggggagcgcgtggtgttgagccaggtcgggctgtttgccgatggcgtggcggtcgcgcagatcggccatcacacctttgaagtgtgccgccattatgtcgatgaagtgatcaccgtcagcacggatgagatctgtgcggcgatcaaggacatctacgatgacacccgctcgatcaccgagccctccggcgcgttgggcgtggccgggatcaagaagtatgtcgagcagcgcggcgtcagcggccagacgctggtggcgattgattcaggggccaacgtcaacttcgatcgcttgcggcacgtggccgagcgcgccgaactgggcgaaggccgcgaggcgatcattgccgtgaccatccccgagcaaccgggcagcttcaaggcgttctgcgaggccatcggcaagcggcagatcaccgaattcaactaccgctatcacaccgaccgcgaggcgcacatcttcgtcggcgtgcagacccatcccgagaacgacccacgcagcgccctgatcgccagcctgaccgggcaaggcttcccggtgctggacctgacagacaacgaactggccaaactgcacatccgccacatggtcggcgggcatgccgagcgggtcgacgatgaagtggtgctgcgcttcgagttcccggagcgaccgggcgcgctgttcaacttcctcaaccgcctgggcgggcgctggaccatctccatgttccactaccgcaaccacggcgcagccgatggccgagtggttgccgggctggtggtgccggaggaagagcggcatctggtcggtgctgcgctggatgagattggttaccggtactgggatgaaagcgagaacccggcttaccggttgtttctgggctga

SEQ ID NO: 12506 - protein, 511 aa, Pseudomonas syringae pv. syringae B728a
MSQDPHALLNYYARKILTSRVYDVAIETPLQGARQLSERLGNQVLLKREDLQPVFSFKIRGAYNKLAQLPAEQTARGVVTASAGNHAQGLALAARELGIKATIVMPRTTPEIKVEGVRSRGATVVLHGDSFPEALAYSLKLVDEQGFVYIHPYDDPDTIAGQGTVAMEILRQQPGQLDAIFVPVGGGGLIAGIAAYVKYLRPEIKVIGVEPDDSNCLQAAMAAGERVVLSQVGLFADGVAVAQIGHHTFEVCRHYVDEVITVSTDEICAAIKDIYDDTRSITEPSGALGVAGIKKYVEQRGVSGQTLVAIDSGANVNFDRLRHVAERAELGEGREAIIAVTIPEQPGSFKAFCEAIGKRQITEFNYRYHTDREAHIFVGVQTHPENDPRSALIASLTGQGFPVLDLTDNELAKLHIRHMVGGHAERVDDEVVLRFEFPERPGALFNFLNRLGGRWTISMFHYRNHGAADGRVVAGLVVPEEERHLVGAALDEIGYRYWDESENPAYRLFLG

SEQ ID NO: 12507 - DNA, 1515 bp, Pseudomonas syringae pv. syringae B728a
  CDS (1)..(1515): transl_table=11
atgcttgaacagtacgtcaagaaaatcctcacctcccgcgtctacgacgttgccatcgaaacgccgctgcaaggcgctcgccagctgtccgaacggctgggcaatcaggtgctgctcaagcgcgaagacctgcagccggtgttctcgttcaagattcgtggcgcgtacaacaagctcgcgcaattgcccgcagagcagactgcacggggcgtggtgacggcctcggcgggcaatcatgcccagggcctggcgctggcagcgcgtgagctggggatcaaggcgaccatcgtcatgccgcgcaccacgccggaaatcaaggtcgaaggcgtgcgctcgcggggtgccaccgtggtgctgcacggcgattcgttcccggaagcgttggcttactcgctgaagctggtcgacgaacaaggcttcgtctacatccatccgtatgacgaccccgacaccatcgccgggcaaggcactgtggcgatggagattcttcgtcagcaaccgggccagctggatgcgatctttgttccggtcgggggtggcggtctgattgccggtatcgcggcctacgtgaaatacctgcgcccggagatcaaggtgatcggcgtcgagccggacgattccaactgcctgcaggcggcgatggctgccggggagcgcgtggtgttgagccaggtcgggctgtttgccgatggcgtggcggtcgcgcagatcggccatcacacctttgaagtgtgtcgccattatgtcgatgaagtgatcaccgtcagcacggatgagatctgtgcggcgatcaaggacatctatgacgacacccgctcaatcaccgagccgtccggcgcgctgggtgtggccgggatcaagaagtatgtcgagcagcgcggcgtcagcggtcagacgctggtggcgattgattccggggccaacgtcaacttcgaccgtttgcgtcatgtggccgagcgcgccgaactgggcgaaggccgcgaggcgatcattgccgtgaccatccccgagcaaccgggcagcttcaaggcgttctgcgaggccatcggcaagcggcagatcaccgaattcaactaccgctaccacaccgatcgcgaggcgcacatcttcgtcggcgtgcagacccatcccgagaacgatccgcgcagcgccctgatcgccagcctgaccgggcaaggcttcccggtgctggacctgaccgacaacgaactggccaaactgcacattcgccacatggtcggcgggcatgccgagcgcgtcgacgatgaagtggtgctgcgcttcgagttcccggagcgaccgggcgcgctgttcaacttcctcaaccgcctgggcgggcgctggaccatctcgatgttccactaccgcaaccacggcgcagccgacggccgggtggttgccgggctggtagtgccggaggaagagcggcatctggtcggcgctgcgctggacgagattggttaccggtactgggatgaaagcgagaacccggcgtaccggctgtttctgggctga

SEQ ID NO: 12508 - protein, 504 aa, Pseudomonas syringae pv. syringae B728a
MLEQYVKKILTSRVYDVAIETPLQGARQLSERLGNQVLLKREDLQPVFSFKIRGAYNKLAQLPAEQTARGVVTASAGNHAQGLALAARELGIKATIVMPRTTPEIKVEGVRSRGATVVLHGDSFPEALAYSLKLVDEQGFVYIHPYDDPDTIAGQGTVAMEILRQQPGQLDAIFVPVGGGGLIAGIAAYVKYLRPEIKVIGVEPDDSNCLQAAMAAGERVVLSQVGLFADGVAVAQIGHHTFEVCRHYVDEVITVSTDEICAAIKDIYDDTRSITEPSGALGVAGIKKYVEQRGVSGQTLVAIDSGANVNFDRLRHVAERAELGEGREAIIAVTIPEQPGSFKAFCEAIGKRQITEFNYRYHTDREAHIFVGVQTHPENDPRSALIASLTGQGFPVLDLTDNELAKLHIRHMVGGHAERVDDEVVLRFEFPERPGALFNFLNRLGGRWTISMFHYRNHGAADGRVVAGLVVPEEERHLVGAALDEIGYRYWDESENPAYRLFLG

SEQ ID NO: 12509 - DNA, 1542 bp, Haemophilus influenzae 86-028NP
  CDS (1)..(1542): transl_table=11
atgaaaaatctactcaccaatcctcaaccctctcaatcagattatatcaatgccattgttaaacttggttcgcgcgtatatgaagctgcacaagtgacccctttacaaaaaatgggaaaactttctgaacgactgcacaataatatctggattaaacgagaagaccgtcagccagtaaatagctttaaactacgcggtgcttacgcaatgatttctagcctttcagaggaacaaaaagcagcaggcgtaatagcggcatctgcaggtaaccatgcacaaggcgtggcattatcagcgaaacaattaggcttaaaagcattaattgttatgccacaaaacaccccaagcattaaagtggatgcagtgcgtggttttggtggtgaggtgttgttgcacggtgctaatttcgatgaagccaaagcaaaagccatcgagctttcaaaagaaaaaaatatgacatttattccaccattcgatcatccattggtaatcgctggacaaggcacgttagcgatggaaatgctacaacaagtggcagatttggattatgtgtttgtacaagtcggtggtggtggcttagctgcgggtgtggcaattttgcttaagcaatttatgccagaaattaaaatcatcggtgtagaatcaaaggattctgcatgcttaaaagccgctctcgataaaggcgaaccaacagatttaacccatgttggattatttgccgatggcgttgccgtaaaacgcattggcgacgaaacattccgcctatgccaacaatatcttgatgatatggtattggtcgatagtgacgaagtatgcgcagcaatgaaagatttgtttgagaacgttcgtgctgttgcagaaccatcaggtgcattaggtttggctggtttgaaaaaatatgcgaaacaaaaccatattgaaggcaaaaatatggcggcaattttgtctggcgcgaacttgaatttccacacattacgttatgtatctgaacgttgtgaaattggtgaaaatcgagaggctttattagccgtgaccatgcctgaacaaccaggtagtttcttaaaatttgcttatgtattaggtaacagagctgtaaccgaattcagttatcgttatgcagatgataaacgtgcttgcgtgtttgttggggtaagaacgacaaatgagcaagaaaaagcagatattattgcagacctcacgaaaaatggttttgatgttgaggatatgtctgatgatgatattgcgaaaacgcatgttcgctatttaatgggtggtcgagcatcaaatgataacgaacgtttatataccttcgaattcccagagcaaaaaggtgccttattaaaattcttggaaaccttgcaaaatcgttggaatatttcattatttcactatcgtgcccacggtgcggactatggaaatatccttgctgggttccaaattgaagaacgcgaacaagcagaatttgaacaggcacttgcccaactcaattatgtttttgaagatgtaacagaaagcaaatcttatcgttatttcttacgttaa

SEQ ID NO: 12510 - protein, 513 aa, Haemophilus influenzae 86-028NP
MKNLLTNPQPSQSDYINAIVKLGSRVYEAAQVTPLQKMGKLSERLHNNIWIKREDRQPVNSFKLRGAYAMISSLSEEQKAAGVIAASAGNHAQGVALSAKQLGLKALIVMPQNTPSIKVDAVRGFGGEVLLHGANFDEAKAKAIELSKEKNMTFIPPFDHPLVIAGQGTLAMEMLQQVADLDYVFVQVGGGGLAAGVAILLKQFMPEIKIIGVESKDSACLKAALDKGEPTDLTHVGLFADGVAVKRIGDETFRLCQQYLDDMVLVDSDEVCAAMKDLFENVRAVAEPSGALGLAGLKKYAKQNHIEGKNMAAILSGANLNFHTLRYVSERCEIGENREALLAVTMPEQPGSFLKFAYVLGNRAVTEFSYRYADDKRACVFVGVRTTNEQEKADIIADLTKNGFDVEDMSDDDIAKTHVRYLMGGRASNDNERLYTFEFPEQKGALLKFLETLQNRWNISLFHYRAHGADYGNILAGFQIEEREQAEFEQALAQLNYVFEDVTESKSYRYFLR

SEQ ID NO: 12511 - DNA, 1515 bp, Pseudomonas fluorescens Pf-5
  CDS (1)..(1515): transl_table=11
atgctcgaacagtacgtcaagaagatcctcacctcgcgcgtttatgacgttgccgtagaaaccccattgcagactgcccgccagctttccgagcggctgggcaatcagatctggctcaagcgtgaagacttgcagccggtgttctcgttcaagatccgtggcgcctacaacaagctgacccagctcagcgatgccgagcgcgcccgcggcgtggtcactgcgtcggcgggtaaccacgcccagggcctggccctggcggccaaggtgctgggggtcaaggctactatcgtgatgcccaagaccacccccgagatcaaggtcgagggcgtgcgctcccgtggcggcaaggtggtgctgcacggcgataccttccctgaagcgctggcctactccctgaagctggtggacgagaagggctacgtctacatccatccctacgatgatccgcacaccattgccgggcagggcacggtggccatggagattctgcgccagcaccccggcccgctggatgcgatcttcgttccggtcggcggcggcggcctgatcgccggcatcgcggcctatgtgaaatacctgcgcccggagatcaaggtcatcggcgtcgagccggacgactccaactgcctgcaggcggccatggctgccggtgagcgcgtggtgctgccgaccgtggggatcttcgccgacggcgtggcggtggcgcagattggccagcacaccttcgacatctgcaaggattatgtggatgaagtgattaccgtcagtaccgacgagatctgtgcggcaatcaaggatatctacgacgatacccgctcgatcaccgaacctgccggcgccctgggcgttgccgggatcaagaagtacgtcgagcagcgcggtatcagcgggcagaccctggtggccatcgactccggagccaacgtcaacttcgaccgcctgcgccacgtggccgagcgcgccgaactgggcgaaggccgcgaagccatcatcgccgtgaccatccccgagaagcccggcagcttcaaggccttctgcgaggcggtgggcaagcgccagatcaccgaattcaactaccgctacaacaccggcagcgaggcgcacatcttcgttggcgtgcagacccacccggaaaacgatccgcgcagcgccctgatcgccagcctgaccgagcagggctttccggtgatcgacctgaccgataacgaactggccaagctgcacatccgctacatggtcggcggccatgccgagaaggtcagcgacgaagtggtgctgcgtttcgaatttccggagcgtccgggggcgctgttcaacttcctcaacaagctgggcgggcgctggaatatctcgatgttccactaccgcaaccatggtgcggcggatggccgggtagtcgccggcctgcaagtgccggccgatgaacgtcacctggtgcccgcggcgctggagcagatcggctatccgtactgggatgaaagcgacaacccggcctaccagctgttcctcggctga

SEQ ID NO: 12512 - protein, 504 aa, Pseudomonas fluorescens Pf-5
MLEQYVKKILTSRVYDVAVETPLQTARQLSERLGNQIWLKREDLQPVFSFKIRGAYNKLTQLSDAERARGVVTASAGNHAQGLALAAKVLGVKATIVMPKTTPEIKVEGVRSRGGKVVLHGDTFPEALAYSLKLVDEKGYVYIHPYDDPHTIAGQGTVAMEILRQHPGPLDAIFVPVGGGGLIAGIAAYVKYLRPEIKVIGVEPDDSNCLQAAMAAGERVVLPTVGIFADGVAVAQIGQHTFDICKDYVDEVITVSTDEICAAIKDIYDDTRSITEPAGALGVAGIKKYVEQRGISGQTLVAIDSGANVNFDRLRHVAERAELGEGREAIIAVTIPEKPGSFKAFCEAVGKRQITEFNYRYNTGSEAHIFVGVQTHPENDPRSALIASLTEQGFPVIDLTDNELAKLHIRYMVGGHAEKVSDEVVLRFEFPERPGALFNFLNKLGGRWNISMFHYRNHGAADGRVVAGLQVPADERHLVPAALEQIGYPYWDESDNPAYQLFLG

SEQ ID NO: 12513 - DNA, 1554 bp, Psychrobacter arcticus 273-4
  CDS (1)..(1554): transl_table=11
atgctgtcacattgggtacgagccatcttacaagccaccgtctatgacgttgctattcaaacaccacttgaagcggcacccaagctgacccaacgttttgctaatgacattcgttttaaacgtgaagacctgcaaccggtaaaatcctttaaattgcgcggcgcttataaccgcatcagccaattgaatgatgagcaaaaagcacgcggcgtgatttgcgcatcggcgggtaaccatgcccaaggcgttgcctactctgcccgtaaacttgcactgaacaatattattgttatgccaaccactacccctgatatcaaagtagatgccgtcagagcgcttggcggcaatgtcgacttgtatggtgacagttttgatgaagccaatcgctatgccattgatcgcgctgagcgtgaaggtctgacttttataccaccatacgatgacgagctggtaattgccggacaaggtacgattggacttgagctcacccagcaatggcgtaatatggattacgtttttgtagcagttggtggtggcggtctgatttctggtgtcgctgcatttttgggtgaagttgccccgcatgtcaaagtcatcgctgtagaagccgaccaatcagcatcactaaaagccgcgcttgaagccaatgagcgagtcaaacttgagcaagtaggactgttcgtcgatggtgtggcagttgcccaaatcggtgaattgccttttgatattgtccgtatgcagaagagcgataaatccggtcctgtcgtcgaacctcaagtcgttacttgtaccaatgatgaagtctgcgctgccatcaaagatatttttgaagagaaccgcagtatcgttgagcctgcaggggcgcttcctgtcgctggtatgaaaaaataccttgaggctcatgacctacaaggcaaaaactgcgtcgccattatctgcggtgccaatatgaattttgatcgcttgcgctacatcgctgagcgtactgagattggtgagaaaaaagaagctgtctttggcgtgaccatccctgaacagactggcgctttcttaagcttctgccgtagtctgcacggtcgtaatatcactgagttcaattaccgtgctgatagtaaaaaatcaccggactctatggaacctgcagcaatcttcgtcggtattgcattaaaagaaggcgataaagagcgtcaaactattcgtacacaattggcagctgatggctatacagcacatgacttgaccgatgacgatgtcgccaaatcacatatccgctatctaattggtggtcatgcgcatgttgaaaatgaacagttattgcaagtcactttcccagaacgtcccggcgctttattgacctttttagaaaaattgggtaacgattttaatatcacacttttccattatcgcaatcatggcgctgctgaaggtcgcgtattggtcggtttgcaagcttctgaaagcaactcgcgccaactacaagatgccttgctggatatcggttacgactgcaccatgctcaatgacaatattggttatcagttatttttaaagtag

SEQ ID NO: 12514 - protein, 517 aa, Psychrobacter arcticus 273-4
MLSHWVRAILQATVYDVAIQTPLEAAPKLTQRFANDIRFKREDLQPVKSFKLRGAYNRISQLNDEQKARGVICASAGNHAQGVAYSARKLALNNIIVMPTTTPDIKVDAVRALGGNVDLYGDSFDEANRYAIDRAEREGLTFIPPYDDELVIAGQGTIGLELTQQWRNMDYVFVAVGGGGLISGVAAFLGEVAPHVKVIAVEADQSASLKAALEANERVKLEQVGLFVDGVAVAQIGELPFDIVRMQKSDKSGPVVEPQVVTCTNDEVCAAIKDIFEENRSIVEPAGALPVAGMKKYLEAHDLQGKNCVAIICGANMNFDRLRYIAERTEIGEKKEAVFGVTIPEQTGAFLSFCRSLHGRNITEFNYRADSKKSPDSMEPAAIFVGIALKEGDKERQTIRTQLAADGYTAHDLTDDDVAKSHIRYLIGGHAHVENEQLLQVTFPERPGALLTFLEKLGNDFNITLFHYRNHGAAEGRVLVGLQASESNSRQLQDALLDIGYDCTMLNDNIGYQLFLK

SEQ ID NO: 12515 - DNA, 1569 bp, Colwellia psychrerythraea 34H
  CDS (1)..(1569): transl_table=11
atgacagaaacactcaaacaagtatccccacaagagccattagattacctacgtcgtattctacttgcccctatttatgatctagcggttgaaactgaattgacggcttgcaacaagttgtcctcccggttaaataaccacatttatttaaaacgtgaagatcagcaacccgtacattcgtttaaattacgtggcgcttacaacaaactcaatagtttaactgaagagcaatgcattcatggtgttattgctgcttctgctggtaatcatgctcaaggtttagcactagcggctaaaaaacttggcatcaatgcaactatcgtcatgcccaaaacaacccctgatattaaggtggacaatgtaaggcgctttggtggtgaagtacgattagttggcaatagtttcaatgaagcacaagccgcttcaatcgaatatgccaaagcagaaaataaaacccttgttcatccctttgacgatgttgaagtcattattggccaaggcacggtagctaaagaattattacaacagctaccccaagctgatgtggtgtttatacctgttggcggtggtggacttcttgcgggtatggctgtttatttaaaacagctaaatccaagaactagaattatcggtgtagaagctgaagattcagcctgtttaaaagccgcacttgaagcaggagagcccgttgatttaactcaagtaggtttgtttgccgatggcgttgccgttaaacgtattggtgaaaatacttttggtttgattcaagagttttgtgatgaagtgatcaccgtttcaaccgatgaaatttgtgcatctatcaaagacatcttcgaagaaacacgtgttattgctgagcctgctggtgcattatctttggccggcttacaaaagtattgtctgactagcaaaggtggtgaatctttagcagcaatactttcaggcgcaaacatgaactttcataccttgcgttacgtatcagaacgctgtgaattaggtgaaaagaaagaagcgatattagcggttactattcccgaagaaaaaggtagttttaaacgtttttgtcaatccataggtaaccgtgccattaccgagtttaactatcgttattctggtaaacctagtgctgaaatttttgtcggtgttcgtcttggcggcagtgtcgaagaacgtcaagagttacttcaagggctagaaagcgcgaattatcaagtaagagattttactgataatgaattagctaaattacacgttcgctacatgattggcggaaaaacgcctaattcagctaaaaatactaattctgtaggtgaaaaggatgaacgactctttagttttgagtttcctgaacatccaggggcgttagaaaaattcttagccgctatgggggaatactggaatatcaccttatttcattaccgtaatcatggcgcagcatttggtcaggtacttgctggttttgatcttgagaaaagtcagcagaacgaattcttccaacatcttgatgaccttggctatcaatggcaagaagaaactgacaacctcgcttatcagacatttttgaattaa

SEQ ID NO: 12516 - protein, 522 aa, Colwellia psychrerythraea 34H
MTETLKQVSPQEPLDYLRRILLAPIYDLAVETELTACNKLSSRLNNHIYLKREDQQPVHSFKLRGAYNKLNSLTEEQCIHGVIAASAGNHAQGLALAAKKLGINATIVMPKTTPDIKVDNVRRFGGEVRLVGNSFNEAQAASIEYAKAENKTLVHPFDDVEVIIGQGTVAKELLQQLPQADVVFIPVGGGGLLAGMAVYLKQLNPRTRIIGVEAEDSACLKAALEAGEPVDLTQVGLFADGVAVKRIGENTFGLIQEFCDEVITVSTDEICASIKDIFEETRVIAEPAGALSLAGLQKYCLTSKGGESLAAILSGANMNFHTLRYVSERCELGEKKEAILAVTIPEEKGSFKRFCQSIGNRAITEFNYRYSGKPSAEIFVGVRLGGSVEERQELLQGLESANYQVRDFTDNELAKLHVRYMIGGKTPNSAKNTNSVGEKDERLFSFEFPEHPGALEKFLAAMGEYWNITLFHYRNHGAAFGQVLAGFDLEKSQQNEFFQHLDDLGYQWQEETDNLAYQTFLN

SEQ ID NO: 12517 - DNA, 1515 bp, Pseudomonas syringae pv. phaseolicola 1448A
  CDS (1)..(1515): transl_table=11
atgcttgaacactacgtcaagaaaatcctcacctcccgcgtgtacgacgtggctgtcgaaaccccgctgcacggcgctcgccagctgtccgagcggctgggaaaccgggtattgctcaagcgcgaagacctgcagccggtgttctccttcaagattcgcggcgcgtacaacaagctggcgcaattgactgcagaagaagccgcacgcggcgtggtcacggcctcggcgggtaaccacgcgcaaggtctggcactggcggcacgcgaactgggcattctggcgactatcgtcatgccgcgcacgaccccggaaatcaaggtcgaaggcgtgcgctcgcggggcgccacagtggtgctgcacggcgactccttccccgaagcgctggcctactcgctgaagctggtcgacgaacaaggcttcgtctacatccacccgtatgacgaccctgacacgattgccgggcaaggcaccgtggcgatggagattcttcgccagcagccggggcagctggacgcgatattcgtaccggtcggtggtggcggtttgatcgcgggtatcgcggcgtacgtcaaatacctgcgaccggagatcaaggttatcggcgtcgaaccggacgactccaactgcctgcaagcggcaatggcggcgggcgagcgcgtggtattgagccaggtcgggctgtttgccgatggtgtggcggtggcgcagatcggccatcacacctttgaagtgtgccgtcattatgtcgatgaagtgatcaccgtcagcaccgacgagatctgcgcggcgatcaaggacatttacgacgacacccgctcgatcgccgagccctccggcgcgctgggcgtggccgggatcaagaaatacgtcgagcagcgcggtatcagcggtcagacactggtggcgatcgactccggagccaacgtcaacttcgaccgtttgcgtcacgttgccgagcgcgccgagctgggcgaaggccgcgaggcgatcatcgccgtgaccattcccgagcagccgggcagcttcaaggcgttctgcgaggccatcggcaagcggcagatcaccgaattcaactaccgctaccacaccgatcgcgaggcgcacatcttcgtcggcgtgcagactcacccggagaacgacccgcgcagcgcgctgatcaccagcctgaccgggcagggttttccggtgctggacctgaccgacaacgaactggccaaactgcatattcgccacatggttggcgggcatgccgagcgggtcaatgatgaagtggtgctgcgcttcgagttcccggagcgaccgggcgcgctgttcaacttcctcaaccgtctgggcggccgctggaccatctcgatgttccactaccgcaaccacggcgctgctgacggccgggtggttgccgggctggtggtgtcggaggaagagcggcatctggtcggtactgctctggatgagattggttacccgtattgggacgagagcgagaacccggcgtacaggctgtttctgggctga

SEQ ID NO: 12518 - protein, 504 aa, Pseudomonas syringae pv. phaseolicola 1448A
MLEHYVKKILTSRVYDVAVETPLHGARQLSERLGNRVLLKREDLQPVFSFKIRGAYNKLAQLTAEEAARGVVTASAGNHAQGLALAARELGILATIVMPRTTPEIKVEGVRSRGATVVLHGDSFPEALAYSLKLVDEQGFVYIHPYDDPDTIAGQGTVAMEILRQQPGQLDAIFVPVGGGGLIAGIAAYVKYLRPEIKVIGVEPDDSNCLQAAMAAGERVVLSQVGLFADGVAVAQIGHHTFEVCRHYVDEVITVSTDEICAAIKDIYDDTRSIAEPSGALGVAGIKKYVEQRGISGQTLVAIDSGANVNFDRLRHVAERAELGEGREAIIAVTIPEQPGSFKAFCEAIGKRQITEFNYRYHTDREAHIFVGVQTHPENDPRSALITSLTGQGFPVLDLTDNELAKLHIRHMVGGHAERVNDEVVLRFEFPERPGALFNFLNRLGGRWTISMFHYRNHGAADGRVVAGLVVSEEERHLVGTALDEIGYPYWDESENPAYRLFLG

SEQ ID NO: 12519 - DNA, 1533 bp, Dechloromonas aromatica RCB
  CDS (1)..(1533): transl_table=11
atgcacccggattatctcgaaaaagttctcaacgcacaggtttacgacgtggcgatcgaaacgccgctcgacctggccagcaacctttccgcccgggtcggcaacaagattatcctgaagcgcgaagacatgcagcctgtcttttccttcaagctgcgtggcgcctacaacaagattgccagcctgtcggccgaaaagctgaagcgcggtgtcatctgtgcctcggccggcaaccacgcccaaggggtcgccctgtcggccagcaaactgggttgccgggcggtcatcgtcatgccgacctcgacgccgggcatcaagattaacgccgttaaatcgcggggcggcgaagtggtgctgcatggcgactccttcgacgaagcatacgcccatgcggtcgaactggaaaaaaccgaaaagctgaccttcgttcatcccttcgacgatccggaggtgatcgccggacagggcacggtcgccatggaaatcctgcgccagcattcgcgccacaacggcccgatcaccgccgtcttctgtgccatcggcggcggcgggctggctgctggcgtggccgcctacatcaagcgcctgcgtccggaaatcaaggtgatcggtgtcgaaaccttcgacgccgacgccatgaagcagtcgctggccgccggcaagcgcgttcgcgtcgatcaggtcgggttgttctccgacggcaccgccgtcaagctggtcggcgaagaaaccttccggctgtgcaaggaatacctggacgaggtcatcctggtcgacaccgatgccatctgtgccgccatcaaggatgttttcgaggatacccgctcgattctggaaccggccggggcgctggccgtcgccggcgccaaggaatatgcccgtcagcacaaactgaaggacaagaacctgatcgccatcacctccggcgccaacatgaatttcgaccgcctgcgcttcgttgccgagcgggccgaattcggcgaacagcgtgaagccgtcttcgcggtcacgctgcccgagaagccgggtgcctacaagaaattccttgggctgatcggtcaccgcaatgtgaccgaattcaactaccgcttccacaccgccagcgaagctcacgtcttcgtcggcgttcaggtggccgaccgcaaggaatcgctgaagctggtcgacagcctgcagaaacacggttacccgacgctcgacctgaccgatgacgaaatggccaagaaccatatccgtcacatggtcggcggccatgccccggcggtttgcgaaaagggcatgcgcgagttgctctatcgcttcgaattcccggaaaagccgggcgccctgatgaacttcctgacccagatgagcgccggctggaacatcagcctgttccactaccgcaaccatggcgccgactacggtcgcgtcctggtcggcatgcaggtaccgccggacgacatggggaaattcaaggaattcctgaccaatctcggctacgcccactgggacgagagccaaaacccggcatacaagctgttcctgggttaa

SEQ ID NO: 12520 - protein, 510 aa, Dechloromonas aromatica RCB
MHPDYLEKVLNAQVYDVAIETPLDLASNLSARVGNKIILKREDMQPVFSFKLRGAYNKIASLSAEKLKRGVICASAGNHAQGVALSASKLGCRAVIVMPTSTPGIKINAVKSRGGEVVLHGDSFDEAYAHAVELEKTEKLTFVHPFDDPEVIAGQGTVAMEILRQHSRHNGPITAVFCAIGGGGLAAGVAAYIKRLRPEIKVIGVETFDADAMKQSLAAGKRVRVDQVGLFSDGTAVKLVGEETFRLCKEYLDEVILVDTDAICAAIKDVFEDTRSILEPAGALAVAGAKEYARQHKLKDKNLIAITSGANMNFDRLRFVAERAEFGEQREAVFAVTLPEKPGAYKKFLGLIGHRNVTEFNYRFHTASEAHVFVGVQVADRKESLKLVDSLQKHGYPTLDLTDDEMAKNHIRHMVGGHAPAVCEKGMRELLYRFEFPEKPGALMNFLTQMSAGWNISLFHYRNHGADYGRVLVGMQVPPDDMGKFKEFLTNLGYAHWDESQNPAYKLFLG

SEQ ID NO: 12521 - DNA, 1536 bp, Prochlorococcus marinus str. NATL2A
  CDS (1)..(1536): transl_table=11
atggaggactatttacagaaaatactaagagctcgcgtttatgacgttgctgaagaaaccccattagaaaaggcgaaaaacttaagcaaaaaattcgaaaataacatttggtttaagagagaagaccttcaacctgtcttttcattcaagttaagaggtgcatttaaccgcatgtctcagctgagcaaggaagagctaaataaaggagtaattgcatcaagcgctggaaaccatgcacagggagttgcattaagtgcatcattcctgaaatgcagagcagtaattgttatgccactgacaactcccgttatgaaagtaagggcagttgaatcacacaaggcagaagttattcttttcggtgaaacttatgatgagtgctatggaaaggcactagatatatctaagaaagaaaatctaactttcatacatccatttgatgatcctgaagtcatagcaggacaaggaacaataggtctagaaatacttagacaaagtcaaactccgcctgatgcgatttacatagctgttggaggcgggggacttattgctggtgtaagtgcgtacgtaaaagcaatatggccagatacaaagattattggtgttgaaccagaagatgcctgcgcaatgacactttcattaaaggcaaatgagcctattgaacttgagagtattggcctttttgcagacggagttgcggtaaggaaggtaggagaaacgacgttctcgatttgcaaaaaaaatattgatgaaatggttactgtaagtactgacgaaatttgcgccgcgataaaagatgttttcgaggatacaagatcaattcttgaaccagcaggtgcattatctatagctggcttaaaaaaacatgttgtaaataatcagttaaaaaacaacaacctagttgcaatagcttgtggtgcaaatatgaattttgaacgactaagatttgtagcagaaagagccgaattaggtgaagaaaaagaagctatgattgcagtaggaattccagaaaaagcgggcagtttaaaacttttatgcaaaacacttgggtcacgcagtctaactgaatttagttacaggatttcagaaggtaaaacagctcaaatatttatgggtgtagaagtttcgaataataatgatagggaattattaacagctgagatcaaaaggggaggttttgattgtcatgatttaagtaatgatgaattatcaaaagttcatctcaggcatatggttggcggcaggctaccaagagcaatcagtcaaatatctaaaggagaatatatagaattgctatatagatttgagtttcctgaaaggcctggtgccttaatgagatttgttaactcaatgagaccagagtggacaataagcatcttccattatcgaaaccatggtgctgatactggaagaatagtaataggtgtattagtaaacgattccgagattcaagcttggaatgagtttgtcaaaaaaataggttataaaaattgggatgagacagataatccagcatataaattatttttaggtgcatag

SEQ ID NO: 12522 - protein, 511 aa, Prochlorococcus marinus str. NATL2A
MEDYLQKILRARVYDVAEETPLEKAKNLSKKFENNIWFKREDLQPVFSFKLRGAFNRMSQLSKEELNKGVIASSAGNHAQGVALSASFLKCRAVIVMPLTTPVMKVRAVESHKAEVILFGETYDECYGKALDISKKENLTFIHPFDDPEVIAGQGTIGLEILRQSQTPPDAIYIAVGGGGLIAGVSAYVKAIWPDTKIIGVEPEDACAMTLSLKANEPIELESIGLFADGVAVRKVGETTFSICKKNIDEMVTVSTDEICAAIKDVFEDTRSILEPAGALSIAGLKKHVVNNQLKNNNLVAIACGANMNFERLRFVAERAELGEEKEAMIAVGIPEKAGSLKLLCKTLGSRSLTEFSYRISEGKTAQIFMGVEVSNNNDRELLTAEIKRGGFDCHDLSNDELSKVHLRHMVGGRLPRAISQISKGEYIELLYRFEFPERPGALMRFVNSMRPEWTISIFHYRNHGADTGRIVIGVLVNDSEIQAWNEFVKKIGYKNWDETDNPAYKLFLGA

SEQ ID NO: 12523 - DNA, 1560 bp, Ralstonia eutropha JMP134
  CDS (1)..(1560): transl_table=11
atgaaccgcaagcccgcctcctccaaacccgactatctcaggaagatcctgaccgccaaagtgtatgacgtggcgcaggagaccgagctgacctttgcgcacaacctgtcggcgcgcaccggcaactcggtgtggttcaagcgcgaggacacgcagccggtgttctcgttcaagctgcgcggcgcatacaacaagatggcgtcgctgacgcaggaagaactcaggcgcggcgtgatcgcggcgtcggccggcaaccacgcgcagggcgtggcgctgtccgcggcgcgcctgcagtgccgcgcaatcatcgccatgccggtgaccacgccgcaggtgaagatcgacgcggtgcgcgagcgcggcggcaagtgggtggagatcgtgctgcacggcgattcgtacagcgacgcctacaaccatgcggcaatcctggagaagaagcacaagctgaccttcatccacccgttcgacgatccggaagtgatcgccggccagggcaccatcgcaatggaaatcctgcgccagcatccgggcccgatccacgcgatcttcgtcgcgatcggtggcggcgggctgatttcaggcatcgcgtcttacatcaaggccgtgcgccccgagatcaaggtgatcggcgtgcagaccgtggattccgacgcgatgaagcgctcggtcgaagcgggcaagcgcattgaactcaaggacgtgggcctgttctctgacggcaccgcggtgaagctggtcggcaaggaaacattccgcatcacgcgcgaactcgtcgatgagatcgtgctggtggacaccgatgcgatctgcgcgggagtgaaggatgtgttccaggacacgcgcagcattcttgaacccgcgggcgcgctggccgtcgccggcctcaagctgtatgccgagcgcgagaagctcaagggcgagcatctggtcgcgatcgcctgcggcgccaacatgaacttcgaccgcctgcgcttcgtcgccgagcgcgccgaagtgggcgaggcacgcgaaggcgtgttcgccgtcactattcccgaagagcgcggtagcttcaagcgcttctgcgaactggtgggcacgcgcagcgtcactgaattcaactaccgcattgccgaccggaacatcgcgcatatcttcgtcggcgtacagatcgccagccgcgccgagaacgacaagatcgccgcgaacttccgccgccatggcttcgacacgctggacctgtccaacgacgaactcgccaagcagcacatccgctacatggttggcggcgtctcgccgctcgcgcacgacgaactgctgtatcgcttcgaattccccgagcgcccgggcgcgctgatgaagttcctgtcgagcatgagcccgaactggaacatcagcctgttccattaccgcaaccagggtggcgacacgtccaacatcctggtcggcatccaggtgccgaagaacgaaaagcgcgctttccgcgcattcctttcgacgctgggttacgtacactgggacgagaccgagaacccggtctacaagctgttcctctccgaccgcggaaatcaagcatga

SEQ ID NO: 12524 - protein, 519 aa, Ralstonia eutropha JMP134
MNRKPASSKPDYLRKILTAKVYDVAQETELTFAHNLSARTGNSVWFKREDTQPVFSFKLRGAYNKMASLTQEELRRGVIAASAGNHAQGVALSAARLQCRAIIAMPVTTPQVKIDAVRERGGKWVEIVLHGDSYSDAYNHAAILEKKHKLTFIHPFDDPEVIAGQGTIAMEILRQHPGPIHAIFVAIGGGGLISGIASYIKAVRPEIKVIGVQTVDSDAMKRSVEAGKRIELKDVGLFSDGTAVKLVGKETFRITRELVDEIVLVDTDAICAGVKDVFQDTRSILEPAGALAVAGLKLYAEREKLKGEHLVAIACGANMNFDRLRFVAERAEVGEAREGVFAVTIPEERGSFKRFCELVGTRSVTEFNYRIADRNIAHIFVGVQIASRAENDKIAANFRRHGFDTLDLSNDELAKQHIRYMVGGVSPLAHDELLYRFEFPERPGALMKFLSSMSPNWNISLFHYRNQGGDTSNILVGIQVPKNEKRAFRAFLSTLGYVHWDETENPVYKLFLSDRGNQA

SEQ ID NO: 12525 - DNA, 1584 bp, Ralstonia eutropha JMP134
  CDS (1)..(1584): transl_table=11
atgccggcacaagccgccgatcttgccaccgaatatcgcgatgtccatgcgccggacgttgccgaccagaacagttacctcaggcgcatcctgaatgcgcgcgtctacgacgtcgcgcgcgagaccgagctcgagctggcgcgcaacctgtccgcgcgcaccggcaacgcaatctggctcaagcgcgaggacaaccagccggtgttctcgttcaagatccgcggcgcctacaacaagatggccaatctggatgcgcaggcactgcagcgcggcgtgatcactgcatcggcgggaaaccacgcgcagggcgtggcgctgtcggcccggcaccttggcgtgcgcgcggtgatcgtggtgccgacgacggcgccgcaggtcaaggtcgatgccgtgcgtgcgcatggcggccccacggtcgaagtggtccaggccggtgcgtcctataccgatgcctggcgccacgcaatgcatctgcagcagcagcttggcctgaccttcatcccggccttcgacgatcccgacgtgatcgcgggccagggcaccgtgggcgcggagatcctggcgcgccatcgcgggccgctcgacgccattttcgtgcctgtcgggggcggcagccttgctgcgggcatcgccacgtacgtgaaggcagtgcgccccgaaatccgcgtgatcggcgtgcagacgcaggactcatgcgcgatggcgcagtcgctgcgcgcgggacggcgcgtggaactcggcgatgtgggcctgttctcggatggcaccgcggtgaagctggtcggcgaggaaaccttccgtctatgccgggcgtatctcgatgatgtcatgacggtcagcacggatgccgtgtgcgccgccatcaaggatgtgttcgaggacacacgcagcgtgctcgaacccgccggtgcgctggccgttgccgccgccaagcaatacgcgcaacagcatggcctgcagggccggacgctggtggcggtgacgtcgggcgccaacgtcaacttcgagcgcatgcgcttcgtcgccgagcgcgcggaaattggcgatgcgcgcgaagccgtgttcgcggtgacgatgcccgaggcgcgcggcactttcctgcgcttctgcgatctcgccggcagccgcagcatcacagagttcagctaccgcattgccgatgcgcaaaccgcgcacgtgtttgtcggcatgcgcgtgcgggatcgtaccgaggctgcgcagattgccggcaccttcagcgcgcaaggctttgccacggtcaacctgaccggcgacgaactggccaagcagcacctgcggcatatggtgggcggccgctccgtactcgctggcggcgagagactgttccgctttgcattccccgagcggcccggcgcgttgatgacctttctgcgcgcgctgccggccgactggaacatcagcctcttccattaccgcaatgatggcggtgacgctgcgtctgtgcttgtcggcatccagatgcccgaggcggctgcacagcgcagcgacgcggtgctggccgcgctcggctacccgtactgggaggaaagcgccaatccggcctatcgcctgttcctggcatag

SEQ ID NO: 12526 - protein, 527 aa, Ralstonia eutropha JMP134
MPAQAADLATEYRDVHAPDVADQNSYLRRILNARVYDVARETELELARNLSARTGNAIWLKREDNQPVFSFKIRGAYNKMANLDAQALQRGVITASAGNHAQGVALSARHLGVRAVIVVPTTAPQVKVDAVRAHGGPTVEVVQAGASYTDAWRHAMHLQQQLGLTFIPAFDDPDVIAGQGTVGAEILARHRGPLDAIFVPVGGGSLAAGIATYVKAVRPEIRVIGVQTQDSCAMAQSLRAGRRVELGDVGLFSDGTAVKLVGEETFRLCRAYLDDVMTVSTDAVCAAIKDVFEDTRSVLEPAGALAVAAAKQYAQQHGLQGRTLVAVTSGANVNFERMRFVAERAEIGDAREAVFAVTMPEARGTFLRFCDLAGSRSITEFSYRIADAQTAHVFVGMRVRDRTEAAQIAGTFSAQGFATVNLTGDELAKQHLRHMVGGRSVLAGGERLFRFAFPERPGALMTFLRALPADWNISLFHYRNDGGDAASVLVGIQMPEAAAQRSDAVLAALGYPYWEESANPAYRLFLA

SEQ ID NO: 12527 - DNA, 1518 bp, Thiobacillus denitrificans ATCC 25259
  CDS (1)..(1518): transl_table=11
atgagccacccagacgactacctcgaacgcattctcacctcgcgcgtctatgacgtcgcgatcgaatcgccgctcgaggtcgcgcacaatctttcgcgtcgcctcgacaaccagatcctgctcaagcgcgaggacctgcagccggtgttctcgttcaagtgccgcggcgcgtacaacaagatggcgaagttgaccgccgcgcaactggcgcgcggcgtcgtcgcggcgtccgccggcaaccacgcgcagggcgtcgctttggcggccgaaaagctcggcgcgacggccaccatcgtcatgccggcgacgaccccgaggatcaaggtcgacgcggtcgcggcgcgcggcgcccgcgtgatcctgcacggcgacaactacgacgaagcctacgagcatgcgatgcagctggcgaaggaggcgaaggcgaccttcgtccatccctacgacgatcccgacgtgatcgcgggccagggcacggtcgcgatggagttgctgcgccagcacccgggcccgatccactccgtctacatcccggtcgggggcggcggtctgatcgcgggtatggccgcctacatcaagcggctgcggccgcagatcaagatcgtcggcgtcgagcccgaggacgccgacgcgatggcgcgttcgctgtgcaagaacacgcgcgtgacgctgccgcgcgtcggcatttttgccgacggcgtcgcggtaaaaaaggtcggcaaggaaaccttccggctggcgcagctctatgtcgacgaaatcatccgcgtgaacaacgacgcgatctgcgcagcgatcaaggacgtcttcgaggacacccgttcgatcctcgaacccgcgggcgcgctttcgatcgccggcatgaaagcggcgatcgccggtgacaggctgaaggggaagacgcttgccgccgtggcgtctggcgccaacatgaacttcgaccgcctgcgccatattgcggagcgcgcggaactgggcgagaagcgcgaagcgattctcgcggtgaccattcccgaaacgccgggcagcttcaagaccttctgcggcctgctcggcgcgcgcaacatcaccgaattcaactatcgctacgccgatccgcgtgtggcgcgggtgttcgtcggactgtccgtacccggtgagggcgagagcaagcgcgtcgtcgaactgctcgggcggcacggcctcgaagcgatcgatctgagcgacaacgaaatggccaagctccacatccgccacctggtcggcgggcgcgcgcccgacgcggtgaacgaggtgctgtaccgcttcgagtttcccgagcgcccgggcgcgctgatgcagttcctgcaaagcatgagccgcggctggaacatcagcctctttcattatcgcaaccacggcaccgactacgggcgcgtgctggtcggcatccaggtgccggacaaggaaaaaccggtctttcagaaattcctcgaaggcctcggctaccgctactgggacgagtcgcgcaacccggcgtacacgctcttcctgggctga

SEQ ID NO: 12528 - protein, 505 aa, Thiobacillus denitrificans ATCC 25259
MSHPDDYLERILTSRVYDVAIESPLEVAHNLSRRLDNQILLKREDLQPVFSFKCRGAYNKMAKLTAAQLARGVVAASAGNHAQGVALAAEKLGATATIVMPATTPRIKVDAVAARGARVILHGDNYDEAYEHAMQLAKEAKATFVHPYDDPDVIAGQGTVAMELLRQHPGPIHSVYIPVGGGGLIAGMAAYIKRLRPQIKIVGVEPEDADAMARSLCKNTRVTLPRVGIFADGVAVKKVGKETFRLAQLYVDEIIRVNNDAICAAIKDVFEDTRSILEPAGALSIAGMKAAIAGDRLKGKTLAAVASGANMNFDRLRHIAERAELGEKREAILAVTIPETPGSFKTFCGLLGARNITEFNYRYADPRVARVFVGLSVPGEGESKRVVELLGRHGLEAIDLSDNEMAKLHIRHLVGGRAPDAVNEVLYRFEFPERPGALMQFLQSMSRGWNISLFHYRNHGTDYGRVLVGIQVPDKEKPVFQKFLEGLGYRYWDESRNPAYTLFLG

SEQ ID NO: 12529 - DNA, 1512 bp, Anabaena variabilis ATCC 29413
  CDS (1)..(1512): transl_table=11
atgctttgcgactacctggtacaaattctgactgctcgtgtgtatgatgttgcccaggaatcacctctggagtatgcccccaatctttcagccagactgaataataaactattgctgaagcgggaagatatgcagtctgtgttttcctttaagctgcggggtgcttacaacaagatggtgaatctaacacccgatttactagcacagggtgtaattgctgcttctgcggggaatcatgcccaaggtgtggcactaggtgcaaaacagctagggacaagagcaattattgttatgccggttactactccccaggtgaaagtagatgcagttaaagcacgagggggagaggtggtattgcatggggatacctatgatgatgcctatgcctacgcgcggcagttggaggcagagaaaggtttaacatttattcacccctttgatgatcctcatgtaattgcgggacagggaactattgggatggaaattctcagacaatatcagcaacctattcatgcgatttttgttgctattggcgggggcggtttgatttcggggattgcggcttatgtaaaacggttacgtccagaaattaaaattattggggttgagccggttgatgctgatgcaatgaaccaatccttgcaagctggtaaacgggtgcgattgtcacaggtgggtttatttgctgatggggtggcagtgcgggaggtgggagaagaaactttccgactgtgtcaggaatatgtagacgaaattattttggtggatacagatgacacctgtgcagccattaaggatgtatttgaagatacccgatctattttagaaccagcaggggcattggcgatcgctggcgctaaggcttatgtagaacgagaacaaatccaaggacaaactttagtcgctgtcgcctgcggtgcaaatatgaattttgaccgtttgcgctttgttgcagaacgggcagaatttggtgaacgccgcgaagctatctttgcagtgacaattcctgaaacacctgggagtctgcggaagttttgcgaatgtattggtagacgcaatttgacagagtttaactatcgcattgctgatgaaaaaattgcccatatttttattgggatgcagattcaaaaccgtgctgacaaaatccacatggtggagacttttgcagaatgtggttttgaaatccttgatttaacagatgatgaactgacaaaactgcatttgcgccacatggtgggcggacactctcccctagcccataatgaattactctaccgttttgaatttccggaacgtcctggagcgttaatgaaattcgttgcttccatgagtcccaattggaatatcagtatgttccactaccgcaacaatggctcagactacgggcgcatcgtggtaggaatgcaggttccaccgcaggaaatggaagaatggcaagcatttcttgattccctcggctaccagtattgggatgaaagccagaacccagcctataagttatttttgggataa

SEQ ID NO: 12530 - protein, 503 aa, Anabaena variabilis ATCC 29413
MLCDYLVQILTARVYDVAQESPLEYAPNLSARLNNKLLLKREDMQSVFSFKLRGAYNKMVNLTPDLLAQGVIAASAGNHAQGVALGAKQLGTRAIIVMPVTTPQVKVDAVKARGGEVVLHGDTYDDAYAYARQLEAEKGLTFIHPFDDPHVIAGQGTIGMEILRQYQQPIHAIFVAIGGGGLISGIAAYVKRLRPEIKIIGVEPVDADAMNQSLQAGKRVRLSQVGLFADGVAVREVGEETFRLCQEYVDEIILVDTDDTCAAIKDVFEDTRSILEPAGALAIAGAKAYVEREQIQGQTLVAVACGANMNFDRLRFVAERAEFGERREAIFAVTIPETPGSLRKFCECIGRRNLTEFNYRIADEKIAHIFIGMQIQNRADKIHMVETFAECGFEILDLTDDELTKLHLRHMVGGHSPLAHNELLYRFEFPERPGALMKFVASMSPNWNISMFHYRNNGSDYGRIVVGMQVPPQEMEEWQAFLDSLGYQYWDESQNPAYKLFLG

SEQ ID NO: 12531 - DNA, 1515 bp, Pseudomonas fluorescens PfO-1
  CDS (1)..(1515): transl_table=11
atgctcgaacagtacgtcaagaagatcctcacctcgcgcgtttatgacgttgccgtagaaaccccgctgcagaacgcccgccagctctccgagcggctgggcaacgacatctggctcaagcgcgaagacttgcagccggtgttctcgttcaagattcgcggtgcctacaacaagctgacccagttgagcgacgaagagcgcgctcgcggcgtggtcaccgcgtcggcgggcaaccatgcacagggcctggccctggcggcgaaagtgttgggcgtgaaagcgaccatcgtgatgcccaagaccaccccggagatcaaggtcgaaggcgtgcgctcgcgcggtggcaaagtggtgctgcacggcgattccttcccggaagcgctggcctactcgctgaagctggtcgacgaaaaaggctacgtctacatccacccgtacgacgatccgcacaccattgccgggcagggcaccgtggcgatggaaattctgcgccagcacccgcagccgctggatgcgattttcgttccggtgggcggcggcggtctgatcgccggcatcgcggcctacgtgaaatacctgcgtccggacatcaaggtcatcggcgtcgagcccgacgactccaactgcctgcaagcggcgatggcggcaggcgaacgcgtggtgctgccgactgtaggcatcttcgccgacggcgtggcggtggcgcagatcggccagcacaccttcgatatctgcaaggattacgtcgacgaggtgatcaccgtcagcaccgacgagatttgcgcggcgatcaaggacatctacgacgacacccgttcgatcaccgaaccggccggcgccctgggcgtggccgggatcaagaagtatgtcgagcagcgcggcgtcagcggccagaccttcgtcgccatcgactccggggccaacgtcaacttcgaccgcttgcgccacgtcgccgagcgcgccgaactgggtgaaggccgcgaagcgatcatcgccgtgaccatcccggagaaggccggcagcttcaaggccttctgcgaggccatcggcaagcgccagatcaccgaattcaactaccgctataacaatggcagcgaagcgcacatcttcgtcggcgtgcagacccacccggacaacgacccgcgcagtgctttgctggcgagcctgaccgaacagggtttcccggtgctcgacctgaccgacaacgaactggccaaactgcacatccgccacatggtcggcggtcgcgccgcgcacgtggtcgatgaagtggtgctgcgcttcgagttcccggagcgtccgggcgcgctgttcaacttcctcaacaagctcggcgggcgctggaacatctcgatgttccactaccgcaaccacggtgcagcggacggtcgtgtggtggcgggtctgcaagtgccccacgacgagcgtcatctggtgcccgcagcccttgaggaaatcggctacccatactgggacgaaagcgacaacccggcctatcagctgtttcttggctga

SEQ ID NO: 12532 - protein, 504 aa, Pseudomonas fluorescens PfO-1
MLEQYVKKILTSRVYDVAVETPLQNARQLSERLGNDIWLKREDLQPVFSFKIRGAYNKLTQLSDEERARGVVTASAGNHAQGLALAAKVLGVKATIVMPKTTPEIKVEGVRSRGGKVVLHGDSFPEALAYSLKLVDEKGYVYIHPYDDPHTIAGQGTVAMEILRQHPQPLDAIFVPVGGGGLIAGIAAYVKYLRPDIKVIGVEPDDSNCLQAAMAAGERVVLPTVGIFADGVAVAQIGQHTFDICKDYVDEVITVSTDEICAAIKDIYDDTRSITEPAGALGVAGIKKYVEQRGVSGQTFVAIDSGANVNFDRLRHVAERAELGEGREAIIAVTIPEKAGSFKAFCEAIGKRQITEFNYRYNNGSEAHIFVGVQTHPDNDPRSALLASLTEQGFPVLDLTDNELAKLHIRHMVGGRAAHVVDEVVLRFEFPERPGALFNFLNKLGGRWNISMFHYRNHGAADGRVVAGLQVPHDERHLVPAALEEIGYPYWDESDNPAYQLFLG

SEQ ID NO: 12533 - DNA, 1524 bp, Burkholderia sp. 383
  CDS (1)..(1524): transl_table=11
atggcatcccacgattacctgaagaaaatcctcaccgcgcgcgtctacgacgtcgcgatcgagacggaactcgaatccgcccgcatcctgtcggcccggctgcgcaatgcggtctacctgaagcgcgaggacaaccagccggtgttctcgttcaagctgcgcggcgcatacaacaagatggcgcacattccggcggacgcgctcgcgcgcggcgtgattacggcatcggccggcaaccacgcgcagggtgtcgcgttctcggcggcccggatgggcgtgaaggccgtgatcgtcgtgcccgtcacgacgccgcaggtgaaggtcgatgcggtgcgtgcgcacggcggcccgagcgtcgaggtgatccaggccggcgagtcgtacagcgatgcgtatgcacacgcggtcaaggtgcaggaagagcgcggcctcacgttcgtccacccgttcgacgatccgtacgtgatcgccggccagggcacgatcgcgatggaaatcctgcgccagcaccagggcccgatccatgcgatcttcgtgccgatcggcggcggcgggctcgcgtccggcgtcgcggcctacgtgaaggcggtgcgcccggagatcaaggtgatcggcgtgcaagccgaagattcgtgcgcgatggcgcagtcgctggaagccggcaggcgtgtcgagctgagcgaggtcggcctgttcgcggacggtaccgccgtgaagctggtcggcgaggaaaccttccgcctctgcagcgaatacctcgacggcgtcgtgacggtgaacaccgacgcgctgtgcgcggcgatcaaggacgtcttccaggacacgcgcagcgtgctcgagccgtccggcgcgctcgcggtcgcgggcgcgaagctctacgcggaacgcgaaggcatcgagaaccagacgctcgtcgcggtcacgtccggcgcgaacatgaacttcgaccggatgcgcttcgtcgccgagcgcgcggaagtgggtgaagcgcgcgaagccgtgttcgcggtcacgatccccgaagagcgcggcagcttcaagcgcttctgctcgctcgtcggcgatcgcaacgtcaccgagttcaactaccggatcgccgatgcgcaggccgcgcacatcttcgtcggcgtgcagatcaagcgtcgcggcgaatcggccgagatcgccgcgaacttcgaatcgcacggcttcaagagcgtcgacctgacgcacgacgagctgtcgaaggaacacatccgctacatggtgggcggccgctcgccgctcgcgctcgacgagcgcctgttccgcttcgaattcccggagcggccgggcgcgctgatgaagttcctgtcgtcgatggcgccggactggaacatcagcctgttccactaccgcaaccagggcgcggactacagctcgatcctcgtcgggctgcaggtgccgcaggccgatcgcgccgaattcgaacgcttcctcgcggcactcggctatccgtatgtcgaggagagcgccaacccggcttaccgcctcttcctgtcgtaa

SEQ ID NO: 12534 - protein, 507 aa, Burkholderia sp. 383
MASHDYLKKILTARVYDVAIETELESARILSARLRNAVYLKREDNQPVFSFKLRGAYNKMAHIPADALARGVITASAGNHAQGVAFSAARMGVKAVIVVPVTTPQVKVDAVRAHGGPSVEVIQAGESYSDAYAHAVKVQEERGLTFVHPFDDPYVIAGQGTIAMEILRQHQGPIHAIFVPIGGGGLASGVAAYVKAVRPEIKVIGVQAEDSCAMAQSLEAGRRVELSEVGLFADGTAVKLVGEETFRLCSEYLDGVVTVNTDALCAAIKDVFQDTRSVLEPSGALAVAGAKLYAEREGIENQTLVAVTSGANMNFDRMRFVAERAEVGEAREAVFAVTIPEERGSFKRFCSLVGDRNVTEFNYRIADAQAAHIFVGVQIKRRGESAEIAANFESHGFKSVDLTHDELSKEHIRYMVGGRSPLALDERLFRFEFPERPGALMKFLSSMAPDWNISLFHYRNQGADYSSILVGLQVPQADRAEFERFLAALGYPYVEESANPAYRLFLS

SEQ ID NO: 12535 - DNA, 1530 bp, Synechococcus sp. CC9605
  CDS (1)..(1530): transl_table=11
atgaccgattacctgcagcggatcctgcgtgcccgcgtctacgacgtggcgcgggaaacccccttggatcccgcccccaatctgagccgccgcctgaacaacacggtctggctgaagcgtgaggatctccagccggtgttctcgttcaagctgcgcggcgcttacaaccgcatggcgcagctcagcgacgacgaactcgagcgcggtgtgattgcctccagcgccgggaaccatgcccagggcgtcgcccttagtgcccagcggctcggctgtcgagcggtgatcgtgatgccgagcaccacacccgaggtgaaagtgcgcgccgtgcgggcccttggtggtgacgtggtcctccatggcgagacctacgacgagtgctccgctgaagcgcagcgacgctgcaaagccgatggacttacgttcattcacccgttcgacgatccggaagtgatcgcaggccagggcacgatcgggatggagatcatgcgccaggccgagcagccacccaacgcgatctatgtggccgtaggtggaggtggcctgatcgcaggcatcgccgcctacgtcaaacggctgtggccggaaacggaggtgatcggcgtggagccggtcgatgccgatgccctgagccgctccctcgagcagggccagcgggtagaactggaacaggtggggctgtttgccgatggcgtcgccgtgagaaaggtgggcgaacacaactttgagttggcccagcagttcgtcgatcacatggtgcgggtcgacaccgatgccatctgtgccgcgatcaaggacgtctttgaagacacccgttccatcctggagcccgccggtgccctggcagttgccgggctcaaacaggacgtggccgagcgccaactggaggggcgccatctggtggcggtggcctgcggggccaacatgaatttcgatcgcctgcgcttcatcgcggaacgggctgagctcggggaagagcgggaagcgatgctggccgtggagattcccgaatcacccggcagcctgaggcggctgtgcgaactgctgcgggagcgcagcctcacggaattcagctatcgcatgaccgatggcacttcggcgcagatcttcatcggtgtgcaggtgtacgacgacaacgaccgtgcatcactgctgagccaactggagcgtgggggcttcccatgcctcgatctcagcgagaacgaatttgccaaggttcacctgcgccacatggttgggggccgtctgccggcttcagcgcgcacggcctgtgccggggaatgcaaagagctgctgtatcgcttcgaatttcccgaacgaccgggcgccttgatgagcttcgtggatgctctgcaccccggctggagcatcagcatcttccactacagaaatcacggtgctgacgtggggcgcatcgttgttggcgtgctggtgccggaaaaggagatgcagggctggaccgaattcctcaatgacctgggctatcgccactgggatgaaaccaacaaccccgcctatgggctgttcctctga

SEQ ID NO: 12536 - protein, 509 aa, Synechococcus sp. CC9605
MTDYLQRILRARVYDVARETPLDPAPNLSRRLNNTVWLKREDLQPVFSFKLRGAYNRMAQLSDDELERGVIASSAGNHAQGVALSAQRLGCRAVIVMPSTTPEVKVRAVRALGGDVVLHGETYDECSAEAQRRCKADGLTFIHPFDDPEVIAGQGTIGMEIMRQAEQPPNAIYVAVGGGGLIAGIAAYVKRLWPETEVIGVEPVDADALSRSLEQGQRVELEQVGLFADGVAVRKVGEHNFELAQQFVDHMVRVDTDAICAAIKDVFEDTRSILEPAGALAVAGLKQDVAERQLEGRHLVAVACGANMNFDRLRFIAERAELGEEREAMLAVEIPESPGSLRRLCELLRERSLTEFSYRMTDGTSAQIFIGVQVYDDNDRASLLSQLERGGFPCLDLSENEFAKVHLRHMVGGRLPASARTACAGECKELLYRFEFPERPGALMSFVDALHPGWSISIFHYRNHGADVGRIVVGVLVPEKEMQGWTEFLNDLGYRHWDETNNPAYGLFL

SEQ ID NO: 12537 - DNA, 1209 bp, Geobacter metallireducens GS-15
  CDS (1)..(1209): transl_table=11
atgctcccctacaccctgatccaggaagcgtcagaccgcctcaaaaagcgggtccggcgcaccgagctgatccactcccaccacttcagcgagcggttcggcttcccccttctcttcaagtgcgagaacctccagcggaccggcgccttcaagatccggggagccctcaacttcatgacctcccagccccgggaggccctgacaaagggggtcatcaccgcctcggccggcaaccacgcccagggggtcgccttttccgccgacctcctgggggcgcaggccaccgtcttcatgcccgagagcaccccgccccagaaggtgcaggccaccaaggagtatggcgccgacgtagtcctcaccggcaggaacttcgacgaggcctatgccgccgcagtccaggcccagaaggagaccggcgccctcttcgtgcaccccttcgacgatcccctggtcatggccggccagggtaccatcggcctcgaaatcctcgatgaactccccgacgtctcagccatcctggtccccatcgggggaggcgggctcatcgccggcattgccacggcggtaaaggagactcacccccacgtgcggatcatcggcatcgaatccaaggccgcaccctccatgcacttctccctcaagaagggaaagatcgtggaggcccccctcacggttacccttgccgacgggatcgccgtgaagaaggtgggacggaacaccttccccatcatccgggaactggtggacgacgtggtgctcgtggaggaagaggagatcgccctggccatcgtggggctcctggagcggacgaaactcctcgtggaaggggctggagccgtgaccctggcggcccttctgaacggcaaggcggggaaactgccggggaagacggtctgcgtcctctccggcggaaacatcgacgtgaagaccatttccaccgtggtggagcggggccttgtggcggcggggcgctatctgaagctgcaggtggtgctggacgacattcccggttccctggcggggctggccacggaggtggctgctgtccgggccaacatcttcctcatcaaccacgagcgccgctccctggaccttcccctcggcaagaccgaggtccttctggaactggagacccggggctacgaacacatccaggagatcatcggccacctggggcgacggggctatgaggtggatgtcgtaaaatga

SEQ ID NO: 12538 - protein, 402 aa, Geobacter metallireducens GS-15
MLPYTLIQEASDRLKKRVRRTELIHSHHFSERFGFPLLFKCENLQRTGAFKIRGALNFMTSQPREALTKGVITASAGNHAQGVAFSADLLGAQATVFMPESTPPQKVQATKEYGADVVLTGRNFDEAYAAAVQAQKETGALFVHPFDDPLVMAGQGTIGLEILDELPDVSAILVPIGGGGLIAGIATAVKETHPHVRIIGIESKAAPSMHFSLKKGKIVEAPLTVTLADGIAVKKVGRNTFPIIRELVDDVVLVEEEEIALAIVGLLERTKLLVEGAGAVTLAALLNGKAGKLPGKTVCVLSGGNIDVKTISTVVERGLVAAGRYLKLQVVLDDIPGSLAGLATEVAAVRANIFLINHERRSLDLPLGKTEVLLELETRGYEHIQEIIGHLGRRGYEVDVVK

SEQ ID NO: 12539 - DNA, 1548 bp, Prochlorococcus marinus str. MIT 9312
  CDS (1)..(1548): transl_table=11
atgtatatgaatgattattttgaaaaaatacttcaggctgaagtctatgaagtagcaaaaaaaacaccactagaaaaagcacataatttaagtaataagcttaataatgaagttttcttaaaaagagaagatcttcaagatgtgttttcattcaaaataagaggggcatttaacaaaatgagtaagctcactaaatcgcagcttgctcaaggagtaattacatcaagtgctggaaatcatgctcagggggtagcactaagtgctctcaagttaaattgccaagcaaccatattaatgccccttacaacgcctctagtaaaaattaatgcagtaaaaaatctaaaggcaaaagttatattatatggagataattatgatgaaacttatagagaggcaataaggattagcaaagaaagaaatttatgttttattcatccttttgatgatcctgaagtaatagcaggacaaggaactatagctattgaacttgaacaacaattaaaagacaaaccttatgctatttatattgctgttggtggtggcggattgatatcaggaatatccttatacattaagaaagtttggcctgaagtaaaaataattggagtagagcctcaagacgcagatgctatgtcaaaatccttagaagaatcaaaaattgttgaattagcttcagtaggacagtttgcagatggagtagccgttaaaaaagttggtaataatacttttgatattggaagaaaatatatagataaaatgattagggttaacacagatgaaatatgtgctgcaatcaaagatgtttttgaagacactagatcgatactagagcctgcaggtgcattatcaattgctggaatgaaaaaagatattttaaattcgaatcattcaaataaaaacatggttgctattgcatgcggtgcaaatatgaactttgagaggcttagatttgtagcagaaagagcggaacttggagaatgcaaagaggttatgatggcagttgaaattcctgaatgtgctggtagtttaatagatttttgtaagttgcttaaaaatagaaatttaactgaatttagctatagaatgtccaactctataaatgcacagatctttgtaggagttgaagttaatggaatagttgataaaaaaattctcttggatgaatttaggaattcgcagtacaaatttattgatttaagtgaggatgaattatccaaaaatcatctaagacatatggtaggtggacgattaccaaagaatctcaaagaaattaataatagaagttttgttgagttgttatatagatttgaatttcccgaaaaacctggagcattaataaatttcttaaataatatgaaatctaattggtcaataagtgtatttcattatcggaattacggtgctgatgtaggaaaaattgttattggagtattaatcgataaaagtgaaattacggaatggaacaattttgtaaaatttttaggttacaaatactgggatgaaactaaaaacgatacatataaattattccttggtgcaccagaataa

SEQ ID NO: 12540 - protein, 515 aa, Prochlorococcus marinus str. MIT 9312
MYMNDYFEKILQAEVYEVAKKTPLEKAHNLSNKLNNEVFLKREDLQDVFSFKIRGAFNKMSKLTKSQLAQGVITSSAGNHAQGVALSALKLNCQATILMPLTTPLVKINAVKNLKAKVILYGDNYDETYREAIRISKERNLCFIHPFDDPEVIAGQGTIAIELEQQLKDKPYAIYIAVGGGGLISGISLYIKKVWPEVKIIGVEPQDADAMSKSLEESKIVELASVGQFADGVAVKKVGNNTFDIGRKYIDKMIRVNTDEICAAIKDVFEDTRSILEPAGALSIAGMKKDILNSNHSNKNMVAIACGANMNFERLRFVAERAELGECKEVMMAVEIPECAGSLIDFCKLLKNRNLTEFSYRMSNSINAQIFVGVEVNGIVDKKILLDEFRNSQYKFIDLSEDELSKNHLRHMVGGRLPKNLKEINNRSFVELLYRFEFPEKPGALINFLNNMKSNWSISVFHYRNYGADVGKIVIGVLIDKSEITEWNNFVKFLGYKYWDETKNDTYKLFLGAPE

SEQ ID NO: 12541 - DNA, 1608 bp, Burkholderia thailandensis E264
  CDS (1)..(1608): transl_table=11
atgcagtcagacgacgccgtcacggaaacccccgaagccctcacgcccgacgcgcgcccgcgcgcgacgatcgcgccgcgcgcgggcacgctcgacgattacctcaagctgacgctgaacgcgcgcgtctacgacgtcgcgcgcgagacggcgctcgagcgcgcgcgcaacctgtccgcgcggctcgacaacgccgtctacctgaagcgcgaggacaaccagccggtgttctcgttcaagctgcgcggcgcgtacaacaagatggcgcacatccccgccgacgcgctcgcgcgcggcgtgatcaccgcgtcggcgggcaaccacgcgcaaggcgtcgcgttctcggccgcgcggatgaacgtgaaggcggtgatcgtcgtgccggtgacgacgccgcagctgaaggtggacgcggtgcgcgcgcacggcgggccgaccgtcgaggtgatccaggcgggcgaatcgtacagcgacgcgtacgcgcacgcggtgaaggtgcaggccgagcgcggcctcacgttcgttcatccgttcgacgatccgtacgtgatcgcgggccagggcacggtcgcgatgggaatcctgcgccagcatcaggggccgattcacgcgatcttcgtgccgatcggcggcggcgggctcgcggcgggcgtcgccgcgtacgtgaaggcggtgcgccccgagatcaaggtgatcggcgtgcagaccgacgattcgtgcgcgatgaagcaatcgctcgcggcgggcaagcgcgtcgagctcgccgaggtcggcctcttctcggacggcacggcggtcaagctcgtcggcgaggagacgttccgcctctgcgcggcgtatctcgacgacgtcgtgaccgtcgacaccgacgcgctttgcgcggcgatcaaggacgtgttccaggacacgcgcagcgtgctcgagccggccggctcgctcgccgtcgcgggcgcgaagcggtatgcggagcgcgcgggcatcgagggcgagacgctcgtcgcgatcacgtccggcgcgaacatgaacttcgaccggatgcgcttcgtcgccgagcgcgccgaggtgggcgaggcgcgcgaggcggtgttcgcggtgacgatccccgaggagcgcggcagcttcaggcgcttctgctcgctcgtcggcgagcgcaacgtgaccgagttcaactaccggatcgccgatgcgcaatcggcgcacatcttcgtcggggtgcagatccggcggcgcgacgaaacggacgaaatcgcgcgcaacttcgccgcgcacggcttcacgaccgtcgatctgtcgggcgacgagctgtcgaagcagcacatccgctacatggtgggcggccgctcgccgctcgcgcacgacgagcggctgttccgcttcgaatttcccgagcggccgggcgcgctgatgaagttcctgtcgtcgatggcgcccgactggaacatcagcctgtttcactaccggaaccagggggccgattacagctcgatcctcgtcggcctgcaggtaccgcaggcggaccacgcggcgttcgaccgctttctcgcggcgctcggctatccgtgtcgcgaggaatccggcaatcccgcctaccggctgtttctcggctga

SEQ ID NO: 12542 - protein, 535 aa, Burkholderia thailandensis E264
MQSDDAVTETPEALTPDARPRATIAPRAGTLDDYLKLTLNARVYDVARETALERARNLSARLDNAVYLKREDNQPVFSFKLRGAYNKMAHIPADALARGVITASAGNHAQGVAFSAARMNVKAVIVVPVTTPQLKVDAVRAHGGPTVEVIQAGESYSDAYAHAVKVQAERGLTFVHPFDDPYVIAGQGTVAMGILRQHQGPIHAIFVPIGGGGLAAGVAAYVKAVRPEIKVIGVQTDDSCAMKQSLAAGKRVELAEVGLFSDGTAVKLVGEETFRLCAAYLDDVVTVDTDALCAAIKDVFQDTRSVLEPAGSLAVAGAKRYAERAGIEGETLVAITSGANMNFDRMRFVAERAEVGEAREAVFAVTIPEERGSFRRFCSLVGERNVTEFNYRIADAQSAHIFVGVQIRRRDETDEIARNFAAHGFTTVDLSGDELSKQHIRYMVGGRSPLAHDERLFRFEFPERPGALMKFLSSMAPDWNISLFHYRNQGADYSSILVGLQVPQADHAAFDRFLAALGYPCREESGNPAYRLFLG

SEQ ID NO: 12543 - DNA, 1524 bp, Burkholderia thailandensis E264
  CDS (1)..(1524): transl_table=11
atggcttcccacgattatctgaagaaaatcctgaccgcccgggtatacgacgtcgcgctcgaaaccgaactcgagcgcgcgcgcaacctgtccgcgcggctcgacaacgccgtctacctgaagcgcgaggacaaccagccggtgttctcgttcaagctgcgcggcgcgtacaacaagatggcgcacatccccgccgacgcgctcgcgcgcggcgtgatcaccgcgtcggcgggcaaccacgcgcaaggcgtcgcgttctcggccgcgcggatgaacgtgaaggcggtgatcgtcgtgccggtgacgacgccgcagctgaaggtggacgcggtgcgcgcgcacggcgggccgaccgtcgaggtgatccaggcgggcgaatcgtacagcgacgcgtacgcgcacgcggtgaaggtgcaggccgagcgcggcctcacgttcgttcatccgttcgacgatccgtacgtgatcgcgggccagggcacggtcgcgatggaaatcctgcgccagcatcaggggccgattcacgcgatcttcgtgccgatcggcggcggcgggctcgcggcgggcgtcgccgcgtacgtgaaggcggtgcgccccgagatcaaggtgatcggcgtgcagaccgacgattcgtgcgcgatgaagcaatcgctcgcggcgggcaagcgcgtcgagctcgccgaggtcggcctcttctcggacggcacggcggtcaagctcgtcggcgaggagacgttccgcctctgcgcggcgtatctcgacgacgtcgtgaccgtcgacaccgacgcgctttgcgcggcgatcaaggacgtgttccaggacacgcgcagcgtgctcgagccggccggctcgctcgccgtcgcgggcgcgaagcggtatgcggagcgcgcgggcatcgagggcgagacgctcgtcgcgatcacgtccggcgcgaacatgaacttcgaccggatgcgcttcgtcgccgagcgcgccgaggtgggcgaggcgcgcgaggcggtgttcgcggtgacgatccccgaggagcgcggcagcttcaggcgcttctgctcgctcgtcggcgagcgcaacgtgaccgagttcaactaccggatcgccgatgcgcaatcggcgcacatcttcgtcggggtgcagatccggcggcgcgacgaaacggacgaaatcgcgcgcaacttcgccgcgcacggcttcacgaccgtcgatctgtcgggcgacgagctgtcgaagcagcacatccgctacatggtgggcggccgctcgccgctcgcgcacgacgagcggctgttccgcttcgaatttcccgagcggccgggcgcgctgatgaagttcctgtcgtcgatggcgcccgactggaacatcagcctgtttcactaccggaaccagggggccgattacagctcgatcctcgtcggcctgcaggtaccgcaggcggaccacgcggcgttcgaccgctttctcgcggcgctcggctatccgttctgggaagaaagcgtcaatccggcgtatcgtctcttcctgtcgtaa

SEQ ID NO: 12544 - protein, 507 aa, Burkholderia thailandensis E264
MASHDYLKKILTARVYDVALETELERARNLSARLDNAVYLKREDNQPVFSFKLRGAYNKMAHIPADALARGVITASAGNHAQGVAFSAARMNVKAVIVVPVTTPQLKVDAVRAHGGPTVEVIQAGESYSDAYAHAVKVQAERGLTFVHPFDDPYVIAGQGTVAMEILRQHQGPIHAIFVPIGGGGLAAGVAAYVKAVRPEIKVIGVQTDDSCAMKQSLAAGKRVELAEVGLFSDGTAVKLVGEETFRLCAAYLDDVVTVDTDALCAAIKDVFQDTRSVLEPAGSLAVAGAKRYAERAGIEGETLVAITSGANMNFDRMRFVAERAEVGEAREAVFAVTIPEERGSFRRFCSLVGERNVTEFNYRIADAQSAHIFVGVQIRRRDETDEIARNFAAHGFTTVDLSGDELSKQHIRYMVGGRSPLAHDERLFRFEFPERPGALMKFLSSMAPDWNISLFHYRNQGADYSSILVGLQVPQADHAAFDRFLAALGYPFWEESVNPAYRLFLS

SEQ ID NO: 12545 - DNA, 1248 bp, Desulfitobacterium hafniense Y51
  CDS (1)..(1248): transl_table=11
atgggaaaagtcgtcctagaggatattctcagagccggtcaaaccttaaaaggggttatcaataagacacctttgcaccgtcatgaccttctttcggagaaataccaatgcaatattttcttaaaacgggaagatctccaggtggttcgttcctttaagctgcgcggagcttataatatggttcatagtattccctcagaacggctcagcagtggtgtcgtttgtgccagtgcaggtaatcatgcccagggtgttgcttattcctgcaaagccctgggtattaaaggaagcatctatgtaccctcgacgacaccaaagcaaaaaatctcttccatcaagcggtttggcggagactttgtggaagtgatacagatcggcgatacctttgacgatgccttcaatagagcgaaagctcattgtgaggaagccaataagacctttgtccatccttttgatgatcctttagtcatcgccggtcagggaaccattgccatggagattcttaatgatatggaagctcccgttgactatattctgggtggtatcggcggtggcggcctcatgtccggtgtggggattgccatgaaaagcttaagcccccaaacccaggtcatcggcgtggaagccaccggtgccgcttccatgaaggaagctttcagtcaaggtgaaatagtcaccttgccccacatcgacggattcgtggatggtaccgcagtaaaacgagtcggagatctcacctttgccatctgccgggaggttctcgacgatgtcatcgcggtcactgaaggaaaggtctgcaccaccatcctggaaatgtataatgacagtgctatcgtggttgaaccggcgggcgcactttccatcgcggctctggaaacctataaggataagatcaaaggcaaaaatgtcgtctgcatcatcagcggcggcaataacgatattgaaagaacccctgaaatcaaggaacgttccttattcgatcagggccttaaacattatttcatcgtcaacttccctcagcgccccggcgccttgaaggaatttgtaggggaagtcttaggccccaacgacgatattgcccgtttcgagtacaccaaatccaacaacaaagaaaaaggcccgacactgattggtatcgagctttcccgtaaagaagattaccagcccttgattgaaagaatggataagaagggcttccaatatacgcgcattaacgataatcccgagctgttcggattgctcatctag

SEQ ID NO: 12546 - protein, 415 aa, Desulfitobacterium hafniense Y51
MGKVVLEDILRAGQTLKGVINKTPLHRHDLLSEKYQCNIFLKREDLQVVRSFKLRGAYNMVHSIPSERLSSGVVCASAGNHAQGVAYSCKALGIKGSIYVPSTTPKQKISSIKRFGGDFVEVIQIGDTFDDAFNRAKAHCEEANKTFVHPFDDPLVIAGQGTIAMEILNDMEAPVDYILGGIGGGGLMSGVGIAMKSLSPQTQVIGVEATGAASMKEAFSQGEIVTLPHIDGFVDGTAVKRVGDLTFAICREVLDDVIAVTEGKVCTTILEMYNDSAIVVEPAGALSIAALETYKDKIKGKNVVCIISGGNNDIERTPEIKERSLFDQGLKHYFIVNFPQRPGALKEFVGEVLGPNDDIARFEYTKSNNKEKGPTLIGIELSRKEDYQPLIERMDKKGFQYTRINDNPELFGLLI

SEQ ID NO: 12547 - DNA, 1512 bp, Saccharophagus degradans 2-40
  CDS (1)..(1512): transl_table=11
atgccccagacttaccttaaacgcatattagatgcgcgaatatacgatctagccatagaaaccccactagagtccgtgccgcttatttctattcgcacaggcaacaacgtgttgcttaaacgcgaagacttgcagccggtgttctcttttaaaattcgcggtgcctacaacaagttgcgcctattaagcgaagaggccagaaaggtcggtgtaattgctgcttctgcaggtaaccatgcacaaggtttggctttggctgctaagcatatgggggttgcggccactattgttatgccgcgcaccacgccagctattaaggtagatgcggtgcgccgtcgcggcgccaaagtggtgctaatgggcgacgcctacgacgaagctgcagcccatgctaaaaaactggtggaagagaaaggccttacctatatccacccgttcgatgacccagacgtgatcgcgggccaaggcacagtgggtatggagatattgcgccagcaccccggcgatatagatgtggtgtttgtacctgttggcggcggcggcttatgtgccggtgtagcggcttatatcaagcacgtgcgcccagaaaccaaggtcatagcggtggaggcagaagattctgcctgtttaaaattggcaatggataaaaaacgccgtgcggtgttgcccagtgtgggtatttttgccgagggcgtggctgtggcgcaaataggtaaagaaacctaccgcgtaattaaagagtgcatcgacgaagttataaccgttaacactgacgaaatgtgcgcggcaataaaagatatattcgaagatacccgctctattgccgagcctgcgggcgcgctttctcttgcgggcttaaaaaaatatgttgcgcgtacaggctgtgtagataaaacgctaatcgccattgatagcggcgccaacaccaactttgaccgtttacgctatatctctgaacgcactgagtttggcgaaaaacgcgaagctatattcgccgttaccctgccagaaaagcccggcgcctataaaaaattctgtaaagatttgggcaagcgcaatattaccgagtttaattatcgctacgccgataatcagcaggcacacatttttgtgggcttgcaaataacgcccgataaaaacgaccgtgaagacatcgtcaatacgcttacaaaaggcggttatgatgtagtggatatgaccgataacgaagtggccaagttgcacgttcgctatatggtgggcggccatgcaactgtgccagatgaaattgtgtatcggtttgagttccccgagcgcccaggtgcgctaatggaattcttaactaaaattgccgggcgctggaatatttctatgttccattaccgcaaccacggtgcggcgtttggcagagtgttggtgggcatgcaggtgcctaagggcgagcgcaaagacttaaaagatttgctcgacgaacttaattacacctattgggatgagacccaaaacgaagcctattcatttttcttggggtag

SEQ ID NO: 12548 - protein, 503 aa, Saccharophagus degradans 2-40
MPQTYLKRILDARIYDLAIETPLESVPLISIRTGNNVLLKREDLQPVFSFKIRGAYNKLRLLSEEARKVGVIAASAGNHAQGLALAAKHMGVAATIVMPRTTPAIKVDAVRRRGAKVVLMGDAYDEAAAHAKKLVEEKGLTYIHPFDDPDVIAGQGTVGMEILRQHPGDIDVVFVPVGGGGLCAGVAAYIKHVRPETKVIAVEAEDSACLKLAMDKKRRAVLPSVGIFAEGVAVAQIGKETYRVIKECIDEVITVNTDEMCAAIKDIFEDTRSIAEPAGALSLAGLKKYVARTGCVDKTLIAIDSGANTNFDRLRYISERTEFGEKREAIFAVTLPEKPGAYKKFCKDLGKRNITEFNYRYADNQQAHIFVGLQITPDKNDREDIVNTLTKGGYDVVDMTDNEVAKLHVRYMVGGHATVPDEIVYRFEFPERPGALMEFLTKIAGRWNISMFHYRNHGAAFGRVLVGMQVPKGERKDLKDLLDELNYTYWDETQNEAYSFFLG

SEQ ID NO: 12549 - DNA, 1512 bp, Methylobacillus flagellatus KT
  CDS (1)..(1512): transl_table=11
atgaaaatcgactacctgcagaaaatcaaatccgcccgcgtctacgacgtggcaagcaagaccccgctggacctgcttcccaacctttcccgacgcattcacaaccaggtgctgctcaaacgcgaggatatgcagcctgtattttcattcaagcttcgcggtgcttacaacaagatggcgcagctttccgccgaggcactgtcgcgcggggtcattaccgcatccgccggcaatcatgcacagggtgtagccctggccgccaagaacgcaggctgtcgcgcagtcatcgtcatgcccgtcaccacccctgacatcaaggtggatgcggtacgtcaccgcggcgctgaggtagtgttggctggagagtcctacacggactcctataaccacgccatgaagctcatggaagagcagcaacttacctttgttcatccgttcgacgatcccgacgtgatcgcgggacaaggcaccgtggcaatggaaatactgcaggacaaccccggcccaatcgaggcaattttctgccctgtcggcggcggcggcttgatcgcgggcgtggccgcctacatcaaggcagtacgtccggagatcaaggtcatcggtgtcgaggtcaatgatgccaacgcgatgacggtttcgctgcaacagggcgcgcgcgtcaccttggaccaggtcggcctgtttgcagacggcaaggccgtcaaattggtcggagaagagactttccgcctgtgccaacaatacgtcgacgagatgatcctggtcgacaacgacgccatctgcgcagctatcaaggatgtcttcgaggatacgcgcgccatcctcgagccgacgggcgcgctctccctggctggactcaaggcctatgcccagcagcacaatctgcaaggcaaaaccctgatagcggtcgcctcgggcgccaacatgagcttcgaccgcctgcgctttgtcgccgagcgcgcagaaattggcgaaaagcgcgaagctgtgctggccgtgaccatcccggaaaccccgggctcattcaagaagttctgccggctgatcggccaccgcaacattaccgagttcaattaccgctatgctgacgccacggccgcacatatctacgtcgggatcgccatccaggaccccagtgaatccggcaagctagtcacccggctgcaggagcacggactgccggcgttggacctgagtgagaatgaagtagcaaagctgcacctgcgccacctggttggcggccatgcgccgcaggcaaagcacgagcaggtctaccgcttcgaattcccggaaaaacccggtgcattgatgaattttctcgacaatatgcggcatgactggaacatcagcctgtttcattatcgtaaccatggtgcggatttcggcagggtcctggtcggcatgcaggtaccgcctggggaagagcaggagtttaccgatttcctgcagaatctgggctatccgtactgggacgaaagcaacaacccggcttataagctattcctcggctaa

SEQ ID NO: 12550 - protein, 503 aa, Methylobacillus flagellatus KT
MKIDYLQKIKSARVYDVASKTPLDLLPNLSRRIHNQVLLKREDMQPVFSFKLRGAYNKMAQLSAEALSRGVITASAGNHAQGVALAAKNAGCRAVIVMPVTTPDIKVDAVRHRGAEVVLAGESYTDSYNHAMKLMEEQQLTFVHPFDDPDVIAGQGTVAMEILQDNPGPIEAIFCPVGGGGLIAGVAAYIKAVRPEIKVIGVEVNDANAMTVSLQQGARVTLDQVGLFADGKAVKLVGEETFRLCQQYVDEMILVDNDAICAAIKDVFEDTRAILEPTGALSLAGLKAYAQQHNLQGKTLIAVASGANMSFDRLRFVAERAEIGEKREAVLAVTIPETPGSFKKFCRLIGHRNITEFNYRYADATAAHIYVGIAIQDPSESGKLVTRLQEHGLPALDLSENEVAKLHLRHLVGGHAPQAKHEQVYRFEFPEKPGALMNFLDNMRHDWNISLFHYRNHGADFGRVLVGMQVPPGEEQEFTDFLQNLGYPYWDESNNPAYKLFLG

SEQ ID NO: 12551 - DNA, 1608 bp, Burkholderia xenovorans LB400
  CDS (1)..(1608): transl_table=11
atgcataagccgaaggccttggcgcacaccgttggcgctatcattgaccctttccggtctcacacagcgctccgcgccacccgcatggcctcccacgactacctgaagaaaaccctgaccgcgcgcgtctacgacgtcgcccgcgagaccgaactcgaacgcgcgccgaatctgtctgcacgtctgcgcaatccggtctacctgaagcgcgaggacaaccagccggtgttctcgttcaaggtgcgcggcgcgtacaacaagatggcgcatattccggccgaggcgctggaacgcggggtgatcaccgcgtcggcgggcaatcatgcgcagggcgtcgcgctgtcggccgcgcgcatgggcgtgaaggcgatcatcgtggtgccggtcaccacgccgcaggtgaaggtcgatgcagtgcgagcacacggcggcccgaccgtcgaagtggtgcagttcggcgaatcgtatagcgacgcgtatggccatgcggtgaaactgcaggaagagcgcgacctgaccttcgtgcatccgttcgacgatccgtacgtgatcgccggacagggcacggtggcaatggagatcctgagccagcaccaggggcctattcacgcgatcttcgtgccgatcggcggcggcggactcgcggcaggcgtggccgcgtatgtgaaatcggtgcggcccgagatcaaggtgatcggcgtgcagaccgatgattcgtgcgcgatggccgcatcgctgaaagccggcgagcgggtcacgctgaacgaagtcggcctgttctcggacggcacggcggtgaaactggtcggcgaagaaaccttccgcctctgccgcgaatatctcgacgacgtgctgctcgtggacaccgacgcgctatgcgccgccatcaaggacgtgttccaggacacccgcagcgtgctggaacccgccggctcgctcgcggtggccggggcgaaacagtatgcggagcgcgaaggcatcgagaaccagacgctgatcgcgatcacatcgggcgcgaacatgaacttcgaccgcatgcgcttcgtggccgagcgcgccgaagtcggcgaagcgcgtgaagccgtgttcgccgtgacgatccccgaagagcgcggcagtttccggcgtttctgcgaactggtgggcacgcgcagcgtcaccgagttcaactaccggattgcggacgcgaattccgcccatatcttcgtgggcgtgcagatcaggaatcgcagcgaatccgcgcagatcgcgggggcgttcgaagcgcacggcttcgccaccgtcgatctgactttcgacgaactgtccaagcagcacatccgttacatggtaggcggccgctcgcctctggcgcacgacgaacggctgttccgcttcgagtttcccgaacgtccgggcgcgctgatgaaattcctttcgtcgatggcgccgaactggaatatcagcctgttccactatcgcaaccagggcgcggactatagctcgattctggtcggcatccaggtgccggagagcgaggatgcggcgttcgaccagtttctcgccacgctcggctatccgaactgggaagagacgcgcaacccggtgtatcgcctgtttctcgcttga

SEQ ID NO: 12552 - protein, 535 aa, Burkholderia xenovorans LB400
MHKPKALAHTVGAIIDPFRSHTALRATRMASHDYLKKTLTARVYDVARETELERAPNLSARLRNPVYLKREDNQPVFSFKVRGAYNKMAHIPAEALERGVITASAGNHAQGVALSAARMGVKAIIVVPVTTPQVKVDAVRAHGGPTVEVVQFGESYSDAYGHAVKLQEERDLTFVHPFDDPYVIAGQGTVAMEILSQHQGPIHAIFVPIGGGGLAAGVAAYVKSVRPEIKVIGVQTDDSCAMAASLKAGERVTLNEVGLFSDGTAVKLVGEETFRLCREYLDDVLLVDTDALCAAIKDVFQDTRSVLEPAGSLAVAGAKQYAEREGIENQTLIAITSGANMNFDRMRFVAERAEVGEAREAVFAVTIPEERGSFRRFCELVGTRSVTEFNYRIADANSAHIFVGVQIRNRSESAQIAGAFEAHGFATVDLTFDELSKQHIRYMVGGRSPLAHDERLFRFEFPERPGALMKFLSSMAPNWNISLFHYRNQGADYSSILVGIQVPESEDAAFDQFLATLGYPNWEETRNPVYRLFLA

SEQ ID NO: 12553 - DNA, 1575 bp, Burkholderia xenovorans LB400
  CDS (1)..(1575): transl_table=11
ttgttgttacacgaactcaaacaggcggccgaagccgccgatagcgtcgcgcttcgtcacgactacctgaagaaaaccctgaccgcgcgcgtctacgacgtcgcccgcgagaccgaactcgaacgcgcgccgaatctgtctgcacgtctgcgcaatccggtctacctgaagcgcgaggacaaccagccggtgttctcgttcaaggtgcgcggcgcgtacaacaagatggcgcatattccggccgaggcgctggaacgcggggtgattacggcctcggcgggcaatcatgcgcagggcgtcgcgctgtcggccgcgcgcatgggcgtgaaggcgatcatcgtggtgccggtcaccacgccgcaggtgaaggtcgacgcggtgcgcgcgcacggcgggccgaccgtcgaagtcgtgcagttcggcgaatcgtacagcgacgcgtatggccatgcggtgaaactgcaggaagagcgcgacctgaccttcgtgcatccgttcgacgatccgtacgtgatcgccggacagggcacggtggcaatggagatcctgagccagcaccaggggcctattcacgcgatcttcgtgccgatcggcggcggcggactcgcggcaggcgtggccgcgtatgtgaaatcggtgcggcccgagatcaaggtgatcggcgtgcagaccgatgattcgtgcgcgatggccgcatcgctgaaagccggcgagcgggtcacgctgaacgaagtcggcctgttctcggacggcacggcggtgaaactggtcggcgaagaaaccttccgcctctgccgcgaatatctcgacgacgtgctgctcgtggacaccgacgcgctatgcgccgccatcaaggacgtgttccaggacacccgcagcgtgctggaacccgccggctcgctcgcggtggccggggcgaaacagtatgcggagcgcgaaggcatcgagaaccagacgctgatcgcgatcacatcgggcgcgaacatgaacttcgaccgcatgcgcttcgtggccgagcgcgccgaagtcggcgaagcgcgtgaagccgtgttcgccgtgacgatccccgaagagcgcggcagtttccggcgtttctgcgaactggtgggcacgcgcagcgtcaccgagttcaactaccggattgcggacgcgaattccgcccatatcttcgtgggcgtgcagatcaggaatcgcagcgaatccgcgcagatcgcgggggcgttcgaagcgcacggcttcgccaccgtcgatctgactttcgacgaactgtccaagcagcacatccgttacatggtaggcggccgctcgcctctggcgcacgacgaacggctgttccgcttcgagtttcccgaacgtccgggcgcgctgatgaaattcctttcgtcgatggcgccgaactggaatatcagcctgttccactatcgcaaccagggcgcggactatagctcgattctggtcggcatccaggtgccggagagcgagaatgcggcgttcgaccagtttctcgccacgctcggctatccgaactgggaagagacgcagaatcctgtttatcgcctgtttctcgcgtcgtag

SEQ ID NO: 12554 - protein, 524 aa, Burkholderia xenovorans LB400
MLLHELKQAAEAADSVALRHDYLKKTLTARVYDVARETELERAPNLSARLRNPVYLKREDNQPVFSFKVRGAYNKMAHIPAEALERGVITASAGNHAQGVALSAARMGVKAIIVVPVTTPQVKVDAVRAHGGPTVEVVQFGESYSDAYGHAVKLQEERDLTFVHPFDDPYVIAGQGTVAMEILSQHQGPIHAIFVPIGGGGLAAGVAAYVKSVRPEIKVIGVQTDDSCAMAASLKAGERVTLNEVGLFSDGTAVKLVGEETFRLCREYLDDVLLVDTDALCAAIKDVFQDTRSVLEPAGSLAVAGAKQYAEREGIENQTLIAITSGANMNFDRMRFVAERAEVGEAREAVFAVTIPEERGSFRRFCELVGTRSVTEFNYRIADANSAHIFVGVQIRNRSESAQIAGAFEAHGFATVDLTFDELSKQHIRYMVGGRSPLAHDERLFRFEFPERPGALMKFLSSMAPNWNISLFHYRNQGADYSSILVGIQVPESENAAFDQFLATLGYPNWEETQNPVYRLFLAS

SEQ ID NO: 12555 - DNA, 1698 bp, Ralstonia metallidurans CH34
  CDS (1)..(1698): transl_table=11
gtgtcagccggacgctgtcctacaactgtggctgtcactgcacccgtcgcacggcaactgccaacctggcactgccaagtgcgccatccattatcattggcggtttccgccgatttttccggtttttttgccgctgccccccggcgccgcactccgcagaccatgacccgcacgcccgccaagcccgactatctgaaaaaaatcctgaccgccaaggtctatgacgtggcccaggagaccgaattgacctatgcgcccgcgctgtcggcacgcaccggcaatgcggtctggttcaagcgcgaggacacccagccggtgttctcgttcaagttgcggggggcgtacaacaagatggcgtccctcacgcccgaggaactcaagcgcggcgtgatcgctgcttcggcaggcaaccacgcccagggcgtggcgctggcggcggcccgcatgcagtgcaaggcgatcatcgccatgccgaccaccacgccgcaggtgaagatcgacgccgtgcgcgagcgcggcggcgagtgggtgcagatcgttctgcacggtgagtcgtacagcgatgcctacctgcacgcggccgaactcgagaagaagcacaagctcgcgttcatccacccgtttgacgaccccgaggtcatcgccggccagggcaccatcgcgatggagatcctgcgccagcaccctggcccgatccacgcgatctttgtcgccatcggcggcggcggcctgatctccggcatcgccgcctacgtcaaggcggtgcgccccgagatcaaggtgatcggcgtgcagaccttcgattccgatgccatgaagcgctcggtggacgccggcaagcgcgtggaactgaaggatgtgggcctgttctcggacggtaccgccgtcaagctggtgggcaaggaaacgttccgcatcacgcgtgaactggtcgacgacatcatcctggtcgataccgatgcgatctgcgcgggcctgaaggatgtgttccaggacacccgcagcatcctcgagccggccggcgcgctggccgtggccggcctcaaggcgtacgccgagcgcgagaagctcaagcaccagcacctggtggcgatcgcctgcggcgccaatatgaacttcgaccgcctgcgctttgtggccgagcgcgccgaagtgggtgaagcgcgcgaagcggtcttcgccgtgacgatccccgaggaacgcggcagcttcaagcgcttctgcgaacaggtcggcacgcgcagcgtgaccgagttcaactaccgcatcgccgacaagggcgtggcgcatatcttcgtcggcgtgcagatcgccagccgcgcggagagcgacaagatcgccgccaacttccgccgccatggctttgacacgctcgacctgtcgaacgacgaactggccaagcagcacatccgctacatggtcggcggccattcgccgctggcgcatgacgaactgctgtatcgcttcgagttcccggagcgcccgggcgcgctgatgaagttcctgtccagcatgagcccgaactggaacatcagcctgttccactaccggaaccagggcgcggatacgtcgaacatcctggtcggcatccaggtgccgaagaacgagaagcgcgcgttccgcagcttcctttcgacgctcggttacgtacactgggatgagaccgacaaccccgtctacaagctgttcctttcctga

SEQ ID NO: 12556 - protein, 565 aa, Ralstonia metallidurans CH34
MSAGRCPTTVAVTAPVARQLPTWHCQVRHPLSLAVSADFSGFFAAAPRRRTPQTMTRTPAKPDYLKKILTAKVYDVAQETELTYAPALSARTGNAVWFKREDTQPVFSFKLRGAYNKMASLTPEELKRGVIAASAGNHAQGVALAAARMQCKAIIAMPTTTPQVKIDAVRERGGEWVQIVLHGESYSDAYLHAAELEKKHKLAFIHPFDDPEVIAGQGTIAMEILRQHPGPIHAIFVAIGGGGLISGIAAYVKAVRPEIKVIGVQTFDSDAMKRSVDAGKRVELKDVGLFSDGTAVKLVGKETFRITRELVDDIILVDTDAICAGLKDVFQDTRSILEPAGALAVAGLKAYAEREKLKHQHLVAIACGANMNFDRLRFVAERAEVGEAREAVFAVTIPEERGSFKRFCEQVGTRSVTEFNYRIADKGVAHIFVGVQIASRAESDKIAANFRRHGFDTLDLSNDELAKQHIRYMVGGHSPLAHDELLYRFEFPERPGALMKFLSSMSPNWNISLFHYRNQGADTSNILVGIQVPKNEKRAFRSFLSTLGYVHWDETDNPVYKLFLS

SEQ ID NO: 12557 - DNA, 1242 bp, Acidobacteria bacterium Ellin345
  CDS (1)..(1242): transl_table=11
atggcgacccacactccgcatcggcccgccgcgtctgtaacgctcgaatccatcgagcaggcgcgcgcccgcattcgcgccgatgtttacttctccccctgcaaccactcgcactcaatctccaagatcgccggccagcgcgtatacctgaagctcgaaaatctccagatgaccggttccttcaaggaacgtggcgcgctcaacaaaattctcacgctctccaacgacgagaagcagcgtggcgtcatcgcagccagcgctggcaatcacgcgcaaggtgtctcgttccacgccacgcgccatggcattcgcgcccgcatcgtcatgccgatgatgacgcctttggttaaagtcaatgccacgcgcggctacggcgccgaagtcatcctccatggcgccgactacgacgaagcttacgaagaagcttgccgcctcgccgccctcgaaggcctcgtattcattcatccttttgacgatccgcaggtcatcgccgggcagggaaccatcgcgctcgaattgctcgagcaagcgcccgacatggaagctgtcgtcgtgcccatcggcggcggaggtcttatcagcggcatcgcttgcgcattgaaatccctgcgtccggatatccgcgtcatcggcgtgcaggccgcgcgtatgccttccatgcaaagtgcattgcaagcgcacaaggcggtcaccattgattcgaacaccactatcgctgatggcatcgctgtccgccgatccggcgatctcactgtccatctcgtcgaaagctacgtcgacgaactcgtcgtcgccgaagaagaagaaattgccagcggcatcctcaccctgctcgaacgcgagaagactctcgccgaaggcgccggcgccgcagcagtcgccgccctgttacaccacaaaacttcgctgaaaaatgaaaagaccgttgccctcgtttgcggcggcaacatcgacgtctcgttgctggcccgcatcatccagcgcggtcttgccaaagacggccgcctcgtccggctgcagatccatctctccgatcgtcccggctcgttgcatcaacttacgcgcctacttaccgtgcatcaggccaacatcgtcgaattacaccatgaccgcacctactatggcgtgaacctcggcgacaccatgattgacgtcaccctggaggctcgcggggaggagcagatccagcagatcctccacggcctgcggcaggagggttataggcatgagcgcattgtgtaa

SEQ ID NO: 12558 - protein, 413 aa, Acidobacteria bacterium Ellin345
MATHTPHRPAASVTLESIEQARARIRADVYFSPCNHSHSISKIAGQRVYLKLENLQMTGSFKERGALNKILTLSNDEKQRGVIAASAGNHAQGVSFHATRHGIRARIVMPMMTPLVKVNATRGYGAEVILHGADYDEAYEEACRLAALEGLVFIHPFDDPQVIAGQGTIALELLEQAPDMEAVVVPIGGGGLISGIACALKSLRPDIRVIGVQAARMPSMQSALQAHKAVTIDSNTTIADGIAVRRSGDLTVHLVESYVDELVVAEEEEIASGILTLLEREKTLAEGAGAAAVAALLHHKTSLKNEKTVALVCGGNIDVSLLARIIQRGLAKDGRLVRLQIHLSDRPGSLHQLTRLLTVHQANIVELHHDRTYYGVNLGDTMIDVTLEARGEEQIQQILHGLRQEGYRHERIV

SEQ ID NO: 12559 - DNA, 1227 bp, Silicibacter sp. TM1040
  CDS (1)..(1227): transl_table=11
atgaccaacttcagaacccaggccaaagcggccgaggcggcgatgcgcgatgtcttcccgcccacgccgctgcaacgcaacgaactcctgtcgcagcgctttggtgcggagatttacctcaaacgcgaggatctcagcccggtgcgctcctacaagattcgcggcgcgctcaacgcgatgcgaaagcagaccagcaaggatctgtttgtctgtgcttcggcgggaaatcacgcgcagggcatggcttacatgtgtcggcaaatggacaaacggggtgtgatctttatgccggtgaccacacctcagcagaagatccagaagacccgcatgtttggcggtgacaacgtcgaggtgcatctgatcggggattacttcgacgatacattgtccgccgcgcaggcgtggtgcgcagaaaaaggagggtatttcctctctccttttgacgacgcggatgtcatcgaaggtcaggcatcaatcgcagtggaaatcgaggcgcaactcggcaaggcgccggatcatatcgttctaccggtgggcggcgggggtatgtcctctggcgtggttcggtattttggcgaggatgtgcatgcgcttcttgtggagcctgagggcggcgcctgcctgaaggcggcgcttgaggcaggtcatcccacaccgctcaaccgggtggatacctttgtggacggcgccgccgttggcaaaattggcgagcggccttttgatattttgcgcagcgtgccgttgccggatgtcctgactgtgtcagaggaccggatctgcaccaccatcctcgagatgctcaatgtcgaaggtatcgttctggaacctgcaggcgcgctcgccgtcgaggcgctgggcgacctgcgcacatggattaagggtaagaccgtggtttgtctgacttccggcgggaactttgatttcgagcgactgccagaggtcaaggaacgggcgcagcgctattccggggtgaagaaatacttcctgctgcgcctgccgcaacgtcccggcgcgctcaaggaattcctgaacattcttgggccggatgatgacatcgcacgttttgaatacatgaagaagtctgcgcgcaacttcggctcggtcctgatcgggatcgagaccaagcgcccagagaacttcgcgccgctgtttgcgcaactggatgcggcgggtttcacctacaccgacatcacaaatgacgagacactggcgcagttcgtgatctga

SEQ ID NO: 12560 - protein, 408 aa, Silicibacter sp. TM1040
MTNFRTQAKAAEAAMRDVFPPTPLQRNELLSQRFGAEIYLKREDLSPVRSYKIRGALNAMRKQTSKDLFVCASAGNHAQGMAYMCRQMDKRGVIFMPVTTPQQKIQKTRMFGGDNVEVHLIGDYFDDTLSAAQAWCAEKGGYFLSPFDDADVIEGQASIAVEIEAQLGKAPDHIVLPVGGGGMSSGVVRYFGEDVHALLVEPEGGACLKAALEAGHPTPLNRVDTFVDGAAVGKIGERPFDILRSVPLPDVLTVSEDRICTTILEMLNVEGIVLEPAGALAVEALGDLRTWIKGKTVVCLTSGGNFDFERLPEVKERAQRYSGVKKYFLLRLPQRPGALKEFLNILGPDDDIARFEYMKKSARNFGSVLIGIETKRPENFAPLFAQLDAAGFTYTDITNDETLAQFVI

SEQ ID NO: 12561 - DNA, 1218 bp, Myxococcus xanthus DK 1622
  CDS (1)..(1218): transl_table=11
atggtcaccctcgaggacatccaggccgcgcgcgagcgccttcgctcggccatccgccccacgccgtgcccgcagtcggactactacacggagcggacggagtgcgccgcggtgttcttcaagctggagaacctccagcgcaccggggccttcaaggagcgcggcgccctcaacaagctgctgacgctgaccgaggacgagcggcgccggggcgtcatcgccgcgtccgccggaaaccacgcgcagggtgtcgcgtaccacgcgcgtcggctgggcgtgagtgccaccatcgtcatgccggagcgcaccccgctcatcaaggtgtcgcgcacgcgggatgactacggcgcgcgcgtggtgctcaagggcaccaactacgacgaggcctacgcggaggcgctgcgcatccagaaggcggaggaccgcgtcttcatccaccccttcaatgacgcgcacgtcatcgccggccagggcaccatcggcctggagctgctggagcagtgccccgacctggaggtggtgctcgtccccattggcggcggcgggctcatctccggcatcgcgtgcgcgctgaaggagacgcggcccgacatccgcgtggtgggcgtgcaggcggagaccatcgccagcatgaaggcgtcggtggaggcgggcgagcgcgtgctgctggccgccgcgggcaccaccatcgcggacggcatcgccgtcaagcgcgtgggcgacctcaccttccccatggtgcagaagtacgtggacgaggtggtggccgtggacgaggaggaaatcgccgccgccatcctcaccctcctggagcaggagaagagcgtggtggagggcgccggcgcggtgggcctggcggcgctgctcagcggtgacgttcccgccgcgaggggccggcgcaccgccatcatcttgagcggtggcaacatcgacatgaacgtcatcagccgcatcatcgagcgcggtctggtgaaggctggccgcttggtgcagttggaggtccggctgccggaccggcccggaatgctggcgaagctcaccacgcaggtggccgacctgcgcgccaatgtcgtggagatccaccacgagcgcgccttctccaaggcgggcctgggcgaggccatggtggaggtgacgctggagaccaccgggcccgcgcaaatcgaggagctggagcgcgcgctccaccggctgggctggcaggtggcccgcaagtag

SEQ ID NO: 12562 - protein, 405 aa, Myxococcus xanthus DK 1622
MVTLEDIQAARERLRSAIRPTPCPQSDYYTERTECAAVFFKLENLQRTGAFKERGALNKLLTLTEDERRRGVIAASAGNHAQGVAYHARRLGVSATIVMPERTPLIKVSRTRDDYGARVVLKGTNYDEAYAEALRIQKAEDRVFIHPFNDAHVIAGQGTIGLELLEQCPDLEVVLVPIGGGGLISGIACALKETRPDIRVVGVQAETIASMKASVEAGERVLLAAAGTTIADGIAVKRVGDLTFPMVQKYVDEVVAVDEEEIAAAILTLLEQEKSVVEGAGAVGLAALLSGDVPAARGRRTAIILSGGNIDMNVISRIIERGLVKAGRLVQLEVRLPDRPGMLAKLTTQVADLRANVVEIHHERAFSKAGLGEAMVEVTLETTGPAQIEELERALHRLGWQVARK

SEQ ID NO: 12563 - DNA, 1254 bp, Cytophaga hutchinsonii ATCC 33406
  CDS (1)..(1254): transl_table=11
atgaatagtaaagtgaaggttgaagacattgttgaagcggcaaaccgtttgaaaaatgttgtgacgcatacgccattaaccaaaaatgagcatctttctcaggaatataactgcaacctatggttaaaaagggaagatctgcaattggttcgttcctataaacttcgtggagcatataattttatgtgcagtcaaaaacgcgaagatatagaaaagggtgttgtatgtgccagtgccggaaaccatgctcagggcgttgcctattcctgccaggcgttgaaaattaaaggccggatctatatgccgagcacaacacccaaacaaaaagttacgcaggtaaaattttttggtaaagagtttgttgaagttgttctgaccggcgatacgtttgatgattcgtacaaagaggcaatgaattattgcacagagaataaattattatttgtacatccgttcgatgatcctaaagtaatagccgggcaaggtacagtaggttttgaaatattaaatgatattgttggaaccattgattatatctttgtgccgattggcggcggcgggcttgcagcaggactttgtacctacataaaagaattgagcccgcatacaaaaatcattggggtggagccgttaggtgcgccggcaatgaaacgctcactggaagaagggaaagttgttgtactggaagaaatcgataagtttgtggatggtgctgccgtgaagcgggtaggcgatctcaattttgatatctgttcagaatatctagatgatgtacagttggtaccggaagggaaaacatgcagcacgatcataaagctgtataatgaagaagccattgtagcagaacctgcaggggcattaagcattagtgtgctggattattataaagatgaaataaaagggaagaatgttgtgtgtgtgatcagcggcagtaacaacgatatcgaccgcatgcaggagatcaaggaacggtcgttgttgtatgaagggctgaaacattatttcataatccgctttaagcagcgtacaggagcactcagagagtttctggatgaggttttagggccaaatgatgatattacctattttgaatatacaaagaaaacaaaccgtgaaaatggcccggcaatggttggtattgaggttaaaatgaaagaagattttaatttactcatcgaccgtatgaacgcaaaaaatgtcgactatacgttagtaaattcagattcaaacttatttagttttctgatcatgtaa

SEQ ID NO: 12564 - protein, 417 aa, Cytophaga hutchinsonii ATCC 33406
MNSKVKVEDIVEAANRLKNVVTHTPLTKNEHLSQEYNCNLWLKREDLQLVRSYKLRGAYNFMCSQKREDIEKGVVCASAGNHAQGVAYSCQALKIKGRIYMPSTTPKQKVTQVKFFGKEFVEVVLTGDTFDDSYKEAMNYCTENKLLFVHPFDDPKVIAGQGTVGFEILNDIVGTIDYIFVPIGGGGLAAGLCTYIKELSPHTKIIGVEPLGAPAMKRSLEEGKVVVLEEIDKFVDGAAVKRVGDLNFDICSEYLDDVQLVPEGKTCSTIIKLYNEEAIVAEPAGALSISVLDYYKDEIKGKNVVCVISGSNNDIDRMQEIKERSLLYEGLKHYFIIRFKQRTGALREFLDEVLGPNDDITYFEYTKKTNRENGPAMVGIEVKMKEDFNLLIDRMNAKNVDYTLVNSDSNLFSFLIM

SEQ ID NO: 12565 - DNA, 1536 bp, Haemophilus somnus 129PT
  CDS (1)..(1536): transl_table=11
atgataagtaatttaaccgaacagccttctggtgctgagtaccttaaagcaattttaagttcaaaaatttacgaacttgcacaggttacacccttacaacctatgctcaaactttctgagcgtttaagtaataccgttttagttaaacgtgaagatcgccaattagttcatagctttaaattgcgtggtgcttatgccatgattgccggtcttagccaaccgcaaaaaaatgccggtgtgattaccgcttccgcaggaaatcatgctcaaggtgtcgcactgtcagcgaaaaatctgggattaaacgcattgattgttatgccgcaaaataccccccgcattaaagtagatgcagtgcgtggttatggtggcgaagtgcttttatatggtgcaaactttgatgaggcaaaagcaaaagcgatagagctttctgaaagtaaaagtatgacatttattccgccttttgatcaccctgcagttattgcaggtcaaggttctttagccatggaattattgcagcaaaacagtcatattgatcgtatttttgttcctgttggcggcggcggattagcagctggcgtggctgttttaattaaacaattaatgcctgacattaaagtgattgcggtagaaagtaaagattcagcttgtttacacgccgctttgaaagttggtcaaccagtagatttagagcgtgttgggttgtttgctgacggtgtggcggtaaaacgtatcggtaatgaaactttccgtgtatgtcaacaatatattgatgatgttgtacttgttgatagtgatgaagtgtgtgcggcaatgaaagatatgtttgaaaatgtgcgtgctattgcagagccatccggtgccgtatcattagccggcttaaaaaaatatgtgaaagaacataatattcaaggtgaaacgttggttaatattttgtccggtgcaaatttaaattttcatacattgcgttatgtgtcagaacgctgtgaaatcggtgaaaaacacgaagcaatttttgctgtaactatccctgaagaaaaaggcagtttcctacgtttttgccatttattaggtgatcgccctgttaccgaatttaactaccgttatgccgataaagaacaagcctgtatttttgttggtgttcgtattagtagtgaaaaagaaaaattagaaattattcaacaacttgaacaaaatgattataaagttatggatctctctgatgatgaaatagcgaaaacccatattcgctatatgattggaggacgaacaaccagcaatagcaaagagcggttatataatttcgagtttcctgagcaaaaaggtgcgttgttaaaattcttgatgatgttaggtacgcattggaatatttctcttttccattatcgtgcttatggtgcagactatggtaacgttttagcaggctttcagttagatgaacatgatgaaattcggttcaatggtcatttagaagaacttgcttatacttatcaagatgtaacggacagcccagcttacaaatatttcttagcttga

SEQ ID NO: 12566 - protein, 511 aa, Haemophilus somnus 129PT
MISNLTEQPSGAEYLKAILSSKIYELAQVTPLQPMLKLSERLSNTVLVKREDRQLVHSFKLRGAYAMIAGLSQPQKNAGVITASAGNHAQGVALSAKNLGLNALIVMPQNTPRIKVDAVRGYGGEVLLYGANFDEAKAKAIELSESKSMTFIPPFDHPAVIAGQGSLAMELLQQNSHIDRIFVPVGGGGLAAGVAVLIKQLMPDIKVIAVESKDSACLHAALKVGQPVDLERVGLFADGVAVKRIGNETFRVCQQYIDDVVLVDSDEVCAAMKDMFENVRAIAEPSGAVSLAGLKKYVKEHNIQGETLVNILSGANLNFHTLRYVSERCEIGEKHEAIFAVTIPEEKGSFLRFCHLLGDRPVTEFNYRYADKEQACIFVGVRISSEKEKLEIIQQLEQNDYKVMDLSDDEIAKTHIRYMIGGRTTSNSKERLYNFEFPEQKGALLKFLMMLGTHWNISLFHYRAYGADYGNVLAGFQLDEHDEIRFNGHLEELAYTYQDVTDSPAYKYFLA

SEQ ID NO: 12567 - DNA, 1527 bp, Synechococcus sp. CC9311
  CDS (1)..(1527): transl_table=11
atggatcattatttgccgaggatcctgcgcgcccgtgtctatgacgtggcccgggaaacccctttagaactggccaacaatttgagccgaaggctgaacaacagcgttttgttgaaacgggaagatcttcaacccgttttttctttcaaactgcgtggtgcctacaaccgcatggctcaactctcagaggctgagctgaaactcggggtcatcgcatctagtgctggaaatcatgcccaaggtgtggccctcagcgcctcccatctcggctgtagagctgtgatcgtgatgccagtcacaacccctggcgtgaaagttgacgctgtgcgccagcttggagcagaggtggtgcttcatggtgagacctacgacgaggcctacgccgaagcaaggtcacgcagcgaagcggagcaactttgctttatccatccatttgacgatcctgaagtgatcgctggacagggcacagtgggcatggaaatcctgcgccagtgccatcagccacccgacgcgatttacgtggccgttggcggtggtggtttgatcggcggaatcgccgtttacgtgaagagtctctggcctgacgttcaaatcattggcgttgaaccccacgatgctgccgcgatgaccttgtccttagaggcaggtgagcgcatccgtttgccgcaggttgggctgtttgcggacggagtggctgtgcgtgaggtaggtgagcacacttttgaactagcccaaaagtatgtcgatgacatcgtgaccgttagtaccgatgaaatctgtgcagccataaaagatgtttttgaagacacccgttcgattcttgaaccggcaggtgcccttgcgattgcaggcctcaaagctgatgtgagccgaaggtcgctccagaatcaaaatcttgtagctgtggcctgtggcgccaacatcaatttcgcgcgtctgcgcttcgttgctgaacgtgccgagctgggtgaagaacgcgaagcgatgctcgctgtagagattccagaacgtccggggagtcttcgctccctctgtgaattacttgcagaccgcagccttactgaattttcttatcgaatgggggctggtgatcaggctcacatctttatgggtgttcaggtgagcgggcccgacgacagagcaacattgattggccatctcaagacgcatggatatgcgtgtcttgatctgagtgacgatgaactttccaaggtgcatctccggcacatggttggtggtcggctacctgagagttcgatcgctagcaatgttcaggagcttctgtatcggttcgaatttccagagcgtccaggtgccttaatgcgcttcgtcacggccttgcatcgcgactggagcatcagcattttccactacagaaatcatggcgccgatgtgggtcggattgtggtgggtgttcttgtaagtacggatgatctaaaagaatggcaatccttcctgcgcgaacttgggtacagcagctgggaggagacaagtaatcccgcctaccaactatttcttggtggatga

SEQ ID NO: 12568 - protein, 508 aa, Synechococcus sp. CC9311
MDHYLPRILRARVYDVARETPLELANNLSRRLNNSVLLKREDLQPVFSFKLRGAYNRMAQLSEAELKLGVIASSAGNHAQGVALSASHLGCRAVIVMPVTTPGVKVDAVRQLGAEVVLHGETYDEAYAEARSRSEAEQLCFIHPFDDPEVIAGQGTVGMEILRQCHQPPDAIYVAVGGGGLIGGIAVYVKSLWPDVQIIGVEPHDAAAMTLSLEAGERIRLPQVGLFADGVAVREVGEHTFELAQKYVDDIVTVSTDEICAAIKDVFEDTRSILEPAGALAIAGLKADVSRRSLQNQNLVAVACGANINFARLRFVAERAELGEEREAMLAVEIPERPGSLRSLCELLADRSLTEFSYRMGAGDQAHIFMGVQVSGPDDRATLIGHLKTHGYACLDLSDDELSKVHLRHMVGGRLPESSIASNVQELLYRFEFPERPGALMRFVTALHRDWSISIFHYRNHGADVGRIVVGVLVSTDDLKEWQSFLRELGYSSWEETSNPAYQLFLGG

SEQ ID NO: 12569 - DNA, 1674 bp, Shewanella sp. MR-7
  CDS (1)..(1674): transl_table=11
atgttatctctcgcatcgtcgcaaacggagcaggctgaggcccagtcctctcaagttcaatcctctcaagttcagtccgataaggcgcaatcgggcacttcagccttagaaaagagtcagcttgcgcaaagctacctgcaaaaaatcctgttgtcgtcggtttatgacgttgcgaaagtgacgccactctcgagccttaataaactctcggcgcgtttgggctgccaagtatttttaaagcgtgaggatatgcagcctgtgcattccttcaagctgcgcggcgcctataaccgtatcgcccagttaagccaagccgaatgtcaacgcggcgtggtgtgtgcctcggcgggcaaccatgcccaaggcgtggccatgtcggcggccagtcgtggtgtggatgcagtgattgtgatgcccgaaactaccccggatattaaagtcgatgcggtgcgtcgtttgggtggcaacgtagtgttgcacggccaagccttcgatcaggccaatggctttgcgatggagatggccgagcaggaggggcgggtgtatatcgccccctttgatgacgaagccgttatcgcaggccaaggcactatcgcccaagaaatgctgcaacagcagcgcgaccttgaagtggtatttgtacccgtgggcggtggtggcttaattgccgggattgctgcctattacaaggcggtgatgccacaggtcaaaattgttggggtggagcctgaagatgcggcctgcttaaaagcggcgatggaggcgggcgagcctgtcacactcccgcaggtcggcttgtttgccgatggagtggcggttaaacgtatcggcactgagccatttcgcctagctaagtggtttgtggatgaagtggtgacggtaacgtccgacgaaatctgcgccgccgttaaagatatttttgaggatacccgcgccattgccgaacctgctggtgccttatcccttgctgggcttaaaaaatatgtcagcaccaatgccgcaggcgagagtggtaagggtgaaaaagtcgcagcgattttaagtggcgcgaatgtgaacttccacagcctacggtatgtgtcggagcgttgcgagttgggtgagcaaaaagaagctgtgttggcggttaaagtgcccgagcgtcccggcagcttcctgcgtttttgtgagttgctcgaaaagcgggtgatgaccgaatttaactatcgctttagtagccgcgatatggcggtggtgtttgcgggtattcgtttgaccaaaggccatggcgaattagagcagatcatcaataccttagaagataatggcttcgaggtgcaggacttatccggtgacgaaaccgcgaaattgcatgtgcgttatatggtcggtggtcatccgccagagccgttagaggagcgcctatttagcttcgagtttcccgagcatccaggggcgctgctgaagtttttaaccaccctgcaaagtaagtggaatatcagtttattccattaccgtaatcacggcgcggcctttgggcgagtgctggcggggtttgaagtccccgagggcgatgccttgccgtttcagcagtttttaactgagctgggatttgtctatcaagaagagacgcaaagccctgcttatcagctgtttttgaatgccggaaaaggaaaaaagaacctgcctttgtaa

SEQ ID NO: 12570 - protein, 557 aa, Shewanella sp. MR-7
MLSLASSQTEQAEAQSSQVQSSQVQSDKAQSGTSALEKSQLAQSYLQKILLSSVYDVAKVTPLSSLNKLSARLGCQVFLKREDMQPVHSFKLRGAYNRIAQLSQAECQRGVVCASAGNHAQGVAMSAASRGVDAVIVMPETTPDIKVDAVRRLGGNVVLHGQAFDQANGFAMEMAEQEGRVYIAPFDDEAVIAGQGTIAQEMLQQQRDLEVVFVPVGGGGLIAGIAAYYKAVMPQVKIVGVEPEDAACLKAAMEAGEPVTLPQVGLFADGVAVKRIGTEPFRLAKWFVDEVVTVTSDEICAAVKDIFEDTRAIAEPAGALSLAGLKKYVSTNAAGESGKGEKVAAILSGANVNFHSLRYVSERCELGEQKEAVLAVKVPERPGSFLRFCELLEKRVMTEFNYRFSSRDMAVVFAGIRLTKGHGELEQIINTLEDNGFEVQDLSGDETAKLHVRYMVGGHPPEPLEERLFSFEFPEHPGALLKFLTTLQSKWNISLFHYRNHGAAFGRVLAGFEVPEGDALPFQQFLTELGFVYQEETQSPAYQLFLNAGKGKKNLPL

SEQ ID NO: 12571 - DNA, 1515 bp, Alkalilimnicola ehrlichei MLHE-1
  CDS (1)..(1515): transl_table=11
atgagccgatcctatctggagcgcatcctcaccgcctgtgtctacgacgtggccatacagaccccgctggacgacggtgccaccctctccgagcgcctgggcaaccgggtgctgatgaagcgagaggacctgcagccggtcttttccttcaaactgcgtggggcctacaacaagatcaaccgcctttccgaggaggcgcgccagaagggcgtgatctgtgcctcggccggcaaccacgcccagggtgtggcgctgtcggcgaagaagctgggtatcaaggccaccatcgtcatgccgcgcaccacgccggacatcaaggtgaacgcggtcaagcggctgggcggccgggtggtgctgcacggcgactcctacgacgaggcctcacagcatgctaacaagctggtcgaggagcgggggttgacctacatccacccctacgacgacccggacgtgatcgccggccagggcacggtgggcatggagatcctgcaccagcacccgcgggacatccacgccatcttcatcgccgtgggtggcgggggcctggccgccggtatcggggtgtatatcaagcagttgcgccccgatatccgtatcatcgccgtggagccggacaccgcccctaccctggcccgcagcctggaggtgggccggcgggtgaagctggagcaggtggggctgttcgccgacggggtggcggtgcgtcaggtgggcaagaccaactggccgctgttgcgccagtatgtggatgacgtggtgctggtctcggatgatgagatttgcgcggcgatcaaggacatcttcgatgacacccgctcgatcatggagccggccggggcgctgggggtggcgggcttgaagaaatacgtggagcgcaccggtatccgcgacaagaccctggtggcggtgaactgcggcgccaacatgaacttctcgcgcctgggccatgtggccgagcgtgccgagctgggtgagcaccgtgaggcggtcttcgcggtcactatcccagagcggccggggagcttcaaacagttctgcgaggccatcggcaaacgcggtatcaccgagttcaactaccgctacgcggacccgacccaggcccacgtctatgccggcatccagctcagcaggggcgatgaggaacgggagctgctgcgcgaggagctggaggaggccggctacccggtgctggacctgaccgaggatgagatggccaaggtgcacgtccgccacatggtgggcggccgtggtggcggggtggagaacgagatcctttaccgcttcgagttcccggaacggcccggggcgctgctcaagttcctctcgcggatgggtcggcgctggaacatctcgctgttccactaccgcaaccacggggccgcctacggcaaggtgctggtgggcatgcaggtgccggaggccgagcgcggccgctgtgtggaatacctggacaaactgggctatcgctatgcagaggagaccgacaacccggcctaccggttgttcctgagctga

SEQ ID NO: 12572 - protein, 504 aa, Alkalilimnicola ehrlichei MLHE-1
MSRSYLERILTACVYDVAIQTPLDDGATLSERLGNRVLMKREDLQPVFSFKLRGAYNKINRLSEEARQKGVICASAGNHAQGVALSAKKLGIKATIVMPRTTPDIKVNAVKRLGGRVVLHGDSYDEASQHANKLVEERGLTYIHPYDDPDVIAGQGTVGMEILHQHPRDIHAIFIAVGGGGLAAGIGVYIKQLRPDIRIIAVEPDTAPTLARSLEVGRRVKLEQVGLFADGVAVRQVGKTNWPLLRQYVDDVVLVSDDEICAAIKDIFDDTRSIMEPAGALGVAGLKKYVERTGIRDKTLVAVNCGANMNFSRLGHVAERAELGEHREAVFAVTIPERPGSFKQFCEAIGKRGITEFNYRYADPTQAHVYAGIQLSRGDEERELLREELEEAGYPVLDLTEDEMAKVHVRHMVGGRGGGVENEILYRFEFPERPGALLKFLSRMGRRWNISLFHYRNHGAAYGKVLVGMQVPEAERGRCVEYLDKLGYRYAEETDNPAYRLFLS

SEQ ID NO: 12573 - DNA, 1227 bp, Hyphomonas neptunium ATCC 15444
  CDS (1)..(1227): transl_table=11
atgcctgatacattgcctcccgaactgcccgtaaccctgtccgacatacaggccgccgccaaggtgctggaggggcaaattgagcgcacagagctcgcccactccaaaacactgtcggcaattacgggcgctgaagtttgggtcaagctggagaaccggcagtacaccgccgccttcaaggaacgcggcgcgctgaacaagctctccaagctttccgacaatgagaagaaatatggcgtgattgccgcttcggccggcaaccatgcgcaaggcgttgcctatcacgcccgtcgccttggtattcccgcgaccatcgtgatgccgcagaccacccctttcaacaaggttgagcatacccgcgatcacggcgcccgtgttctgttggaaggcatgacattcgatgaggccaaggcccatgcctatgccgtctgcgagcgtgaaggcctgacattcgtacatcctttcgatgatgcagacatcatcgctggccagggcactatcgcgcttgagatgctggcggacaatccggggctcgatacgctggttgtgccaatcggtggcggcggcctgatttcaggcatagccattgcggcgaaagcgctgaagccggaaatccgcatcattggcgtgcagacggcaatgtatccggccatgcacgccgccatgcgcggcaaacccgcaaaaacgggcggtgcaacgatcgcagaaggcattgccgtgcgcgatgttggggacatcacccggcagatctgcgagcgcatggtggatgatgtggtcctcgttgaggaggaacacctcgaacgcgccattacgctctttgtagaggtcgaaaagacgattgcagaaggcgccggggccgcgggccttgccgctctcctcgcccacccttcccgtttctatggacgcaaggttggcctcgtactctgcggcggcaatatcgatacgcgcctgctggcctctgttttgacgcgggcactggtccgcgagaaccgactggcccgtatccgcatcgtcggagatgaccggccgggcctgctcgcgctggtttccaagatcatcggagacaatggcgccaatatcatggaagtcgcccacaaccggattgcgctggatgtgccggcgaaaggcgccgagttcgacatcctgatggagacccgtgacagccagcacacacaggaagtcatcgacgcgctggctcaggctggctacccgccgcgcgccatctag

SEQ ID NO: 12574 - protein, 408 aa, Hyphomonas neptunium ATCC 15444
MPDTLPPELPVTLSDIQAAAKVLEGQIERTELAHSKTLSAITGAEVWVKLENRQYTAAFKERGALNKLSKLSDNEKKYGVIAASAGNHAQGVAYHARRLGIPATIVMPQTTPFNKVEHTRDHGARVLLEGMTFDEAKAHAYAVCEREGLTFVHPFDDADIIAGQGTIALEMLADNPGLDTLVVPIGGGGLISGIAIAAKALKPEIRIIGVQTAMYPAMHAAMRGKPAKTGGATIAEGIAVRDVGDITRQICERMVDDVVLVEEEHLERAITLFVEVEKTIAEGAGAAGLAALLAHPSRFYGRKVGLVLCGGNIDTRLLASVLTRALVRENRLARIRIVGDDRPGLLALVSKIIGDNGANIMEVAHNRIALDVPAKGAEFDILMETRDSQHTQEVIDALAQAGYPPRAI

SEQ ID NO: 12575 - DNA, 1251 bp, Rhizobium leguminosarum bv. viciae 3841
  CDS (1)..(1251): transl_table=11
gtgacgagacttgatgtcgaaagcgccgaagaggcgatgcgcagcctttttccggcaacgccgctgcagctcaacgatcatctgtcggcccgctacggtgccgatatctggctgaagcgcgaggatctgtcgccggtgcgctcctacaagatccgcggcgccttcaatttcttccgcaaggcgatcgggcagggtgctgccggcaagaccttcgtctgcgcctcagccggcaaccacgcccagggctttgccttcgtctgccgccatttcggcgtgccgggcgtcgtcttcatgccggtgacgacaccgcagcagaagatcgacaagacccgcatgttcggcgccgaattcatcaccatccggctgttcggcgacttcttcgaccagtgctaccaagccgcccgcgaacatgtggaggcgattggcggcgtcatggtgccgcccttcgaccatgccgacatcatcgaaggccaggcgaccgtcgccgccgaaatcatgcagcagctgccggagggaacagtgccggacatggtcgtcctgccggttggcggcggcggacttgccgccggcatcaccagttatctcgacggcacggtgccgaaatcggctttcgtcttcactgagccggccggcgcgccgagccttaagcgcagcatcgaagcgggcaaggtgacgacgcttgccaaggtcgacaatttcgtcgatggcgctgcagtcgcccggatcggcgacctgaatttcgccgctcttcgcgattttccggccgagcaggtgcaactcataccggagaacgccatctgcgtcaccattcaggagatgctgaatgtcgagggcgtcgtgctggagccggccggcgccctgtcgctgacggcgatcgccgcgatggacggccaagcgatccgcggcaagaccatcgttgccgtcgtctccggcggcaatttcgatttcgagcgtctgcctgacgtgaaggaaagagccatgcgttacgcagggctgaagaaatacttcatcctgcggctcgcccagcgccccggtgcgctccgggatttcctcaatctgctcggccccgacgacgatatcgcccgcttcgagtatctgaagaaatcggcacgtaacttcggctcgatcctgattggcatcgaaaccaaggcgcctgagaatttcgctcggctgatcggaaatttcgaagcagccggcatgggttacgaggatattaccgaaaacgagatcctcgccaatctgatcatttga

SEQ ID NO: 12576 - protein, 416 aa, Rhizobium leguminosarum bv. viciae 3841
MTRLDVESAEEAMRSLFPATPLQLNDHLSARYGADIWLKREDLSPVRSYKIRGAFNFFRKAIGQGAAGKTFVCASAGNHAQGFAFVCRHFGVPGVVFMPVTTPQQKIDKTRMFGAEFITIRLFGDFFDQCYQAAREHVEAIGGVMVPPFDHADIIEGQATVAAEIMQQLPEGTVPDMVVLPVGGGGLAAGITSYLDGTVPKSAFVFTEPAGAPSLKRSIEAGKVTTLAKVDNFVDGAAVARIGDLNFAALRDFPAEQVQLIPENAICVTIQEMLNVEGVVLEPAGALSLTAIAAMDGQAIRGKTIVAVVSGGNFDFERLPDVKERAMRYAGLKKYFILRLAQRPGALRDFLNLLGPDDDIARFEYLKKSARNFGSILIGIETKAPENFARLIGNFEAAGMGYEDITENEILANLII

SEQ ID NO: 12577 - DNA, 1515 bp, Pseudomonas aeruginosa UCBPP-PA14
  CDS (1)..(1515): transl_table=11
atgctcgaacaatacgtcaagaagatcctcacctcgcgcgtctatgacgtcgcggtggaaacgcccctgcaacccgcccgccagttgtccgaacgcctcggcaaccaggtcctgctcaagcgcgaggacctgcagccggtgttttccttcaagatccgcggcgcctacaacaaggtcgcgcagctcaccgaggaggagaaggcccgcggggtgatcgccgcctcggccggcaaccacgcccagggcctggccctggcggccaagcggcaggggatcagggcggtcatcgtgatgcccaagaccacccccgagatcaaggtccaggcggtgcgcgcccacggcgccaaggcggtgctgcacggcgacgccttccccgaggcgctggcccacgcgctgaagctggtcgacgagaagggctacaccttcgtccatccctacgacgatccggacaccatcgccggccagggcaccgtggccatggagatcctccgccagcagcccggccgcctcgatgcgatcttcgtcccggtgggcggtggcggattggtcgccggcatcgccgcctacgtcaagtacctgcgtccggagatcaaggtgatcggcgtcgagccggacgagtcgaactgcctgcaggcggccatggccgccggcgagcgggtgatgctgggccaggtcgggctgttcgccgacggcgtggcggtggcgcagatcggccagcacaccttcgacatctgcaaggaccacgtcgacgaagtgatcaccgtcagcaccgacgagatctgtgcggcgatcaaggacatctacgacgacacccgctcgatcaccgagccggccggcgcgctggcggtggccgggatcaagaagtacgttgagcgcgagcgcgccgaggggcagaccctggtggcgatcgactccggcgccaacgtcaacttcgatcgcctgcggcatgtcgccgaacgcgccgaactgggcgagcgccgcgaagcgatcatcgcggtgaccattcccgagcggccgggcagcttcaaggccttctgcgaggcggtcggcaagcgccagatcaccgagttcaactatcgctaccacagcggcagcgaggcgcacatcttcgtcggcgtgcagacccacccggagaacgacccgcgcgaggcgctggtggcctatctgcgcgagaagggcttcccggtcctcgacctgaccgacaacgaactggccaagctgcacatccgccacatggttggcggccatgcagtgaaagtcagcgacgagatggtgttccgcttcgaattccccgagcggcccggcgcgctgttcaacttcctcaccaagctcggcgggcgctggaacatctcgatgttccactaccgcaaccatggcgcggccgacggccgggtggtggccgggttgcaggtgccggaagacgagcgccacctgatcccgcagaccctggaggcgatcggctatccgtactgggacgagaccgccaacccggcctaccagctgttcctcggctga

SEQ ID NO: 12578 - protein, 504 aa, Pseudomonas aeruginosa UCBPP-PA14
MLEQYVKKILTSRVYDVAVETPLQPARQLSERLGNQVLLKREDLQPVFSFKIRGAYNKVAQLTEEEKARGVIAASAGNHAQGLALAAKRQGIRAVIVMPKTTPEIKVQAVRAHGAKAVLHGDAFPEALAHALKLVDEKGYTFVHPYDDPDTIAGQGTVAMEILRQQPGRLDAIFVPVGGGGLVAGIAAYVKYLRPEIKVIGVEPDESNCLQAAMAAGERVMLGQVGLFADGVAVAQIGQHTFDICKDHVDEVITVSTDEICAAIKDIYDDTRSITEPAGALAVAGIKKYVERERAEGQTLVAIDSGANVNFDRLRHVAERAELGERREAIIAVTIPERPGSFKAFCEAVGKRQITEFNYRYHSGSEAHIFVGVQTHPENDPREALVAYLREKGFPVLDLTDNELAKLHIRHMVGGHAVKVSDEMVFRFEFPERPGALFNFLTKLGGRWNISMFHYRNHGAADGRVVAGLQVPEDERHLIPQTLEAIGYPYWDETANPAYQLFLG

SEQ ID NO: 12579 - DNA, 1548 bp, Pseudomonas aeruginosa UCBPP-PA14
  CDS (1)..(1548): transl_table=11
atgagcgcctcgaccctcagcgcaagcaaacccctgctggccggctacgtggaaagcatcctggccgcgccggtgtacgacgtcgccgtggaaacccccttgcaggtcgcgccgcagttgtcccagcgcctgggcaaccgggtgctgctcaagcgcgaggacctgcagccggtgttctccttcaagatccgcggcgcctatacccgtgtcgcgcgcctgagcgacgagcagaaggcccgcggggtgatcaccgcctccgccggcaaccatgcccagggcctggccctggcggcgcagcgcctgggcgtgcgggcggtgatcgtgatgccgcgcaccactcccgagctcaaggtcaagggcgtgctggcgcgcggcggcgaggcgttgctgcacggcgacgctttccccgatgcgctggcccatgccctgcaactggccgagcgcgaaggcatgaccttcgtcccgccctacgacgatccggacgtgatcgccggacagggcacggtggcgatggagatcctccgccagcacagcggccgcctcgacgcgatcttcgtgccggtcggcggcggcagcctgattgccgggatcgccgcctacgtcaagcacctgcgtccggatatccgcgtgatcggcgtcgagccggaggattccaactgcctgcaggcggcgctggccgccggcgaacgggtggtgctgggccaggtcgggctgttcgccgacggggtggcggtggcgcagatcggcgcttgcaacttcgaggtctgcaaggaccatgtcgacgaggtgatcaccgtcggcagcgacgaaatctgcgcggcgatcaaggacatctacgacgacacccgttcgatcaccgagccggccggcgccctggccgtagcggggatcaagaagtacgtggcccgcgaacgcaccgaggggcagaccctggtggccatcgactccggtgccaacatcaacttcgaccgcctgcgccacgttgccgagcgcgccgaactgggcgaacagcgcgaagcgatcatcgccgtcaccgtggccgagcggccgggcagcttcaaggccttctgcgcggcgctgggccggcgccagatcaccgagttcaactaccgctaccacagcgaccgccaggcccacctgttcgtcggcgtgcagacccatccgctcaccgacagtcgcgccgacctgctcgccggcctgcgtgagcagggcttcccggtactcgacctgaccgacaacgagatggccaagctgcacatccgccacatggtcggcggccacggtaccgaggtgcgccgcgagcggctgttccgcttcgagtttcccgaacgccccggggccttgctgaactttctcgacaagctcggctcgcgctggaacatcagcctgttccactaccgcaaccacggcgccgccgacggtcgggtgctggccggattgcaggtgccggacgaggagcgcggcgagctggaggcggcgttgcaagccatcggctatccgtactgggaggaaacccacaacccggcctaccggctgttcgccggttga

SEQ ID NO: 12580 - protein, 515 aa, Pseudomonas aeruginosa UCBPP-PA14
MSASTLSASKPLLAGYVESILAAPVYDVAVETPLQVAPQLSQRLGNRVLLKREDLQPVFSFKIRGAYTRVARLSDEQKARGVITASAGNHAQGLALAAQRLGVRAVIVMPRTTPELKVKGVLARGGEALLHGDAFPDALAHALQLAEREGMTFVPPYDDPDVIAGQGTVAMEILRQHSGRLDAIFVPVGGGSLIAGIAAYVKHLRPDIRVIGVEPEDSNCLQAALAAGERVVLGQVGLFADGVAVAQIGACNFEVCKDHVDEVITVGSDEICAAIKDIYDDTRSITEPAGALAVAGIKKYVARERTEGQTLVAIDSGANINFDRLRHVAERAELGEQREAIIAVTVAERPGSFKAFCAALGRRQITEFNYRYHSDRQAHLFVGVQTHPLTDSRADLLAGLREQGFPVLDLTDNEMAKLHIRHMVGGHGTEVRRERLFRFEFPERPGALLNFLDKLGSRWNISLFHYRNHGAADGRVLAGLQVPDEERGELEAALQAIGYPYWEETHNPAYRLFAG

SEQ ID NO: 12581 - DNA, 1551 bp, Magnetococcus sp. MC-1
  CDS (1)..(1551): transl_table=11
atggaggatctacactgcccttttatacaaaggttgcccatgtccgaacaactgtttcgccacattcttacttcccgcgtctacgaggctgcggtggagacccctttggaacagtcggcttggctttcggcgcagctacgcaaccaagtttttattaaacgcgaggatctacagcctgtcttttcgtttaaattacgcggggcctacaacaaaatggcgcagcttacccctgagcagcgggcccggggcattattgcggcctctgcgggcaaccatgcgcaaggggtggcctttagcgcccgtcagttggggttatctgccaccattgtgatgccctgcaccaccccagagatcaaggtgggggcggtcaaacagtttggtgcccaggtggtgctgcatggggataactactccatcgccgccgaccactgtaaagagctggctcagcacaacggcatgacctttattcacccctttgacgatgagctggtgatcgccggacagggtaccgtggggctggagattatgcgccagagcggtaatcaactggacgccatttttgttccggtcggcggcggggggttgattgcgggcattgccacctatgtaaaaaatctgctaccgcagatccgtattattggcgtagaacccaccgatagcgatgccatggcccgcgccctagaggcgggcaagattgtctctttagaccaagtgggcatctttgccgatggggtggcggtgcgtgaggttggtacacgcaccctggcgctgtgtgaacagtatgtggatgagatggtgcgggtcaatgtggatgagatctgtaccgccatcaagtggacctatcaagccacccgtgccattgtagagcccgcaggggccttagcgctggctggtttacgccgctatgtggcggaaaaaggcataaccggtcaacgcttggtggtcatcaatagcggggccaatatgaactttgagcggctccgttatgtaaccgaacgcaccatggttggggagcaacgcgaggcgctgtttgccatcaccatacctgaacagcccggtgctctacgccacttttgccaagaggtggtgggggaccataatattaccgaatttaactaccgtctatcggggcgcgatgccgcccatatctttgtgggcattgatctgcgtgaaccagccgaacgacaactgctcgcccatcggttacagagtttccactatcaatttgtggatcttaccgaaaacgatctggccaagacccacctgcgtcatatggttggcgggcgttcccatgtggtgcagcatgagcgtcttttgcgttttcgtttccccgaacggcccggtgccttggcccactttcttaccaccatgcaggcggattggaacatctcactgtttcaataccgactacacggcggggagtatggtcgggtgttgattggtctggaggtgccccctgagcaacacgatcaattgcaaagctgcctagataagctgggttttcgctatgtagatgagagtgagaatcctgcctataagctgtttctctag

SEQ ID NO: 12582 - protein, 516 aa, Magnetococcus sp. MC-1
MEDLHCPFIQRLPMSEQLFRHILTSRVYEAAVETPLEQSAWLSAQLRNQVFIKREDLQPVFSFKLRGAYNKMAQLTPEQRARGIIAASAGNHAQGVAFSARQLGLSATIVMPCTTPEIKVGAVKQFGAQVVLHGDNYSIAADHCKELAQHNGMTFIHPFDDELVIAGQGTVGLEIMRQSGNQLDAIFVPVGGGGLIAGIATYVKNLLPQIRIIGVEPTDSDAMARALEAGKIVSLDQVGIFADGVAVREVGTRTLALCEQYVDEMVRVNVDEICTAIKWTYQATRAIVEPAGALALAGLRRYVAEKGITGQRLVVINSGANMNFERLRYVTERTMVGEQREALFAITIPEQPGALRHFCQEVVGDHNITEFNYRLSGRDAAHIFVGIDLREPAERQLLAHRLQSFHYQFVDLTENDLAKTHLRHMVGGRSHVVQHERLLRFRFPERPGALAHFLTTMQADWNISLFQYRLHGGEYGRVLIGLEVPPEQHDQLQSCLDKLGFRYVDESENPAYKLFL

SEQ ID NO: 12583 - DNA, 1284 bp, Mycobacterium avium 104
  CDS (1)..(1284): transl_table=11
gtgtccgccgaattgagtcagtccccgagcgtcgcgccgctttcagcggctgacatcgacgacgcggccaagcggatcgccgcggtggtcacgccgaccccgttgcagttcagcgaccggctgtcggcgatcaccggcgcacaggtctacctcaagcgcgaggacctgcagatcgtgcgctcctacaagctgcgcggcgcctacaacctgctggtgcagctgtccgagacggagctggccgcgggcgtggtgtgctcgtcggcgggcaatcacgcccaggggttcgcctacgcctgccggatgttgcaggtgcacggccgcgtctacgtgccggccaagacgccgttgcagaagcgggaccggatccgctaccacggcggggagttcatcgagctgatcgtcggcggaaccacctacgaccaggccgccgaggcggcgctggccgacgtggcgagcaccggcgccaccctcgtcccgccctatgacgatctgcgcaccatcgccggccagggcaccatcgccgtcgagctgctcgaccagctcgacaccgagccggacctggtggtggtcccggtgggcggcggcggctgcatcgccggcatcaccacctacctcgccgagcgcaccgacaccaccgcggtgctcggcgtcgagccggccggggccgcggcgatgatggccgccctggcggccggcgagccggtgacgctggaccacgtcgaccagttcgtcgacggtgccgcggtgcggcgggccggtgacctgacctatgccgcgctggcggccgccggcgacatggtgtcgatcaccacggtcgacgagggcgcggtgtgcaccgcgatgctcgacctctaccagaacgagggcatcatcgccgagcccgcgggcgcgctgtcggtcaccgggttgctggaggccgacatcgagcccggttcgacggtggtctgcctgatctccggcggcaacaacgacgtgtcgcgctacggcgaggtgctggagcggtccctggtgcacctgggcctcaagcactacttcctggtcgacttcccgcaggagccgggcgcgctgcgccggttcctcgacgaggtgctcggccccaacgacgacatcacgctgttcgagtatgtcaagcgcaacaaccgggagaccggcgaggcgctggtgggcatccagttggggtcctcggccgacctggacggcctgctggcccgaatgcgggcgaccgagctgcacgtcgagaccctgaagccgggctcgccggcctaccgctacctgctgctctaa

SEQ ID NO: 12584 - protein, 427 aa, Mycobacterium avium 104
MSAELSQSPSVAPLSAADIDDAAKRIAAVVTPTPLQFSDRLSAITGAQVYLKREDLQIVRSYKLRGAYNLLVQLSETELAAGVVCSSAGNHAQGFAYACRMLQVHGRVYVPAKTPLQKRDRIRYHGGEFIELIVGGTTYDQAAEAALADVASTGATLVPPYDDLRTIAGQGTIAVELLDQLDTEPDLVVVPVGGGGCIAGITTYLAERTDTTAVLGVEPAGAAAMMAALAAGEPVTLDHVDQFVDGAAVRRAGDLTYAALAAAGDMVSITTVDEGAVCTAMLDLYQNEGIIAEPAGALSVTGLLEADIEPGSTVVCLISGGNNDVSRYGEVLERSLVHLGLKHYFLVDFPQEPGALRRFLDEVLGPNDDITLFEYVKRNNRETGEALVGIQLGSSADLDGLLARMRATELHVETLKPGSPAYRYLLL

SEQ ID NO: 12585 - DNA, 1215 bp, Nocardioides sp. JS614
  CDS (1)..(1215): transl_table=11
atgactgaggtcccgacggtcgggctggccgacatcgaggaggcccgccgggtcctggccggcgtcgcgatccagaccccgatggaggagtcccgctggctctcggcgatcgccggcgggccggtgtggctcaagtgcgagaacctccagcgcaccgggtccttcaagccccgcggcgcctacgtgcgcatctcccggctcacccccgaggagcgggcccgcggggtcgtggcggcctcggcgggcaaccacgcgcagggcgtggcgctggccgcgcagctgctcggcatcaaggccaccgtcttcatgcccgagggggcgccgatccccaaggagaaggcgacccgcgggtacggcgcggaggtgctcttccacggccggtacctcgaggacgcgctggccgaggcgaccgtgttcgccgagcgcaccggcgcggtgctgatccaccccttcgaccacgccgacgtcgtcgccggccagggcacggccggcctcgagatcctcgagcaggcgcccgacctgcagacggtgctggtccccaccggcggtggtgggctgctggcgggggtcgcgatcgcggtgaaggcgcggcgccccgacgtccgggtgatcggggtgcaggcggccggcgccgcggcgtaccccggctcgctcgccgaggggcaccccgtcgccctgacctcgatgaagacgatggccgacggcatcgccgtgggcctcccggggcaggtcaccttcgcggcggtgcgcgaccacgtcgacgagatcgtcacggtctccgagaactcgctgtcccgctcggtgctggccgtgctggagcgcgcgaagatgctggtcgagcccgccggagcggccgcggtcgccgccgtgctggaccggccggacatcttcgcgacccccgcggtggtcgtgctctcgggcggcaacatcgaccccctgctgctcggcaaggtgatccggcacggcatggcggccgccggccgctacctgaacctacgggtctgcatccccgacctgccgggcgggctcgcgcagctgctcaccgacatctccgcggtcggagcgaacgtgctcgaggtcgcgcacgagcggatctcacccacgctgaacctcgacgaggtcgaggtgcacgtccagctcgagacccgcggggagccgcacaccgcgcaggtgctggcgcgcctgcgcgagcgcggctaccgcgtgtacgagtag

SEQ ID NO: 12586 - protein, 404 aa, Nocardioides sp. JS614
MTEVPTVGLADIEEARRVLAGVAIQTPMEESRWLSAIAGGPVWLKCENLQRTGSFKPRGAYVRISRLTPEERARGVVAASAGNHAQGVALAAQLLGIKATVFMPEGAPIPKEKATRGYGAEVLFHGRYLEDALAEATVFAERTGAVLIHPFDHADVVAGQGTAGLEILEQAPDLQTVLVPTGGGGLLAGVAIAVKARRPDVRVIGVQAAGAAAYPGSLAEGHPVALTSMKTMADGIAVGLPGQVTFAAVRDHVDEIVTVSENSLSRSVLAVLERAKMLVEPAGAAAVAAVLDRPDIFATPAVVVLSGGNIDPLLLGKVIRHGMAAAGRYLNLRVCIPDLPGGLAQLLTDISAVGANVLEVAHERISPTLNLDEVEVHVQLETRGEPHTAQVLARLRERGYRVYE

SEQ ID NO: 12587 - DNA, 1521 bp, Azoarcus sp. BH72
  CDS (1)..(1521): transl_table=11
atgacttccgccagtcccgattacctggaacgcatcctcaacgcccaagtctatgatcttgcggtggaaaccccgctcgatctggcgaccaacctgtcggcgcggagcggtaaccggatctacctgaagcgcgaggacatgcagccggtgttcagcttcaagctgcgcggcgcgtacaacaagatggccaacctgtcgccgcaggcgctgcagcgcggcgtcatctgcgcttcggccggcaaccacgcccagggcgtcgcgctgtcggcgcagaagctgggggtgcgcgcggtgatcgtgatgccgacgacgacgccgcagatcaagatcgacgcggtgcgcagccgcggcggcgaggtggtgctggcgggcgagtcctattccgacgcgtacgcgcacgcgctggagctggaaaaagcggaaaagctcaccttcgtccatccctacgacgaccccgacgtgatcgccggccagggcaccatcggcatggaaatcctgcgcgcgcatgcgaagccgatccacgcgatcttctgcgccgtcggcggcggcggcctgatcgccggggtcgcggcctacgtcaagcgcttgcgccccgagacccgcatcatcggcgtcgaatccgagggcgccgcggccatgaccgaatcgctcgcgcggggcgagcgcgtcagcctcgagcaggtagcgctctttgcggacggcactgcggtcaagcaggtgggcggcgaaaccttccgcctgtgccagcaatacgtcgatgaaatgatcgtggtcgacaacgacgcgatctgcgcggcgatcaaggacgttttcgaagacacccgctccatcctcgaaccctcgggcgccctcgcggtggccggtgcaaaggagtacgcacggcgccaccagctcagcgaccgcagcctggtcgcggtcgcgtccggcgcgaacatgaacttcgaccgcctgcgcttcgtcgccgagcgcgcggagctcggcgaacagcgcgaggccgtgcttgcggtcaccattccggagcagcccggctcgttccgcaagttcatcaacatcctgggcaaccgcgacatcaccgagttcaactaccgctacgccgacagcgagcgcgcccacatcttcgtcggggtcacggtgcgcagccgcgacgaggccacccggctggtggagatgctcggccagcacgacctgccggcgctcgacctcaccgacgacgaactcgccaagtcgcacgtgcgctacatggtcggcggacgcgcgccgcaggtggccaacgagctggtataccgcttcgtgtttccggagcgcccgggcgcgctgctcaacttcctgtccaacctgcgctcggactggaacatcagcctgttccactatcgcaaccacggcgcggatttcggccgcgtgctggtgggcatgcaggtgccgccccaggacatcgacgcgttcgaggccttcctgcagcgcctcggctacgaatacgccgcggaaacggaaaacccggcctaccggctgttcctggcctga

SEQ ID NO: 12588 - protein, 506 aa, Azoarcus sp. BH72
MTSASPDYLERILNAQVYDLAVETPLDLATNLSARSGNRIYLKREDMQPVFSFKLRGAYNKMANLSPQALQRGVICASAGNHAQGVALSAQKLGVRAVIVMPTTTPQIKIDAVRSRGGEVVLAGESYSDAYAHALELEKAEKLTFVHPYDDPDVIAGQGTIGMEILRAHAKPIHAIFCAVGGGGLIAGVAAYVKRLRPETRIIGVESEGAAAMTESLARGERVSLEQVALFADGTAVKQVGGETFRLCQQYVDEMIVVDNDAICAAIKDVFEDTRSILEPSGALAVAGAKEYARRHQLSDRSLVAVASGANMNFDRLRFVAERAELGEQREAVLAVTIPEQPGSFRKFINILGNRDITEFNYRYADSERAHIFVGVTVRSRDEATRLVEMLGQHDLPALDLTDDELAKSHVRYMVGGRAPQVANELVYRFVFPERPGALLNFLSNLRSDWNISLFHYRNHGADFGRVLVGMQVPPQDIDAFEAFLQRLGYEYAAETENPAYRLFLA

SEQ ID NO: 12589 - DNA, 1266 bp, Bifidobacterium longum DJO10A
  CDS (1)..(1266): transl_table=11
atggaacaaaaggatgttttgaaggcgctgcaacgtgatcatgcagccgaactgaagctggccgccgaacgactcaaaggcactgcccgccacacggagatcattccttctccggtgctgagcgagatgaccggccatgagattctcctgaagccggaaaacctgcaggtcaccggatccttcaagatccgcggtgcctataacaagattgcttcgctcaccgaagagcagatcgctcacggcatcgtcaccgcgtctgccggcaaccatgcccagggtgtggcctatgcggcccgcgagcgtggagccaaggccaccatctgcatgccgcagatcaccccgccgctgaaggtcgatgccaccaaggcctacggtgccgacgtggtgctgtacggcgatgtgttcgatgaatccgccgcccacgctgctgagctcgccgacaaggaaggcatgatttacgtgccgccattcgacgattacgaagtcatctgcggccaaggcaccatcggtctggagatccttgaagacgtgccgaacgtcactgacgtggtcgtgccgctcggtggtggtggcctgggtgccggcgtggcgctcgccatcaagacattcaagcctgaagtgcgcgtaatcggtgcgattccggagggctcaccggcctggaaggactcgctggccgcgggtcgtgtgtctccggctgaccatgtggttacctccgccgaaggtgttgcggtcaagcaccccggcgacctgcccttcgctctgattaacgagttcctggacgatctggtcaccgtcaccgagcgcgacatcaacgaaatgattctgctcatgctcgagaagcataagctggtggtcgaggcggccggcgccgtttcgctggctgcgctggaacacctgaacctgcgttcgcgcaagttcgccgccgccaccggcccgcacgtggtggttccgattatgtccggcggcaatatcgacaccgtgaccatgggtgcggtgattcagaaaggtatgatcgcccgcggccgcatcatgaacttcgaggtcgagctgccggatactccgggccagctcgtcaaggtggccaccctgcttgccgagcagcgcgccaacgtcattcagcttgatcacgaccagttcaaggcatccggccactacaccaacgcggtgtctctcggcgtcacggtcgagaccaacggccccgagcacatcgaccgcatcctcgcggcactcagggaagccggattccagcccaagcgcatctactga

SEQ ID NO: 12590 - protein, 421 aa, Bifidobacterium longum DJO10A
MEQKDVLKALQRDHAAELKLAAERLKGTARHTEIIPSPVLSEMTGHEILLKPENLQVTGSFKIRGAYNKIASLTEEQIAHGIVTASAGNHAQGVAYAARERGAKATICMPQITPPLKVDATKAYGADVVLYGDVFDESAAHAAELADKEGMIYVPPFDDYEVICGQGTIGLEILEDVPNVTDVVVPLGGGGLGAGVALAIKTFKPEVRVIGAIPEGSPAWKDSLAAGRVSPADHVVTSAEGVAVKHPGDLPFALINEFLDDLVTVTERDINEMILLMLEKHKLVVEAAGAVSLAALEHLNLRSRKFAAATGPHVVVPIMSGGNIDTVTMGAVIQKGMIARGRIMNFEVELPDTPGQLVKVATLLAEQRANVIQLDHDQFKASGHYTNAVSLGVTVETNGPEHIDRILAALREAGFQPKRIY

SEQ ID NO: 12591 - DNA, 1527 bp, Actinobacillus pleuropneumoniae serovar 1 str. 4074
  CDS (1)..(1527): transl_table=11
atgagcaatccgacaattcaatccggcaccgattatctgcgtgtaatcctcagttcaaatatctacgacctagcgcaagttaccccgcttcaaaaaatggaaaaactctccgagcgtttaggcaaccaaattcttatcaaacgtgaagatcgccaaccggtacatagtttcaaactgcgtggtgcatttgccatgatttccaatctctcggcaagccaaaaagccgccggtgtgattaccgcttcggcaggaaaccacgctcaaggcgtggcgctttcatcaaaacacttaggacttcgtgcattaatcgttatgccgcaaaatacgccggcaattaaagtcgatgcggtgcgagggttcggtggagaagtcttactattcggtgccaattttgatgaggcgaaagccaaagcattagaactttctacagagttggggatgactttcgtaccaccgttcgatcacccgatggtgattgccggacaaggtacgatcggtatggaattagtacagcaaagatcagatttagattatgtattcgtaccggtcggtggcggcggtttagccgccggtattgcggtattaattaagcaaattctaccgaatgtaaaagtgattggcgttgaatcaaaagattccgcttgtttgcaacatgccttaaaagtcggcaaaccggataacttggaacgtgtcggcttattcgcagacggtattgcggtaaaaagaatcggtgacgaaactttccgtttatgccagaaatatatcgatgaagtggtactggtcgataacgatcagatttgtgcggcaatgaaagatatttttgaaaacgtacgtgcgattgcagaaccttccggtgcgacttcattagccggcttaaaaaaatatgtgaaagaacaccaacttgaaggcaaaaacttagcttgtgtgctttccggtgcgaacttgaatttccatacgttacgttatgtttcggaacgttgtgaaatcggcgaaaaacatgaagccttattagcggtaaccattccggaacaaaaaggcagttttttaaaattctgtgagattttaggcaatagagcggtcaccgaatttaactatcgacacgcagatgacaataaagcgtgtattttcgttggggttcgtattaccggcaatgcggaaaaagcggatatcattcgcgatctacaacagcacaattataacgtagtggatctttcggatgatgacattgctaaaacgcatattcgttatatggtcggcggtcgtcctaacagcattagcagcgagcaactttatagcttcgaattccctgagcaaaaaggcgcattattaaaattcctccaaacactgaccgattgggatatttcattattccattatcgtgcgcacggggcggattacggcgatattctcgctgcgtttactttagatgaaagcgataagcatcgccttaatcagcatttggatcaacttggttatcgttatcaaaacgtaacggatagccttgcatatcaatactttttaaaataa

SEQ ID NO: 12592 - protein, 508 aa, Actinobacillus pleuropneumoniae serovar 1 str. 4074
MSNPTIQSGTDYLRVILSSNIYDLAQVTPLQKMEKLSERLGNQILIKREDRQPVHSFKLRGAFAMISNLSASQKAAGVITASAGNHAQGVALSSKHLGLRALIVMPQNTPAIKVDAVRGFGGEVLLFGANFDEAKAKALELSTELGMTFVPPFDHPMVIAGQGTIGMELVQQRSDLDYVFVPVGGGGLAAGIAVLIKQILPNVKVIGVESKDSACLQHALKVGKPDNLERVGLFADGIAVKRIGDETFRLCQKYIDEVVLVDNDQICAAMKDIFENVRAIAEPSGATSLAGLKKYVKEHQLEGKNLACVLSGANLNFHTLRYVSERCEIGEKHEALLAVTIPEQKGSFLKFCEILGNRAVTEFNYRHADDNKACIFVGVRITGNAEKADIIRDLQQHNYNVVDLSDDDIAKTHIRYMVGGRPNSISSEQLYSFEFPEQKGALLKFLQTLTDWDISLFHYRAHGADYGDILAAFTLDESDKHRLNQHLDQLGYRYQNVTDSLAYQYFLK

SEQ ID NO: 12593 - DNA, 1542 bp, Haemophilus influenzae R2846
  CDS (1)..(1542): transl_table=11
atgaaaaacttacttaccaatcctcaaccctctcaatcagattatatcaatgccattgttaaacttggttcgcgcgtatatgaagctgcacaagtgacccctttacaaaaaatgggaaaactttctgaacgactgcacaataatatctggattaaacgagaagaccgtcagccagtaaatagctttaaactacgcggcgcttacgcaatgatttctagcctttcagcagaacaaaaagcagcaggcgtaatagcggcatctgcaggtaaccatgcacaaggcgtggcattatcggcgaaacaattaggcttaaaagcattgatcgtcatgccacaaaacaccccaagcattaaagtggatgcagtgcgtggttttggtggcgaggtgttgttgcacggtgctaatttcgatgaagccaaagcaaaagccatcgagctttcaaaagaaaaaaacatgacatttattccaccattcgatcatccattagtgatcgctggacaaggcacgttagcgatggaaatgctacaacaagtggcagatttggattatgtgtttgtacaagtcggcggtggtggcttagctgcaggtgtagcaattttgcttaagcaatttatgccagaaattaaaatcatcggtgtagaatcaaaggattctgcgtgcttaaaagcggctcttgataaaggcgaaccaacagatttaacccatgttggattatttgccgatggtgttgccgtaaaacgcattggtgacgaaacattccgtctatgtcagcaatatcttgatgatatggtattggtcgatagtgacgaagtatgcgcagcaatgaaagatttgtttgagaacgttcgtgctgttgcagaaccatcaggtgcattaggtttggctggtttgaaaaaatatgtaaaacaaaaccatattgaaggcaaaaatatggcggcaattttgtctggcgcgaacttgaatttccacacattacgttatgtatctgaacgttgtgaaattggtgaaaatcgagaggctttattagccgtaaccatgcctgaacaaccaggtagtttcttaaaatttgcttatgtattaggtaaccgagctgtaaccgaattcagttatcgttatgcagatgataaacgcgcttgtgtgtttgttggggtaagaacgacaaatgagcaagaaaaagcagatattattgcagacctcacgaaaaatggttttgatgttgaggatatgtctgatgatgatattgcgaaaacgcatgttcgctatttaatgggggggcgcgcatcaaatgataacgaacgtttatataccttcgaattcccagagcaaaaaggtgccttattaaaattcttggaaaccttgcaaaatcgttggaatatttcattatttcactatcgtgcccacggcgcggactatggaaatatccttgctgggttccaaattgaacaacgcgaacaagcagaatttgaacaggtacttgcccaactcaattatgtttttgaagatgtaacagaaagcaaatcttatcgttatttcttacgttaa

SEQ ID NO: 12594 - protein, 513 aa, Haemophilus influenzae R2846
MKNLLTNPQPSQSDYINAIVKLGSRVYEAAQVTPLQKMGKLSERLHNNIWIKREDRQPVNSFKLRGAYAMISSLSAEQKAAGVIAASAGNHAQGVALSAKQLGLKALIVMPQNTPSIKVDAVRGFGGEVLLHGANFDEAKAKAIELSKEKNMTFIPPFDHPLVIAGQGTLAMEMLQQVADLDYVFVQVGGGGLAAGVAILLKQFMPEIKIIGVESKDSACLKAALDKGEPTDLTHVGLFADGVAVKRIGDETFRLCQQYLDDMVLVDSDEVCAAMKDLFENVRAVAEPSGALGLAGLKKYVKQNHIEGKNMAAILSGANLNFHTLRYVSERCEIGENREALLAVTMPEQPGSFLKFAYVLGNRAVTEFSYRYADDKRACVFVGVRTTNEQEKADIIADLTKNGFDVEDMSDDDIAKTHVRYLMGGRASNDNERLYTFEFPEQKGALLKFLETLQNRWNISLFHYRAHGADYGNILAGFQIEQREQAEFEQVLAQLNYVFEDVTESKSYRYFLR

SEQ ID NO: 12595 - DNA, 1542 bp, Haemophilus influenzae R2866
  CDS (1)..(1542): transl_table=11
atgaaaaacttactcaccaatcctcaaccttctcaatcagattatatcaatgccattgttaaacttggttcgcgcgtatatgaagctgcgcaagtgacccctttacaaaaaatgggaaaactttctgaacgactgcacaataatatctggattaaacgagaagaccgtcagccagtaaatagctttaaactacgcggtgcttacgcaatgatttctagcctttcagaggaacaaaaagcagcaggcgtaatagcggcatctgcaggtaaccatgcacaaggcgtggcattatcggcgaaacaattaggcttaaaagcactgatcgtcatgccacaaaacaccccaagcattaaagtggatgcagtgcgtggttttggtggcgaggtgttgttgcacggtgctaatttcgatgaagccaaagcaaaagccatcgagctttcaaaagaaaaaaacatgacatttattccaccattcgatcatccattagtgatcgctggacaaggcacgttagcgatggaaatgttacaacaagtggcagatttggattatgtgtttgtacaagttggcggtggcggtttagctgcaggtgtagcaatgttgcttaagcaatttatgccagaaattaaaatcatcggtgtagaatcaaaggattctgcatgcttaaaagcggctcttgataaaggcgaaccaacagatttaacccatgttggattatttgccgatggcgttgccgtaaaacgcattggcgacgaaacattccgcctatgccaacaatatcttgatgatatggtattggtcgatagtgacgaagtatgcgcagcaatgaaagatttgtttgagaacgttcgtgctgttgcagaaccatcaggtgcattaggtttggctggtttgaaaaaatatgcgaaacaaaaccatattgaaggcaaaaatatggcggcaattttgtctggcgcgaacttgaatttccatacattacgttatgtatctgaacgttgtgaaattggtgaaaatcgagaggctttattagccgtgaccatgcctgaacaaccaggtagtttcttaaaatttgcttatgtattaggtaacagagctgtaaccgaattcagttatcgttatgcagatgataaacgagcttgcgtgtttgttggagtaagaacgacaaatgagcaagaaaaagcagatattattgcagacctcactaaaaatggttttgatgttgaggatatgtctgatgatgatattgcgaaaacgcacgttcgctatttaatgggaggtcgagcagccaatgataatgaacgcttatatacgttcgaattcccagagcaaaaaggtgcgttattgaaatttttagaaaccttgcaaaatcgttggaatatttcattattccattatcgtgcccacggtgcggactatggaaatatccttgctggtttccaaattgaagaacacgaacaagcagaatttgaacagacacttgcccaactcaattatgtttttgaagatgtaacagaaagcaaatcttatcgttatttcttacgttaa

SEQ ID NO: 12596 - protein, 513 aa, Haemophilus influenzae R2866
MKNLLTNPQPSQSDYINAIVKLGSRVYEAAQVTPLQKMGKLSERLHNNIWIKREDRQPVNSFKLRGAYAMISSLSEEQKAAGVIAASAGNHAQGVALSAKQLGLKALIVMPQNTPSIKVDAVRGFGGEVLLHGANFDEAKAKAIELSKEKNMTFIPPFDHPLVIAGQGTLAMEMLQQVADLDYVFVQVGGGGLAAGVAMLLKQFMPEIKIIGVESKDSACLKAALDKGEPTDLTHVGLFADGVAVKRIGDETFRLCQQYLDDMVLVDSDEVCAAMKDLFENVRAVAEPSGALGLAGLKKYAKQNHIEGKNMAAILSGANLNFHTLRYVSERCEIGENREALLAVTMPEQPGSFLKFAYVLGNRAVTEFSYRYADDKRACVFVGVRTTNEQEKADIIADLTKNGFDVEDMSDDDIAKTHVRYLMGGRAANDNERLYTFEFPEQKGALLKFLETLQNRWNISLFHYRAHGADYGNILAGFQIEEHEQAEFEQTLAQLNYVFEDVTESKSYRYFLR

SEQ ID NO: 12597 - DNA, 1269 bp, Listeria monocytogenes str. 1/2a F6854
  CDS (1)..(1269): transl_table=11
atggaattagttgacttattagtaacagaagaagatgtcgaaaaggcctatgaagtcttaaagtcggtcgtcaaacatacaccactagaatatgatttttatctttcggaaaaatatcattgcaatgtctatctgaaacgcgaagatttgcaaagagtgcgttcttttaaattacgtggtgctttttatgctatttctagattatcagcggaacaattggaaaaaggagtggtgtgcgcaagtgctggaaatcatgcgcaaggagttgcatatacgtgcaaacgaatgacagttccagctacgatttttatgccaacgactaccccgcaacaaaaagtatcacaagtaaaattttttggtggtagtaatgtcgaagtggttttagttggcgatacgtttgatgcttctgcaactgccgcgaaagaatttgctgcagcgcatggccaaacttttatcccaccgtttgatgatcctgatattattgcaggccaaggctcgcttgctgtggagatggtcaaagatttaaataaagcacacgagcaagcagattatgtttttgctggaattgggggtggtggcttgattagcggtgttgcaacgtatctcaaagcgaagagcccgattacaaaaatcatcggggtagaacctgatggcgcgccttcaatgacagcagctttaaaacaaaatcaagtcgtaacactagataaaatcgataaatttgtcgatggcgctgcggtaaaagaagttggtagcttaacgttccaacatgcgaaagtgttagttgatgaagtgacaaccatctctgagggagctgtttgctctacgattttggatatgtatacgaagcaagcgattgttgcagaaccagctggagcactttcggttgccgcacttgaaacctaccgcgaggaaattaaagacaagacggttgtttgtattgtaagtggcggaaacaacgatattaaccggatgcaagaaattgaagagcgttccctgctacatgaaggtttaaagcattattttatcgtcaacttctcacaacgtcctggtgctttgaaagaatttgttaacgatgtgctcggtccacatgacgatatcactaaattcgaatatacgaaaaaagtgaatcgtggtaatggaccagttattatcggtgttttgttgcaagataaaaatgattatgaaggattacttgaccgggttgctgcttttgacccgagctatattccaattaatgataatcaaaccctatacacattacttgtttaa

SEQ ID NO: 12598 - protein, 422 aa, Listeria monocytogenes str. 1/2a F6854
MELVDLLVTEEDVEKAYEVLKSVVKHTPLEYDFYLSEKYHCNVYLKREDLQRVRSFKLRGAFYAISRLSAEQLEKGVVCASAGNHAQGVAYTCKRMTVPATIFMPTTTPQQKVSQVKFFGGSNVEVVLVGDTFDASATAAKEFAAAHGQTFIPPFDDPDIIAGQGSLAVEMVKDLNKAHEQADYVFAGIGGGGLISGVATYLKAKSPITKIIGVEPDGAPSMTAALKQNQVVTLDKIDKFVDGAAVKEVGSLTFQHAKVLVDEVTTISEGAVCSTILDMYTKQAIVAEPAGALSVAALETYREEIKDKTVVCIVSGGNNDINRMQEIEERSLLHEGLKHYFIVNFSQRPGALKEFVNDVLGPHDDITKFEYTKKVNRGNGPVIIGVLLQDKNDYEGLLDRVAAFDPSYIPINDNQTLYTLLV

SEQ ID NO: 12599 - DNA, 1203 bp, Bacillus cereus G9241
  CDS (1)..(1203): transl_table=11
atgaaggatatcgttattaaaacaccgttacaacgtgatacagttttatctgagaaatatgattgtgacgtttatgtaaaacgagaagacttacaattgattcgctctttcaaaattcgtggtgcgtataatctaattcaaagtttaccgaaagtgcaattacaaaacggtgttgtttgtgcaagtgctggtaatcatgcgcaaggagtagcttatacatgtaatttattgaagattccgtcaaaaattttcatgccgacgacgacacctaaacaaaaagtgtcacaagtacaatttttcggtggtgattttgcggaaattgtattagttggtgatacatttgatagctctttccaagaagcacagcgctattgtgaaaaaaataggatgacgtttgttcacccatttgatgatccatatgttattgctggtcaagggacagtcgcagttgaaattatgcatgatatggagaaaacggttgattatatctttacagcaattggcggtggtggattagcatcaggagttggtacatatgtgaaaggtgttagtcctgctacaaagattattggtgtagagccaatgggagctgcatctatgaaagaggcttttcttcaaaatgaaaatgtcgcattggagaaaatagatagttttgttgatggggcagctgttaaaaaggtaggaaagttaacatttgaaacgtgtaaagatgtaattgatgatattgttttaataccagaaggaaaggtttgtacgacgattttagaactgtataagaaaaatgcaattgtagctgaaccggctggtgcgctatctattgcagcgcttgatttatatagagatgaaataaaaggtaaaacagttgtatgtacgctaagtggtgggaataatgatattgatagaatgcaagaaatgaaagaacgttctctcatttacgaagggttaaagcattattttatcattgaattcccgcagcgttcaggtgcgctaagagaatttcttgataaaggattaggaccagaagatgatattacgcgctttgagtatattaagaaacataataaagaaaatggtccagcattagtcggagtagagttaaaacataaagaagattatgagcaattaattactcgttttaaagaaaataatattcaatttatggagcttaataaaaatcctgttttgtttgatttacttatttaa

SEQ ID NO: 12600 - protein, 400 aa, Bacillus cereus G9241
MKDIVIKTPLQRDTVLSEKYDCDVYVKREDLQLIRSFKIRGAYNLIQSLPKVQLQNGVVCASAGNHAQGVAYTCNLLKIPSKIFMPTTTPKQKVSQVQFFGGDFAEIVLVGDTFDSSFQEAQRYCEKNRMTFVHPFDDPYVIAGQGTVAVEIMHDMEKTVDYIFTAIGGGGLASGVGTYVKGVSPATKIIGVEPMGAASMKEAFLQNENVALEKIDSFVDGAAVKKVGKLTFETCKDVIDDIVLIPEGKVCTTILELYKKNAIVAEPAGALSIAALDLYRDEIKGKTVVCTLSGGNNDIDRMQEMKERSLIYEGLKHYFIIEFPQRSGALREFLDKGLGPEDDITRFEYIKKHNKENGPALVGVELKHKEDYEQLITRFKENNIQFMELNKNPVLFDLLI

SEQ ID NO: 12601 - DNA, 1524 bp, Burkholderia vietnamiensis G4
  CDS (1)..(1524): transl_table=11
atggcatcccacgactacctgaagaaaatcctcaccgcgcgcgtctacgacgtcgcacgcgagacggaactcgaaccggcccgcaacctgtcgacacggctgcgcaaccccatttacctgaagcgcgaggacaaccagccggtgttctcgttcaagctgcgcggcgcgtacaacaagatggcgcacattccggccgacgcgctcacgcgcggcgtgatcaccgcgtccgccggcaaccatgcgcagggcgtcgcgttctcggcggcgcgcatgggcgtgaaggcggtgatcgtcgtgccggtcacgacgccgcaggtgaaggtcgacgcggtgcgcgcgcacggcggcccgagcgtcgaggtgatccaggcaggcgagtcgtacagcgatgcgtacgcgcatgcgctcaaggtgcagcaggagcgcggcctcacgttcgtgcacccgttcgacgatccgtacgtgatcgccggccagggcacgatcgcgatggaagtcctgcggcagcatcaggggccgatccacgcgatcttcgtgccgatcggcggcggtgggctcgcgtcgggcgtcgccgcgtacgtgaaggccgtgcggcccgagatcaaggtgatcggcgtgcaagcagaggattcgtgcgcgatggcgcagtcgctgcagaagggcgaacgcgtcgagctcagcgaagtcgggctgttcgccgacggcaccgcggtgaagctggtcggcgaggaaaccttccggctgtgcagcgaattcctcgacggcgtcgtcaccgtcgacaccgacgcgctgtgcgcggcgatcaaggacgtgttccaggacacccgcagcgtgctcgagccgtccggcgcgctggcggtcgccggcgccaagcgttacgtggaacgcgaagggatcgagaatcagacgctcgtcgcggtcacctccggcgcgaacatgaacttcgaccggatgcgcttcgtggccgaacgcgcggaagtgggcgaggcgcgcgaagccgtgttcgcggtcacgatccccgaggagcgcggcagcttcaagcggttctgctcgctggtgggcgaccgcagcgtgaccgagttcaactaccggatcgccgatgaaaaatcggcgcacatcttcgtcggcgtgcagatccgccggcgcggcgagtcggccgagatcgccgcgaacttcgacgcgcacggcttcaagacggtcgacctgacgcacgacgagctgtcgaaggagcatatccgctacatggtcggcggccgctcgccgctggcgctcgacgagcgtctgttccgcttcgagtttccggagcggccgggcgcgctgatgaagttcctgtcgtcgatggcgccggactggaacatcagcctgttccactaccgcaaccagggcgccgactacagctcgatcctggtcgggctgcaggtgccgcaggccgatcgcgccgagttcgaacgcttcctggccgcgctcggctatccgtacgtcgaagagagcgtcaatccggcctaccgcctgttcctgtcgtaa

SEQ ID NO: 12602 - protein, 507 aa, Burkholderia vietnamiensis G4
MASHDYLKKILTARVYDVARETELEPARNLSTRLRNPIYLKREDNQPVFSFKLRGAYNKMAHIPADALTRGVITASAGNHAQGVAFSAARMGVKAVIVVPVTTPQVKVDAVRAHGGPSVEVIQAGESYSDAYAHALKVQQERGLTFVHPFDDPYVIAGQGTIAMEVLRQHQGPIHAIFVPIGGGGLASGVAAYVKAVRPEIKVIGVQAEDSCAMAQSLQKGERVELSEVGLFADGTAVKLVGEETFRLCSEFLDGVVTVDTDALCAAIKDVFQDTRSVLEPSGALAVAGAKRYVEREGIENQTLVAVTSGANMNFDRMRFVAERAEVGEAREAVFAVTIPEERGSFKRFCSLVGDRSVTEFNYRIADEKSAHIFVGVQIRRRGESAEIAANFDAHGFKTVDLTHDELSKEHIRYMVGGRSPLALDERLFRFEFPERPGALMKFLSSMAPDWNISLFHYRNQGADYSSILVGLQVPQADRAEFERFLAALGYPYVEESVNPAYRLFLS

SEQ ID NO: 12603 - DNA, 1251 bp, Streptococcus suis 89/1591
  CDS (1)..(1251): transl_table=11
atgattacagcaaaaaatgtagaacaagcatactccgttcttaagcgcgtggtagtacgtacccccttggattatagtcgatacttatcggaaaaatatggtgcaactatttatttaaaaagagaaaatgaacagcgtgttcgctcttttaaaattcgaggagcctattatgctatttcacaattgacagatgatgagaagtcacgcggagtggtctgtgcttcggccggaaaccacgctcaaggtgtggcctacacctgtcaggaaatgcaaattcctgctacgatttttatgcccattacaactccgcaacaaaaaatagggcaggttaaatttttcggaggagactacgtagagattcggctcgtaggtgataccttcgatgagtcagccaaggcagcacaagattatactcaggaaagtgggaaaacatttatagacccattcgatgatgaaaatgtgcaggctggtcagggaacagtagcctatgaaatcttggaagaagcggaagagcaaaccattagttttgaccaaattttagttcccataggaggaggtggtctggttgcaggcgtttcggcctatctgaaagaacatgcacctgaaattaagattgttggtgttgaagcaagtggggcacggtcaatgaaagcggcttttgataaaggtcgtccggttaaattagaccaaattgataaatttgctgacggtattgcggtacagaaagttggtaagtcgacctacgaagtggctcggaaatacgtagatcgcctgattggtgtggatgaaggatggatttccgggactattttagacctctattctaagctgggtattgttgctgagccagcaggagcagcaacgattgcagctcttgaggtagtcaaggaccaaatcaaggggcaaaccatttgttgtatcatttctggtggtaataacgacatcaacaggatgccggaaatggaggaacgtgcgcttatctacgagggaattaaacactactttgttgttaattttccacaacgtccaggggctcttcgtgaatttgtaaatgatattctagggccaaatgatgatattactcgttttgaatatatcaaacgtgccaataagggaacagggccggttctaatcggtattgccctaggagataaaacagattatacgcagtttatttctcgcttggaagagtttgatccccagtacatcaatcttcatgaaaatgattcgctttataaaatgctagtttag

SEQ ID NO: 12604 - protein, 416 aa, Streptococcus suis 89/1591
MITAKNVEQAYSVLKRVVVRTPLDYSRYLSEKYGATIYLKRENEQRVRSFKIRGAYYAISQLTDDEKSRGVVCASAGNHAQGVAYTCQEMQIPATIFMPITTPQQKIGQVKFFGGDYVEIRLVGDTFDESAKAAQDYTQESGKTFIDPFDDENVQAGQGTVAYEILEEAEEQTISFDQILVPIGGGGLVAGVSAYLKEHAPEIKIVGVEASGARSMKAAFDKGRPVKLDQIDKFADGIAVQKVGKSTYEVARKYVDRLIGVDEGWISGTILDLYSKLGIVAEPAGAATIAALEVVKDQIKGQTICCIISGGNNDINRMPEMEERALIYEGIKHYFVVNFPQRPGALREFVNDILGPNDDITRFEYIKRANKGTGPVLIGIALGDKTDYTQFISRLEEFDPQYINLHENDSLYKMLV

SEQ ID NO: 12605 - DNA, 1311 bp, Sulfitobacter sp. EE-36
  CDS (1)..(1311): transl_table=11
gtgagcaagattgaaggctgcgttgaccgcgtcacctgggaatcgtatcgacaagtattcaacgggaaggtcgatgagatgacagatatgtttaaaactgcagcacgcagcgcagcgcaacagatgcgagaggtgtttcccgccacccccttgatgcgcaacgaacatctgtcagaaaaatatgacgctgacatatggttgaaacgcgaagacctaagccccgttagatcatataagttgcgcggggcgttcaacgcgatgcgcaaagtgatccccgagaagtctgttttcgtttgtgcaagtgcgggcaaccacgcccaaggtgttgcatttatgtgcagtcatttcggtgtgaaaggtgtgattttcatgcccgtcacgacgcctcaacagaaaattcagaaaaccaagatgttcggtgggcgtcaggtcgaggttcgcttgatcggagattactttgacaaaacgctcgccgcggcgcagcagtattgcgtggaagagggcgcgcattttctgtctcctttcgatgatgaagatgtcatagaggggcaagcctccgttgcggttgaaatagaggagcagttagggcgcgtgcccgaccacattctgcttcccgttggtggcggcggtctttcgtccggcgtttacagctattttcaaaatgcgtgccggtatagctttgttgaacctgaaggggcccctagtttggccaaagctttggtcgcgggtgcaccggtggatgtgtctcctatcaatagtttcgtcgatggggccgcggtcgcaaaaattggccaacgtaactttgcacggttggatcgtgtcgcagagagtgatgtgatacatctggccgaagaccgcatctgcgtcacgatcatcgaaatgctgaatgttgaaggcatcgtgttagaacctgctggtgccctttcgattgaggcgctgggcgaagtagctgaccagatcaagggcaagaccgttgtatgcgtagcatccggcggaaactttgattttgagcgtctgccagaggtgaaagagcgggcgcagcggtactccggcgtcaaaaaatattttattctgcggatgccgcagcgccctggtgcgctgaaagaattcttgagcattctcggcccagacgatgacatctgtcggtttgaatacctgaagaagtctgcgcgaaacttcggctctgttctgatcggaattgaaacacgcagccctgacagttttgggccgtttttggcgcaactgaaggacgcaggatttacctatacggacatcacgaatgacgaaaccttggctcaatttgttctatag

SEQ ID NO: 12606 - protein, 436 aa, Sulfitobacter sp. EE-36
MSKIEGCVDRVTWESYRQVFNGKVDEMTDMFKTAARSAAQQMREVFPATPLMRNEHLSEKYDADIWLKREDLSPVRSYKLRGAFNAMRKVIPEKSVFVCASAGNHAQGVAFMCSHFGVKGVIFMPVTTPQQKIQKTKMFGGRQVEVRLIGDYFDKTLAAAQQYCVEEGAHFLSPFDDEDVIEGQASVAVEIEEQLGRVPDHILLPVGGGGLSSGVYSYFQNACRYSFVEPEGAPSLAKALVAGAPVDVSPINSFVDGAAVAKIGQRNFARLDRVAESDVIHLAEDRICVTIIEMLNVEGIVLEPAGALSIEALGEVADQIKGKTVVCVASGGNFDFERLPEVKERAQRYSGVKKYFILRMPQRPGALKEFLSILGPDDDICRFEYLKKSARNFGSVLIGIETRSPDSFGPFLAQLKDAGFTYTDITNDETLAQFVL

SEQ ID NO: 12607 - DNA, 981 bp, Roseovarius nubinhibens ISM
  CDS (1)..(981): transl_table=11
atgacgtccatcgacatgatccgcgccgccgccacacggatcaacggccacgcccgccgcaccccgctcctgtcctcgcccttcctcgacgagatcgccggccgccgcgtgctgatcaaacccgaatgcctgcaacagaccggcagcttcaaatatcgcggcgcccgctcggccatctcggcgctcgacgacgcgacccgcgccaagggcgtcatcgccttctcgagcggcaaccacgcccagggcatcgcgctcgccgcccgcgaaatgggcgcccccgccgtgatcatcatgcccgaggacgccccgcgcctcaaaatcgacaacacccgggcctttggtgccgaggtggtgctctatgaccgcgcccgcgaagaccgcgactccatcggcgaccgactgtcccgcgaccgcgggttgaccctgatcaaaccctttgacgaaccccaggtgatcgccggccaaggcaccaccgggctcgagatcgccgaagacgcaagcgcccttggcatcaccgaggccgatgtgctggtctgctgcggcggtggcgggctcacctccggcatcgcgctggcgctcgaggccgacgcccccggcctgcgcgcccgcccggtggaaccgcaaggctttgacgacgtgacccgctcgctcagcgccggcgagatccagcgcaacaacagcatggagggcgggctctgcgacgctatcctgacgccccagcccggcactctcaccttcccgatcatgcaccgtctctgcggccccggcctggtggtgagcgacgaggacgcgctgcgcgccatggctctcgcctggcagcggctcaaacttgtggccgaaccgggcggtgccgtggccctcgccgccgccctcttccaaggcgccgagacccggggcgacacaatcatcgccgtcatctcgggcggcaatgtcgaccgccccgtctttgaccgcgccctcgccaccctggcccaggactga

SEQ ID NO: 12608 - protein, 326 aa, Roseovarius nubinhibens ISM
MTSIDMIRAAATRINGHARRTPLLSSPFLDEIAGRRVLIKPECLQQTGSFKYRGARSAISALDDATRAKGVIAFSSGNHAQGIALAAREMGAPAVIIMPEDAPRLKIDNTRAFGAEVVLYDRAREDRDSIGDRLSRDRGLTLIKPFDEPQVIAGQGTTGLEIAEDASALGITEADVLVCCGGGGLTSGIALALEADAPGLRARPVEPQGFDDVTRSLSAGEIQRNNSMEGGLCDAILTPQPGTLTFPIMHRLCGPGLVVSDEDALRAMALAWQRLKLVAEPGGAVALAAALFQGAETRGDTIIAVISGGNVDRPVFDRALATLAQD

SEQ ID NO: 12609 - DNA, 1236 bp, Roseovarius nubinhibens ISM
  CDS (1)..(1236): transl_table=11
atgagtgatttcatcgataaggcccgcgccgccgagcgcgcgatgcgcgaggtgttccccgagacgccgctgctgcgcaatgaacatctgtccgagcgttacggcgcgaatatcctgctcaagcgggaggatctgacgccggtgcggagctataagctgcgcggtgcgttcaatgcgatgcgcaaggtgatggcacgcggcgaggcgccggtgtttgtctgcgcgagcgccggcaaccatgcgcagggcgtcgcctttatgtgccagcatttcggggtgcggggcgtgattttcatgccggtgacaacgccgcagcagaagatcggcaaaacggccaagttcggcggggagagtgtcgagattaagctcatcggcgattatttcgacgacacgctggcggcggcgcaggcgcattgtgcgcagatcggcgggcatttcctgccgcctttcgacgacgaggatgtgatcgaggggcaggcctcggtcgcggcggagatcgaggcgcagctcggcgggctgccggatgagatcgtgatgccggtgggcggtggtgggctgtcgtccggggtgcggagctatttcggcgatcgggtggggatcacccttgtcgagcccgagggcggtgcctgtctcaacgcggcgctggcggcgggagagccggtgcggctggcgcaggtcaataattttgccgatggcgcggcggtggcacagatcggtgagaagacattcgcgcggctgcgtgatctcgatccggcgcggtcaaggctcgtctgcgaggatcggctctgcaccacgatgatcgagatgctcaatatcgaggggattgtccttgagccggcgggggcgctgtcggtggatgtgctcaaggatatgcgcgacgagatcgcgggcaagacggtggtctgcgtcacctcgggcggcaatttcgatttcgagcggctgccggaggtcaaggaacgggcgcagcggcattcgggcgtgaagaaatatttcatcctgcggatgccgcagcggcccggggcgctcaaggattttctcagtatccttgggccggaggacgatattgcgcggttcgaatatctcaagaaatcggcgcggaatttcggctcggtgctgatcgggatcgagacgggacatgccgagaatttcgcgcggatcgaggcggcgctcaaggcgcagggctttgcctatcgcgacatcaccaaggatgaggttctggccgagttcctgatttaa

SEQ ID NO: 12610 - protein, 411 aa, Roseovarius nubinhibens ISM
MSDFIDKARAAERAMREVFPETPLLRNEHLSERYGANILLKREDLTPVRSYKLRGAFNAMRKVMARGEAPVFVCASAGNHAQGVAFMCQHFGVRGVIFMPVTTPQQKIGKTAKFGGESVEIKLIGDYFDDTLAAAQAHCAQIGGHFLPPFDDEDVIEGQASVAAEIEAQLGGLPDEIVMPVGGGGLSSGVRSYFGDRVGITLVEPEGGACLNAALAAGEPVRLAQVNNFADGAAVAQIGEKTFARLRDLDPARSRLVCEDRLCTTMIEMLNIEGIVLEPAGALSVDVLKDMRDEIAGKTVVCVTSGGNFDFERLPEVKERAQRHSGVKKYFILRMPQRPGALKDFLSILGPEDDIARFEYLKKSARNFGSVLIGIETGHAENFARIEAALKAQGFAYRDITKDEVLAEFLI

SEQ ID NO: 12611 - DNA, 1545 bp, Prochlorococcus marinus str. MIT 9211
  CDS (1)..(1545): transl_table=11
atggaggactatttgcaaaaaatccttagagctcgtgtctatgacatcgcaacaaagacacctttagagaaggctaagaatttaagtaatcggttgaaaaataaggtttggttgaaaagagaggatctacaaccagtgttttccttcaagttgaggggggcatataacagaatggcatctttaacagacgaggaattaaaaattggtgttgttgcatcgagtgctggtaatcatgcgcagggagttgctctaagtgcgtcctatctaaaatgtagggccgtaatagtaatgcctataacaacaccagcaatgaaaatcacctctgttcgaagattaaaagcagaggtaattctttatggtgaaacatatgatgaggcttacaaagaagctcagagaataagtgaaaaaaatgggttagtgtttatacatccatttgatgatcctgaagttattgctggccaaggaactattggtcaagaaatactctcgcaaatagaaaatccgcctgatgcaatttatatagcagttggtgggggtggactaattgcaggcgtagcctcattcgtaaaaagtctatggccaagcacagagataattggggtagaaccaactgatgcgtctgcaatgacagattcattaaaggcaggcaaaagaattgaattgaaagatgtcggcctatttgctgatggagtagcggttaaaaaagtaggtgagaaaacttttgaattagccaagagatatgtcgacagaatgattactgttaataccgacgaaatatgtgcagcaattaaagatgtatttgaagacacacggtcaatactggaaccagcaggtgctttgtctatagcgggtctaaagtctgacgtttctaacagaaacttagttaataaaaatttagtcgcaattgcatgtggtgcaaatatgaattttgacagactaaggtttgttgctgaaagggctgagttaggagagaaaagagaggctatgtttgcagtagagataccagagaatgcagggagccttaagaatttatgcaaaatactaggcaacagaagtcttacagaatttagttatcgaatgtctgaaggaaattcagcccagatctttatgggtttagaagtagaaggcaataaagacaaaggtgaccttataaaaagtattaattcgaagagttttaaatgtcttgacctaagtgatgacgagctctcaaaagttcatttacggcatatggtcggcggaagattaccaatatcagccaatgccctctcgaataaaaactataaggaacttctttataggttcgaattccctgaaaggcctggagccttaatgcgttttgtaaacactatgagacctaattggaatatcagtattttccactatcgcaatcatggtgctgatattgggagaatagttatcggagtacttgtagaagaaaaggatcttgaagcttgggagagattcctcaaagaaatagggtacaaaagctgggaagaaaccaaaaatccggcttatcagcttttcttaggtgcacagaatggctaa

SEQ ID NO: 12612 - protein, 514 aa, Prochlorococcus marinus str. MIT 9211
MEDYLQKILRARVYDIATKTPLEKAKNLSNRLKNKVWLKREDLQPVFSFKLRGAYNRMASLTDEELKIGVVASSAGNHAQGVALSASYLKCRAVIVMPITTPAMKITSVRRLKAEVILYGETYDEAYKEAQRISEKNGLVFIHPFDDPEVIAGQGTIGQEILSQIENPPDAIYIAVGGGGLIAGVASFVKSLWPSTEIIGVEPTDASAMTDSLKAGKRIELKDVGLFADGVAVKKVGEKTFELAKRYVDRMITVNTDEICAAIKDVFEDTRSILEPAGALSIAGLKSDVSNRNLVNKNLVAIACGANMNFDRLRFVAERAELGEKREAMFAVEIPENAGSLKNLCKILGNRSLTEFSYRMSEGNSAQIFMGLEVEGNKDKGDLIKSINSKSFKCLDLSDDELSKVHLRHMVGGRLPISANALSNKNYKELLYRFEFPERPGALMRFVNTMRPNWNISIFHYRNHGADIGRIVIGVLVEEKDLEAWERFLKEIGYKSWEETKNPAYQLFLGAQNG

SEQ ID NO: 12613 - DNA, 1542 bp, Synechococcus sp. RS9917
  CDS (1)..(1542): transl_table=11
atggatcattacctgccccgcattctgcgcgcccgtgtctacgacgtggcccgggaaacgccgttggagccggccgccaatctgagtgaacgactcgacaacgcgatctggctgaagcgggaagatctgcagccggtgttttcgttcaaactgcgcggtgcctacaaccggatggcccagctctcaccggagcagctgtcgcgcggggtgattgcctccagcgcaggcaaccatgcccagggtgtggccctgagtgccgagcacctcggctgtcgggccgtgatcgtgatgccgatcaccacccccgaggtgaaggtggacgcggtgcggcgtcgcggcggcacggttgtgctgcatggcgagacctatgacgaggcctatgccgaagcccgtcggcgcagcgaagcggaggagctttgcttcattcatcccttcgacgatccggaggtgatcgccgggcagggcacgatcggcatggagatcctgcgtcaactgccgacgccgccggatgccatctatgtcgccgtcggcggcggtggactgatcggcggaatcgccgcctatgtgaagagcctctggcccgatgtggaggtgatcggggtggaaccccacgacgccgccgccatgaccctgtctttggaagccggtgaacggattcgcctcccccaggtgggcctgttcgctgatggagtcgccgtgcgggaggtgggggagcacacctttgcgatcgcccaggagcacgtggacgccatggtgactgtgagtaccgatgaaatctgcgcggcgatcaaggacgtgttcgaagacacgcgctcgatcctggaacccgccggggccctggcggtggcggggctcaaggccgatgtgatgcggcgggggttgcggggacaacagctggtggcggtggcctgcggcgccaacatgaatttcgatcggttgcgcttcgtggccgagcgcgccgaactgggcgaggaacgggaagcgatgctcgcggtgcagattccggagcgggccggcagcctccgccacctctgcgagcagctccagaaccgcagcctcaccgaattcagctatcgcatggcggctggcgacaccgcccagatcttcatgggcgtgcaggtgcgggaccacgacgaccgtctggcgctgatcgagcagcttcaggagcagggcttcgcatgtcaggacctcagcgacgatgaactggccaaggtgcatctgcgccacatggtgggggggcgacttccccagggggccctggaggcggcaggccagcactgccaggaattgctgtaccgctttgagttcccggagcgccccggcgccctgatgaccttcgtgaccgccctgcatccggactggaccatcagcatcttccattaccgcaaccacggcgccgatgtgggtcggatcgtggtgggcgtgctggtgcccgaagcggatcgggacgcctggaacgactttctgcgcgatctcggctacgggagctgggaggaaacgggcaatccggcctatgccttatttctcggccatcgcccctga

SEQ ID NO: 12614 - protein, 513 aa, Synechococcus sp. RS9917
MDHYLPRILRARVYDVARETPLEPAANLSERLDNAIWLKREDLQPVFSFKLRGAYNRMAQLSPEQLSRGVIASSAGNHAQGVALSAEHLGCRAVIVMPITTPEVKVDAVRRRGGTVVLHGETYDEAYAEARRRSEAEELCFIHPFDDPEVIAGQGTIGMEILRQLPTPPDAIYVAVGGGGLIGGIAAYVKSLWPDVEVIGVEPHDAAAMTLSLEAGERIRLPQVGLFADGVAVREVGEHTFAIAQEHVDAMVTVSTDEICAAIKDVFEDTRSILEPAGALAVAGLKADVMRRGLRGQQLVAVACGANMNFDRLRFVAERAELGEEREAMLAVQIPERAGSLRHLCEQLQNRSLTEFSYRMAAGDTAQIFMGVQVRDHDDRLALIEQLQEQGFACQDLSDDELAKVHLRHMVGGRLPQGALEAAGQHCQELLYRFEFPERPGALMTFVTALHPDWTISIFHYRNHGADVGRIVVGVLVPEADRDAWNDFLRDLGYGSWEETGNPAYALFLGHRP

SEQ ID NO: 12615 - DNA, 1623 bp, Synechococcus sp. WH 5701
  CDS (1)..(1623): transl_table=11
atggggtcaacggtcacctttcctgaagccgaccgctcgcctgcccggcacactggagccatggacgacacactgcagcgcatcctgcgggcgcgggtctacgacgtggcgatcgagtcgccgctcgaagaggcccccaacctgtcgcggcggctcggcaacaccgtgctgctcaagcgcgaagacctccagccggtgttctccttcaagctccgcggggcctacaaccgcatggcccagctcacgccggctgaactgaagcgtggggtgatcgccgccagcgccggcaaccacgcccagggggtggccctggcggccgagaggctgggctgccacgcggtgatcgtgatgccgctcaccacacccgcgatgaaggtgcgggccgtggccgcccgcggtgccgaggtgatcctgcacggagacacctacgacgaggcctgccagcaggcaagggtgctggaacaggagcggggcctcaccttcatccatcccttcgacgatccggaggtgatcgccggccagggcaccgtgggcctcgagatcctgcgccagtgctcagctccccccgatgccatctatgtggcggtgggtggcggtgggctgatcgccggcatcgccgccttcatcaagaacgtctggccccaggtggaggtgatcggtgtcgagccggtggatgccgatgccatgacccgctccctggcggcaggtcggcgggtgagcctcgagcaggtgggtctgttcgccgatggggtggccgtgcacgaggtgggcgtgcacaccttcgccctggcccagcgctacgtggatgccatggtcaccgtggacaccgatgaaatctgcgccgcgatcaaggacgtcttcgaggacacccgctcgatcctcgagccggccggtgctctggcggtggccggcatgaaggccgacgtgcagcgccgagggctgaaacagcgcaccctggtggccgtggcctgcggcgccaacatgaatttcgatcgcctgcgcttcgtggccgagcgggccgagctgggggaggagcgcgaagcgatgctggcggtggagatccccgagcgcccgggcagcctgcgccagctctgcgagctgctgggctcccgcagcctgaccgaattcagctatcggatggcggaccaccgcctggcccacattttcctgggggtgcagatcgacgggcaccaagacaccgaagcgctgatcagccagctgggcgccggcggcttcccctgcctcgacctcagcagcaacgagctggccaagctgcacctgcgccacatggtgggtggacgactgcccgaagcggcctgccacgccggtgcggcgacgccgcgggaactgctctaccgcttcgagttccccgagcggccgggcgcgctgatggctttcgtcaacgccctgcaccccaactggtcgatcagcatctttcactaccgcaaccagggggccgacgtcggccgcatcgtggtgggggtgcaggtggaggagcaggattccggcgcctgggagctctttctctcaggcctcggctaccgccactgggacgagacccagaacccagcctaccggctgttcctcggcccggccagccagcctgtgccggcgctggcctga

SEQ ID NO: 12616 - protein, 540 aa, Synechococcus sp. WH 5701
MGSTVTFPEADRSPARHTGAMDDTLQRILRARVYDVAIESPLEEAPNLSRRLGNTVLLKREDLQPVFSFKLRGAYNRMAQLTPAELKRGVIAASAGNHAQGVALAAERLGCHAVIVMPLTTPAMKVRAVAARGAEVILHGDTYDEACQQARVLEQERGLTFIHPFDDPEVIAGQGTVGLEILRQCSAPPDAIYVAVGGGGLIAGIAAFIKNVWPQVEVIGVEPVDADAMTRSLAAGRRVSLEQVGLFADGVAVHEVGVHTFALAQRYVDAMVTVDTDEICAAIKDVFEDTRSILEPAGALAVAGMKADVQRRGLKQRTLVAVACGANMNFDRLRFVAERAELGEEREAMLAVEIPERPGSLRQLCELLGSRSLTEFSYRMADHRLAHIFLGVQIDGHQDTEALISQLGAGGFPCLDLSSNELAKLHLRHMVGGRLPEAACHAGAATPRELLYRFEFPERPGALMAFVNALHPNWSISIFHYRNQGADVGRIVVGVQVEEQDSGAWELFLSGLGYRHWDETQNPAYRLFLGPASQPVPALA

SEQ ID NO: 12617 - DNA, 1536 bp, Synechococcus sp. WH 5701
  CDS (1)..(1536): transl_table=11
atgccgcaacgctacatcaagaagattctcgatgcgcgcgtctatgacgtggccatcgaaacacccctgactgaagcccgcagtctgtccaagcgctttggcaacaatattctgctcaagcgtgaagatcttcagccggtgttctccttcaagattcgtggtgcctataaccggattgcgcagctttccgaggagcagaaggccaagggtgtcatttgtgcgtcggccggaaatcatgcccagggtgtggcgctggctgccaagaatctcgggatcaaggcggtaattgtgatgccgcagaccacgccggagatcaaggtgcgttcggtacgggatcacggtgccaaggtggttctcaagggcgatgccttcgacgaggcggcggcccacgctcaggagttgatcgcaaagcacggctacacctacattccgccgtacgatgatcccgatgtgatcgccggccagggcacggtggccatggaaatcatgtggcagttcagcaagccgatccacgccatcttcatctgtgttggtggcggcgggctgattgccggcatggccgcttacatcaagtatctgcgccccgagatcaaggtgattggtgtcgaaccggaggactccaactgcctccaggccgccatgaaagcgggcaaacgcgtggtgctcgatgaagtgggcatctttgctgatggagtggcagtcaagcagattggtaagtacccctgggagatctgcaaggaccacgtggacgaggtgatcaccgtatccaccgacgaaatctgcgcggccatcaaggatgtgttcgaggatacccgctccattgccgagccggccggtgccctgggtgtggccggcatcaagaaatacatcgagcgcgagaaagtcgagggcgagaacctgattgccaccctgagcggtgccaacatgaacttcgaccgtctgcgctacatctccgaacgcacggaagtgggcgagaaacgcgaggccatcctggcggtgaccattccggagaaaccgggcgcgttcaagaccttcatcaacgccctgcacaagcgcagcatcaccgagttcaattaccgctacgccgatgctaccaatgccacgattttcgttggcatccagattgccgcgggtggtcacggccgcgaggatctggttcaggatcttcgggagagcggatactcggtggtcgatttaaccgacagcgatctggccaagcagcacatccgtcacatggtgggcggccacgcgccgaccatcaccaacgaaaaggtgttccagttcgagttcccggagcgtccgggggcgttgctgaagttcctgatgtctcttggtacccgctggaatatctccatgttccactaccgcaaccacggtgcagcctacagccgtgttctgctgggcgctcaggtggacgacgatgaggtgcaggatttcgagaaaatgctggataaggtcggctttcgctatgaaaacatgacggataatgaggcctatcagttgtttctcgggcaaggaaatgcacgatcgagctaa

SEQ ID NO: 12618 - protein, 511 aa, Synechococcus sp. WH 5701
MPQRYIKKILDARVYDVAIETPLTEARSLSKRFGNNILLKREDLQPVFSFKIRGAYNRIAQLSEEQKAKGVICASAGNHAQGVALAAKNLGIKAVIVMPQTTPEIKVRSVRDHGAKVVLKGDAFDEAAAHAQELIAKHGYTYIPPYDDPDVIAGQGTVAMEIMWQFSKPIHAIFICVGGGGLIAGMAAYIKYLRPEIKVIGVEPEDSNCLQAAMKAGKRVVLDEVGIFADGVAVKQIGKYPWEICKDHVDEVITVSTDEICAAIKDVFEDTRSIAEPAGALGVAGIKKYIEREKVEGENLIATLSGANMNFDRLRYISERTEVGEKREAILAVTIPEKPGAFKTFINALHKRSITEFNYRYADATNATIFVGIQIAAGGHGREDLVQDLRESGYSVVDLTDSDLAKQHIRHMVGGHAPTITNEKVFQFEFPERPGALLKFLMSLGTRWNISMFHYRNHGAAYSRVLLGAQVDDDEVQDFEKMLDKVGFRYENMTDNEAYQLFLGQGNARSS

SEQ ID NO: 12619 - DNA, 1533 bp, Synechococcus sp. WH 7805
  CDS (1)..(1533): transl_table=11
atggacgactatctccaaaggattcttcgtgcgcgggtctacgacgttgcccgtgaaacccccctcgacgctgccagcaatctcagtcgccggctctccaacaccatccgtcttaagcgggaggatcttcagccggttttttcgttcaaacttcgcggggcttacaaccggatggcccagctgtccgaagaggagctgagtcgtggggtcatcgcctccagtgctggaaaccacgctcagggtgtcgctctcagtgcttcccatctccactgtcgggcggtgattgtgatgccggtcaccactccaagtgtgaaggtcgaggccgtgaagcagctggggggcgaagtggttctccatggcgagacctatgacgaggcctatgccgaggcatgccggcgcagcgaaaatgagcatctctgcttcatccatcctttcgatgaccctgatgtcatcgccggccaaggaacagttgggatggaaatccttcgccaaagcccccgccctcccgatgccatctacatcgccatcggtgggggaggtttgatcagtggaatagcggcctatgtcaaggccctctggcccgatgttcagatcattggtgttgaaccacatgacgctgctgcaatgaccctttcactggaggccggtgaacgcattcgacttccacaggtcggattgttcgcagatggtgtggccgtacgcgaggtcggtgaacacaccttccgcctggtccagcgttatgtggatgcgatcgttacggtcagtaccgacgagatctgtgctgcgatcaaggatgtctttgaagacacccgatccattctcgagccggcgggggctcttgcggttgcaggcttaaaagcggatgtcgcccgtcgcggactgaaagatcaagagctggtggccgtcgcctgcggcgccaacatgaatttcgatcggctgcgctttgtggcggagcgagctgaattgggtgaggagcgtgaggccatgctggccgtggagatcccggaacagccgggaagcctgaagaatctttgtgagcttctccagaagcgaagcttgacggagttcagctaccgcatgggtgctggagaacgtgcgcatattttcatgggtgtgcaggttgccgatctgcaggatcgttcggatcttctgaactccctacgcagtcacggatacgactgtcttgatctcagtgacgatgaacttgcgaaggttcacctccgacacatggtgggtgggcgtctgccagtccggactgatgcgacgtcttcacaacccaaggagctcctctatcgcttcgagttcccagagcgacccggagcgctcatgcgctttgtgagtgccttgcgtgcggactggtccatcagcattttccactaccggaaccatggagcagatgtcggtcgcattgtggtgggcgtactggtgaagcccgatgaacttcaagactggcaagcagtgttgagagagctcggctacgccagctgggaagaaacatccaatcccgcctaccgcatctttctgggtgcctga

SEQ ID NO: 12620 - protein, 510 aa, Synechococcus sp. WH 7805
MDDYLQRILRARVYDVARETPLDAASNLSRRLSNTIRLKREDLQPVFSFKLRGAYNRMAQLSEEELSRGVIASSAGNHAQGVALSASHLHCRAVIVMPVTTPSVKVEAVKQLGGEVVLHGETYDEAYAEACRRSENEHLCFIHPFDDPDVIAGQGTVGMEILRQSPRPPDAIYIAIGGGGLISGIAAYVKALWPDVQIIGVEPHDAAAMTLSLEAGERIRLPQVGLFADGVAVREVGEHTFRLVQRYVDAIVTVSTDEICAAIKDVFEDTRSILEPAGALAVAGLKADVARRGLKDQELVAVACGANMNFDRLRFVAERAELGEEREAMLAVEIPEQPGSLKNLCELLQKRSLTEFSYRMGAGERAHIFMGVQVADLQDRSDLLNSLRSHGYDCLDLSDDELAKVHLRHMVGGRLPVRTDATSSQPKELLYRFEFPERPGALMRFVSALRADWSISIFHYRNHGADVGRIVVGVLVKPDELQDWQAVLRELGYASWEETSNPAYRIFLGA

SEQ ID NO: 12621 - DNA, 1542 bp, Pseudoalteromonas tunicata D2
  CDS (1)..(1542): transl_table=11
atggtttcaaaagagcttgaatatttcagagcaattatccaagccaatatggagccattggcgaaagtaacgcaagtgagcccaatgccgagtttggaaaaaaaactcggcaataaaatttggctaaagcgtgaggatcagcagccggtttattcgtttaaattgcgtggtgcttttcataaactcaaacaattgcctgcacaatcaaaagtggttacagcttctgctggcaatcatgcccaaggtgtggcgttaagtgctagttttttaggtcacacggcaaaaattgtcatgccagtgacaacccctgaaataaaagtgaatgccgtacgcgatttaggtggcgaagtgattttgcatggccatcattttgatgctgctaatagctttgctttaaatcttgcagaacaggagggagcggtatttgttccgccatttgacgacccggatgtcattgttggccaagggactattgcgcgagaattaatgcagcaattgccacaacttgatgctgtttttattcctgttggtggcggtgggttactcgcgggtatgtcggtttatatcaaatcgttgcgtccagatattaaagtaatcggggttgagtctgaagaaagtgcctgcttaaaagctgcaatggaagcgggtaagccggttgagcttgaacgagtaggcagctttgccgatggtgttgcggttaaaattattggtaaagaaacgtttcgtttagcgcagcagttttgtgatgaagttgtcactgtaacgagcgacgagatttgtgctgcaatgcaagatgtattcgtttcaactcgagcggtagcagagccttcaggtgctttggccttagcaggcctaaaaaaatggtgcatcgaaaacaaggctaaaggacttaaattatcagccgtattgtcgggtgcaaatttaaactttgatcgcttacgttacgttgctgagcgcactgcgcttggcgaaaaaaatgaagcattatttgccgttaccataggagaagaaaaaggtagtttccgtcgtttttgcaaagccttaggtgggcgtgcaattacagagtttaattaccgttatgccaattcaaccaaagcacagatatttgttggtgtcggtttgcgtcgtgcacaagaagagctcgatgagttaaaagctgagcttacacagttagattatgattttactgacttatctgacaatgaattagccaaattgcatattcgatatatggttggcggccagcctggacaaatgattaaagagcgcttatttcgctttgaatttccagagtacccaggtgcattagagcgcttcttagatactttaggtgcaaattggaatattaccttattccattatcgtaatcacggtgcagcaacgggtaatgtcttagccgcatttgagatccctgataatgataatcaggcatttcaagagcatttaagtcgccttgcttatggttaccaagaagaaacaaataacccttgttatcaacgttttttagcaggtccggttgagaaattggctgaagctggctag

SEQ ID NO: 12622 - protein, 513 aa, Pseudoalteromonas tunicata D2
MVSKELEYFRAIIQANMEPLAKVTQVSPMPSLEKKLGNKIWLKREDQQPVYSFKLRGAFHKLKQLPAQSKVVTASAGNHAQGVALSASFLGHTAKIVMPVTTPEIKVNAVRDLGGEVILHGHHFDAANSFALNLAEQEGAVFVPPFDDPDVIVGQGTIARELMQQLPQLDAVFIPVGGGGLLAGMSVYIKSLRPDIKVIGVESEESACLKAAMEAGKPVELERVGSFADGVAVKIIGKETFRLAQQFCDEVVTVTSDEICAAMQDVFVSTRAVAEPSGALALAGLKKWCIENKAKGLKLSAVLSGANLNFDRLRYVAERTALGEKNEALFAVTIGEEKGSFRRFCKALGGRAITEFNYRYANSTKAQIFVGVGLRRAQEELDELKAELTQLDYDFTDLSDNELAKLHIRYMVGGQPGQMIKERLFRFEFPEYPGALERFLDTLGANWNITLFHYRNHGAATGNVLAAFEIPDNDNQAFQEHLSRLAYGYQEETNNPCYQRFLAGPVEKLAEAG

SEQ ID NO: 12623 - DNA, 1554 bp, Photobacterium sp. SKA34
  CDS (1)..(1554): transl_table=11
atgagcgaagtgaaacaggccacggatgaaaagctacttagcggagctgactatcttcgcaatatccttcgagcacccgtttatgaggtggcgcaagtcaccccattacaaaatatggaccgtctgagtgcaaggatagcaaatcagatccaactaaaacgggaagaccgccaacccgttcactcatttaagttacgcggcgcttacaacatgatgtcgcaactgactgagcctcagaaagctgctggggtgatagcagcctctgctggtaatcatgcgcaaggtcttgccttatcaagccaaaaactcggtgttaaagccacgattgtcatgccacgtaccacaccggatattaaggttgatgcggtacgtagttttggcgggattgtagtactgcatggcaataactttgatgaagcaaaaggctacgctgaacaattagcgcaacaacatggctatacttttattcctcctttcgatcacccttcggtgatcgcaggacaagggactatcggtattgaattagtacaacaaaacggccatttggattgtgtttttgtgcccgttggcggtggtggtttagccgcaggtgttgcggtattactaaagcaattattacctgaaattaaggtagttggtgttgaagctgaagattctgcctgcttaaaagcagcccttgatgcgggtaaaccagtctcgttagatcaagtaggtatgtttgccgatggagttgcagttaagcaaataggcagcgagactttccgtttatgtcagcaataccttgatgatgttatcacggtcagcagtgatgaaatttgctcggctgtaaaagatatttttgaagatacgcgggcgattgctgagccttcaggggcactttctctggcaggactaaaaaaatacgtcgagcagcaccaaatccgcgatcagcaacttgccgctattttatcaggcgcaaacttgaattttcatggtctacgctatgtctcagagcgttgcgagttaggtgaaaaacgtgaagggttattagccgttacgatccctgaacgcccaggtgcttttcttgatttctgccatttgattggtggtcgagcagtaaccgagtttaactaccgatataacgatgatgctctggccaatgtttttgttggtgtgcgtttaattcaaggccaagaagagcttgatggcatcataaaagatctgcgaaaaggcggatatccggtggtcgatttatctgatgacgaaatggcgaaagtccatgttcgttatatgattggtggtagaccatcaaaaccgcttaaagaacgtttatatagctttgagtttcctgaatacccaggtgcacttattcgctttttaaacacccttggttgtcattggaatattagcttatttaattatcgtaatcatggggcagattatggtcgtgtcttatgtggctttgaacttgaagacaaagatttactgtcatttacaagccacttacgcgaacttggttatcaatggaaagacgaaacagaaaatccagcctataagttttttcttgctcagtaa

SEQ ID NO: 12624 - protein, 517 aa, Photobacterium sp. SKA34
MSEVKQATDEKLLSGADYLRNILRAPVYEVAQVTPLQNMDRLSARIANQIQLKREDRQPVHSFKLRGAYNMMSQLTEPQKAAGVIAASAGNHAQGLALSSQKLGVKATIVMPRTTPDIKVDAVRSFGGIVVLHGNNFDEAKGYAEQLAQQHGYTFIPPFDHPSVIAGQGTIGIELVQQNGHLDCVFVPVGGGGLAAGVAVLLKQLLPEIKVVGVEAEDSACLKAALDAGKPVSLDQVGMFADGVAVKQIGSETFRLCQQYLDDVITVSSDEICSAVKDIFEDTRAIAEPSGALSLAGLKKYVEQHQIRDQQLAAILSGANLNFHGLRYVSERCELGEKREGLLAVTIPERPGAFLDFCHLIGGRAVTEFNYRYNDDALANVFVGVRLIQGQEELDGIIKDLRKGGYPVVDLSDDEMAKVHVRYMIGGRPSKPLKERLYSFEFPEYPGALIRFLNTLGCHWNISLFNYRNHGADYGRVLCGFELEDKDLLSFTSHLRELGYQWKDETENPAYKFFLAQ

SEQ ID NO: 12625 - DNA, 1518 bp, Oceanospirillum sp. MED92
  CDS (1)..(1518): transl_table=11
atgccagatcgttatatcaagaaaatcctctcggcccgcgtctacgacgttgcggtagagacaccactggatgaagcaaaaggtctatctgagcgtctgaataaccgaattatgctgaaacgagaagatgagcaacccgttttctcgtttaaacttcgcggtgcctacaacaagctatcgcaactctccgaagaagagcgtgcctgcggggtcgtagcagcatctgctggcaaccatgcccaggggttggcgatgtccgctaagaagctgggtgtgaaagcgacgattgtcatgcccaagaccacacccgatgtaaaagttaacaacgttaaacgcctaggcggtaaagtcgtactgcatggcgatgcttatgatgatgccgcagcccatgcgcaaaaactggttgcagaaaaaggcatgacgtttgtccacccttttgatgatcctgatgtcattgccggtcagggcactgtagcgatggagatcctacggcaggagtcaggtcctattgaggcgatctttgtccctgtgggtggcggcggattagttgcaggtatagcaacttacgtaaaatacctacgtaaagatacaaaaattattggcgtagaatcagaggactcagcttgccttaaggcagcgatggatgcaggcaaacgtgtcacccttgagcaagtcggcatatttgctgacggtgttgctgttgcgaccatcggcgagaatacctttgagctggcacaacgctacgtcgatgatgtgattaccgtctccaccgatgaaatttgtgcggccattaaagacatctacgatgatacccgctcaatctgtgaacctgccggtgccctgggtgttgcgggtatgaagaaatatgtggaacgtgaagcctgttcggataaaaccttaattgcgatcgactccggtgctaatgttaatttcgaccgcttacgccatatcgctgagcgctctgaacttggcgaaaaacgcgaagcaattatcgctgcacgtattcccgaaaagccgggtagctttaaacgattctgctcagccctgggtagccgaaatattaccgagttcaattatcgttatagcgatgagagcaatgcgattgtatttgccggagtacagctcaaagctggcggaggtggtcgcgaagagctggtcaatgaacttcgtagtagtgattatgaggtagaagacctcagcgataacgaaattgcaaaaatccatgtgcgctatatggtagggggtcacgcccctgcaaatctcgaaaacgaagttatctaccgttttgagttccccgaacgtcccggtgcactgatgaaattcctcagcaagctgggcagcaaatggaatatatcgatgtttcattaccgcaaccacggtgccgcttatgggcgcgttttagtcggcatgcaaattccgcaagctgaacgagcgcaagttgaaggtttcctggaagagattggatataacttctgggaagaaactgacaacaaggcctatcaactgttcttaggctaa

SEQ ID NO: 12626 - protein, 505 aa, Oceanospirillum sp. MED92
MPDRYIKKILSARVYDVAVETPLDEAKGLSERLNNRIMLKREDEQPVFSFKLRGAYNKLSQLSEEERACGVVAASAGNHAQGLAMSAKKLGVKATIVMPKTTPDVKVNNVKRLGGKVVLHGDAYDDAAAHAQKLVAEKGMTFVHPFDDPDVIAGQGTVAMEILRQESGPIEAIFVPVGGGGLVAGIATYVKYLRKDTKIIGVESEDSACLKAAMDAGKRVTLEQVGIFADGVAVATIGENTFELAQRYVDDVITVSTDEICAAIKDIYDDTRSICEPAGALGVAGMKKYVEREACSDKTLIAIDSGANVNFDRLRHIAERSELGEKREAIIAARIPEKPGSFKRFCSALGSRNITEFNYRYSDESNAIVFAGVQLKAGGGGREELVNELRSSDYEVEDLSDNEIAKIHVRYMVGGHAPANLENEVIYRFEFPERPGALMKFLSKLGSKWNISMFHYRNHGAAYGRVLVGMQIPQAERAQVEGFLEEIGYNFWEETDNKAYQLFLG

SEQ ID NO: 12627 - DNA, 1515 bp, marine gamma proteobacterium HTCC2207
  CDS (1)..(1515): transl_table=11
atgccacagaagtatgtgaaaaaaattctcgacgcgcgtatctatgatctggtgatcgaaacgccgattgatcctgcgccactgctttcgcagcgcctgaataataatgtgctgctaaagcgcgaagacctgcagccggtattctcgtttaagttgcgcggtgcttataacaagttgcgccagcttaccgatcagcagcgcgccaccggtgtgattgcagcgtcggcgggaaatcatgcccagggtctggctctggcatcaaaaaagatgggggttaaagccaccattgtgatgccgaaaacgactccgcaaattaaggtggatgcagtgcgtgctcgcggcgccaaagtggttttggtgggcgacaactatgatgccgcatctgctcatgcgcaaaagctggtcgaagagaaaggtttggtttatatccatccatttgacgatccggatgtcattgctgggcagggcaccattggcatggagattttgcgtcaattaccgggcgatctggatgtgatttttattgctgttggcggtggcggtctctgtgccggtgtggcggcctatgttaaatatgtgcgtccgaatgtgaaaattattgccgtcgaagccaacgacagtgcctgccttgatgctgcgctaaaggctggccggcgagtgcgcttaaaggaagtgggtatctttgccgacggcactgccgttgcgcaaattggtaaagagacattccgtttgctgaaagatttggtagatgaagtgatcactgtaagcacggatgaaatttgtgcggcgatcaaagatgtctacagtgatactcgcgcaatttgtgagccgtctggtgctatgggtttggccggtctgaaaaaatatgtcgagcgcgaggctgtggagggacagacattgctgtccgttcagtgtggcgccaatatagattttgatcgactgcgctatatttctgagcgcaccgaaattggtgaaaaacgcgaagccgtattggcagtgaccatcgatgaaaagccgggcagctttaagttgttttgcaaggctatgcacaagcgcaatatctctgaatttaattatcgctttagcgatgccaataaggcgcatatctttgttggcgctcaggtggttgatgatgaggatcgccatcagctggtggctgagctacgtaagcagggctatacggtcgccgatatgaccgacaatgaagtggctaaatctcatattcgtcatatggtcggagggcgttcacctcaggtgggagaagagcaggtttttcgctttgagtttcctgagcgccccggcgcgctgttgaacttccttactcagctgggtggcgggtttaatatttcaatgtttcattaccgcaaccatggctcggcttttggtcgtgtgctggtgggtattcaggcgtctaagaaagatcttaagacgctatcaggttttctcgataatctgggttaccactatgttaacgaaactgagaatgaggcctaccagttttttcttggctcttaa

SEQ ID NO: 12628 - protein, 504 aa, marine gamma proteobacterium HTCC2207
MPQKYVKKILDARIYDLVIETPIDPAPLLSQRLNNNVLLKREDLQPVFSFKLRGAYNKLRQLTDQQRATGVIAASAGNHAQGLALASKKMGVKATIVMPKTTPQIKVDAVRARGAKVVLVGDNYDAASAHAQKLVEEKGLVYIHPFDDPDVIAGQGTIGMEILRQLPGDLDVIFIAVGGGGLCAGVAAYVKYVRPNVKIIAVEANDSACLDAALKAGRRVRLKEVGIFADGTAVAQIGKETFRLLKDLVDEVITVSTDEICAAIKDVYSDTRAICEPSGAMGLAGLKKYVEREAVEGQTLLSVQCGANIDFDRLRYISERTEIGEKREAVLAVTIDEKPGSFKLFCKAMHKRNISEFNYRFSDANKAHIFVGAQVVDDEDRHQLVAELRKQGYTVADMTDNEVAKSHIRHMVGGRSPQVGEEQVFRFEFPERPGALLNFLTQLGGGFNISMFHYRNHGSAFGRVLVGIQASKKDLKTLSGFLDNLGYHYVNETENEAYQFFLGS

SEQ ID NO: 12629 - DNA, 1512 bp, Oceanobacter sp. RED65
  CDS (1)..(1512): transl_table=11
atggcggaaaactatataaagcgcatattggaagccaacgtttacgatgtggcggtggagacaccgctgtcggaagctaagtttttgagcaatcgtttgggtaataacattctcattaagcgtgaagacaagcagccggtttatagcttcaaatgtcgcggcgcttataactgcattgccaagaaatcacctgagcaattggccaagggtgtggttaccgcatcagcaggaaatcacgcgcaaggtgttgcgttatctgcgcagcagctaggtatcaaagcaactatcgttatgccgcgcaccacgcccgaaattaaagtggccaatgtgcgagctcgtggtgctaaagcggttctgcatggggacacattcgacgaagcctttgcgcacagtcagaagttggtggaagagaaaggcatgacctatatccatccctatgatgacccagatgtcatcgctgggcagggcactatcgctatggagatcttgcgtcagcactctggtccaatccatgccatatttgtctgtgtaggtggtggtggtttagccgcaggaatagcagcctatacaaaatacttgcgtccagaaaccaaggtcattgcggtcgaaagcaccgagagcgcatgtctggatgcggcaatgaaagcaggtaagcgtgttaagttaccgcatgttggtatcttcgcggatggcgtagcagtgggccaaatcggtaagcacacttggaaggtgtgtaaggaacacatcgatgaggttatcacagtaacgcctgacgaactttgtgccgctattaaagacatcttcgatgatacgcgcagtgtcgctgagccagcgggtgctcttggcgttgcgggcatgaaaaagtacatcgagaaaaccggtataaaagatgaaaccatggtggcgatcgagtccggtgccaatattaactttgatcgcttgcgctatgtctctgagatggccgaagtgggtgaaaagcgcgaagtccttatggcggtgaccattcctgagcgtcctggtagttttaagcagttctgcaacgttttaggaaagagcaatattactgagttcaattatcgctatggcaaaagcgatcaggctcaaatttacgtgggggtaaaaatcgccgaaggcggcaagcaagagctgtttgatgagctagaaaaaaagggctatccagtgttagaccttagtgaaaatgagatcagtaagtaccatattcgccatatggtcggcggtcatgctccagaagaagtacaagacgaaattctttaccgctttgaatttccagaacgtccgggggcactgatgcagtttttgaaacatttaggtgagcgatggaatatatccatgttccactatcgcaatcatggggcagccaatggtcgagtactggcaggcttgcaggtttctaaagacgatcaaaaggcctttaagcaacatattaaagagctcggctatccttgttgggatgagagtgataatcccgcttatcagcttttcttaaaataa

SEQ ID NO: 12630 - protein, 503 aa, Oceanobacter sp. RED65
MAENYIKRILEANVYDVAVETPLSEAKFLSNRLGNNILIKREDKQPVYSFKCRGAYNCIAKKSPEQLAKGVVTASAGNHAQGVALSAQQLGIKATIVMPRTTPEIKVANVRARGAKAVLHGDTFDEAFAHSQKLVEEKGMTYIHPYDDPDVIAGQGTIAMEILRQHSGPIHAIFVCVGGGGLAAGIAAYTKYLRPETKVIAVESTESACLDAAMKAGKRVKLPHVGIFADGVAVGQIGKHTWKVCKEHIDEVITVTPDELCAAIKDIFDDTRSVAEPAGALGVAGMKKYIEKTGIKDETMVAIESGANINFDRLRYVSEMAEVGEKREVLMAVTIPERPGSFKQFCNVLGKSNITEFNYRYGKSDQAQIYVGVKIAEGGKQELFDELEKKGYPVLDLSENEISKYHIRHMVGGHAPEEVQDEILYRFEFPERPGALMQFLKHLGERWNISMFHYRNHGAANGRVLAGLQVSKDDQKAFKQHIKELGYPCWDESDNPAYQLFLK

SEQ ID NO: 12631 - DNA, 1548 bp, Synechococcus sp. RS9916
  CDS (1)..(1548): transl_table=11
atggatcactacctgcctcggattctgcgcgcacgggtctacgacgtcgctcgggagacaccgctcgagccagcggtcagtctcagcaggaggctggacaacagcgtttggttcaagcgcgaagacctccagccggtcttctccttcaaattgcgcggtgcttacaaccgcatggcacagctcagcactgaggagctggaacgaggcgtgatcgcatcgagcgccggcaatcatgcccagggtgttgccctcagcgcccagcagctccaatgccgcgctgtgatcgtgatgccgatcaccaccccagatgtgaaggtccaggccgtgcgtggccgcggagctgaagtggtgctgcatggagagacctacgacgaggcctacgccgaggccatgcggcgcagtgaaagcgatggcctgtgcttcatccatccctttgacgaccctgaggtgatcgccggtcaggggacgatcgggatggaaatcctccgtcagattccacagccccctgacgcgatctatgtggccgtcggcggcggtggattgatcggcggaattgccgcttatgtgaaaagcctgtggcccgatgtgcaggtgatcggcgtcgaaccgcatgacgcggctgccatgaccttgtcgctggaagccggcgaacgaatccgcctgccccaagtcggtttatttgccgatggggtggccgtgcgccaagtgggagagaacacctttgccctggcgcagcgctacgtggatgcaatggtcacggtgggcaccgatgagatctgtgcagcgattaaggacgtctttgaggacacacgctcgatccttgagccggcaggcgccctcgcaatcgccgggctgaaggcggatgtggcgcgcaggaatctccgcaacaagaccctggttgctgtggcctgcggggccaacatgaatttcgatcgtctgcgcttcgtggcagaacgggcggagctgggtgaagaacgggaagcgatgctcgccgttcaaatcccagaacaggcgggaagtctgcgcaaattgtgtgaatgcctcgaccggcggagcctgacggaattcagctaccggatgagtgacgggccccaggcacagattttcatgggcgttcaggtgcaggaccacgacgaccggcggcagctgattgggcacctacatgacaacggtttttcctgccaggacctcagtgacgatgaactcgccaaggttcacctccggcacatggtcggaggacgactgccggcttccgctcagtgccagcaggacaacgactgcctcgagctgctctaccgcttcgagtttccggaacggcctggagccttgatgacctttgtcacagctctcaggcctgaatggaccatcagcatcttccactaccgcaaccatggagccgatgtcggtcgaattgtggtgggcgttttggtcaaaaacgcagaccttgagaactggaacactttcctgcgcgatgtgggctatcccagttgggaggaaaccgggaatcccgcctatcgcctttttttgggtcaatccaaccctggctga

SEQ ID NO: 12632 - protein, 515 aa, Synechococcus sp. RS9916
MDHYLPRILRARVYDVARETPLEPAVSLSRRLDNSVWFKREDLQPVFSFKLRGAYNRMAQLSTEELERGVIASSAGNHAQGVALSAQQLQCRAVIVMPITTPDVKVQAVRGRGAEVVLHGETYDEAYAEAMRRSESDGLCFIHPFDDPEVIAGQGTIGMEILRQIPQPPDAIYVAVGGGGLIGGIAAYVKSLWPDVQVIGVEPHDAAAMTLSLEAGERIRLPQVGLFADGVAVRQVGENTFALAQRYVDAMVTVGTDEICAAIKDVFEDTRSILEPAGALAIAGLKADVARRNLRNKTLVAVACGANMNFDRLRFVAERAELGEEREAMLAVQIPEQAGSLRKLCECLDRRSLTEFSYRMSDGPQAQIFMGVQVQDHDDRRQLIGHLHDNGFSCQDLSDDELAKVHLRHMVGGRLPASAQCQQDNDCLELLYRFEFPERPGALMTFVTALRPEWTISIFHYRNHGADVGRIVVGVLVKNADLENWNTFLRDVGYPSWEETGNPAYRLFLGQSNPG

SEQ ID NO: 12633 - DNA, 1545 bp, Vibrio sp. Ex25
  CDS (1)..(1545): transl_table=11
atggaatctcaacccgaaaagaaagtaaatcaaactggcgcagactatctgcgccaaatccttcgcgcacctgtttatgaagtagcaacagtgacgccactgcaagaaatgcctcgtttatcagcacgtatcgggaataacgtacagatcaagcgcgaagatcgccaacccgtgcactcatttaaattacgcggtgcgtacaacatggtggcaagtttatctgaagcgcagaaagccgctggtgtcatcgctgcatcggcaggtaaccacgctcaaggcatggcactgtctggcactaagctgggaatcaaaaccactatcgtgatgccaaagaccacgccggatatcaaagtcgacgcagtacgcagctttggtggcaatgtggtactacacggcagcaactttgatgaagcaaaagcagaagccgaacgtttgtcagagcaatatggctatacttttgtgcccccctttgatcacccactggtgatcgcaggtcaaggcaccatcggtatggaaatgctgcaacaaaatggtcaccttgattacatctttgttcctgtcggtggcggcggtttggccgctggtattgcggtactagtgaagcagttaatgccagaaatcaaagtcattgccgtagagccggaagactcatcttgtcttaaagccgcgctggatgctggtgaaccagtggtactagaccaagtcagcatgtttgccgatggcgtcgcagtaaaacgcattggtgaagagactttccgcctgtgccagaagtacattgatggccatattgcggtctctagtgatgaaatctgcgcagccgtaaaagacatctttgaagatacccgtgcgattgctgagccttcgggtgcgcttgctctggcggggctgaagaaatttgctgaacagaacaagctgaaagacaaaaacctaggcacggtactgtctggcgcaaacaccaacttccacgggttacgttatgtgtcagaacgttgcgagctaggtgaaaaacgtgaaggtttattggcagtgacgatccctgaacgccaaggagcgttctttgagttctgtaacttgattggcggccgtgcagttacggagtttaactatcgttataacgatgacgaactcgctaatatctttgtcggtgttcgtctgcaaggcggtcaagaagagttggaaaacatcattcacgatctacgtgaaggtggctatccggtggttgacctttctgatgatgaaatggcgaagctacacgttcgctacatgatcggcgggaagccatcgaagcaactcaaagagcgactctacagctttgaatttccagagtacccaggtgccttgctgaaattcttaagcactcttggtacccattggaatattagcttgttcaactaccgtaaccacggcgcagactacggacgcgttttatgtggtttcgagttagatgaaggagatttagctcagttttctgcgcatttacgcgaacttggctatcaatgcaaagacgaaacagacaacccgtcttacaagttcttcctgtcataa

SEQ ID NO: 12634 - protein, 514 aa, Vibrio sp. Ex25
MESQPEKKVNQTGADYLRQILRAPVYEVATVTPLQEMPRLSARIGNNVQIKREDRQPVHSFKLRGAYNMVASLSEAQKAAGVIAASAGNHAQGMALSGTKLGIKTTIVMPKTTPDIKVDAVRSFGGNVVLHGSNFDEAKAEAERLSEQYGYTFVPPFDHPLVIAGQGTIGMEMLQQNGHLDYIFVPVGGGGLAAGIAVLVKQLMPEIKVIAVEPEDSSCLKAALDAGEPVVLDQVSMFADGVAVKRIGEETFRLCQKYIDGHIAVSSDEICAAVKDIFEDTRAIAEPSGALALAGLKKFAEQNKLKDKNLGTVLSGANTNFHGLRYVSERCELGEKREGLLAVTIPERQGAFFEFCNLIGGRAVTEFNYRYNDDELANIFVGVRLQGGQEELENIIHDLREGGYPVVDLSDDEMAKLHVRYMIGGKPSKQLKERLYSFEFPEYPGALLKFLSTLGTHWNISLFNYRNHGADYGRVLCGFELDEGDLAQFSAHLRELGYQCKDETDNPSYKFFLS

SEQ ID NO: 12635 - DNA, 1554 bp, Alteromonadales bacterium TW-7
  CDS (1)..(1554): transl_table=11
atggtttctcaagagctcgattattttcgtgcaattattcaagcaaatatggagcccttggctaaagtcactgaggtcagtgaaatgcctgaccttagcgctaaacttggcaaccatgtatggcttaaacgtgaagatcaacagcccgtgtattcgtttaaattacgcggcgcatacaataaattaaataagttgccaaaagggtctgttgtaattactgcatcggctggtaaccatgctcagggtgttgcattaagcgcttcgcatttagggcataaggcaacgattgtaatgcctgttacaacgccagaaataaaggttaacgccgtacgtgctttaggcggtgaggttgtattgcatggacatcagtttgacgtagctaaagcgcacgcgcttgagcttacagagcagcgtaatggcatttttgtcccaccatttgacgatcctgacgttattgttggacaaggtactgtagcgcgagaactaatgcagcagctcaatgagcttgatgcggtatttattcccgttggaggcggtggcttactggcaggcatggctgtttatataaagtcattacgccctgatataaaagtcattggcgtagaagccgacgaaagcgcctgtttacaagcagcacttaaagcgggtgaaccagtagagcttgaccgagtaggtagttttgccgatggtgtagcggttaaaattattggcaaggaaacatttcgcttagcacaaaagttttgtgacgaagtaatcactgtgactagcgatgaaatttgtgcagccatgcaagatatttttgtctctacccgcgcaattgcagagccctctggtgcccttgcaacggcagggcttaaaaagtggagccaacagtcgggcttaaaagggctccatttagcagcggtgctttcgggtgctaacttaaactttgatcgcttacgttatgtcgctgagcgcacagcgttaggtgaaaaaaacgaagcgttattagccgttaccatcaaagaagaaaaaggcagttttaaacagttttgtgcgtctttaggtggacgtgctattactgagtttaactaccgttatgcagggcctggtgaagcgcaaatatttgtaggtattgctctgcgccaaggagagcaggagcttaatgagctcaagcaggacctaactaaaaacgattacgcgttttgcgacttatcagataatgaacttgctaagctacacgtacgttatatggttggcggtaaagcacccgaaaaactgcatgagcgtttgttacgttttgagtttccagaataccccggcgcactagcgcgctttttagatacgttaggcaacgattggaatatcacgttatttcattatcggagtcaaggcggctcaatgggctatgtattagccggttttgctattgaacctgagcaatttgagacttttaacgagcatctcaatgacttaggctatagcgtgcaagatgaaacgcataatccgtgttttacacagtttttaacgacgcaacctctttcagagaaaaccgcaaagctcgcttcagtttaa

SEQ ID NO: 12636 - protein, 517 aa, Alteromonadales bacterium TW-7
MVSQELDYFRAIIQANMEPLAKVTEVSEMPDLSAKLGNHVWLKREDQQPVYSFKLRGAYNKLNKLPKGSVVITASAGNHAQGVALSASHLGHKATIVMPVTTPEIKVNAVRALGGEVVLHGHQFDVAKAHALELTEQRNGIFVPPFDDPDVIVGQGTVARELMQQLNELDAVFIPVGGGGLLAGMAVYIKSLRPDIKVIGVEADESACLQAALKAGEPVELDRVGSFADGVAVKIIGKETFRLAQKFCDEVITVTSDEICAAMQDIFVSTRAIAEPSGALATAGLKKWSQQSGLKGLHLAAVLSGANLNFDRLRYVAERTALGEKNEALLAVTIKEEKGSFKQFCASLGGRAITEFNYRYAGPGEAQIFVGIALRQGEQELNELKQDLTKNDYAFCDLSDNELAKLHVRYMVGGKAPEKLHERLLRFEFPEYPGALARFLDTLGNDWNITLFHYRSQGGSMGYVLAGFAIEPEQFETFNEHLNDLGYSVQDETHNPCFTQFLTTQPLSEKTAKLASV

SEQ ID NO: 12637 - DNA, 1533 bp, marine gamma proteobacterium HTCC2143
  CDS (1)..(1533): transl_table=11
atgccacacagatacataaagaaaattctcagcgcccaagtctacgatgtcgccatcgagtcgcctgtcgacccagcgccattgctgagcaagcgctttgataacaatattttgttgaagcgagaagatctacagccagtcttttcgtttaagttgcgaggtgcgtataacaaaatgatgcatcttagcgacgctgagcgagcaaaaggcgtcattgccgcatcggctggaaatcatgcccagggtctggccttagccgcgctgaaactgggtgtgaaagctaccataattatgccgaaaacaacgcctcagattaaggttgatgcggtgaggcgtcgcggtgcgaaggttgttttacacggcgatacctacgatgaagcatcaattcacgcacaaaaactggtgaacgaaaaagacctagtatacatccacccctacgacgatccggacataattgcaggtcagggcaccattggtatggaaattatccgccaggtcacggggcctttggacgcggtttttgtgccagtcggtggcggtggtttattggcgggtgttgctgcatatatcaaatatgtgcgtcctgatattaaagtgattggggtggagccggaagacgcggcctgcctgaaagcagctatggatgctgggcgtcgagtaaaacttgcgcaggtgggtctttttgctgatggtgttgccgttggacagattgggaaagagacgttccgtgttattcgcaaaacagtagacgatgtaatcactattagcactgatgaaatgtgcgcagccattaaagatatttttgacgacacccgatcgatagctgagcctgcaggtgcgttggcgttggcggggttaaaaaaatacatcgaatctagcggcgctcgaggacaaacgctgctggcaatcgacagtggtgcaaacaccaacttcgatcggttgcgctatatttcggagcgaacagaggtcggtgaaaagagggaggctattatcagcgtcactattcccgaacgccccggtagcttcaagaaattctgtggtttattggggcgtcgcagtattactgagtttaactaccgttatggtaatagccgagatgcacagatattcgtcggggtccaaattagtcctgatggcaacgaccgggcggagttagttcaagggttggagcaaaaaggctatccggtgctggatttaactgacaatgaaatggccaagttgcatattcgacacatggtaggggggcacgctcctgatgacatcaaagaagagctgttataccgctttcagtttcctgagcgacctggcgcgttattgaactttctgacacagcttggtcaacagtggaatatttcgatgtttcattaccgaaatcacggggcagcctacggacgggtgctgcttggattacaggcttctaaaggtgaccgcaaagccgttgagactttccttgggcaggtacagtatccatttacggaagaaactgataatcctgcttatgtctcatttctgagcggtagaacgacttcttag

SEQ ID NO: 12638 - protein, 510 aa, marine gamma proteobacterium HTCC2143
MPHRYIKKILSAQVYDVAIESPVDPAPLLSKRFDNNILLKREDLQPVFSFKLRGAYNKMMHLSDAERAKGVIAASAGNHAQGLALAALKLGVKATIIMPKTTPQIKVDAVRRRGAKVVLHGDTYDEASIHAQKLVNEKDLVYIHPYDDPDIIAGQGTIGMEIIRQVTGPLDAVFVPVGGGGLLAGVAAYIKYVRPDIKVIGVEPEDAACLKAAMDAGRRVKLAQVGLFADGVAVGQIGKETFRVIRKTVDDVITISTDEMCAAIKDIFDDTRSIAEPAGALALAGLKKYIESSGARGQTLLAIDSGANTNFDRLRYISERTEVGEKREAIISVTIPERPGSFKKFCGLLGRRSITEFNYRYGNSRDAQIFVGVQISPDGNDRAELVQGLEQKGYPVLDLTDNEMAKLHIRHMVGGHAPDDIKEELLYRFQFPERPGALLNFLTQLGQQWNISMFHYRNHGAAYGRVLLGLQASKGDRKAVETFLGQVQYPFTEETDNPAYVSFLSGRTTS

SEQ ID NO: 12639 - DNA, 1635 bp, marine gamma proteobacterium HTCC2080
  CDS (1)..(1635): transl_table=11
atggaaggtccacgggcaaatgaaactcgatcacatcatgacgtaattactgatttacacgtattatcccctttcgacttccgcgggaaagcggccatgacagatgcctacatcaaacgaatcctaaatgcgcgagtctatgacatcgcccacgaaacgcctttaagcgatgcgccgctaatgactcggcgcctggggaatcaaatatttttaaagcgagaagatctgcaaccggtcttctccttcaagttgcgtggcgcctataacaagatgattaacctcgatgagccctcgcggcgacggggtgttgttgccgcttctgctggaaaccacgcccagggggtagccttagctgctcagaagttatcggtcaaagctaaaatagtgatgccggtgaccacccctgccatcaaggtcgatgcggtcagaaactatggggcctcggtcattttgcacggcgacaccttcgatgaggctgcgcatctagcggcggaaattgttgaagctgaaggtatgacattcctccacccttttgatgacccagatgtaattgcgggtcagggcacagttgctgtggagttatcgcgtcaggcccccgctcccctagattacgtgttcgtttgcgtgggtggtggcgggcttattgcgggcatggccacctaccttcggtatgtctggccaaagacccaaatcattggcgttgaacccgaggatgctgcctgcgttcgtgctgctcttgataaggggcggcgcgttcggttgcgagaagtcggcttgtttgccgatggctgcgccgttgcacaggtcggcaaagaaactttgcgcctgataaaaagccacgtcaccgatgtcattacggtgactaccgatgagatatgcgcgggcgtcaaagatattttcgaggacacccgggcaatcgctgagcccgctggagcattagcggtggcaggtatgaagaaatatacagcgctgcacggtcttcagggcgtcacgatggcggctacggtgagcggtgccaacacgaactttgatcggctgcgctatatttctgaacgcactgaaataggagagcgaagagaggctgtcatttccgtcaccatccctgagcgtgccggcgcctttcgccgattttgcaacgagctgggtaagcgcaatattaccgagttcaattaccgttatgttgatgatcgcgtggcacaagtttttgtgggactttcggtgacgccaaacagtgcagatttagaacagttgaccaacaagcttgagaagaaagggtattcgatcgataacctgaccgataatgaaaccgctaagctgcatgttagacacatggtgggtggacaggctccttgtattggggggagtgaatgtgttttcagggtccaatttccagaacgtccgggcgccttgctgaaatttttaaatgcccttggtaatgattttgatatttctctgtttcattaccgcaatcatggagcggcctacggcagaattttagtagggttcaggctggcagatgagcgtcgttctgccctgttgaaggtactggccgatgtcggttatccccattgggaagaaaccagcaatcccgcgtatgaggcctacctcaagcccaaaaccgcctcagccgattaa

SEQ ID NO: 12640 - protein, 544 aa, marine gamma proteobacterium HTCC2080
MEGPRANETRSHHDVITDLHVLSPFDFRGKAAMTDAYIKRILNARVYDIAHETPLSDAPLMTRRLGNQIFLKREDLQPVFSFKLRGAYNKMINLDEPSRRRGVVAASAGNHAQGVALAAQKLSVKAKIVMPVTTPAIKVDAVRNYGASVILHGDTFDEAAHLAAEIVEAEGMTFLHPFDDPDVIAGQGTVAVELSRQAPAPLDYVFVCVGGGGLIAGMATYLRYVWPKTQIIGVEPEDAACVRAALDKGRRVRLREVGLFADGCAVAQVGKETLRLIKSHVTDVITVTTDEICAGVKDIFEDTRAIAEPAGALAVAGMKKYTALHGLQGVTMAATVSGANTNFDRLRYISERTEIGERREAVISVTIPERAGAFRRFCNELGKRNITEFNYRYVDDRVAQVFVGLSVTPNSADLEQLTNKLEKKGYSIDNLTDNETAKLHVRHMVGGQAPCIGGSECVFRVQFPERPGALLKFLNALGNDFDISLFHYRNHGAAYGRILVGFRLADERRSALLKVLADVGYPHWEETSNPAYEAYLKPKTASAD

SEQ ID NO: 12641 - DNA, 2147 bp, Solanum lycopersicum
  CDS (92)..(1912)
cgacctccgccgccgggaaatatttacatctccggctaccgacggatttgtataacgtatttaatcttcattatacatccgaacgtaggaaatggaggttcttcggtttaccgccgtgaaatcattgaattcatgcgtccgtccagaattcacggcgatgagttccgtcattgttcctattagcactgtgaaagtttctggaacgaggaaaagcaaaaagaaggcgcttatttgtgctaaggcgacggagatcttgtcatcgccagctacggtaacggaaccgttgaaggcggagccggcagaggcaccggttccgttgctacgagtttctccgagctcgttgcagtgtgagccgggatatttgttaccgaatagtccggttttaggtacgggtggtgtgaccgggtatgagtatctgacgaacatcttgtcatcgaaagtttatgatgtagcttatgagacgcctttgcagaaagctcctaagctgtcagaaagattgggagttaatgtatggctaaaaagagaggatcttcagccggtgttttcgttcaaaatcagaggagcttacaatatgatggcaaaactcccgaaagagcagttggaaaaaggggttatatgctcatcagcaggaaaccatgcacaaggtgttgcattatctgctcagagacttggctgcgatgctgtgattgttatgcctgttactacaccagacatcaaatggaaatcagttaagagattgggtgctactgttgttcttgttggggactcatatgatgaagctcaagcatatgccaaaaagcgggctgaatctgaaggccgcacattcatccctccttttgatcacccagatgtcattgtaggtcagggtacagtagggatggagataaatcgccaactcaaagataacattcatgcaatctttgtgcctgttggaggaggggggcttatagctggtattgctgcttatttgaaaagggttgccccagatataaagattattggagttgaaccacttgatgctaatgcattggcattatcattacatcatggtcagagagtaatgctggaccaagttgggggttttgcagatggtgtagctgttaaagtggttggtgaagagacttatcgtctgtgcgaggaattaatagatggcgttgtcctagttggtcgtgatgctatatgtgcatctataaaggacatgtttgaagagaaaaggagcatactagagccggcaggtgcacttgctcttgctggagccgaggcatactgcaagtattatggcctcaagggtgaaaacgtagtagcaataactagtggagccaacatgaactttgacaggcttagattggtaacagaactcgcagatgttggtagacagcgggaagctgttcttgctacttttatgccagaagacccaggaagcttcaaaaagttcgctgaaatggtaggaccaatgaatatcactgaattcaagtacagatacaactctgataaagaaagagctcttgtactttacagtgttggacttcacacaatattagaacttgaaggaatggtggagaggatggaatcagcagatctgcaaaccattaatcttacagacaatgacttggtcaaagatcatcttaggcatttgatgggtggtagaacaaatgttcataatgagcttttgtgtcgattcacttttcctgagaagcctggtgctttgatgaagtttttagatgctttcagcccacgttggaatataagtttgtttcattatcgtgcacagggagatactggtgcaaatgtgctagtcgggatccaagttccaccggatgaggtagttgagtttgagggacgggcagacagtcttggttatgaatatgcaatggagagtctcaatgaggcataccagctcataatgcattgaaaaaaggtgttgcctgttatggcttgttctgggtcctcattgcaacaccgacttcactttctcctggttagtcagatattctgaatcctcctcgacgatggaagattgcctgttttatatacaaccagtgtactagatgattttgggctagtctttatcttgtgtacataagctatttgtatgttgttatctaaagacctctacttccatgaataaaccatttcactttaaagct

SEQ ID NO: 12642 - protein, 606 aa, Solanum lycopersicum
MEVLRFTAVKSLNSCVRPEFTAMSSVIVPISTVKVSGTRKSKKKALICAKATEILSSPATVTEPLKAEPAEAPVPLLRVSPSSLQCEPGYLLPNSPVLGTGGVTGYEYLTNILSSKVYDVAYETPLQKAPKLSERLGVNVWLKREDLQPVFSFKIRGAYNMMAKLPKEQLEKGVICSSAGNHAQGVALSAQRLGCDAVIVMPVTTPDIKWKSVKRLGATVVLVGDSYDEAQAYAKKRAESEGRTFIPPFDHPDVIVGQGTVGMEINRQLKDNIHAIFVPVGGGGLIAGIAAYLKRVAPDIKIIGVEPLDANALALSLHHGQRVMLDQVGGFADGVAVKVVGEETYRLCEELIDGVVLVGRDAICASIKDMFEEKRSILEPAGALALAGAEAYCKYYGLKGENVVAITSGANMNFDRLRLVTELADVGRQREAVLATFMPEDPGSFKKFAEMVGPMNITEFKYRYNSDKERALVLYSVGLHTILELEGMVERMESADLQTINLTDNDLVKDHLRHLMGGRTNVHNELLCRFTFPEKPGALMKFLDAFSPRWNISLFHYRAQGDTGANVLVGIQVPPDEVVEFEGRADSLGYEYAMESLNEAYQLIMH

SEQ ID NO: 12643 - DNA, 1698 bp, Aspergillus niger
  CDS (1)..(1698)
atgccgggcgaagcaactgagaacggcgttccgtaccccgtttcaaccaagttggacaacctgaccctgaacgagcgttcggctgctccgtctcccacttcggacaaggtggatggtcaagagcgatcaacagtcgattatggcattcctgacgccttcctgcttcccaatggaacgcctgactatctccggttgatcctgacgtcccgtgtctacgacattatcgaggaaaccccgcttcaccatgcggtcaacatcagcaatcgcctggagtgccgtgtgctcctgaagagagaggatcttctccccgtgttcagtttcaagctccgtggagcctacaacaaaatggcgcacttgacccccgagcaacggtggaagggagtcattgcgtgctcagcaggaaaccatgcgcagggcgtcgcttactcggctcggaaactgaagatccccgccactatcgttatgccatcgggcacccccgctatcaagcatctgaatgtcgcccgcctgggtggtagcgtggtcctccacggggacgacttcgacgcagctaagcaagaagcataccggttgcaggagcaacacggacttaccatgatccctcccttcgatgacccctacgtgatcgctggccaaggaaccattggcatggagatattgcgccaggccaatttgcagaagctagaagctgtcttctgtgccgtcggtggaggaggtctgattgctggcattggcgtctaccttaagcgcatcgcaccacacgtgaagatcattggcgttgaggcccgcgatgccaatgccatggcacagtccctcgaatcgggttctcgagtgtttctgaaggatgtgggcctgttcgcagacggtgctgctgtcaagtctgttggagaggagaactatcgccttgcacgtgaagtcatcgatgaggtcgttcaggtcacaaccgatgagacatgcgccgccatcaaggatgcgtttgaggacacacggtctatcattgaaccagcaggtgccctggctctggccggtctcaagaagtacgccgtaatgaaccccagccccgacacgagcagggagttgtgcgctatcgcctccggagctaacatggacttcgaccgcctgcgcttcgttgctgagcgtgcggctctgggagagcggaaggaggcgctcctgagcgtcaggatccccgagaagccaggcgctttcgcaaagcttgtcgaggttgttcttcctcatgcagtcacggcgttcagctaccgttacgcccgtgaatcgtctgccgatgttctgatgggcatctctttgtccgctgctactggtcgggacgatttggccaagattatcagccaattggtacgaggtggcatggatacgaaggatcttagtgatgacgagctggcgaagagacacttgcgcttcctggttggtggtcgcagtgaggtcgcggatgaacggttgttcatgttcgagttccccgaacgtccgggtgctcttgctaagttcttgacgacccttcgtcccaaccagaatatctccctgttccactaccgtaactatggtggtgatgttggcaaggtgcttgcgggtatccagtgccctgagaacgagaaggccgagctggaggctttcctcagcgatctggcttatcccttcactgaacataccgattccccgacctacaagaccttcctgaggtag

SEQ ID NO: 12644 - protein, 565 aa, Aspergillus niger
MPGEATENGVPYPVSTKLDNLTLNERSAAPSPTSDKVDGQERSTVDYGIPDAFLLPNGTPDYLRLILTSRVYDIIEETPLHHAVNISNRLECRVLLKREDLLPVFSFKLRGAYNKMAHLTPEQRWKGVIACSAGNHAQGVAYSARKLKIPATIVMPSGTPAIKHLNVARLGGSVVLHGDDFDAAKQEAYRLQEQHGLTMIPPFDDPYVIAGQGTIGMEILRQANLQKLEAVFCAVGGGGLIAGIGVYLKRIAPHVKIIGVEARDANAMAQSLESGSRVFLKDVGLFADGAAVKSVGEENYRLAREVIDEVVQVTTDETCAAIKDAFEDTRSIIEPAGALALAGLKKYAVMNPSPDTSRELCAIASGANMDFDRLRFVAERAALGERKEALLSVRIPEKPGAFAKLVEVVLPHAVTAFSYRYARESSADVLMGISLSAATGRDDLAKIISQLVRGGMDTKDLSDDELAKRHLRFLVGGRSEVADERLFMFEFPERPGALAKFLTTLRPNQNISLFHYRNYGGDVGKVLAGIQCPENEKAELEAFLSDLAYPFTEHTDSPTYKTFLR

SEQ ID NO: 12645 - DNA, 1704 bp, Aspergillus oryzae
  CDS (1)..(1704)
atgtccgcagaatcttctacaaatggcattgcgacgcccgtctcatcgaagtacagcaacctggctctgaccgagtactcaacagtgcccacgcctgactcagaaaacgatgatggaaagcaactgggatcaccgcccaattggggcattcctgatgcatttttactacctaatggctatccagattatctccgattgatcttaacatcccgcgtttacgaggtcatcaatgagaccccccttcatcatgcagtcaaccttagcaaccgcttggaatgtcgtgtacttctgaaacgggaggacttgcttcctgtattcagtttcaagctccgcggagcctacaacaagatggcacatctgaatcaggagcagagttggaaaggtgttattgcatgctctgcaggtaaccatgcgcagggtgttgcgttttccgcgcgtcatctgaagattccagcaacgatcgttatgccctcgggcaccccggctatcaagcacctgaacgtcgctcgcctcggcggaagtgtgattctccacggagacgacttcgatgctgcgaaggcagaagcacaccgcttagagaagcagcacggattaacgagcattcctcctttcgatgacccttacgtgatcgcaggccaaggaaccatcggaatggaaatattgcgccaggcaaacttgcagaagctggaagctgtcttctgtgctgttggaggaggtggattgattgctggtatcggagtctacctcaagcgcattgcaccccatgtgaagataatcggagtggaagctcatgatgcgaatgctatggctcagtccttggattctgggtctcgtgtgctactcaaagatgtggggctgtttgccgacggcgctgctgtcaaggctgttggagaggaaccctaccggctggctcgtgaagtaattgatgaagtcattcaggtttctactgatgagacgtgtgccgcgatcaaggatgcatttgaggacacccgatctatcatcgagccggcaggtgccctggccttggcaggtctcaagaaatatgtctccttgtatcccgaccccaaccctaagcgcgagctggttgccatcacatccggtgcgaacatggacttcgatagactgcggttcgtggctgagcgtgctgccctgggtgaacggaaggaggcgctcttgagtgtgaacattcccgaacagcctggctctttcgccaagctagtcgaagttattctccctcacgcggtcaccgcattcagctaccgttatgctcgggacgaatcggccgatgtcttcatgggtatctccttgtctgcctctaccgggcaaaaggatctggcgaagatcatggaagaactggacaagggtggtatgaaggcgaaggatttgagcgatgacgagcttgccaagagacacgttcgcttcttggttggtggacgttgtgacgtgaaggatgagcgtttgtttatgtttgagttcccggagcgtcctggtgctctggccaagttcctcactaccctccgacccagccagaacctctccttgttccactaccgtaactacggtggtgacgttggaaaggtgcttgctggcattcagtgcccgccatctgagaaggaccagctggaagccttcttaagggatctgggctatcctttcagcgagcataccgactcgtccacttaccacaccttccttcgttcttga

SEQ ID NO: 12646 - protein, 567 aa, Aspergillus oryzae
MSAESSTNGIATPVSSKYSNLALTEYSTVPTPDSENDDGKQLGSPPNWGIPDAFLLPNGYPDYLRLILTSRVYEVINETPLHHAVNLSNRLECRVLLKREDLLPVFSFKLRGAYNKMAHLNQEQSWKGVIACSAGNHAQGVAFSARHLKIPATIVMPSGTPAIKHLNVARLGGSVILHGDDFDAAKAEAHRLEKQHGLTSIPPFDDPYVIAGQGTIGMEILRQANLQKLEAVFCAVGGGGLIAGIGVYLKRIAPHVKIIGVEAHDANAMAQSLDSGSRVLLKDVGLFADGAAVKAVGEEPYRLAREVIDEVIQVSTDETCAAIKDAFEDTRSIIEPAGALALAGLKKYVSLYPDPNPKRELVAITSGANMDFDRLRFVAERAALGERKEALLSVNIPEQPGSFAKLVEVILPHAVTAFSYRYARDESADVFMGISLSASTGQKDLAKIMEELDKGGMKAKDLSDDELAKRHVRFLVGGRCDVKDERLFMFEFPERPGALAKFLTTLRPSQNLSLFHYRNYGGDVGKVLAGIQCPPSEKDQLEAFLRDLGYPFSEHTDSSTYHTFLRS

SEQ ID NO: 12647 - DNA, 1779 bp, Cryptococcus neoformans
  CDS (1)..(1779)
atggcgcctacaccgggagtcatccccgtccccgccgcccgcccggccgccagccacctctccaagtcgccgccgacgaccaacgagtacacctccaccgcgcccatccccgccctcccgccgcagcacacggacgagggcgtcccctcccacctctaccaaggcctgcccgcccatctcctgatcgacgatgcccagggacaaaaggtccccgactatctcaggatgatcctgatgtccaaggtctacgccgcgcccctcaacctcaaggaaacccctctcacatatgcagccaacctctccgcccggctcggcaacgagatctggatcaagcgggaggacctccagcccgtgttctcattcaagatccgcggcgcctacaacatgatggccagtctgtccgacgaagaaaagaaaaagggcgtcatcacgtgctccgccggcaaccacgcccagggcgtcgccctctccggccacgcactcaacatccccgccatcgtcgtcatgcccgtctccaccccgtccatcaagtggcgcaacgtccagcgtctcggcgccaccgtcctcctccacggccgcgactttgacgaggccaaggccgagtgtctccgcctcgaaaaggaaaagggcctgacctttgtgcccccgtacgataacccctacgtcgtcgccggccagggaactgtcgccatggaaatctgccgccaagtcacagatgccgaccagatcgatggcatattcgcttccgtcggcggaggcggccttgcggccggtatcgcggcgtacatgaagcgagtcgccaagcccagtgtcggaatctacggtgtcgagaccgttgacggtgatgccatggaccgctcactcaaggccggcaagagggtcctcctcgatgaagtcggcccgtttgcagacggtaccgcggtaaggcttgtcggcgaagaaccttttcgcgtatgcaaaaactttttggacgacgtcgtgcttgtcaacaatgacgagatttgcgccgccatcaaggatgtctttgaagaaacccgatctgtccccgaaccgtccggtgccctcgcactcgcaggcctgaaagcccacattatccgaaacaacctccaaggcgccggtaaacgctttgtcgccgtcatctccggcggtaacatgaactttggccgactccgattcgtcgctgagcgagcggatgtcggcgaacgacgagaagtgctgatgagtgtccgagtgcccgaaaagcctggcagctttttgaaattccactccctcctcggttcacgcgcagtcaccgagttctcctaccgccactccaacaattccaccggctacatcatctgctccttcctcctctcctcctcatcctcttcgtcctccgggccctcacccgaagcgcgcgcaaacgagattcacgagatggtcgaatcgtttaaacagcatgggatcgaagccgtcgatttgagcgaggatgagtttgcaaagagtcatgtgaggcatctggtcggtggacgcagtgccgtggagcacgaaaggatctttaggtttgagttcccggaaagacctggggcacttggaaactttttaaaaggtatgaaggtcgaatggaatatctccatgttccattacagaaaccacggtgccgacgtcggcaaagtcctcatcggcgtccaagtcccgtcccaggacaaccccgcatttgacgagtttttggaaaagctgggatatccatatgtcgaagagacccataatgaggtttacaccatgttcctcaggtcgtaa

SEQ ID NO: 12648 - protein, 592 aa, Cryptococcus neoformans
MAPTPGVIPVPAARPAASHLSKSPPTTNEYTSTAPIPALPPQHTDEGVPSHLYQGLPAHLLIDDAQGQKVPDYLRMILMSKVYAAPLNLKETPLTYAANLSARLGNEIWIKREDLQPVFSFKIRGAYNMMASLSDEEKKKGVITCSAGNHAQGVALSGHALNIPAIVVMPVSTPSIKWRNVQRLGATVLLHGRDFDEAKAECLRLEKEKGLTFVPPYDNPYVVAGQGTVAMEICRQVTDADQIDGIFASVGGGGLAAGIAAYMKRVAKPSVGIYGVETVDGDAMDRSLKAGKRVLLDEVGPFADGTAVRLVGEEPFRVCKNFLDDVVLVNNDEICAAIKDVFEETRSVPEPSGALALAGLKAHIIRNNLQGAGKRFVAVISGGNMNFGRLRFVAERADVGERREVLMSVRVPEKPGSFLKFHSLLGSRAVTEFSYRHSNNSTGYIICSFLLSSSSSSSSGPSPEARANEIHEMVESFKQHGIEAVDLSEDEFAKSHVRHLVGGRSAVEHERIFRFEFPERPGALGNFLKGMKVEWNISMFHYRNHGADVGKVLIGVQVPSQDNPAFDEFLEKLGYPYVEETHNEVYTMFLRS

SEQ ID NO: 12649 - DNA, 1848 bp, Podospora anserina
  CDS (1)..(1848)
atggcttccacaaattcgaatgcacctcgtcatgaggggagtgtggcagagcagacggccggccatgttaacggtgactatgtggtcaatggcgtgccacagctgcccaccgcattccgcaacggcaacggcggccttggtgctgggggtttgcccaggaacatgtcgctgaacagcttcgctctgacagagtacagcgcaaagccaacaccccccgctgaagacaagaaagatgaagtgaaaaaggtcgtgccagacgagtatctgctaccgaatggtaacccagatctcattatcctacgtgtacagtatcttcgccttatcatcacctcctacccgcgggtgagagaggtgtgcaaagaaactcctttggtgcacgctgttggcctgagcaaccgactggagcgcaaggtcctgttgaagcgcgaggatgagcaaccggtattcagtttcaaactcagaggagcgtacaacaagatggctcatctcgacgctaccgagtcctggaagggtgtcgtttgttgcagcgctggcaatcatgctcagggcgttgcttactcggcccgcaggttgaaaatcccagccactattgtgatgcccaagggcacaccaagcatcaagcatctcaatgtatcgagaatgggcggacacgttgttcttcacggcgccgactttgacgaggccaaggaggaatgtgctcggcgggaaaagcaggatggcctgataaacattcccccgttcgacgacccttatgttattgccggccaaggaactatcggtatggagattctctcacaaacaaacctgcagaagcttgatgccatcttctgctgcgtgggtggaggcggcctgatcgccggcgttggtgtgtacgtcaagcgtattgcaccgcatgtcaagatcattggcgtggaaacgtacgacgcggatgcgatgactcagtctctcgacaagggggagcgtgtgcttctcaaggatgttgggttgttcgccgatggcgccgcggtcaagattacgggcgaggaaacgttccgtatttgtcaggaggttgtggacgaaatggttcgggtaaccacagacgaggcctgtgccgctatcaaggacatgtttgaggataccaggtctatcattgaaccagctggtgccctggccattgccggtctgaagaagtgggtggccgccaatccaaccccggatcctacacggtctgtcgtggccatcacatccggcgcaaacatgaactttgaccgcttgggctttgttgcagcccgtgctacgtacggcgagggaagagaggctttacttgcagcccgcatcccagaaagcccgggagccttcgctgaactcatcaacgccgtcatgcctcactctgtcaccgagtttagctatcgttacgccagcccaactgaagcaaatgtgctcctgggtatctcattaaccgccgttggtagtgaacgcgcacagcaactgcagtcggttatcagccgcatcaaggagtccggcaccatggatatcaccgatctgtccaacgacgagttagcaaagagtcacattcgatacatggttggtggccgttctagtgtgcctaacgagcgtctgtacacattccgattcccagaacggcccggtgctcttgagcgcttcctacagaccttgcgtgtcaaatacaacatcagtctgttccagtacagaaaccacggtggtgatattgggcaggttttgacaggcatcgtttgcccgaacgaggagattggcgaactagaaacattcctcaagaagatcggctatccgtgggaggactgcacagatgcaccggtgttcaagacattcttacggtcggagtcatag

SEQ ID NO: 12650 - protein, 615 aa, Podospora anserina
MASTNSNAPRHEGSVAEQTAGHVNGDYVVNGVPQLPTAFRNGNGGLGAGGLPRNMSLNSFALTEYSAKPTPPAEDKKDEVKKVVPDEYLLPNGNPDLIILRVQYLRLIITSYPRVREVCKETPLVHAVGLSNRLERKVLLKREDEQPVFSFKLRGAYNKMAHLDATESWKGVVCCSAGNHAQGVAYSARRLKIPATIVMPKGTPSIKHLNVSRMGGHVVLHGADFDEAKEECARREKQDGLINIPPFDDPYVIAGQGTIGMEILSQTNLQKLDAIFCCVGGGGLIAGVGVYVKRIAPHVKIIGVETYDADAMTQSLDKGERVLLKDVGLFADGAAVKITGEETFRICQEVVDEMVRVTTDEACAAIKDMFEDTRSIIEPAGALAIAGLKKWVAANPTPDPTRSVVAITSGANMNFDRLGFVAARATYGEGREALLAARIPESPGAFAELINAVMPHSVTEFSYRYASPTEANVLLGISLTAVGSERAQQLQSVISRIKESGTMDITDLSNDELAKSHIRYMVGGRSSVPNERLYTFRFPERPGALERFLQTLRVKYNISLFQYRNHGGDIGQVLTGIVCPNEEIGELETFLKKIGYPWEDCTDAPVFKTFLRSES

SEQ ID NO: 12651 - DNA, 2223 bp, Arabidopsis thaliana
  CDS (21)..(1799)
gtttaactctctctaaacccatgaattccgttcagcttccgacggcgcaatcctctctccgtagccacattcaccgtccatcaaaaccagtggtcggattcactcacttctcctcccgttctcggatcgcagtggcggttctgtcccgagatgaaacatctatgactccaccgcctccaaagcttcctttaccacgtcttaaggtctctccgaattcgttgcaataccctgccggttacctcggtgctgtaccagaacgtacgaacgaggctgagaacggaagcatcgcggaagctatggagtatttgacgaatatactgtccactaaggtttacgacatcgccattgagtcaccactccaattggctaagaagctatctaagagattaggtgttcgtatgtatcttaaaagagaagacttgcaacctgtattctcgtttaagcttcgtggagcttacaatatgatggtgaaacttccagcagatcaattggcaaaaggagttatctgctcttcagctggaaaccatgctcaaggagttgctttatctgctagtaaactcggctgcactgctgtgattgttatgcctgttacgactcctgagataaagtggcaagctgtagagaatttgggtgcaagggttgttcttttcggagattcgtatgatcaagcacaagcacatgctaagatacgagctgaagaagagggtctgacgtttatacctccttttgatcaccctgatgttattgctggacaagggactgttgggatggagatcactcgtcaggctaagggtccattgcatgctatatttgtgccagttggtggtggtggtttaatagctggtattgctgcttatgtgaagagggtttctcccgaggtgaagatcattggtgtagaaccagctgacgcaaatgcaatggctttgtcgctgcatcacggtgagagggtgatattggaccaggttgggggatttgcagatggtgtagcagttaaagaagttggtgaagagacttttcgtataagcagaaatctaatggatggtgttgttcttgtcactcgtgatgctatttgtgcatcaataaaggatatgtttgaggagaaacggaacatattggaaccagcaggggctcttgcactcgctggagctgaggcatactgtaaatattatggcctaaaggacgtgaatgtcgtagccataaccagtggcgctaacatgaactttgacaagctaaggattgtgacagaactcgccaatgtcggtaggcaacaggaagctgttcttgctactctcatgccggaaaaacctggaagctttaagcaattttgtgagctggttggaccaatgaacataagcgagttcaaatatagatgtagctcggaaaaggaggctgttgtactatacagtgtcggagttcacacagctggagagctcaaagcactacagaagagaatggaatcttctcaactcaaaactgtcaatctcactaccagtgacttagtgaaagatcacctgcgttacttgatgggaggaagatctactgttggagacgaggttctatgccgattcacctttcccgagagacctggtgctctaatgaacttcttggactctttcagtccacggtggaacatcacccttttccattaccgtggacagggtgagacgggcgcgaatgtgctggtcgggatccaagtccccgagcaagaaatggaggaatttaaaaaccgagctaaagctcttggatacgactacttcttagtaagtgatgacgactattttaagcttctgatgcactgagtttgaagctgtggtggataatccaaatctcaggaagaagaagaacccatgagagtcttcctcgtgatcatggttgttcttgagattctttagtctgttttctctcgggtctgtgtctgtcggatgagcgttttagccactgtagttcaatgagtaacctctatttgctacgaactctcattcctagatcgtgggttaccttttggtttctccaagcaatttgaggctagcctccaataaaaaatagtatttctagtatttgaaaaaacgctactttcgtggtatagagaaagataaagagagagagagagagagagagagagagagagagagagagagagagagagagagagagatgctcttgatattgctcttgatacaactctattattattgctcttaatccataatgaaagtgctttac

SEQ ID NO: 12652 - protein, 592 aa, Arabidopsis thaliana
MNSVQLPTAQSSLRSHIHRPSKPVVGFTHFSSRSRIAVAVLSRDETSMTPPPPKLPLPRLKVSPNSLQYPAGYLGAVPERTNEAENGSIAEAMEYLTNILSTKVYDIAIESPLQLAKKLSKRLGVRMYLKREDLQPVFSFKLRGAYNMMVKLPADQLAKGVICSSAGNHAQGVALSASKLGCTAVIVMPVTTPEIKWQAVENLGARVVLFGDSYDQAQAHAKIRAEEEGLTFIPPFDHPDVIAGQGTVGMEITRQAKGPLHAIFVPVGGGGLIAGIAAYVKRVSPEVKIIGVEPADANAMALSLHHGERVILDQVGGFADGVAVKEVGEETFRISRNLMDGVVLVTRDAICASIKDMFEEKRNILEPAGALALAGAEAYCKYYGLKDVNVVAITSGANMNFDKLRIVTELANVGRQQEAVLATLMPEKPGSFKQFCELVGPMNISEFKYRCSSEKEAVVLYSVGVHTAGELKALQKRMESSQLKTVNLTTSDLVKDHLRYLMGGRSTVGDEVLCRFTFPERPGALMNFLDSFSPRWNITLFHYRGQGETGANVLVGIQVPEQEMEEFKNRAKALGYDYFLVSDDDYFKLLMH

SEQ ID NO: 12653 - DNA, 1809 bp, Oryza sativa
  CDS (1)..(1809)
atggcggccgccgccaccgccgcggccgcggccacctccaccttcaccgccgccgtgccgcgcgcgcgcgggcgcaggcatccaacgcgcgtggcggcggcggcggcggcgacggcgtcgtcaccggaggcggcgatggcggcggcggcgccgccgttgccgatgatgcgggtggcgcccgagacgctgcagcggcagagcgggtacctcgtgcggggccgcggggaggaggggattggggagggggaggcggaggcggtgggaggggacgcggcgggagggctcggcgcgatggagtacctgaccagcgtgctctcgtccaaggtgtacgacgtcgccatcgagtcgccgctccagctcgccaccaagctctccgagcgcctcggcgtcaacttgtggatcaagcgcgaggacctgcagcccgtattctcattcaagttgagaggagcatacaatatgatggcaaagctctcgcgtgaacagttggagaggggtgtcatctgctcctctgctgggaaccatgcccagggagtggccctttccgctcaaagactcggttgcgatgctgttattgtcatgcctgtgacaacgcctgaaatcaagtggcgatcggtggagagattgggtgcaacagttgtactcaaaggggactcatatgatgaagctcaatcatatgcaaaacaaagatgcgagcaggaaggccgcacattcatacctccttttgaccatcctgatgttataagtggacaaggaacgattggcatggaaattgttcggcagttgcaaggcccacttcatgccatatttgtacctgtaggaggaggtggattaattgctgggatcgctgcctatgtaaaaagggttcgcccagaggtgaaaataattggagtggagccatcagatgcaaatgcaatggcattgtccttgtgtcatggtcaaagggtcatgctggagcaagttggtgggtttgctgatggtgtggctgtcaaagttgtaggggaggaaacatttcgcttgtgccgggaacttgtagatggtattgttcttgtcagtcgagatgctatttgtgcttcaataaaggatatgtttgaggagaaaagaagcatacttgaacctgctggtgcccttgcgctggcaggagctgaagcttactgcaaatactatggcttgaaaggggaaaatgttgttgcaataactagtggagcaaatatgaactttgatcggctcagattagtaactgagctggctgatgttggtcgaaaacgagaagcagttcttgccacatttttgccagaggagcagggaagcttcaaaaagtttgcagagctggttggccggatgaatattactgaattcaaatacagatacgattgcaatgcaaaagatgcccttgtcctttacagtgttggcatctacactgacgatgaacttaaagcaatggtggaacgtatggaatcttcaaaattgagaactgttgatcttactgacaatgatttggcaaaggatcatctaagatactttattggtggcaggtcagaagtaacagatgaacttgtttaccggttcattttcccagaaaggcctggtgcacttatgaaatttttggatgcattcagcccccgctggaatatcagccttttccattaccgtgcacaggtgtgtgacagatttattattcatcagtttccctgctgtaaagtagtcttgtatgaaaattgcaatctcatgcatctgaaatcgtcattttattgccatctatcctgtacaatattccctttccattttcacttgacaaaaatgtacatctaa

SEQ ID NO: 12654 - protein, 602 aa, Oryza sativa
MAAAATAAAAATSTFTAAVPRARGRRHPTRVAAAAAATASSPEAAMAAAAPPLPMMRVAPETLQRQSGYLVRGRGEEGIGEGEAEAVGGDAAGGLGAMEYLTSVLSSKVYDVAIESPLQLATKLSERLGVNLWIKREDLQPVFSFKLRGAYNMMAKLSREQLERGVICSSAGNHAQGVALSAQRLGCDAVIVMPVTTPEIKWRSVERLGATVVLKGDSYDEAQSYAKQRCEQEGRTFIPPFDHPDVISGQGTIGMEIVRQLQGPLHAIFVPVGGGGLIAGIAAYVKRVRPEVKIIGVEPSDANAMALSLCHGQRVMLEQVGGFADGVAVKVVGEETFRLCRELVDGIVLVSRDAICASIKDMFEEKRSILEPAGALALAGAEAYCKYYGLKGENVVAITSGANMNFDRLRLVTELADVGRKREAVLATFLPEEQGSFKKFAELVGRMNITEFKYRYDCNAKDALVLYSVGIYTDDELKAMVERMESSKLRTVDLTDNDLAKDHLRYFIGGRSEVTDELVYRFIFPERPGALMKFLDAFSPRWNISLFHYRAQVCDRFIIHQFPCCKVVLYENCNLMHLKSSFYCHLSCTIFPFHFHLTKMYI

SEQ ID NO: 12655 - DNA, 2082 bp, Nicotiana attenuata
  CDS (47)..(1852)
cttcttcaaaaattcttctattttcctctatcaaatatagtacgatatggaagttctttgtcaagccccagctggaaactcaaattttgcctgtaaccccaaatttacagcaattagaaccagagcaatttctagcaatgacacatttaaagtaatttccagtactggcaacaacaagaaaatgaagggcgcgatacgtacttcgattccaaaaccatcagcattgccattgaaggtctcacaattatctccatcagctgattcaatgcctgttccagcgtctttgcaggacgtcgaggcggggaagttgatagagaataatccatcagggggcgatacagaggaattgtttcagtatcttgttgaaatattggcttctagagtgtatgatgtagcaattgattcccccttgcaaaatgcagctaagctttccaagaagcttggagttaacttttggatcaaaagagaggatatgcagtccgtgttctcgttcaagcttagaggagcttataacatgatgaccaaactctcaaaggagcagttagaaagaggggttataactgcttcagctggaaatcatgcacaaggtgttgcattaggtgctcagagacttaaatgtactgctacgattgtcatgcctgttaccacaccagagatcaagattgaagcagttaagaacttggatggtaaagtagttctacatggtgacacatttgataaagctcaggaacatgctttaaagttggctgaagatgaaggtctcacattcatcccgcctttcgatcacccagatgtgatcataggccaaggtacaattggaacggagattaatcgtcaacttaaagatatacatgcagtatttgtgcctgtaggaggaggaggtttaatagctggtgttgctgcatatttcaaaagggttgctcctcatacaaagattattggagttgagccatttggtgcaagttcaatgacacaatctttgtaccatggagaaagagtaaagttggaacaagttgataattttgcagatggcgtagctgttgcactagttggtgaagaaactttccgtctttgcaaagatttaatagacggaatggtcttagtcagtaacgatgctattagtgctgcagtaaaggatgtgtacgacgaaggacggaacatattagagacatcaggtgcacttgccatagctggagctgaagcttactgcaaatactataacataaagggcgaaaacgttgtagcaattgctagtggagccaatatggacttcagcaaactaaaattagtcgtcgatttagcagatattggtggacagagggaagctctgctggctacttttatgccagaagaaccaggaagcttcaaaaaattctgcgaacttgtgggacctatgaatattactgaatttaagtacagatataattctggaagaaaacaagctctggtactctacagtgttggtgttaatacaaaatcggatcttgagtcaatgttggagaggatgaaatcatcacagctgaatactgtcaatctcacaaataataatttggtcaaagaacatctaaggcatttgatgggaggcagatcagaaccaagtaatgagattttctgtcaattcatatttcctgagaagcctggagctttaaggaagtttttagatgctttcagccctcgttggaatataagtttgttccattatcgtgaacagggagaacttgatgcaagtgtgttagttggattccaagttccaaaaggtgagatagaagagttccgagttcaagctaacaatcttggttattcatatgaaatcgagagtctcaacgaggcttctcaacttataatggagtgaacaagattgatgtattacttagtactagagtatttggctactactgatagagcaataaagttgcagttattgcaattcgaataatttatgaattaacttgttgtaagttaattttctctgtcagtggaagctagtagatttggtatgaataatgatcctttgtgtcttatctaatggtctttagttccattaagaaataagtttgtataaaaaaaaaaaaaaaaaaaaaa

SEQ ID NO: 12656 - protein, 601 aa, Nicotiana attenuata
MEVLCQAPAGNSNFACNPKFTAIRTRAISSNDTFKVISSTGNNKKMKGAIRTSIPKPSALPLKVSQLSPSADSMPVPASLQDVEAGKLIENNPSGGDTEELFQYLVEILASRVYDVAIDSPLQNAAKLSKKLGVNFWIKREDMQSVFSFKLRGAYNMMTKLSKEQLERGVITASAGNHAQGVALGAQRLKCTATIVMPVTTPEIKIEAVKNLDGKVVLHGDTFDKAQEHALKLAEDEGLTFIPPFDHPDVIIGQGTIGTEINRQLKDIHAVFVPVGGGGLIAGVAAYFKRVAPHTKIIGVEPFGASSMTQSLYHGERVKLEQVDNFADGVAVALVGEETFRLCKDLIDGMVLVSNDAISAAVKDVYDEGRNILETSGALAIAGAEAYCKYYNIKGENVVAIASGANMDFSKLKLVVDLADIGGQREALLATFMPEEPGSFKKFCELVGPMNITEFKYRYNSGRKQALVLYSVGVNTKSDLESMLERMKSSQLNTVNLTNNNLVKEHLRHLMGGRSEPSNEIFCQFIFPEKPGALRKFLDAFSPRWNISLFHYREQGELDASVLVGFQVPKGEIEEFRVQANNLGYSYEIESLNEASQLIME

SEQ ID NO: 12657 - DNA, 1263 bp, Bacillus cereus
  CDS (1)..(1263): transl_table=11
atggtgcaaaaggtaaaggagagagtgaaaattgaagatatcttaatggctcataattgcatgaaagatatcgttattaaaacaccgttacaacgtgatacagttttatctgagaaatatgattgtgacgtttatgtaaaacgagaagatttacaattgattcgctctttcaaaattcgtggtgcgtacaatttaattcaaagcttaccgaaagaacaattacaaaacggtgttgtttgcgcaagcgctggtaatcacgcacaaggggtagcttttacgtgtaatttattgaagattccgtcaaaaatctttatgccaacaacgacgccgaaacaaaaagtatcgcaagtacaatttttcggtggtgatttcgcagagattgtattagttggtgatacattcgatagctcttttcaagaagcacagcgttattgtgaagaaaatagaatgacgtttgttcatccatttgatgatccgtatgtggttgctggtcaaggaacagtggcagttgaaattatgcatgatatggagaaaccagtggattatatctttacagcaattggcggcggtggattagcatcaggtgttggtacatatgtgaaaggtgttagtcctgctacaaaggttattggggtagagccaatgggagcagcatctatgaaagaggcttttcttcaaaacgataatgtcgcattggagaaaatagatagttttgttgatggagcagcagttaaaaaggtaggaaagttaacatttgaaacgtgtaaagatgtaattgatgacatcgttttagtaccagaaggaaaggtttgtacgacgattttagaactgtataagaaaaatgcgattgtagcagagcctgctggtgcactttctattgccgcacttgatctatacaaggatgaaattcaaggtaaaacagttgtatgcacattaagcggtggaaataacgatattgatagaatgcaagagatgaaagaacgttctctcatttacgaaggattaaaacattatttcatcattgaattcccgcagcgttcaggtgcgctaagagaatttcttgataaaggattaggaccagaagatgatattacgcgctttgagtatattaagaaacataataaggaaaatggtccagcgttagtcggagtagagttaaaacataaagaagattacgcgcagttaattacccgttttaaagaaaataacattcaatttatggagcttaataaaaatcctgttttgtttgatttacttatttaa

SEQ ID NO: 12658 - protein, 420 aa, Bacillus cereus
MVQKVKERVKIEDILMAHNCMKDIVIKTPLQRDTVLSEKYDCDVYVKREDLQLIRSFKIRGAYNLIQSLPKEQLQNGVVCASAGNHAQGVAFTCNLLKIPSKIFMPTTTPKQKVSQVQFFGGDFAEIVLVGDTFDSSFQEAQRYCEENRMTFVHPFDDPYVVAGQGTVAVEIMHDMEKPVDYIFTAIGGGGLASGVGTYVKGVSPATKVIGVEPMGAASMKEAFLQNDNVALEKIDSFVDGAAVKKVGKLTFETCKDVIDDIVLVPEGKVCTTILELYKKNAIVAEPAGALSIAALDLYKDEIQGKTVVCTLSGGNNDIDRMQEMKERSLIYEGLKHYFIIEFPQRSGALREFLDKGLGPEDDITRFEYIKKHNKENGPALVGVELKHKEDYAQLITRFKENNIQFMELNKNPVLFDLLI

SEQ ID NO: 12659 - DNA, 1779 bp, Arabidopsis thaliana
  CDS (1)..(1779)
atgaattccgttcagcttccgacggcgcaatcctctctccgtagccacattcaccgtccatcaaaaccagtggtcggattcactcacttctcctcccgttctcggatcgcagtggcggttctgtcccgagatgaaacatctatgactccaccgcctccaaagcttcctttaccacgtcttaaggtctctccgaattcgttgcaataccctgccggttacctcggtgctgtaccagaacgtacgaacgaggctgagaacggaagcatcgcggaagctatggagtatttgacgaatatactgtccactaaggtttacgacatcgccattgagtcaccactccaattggctaagaagctatctaagagattaggtgttcgtatgtatcttaaaagagaagacttgcaacctgtattctcgtttaagcttcgtggagcttacaatatgatggtgaaacttccagcagatcaattggcaaaaggagttatctgctcttcagctggaaaccatgctcaaggagttgctttatctgctagtaaactcggctgcactgctgtgattgttatgcctgttacgactcctgagataaagtggcaagctgtagagaatttgggtgcaacggttgttcttttcggagattcgtatgatcaagcacaagcacatgctaagatacgagctgaagaagagggtctgacgtttatacctccttttgatcaccctgatgttattgctggacaagggactgttgggatggagatcactcgtcaggctaagggtccattgcatgctatatttgtgccagttggtggtggtggtttaatagctggtattgctgcttatgtgaagagggtttctcccgaggtgaagatcattggtgtagaaccagctgacgcaaatgcaatggctttgtcgctgcatcacggtgagagggtgatattggaccaggttgggggatttgcagatggtgtagcagttaaagaagttggtgaagagacttttcgtataagcagaaatctaatggatggtgttgttcttgtcactcgtgatgctatttgtgcatcaataaaggatatgtttgaggagaaacggaacatattggaaccagcaggggctcttgcactcgctggagctgaggcatactgtaaatattatggcctaaaggacgtgaatgtcgtagccataaccagtggcgctaacatgaactttgacaagctaaggattgtgacagaactcgccaatgtcggtaggcaacaggaagctgttcttgctactctcatgccggaaaaacctggaagctttaagcaattttgtgagctggttggaccaatgaacataagcgagttcaaatatagatgtagctcggaaaaggaggctgttgtactatacagtgtcggagttcacacagctggagagctcaaagcactacagaagagaatggaatcttctcaactcaaaactgtcaatctcactaccagtgacttagtgaaagatcacctgcgttacttgatgggaggaagatctactgttggagacgaggttctatgccgattcacctttcccgagagacctggtgctctaatgaacttcttggactctttcagtccacggtggaacatcacccttttccattaccgtggacagggtgagacgggcgcgaatgtgctggtcgggatccaagtccccgagcaagaaatggaggaatttaaaaaccgagctaaagctcttggatacgactacttcttagtaagtgatgacgactattttaagcttctgatgcactga

SEQ ID NO: 12660 - protein, 592 aa, Arabidopsis thaliana
MNSVQLPTAQSSLRSHIHRPSKPVVGFTHFSSRSRIAVAVLSRDETSMTPPPPKLPLPRLKVSPNSLQYPAGYLGAVPERTNEAENGSIAEAMEYLTNILSTKVYDIAIESPLQLAKKLSKRLGVRMYLKREDLQPVFSFKLRGAYNMMVKLPADQLAKGVICSSAGNHAQGVALSASKLGCTAVIVMPVTTPEIKWQAVENLGATVVLFGDSYDQAQAHAKIRAEEEGLTFIPPFDHPDVIAGQGTVGMEITRQAKGPLHAIFVPVGGGGLIAGIAAYVKRVSPEVKIIGVEPADANAMALSLHHGERVILDQVGGFADGVAVKEVGEETFRISRNLMDGVVLVTRDAICASIKDMFEEKRNILEPAGALALAGAEAYCKYYGLKDVNVVAITSGANMNFDKLRIVTELANVGRQQEAVLATLMPEKPGSFKQFCELVGPMNISEFKYRCSSEKEAVVLYSVGVHTAGELKALQKRMESSQLKTVNLTTSDLVKDHLRYLMGGRSTVGDEVLCRFTFPERPGALMNFLDSFSPRWNITLFHYRGQGETGANVLVGIQVPEQEMEEFKNRAKALGYDYFLVSDDDYFKLLMH

SEQ ID NO: 12661 - DNA, 1269 bp, Bacillus subtilis
  CDS (1)..(1269): transl_table=11
atgaaaccgttgcttaaagaaaactctctcatccaagtgaaacacattttgaaggctcaccaaaacgtaaaggacgttgtcattcacacacctttgcagaggaatgacagactttctgagagatatgaatgcaatatctatttaaaacgcgaagacttgcaagttgtcagatcttttaagctcagaggggcttatcataaaatgaaacagctttccagcgagcagacagagaacggagttgtgtgtgcaagtgccggaaaccacgctcaaggtgtggcattttcgtgtaaacatcttggcattcacgggaaaatttttatgccgtctactacaccgagacaaaaagtatctcaagttgaactattcggaaaaggatttatcgatattattttgacaggcgatacgtttgacgacgtgtataaaagcgctgctgaatgctgtgaggcggaatctcggacgtttatccatccgttcgatgatccggatgtgatggccggacagggaacgctcgcagtcgagattttaaacgacattgatacagaaccgcattttctttttgcaagtgtcggaggcggcggccttctctctggggtaggtacatatttgaaaaacgtgtctcctgatacaaaggtaattgctgttgagccggcgggagcggcatcctactttgaatcaaacaaagctgggcatgtcgtcacacttgataaaattgataagtttgtagatggggcggctgttaaaaaaattggcgaggaaaccttccggacgctggaaactgtcgttgatgacattctccttgtgcctgaaggaaaagtatgtacatccattcttgaattatataacgaatgtgcggttgttgctgaaccggctggagctctttctgtcgcagcgcttgatttgtacaaggatcaaattaaagggaaaaacgtggtgtgtgtggtaagcgggggcaataacgatatcggaagaatgcaggaaatgaaggagcgttccttgatttttgaaggccttcagcattattttatcgtcaattttccacaaagagcgggggcgctccgcgaatttcttgacgaagtcctcgggccgaatgatgacattacaaggtttgaatatacgaagaaaaataataaaagcaatggacctgctcttgtcggcatcgagctgcagaacaaagccgattatgggccgctgattgaacggatgaacaaaaaaccgtttcattatgtagaggtgaacaaggatgaggacttgttccatttgctaatctaa

SEQ ID NO: 12662 - protein, 422 aa, Bacillus subtilis
MKPLLKENSLIQVKHILKAHQNVKDVVIHTPLQRNDRLSERYECNIYLKREDLQVVRSFKLRGAYHKMKQLSSEQTENGVVCASAGNHAQGVAFSCKHLGIHGKIFMPSTTPRQKVSQVELFGKGFIDIILTGDTFDDVYKSAAECCEAESRTFIHPFDDPDVMAGQGTLAVEILNDIDTEPHFLFASVGGGGLLSGVGTYLKNVSPDTKVIAVEPAGAASYFESNKAGHVVTLDKIDKFVDGAAVKKIGEETFRTLETVVDDILLVPEGKVCTSILELYNECAVVAEPAGALSVAALDLYKDQIKGKNVVCVVSGGNNDIGRMQEMKERSLIFEGLQHYFIVNFPQRAGALREFLDEVLGPNDDITRFEYTKKNNKSNGPALVGIELQNKADYGPLIERMNKKPFHYVEVNKDEDLFHLLI

SEQ ID NO: 12663 - DNA, 1821 bp, Burkholderia cepacia
  CDS (49)..(1572): transl_table=11
ctatcattgaccctttaccgtccgcttccgcaccgcacgcgagcatccatggcctcccacgattacctgaagaaaatcctgaccgcgcgcgtctacgacgtcgcgttcgagaccgaactcgaaccggcccgcaacctgtccgcgcgactgcgcaaccccgtgtacctgaagcgcgaggacaaccagccggtgttctcgttcaagctgcgcggcgcatacaacaagatggcgcacattcccgccgatgcgctcgcgcgcggcgtgattaccgcatcggccggcaatcacgcgcagggcgtcgcgttctcggcggcccggatgggcgtgaaggccgtgatcgtcgtgcccgtcacgacgccgcaggtgaaggtcgacgcggtgcgcgcgcacggcggcccgggtgtcgaggtgattcaggccggcgaatcgtacagcgatgcgtacgcgcacgcgctcaaggtacaggaggagcgcggtctcacgttcgtgcacccgttcgacgatccgtacgtgatcgccggccagggcacgatcgcgatggagatcctgcgccagcaccagggcccgatccacgcgatcttcgtgccgatcggcggcggcgggctcgcggcgggcgtcgccgcgtacgtgaaggccgtgcgtccggagatcaaggtgatcggcgtgcaggccgaggattcgtgcgcgatggcgcagtcgctgcaggccggcaagcgcgtcgagctcgccgaggtcggcctgttcgcggacggcacagcggtgaagctcgtcggcgaggaaactttccggctctgcaaggaatatctcgacggcgtcgtgaccgtcgataccgacgcgctctgtgcggcgatcaaggacgtgttccaggacacgcgcagcgtgctcgagccgtcgggcgcgctcgcggtggccggcgcgaagctctatgcggaacgcgaaggcatcgagaaccagacgctcgtcgccgtcacgtcgggcgccaacatgaacttcgaccggatgcgcttcgtcgccgaacgcgcggaggtcggcgaggcgcgcgaggccgtgttcgccgtcacgattcccgaggagcgcggcagcttcaagcgcttctgctcgctcgtcggcgaccgcaacgtgaccgagttcaactaccggatcgccgatgcgcaatccgcgcacatcttcgtcggcgtgcagatccgtcgccgcggcgaatcggccgacatcgccgcgaacttcgagtcgcacggcttcaagacggccgacctcacgcacgacgagctgtcgaaggagcatatccgctacatggtcggcggccgctcgccgctcgcgctcgacgagcgcctgttccgcttcgaatttcccgaacggccgggcgcgctgatgaagttcctgtcgtcgatggcgccggactggaacatcagcctgttccactaccgcaaccagggcgcggactacagctcgatcctcgtcgggctgcaggtgccgcaggccgatcatgccgaattcgaacgcttcctcgcggcgctcggctatccgtatgtcgaagagagcgccaatccggcgtatcgcctcttcctgtcgtaaaggcactgccatgaatcccgaacattccccgctcggcaaggcgaccgtctacgcatcgcagtacgacgcgtcgctgctgttcccgatcccgcgcgcgggcgcgcgcgagcagatcggtattacgtccgcgctgccgttcttcggcaccgacatctggaacgcgtacgaactgtcgtggctgaacgcgcgcggcaagccgcaggtcgcggtcgcgacgttctacgtgccggccgaatcgccgaacatcgt

SEQ ID NO: 12664 - protein, 507 aa, Burkholderia cepacia
MASHDYLKKILTARVYDVAFETELEPARNLSARLRNPVYLKREDNQPVFSFKLRGAYNKMAHIPADALARGVITASAGNHAQGVAFSAARMGVKAVIVVPVTTPQVKVDAVRAHGGPGVEVIQAGESYSDAYAHALKVQEERGLTFVHPFDDPYVIAGQGTIAMEILRQHQGPIHAIFVPIGGGGLAAGVAAYVKAVRPEIKVIGVQAEDSCAMAQSLQAGKRVELAEVGLFADGTAVKLVGEETFRLCKEYLDGVVTVDTDALCAAIKDVFQDTRSVLEPSGALAVAGAKLYAEREGIENQTLVAVTSGANMNFDRMRFVAERAEVGEAREAVFAVTIPEERGSFKRFCSLVGDRNVTEFNYRIADAQSAHIFVGVQIRRRGESADIAANFESHGFKTADLTHDELSKEHIRYMVGGRSPLALDERLFRFEFPERPGALMKFLSSMAPDWNISLFHYRNQGADYSSILVGLQVPQADHAEFERFLAALGYPYVEESANPAYRLFLS

SEQ ID NO: 12665 - DNA, 1872 bp, Cicer arietinum
  CDS (19)..(1791)
gcagtacgaggggcatcaatgctctcgacctccacgaccaattcttccattctgcccttccggtctagggcaagtagttctacttttatcgcgcgccccccagccaacttcaactccatctttacgacttcggtgagggtcttcccaatcagtatgtcacgatattgcgtttttccacatacttgggagcgagatcataacgttcctggagttcctggagttttacgaaaagtggttccagcagcacctattaagaacaaaccaacttgtgcagattcagatgagttacctgagtacttaagagacgtactacgctcacctgtttacgacgtagttgtcgagtcacctgtcgagctaactgagagattatcagatcgcttaggtgttaacttttacgttaaaagagaggatcgccaacgcgttttttcatttaaattacgcggtccatacaatatgatgtcatcattatcacatgaggaaattgataaaggtgttatcaccgcatcagcaggaaaccatgcacaaggagtcccatttccatttccaggaagacgcctaaaatgtgtcgcaaaaattgtcatgccaactactactccaaacattaaacttgatggtgtccgcgcactaggagcagatgttgtattatggggtcatacttttgatgaggcaaaaacccatgctgtcgagttatgtgagaaggatggattaagaactattcctccatttgaggatccagcagtaattaaaggacaaggtactattggaagtgagattaacagacaaattaaacgcattgacgcagtttttgtacctgttggtggaggtggtttaattgctggcgttgcagcatttttcaaacaaattgctccacaaactaaaattattgtagttgagccatatgatgcagcatcaatggcattatcagttcatgcagagcacagagcaaaattatcaaatgtcgatacttttgcagacggtgcaactgtcgccgtaattggtgagtatacttttgcaagatgccaagacgttgttgatgcaatggttctagttgcaaacgatggaattggtgcagcaataaaggatgtttttgatgagggtcgaaacatagttgagacttcaggtgcagcgggcattgcaggaatgtattgtgagatgtacagaataaagaatgacaacatggtgggaattgtaagcggagctaacatgaacttcagaaaactccataaggtttcagaattagcagtgttgggttcaggacacgaggcattattgggtacttatatgccaggtcaaaaaggatgttttaaaactatggcaggtttagttcatggatcactctcatttactgagattacttacagatttacttcacatcgcagatcgatactggtactaatgcttaagctcgagccatggcggtatattgagaaaatgattgaaatgatgaaatatagtggtgttactgttttaaacatttcacataacgagttagcagttattcatggtaaacatttagtcggaggatcagcaaaagtctcagatgaggtctttgtagagtttataattccagagaaagcagatctaaaaaaatttctagaggtattatcacctcattggaaccttactttatacaggtaccgcaaccaaggagacttaaaagcaacgattttaatggtcatagctagtttcctgtgtgaaattgttatccgtaaaaaccaaattgatgatttaggatacccatatgaaattgatcaatacaacgacgcatttaacttagcggtaacagagtaaaattctcgctttagcggtacatgtcagctagcagtcagctagtacgagtacgatcagtacggtctgatttcgaaagtacga

SEQ ID NO: 12666 - protein, 590 aa, Cicer arietinum
MLSTSTTNSSILPFRSRASSSTFIARPPANFNSIFTTSVRVFPISMSRYCVFPHTWERDHNVPGVPGVLRKVVPAAPIKNKPTCADSDELPEYLRDVLRSPVYDVVVESPVELTERLSDRLGVNFYVKREDRQRVFSFKLRGPYNMMSSLSHEEIDKGVITASAGNHAQGVPFPFPGRRLKCVAKIVMPTTTPNIKLDGVRALGADVVLWGHTFDEAKTHAVELCEKDGLRTIPPFEDPAVIKGQGTIGSEINRQIKRIDAVFVPVGGGGLIAGVAAFFKQIAPQTKIIVVEPYDAASMALSVHAEHRAKLSNVDTFADGATVAVIGEYTFARCQDVVDAMVLVANDGIGAAIKDVFDEGRNIVETSGAAGIAGMYCEMYRIKNDNMVGIVSGANMNFRKLHKVSELAVLGSGHEALLGTYMPGQKGCFKTMAGLVHGSLSFTEITYRFTSHRRSILVLMLKLEPWRYIEKMIEMMKYSGVTVLNISHNELAVIHGKHLVGGSAKVSDEVFVEFIIPEKADLKKFLEVLSPHWNLTLYRYRNQGDLKATILMVIASFLCEIVIRKNQIDDLGYPYEIDQYNDAFNLAVTE

SEQ ID NO: 12667 - DNA, 1545 bp, Escherichia coli
  CDS (1)..(1545): transl_table=11
atggctgactcgcaacccctgtccggtgctccggaaggtgccgaatatttaagagcagtgctgcgcgcgccggtttacgaggcggcgcaggttacgccgctacaaaaaatggaaaaactgtcgtcgcgtcttgataacgtcattctggtgaagcgcgaagatcgccagccagtgcacagctttaagctgcgcggcgcatacgccatgatggcgggcctgacggaagaacagaaagcgcacggcgtgatcactgcttctgcgggtaaccacgcgcagggcgtcgcgttttcttctgcgcggttaggcgtgaaggccctgatcgttatgccaaccgccaccgccgacatcaaagtcgacgcggtgcgcggcttcggcggcgaagtgctgctccacggcgcgaactttgatgaagcgaaagccaaagcgatcgaactgtcacagcagcaggggttcacctgggtgccgccgttcgaccatccgatggtgattgccgggcaaggcacgctggcgctggaactgctccagcaggacgcccatctcgaccgcgtatttgtgccagtcggcggcggcggtctggctgctggcgtggcggtgctgatcaaacaactgatgccgcaaatcaaagtgatcgccgtagaagcggaagactccgcctgcctgaaagcagcgctggatgcgggtcatccggttgatctgccgcgcgtagggctatttgctgaaggcgtagcggtaaaacgcatcggtgacgaaaccttccgtttatgccaggagtatctcgacgacatcatcaccgtcgatagcgatgcgatctgtgcggcgatgaaggatttattcgaagatgtgcgcgcggtggcggaaccctctggcgcgctggcgctggcgggaatgaaaaaatatatcgccctgcacaacattcgcggcgaacggctggcgcatattctttccggtgccaacgtgaacttccacggcctgcgctacgtctcagaacgctgcgaactgggcgaacagcgtgaagcgttgttggcggtgaccattccggaagaaaaaggcagcttcctcaaattctgccaactgcttggcgggcgttcggtcaccgagttcaactaccgttttgccgatgccaaaaacgcctgcatctttgtcggtgtgcgcctgagccgcggcctcgaagagcgcaaagaaattttgcagatgctcaacgacggcggctacagcgtggttgatctctccgacgacgaaatggcgaagctacacgtgcgctatatggtcggcggacgtccatcgcatccgttgcaggaacgcctctacagcttcgaattcccggaatcaccgggcgcgctgctgcgcttcctcaacacgctgggtacgtactggaacatttctttgttccactatcgcagccatggcaccgactacgggcgcgtactggcggcgttcgaacttggcgaccatgaaccggatttcgaaacccggctgaatgagctgggctacgattgccacgacgaaaccaataacccggcgttcaggttctttttggcgggttag

SEQ ID NO: 12668 - protein, 514 aa, Escherichia coli [sequence omitted]

SEQ ID NO: 12669 - DNA, 1290 bp, Mycobacterium bovis
  CDS (1)..(1290): transl_table=11
gtgtccgccgaactgagccagagcccgagcagctcgccgctgttttcactatctggggcagacatcgaccgtgccgccaagcggatcgcaccggtagtcacgcccaccccgttgcaacctagcgatcggttgtcggcgatcactggcgccacggtctacctcaagcgcgaagacttgcagacggtgcgctcttataagctacgcggagcgtacaacctgttggtgcagttgtccgatgaggaactggccgcgggcgtggtgtgttcttctgcgggcaaccacgcgcagggcttcgcgtatgcgtgtcgctgtctgggtgtgcacggccgggtctacgtacctgccaaaacccccaagcagaagcgtgaccggatccgctaccacggcggggagttcatcgacctgatcgtgggtgggtcgacctatgatctggctgcggcggcggcccttgaggacgtggaacgcaccggggccacgctggtaccgccgtttgacgacctgcgcaccatcgccggccagggcacgatagccgtcgaagtgcttggccagctcgaggacgagccggacctggtggtggtcccggtgggtggcggcggctgcatcgcggggatcaccacctacctggccgagcggacgaccaacaccgcggtgctgggcgtcgagccggctggtgcggccgccatgatggccgcgctcgcggcgggcgagccggtgacgctggaccatgtcgaccagttcgtcgacggcgccgcggtgaaccgggcgggcacgctgacctatgccgcgctagccgccgccggcgacatggtttcgctcaccaccgtcgacgagggtgcggtgtgcacggcgatgctcgatctgtatcagaacgagggcatcatcgccgaaccggccggtgccctgtcggtcgccggtctgttggaagccgacatcgagcccgggtccaccgtggtgtgcctgatttcgggcggcaacaacgacgtgtcccgttacggggaggtgttggagcgctcgctggtccacctgggcctcaagcactatttcctggtcgacttcccgcaggagcccggtgcgctgcgccggtttctcgacgacgtgctcggacccaacgacgacatcaccttgttcgagtacgtcaagcgcaacaaccgggagaccggtgaggcgctggtgggtatcgagctgggatcggccgcggatctagacggtctgctggcccggatgcgggcgaccgacattcacgtcgaggcgttggaaccggggtcgccggcttaccgctatctgctgtag

SEQ ID NO: 12670 - protein, 429 aa, Mycobacterium bovis
MSAELSQSPSSSPLFSLSGADIDRAAKRIAPVVTPTPLQPSDRLSAITGATVYLKREDLQTVRSYKLRGAYNLLVQLSDEELAAGVVCSSAGNHAQGFAYACRCLGVHGRVYVPAKTPKQKRDRIRYHGGEFIDLIVGGSTYDLAAAAALEDVERTGATLVPPFDDLRTIAGQGTIAVEVLGQLEDEPDLVVVPVGGGGCIAGITTYLAERTTNTAVLGVEPAGAAAMMAALAAGEPVTLDHVDQFVDGAAVNRAGTLTYAALAAAGDMVSLTTVDEGAVCTAMLDLYQNEGIIAEPAGALSVAGLLEADIEPGSTVVCLISGGNNDVSRYGEVLERSLVHLGLKHYFLVDFPQEPGALRRFLDDVLGPNDDITLFEYVKRNNRETGEALVGIELGSAADLDGLLARMRATDIHVEALEPGSPAYRYLL

SEQ ID NO: 12671 - DNA, 1284 bp, Mycobacterium leprae
  CDS (1)..(1284): transl_table=11
atgtccgccgaacctagtagaaaccccaggaccccaccggtgtccgcggttgacattgacggtgcggcgaagcggatcgcgccggtggtcacgcctaccccgttgcaacttagcgatcggttgtcggcgatcactggtgcagcggtgtacctcaagcgtgaagacctgcagacggtgcgctcttacaaactgcgcggcgcctacaacctgttggtgcagctgaccgacgaggagatcgccgccggcgttgtgtgctcttcggcgggtaaccatgcacagggtgtcgcgtatgcatgtcggtcactgggtgtgcacggccgtgtctatgtacctgccaagacacccaaacaaaagtgggatcggatccgctaccatggcggggcattcatcgagctgatcgtcgggagatcgacctacgatctcgccgctgccgcggcggtcgacgacattgaacgcaccggcgcgacgttggtacctccttatgacgacgtccgcgtcatcgctggtcagggcaccattgccgtcgagttgctggagcaactcaacaccgagcctgacctagtggtggtcccggtgggcggcggtggctgcatcgccggcatgaccacttacttggccgaacgaacggcgaacactgctgtgcttggtgtcgagccggctggtgccgcggctatgatggccgcgctggccgcgggtgagccggtgacactggactacgtcgatcagttcgtggatggcgctgcggtgaaccgggtgggaacgttgccttatgccgcgttgactgccgcaggtgacatggtgtccatcaccaccgtcgacgagggggcggtgtgcactgcgatgctcgacctttaccagaacgagggcattatagctgagccggcgggcgcactgtcagtagctgggctgctggaaactgacattgaacccgggtccaccgtggtttgcctgatctcgggcggcaacaacgacgtattgcgctacggtgaggtgttggagcgttcgctgatccacctaggtctcaaacactatttcctggtagacttcccccagaagcctggtgccttgcgccgttttcttgacgaagtgcttggacccaacgacgacatcaccttgttcgagtacgtcaagcgcaacaaccgagagaccggcgaggcgctggtaggtatccagctggggtctgctgtcgacttagacgtcctgctggcccggatgcaggggaccgaaatgcacgtcgaaaccctacaaccaggttcgccggcctaccgctacctgttgctttag

SEQ ID NO: 12672 - protein, 427 aa, Mycobacterium leprae
MSAEPSRNPRTPPVSAVDIDGAAKRIAPVVTPTPLQLSDRLSAITGAAVYLKREDLQTVRSYKLRGAYNLLVQLTDEEIAAGVVCSSAGNHAQGVAYACRSLGVHGRVYVPAKTPKQKWDRIRYHGGAFIELIVGRSTYDLAAAAAVDDIERTGATLVPPYDDVRVIAGQGTIAVELLEQLNTEPDLVVVPVGGGGCIAGMTTYLAERTANTAVLGVEPAGAAAMMAALAAGEPVTLDYVDQFVDGAAVNRVGTLPYAALTAAGDMVSITTVDEGAVCTAMLDLYQNEGIIAEPAGALSVAGLLETDIEPGSTVVCLISGGNNDVLRYGEVLERSLIHLGLKHYFLVDFPQKPGALRRFLDEVLGPNDDITLFEYVKRNNRETGEALVGIQLGSAVDLDVLLARMQGTEMHVETLQPGSPAYRYLLL

SEQ ID NO: 12673 - DNA, 1542 bp, Pasteurella multocida
  CDS (1)..(1542): transl_table=11
atggtcaataacctccattcagctcacccaacaggtgcagaatacctcaaagccgtgttgagttctaaagtctatgacgtggcgcaagtgactccgcttcaagacatggcaaaactgtctgaacgtttaggtaataaagtgtttatcaaacgtgaagatcgccaacccgtacacagtttcaaactgcgtggtgcgtatgccatgattgctggcttaagtgccgaacaaaaagcctcgggcgtgattgccgcctcagcgggaaaccatgcacaaggcgtggcgctgtctgccaaacatcttggcttgcgtgccttaatcgtgatgccacaaaacaccccaagtatcaaagtcgatgccgtgcgtggatttggtggtgaagtgctattacatggcgccaatttcgatgaagccaaagccaaagcgattgaattggcggaaagcaaaaatatgacattcattccgccttttgatcaccccgcggtgattgcaggacaaggctcgattgccatggaattgttacaacaaaacagccaaattgatcgtatttttgtccctgttggtggcggtggcttagccgcaggcattgctgtattaattaaacaattaatgcccgaaatcaaagtaattggggttgagtcgaaagattccgcctgcttgtatcgtgctctcaaagcaggtaagcccattgatttagatcgcgttggcttatttgctgacggggtcgcagtgaaacgtattggcgatgagactttccgcgtttgtcagcaatatattgatgatgtagtgttagtagatggtgatgaaatctgcgctgcggtcaaagatatttttgagaatgtgcgcgctattgctgaaccgtcgggggcattatcgcttgctggtttaaaaaaatacgtgaaagagcacaatattcaaggtgaaaccttggtgaatgtattatctggtgccaatttaaatttccataccttacgttatgtgtcagagcgttgtgaaattggtgaacagcacgaagcccttttagccgtgaccattcctgaacaaccagggagtttcttaaaattctgccatattttaggtcatgtccctgttactgaatttaaataccgttatgccgacgacaaacaagcttgtattttcgtgggggtacgcattacagggcaagaagaaaaacaaacgatcatcaatcaattacaacaaaatggttatgatttaattgatttgtctaatgatgatatcgccaaaacgcatgtacgctatatgattggcggacgttcaaacagtcccttaaaagagcgtttatacagttttgaattcccagaacaaaaaggcgccttattaaaattcctcgaaactttggggcaaacacattggaatatttccgtgttccattatcgtgcgcacggggcagattacggtaacgtgcttgctggcttccaattaaatgatgaagatctcgacgcctttaatcagcatttggaaaaactgggttatgtctatcaagatgtcacagaaagccctgcttatcgttatttcttagtgtaa

SEQ ID NO: 12674 - protein, 513 aa, Pasteurella multocida
MVNNLHSAHPTGAEYLKAVLSSKVYDVAQVTPLQDMAKLSERLGNKVFIKREDRQPVHSFKLRGAYAMIAGLSAEQKASGVIAASAGNHAQGVALSAKHLGLRALIVMPQNTPSIKVDAVRGFGGEVLLHGANFDEAKAKAIELAESKNMTFIPPFDHPAVIAGQGSIAMELLQQNSQIDRIFVPVGGGGLAAGIAVLIKQLMPEIKVIGVESKDSACLYRALKAGKPIDLDRVGLFADGVAVKRIGDETFRVCQQYIDDVVLVDGDEICAAVKDIFENVRAIAEPSGALSLAGLKKYVKEHNIQGETLVNVLSGANLNFHTLRYVSERCEIGEQHEALLAVTIPEQPGSFLKFCHILGHVPVTEFKYRYADDKQACIFVGVRITGQEEKQTIINQLQQNGYDLIDLSNDDIAKTHVRYMIGGRSNSPLKERLYSFEFPEQKGALLKFLETLGQTHWNISVFHYRAHGADYGNVLAGFQLNDEDLDAFNQHLEKLGYVYQDVTESPAYRYFLV

SEQ ID NO: 12675 - DNA, 1545 bp, Salmonella typhimurium
  CDS (1)..(1545): transl_table=11
atggcggaatctcaacctctgtcagtcgcgccggaaggggcggagtatctgcgcgcggtgctacgcgcgccagtatacgaagcggcgcaggtgacaccgctgcaaaaaatggaaaagctctcgtcacgtctggacaacgttattctcgtcaaacgcgaagaccggcagccggtacatagctttaagctgcgcggcgcttacgcgatgatggccggattgaccgaagaacaaaaagcccacggcgtgattaccgcgtcggcggggaaccatgcacagggcgtggcgttttcctccgcgcggcttggcgtgaagtcgctgatcgtcatgccaaaagcaacggcggatattaaagtcgatgcggtacgcggttttggcggcgaagtgctgttgcacggcgctaattttgatgaagcgaaagcgaaagctattgaactggcgcagcagcagggttttacttgggtgccgccgtttgatcacccaatggtgatcgccgggcagggcacgctggcgctggaactgcttcagcaggattcgcatctcgatcgtgtctttgtgccggttggcggcggcggcctggcggcgggcgtagcggtactgatcaaacaattgatgccgcaaatcaaagtgattgccgtcgaagcggaggattccgcctgcctgaaagcggcgttggaagccggtcatccagtggatctcccgcgcgttgggttgtttgctgaaggcgtagcggtaaaacgcatcggcgacgaaaccttccgcctgtgccaggaatatctcgacgacattattacagtcgatagcgacgctatctgcgcggcgatgaaagatctgtttgaagatgtgcgtgcggtggcggagccgtccggcgcgctggcgctggcggggatgaagaaatatatcgcccagcacaatattcgcggcgaacgcctggcgcacgtcctttccggcgccaacgtcaacttccacggcttgcgctatgtgtctgaacgctgcgagctgggggaacagcgcgaagcgttactggcggtgaccattccggaagaaaaggggagctttctcaaattctgccagttgcttggcgggcgtatggtcaccgaatttaactaccgttttgccgacgcgaaaaatgcctgtatttttgtcggcgtacgcgtcagtcaggggctggaggagcgaaaagagattatcacccaactgtgcgacggcggttatagcgtagtggatctctccgacgatgaaatggcgaagctgcatgtgcgctatatggtcggcggacgcccctccaagccattacaggagcgtttgtatagtttcgaatttccggagtcgcccggcgcgttgctcaaattcctgcatacgcttggcacgcactggaatatttcgctattccattaccgtagccacggtaccgattatggccgcgtgctggcggcgttcgagttaggcgatcatgagccggatttcgaaacccggctgcatgagctgggctatgaatgccatgatgagagcaataacccggcgttccggttctttctggcgggttaa

SEQ ID NO: 12676 - protein, 514 aa, Salmonella typhimurium
MAESQPLSVAPEGAEYLRAVLRAPVYEAAQVTPLQKMEKLSSRLDNVILVKREDRQPVHSFKLRGAYAMMAGLTEEQKAHGVITASAGNHAQGVAFSSARLGVKSLIVMPKATADIKVDAVRGFGGEVLLHGANFDEAKAKAIELAQQQGFTWVPPFDHPMVIAGQGTLALELLQQDSHLDRVFVPVGGGGLAAGVAVLIKQLMPQIKVIAVEAEDSACLKAALEAGHPVDLPRVGLFAEGVAVKRIGDETFRLCQEYLDDIITVDSDAICAAMKDLFEDVRAVAEPSGALALAGMKKYIAQHNIRGERLAHVLSGANVNFHGLRYVSERCELGEQREALLAVTIPEEKGSFLKFCQLLGGRMVTEFNYRFADAKNACIFVGVRVSQGLEERKEIITQLCDGGYSVVDLSDDEMAKLHVRYMVGGRPSKPLQERLYSFEFPESPGALLKFLHTLGTHWNISLFHYRSHGTDYGRVLAAFELGDHEPDFETRLHELGYECHDESNNPAFRFFLAG

SEQ ID NO: 12677 - DNA, 2746 bp, Arxula adeninivorans
  CDS (908)..(2560)
aagctttaatcggtagtttatcacagttaaattgctaacgcagtcaggcaccgtgtatgaaatctaacaatgcgctcatcgtcatcctcggcaccgtcaccctggatgctgtaggcataggcttggttatgccggtactgccgggcctcttgcgggatatcgtccattccgacagcatcgccagtcactatggcgtgctgctagcgctatatgcgttgatgcaatttctatgcgcacccgttctcggagcactgtccgaccgctttggccgccgcccagtcctgctcgcttcgctacttggagccactatcgactacgcgatcatggcgaccacacccgtcctgtggatccaccattcatcaattgtcatgcccacacttttgccatagtttggatactcgttgagtaccgccttgaaagcggccttgaaattggtctcaatttgcggtgcttcggcatgaacgccatgccggctcatgtactttacatattgctgtgaaactgaccccttgggcgtgagcagcgtcccgtacgcatcaaaggttatcagtctaggccttggaaaccttttcaacggcattggatgttaacaagggaggatcaggatttagacttggaggtccggtttcggggctggtcacgtgatactgggccggagttggaccataaagacagtcgtgatcctcgcacccagtggaagcacaagagggttaaatgtaactaaatagtcaaacagtacacgctgttgttcaattggccctatgaaaaacccctacttctggtattttgaccgtgatagattgaaattctcgtgcatgaccactccggagcgataacgagccgtgtcttgagaagagtcataaccattaccttgtggtgaatcagaccagctttggacgacaataccatgtctaatatatcgactccgcgcatctcggggctgactgaatatacttctcagcctgataaatcccattacgactctatcgaatcccatttcttgcttcctgatggaaccccagactatttaaagctcattctcacttcaaaagtgtacgatgtttgcaacgagacccccgtaactcctgcggtcaatttgtcgtcaaagctgggcgccaacatctttctcaaaagagaggatctccagccggtattttcgttcaagcttcgaggagcttacaacatgatggctcatttgcctcaggagactcgatggaagggtgtcattgcatgctctgctggtaaccatgctcagggagtagcatactcggccaaacatctcaacattcctgccacaattgtcatgcccgtggtgacccctgctatcaagtacaagaacgtggaccgactgggagcaaaggtagtgctccatggtaacgattttgatgccgcaaaggccgagtgcaatcgattgtcggaaaagcacggattgactaatattcctctttttgacaacccctatgtgattgcgggacagggcacaattggagtggagcttctgcgccagattgacgtggaatcgctcaaggctatttttgtgtgcattggtggaggaggacttattgctggagtgggggcctacattaagcgtattgctcctcaggtaaaaatcattggtgtggaaacttatgacgccaatgccatgcgccagtcgctgcagaagggtgaacgaatcactctgtcagaggtaggattgtttgccgacggtgctgcagttaaaattcttggagaggagactttccggttgtgccaacaagtggtagatgaaattgtattggtgtctactgacgagatttgtgctgctattaaggatgtgtttactgagactcgatccatcgtcgagcccgctggtgcgctgtcggtggcaggactcgtcaagtacgttgaatctcaccctgaaattgatcactctgcctccggatacactgccatcttgtcaggagcgaatatggattttgaccgactgcgatttgtttctgaacgagcaaagctcggagagggatccgaggtgttcattgtagccaccatccccgagaagcctggttcgtttggaaagctcattgatctggtccaccctcgagccgttactgagtttagctacagatactccaatggagaactagaaaagagcgacggaaaggcccatgtgtacatttcattttcagttgataatgctaaagctgaagtgccccgcatcctcgatgatttcaagggagctgggttcgatgctattgatatctcccacaatgagtttccaaaaagtcacccaagatacttggtaggagcaaaccagccagttaccaatgagagagtgttccgatttgagttccccgaaagaccaggagctttggtgaaattccttcacggagtcaaatccaagtggaacattactctgttccactaccgaaaccagggatcggacattgcaaaggtcttggctggtatctctgtaccttctcacgagagcgatcaattccagcaattcttggacaatcttgagtacccatatgccgaggagactgacaatgtggtgtacaagcttttttcgcagggagactagcatgtatataggaattgatgatgatgccaatgtgccaattaaatcactagttagtagttcagagggattaggttgacaaggcaaatggaacgtataggtatagggatttagatatgggatattagaaggcatacagatatggatcatcaattgacctagtataacttgtcagtgcgaaccctccaa

SEQ ID NO: 12678 - protein, 550 aa, Arxula adeninivorans
MSNISTPRISGLTEYTSQPDKSHYDSIESHFLLPDGTPDYLKLILTSKVYDVCNETPVTPAVNLSSKLGANIFLKREDLQPVFSFKLRGAYNMMAHLPQETRWKGVIACSAGNHAQGVAYSAKHLNIPATIVMPVVTPAIKYKNVDRLGAKVVLHGNDFDAAKAECNRLSEKHGLTNIPLFDNPYVIAGQGTIGVELLRQIDVESLKAIFVCIGGGGLIAGVGAYIKRIAPQVKIIGVETYDANAMRQSLQKGERITLSEVGLFADGAAVKILGEETFRLCQQVVDEIVLVSTDEICAAIKDVFTETRSIVEPAGALSVAGLVKYVESHPEIDHSASGYTAILSGANMDFDRLRFVSERAKLGEGSEVFIVATIPEKPGSFGKLIDLVHPRAVTEFSYRYSNGELEKSDGKAHVYISFSVDNAKAEVPRILDDFKGAGFDAIDISHNEFPKSHPRYLVGANQPVTNERVFRFEFPERPGALVKFLHGVKSKWNITLFHYRNQGSDIAKVLAGISVPSHESDQFQQFLDNLEYPYAEETDNVVYKLFSQGD

SEQ ID NO: 12679 - DNA, 1731 bp, Saccharomyces cerevisiae
  CDS (1)..(1731)
atgtcagctactctactaaagcaaccattatgtacggttgttcggcaaggtaaacagtccaaagtgtctggattgaaccttttgagactaaaggctcatttgcacagacaacacctgtcaccttccttgataaaactacactctgaattgaaattggatgagctgcaaactgataacacccctgattacgtccgtttagttttaaggtcctctgtatacgatgttattaatgaatctccaatctctcaaggtgtaggtttgtcttcccgtctaaacacgaatgtcatcttgaaaagagaagatctattgcctgttttctctttcaagcttcgtggtgcctataacatgattgccaagttggacgattctcaaagaaaccagggtgttattgcctgttcagctgggaatcatgcccaaggtgtggcctttgctgctaaacacttgaaaatacctgctactatcgttatgcctgtttgtacaccatctattaagtatcaaaatgtctcgagattagggtctcaagtcgtcctatatggtaacgattttgacgaggctaaggctgaatgtgccaaattggctgaagagcgtggcttgacgaacattcctcctttcgatcatccttatgtcattgccggtcaaggtactgtagctatggaaatcctaagacaagtacgtaccgctaataagatcggtgctgtctttgttcccgtcggcggtggtggtttaattgctggtattggtgcttatttgaaaagggttgctcctcatatcaaaatcattggtgttgaaacttacgatgcggccactttacataattccttgcaacgcaaccagagaactcctttacctgtggtgggtacttttgccgatggtacgtctgtgcgtatgattggtgaagaaacatttagagtcgcccaacaagtggttgatgaagttgttcttgttaacactgacgaaatctgtgctgcagtaaaggatatttttgaagatactagaagtattgtagaaccatctggtgccctttcagtagccggtatgaagaaatacatctctaccgtacatccagaaattgaccacactaaaaacacctatgttcccatcctttctggtgctaacatgaactttgatagattaagatttgtttccgaacgtgctgttcttggtgaaggaaaggaagtcttcatgttagttactttacccgacgtccctggtgcgttcaagaaaatgcaaaagatcatccacccaagatctgtcactgaattctcttaccgttacaatgaacatcgtcatgagtcctctagtgaagtgcccaaggcttacatttacacttctttcagcgtcgttgacagagaaaaggaaatcaagcaagttatgcaacagttgaatgctttaggttttgaagctgtggatatctccgataacgaattggctaaatctcatggtagatacttggttggtggtgcttctaaggttcctaatgaaagaattatttcatttgaattccctgaaagaccaggtgccttgactaggttccttggaggcctaagcgattcttggaatcttactttattccattatagaaaccatggtgccgatatcggtaaggttttagctggtatttccgttcctccaagggaaaacttaaccttccaaaaattcttggaagatttaggctacacttatcatgatgaaactgataacactgtttatcaaaaattcttgaaatattaa

SEQ ID NO: 12680 - protein, 576 aa, Saccharomyces cerevisiae
MSATLLKQPLCTVVRQGKQSKVSGLNLLRLKAHLHRQHLSPSLIKLHSELKLDELQTDNTPDYVRLVLRSSVYDVINESPISQGVGLSSRLNTNVILKREDLLPVFSFKLRGAYNMIAKLDDSQRNQGVIACSAGNHAQGVAFAAKHLKIPATIVMPVCTPSIKYQNVSRLGSQVVLYGNDFDEAKAECAKLAEERGLTNIPPFDHPYVIAGQGTVAMEILRQVRTANKIGAVFVPVGGGGLIAGIGAYLKRVAPHIKIIGVETYDAATLHNSLQRNQRTPLPVVGTFADGTSVRMIGEETFRVAQQVVDEVVLVNTDEICAAVKDIFEDTRSIVEPSGALSVAGMKKYISTVHPEIDHTKNTYVPILSGANMNFDRLRFVSERAVLGEGKEVFMLVTLPDVPGAFKKMQKIIHPRSVTEFSYRYNEHRHESSSEVPKAYIYTSFSVVDREKEIKQVMQQLNALGFEAVDISDNELAKSHGRYLVGGASKVPNERIISFEFPERPGALTRFLGGLSDSWNLTLFHYRNHGADIGKVLAGISVPPRENLTFQKFLEDLGYTYHDETDNTVYQKFLKY

SEQ ID NO: 12681 - DNA, 1824 bp, Brassica napus
  CDS (1)..(1824)
atggattccgtcaggcttccaacggctccttcctctctccgtagccaaatgctaggtcaaccccttcaccgcattcccctacctccctgtaacggccgcagcaacctccggtttaaaccggttattggaaccaatctatctcgagaaaaccacgtctctccggttgccgttatcacccgagacgaaacatcagtggctcctctcgcttctcctcagccacgtctcaaggtctctccgagctcgctccagtaccccgccggttacctcggcgcggttccggagcgtgcgagcgatcccgagaacggaagcatcgcggaggcgatggagtatctgacgaacatactctccacgaaggtttacgacgtcgcgattgagacgccactccacttggccaagaagctatcggagaggctaggtgttcgcatgtttctcaagagagaagacttgcaacctgtgttctcgtttaagattcgtggagcttacaacatgatggtgaagcttccagctgagcagttagcgaaaggagtcatctgctcctcagctggaaaccatgctcaaggagttgctatgtctgccgccaaactcggctgcaccgccgtgattgttatgcctcgcacaaccccagagatcaagtggcaatctggggagaattggggtgcgacggttgttcttgttggggatacgtatgatgaagcacaagcatttgctaagcaacgagctgaagaagaaggtttgacgtttatacctccttttgatcacccggatgttattgccggacaagggactgttgggatggagatcacaaggcaagctaaaggtccattacatgctatatttgtccccatcggtggtggtggtttgatagctggtattgctgcttatgtgaagagagtttctcccgaggtgaagatcattggtgtagaaccagctgatgcaaatacaatggcgttgtcgctgcatcacggcgagagagtgatactaaaccagattggtggttttgcagatggtgtagcagttaaagaagttggggaagagacttttcgtatatgcagaaagctgatggatggtgttgttcttgtcactcgtgatgctatgtgcgcatcaataaaggatatgtttgaggagaaacggaacatattagaaccagcaggtgctcttgcgatcgctggagctgaagcgtactgtaaatattatggcctaaaggacgtgaacgttgtggccataaccagtggtgcaaacatgaactttgacaagctcaggattgtgacagaactcgccaatgtcggtaggcaacaggaggctgttcttgctactatcttgccggaaaagcctggaagctttaagcaattctgtgaattgattggaccaatgaacataaccgagttcaagtatagatgtggctcgaaaaaggaagctgttgtactatacagtgttggaatgcacacacccggagagctcaaagcactagagaagagaatggaatcttctcaactcaaaactacgaacctcacaaccagtgacttagtaaaagatcacctgcgttacttgatgggtggaagatcaagtgttgaaaaagaggttctatgccgattcacattcccggagagaccaggtgctctaatgaacttcttggactctttcagtccacggtggaacattagccttttccattaccgtgcagagggtgcagcaggggccaacgtgctggtcgggatccaagtcccagacaaagaaatggaggaatttcgaaaccgagctcaagttcttggatacgagtacgtcttggtaagtgaagacaccaacttcaaccttctgatgcactga

SEQ ID NO: 12682 - protein, 607 aa, Brassica napus
MDSVRLPTAPSSLRSQMLGQPLHRIPLPPCNGRSNLRFKPVIGTNLSRENHVSPVAVITRDETSVAPLASPQPRLKVSPSSLQYPAGYLGAVPERASDPENGSIAEAMEYLTNILSTKVYDVAIETPLHLAKKLSERLGVRMFLKREDLQPVFSFKIRGAYNMMVKLPAEQLAKGVICSSAGNHAQGVAMSAAKLGCTAVIVMPRTTPEIKWQSGENWGATVVLVGDTYDEAQAFAKQRAEEEGLTFIPPFDHPDVIAGQGTVGMEITRQAKGPLHAIFVPIGGGGLIAGIAAYVKRVSPEVKIIGVEPADANTMALSLHHGERVILNQIGGFADGVAVKEVGEETFRICRKLMDGVVLVTRDAMCASIKDMFEEKRNILEPAGALAIAGAEAYCKYYGLKDVNVVAITSGANMNFDKLRIVTELANVGRQQEAVLATILPEKPGSFKQFCELIGPMNITEFKYRCGSKKEAVVLYSVGMHTPGELKALEKRMESSQLKTTNLTTSDLVKDHLRYLMGGRSSVEKEVLCRFTFPERPGALMNFLDSFSPRWNISLFHYRAEGAAGANVLVGIQVPDKEMEEFRNRAQVLGYEYVLVSEDTNFNLLMH

SEQ ID NO: 12683 - DNA, 1812 bp, Zea mays
  CDS (1)..(1812)
atggcggccgccgccaccaccgcttcgccctcggcctccttccctgcagcatccctccgtcgcgacgcgcgcaggacctcatgcgtagccgccgccgccgcggcgacgacggccgctgaggcggggctcgcggccgtcccggcgccgccgccaacgccgatggttcgggtggtgccggagtcactgcagcgggaaagcgggtgcctcgtggagggatttagggcgcgcggtgcgtgcgcggcggatggggaggggtttggggacgccgcgggggaaggaggaggccccggcgcgatggagtacctcaccagcgtgctgtcgtccaaggtgtacgacgtggcaatcgagtcaccgctgcagctcgccaccaagctctcccaccgcctcggggtcaacctctggatcaagcgcgaggacctgcagccggtattctcattcaagttgcggggagcatacaacatgatggcaaagctctcccgtgagcagttagagaggggcgtcatctgctcctctgctggaaaccatgcccagggcgttgctctttccgctcagagactgggatgtgatgctgtcatcgtcatgcccgtgacaacaccagaaatcaagtggaaatcagtggagaggttgggtgcaacagtggtccttgagggggactcatatgatgaagctcagtcatatgcaaaattgcgttgccagcaggaaggccgcacatttgtacctccttttgaccatcctgatgtcatcactggacaaggaactatcggcatggaaattgttaggcagctgcaaggtccactgcatgcaatatttgtacctgttggaggtggtggattaattgctggaattgctgcctatgtaaaacgggttcgcccagaggtgaaaataattggagtggaaccctcagatgcaaatgcaatggcattatccttgtgtcatggtaagagggtcatgttggagcatgttggtgggtttgctgatggtgtagctgtcaaagctgttggggaagaaacatttcgcctgtgcagagagctagtagatggcattgttatggtcagtcgagatgctatttgtgcttcaataaaggatatgtttgaggagaaaagaagtatccttgaacctgctggtgcccttgcattggctggggctgaagcctactgcaaatactataacttgaaaggagaaactgtggttgcaataactagtggggcaaatatgaactttgatcgacttagaatagtaaccgagctagctgatgttggccgaaaacgggaagcagtgttagctacatttctgccagagcagcagggaagcttcaaaaaattcacagaattggttggcaggatgaatattactgaattcaaatacagatatgattctaatgcaaaagatgcccttgttctttacagtgttggcatctacactgacaatgagcttggagcaatgatggatcgcatggaatctgcgaaactgaggactgttaaccttactgacaatgatttggcaaaggaccaccttagatactttattggaggaagatcagaaataaaagatgaactggtttaccggttcattttcccggaaaggcctggggcccttatgaaatttttggacgcgtttagtcctcgttggaacatcagccttttccattaccgtgcacagggtgaagctggagcaaatgtattagttggtgtacctcggccgcgaccacgctatgatgaattcaagagtcatgccaacaatcttgggtacgagtacatgtcagagcacaacaatgagatataccggttgctgttgcgtgacccaaaggtttaa

SEQ ID NO: 12684 - protein, 603 aa, Zea mays
MAAAATTASPSASFPAASLRRDARRTSCVAAAAAATTAAEAGLAAVPAPPPTPMVRVVPESLQRESGCLVEGFRARGACAADGEGFGDAAGEGGGPGAMEYLTSVLSSKVYDVAIESPLQLATKLSHRLGVNLWIKREDLQPVFSFKLRGAYNMMAKLSREQLERGVICSSAGNHAQGVALSAQRLGCDAVIVMPVTTPEIKWKSVERLGATVVLEGDSYDEAQSYAKLRCQQEGRTFVPPFDHPDVITGQGTIGMEIVRQLQGPLHAIFVPVGGGGLIAGIAAYVKRVRPEVKIIGVEPSDANAMALSLCHGKRVMLEHVGGFADGVAVKAVGEETFRLCRELVDGIVMVSRDAICASIKDMFEEKRSILEPAGALALAGAEAYCKYYNLKGETVVAITSGANMNFDRLRIVTELADVGRKREAVLATFLPEQQGSFKKFTELVGRMNITEFKYRYDSNAKDALVLYSVGIYTDNELGAMMDRMESAKLRTVNLTDNDLAKDHLRYFIGGRSEIKDELVYRFIFPERPGALMKFLDAFSPRWNISLFHYRAQGEAGANVLVGVPRPRPRYDEFKSHANNLGYEYMSEHNNEIYRLLLRDPKV

SEQ ID NO: 12685 - DNA, 1809 bp, Glycine max
  CDS (1)..(1809)
atggatgcgctgcgcgtcgcccccaccaccccgcctctcctccgccgccaccctctccgcaaaatggcgccccatcccctcaccgcgcgtccccgccgcgcgcccctcatcgtcgccacgctttccatgccgccggaggccactcactcctccgccgtcgccatcgtcgaagatccctcggaggcggctcctcctccgcgcccccgcgtctcgccggattccctccagtacccgcccggcttcgtcggcgcgattcccgccagctctcgctcagacggcggcgacggcgacggtatgaataatgccatgacttatttgacgaacattctctcttcgaaggtatatgacgtggcgattgagtcccctctgcaattggcgccaaagctctctgcgagactcggggttaaggtttggctcaagagagaggatttgcaacccgttttctcatttaagcttcgtggagcttataatatgatggcaaagcttccgacggaattgttggaaaagggggttatctgctcgtctgctgggaaccatgctcaaggagttgcattggctgccaagaggttgaattgcagtgcggtgattgctatgcctgtcaccactccagaaataaagtggaaatccgtggaggcgctgggtgctacagttgtgctcgtgggggattcatatgatgaagcacaagcgtatgctaagaagcggggggtagaggagggtaggacattcgtacctccttttgatcatcctgatgtcatcatgggtcagggaacaattggcatggaaattgtccgccaaatgcaaggtccaatttttgcaatctttgtgcctgtgggaggtggtggtctcattgctggtattgctgcttatgtgaagagggttaagccggaggtgaagatttttggggtggaacccactgatgcgaatgcaatggcattgtcactccatcatgatcagagagtgattttggatcaggttggaggatttgcagatggtgtagctgttaaagaggttggtgaagaaacttttcgcatatgcaaggagttgatagatggcgttgttcttgtaagccgtgattcaatttgtgcgtcaataaaagatatgttcgaggagaaaaggaacatattagaaccagcaggtgcacttgcactagctggagctgaggcatactgcaagcatcatggggtccaggggaaagatattgtagtaataaccagtggagcaaacatgaattttgataaacttcgggttgtaactgaactcgctaacgttggccgtaaacaagaggctgtgctggcaactgttttgccagaggagccgggcagtttcaaacagttttgtgaattggtggggcagatgaacatcacagaattcaaatacagatataactccaatgagaaggcagttgtcctttacagtgttgggattcacacagtctccgaactaagagcaatgcaggagaggatggaatcttctcagctcaaaacttacaatctcacagaaagtgacttggtgaaagaccacttgcgttacttgatgggaggccgatcaaacattcagaatgaggttctctgtcgtttcacctttccagaaagacctggtgctttgatgaaatttttggaccccttcagtccacgttggaatatcagtttattccattaccgaggggagggtgaaactggagcaaacgtgctagttggaatacaggtacccaaaagtgagatggatgagttccatgatcgtgccaacaaacttggatatgattataaagtggtgaataatgatgatgacttccagcttctaatgcactga

SEQ ID NO: 12686 - protein, 602 aa, Glycine max
MDALRVAPTTPPLLRRHPLRKMAPHPLTARPRRAPLIVATLSMPPEATHSSAVAIVEDPSEAAPPPRPRVSPDSLQYPPGFVGAIPASSRSDGGDGDGMNNAMTYLTNILSSKVYDVAIESPLQLAPKLSARLGVKVWLKREDLQPVFSFKLRGAYNMMAKLPTELLEKGVICSSAGNHAQGVALAAKRLNCSAVIAMPVTTPEIKWKSVEALGATVVLVGDSYDEAQAYAKKRGVEEGRTFVPPFDHPDVIMGQGTIGMEIVRQMQGPIFAIFVPVGGGGLIAGIAAYVKRVKPEVKIFGVEPTDANAMALSLHHDQRVILDQVGGFADGVAVKEVGEETFRICKELIDGVVLVSRDSICASIKDMFEEKRNILEPAGALALAGAEAYCKHHGVQGKDIVVITSGANMNFDKLRVVTELANVGRKQEAVLATVLPEEPGSFKQFCELVGQMNITEFKYRYNSNEKAVVLYSVGIHTVSELRAMQERMESSQLKTYNLTESDLVKDHLRYLMGGRSNIQNEVLCRFTFPERPGALMKFLDPFSPRWNISLFHYRGEGETGANVLVGIQVPKSEMDEFHDRANKLGYDYKVVNNDDDFQLLMH

SEQ ID NO: 12687 - DNA, 1815 bp, Zea mays
  CDS (1)..(1815)
atggcggccgccgccaccaccgcctcgcactcagcctccttccccgcggcatccctccgccacgacgcgcgcagaacctcatgcgtagcccccgccgccgccgcggcgacgacggccgctgagacggggctcacggccgtcccggcgccgacgccaacgccgatggtgcgggtggtgccggagtcactgcagcgggaaagcgggtgcctcgtggagggattcagggagcgcggcgcgggcgcggcggatggggaggggttcggggacgccgcgggggaaggaggaggccccggcgcgatggagtacctcaccagcgtgctgtcatccaaggtgtacgacgtggcaatcgaatcaccgctgcagctcgcctccaagctctcccaccgcctcggggtcaacatctggatcaagcgcgaggacctgcagccggtgttctcattcaagttgcggggagcatacaacatgatggcaaagctctcccgtgagcagttagagaggggcgtcatctgctcctctgctggaaatcatgcccagggcgttgctctttccgctcagagactgggatgtgatgctgtcatcgtcatgcccgtgacaacaccagaaatcaagtggaaatcagtggagaggttgggtgcaacagtggtccttgagggggactcatatgatgaagctcagtcatatgcaaaattgcgttgccagcaagaaggccgcacatttgtacctccttttgaccatcctgatgtcatcactggacaaggaactatcggcatggaaattgttaggcagctgcaaggtccactgcatgcaatatttgtacctgttggaggtggtggattaattgctggaattgctgcctatgtaaaacgggttcgcccagaggtgaaaataattggagtggaaccctcagatgcaaatgcaatggcattatccttgtgtcatggtaagagggtcatgttggagcatgttggtgggtttgctgatggtgtagctgtcaaagctgttggggaagaaacatttcgcctgtgcagagagctagtagatggcattgttatggtcagtcgagatgctatttgtgcttcaataaaggatatgtttgaggagaaaagaagtatccttgaacctgctggtgcccttgcattggctggggctgaagcctactgcaaatactataacttgaaaggagaaactgtggttgcaataactagtggggcaaatatgaactttgatcgacttagactagtaaccgagctagctgatgttggccgaaaacgggaagcagtgttagctacatttctgccagagcggcagggaagcttcaaaaaattcacagaattggttggcaggatgaatattactgaattcaaatacagatacaattctaatgcaaaagatgcccttgttctttacagtgttggcatctacactgacaatgagcttggagcaatgatggatcgcatggaatctgcgaaactgaggactgttaaccttactgacaatgatttggcaaaggaccaccttagatactttattggaggaagatcagaaataaaagatgaactggtttaccggttcattttcccggaaaggcctggggcccttatgaaatttttggacacgtttagtcctcgttggaacatcagccttttccattaccgtgcacagggtgaagctggagcaaatgtattagttggtatacaagtgccgccagcagaatttgatgaattcaagagtcatgccaacaatcttgggtacgagtacatgtcagagcacaacaatgagatataccggttgctgttgcgtgacccaaaggtctaa

SEQ ID NO: 12688 - protein, 604 aa, Zea mays
MAAAATTASHSASFPAASLRHDARRTSCVAPAAAAATTAAETGLTAVPAPTPTPMVRVVPESLQRESGCLVEGFRERGAGAADGEGFGDAAGEGGGPGAMEYLTSVLSSKVYDVAIESPLQLASKLSHRLGVNIWIKREDLQPVFSFKLRGAYNMMAKLSREQLERGVICSSAGNHAQGVALSAQRLGCDAVIVMPVTTPEIKWKSVERLGATVVLEGDSYDEAQSYAKLRCQQEGRTFVPPFDHPDVITGQGTIGMEIVRQLQGPLHAIFVPVGGGGLIAGIAAYVKRVRPEVKIIGVEPSDANAMALSLCHGKRVMLEHVGGFADGVAVKAVGEETFRLCRELVDGIVMVSRDAICASIKDMFEEKRSILEPAGALALAGAEAYCKYYNLKGETVVAITSGANMNFDRLRLVTELADVGRKREAVLATFLPERQGSFKKFTELVGRMNITEFKYRYNSNAKDALVLYSVGIYTDNELGAMMDRMESAKLRTVNLTDNDLAKDHLRYFIGGRSEIKDELVYRFIFPERPGALMKFLDTFSPRWNISLFHYRAQGEAGANVLVGIQVPPAEFDEFKSHANNLGYEYMSEHNNEIYRLLLRDPKV

SEQ ID NO: 12689 - DNA, 23 bp, Artificial sequence
  primer
atgaccaccgattacctcgaaag

SEQ ID NO: 12690 - DNA, 24 bp, Artificial sequence
  primer
ttagcgaagaaagagacgataaac

SEQ ID NO: 12691 - protein, 390 aa, Artificial sequence
  consensus sequence
  Variant (4)..(7): Xaa in position 4 to 7 is any amino acid
  Variant (8)..(9): Xaa in position 8 to 9 is any or no amino acid
  Variant (12)..(20): Xaa in position 12 to 20 is any amino acid
  Variant (25)..(25): Xaa in position 25 is any amino acid
  Variant (27)..(27): Xaa in position 27 is any amino acid
  Variant (29)..(29): Xaa in position 29 is any amino acid
  Variant (33)..(33): Xaa in position 33 is any amino acid
  Variant (39)..(42): Xaa in position 39 to 42 is any amino acid
  Variant (44)..(47): Xaa in position 44 to 47 is any amino acid
  Variant (48)..(52): Xaa in position 48 to 52 is any or no amino acid
  Variant (55)..(57): Xaa in position 55 to 57 is any amino acid
  Variant (66)..(66): Xaa in position 66 is any amino acid
  Variant (68)..(78): Xaa in position 68 to 78 is any amino acid
  Variant (79)..(80): Xaa in position 79 to 80 is any or no amino acid
  Variant (82)..(82): Xaa in position 82 is any amino acid
  Variant (85)..(86): Xaa in position 85 to 86 is any amino acid
  Variant (89)..(90): Xaa in position 89 to 90 is any amino acid
  Variant (92)..(97): Xaa in position 92 to 97 is any amino acid
  Variant (98)..(98): Xaa in position 98 is any or no amino acid
  Variant (100)..(101): Xaa in position 100 to 101 is any amino acid
  Variant (102)..(104): Xaa in position 102 to 104 is any or no amino acid
  Variant (106)..(106): Xaa in position 106 is any amino acid
  Variant (108)..(108): Xaa in position 108 is any amino acid
  Variant (110)..(114): Xaa in position 110 to 114 is any amino acid
  Variant (116)..(118): Xaa in position 116 to 118 is any amino acid
  Variant (120)..(131): Xaa in position 120 to 131 is any amino acid
  Variant (132)..(132): Xaa in position 132 is any or no amino acid
  Variant (136)..(138): Xaa in position 136 to 138 is any amino acid
  Variant (146)..(148): Xaa in position 146 to 148 is any amino acid
  Variant (150)..(152): Xaa in position 150 to 152 is any amino acid
  Variant (154)..(162): Xaa in position 154 to 162 is any amino acid
  Variant (163)..(168): Xaa in position 163 to 168 is any or no amino acid
  Variant (174)..(175): Xaa in position 174 to 175 is any amino acid
  Variant (177)..(181): Xaa in position 177 to 181 is any amino acid
  Variant (183)..(185): Xaa in position 183 to 185 is any amino acid
  Variant (187)..(187): Xaa in position 187 is any amino acid
  Variant (188)..(194): Xaa in position 188 to 194 is any or no amino acid
  Variant (199)..(213): Xaa in position 199 to 213 is any amino acid
  Variant (214)..(217): Xaa in position 214 to 217 is any or no amino acid
  Variant (219)..(219): Xaa in position 219 is any amino acid
  Variant (220)..(220): Xaa in position 220 is any or no amino acid
  Variant (222)..(223): Xaa in position 222 to 223 is any amino acid
  Variant (224)..(225): Xaa in position 224 to 225 is any or no amino acid
  Variant (227)..(227): Xaa in position 227 is any amino acid
  Variant (230)..(230): Xaa in position 230 is any amino acid
  Variant (233)..(235): Xaa in position 233 to 235 is any amino acid
  Variant (237)..(239): Xaa in position 237 to 239 is any amino acid
  Variant (241)..(247): Xaa in position 241 to 247 is any amino acid
  Variant (249)..(252): Xaa in position 249 to 252 is any amino acid
  Variant (253)..(261): Xaa in position 253 to 261 is any or no amino acid
  Variant (263)..(267): Xaa in position 263 to 267 is any amino acid
  Variant (269)..(282): Xaa in position 269 to 282 is any amino acid
  Variant (285)..(285): Xaa in position 285 is any amino acid
  Variant (289)..(290): Xaa in position 289 to 290 is any amino acid
  Variant (292)..(307): Xaa in position 292 to 307 is any amino acid
  Variant (308)..(333): Xaa in position 308 to 333 is any or no amino acid
  Variant (336)..(336): Xaa in position 336 is any amino acid
  Variant (338)..(347): Xaa in position 338 to 347 is any amino acid
  Variant (350)..(351): Xaa in position 350 to 351 is any amino acid
  Variant (352)..(364): Xaa in position 352 to 364 is any or no amino acid
  Variant (366)..(368): Xaa in position 366 to 368 is any amino acid
  Variant (370)..(383): Xaa in position 370 to 383 is any amino acid
  Variant (384)..(385): Xaa in position 384 to 385 is any or no amino acid
  Variant (387)..(387): Xaa in position 387 is any amino acid
  Variant (389)..(389): Xaa in position 389 is any amino acid
TPLXXXXXXLSXXXXXXXXXKREDXQXVXSFKXRGAYNXXXXLXXXXXXXXXGVXXXSAGNHAQGXAXXXXXXXXXXXXXIXMPXXTPXXKXXXXXXXGXXXXXVXLXGXXXXXAXXXAXXXXXXXXXXXXXPFDXXXVIAGQGTXXXEXXXQXXXXXXXXXXXXXXXGGGGLXXGXXXXXKXXXPXXXXXXXXIGVEXXXXXXXXXXXXXXXXXXXLXXVXXXXFXDGXAVXXXGXXXFXXXXXXXDXXXXXXXXXXXXXVXXXXXCXXXXXXXXXXXXXXEPXGALXXAXXXXXXXXXXXXXXXXXXXXXXXXXXXXXXXXXXXXXXXXXXSGXNXXXXXXXXXXERXXXXXXXXXXXXXXXPXXXGXXXXXXXXXXXXXXXXTXFXY

SEQ ID NO: 12692 - protein, 30 aa, Artificial sequence
  protein pattern
  Variant (2)..(5): Xaa in position 2 to 5 is any amino acid
  Variant (6)..(6): Xaa in position 6 is Ala, Cys, Asn, Thr or Val
  Variant (7)..(7): Xaa in position 7 is any amino acid
  Variant (8)..(8): Xaa in position 8 is Ile, Leu, Met or Val
  Variant (9)..(9): Xaa in position 9 is any amino acid
  Variant (10)..(10): Xaa in position 10 is Phe, Ile, Leu, Met or Val
  Variant (14)..(14): Xaa in position 14 is Asp or Asn
  Variant (15)..(17): Xaa in position 15 to 17 is any amino acid
  Variant (19)..(19): Xaa in position 19 is any amino acid
  Variant (21)..(21): Xaa in position 21 is Phe or Tyr
  Variant (23)..(23): Xaa in position 23 is any amino acid
  Variant (27)..(29): Xaa in position 27 to 29 is any amino acid
  Variant (30)..(30): Xaa in position 30 is Phe, Ile, Leu, Met or Val
SXXXXXXXXXKREXXXXVXSXKXRGAXXXX

SEQ ID NO: 12693 - protein, 20 aa, Artificial sequence
  protein pattern
  Variant (2)..(3): Xaa in position 2 to 3 is any amino acid
  Variant (4)..(4): Xaa in position 4 is any or no amino acid
  Variant (6)..(8): Xaa in position 6 to 8 is any amino acid
  Variant (9)..(9): Xaa in position 9 is any or no amino acid
  Variant (11)..(11): Xaa in position 11 is any amino acid
  Variant (14)..(14): Xaa in position 14 is Ala or Gly
  Variant (15)..(15): Xaa in position 15 is Ser or Thr
  Variant (16)..(16): Xaa in position 16 is Ile, Leu or Val
  Variant (17)..(17): Xaa in position 17 is Ala or Gly
  Variant (18)..(18): Xaa in position 18 is any amino acid
  Variant (20)..(20): Xaa in position 20 is Ile, Leu or Met
PXXXDXXXXIXGQXXXXXEX

SEQ ID NO: 12694 - protein, 18 aa, Artificial sequence
  protein pattern
  Variant (3)..(3): Xaa in position 3 is Ile or Val
  Variant (4)..(4): Xaa in position 4 is Ala, Cys or Thr
  Variant (5)..(5): Xaa in position 5 is Ala, Cys or Ser
  Variant (14)..(14): Xaa in position 14 is Leu or Val
  Variant (16)..(16): Xaa in position 16 is any amino acid
  Variant (17)..(17): Xaa in position 17 is Ala, Gly, Ser or Thr
  Variant (18)..(18): Xaa in position 18 is Ala, Cys, Gly or Ser
GVXXXSAGNHAQGXAXXX

SEQ ID NO: 12695 - protein, 14 aa, Artificial sequence
  protein pattern
  Variant (6)..(6): Xaa in position 6 is Ala, Ile or Leu
  Variant (7)..(7): Xaa in position 7 is Ala, Gly or Ser
  Variant (9)..(9): Xaa in position 9 is Ile, Leu, Met or Val
  Variant (10)..(10): Xaa in position 10 is Ala, Cys, Gly, Ser or Thr
  Variant (11)..(13): Xaa in position 11 to 13 is any amino acid
GGGGLXXGXXXXXK

SEQ ID NO: 12696 - protein, 20 aa, Artificial sequence
  protein pattern
  Variant (2)..(3): Xaa in position 2 to 3 is any amino acid
  Variant (4)..(4): Xaa in position 4 is Ile, Leu, Met or Val
  Variant (5)..(13): Xaa in position 5 to 13 is any amino acid
  Variant (14)..(14): Xaa in position 14 is Gly, Ile or Val
  Variant (15)..(15): Xaa in position 15 is any amino acid
  Variant (18)..(18): Xaa in position 18 is Ala, Ser or Thr
CXXXXXXXXXXXXXXEPXGA

SEQ ID NO: 12697 - protein, 15 aa, Artificial sequence
  protein pattern
  Variant (2)..(2): Xaa in position 2 is any amino acid
  Variant (3)..(4): Xaa in position 3 to 4 is any or no amino acid
  Variant (7)..(7): Xaa in position 7 is Asp, Glu or Gln
  Variant (8)..(9): Xaa in position 8 to 9 is any amino acid
  Variant (10)..(10): Xaa in position 10 is Gly or Asn
  Variant (11)..(11): Xaa in position 11 is Ala or Gln
  Variant (13)..(14): Xaa in position 13 to 14 is any amino acid
FXXXFPXXXXXLXXF

SEQ ID NO: 12698 - DNA, 741 bp, Thermus thermophilus
  CDS (1)..(741): transl_table=11
atgaaggaagcccccctggtagagcacctcgaggagctccgcgcccggatcctctggtccctcctcgcctgggcggtggggacgggcgtggcctggaccttcagggtccagcttctggagtggttgaagaggcccttggacctcgcggccaaggcccacggcatccaggtcaacctcatcgtcctggacatcaccgagcccttcctcgtctccctgaaggtggccgccttcggggggcttgtgctcgcccttcccttcatcgtctaccaggtctgggccttcatcgccccggggctctatgagcacgagaagcgcctggccgtgcccttcctcctgggggcggggttcagcttcgccctgggggcgctcttcgcctactacgccttcctgcccttcgccgttcccttcctcttgggctttttgggggacgtggtcactccccagatctccatcggccgctacatgggccagatcctcatgatgctcaccgtcatgggggtggtctttgagatgccggtggtgagctacctcctcgcccgcctggggatcctcacctcctccttcctcgcccgcaactggcgcatcgccgtcgtcctcctcctcaccctggccgccttcatcacccccacggtggacgtggtctccctcttcatcgtgagcgggcccctcctcgtcctctactgggtctccgtcctggtggcccgcctcgcggaaaggcagaggccccaggaggccgcttaa

SEQ ID NO: 12699 - protein, 246 aa, Thermus thermophilus
MKEAPLVEHLEELRARILWSLLAWAVGTGVAWTFRVQLLEWLKRPLDLAAKAHGIQVNLIVLDITEPFLVSLKVAAFGGLVLALPFIVYQVWAFIAPGLYEHEKRLAVPFLLGAGFSFALGALFAYYAFLPFAVPFLLGFLGDVVTPQISIGRYMGQILMMLTVMGVVFEMPVVSYLLARLGILTSSFLARNWRIAVVLLLTLAAFITPTVDVVSLFIVSGPLLVLYWVSVLVARLAERQRPQEAA

SEQ ID NO: 12700 - DNA, 1328 bp, Glycine max
  CDS (74)..(1108)
tgggacggccgggcctggcggctccgcgtccgaaccgtgtatccaagcaaaagaaaagacgttacagcatagcatgggattgataagcgccagtgttcccatgaatatcgttcctcaattcgggtcgctccgaacacccattcgggtcggaaacccttccgggttgagcttccttcggaagaggaataacggctttgtttgcttcgccgtcgatgacgagctcagacagaagcagcaggacttgagtactaccgcaactgggctgggctccgcccttgaagaaaggcccggaaacacagatctttttgagagtacaactgaagaaacgcagggaaattttaggcaagatggtgacccaggtcctatctacgattttctttatcctgataaagagcttcttcccgatgataaagaaatgagcatatttgatcatcttgaagagctgcgacagagaatctttgtatcagttctggcagttggagcaagcattttgggatgctttgcattttcaaaagaactgataatgattcttgaagctcctgttaaatcacagggtgtaagatttcttcagctagctcctggtgaatttttcttcactactttaaaggtgtctggatactgtggccttctcttgggaattcctgtcatcctctatgaaatcatagcctttgtacttccaggacttacaaaagctgaaagaaggtttctagggccaattgttttaggctcatcggttcttttctatgccggaataactttctcctacttagttctgacacctgcagcattaaatttctttgttacctacgctgaaggtgctgttgaatcattatggtccattgatcaatactttgaatttgttctggtgcttatgttcagtacaggcttatctttccaggtacctgtcatacaatttctattgggacaacttggactggtgtctggagaccagatgctatcaatttggaggtatgttgtggttggtgcagtagtggcagctgctatagttacaccatctactgatcctctcactcaagttcttctagcggcacccttattgggtctttacttaggtggtgcatggatggtcaagcttactggacggtgaccctagccgcatcataataatgtgccagaattttcagtatgaacagatgttaatgtacattcacatagcaatctagcgtatatttttacacgtaccagagcactactcttctatattctaattgatttactagtcattcccattcttcgtcgtgttccgctcattcccaaaaaaaaaaaaaaaaaaaaaaaaaaaaaaaaaaaaaaaaaaaaaaaaaaaa

SEQ ID NO: 12701 - protein, 344 aa, Glycine max
MGLISASVPMNIVPQFGSLRTPIRVGNPSGLSFLRKRNNGFVCFAVDDELRQKQQDLSTTATGLGSALEERPGNTDLFESTTEETQGNFRQDGDPGPIYDFLYPDKELLPDDKEMSIFDHLEELRQRIFVSVLAVGASILGCFAFSKELIMILEAPVKSQGVRFLQLAPGEFFFTTLKVSGYCGLLLGIPVILYEIIAFVLPGLTKAERRFLGPIVLGSSVLFYAGITFSYLVLTPAALNFFVTYAEGAVESLWSIDQYFEFVLVLMFSTGLSFQVPVIQFLLGQLGLVSGDQMLSIWRYVVVGAVVAAAIVTPSTDPLTQVLLAAPLLGLYLGGAWMVKLTGR

SEQ ID NO: 12702 - DNA, 1392 bp, Zea mays
  CDS (113)..(1183)
gggtccccgcgcgggcggccaggcgggctcgggacatcgtctgtccgccaccggttacctctttctccaggtagcgcaccatcggaacggcgaggagcagacgggaacggggatgggaagcgctggggcgctgctctggcacacgccgcagcagctgcacggccgtggcgtcctcttccgccagagccggcctctcctgcgccagcgcaacctgcctctaatatcgctagctgccccggcgctcgagcccgagcgccgccgccggcagtgcctccgctgcgctgccgtcgacggggacggcgccccccgggagtctgggccactgccacagaaggagtctccgtccagcggcatcggtgccgcactcgaggacccgcctccaggacctcctgtggagaatggttcctttggaggcccctcacaggaagaacagagtgctctatatacttttctttatccaagcaaagacttacttccagatgataaggagatgagtatatttgatcatctagaggagcttcgtgacaggattttcatctcagttttggctgttggggctgcgatattaggctgttttgctttttcaaaagatttggttatttttcttgaggcaccagtgactgctcagggtgttcggtttttgcagctctcgcctggggaatttttctttacaacattaaaggtttcaggttattgtggccttttacttggaagtcctatcattttgtatgagatcattgcatttgttatcccaggtttaacaagggacgagcggaaatttcttgggcctattgtgttgggttcttctgttctattctatctaggcattttcttctcctacacggttctcagccctgctgcgttgaacttctttgtgaattatgcagatggggcagtggaatcgttgtggtcaatagaccagtactttgaattcatacttgtgctgatgtttagcacagggttgtcctttcaggtccctgttatccagcttttgctgggacaacttggattggtttctagtgaccaaatgctttcgatctggagatatgttgttgttggtgctgttgttgctgctgctgtgcttacaccttcgacggacccgttgacacaaatgctcctggctggtcccttgcttggtttatacttgggtggtgcatggatggtcaagataactgggcgctaactgctttgtgcaaggtgatggtgctccggatagcaagagtcccagtgtaacctagtcttgtaaaaatgaattcactctgcttgcttgtaaaaatgaattcactctgcgtgctcattagatgatactagttagttatccgacactatggtttctatatatgatatatgttttctttatacaaaagaggaaaaaaaaaaaaaaaaaaaaag

SEQ ID NO: 12703 - protein, 356 aa, Zea mays
MGSAGALLWHTPQQLHGRGVLFRQSRPLLRQRNLPLISLAAPALEPERRRRQCLRCAAVDGDGAPRESGPLPQKESPSSGIGAALEDPPPGPPVENGSFGGPSQEEQSALYTFLYPSKDLLPDDKEMSIFDHLEELRDRIFISVLAVGAAILGCFAFSKDLVIFLEAPVTAQGVRFLQLSPGEFFFTTLKVSGYCGLLLGSPIILYEIIAFVIPGLTRDERKFLGPIVLGSSVLFYLGIFFSYTVLSPAALNFFVNYADGAVESLWSIDQYFEFILVLMFSTGLSFQVPVIQLLLGQLGLVSSDQMLSIWRYVVVGAVVAAAVLTPSTDPLTQMLLAGPLLGLYLGGAWMVKITGR

SEQ ID NO: 12704 - DNA, 1212 bp, Glycine max
  CDS (80)..(1120)
aggcacataaccaagatcgaagggaaggaaaccgtatccaagcgtgtgacagtcaaaagaaaagacgttacagcatagcatgggattgataagcaccagtgttcccacgaacatcgttcctcaattcgggtctctccgaacatccatccgggtcggaaacccaaacccttccgggttgagtttcccacggaagaggaataacagttttgtttgcttggccgtcgatgacgagctgagacagaagcagcaagacttgagtactagcgccactgggctgggctccgcccttgaagaaaggcccgaaaatgcagatctttttgagagtacagctgaagaaacgcagggaaattttgggcaagatggtgaccgaggtgctatctatgattttctttatcctgataaagagcttcttcccgatgacaaagaaatgagcatatttgatcatcttgaagagctgcgacagagaatctttgtatcagtcctggcagttggagcaagcattttgggatgctttgcattttcaaaagaactaataatgattcttgaagctcctgttaaaacacagggtgtaagatttcttcagctagctcctggtgaatttttcttcacaactttaaaggtgtctgggtactgtggccttctcttgggaagtcctgtcatcctctatgaagtcatagcttttgtacttccaggacttacaaaatctgaaagaaggtttctagggccaattgttttaggctcatcagttcttttctatgccggaataactttctcctacttagttctgacacctgcagcattaaatttctttgttacctacgctgaaggtgctgttgaatcattatggtccatcgatcaatactttgaatttgttctggtgcttatgttcagtacaggcttatctttccaggtacctgtcatacaatttctattgggacaacttggactggtgtctggagaccagatgctatcaatttggaggtatgttgtggttggtgccgtagtggcagctgctatagttacgccatctactgatcctctcactcaaattcttctagcggcacccttattgggtctttacttaggtggcgcatggatggtcaagcttactggacggtgaccctagccgcatcttaatgatgtgccagaatttcaatatgaacagatgttaatgtacattcacatagcaatctagtgtatatttttacacgt

SEQ ID NO: 12705 - protein, 346 aa, Glycine max
MGLISTSVPTNIVPQFGSLRTSIRVGNPNPSGLSFPRKRNNSFVCLAVDDELRQKQQDLSTSATGLGSALEERPENADLFESTAEETQGNFGQDGDRGAIYDFLYPDKELLPDDKEMSIFDHLEELRQRIFVSVLAVGASILGCFAFSKELIMILEAPVKTQGVRFLQLAPGEFFFTTLKVSGYCGLLLGSPVILYEVIAFVLPGLTKSERRFLGPIVLGSSVLFYAGITFSYLVLTPAALNFFVTYAEGAVESLWSIDQYFEFVLVLMFSTGLSFQVPVIQFLLGQLGLVSGDQMLSIWRYVVVGAVVAAAIVTPSTDPLTQILLAAPLLGLYLGGAWMVKLTGR

SEQ ID NO: 12706 - DNA, 1212 bp, Glycine max; identical to SEQ ID NO: 12704
  CDS (428)..(1120)

SEQ ID NO: 12707 - protein, 230 aa, Glycine max
MSIFDHLEELRQRIFVSVLAVGASILGCFAFSKELIMILEAPVKTQGVRFLQLAPGEFFFTTLKVSGYCGLLLGSPVILYEVIAFVLPGLTKSERRFLGPIVLGSSVLFYAGITFSYLVLTPAALNFFVTYAEGAVESLWSIDQYFEFVLVLMFSTGLSFQVPVIQFLLGQLGLVSGDQMLSIWRYVVVGAVVAAAIVTPSTDPLTQILLAAPLLGLYLGGAWMVKLTGR

SEQ ID NO: 12708 - DNA, 780 bp, Klebsiella pneumoniae subsp. pneumoniae MGH 78578
  CDS (1)..(780): transl_table=11
atgggcgtagacgatacacaaccgctaatttcgcatctgattgagctgcgcaagcgtctgctcaacagcatcattgctattctggtgatcttcctggcgctggtctatttcgccaatgatatctaccagctggtctcggccccgcttatcagtaagatgccagtgggcgcgacgatgatcgccaccgatgtcgcttcacctttctttacgccgataaagttgaccttcatggtgtcggtgatcctgtcggtgccgattattctttaccaggtatgggccttcgtcgcgccggcgttgtataagcacgaacgccggctggtggtgcctttactggtatccagtaccctgctgttctatatcggcatggctttcgcctattttgtcgtgtttccgctggcgttcggcttcctgacccatgcggcgccggaaggggtgctggtctcgaccgatattcgcagctatctcgacttcgtgatggcgctgtttatggcattcggggtctcctttgaggtgccggtcgccattgtgttgctctgctggatgggcgttaccacgccggaagacttgcgtaaaaaaaggccgtatgtgctggtgggtgccttcgtggtgggcatgctgctgacgccgccggacgtattctcgcagacactgctggccattccgatgtactgtctgtttgaagtcggggtgttctttgcccgcttctacaccgggaagcgcctgacgcgcgatgacgacgccgcggccgaagctgaagccgcagagcacagagaagagtaa

SEQ ID NO: 12709 - protein, 259 aa, Klebsiella pneumoniae subsp. pneumoniae MGH 78578
MGVDDTQPLISHLIELRKRLLNSIIAILVIFLALVYFANDIYQLVSAPLISKMPVGATMIATDVASPFFTPIKLTFMVSVILSVPIILYQVWAFVAPALYKHERRLVVPLLVSSTLLFYIGMAFAYFVVFPLAFGFLTHAAPEGVLVSTDIRSYLDFVMALFMAFGVSFEVPVAIVLLCWMGVTTPEDLRKKRPYVLVGAFVVGMLLTPPDVFSQTLLAIPMYCLFEVGVFFARFYTGKRLTRDDDAAAEAEAAEHREE

SEQ ID NO: 12710 - DNA, 876 bp, Mesorhizobium loti MAFF303099
  CDS (1)..(876): transl_table=11
gtgagcgtttcggacaaggaaaaggacgagatcgaaaaatcgtcggcgccgctgatcgagcatctcatcgagctacgtcgccggctaatctggtcgctcggcggcttcttcgtcgccttcctggtgtgcttcttcttcgccaagaagctgttcaacctcctggtcgttcccttcaaatgggcgacgaagtgggcgggtctcgacccgcacaaggtcgagctgatctacaccgcgccgcaggaattcttcttcacgcaggtcaagctcgccatgttcggcggcatggtcatcgcctttccgctgatcgccacgcagatctacaaattcatcgcgcccggcctctacaagaacgagcgcaacgccttcctgccgttcttgatcgcgtcacccgtcctgttcctgatgggcgcgtcgctggtctatttcttcttcaccccgatggttatgtggttcttccttgccatgcagcaggccggcacggacgaccaggtgcagatttcgctgctgccgaaagtgtcggaatatctcagcctgatcatgacgctgatcttctccttcggcctggtgttccagctgccggtggtgaccagtctgatgacacgtgtcggcatgctgtcgtccaaggcgctggccgagaagcgcaaatgggcgatcgtcattgctttcgtcgtcgcggcggtgctgacgccgcccgatccgatgagccagatcggtttggccatcccgaccatcctgctctacgaggtcgccatctggtcggccaggctgatcgagcgcagccaggagcgcgagcgcttggcgcgcgagaagcaggaagccggggagaccgtggccgacaagacaccggacgagcctccggcgccggctgcttcgtaa

SEQ ID NO: 12711 - protein, 291 aa, Mesorhizobium loti MAFF303099
MSVSDKEKDEIEKSSAPLIEHLIELRRRLIWSLGGFFVAFLVCFFFAKKLFNLLVVPFKWATKWAGLDPHKVELIYTAPQEFFFTQVKLAMFGGMVIAFPLIATQIYKFIAPGLYKNERNAFLPFLIASPVLFLMGASLVYFFFTPMVMWFFLAMQQAGTDDQVQISLLPKVSEYLSLIMTLIFSFGLVFQLPVVTSLMTRVGMLSSKALAEKRKWAIVIAFVVAAVLTPPDPMSQIGLAIPTILLYEVAIWSARLIERSQERERLAREKQEAGETVADKTPDEPPAPAAS

SEQ ID NO: 12712 - DNA, 738 bp, Pasteurella multocida subsp. multocida str. Pm70
  CDS (1)..(738): transl_table=11
atgcgtgttgaagattctcaacctctgatcagccacttaatggagttacgtgatcgcctactacgagcgatcatttttgttgcggtcgttttttgtgccttagtgtattttgccaacgacatctataactttgtggcttcgcctttaattgatgtgttaccggctggcgccagtatgatcgccaccaatattgctacccctttcttcacaccaatcaaattaactgcggtggttgccgtctttctctccgtgccttatttactctatcaagtctgggcatttgtggcacctgccctctatcaacatgaaaaacgcttgatttacccgctcctgttttccagtactgtcctgttttatcttggggtggctttcgcttattatgttgtctttcctctcgtgtttggtttcttaaccaaaaccgccccaacaggtgtcgcgattgctacagatatcagtagctatttggattttgtattgacgatcttcttagcatttggagtctgttttgaagtgcctgtggcgattattttattatgttggacaggcgtcactacacccgaggatcttaaaggcaaacgcccctatattattgttgctgcttttattattggcatgctattaacaccacccgatattttctcgcaaaccctacttgctatcccaatgtggttattgtttgaggttggtgtgatttttgcacgtttttatcgccctagagaggatgaagaaacgcaatag

SEQ ID NO: 12713 - protein, 245 aa, Pasteurella multocida subsp. multocida str. Pm70
MRVEDSQPLISHLMELRDRLLRAIIFVAVVFCALVYFANDIYNFVASPLIDVLPAGASMIATNIATPFFTPIKLTAVVAVFLSVPYLLYQVWAFVAPALYQHEKRLIYPLLFSSTVLFYLGVAFAYYVVFPLVFGFLTKTAPTGVAIATDISSYLDFVLTIFLAFGVCFEVPVAIILLCWTGVTTPEDLKGKRPYIIVAAFIIGMLLTPPDIFSQTLLAIPMWLLFEVGVIFARFYRPREDEETQ

SEQ ID NO: 12714 - DNA, 771 bp, Neisseria meningitidis Z2491
  CDS (1)..(771): transl_table=11
gtgtccgaaacacaaaacgaacaacccgtccaaccgcttgtcgagcatctcatcgagctgcgccgccgcctgatgtggacggttgtcggtatcttagtctgctttttcggcctaatgccgtttgcccaacaactctatacttttatcgccgacccgctgatggcaaacctgcccaaagacaccagcatgattgccaccgatgtcatcgcaccatttttcgtgccggtcaaagttaccctgatggcggcatttttaatttcgctgccgcatacgctctaccaaatctgggcattcgtcgcccccgcactctaccaaaacgaaaaacgcctgattacgccgctcgtcctctccagcgtcagcctgtttttcatcggcatggcatttgcctactttttggttttccccgtcattttcaaattccttgccagcgttacccctgtcggtgtcaatatggcgacagacatcgacaaatacctctccttcatcttggggatgtttgtcgcattcggtacaacgtttgaagtccccattgtcgttatcctgttaaccaaaattggtgtggtaacaaccgaacagctcaaacgcgcccgcccctatgtgattgtcggcgcgtttgtcattgccgccatcatcacgccgcccgatgtgatttcacaaaccctgcttgccattccgctgattctcttatacgaagcaggtatttggttcggacgctttttcacgccacgttcagaacaggatggcgacatacagccgcctgcaacaacctga

SEQ ID NO: 12715 - protein, 256 aa, Neisseria meningitidis Z2491
MSETQNEQPVQPLVEHLIELRRRLMWTVVGILVCFFGLMPFAQQLYTFIADPLMANLPKDTSMIATDVIAPFFVPVKVTLMAAFLISLPHTLYQIWAFVAPALYQNEKRLITPLVLSSVSLFFIGMAFAYFLVFPVIFKFLASVTPVGVNMATDIDKYLSFILGMFVAFGTTFEVPIVVILLTKIGVVTTEQLKRARPYVIVGAFVIAAIITPPDVISQTLLAIPLILLYEAGIWFGRFFTPRSEQDGDIQPPATT

SEQ ID NO: 12716 - DNA, 813 bp, Deinococcus radiodurans R1
  CDS (1)..(813): transl_table=11
atgacccaattgccgcccccggagcagaccgtgcttaagccagccccgccggaactggcgagcgcgccgctgttcgaccaccttgaggagctgcggcggcgcctgattctcagcgtcgtgtttctggccgtcggcatggtgatcgcctttacctaccgcgtgcagcttatcgagctggtcaaggtgccgctgacctactcggagctctacaccaccggcaaggtgcagctcgtgaccaccaagctcgcctcgcagctcttgctgagtttcaacctcgccttctgggcggggctgacgctggcgctgccttttatcgtgtggcagatctgggcgtttatcgcgccggggctctacccgcaggagcggcgctggggcctgcccttcatcctgggcgcggggttcgccttcgcggcgggcgtggtgttcggctacaagctggtgctgccgacgatggtgcccttcctgatcgagtttctggccgggaccgtcacccagatgcaggacctgcaggagtacatcggtaccgtcgtgacctttctggtcgctttcggggtggccttcgagctgccgatcctggcggtgatcctgacgcggctgggcatcgtcaaccatacgatgctgcgccagggctggcgctttgcgctgatcggcatcatgattctggccgccgtcatcacgcccacccctgaccccgccaacatggcgctggtggcggtgccgctctacgcgctgtacgaactcggcgtggtgctctcgcgggtcttccgcgtgattgcgcccgaggaacaggagcggcccgcgccgatgtcctga

SEQ ID NO: 12717 - protein, 270 aa, Deinococcus radiodurans R1
MTQLPPPEQTVLKPAPPELASAPLFDHLEELRRRLILSVVFLAVGMVIAFTYRVQLIELVKVPLTYSELYTTGKVQLVTTKLASQLLLSFNLAFWAGLTLALPFIVWQIWAFIAPGLYPQERRWGLPFILGAGFAFAAGVVFGYKLVLPTMVPFLIEFLAGTVTQMQDLQEYIGTVVTFLVAFGVAFELPILAVILTRLGIVNHTMLRQGWRFALIGIMILAAVITPTPDPANMALVAVPLYALYELGVVLSRVFRVIAPEEQERPAPMS

SEQ ID NO: 12718 - DNA, 861 bp, Mycobacterium leprae TN
  CDS (1)..(861): transl_table=11
atgtctctgatcgaccacctgactgagttgcgaacccggctactgatctcgttggccgcgattgtggtcaccacgattttcgggttcatctggtactctcattccatcttcgggttggagagtctcggcgagtggttacggcgtccgtactgttcgctgccgcaatcggcacgtgcggatatcagccccgacgggcagtgtcgattgttggccacagcgccgttcgatcaattcatgctgcgaatcaaggttgggatggccgccgggatcgtgctggcctccccagtgtggttttaccagctctgggcgttcatcacgccagggctctacacgaaggaacgccgcttcacggtggctttcgtggttccagccgcggtgctgttcgccggcggtactgtactagcatatttggtgttatccaaagcgttgggtttcttgctgattgtcggtagcggcgtgcaagtgaccgcgctttctggtgaccggtatttcggttttttgttgaaccttctggtagttttcggggtcagctttgagttcccgctgttgatcgtcatgctcaacatcgctggtcttctgacctatcagcggctgaagtcttggcgtcgtggtctaatattcgcaatgtttgtgttcgcggcggtatttacgcccggatctgacccattttcgatgacagcgcttggcgccgctctgaccgtgctgctcgagcttgccatccagctagttcggctgcacgacaagcgcagagtcaagcatgaagccttaatcgccgacgatgaagcgtctgtcatcgagccaccctcgtcgataccggagcggtcgtataccgctactaggtctcatgacgatgtcacataa

SEQ ID NO: 12719 - protein, 286 aa, Mycobacterium leprae TN
MSLIDHLTELRTRLLISLAAIVVTTIFGFIWYSHSIFGLESLGEWLRRPYCSLPQSARADISPDGQCRLLATAPFDQFMLRIKVGMAAGIVLASPVWFYQLWAFITPGLYTKERRFTVAFVVPAAVLFAGGTVLAYLVLSKALGFLLIVGSGVQVTALSGDRYFGFLLNLLVVFGVSFEFPLLIVMLNIAGLLTYQRLKSWRRGLIFAMFVFAAVFTPGSDPFSMTALGAALTVLLELAIQLVRLHDKRRVKHEALIADDEASVIEPPSSIPERSYTATRSHDDVT

SEQ ID NO: 12720 - DNA, 855 bp, Mycobacterium tuberculosis CDC1551
  CDS (1)..(855): transl_table=11
atgtcgctggtcgaccacctgaccgagttacgcaccaggttgctgatctccctggccgcgatcttggtcaccacaatcttcgggttcgtctggtattcgcattcgattttcgggttggacagcctcggagagtggctgcggcatccctactgtgccctgccgcagtcggcccgggcggatatcagcgccgacggagagtgccgtttgttggccaccgcgccgttcgaccagttcatgttgcggctcaaggtcgggatggccgccggcattgtgctggcttgcccggtgtggttctaccagctgtgggcgttcatcacgcctggtctctaccagagggagcgccgcttcgcggtggccttcgtgatcccagcagcggtgctgttcgtcgccggtgccgtactggcctacctggtgttgtccaaggcgttgggctttttgttgaccgtcggcagcgacgtgcaggtgaccgcgctgtctggcgaccgctactttggctttctgctcaacctgctggtggtgttcggggtcagcttcgaattccccctgctgatcgtgatgctgaacctggcgggcctgctgacctatgagcggctcaagtcttggcggcgcgggttgatctttgcgatgttcgtcttcgcggcgatcttcacgcccggatccgatccgttctcgatgaccgcgctcggtgcggcgttgaccgtgctgctagagctcgccattcagatcgcccgcgtgcatgacaagcgaaaagccaagcgcgaagccgcgattcccgacgacgaagcttcggtcatcgacccgccctcgccggtgccggcgccatcggtcatcggatctcatgacgacgtcacgtag

SEQ ID NO: 12721 - protein, 284 aa, Mycobacterium tuberculosis CDC1551
MSLVDHLTELRTRLLISLAAILVTTIFGFVWYSHSIFGLDSLGEWLRHPYCALPQSARADISADGECRLLATAPFDQFMLRLKVGMAAGIVLACPVWFYQLWAFITPGLYQRERRFAVAFVIPAAVLFVAGAVLAYLVLSKALGFLLTVGSDVQVTALSGDRYFGFLLNLLVVFGVSFEFPLLIVMLNLAGLLTYERLKSWRRGLIFAMFVFAAIFTPGSDPFSMTALGAALTVLLELAIQIARVHDKRKAKREAAIPDDEASVIDPPSPVPAPSVIGSHDDVT

SEQ ID NO: 12722 - DNA, 870 bp, Sulfolobus solfataricus P2
  CDS (1)..(870): transl_table=11
gtggaagaaaaagcaaaggagagaggtaaagaagagaagagttttttcgaagaaaagccattattagatcatttaagagaattagcaataagactaaggagaattatagcagcattagctatttcgttcttcttttacttcatgacaggttatgaatggattaatatagatccattacaaataccatttcttgggataagtatctcaaaaattccaattccttatccgtcattttacgatagtattgcagtacaagtaaccaaattctttatttaccatgaactgccagccaatactaagataataataataaacttatttgatccaatatatgcgtcgctttatgtttcactttacctcgcactattgacctcgcttcccctcataattagagaaacctgggcttttttagctccgggactatataaacatgaaaagaaaatctttaagctaaccatgattccagcatttctacttttcttctctggttctctatttgcgtttttgatactaatccccttaatgtttgacatgatatcattttataccgagtctttaggtcctgccgtagaacctaccataagtttaagttcgttcatatccacaactttcctattaatggggtcgttaggactagcatttgagatgccactgataatgattggtttaactcacctaagaatagttaaggctagtacttggaggaattattggagatggggagttctggtatcctttataattgcatggataatatcaccaggtacaactggtggcgttatggaaacaataataggattatcactatcgagcctatactttttaggaatgggaatctctttcttagtagagaggaaaagggaatcttaa

SEQ ID NO: 12723 - protein, 289 aa, Sulfolobus solfataricus P2
MEEKAKERGKEEKSFFEEKPLLDHLRELAIRLRRIIAALAISFFFYFMTGYEWINIDPLQIPFLGISISKIPIPYPSFYDSIAVQVTKFFIYHELPANTKIIIINLFDPIYASLYVSLYLALLTSLPLIIRETWAFLAPGLYKHEKKIFKLTMIPAFLLFFSGSLFAFLILIPLMFDMISFYTESLGPAVEPTISLSSFISTTFLLMGSLGLAFEMPLIMIGLTHLRIVKASTWRNYWRWGVLVSFIIAWIISPGTTGGVMETIIGLSLSSLYFLGMGISFLVERKRES

SEQ ID NO: 12724 - DNA, 843 bp, Sinorhizobium meliloti 1021
  CDS (1)..(843): transl_table=11
atgagccgcgatatcgaggaccggccgcagccgcttatcgagcatctgatcgaactgcgcacgcggttgatgtgggcggtgggcgcattcttcgtggcgttcctcgtctgcttctattttgccaagcagctgttcaaccttcttgttctgccgttcaagtgggccgtgagctgggccgggctcagccaccgcaacgtcgagctcatctacacggcgccgcaggagttcttcttcacgcagatcaaagtcgcgatgttcggtgcgctggtgatcgcatttccggtcatcgcgtcgcaggtctacaggttcgttgcacccggcctttacaagaacgaacgcgctgccttcctgccgttcctcgtcgcttcgccactcctgttcctgcttggcggcgcgctggtctatttcttcttcacgccgatggtcatgtggttcttcctcgccatggaacagggcggcggcgaagggcaggtcgccatccagctcctgccgaaggtgtccgagtatctcagcctcatcatgtctctggtcttcgccttcggtctggtgttccagttgccggtcatcacgacgctcctcgcgcgtgtcggcttcgtcacctcccaggggcttgccgaaaagcgcaaatacgcgatcgtgatcgccttcgtggtcgcagcggttctgacgccgccggatccggtttcccagatcggccttgcgctgccagccatccttctctacgaaatttcaatctacacggcgcgaatcgtcgaaaggcgaagggctgccgaggccctcgagcgcgaggctgcctccgagcaggaaagttcgtccgagacggctgaccccgccaagggctga

SEQ ID NO: 12725 - protein, 280 aa, Sinorhizobium meliloti 1021
MSRDIEDRPQPLIEHLIELRTRLMWAVGAFFVAFLVCFYFAKQLFNLLVLPFKWAVSWAGLSHRNVELIYTAPQEFFFTQIKVAMFGALVIAFPVIASQVYRFVAPGLYKNERAAFLPFLVASPLLFLLGGALVYFFFTPMVMWFFLAMEQGGGEGQVAIQLLPKVSEYLSLIMSLVFAFGLVFQLPVITTLLARVGFVTSQGLAEKRKYAIVIAFVVAAVLTPPDPVSQIGLALPAILLYEISIYTARIVERRRAAEALEREAASEQESSSETADPAKG

SEQ ID NO: 12726 - DNA, 903 bp, Caulobacter crescentus CB15
  CDS (1)..(903): transl_table=11
gtgagtaaagccatcggacacgatcccgacgaggagatcgaggcttcgcgcgcgccgctgctggatcacctgatcgagctgcgtatgcggctgatcatctgcgtcgtggccatcgccttggctttcggcgtctgcttcgccttcgtgaagccgatcttcctgttcctggttcgcccgttcaccgtggcggaggggctgaaggccatgcaggacgccggcggagagcacggggcgttcgaccttctgctggcgctggtcggcgtcaagaaggtcgccaccggcgccttggccaacatcaccctgcaggccaccgcgccgctggagcagttcttcaccaacatcaagctggcggcgttcgggggcatcatcctggccttcccggttatcgcctggcagctgtaccggttcgtggcgccgggtctctacaagaaggagcgcaacgcgttcctgccgttcctgatcgcctcgccggtgctgttcctgatgggcgcttcgctggtctactacgtgatgctgcccttcgttctgtggttctcgctgagccagcagatggtgggcgacggcgtgcaggtggtgttgcagacccgcgtgtcggagtacctgaccctggtcacgacactgctgttggcgttcggtctcagcttccagttgcccgtggtgctgtcgctggggggcttggcgggcttggtcacctcgcagatgctgcgcacgggtcggcgctatgcgatcgtcgccgtgttcgtggtcgcggccatcgtcacgccgcccgatccgatcagccagatcaccttggcggtgccgctttgcctgctctacgaaatctcgatctggtgcgtttggctgattgagcgccgtcgcaaggaagaagacgagaaggccggtacggacctggtcgtttcgtaa

SEQ ID NO: 12727 - protein, 300 aa, Caulobacter crescentus CB15
MSKAIGHDPDEEIEASRAPLLDHLIELRMRLIICVVAIALAFGVCFAFVKPIFLFLVRPFTVAEGLKAMQDAGGEHGAFDLLLALVGVKKVATGALANITLQATAPLEQFFTNIKLAAFGGIILAFPVIAWQLYRFVAPGLYKKERNAFLPFLIASPVLFLMGASLVYYVMLPFVLWFSLSQQMVGDGVQVVLQTRVSEYLTLVTTLLLAFGLSFQLPVVLSLGGLAGLVTSQMLRTGRRYAIVAVFVVAAIVTPPDPISQITLAVPLCLLYEISIWCVWLIERRRKEEDEKAGTDLVVS

SEQ ID NO: 12728 - DNA, 780 bp, Salmonella typhimurium LT2
  CDS (1)..(780): transl_table=11
atggctgtagaagatactcaaccgcttatcacgcatctgatcgagttgcgtaagcgcctgctaaactgcatcgtcgcagtacttctgatttttctggcgttaatttatttcgccaatgatatttatcatttagtcgccgcaccgctgattaaacagatgccgcaaggggcgacaatgattgcgacggatgtggcgtcgccgttttttacgcctatcaaactcaccttcatggtgtctttgatcttatccgcgcctgtcattttgtaccaggtttgggcctttatcgccccggcgctgtataagcatgagcgtcgtctggtcgtacctctgctggtatccagctcgctgcttttctatattggtatggccttcgcctattttgtcgtattccctttggcctttggtttcctgacgcatacggcgccggaaggggtacaggtttcgacagatatcgccagctatcttagctttgtcatggcgctttttatggcctttggcgtagcctttgaagtgccggtggcgattgtgttgctgtgctggatgggcatcaccacgccagaagatttgcgtaaaaaacggccttatatcctggtcggggcattcattgtgggaatgctgcttacgccgccagatgttttctcgcaaacgttgctggcgataccgatgtactgcctgtttgaaattggcgttttctgctcacgcttttatgtcggtaagcgacggacgcgcgacgaagataacgaggccgaaaccgaaaaggccgagcacactgaagactaa

SEQ ID NO: 12729 - protein, 259 aa, Salmonella typhimurium LT2
MAVEDTQPLITHLIELRKRLLNCIVAVLLIFLALIYFANDIYHLVAAPLIKQMPQGATMIATDVASPFFTPIKLTFMVSLILSAPVILYQVWAFIAPALYKHERRLVVPLLVSSSLLFYIGMAFAYFVVFPLAFGFLTHTAPEGVQVSTDIASYLSFVMALFMAFGVAFEVPVAIVLLCWMGITTPEDLRKKRPYILVGAFIVGMLLTPPDVFSQTLLAIPMYCLFEIGVFCSRFYVGKRRTRDEDNEAETEKAEHTED

SEQ ID NO: 12730 - DNA, 795 bp, Nostoc sp. PCC 7120
  CDS (1)..(795): transl_table=11
atgaccccctcacaagaagtagatacaataaccactcctgagattgatacagaaggatacggcaactcagatattgattctcccgatgagttgcctggtgaagtcgaaatgtctctattcgaccacctagaagaattaagacagcgcatcttttattcactgattgccgtagcagtgggtgtagttggctgcttcttcgctgtcaagccaattgttcagttactagaagtcccagcccaaggtgttaaatttctccagttagcccccggagaatatttctttgtttctctcaaagttgcaggctacactggcttgttactttctagtcccttcattctctaccaaattattttgtttgttcttcctggattgactcggcgcgaacgtggtctacttgggcctattgttttagggtcaagcgtgctgtttgccggcggtttagtctttgcttatttacttttgattcccgccgctttgaattttttcatcagttacggcgcggatgttgtggaacaactctggtctatcgacaaatattttgaatttgtactattgcttttatttagtactgggttggctttccaagttcccataattcaacttttactagctaatttagggattgtttcatcccaaagaatggtttctggctggcgatttgtaattatggcagccgtagttttaggtgctgtacttacaccttctactgaccccttaactcaaagtcttttggcgggcgcggtgcttgccctttactttggtggtattggtgtagtgaagctcacaggtaaatga

SEQ ID NO: 12731 - protein, 264 aa, Nostoc sp. PCC 7120
MTPSQEVDTITTPEIDTEGYGNSDIDSPDELPGEVEMSLFDHLEELRQRIFYSLIAVAVGVVGCFFAVKPIVQLLEVPAQGVKFLQLAPGEYFFVSLKVAGYTGLLLSSPFILYQIILFVLPGLTRRERGLLGPIVLGSSVLFAGGLVFAYLLLIPAALNFFISYGADVVEQLWSIDKYFEFVLLLLFSTGLAFQVPIIQLLLANLGIVSSQRMVSGWRFVIMAAVVLGAVLTPSTDPLTQSLLAGAVLALYFGGIGVVKLTGK

SEQ ID NO: 12732 - DNA, 804 bp, Agrobacterium tumefaciens str. C58
  CDS (1)..(804): transl_table=11
atgagcggggataccgaggacaagccgcagccgcttatcgaacacctgatggaactgcgcacacggctgatctggtcgctcggcgcgttttttatcgccttcatcgcctgtttcgccgtcgccaagcacctcttcaacctgctcgtcatcccctataagtgggcggtgatctgggccgggctggatgtggcgaaatcgtcgctgatctataccgcgccgcaggaattcttcttcacgcagatcaaggtcgccatgttcggcgcgatggtcatctcctttccggtgatcgcctcgcagctttataaattcgtggcgccgggtctctacaagaatgaacgcgccgcctttctgccgttcctgattgcgtcgccgatcctgttcctcatcggcgcggcactcgtctatttcttcttcacgcctatggtcatgtggttcttcctcgccatgcagcaattgcctgtggatggtgaagtggcgatttcgctgatgcccaaggtgtcggaatatctcagcctcatcatgacgctggtgctgtccttcggcctggtgttccagttgcccgtcgtcaccacgcttctggctcgtgtcggaattctgaccagcgactggctcagggaaaagcgcaaattcgccatcgtcatggcctttgtggtcgcggccgtgctgacaccgccggaccccatgtcccagatcggtcttgcgctgcctgcgatcattctctacgagatttccatctacatggctcgactcgtggagaggaaacgtgcggcggaatccaaaagcacggagctggaagagacctga

SEQ ID NO: 12733 - protein, 267 aa, Agrobacterium tumefaciens str. C58
MSGDTEDKPQPLIEHLMELRTRLIWSLGAFFIAFIACFAVAKHLFNLLVIPYKWAVIWAGLDVAKSSLIYTAPQEFFFTQIKVAMFGAMVISFPVIASQLYKFVAPGLYKNERAAFLPFLIASPILFLIGAALVYFFFTPMVMWFFLAMQQLPVDGEVAISLMPKVSEYLSLIMTLVLSFGLVFQLPVVTTLLARVGILTSDWLREKRKFAIVMAFVVAAVLTPPDPMSQIGLALPAIILYEISIYMARLVERKRAAESKSTELEET

SEQ ID NO: 12734 - DNA, 825 bp, Brucella melitensis 16M
  CDS (1)..(825): transl_table=11
gtgaaccgggacgaggatgaaatcgaacagagcgcagcgcctctgcttgaacacctgatcgaactgcgccgccgccttatttgggctatcctggcttttttcgtggcattcattttctgctttgctttcgcaaaacagctcttcaacctgcttgtggtgccgtatcaatgggccatcgactgggccggcatggaccgctccaaggcggaattgatctataccgcacctcaggaattcttcttcacgcaggtgaaggtggccatgttcggcggcattgtgctggccctcccggtcatcgccgcacagatttataaattcgtggctcccggtctctacaagcacgaacgcactgcatttctgccgttcctgatcgcgtcgcccattctgttcctgatcggcggcgcgctcgtctatttctttttcacgcccatggtgatgtggttcttcctcgccatgcagcagaccggcggcagcggcgaggtccagatttcgcttctgccgaaagtgtcggaatatctgagcctcatcatgacgctcatctttgcttttggcctggtcttccagttgccggtggtgacgagcctcatggcgcgtgtggggctggtgacttcggcggggctgaaggacaagcgcaaatatgcgatcgtcattgccttcgtcgcggctgcggtgctgaccccgccggacccggcgagccagatcggtcttgccttgccgacgatccttctttacgagatttcgatctttctggcgcgcatgatcgagaagaagcgggatgaggcgcaggcatctgccgacgctgataacaacgcttcctccacctga

SEQ ID NO: 12735 - protein, 274 aa, Brucella melitensis 16M
MNRDEDEIEQSAAPLLEHLIELRRRLIWAILAFFVAFIFCFAFAKQLFNLLVVPYQWAIDWAGMDRSKAELIYTAPQEFFFTQVKVAMFGGIVLALPVIAAQIYKFVAPGLYKHERTAFLPFLIASPILFLIGGALVYFFFTPMVMWFFLAMQQTGGSGEVQISLLPKVSEYLSLIMTLIFAFGLVFQLPVVTSLMARVGLVTSAGLKDKRKYAIVIAFVAAAVLTPPDPASQIGLALPTILLYEISIFLARMIEKKRDEAQASADADNNASST

SEQ ID NO: 12736 - DNA, 1023 bp, Arabidopsis thaliana
  CDS (1)..(1023)
atgagcagcacaagcactagttctgctcttatccaccatttccgcctcaccactcgcaacttgggttcgcctacaaagcagcgttgtccttacgctgtaactttctgcaattcgtggagggaagctggactccgatactccgtcacgcaacgccggagcaaaggctttgggccggtgtcagctctcaatgacgacgattcaccaacagagaccacccccggcgttggctctgctgtagaagacagaccaccagattcatctgaagatagatcaagttcggtctatgagtttctgtatccccgtaaagaggagctccctgatgacaaagaaatgactattttcgaccatctcgaggagctccgggagagaatattcgtctctgttttggctgtaggagctgcaatcttgggatgcttcgccttctccaaagatcttattgtctttcttgaagctcccgtcaaaactcagggtgtacggtttctccagcttgctcctggcgaatttttcttcacaactttaaaggtctccggttattgcgggcttctactagggagcccagtgatcctgtatgagattatagcttttgtccttcccggtctgacacgggctgagagaaggtttctggggccaattgtatttggctcctcattgctcttctatgctggacttgctttctcctactgggttttaacccctgcagccttgaatttctttgtgaattacgctgaaggtgtggtagaatctctgtggtctatcgaccagtactttgagtttgtactagtgcttatgttcagcacaggcctttctttccaggttccagtcattcagttactcctgggacaagtaggggttgtgtcgggagatcaaatgctatcaatttggagatatgtggtggtaggtgcggtggttgcagcagctgttgtcacaccctcgacagaccctgtcactcaaatgctcctagcaacaccgcttctggggctctacttgggtggtgcatggatggtcaagctcacaggtcggtga

SEQ ID NO: 12737 - protein, 340 aa, Arabidopsis thaliana
MSSTSTSSALIHHFRLTTRNLGSPTKQRCPYAVTFCNSWREAGLRYSVTQRRSKGFGPVSALNDDDSPTETTPGVGSAVEDRPPDSSEDRSSSVYEFLYPRKEELPDDKEMTIFDHLEELRERIFVSVLAVGAAILGCFAFSKDLIVFLEAPVKTQGVRFLQLAPGEFFFTTLKVSGYCGLLLGSPVILYEIIAFVLPGLTRAERRFLGPIVFGSSLLFYAGLAFSYWVLTPAALNFFVNYAEGVVESLWSIDQYFEFVLVLMFSTGLSFQVPVIQLLLGQVGVVSGDQMLSIWRYVVVGAVVAAAVVTPSTDPVTQMLLATPLLGLYLGGAWMVKLTGR

SEQ ID NO: 12738 - DNA, 945 bp, Corynebacterium glutamicum ATCC 13032
  CDS (1)..(945): transl_table=11
atgtccattgttgagcacatcaaagagtttcgacgccgacttcttatcgctctggcgggcatcctcgtgggcaccattatcggctttatttggtacgatttctcattttggcagatccccactttgggcgagctgctgagggatccgtactgttctctgcctgctgaatcccgctgggccatgagcgactcagaggaatgtcgactgctcgcaaccggcccgtttgatccattcatgcttcgccttaaagtagcggcgttggtgggtatggttcttggctcacccgtgtggctgagccagctgtggggctttatcaccccaggtttgatgaagaatgagcgccgttacaccgcaatcttcgtcacgattgctgttgtgctgtttgtcggcggtgctgttcttgcgtacttcgtcgttgcatatggtttggagttcctccttaccattggtggagacacccaggcagcggccctgactggtgataagtacttcggattcttgctcgcgttgttggcgattttcggcgtgagcttcgaagttccactggtgatcggcatgctcaacattgtgggtatcttgccttacgatgccattaaagataagcgacgcatgatcatcatgattttgttcgtgttcgctgctttcatgacacccggccaggatcctttcaccatgttggtgttggcgctttcactcaccgttctggtagagcttgccctgcagttctgtcgtttcaacgacaaacgccgggacaagaagcgcccagaatggcttgatggcgatgacctctctgcatcaccactggatacttctgctggtggagaagatgctccaagcccagtcgaaaccccagaggcggtggagccttcgcggatgctgaacccaagtggggaggcgtcgataagctataaacccgggcgcgccgacttcggtgacgtgctctag

SEQ ID NO: 12739 - protein, 314 aa, Corynebacterium glutamicum ATCC 13032
MSIVEHIKEFRRRLLIALAGILVGTIIGFIWYDFSFWQIPTLGELLRDPYCSLPAESRWAMSDSEECRLLATGPFDPFMLRLKVAALVGMVLGSPVWLSQLWGFITPGLMKNERRYTAIFVTIAVVLFVGGAVLAYFVVAYGLEFLLTIGGDTQAAALTGDKYFGFLLALLAIFGVSFEVPLVIGMLNIVGILPYDAIKDKRRMIIMILFVFAAFMTPGQDPFTMLVLALSLTVLVELALQFCRFNDKRRDKKRPEWLDGDDLSASPLDTSAGGEDAPSPVETPEAVEPSRMLNPSGEASISYKPGRADFGDVL

SEQ ID NO: 12740 - DNA, 951 bp, Streptomyces coelicolor A3(2)
  CDS (1)..(951): transl_table=11
ttgctgaagcctgcccgcaacaaggagaaggaccccgaggggcggatgccgctcgcggaacaccttcgtgagctccgcaaccggctcgcgaaggcgctgctggccatcgtcgtcgtcacggtggtcgccgccttcttctatcagtggatcatcaacgccctcacggatccgatcctccagtcgatcggctgtgagaagtcgttcgcggagctggcccagtcggaggccggctcggagccgtgcgcgcagatcaccatcaacggtctgctcggccccttcaccctggcgctgaaggtgtccctgacggccggtgtcgtgctggcctcgccggtctggctctaccagctgtgggcgttcgtcgccccggggctgcacaggaacgagaagaagtacgcctacgcgttcgtcgccaccggcgccccgctcttcctcgccggcgcgtacttcgcctacgcggtgctccccacctcggcgaaggtgctgatcgagttcacgccgaacgacgtcgacaacctgctgccgctggacgagctgctcgacctcgtcacgcgcatggtggtcgtcttcggtctctccttcgagctgcccctgctgctggtcatgctcaacttcaccggcgtgctgaccggcaagcggatgctcggctggtggcgcgcgatgatcatgggcatcacgctgttcgcggccatcgccacgcccagcaccgacccgctgacgatgatcatgctggccggtccgatctgggtcctgtacttcgccgcggtcgtcgtctccctgctgaacgaccgccgcaaggcccgcctcgaggccctggagcccgacgacgacgaggcgtccgacctggacctcacccccgaggacatcggcgaggtcgagcccgtgaccaccgcccgtgccctgcccgagcaggccacgaaggaccgggtcaacggctacgacgacgtgacctga

SEQ ID NO: 12741 - protein, 316 aa, Streptomyces coelicolor A3(2)
MLKPARNKEKDPEGRMPLAEHLRELRNRLAKALLAIVVVTVVAAFFYQWIINALTDPILQSIGCEKSFAELAQSEAGSEPCAQITINGLLGPFTLALKVSLTAGVVLASPVWLYQLWAFVAPGLHRNEKKYAYAFVATGAPLFLAGAYFAYAVLPTSAKVLIEFTPNDVDNLLPLDELLDLVTRMVVVFGLSFELPLLLVMLNFTGVLTGKRMLGWWRAMIMGITLFAAIATPSTDPLTMIMLAGPIWVLYFAAVVVSLLNDRRKARLEALEPDDDEASDLDLTPEDIGEVEPVTTARALPEQATKDRVNGYDDVT

SEQ ID NO: 12742 - DNA, 738 bp, Chlorobium tepidum TLS
  CDS (1)..(738): transl_table=11
atgagcttccttgatcatctcgaagagcttcgctggaggctcatctggtctcttatcgcatttgttgtagcggccatcgttaccgcattcttttcagactttctcgtcaaccaggtactcatcagaccactaaaagagagtggcccgaacattcatttgcagaaccttgtgccctacggccagatttcgctctacctgcaagtgattgtttttgcggcatttgtgctcgcgttcccctttctggtctggcagatatggcaattcgtcgaacctggcttgcatgaaaccgaaaaagcagccagccgttttatcattttcttcatttcgatctgcttcttctcgggcatcgctttcggttactttgtcttcctgccaatctcactgaaattctttgcgggattcggctccgaactcatcgccaacaacatcgccatccaggactacatcagtttcttcatgggcaccctgctgacaaccggtctggttttcgagctgcccttcgtatcttatgtgctctcgaaaatcggtttgctaaccccggccttcatgcgcttttaccgtcgccatgcggtcgtagcgctgctgatcatcgccgccatcgtcacgccgtcaaccgatatggtcacacaggcagtcatcgccattccgatgatcgtgctgtacgaaatcagcatctacatttcagccgctgtacagaaaaagcgcaacaagaagatgatggaggagggcgttgcatga

SEQ ID NO: 12743 - protein, 245 aa, Chlorobium tepidum TLS
MSFLDHLEELRWRLIWSLIAFVVAAIVTAFFSDFLVNQVLIRPLKESGPNIHLQNLVPYGQISLYLQVIVFAAFVLAFPFLVWQIWQFVEPGLHETEKAASRFIIFFISICFFSGIAFGYFVFLPISLKFFAGFGSELIANNIAIQDYISFFMGTLLTTGLVFELPFVSYVLSKIGLLTPAFMRFYRRHAVVALLIIAAIVTPSTDMVTQAVIAIPMIVLYEISIYISAAVQKKRNKKMMEEGVA

SEQ ID NO: 12744 - DNA, 822 bp, Thermosynechococcus elongatus BP-1
  CDS (1)..(822): transl_table=11
atgacgcgatcgcccgatattccagatattgagagtccctctcctaactcctcagccattgctgacaggtccttggaggaaaacatcccccttgacccggaggatgaattgcccaacgaagtggaaatgtccctctgggatcaccttgaggagttgcggcagcggctctttgttgtcctcggcaccgttgctgttactattgggctctgctttagccaagtccgctggatcattgagttccttgaaaaaccagcccaaggcgccaagttcctgcaactgagtccgggggaatacttttttgtctcctgtaaagcggcggcctacagcggcattctgctggccaccccaatgattctctaccaggccatccgttttatcctgccgggattgacacggcgtgagcaacgcttgctggcaccggtggttttcggttcatcccttctctttattgctggtttggtgtttgcctataccctcttggctcccgctgccctcggctttttcattagctatggggcagaggtggttgagcaactgtggtcgatcgatcgctatgtggactttattttgctgttgctccttgccactggccttgcctttcaagtccccattctccagatggttctcattgccctaggcattgtctcaattgcgcaactccttagccaatggcgctacgtggtgatgattgccgtggccgtggcagcggtcttgaccccctccatcgacccgattactcagggactgttggcggctgcgctgcttgccctctactttacggggattggcttggcgaagctaatggggatggggcgtccttaa

SEQ ID NO: 12745 - protein, 273 aa, Thermosynechococcus elongatus BP-1
MTRSPDIPDIESPSPNSSAIADRSLEENIPLDPEDELPNEVEMSLWDHLEELRQRLFVVLGTVAVTIGLCFSQVRWIIEFLEKPAQGAKFLQLSPGEYFFVSCKAAAYSGILLATPMILYQAIRFILPGLTRREQRLLAPVVFGSSLLFIAGLVFAYTLLAPAALGFFISYGAEVVEQLWSIDRYVDFILLLLLATGLAFQVPILQMVLIALGIVSIAQLLSQWRYVVMIAVAVAAVLTPSIDPITQGLLAAALLALYFTGIGLAKLMGMGRP

SEQ ID NO: 12746 - DNA, 777 bp, Shigella flexneri 2a str. 301
  CDS (1)..(777): transl_table=11
atgtctgtagaagatactcaaccgcttatcacgcatctgattgagctgcgtaagcgtctgctgaactgcattatcgcggtgatcgtgatattcctgtgtctggtctatttcgccaatgacatctatcacttggtatccgcgccattgatcaagcagttgccgcaaggttcaacgatgatcgccaccgacgtggcctcgccgttctttacgccgatcaagctgacctttatggtgtcgctgattctgtcagcgccggtgattctctatcaggtgtgggcatttatcgccccagcgctgtataagcatgaacgtcgcctggtggtgccgctgctggtttccagctctctgctgttttatatcggcatggcattcgcctactttgtggtctttccgctggcatttggcttccttgccaataccgcgccggaaggggtgcaggtatccaccgacatcgccagctatttaagcttcgttatggcgctgtttatggcgtttggtgtctcctttgaagtgccggtggcaattgtgctgctgtgctggatggggattacctcgtcagaagacttacgcaaaaaacgcccgtatgtgctggttggtgcattcgttgtcgggatgttgctgacgccgccggatgtcttctcgcaaacgctattggcgatcccgatgtactgtctgtttgaaatcggtgtcttcttctcacgcttttacgttggtaaagggcgaaatcgggaagaggaaaacgacgctgaagcagaaagcgaaaaaactgaagaataa

SEQ ID NO: 12747 - protein, 258 aa, Shigella flexneri 2a str. 301
MSVEDTQPLITHLIELRKRLLNCIIAVIVIFLCLVYFANDIYHLVSAPLIKQLPQGSTMIATDVASPFFTPIKLTFMVSLILSAPVILYQVWAFIAPALYKHERRLVVPLLVSSSLLFYIGMAFAYFVVFPLAFGFLANTAPEGVQVSTDIASYLSFVMALFMAFGVSFEVPVAIVLLCWMGITSSEDLRKKRPYVLVGAFVVGMLLTPPDVFSQTLLAIPMYCLFEIGVFFSRFYVGKGRNREEENDAEAESEKTEE

SEQ ID NO: 12748 - DNA, 762 bp, Pseudomonas putida KT2440
  CDS (1)..(762): transl_table=11
atgagtatcgccatggaccctgccgcgagcatgcccctgaccgaacacctgcgcgacctgcgcaaacgcctggtgcgttgcctggcgctggtggcattggtgttcgccggcctgttcccctttgcccagacactgtacacgctcatatccgagccgctacggcgctttttgccggaaggcgcgagcatgatcgccaccagcgtcacctcgccctttctggcaccgttcaagctgaccgcgatgtgcgccctgttcctggccatgccgctgctgctgcatcaggcctggggttttctggcgccggggctgtaccgccgtgaacggcgcattgccctgccgctgctggtatcgagcatcgttttgttctatgccggcatggcgttcgcgttctttctggttttcccgatgatgttcggtttctttgccagcgtgacaccggacggcgtggcgatgatgaccgatatcagccagtacctggactttatcctggcgctgtttctggcgttcgggctggcgttcgagatcccggtggcgacgttcatcgtggtctgggcagggttggccgatgtggccacattgcggcgcagcaggccctacgtggtcgtcgggtgctttgtggtggggatgatcctgacaccgccggatgtgttttcgcagacgatgctggcagtgccgatgtgggtgctgttcgagatggggttgctggcttgtggaatgttgaagcggccggagccaggcaaggagattgtggctggattgtag

SEQ ID NO: 12749 - protein, 253 aa, Pseudomonas putida KT2440
MSIAMDPAASMPLTEHLRDLRKRLVRCLALVALVFAGLFPFAQTLYTLISEPLRRFLPEGASMIATSVTSPFLAPFKLTAMCALFLAMPLLLHQAWGFLAPGLYRRERRIALPLLVSSIVLFYAGMAFAFFLVFPMMFGFFASVTPDGVAMMTDISQYLDFILALFLAFGLAFEIPVATFIVVWAGLADVATLRRSRPYVVVGCFVVGMILTPPDVFSQTMLAVPMWVLFEMGLLACGMLKRPEPGKEIVAGL

SEQ ID NO: 12750 - DNA, 789 bp, Pseudomonas putida KT2440
  CDS (1)..(789): transl_table=11
atgagcgagaacccggaacacgaccagccaatgccgctggtttcgcacctgaccgaactgcgcacccgcctgctgcgctgcgttgccgtcattttcctgatctttgccgggctgttctccttcgcccagcagatctacacactggtttccgcgccactgcgcgagcacttgccggccaatgcaacgatgatcgccaccgatgtggcctcgccgttcctcacgccgttcaagctgaccatgatcgtctcgctgttcctggccatcccgttcatccttcagcagatctgggggtttatcgcgccagggctgtaccgccatgaaaagcgcatcgccattccactgttggtgtcgagcatcttcctgttctatgccggtatggcattcgcctatttcctggtattcccgctgatcttcggtttcttcgccagcgctacaccagaaggcgtttcgatgatgaccgacatcgcaagctacctcgacttcgtgatgacgctgttcttcgcctttggcgtggccttcgaaatcccagtggcggtggtgctgctggtgtggatcggcgtggtcgacgtgaagtacctgaagaaagtccgcccgtatgtgatcatcggctgcttcgtggtcggcatggtcctcaccccaccggacatcttctcccagaccctgctggccgtgcccatgtggctgctgttcgagatcggcgtgctgtgcggcagcctgatccgcaagcgcagcgcccacgacgaaaccgccgacgaccataacgaccagccaccagcgacccaaccgtga

SEQ ID NO: 12751 - protein, 262 aa, Pseudomonas putida KT2440
MSENPEHDQPMPLVSHLTELRTRLLRCVAVIFLIFAGLFSFAQQIYTLVSAPLREHLPANATMIATDVASPFLTPFKLTMIVSLFLAIPFILQQIWGFIAPGLYRHEKRIAIPLLVSSIFLFYAGMAFAYFLVFPLIFGFFASATPEGVSMMTDIASYLDFVMTLFFAFGVAFEIPVAVVLLVWIGVVDVKYLKKVRPYVIIGCFVVGMVLTPPDIFSQTLLAVPMWLLFEIGVLCGSLIRKRSAHDETADDHNDQPPATQP

SEQ ID NO: 12752 - DNA, 741 bp, Vibrio parahaemolyticus RIMD 2210633
  CDS (1)..(741): transl_table=11
atgtctaccgtcgagcagacacagcctttaattagtcatttgttggagcttcgcaaccgactactgcgttcaattttggcagtgttggtggtgtttgtcgggctaatttatttctctaaccacatttacgagtttatctccgcacctttggttgaacgtttaccagaaggcgcgacgatgatcgcaaccgatgtggcatcaccatttttcactcctctaaaactgacgcttatcgcttcagtatttgttgcggtgccgtttattttgtatcaggtttgggcctttgttgcgccaggtctgtacaagcacgaacgtcgtttgatcatgccattgctgttttctagctcgttgctgttttactgtggcgtggcctttgcgtattacgtggtatttccactggtatttggcttctttactgcgatttctctcggtggggttgagtttgcgaccgatatttcgagctacctagattttgtgctggcgctgtttatggcgtttggtattgcgttcgaagtgccagtggcgatcatcctactttgttggactggggcgaccacgccgcaagacctaaaagagaagcgtccatacattattgtggctgcgttcgttgtcggcatgctgctgacgccgccagacatgatttcgcagacgttacttgcgatcccaatgtgcttactgtttgaggttggtctgttctttgctcgtttttacactcgtaaagatgaggaagaagaggagtaa

SEQ ID NO: 12753 - protein, 246 aa, Vibrio parahaemolyticus RIMD 2210633
MSTVEQTQPLISHLLELRNRLLRSILAVLVVFVGLIYFSNHIYEFISAPLVERLPEGATMIATDVASPFFTPLKLTLIASVFVAVPFILYQVWAFVAPGLYKHERRLIMPLLFSSSLLFYCGVAFAYYVVFPLVFGFFTAISLGGVEFATDISSYLDFVLALFMAFGIAFEVPVAIILLCWTGATTPQDLKEKRPYIIVAAFVVGMLLTPPDMISQTLLAIPMCLLFEVGLFFARFYTRKDEEEEE

SEQ ID NO: 12754 - DNA, 750 bp, Haemophilus ducreyi 35000HP
  CDS (1)..(750): transl_table=11
atgtcaattgaagaatcacagcctctgattagccacttagttgaattaagaaaccgcttattgcgtgcaattgtttgtgttttggttgttttttgtatgttggtgtattgggcaaatgatatctatacattgcttgctacaccgctcactgaaaactttcctgcgggcgcaacaatgattgcaaccaatgttactacgcctttttttactccacttaagttaaccggcgtggtggcaatcttcttgtccgtgccatttattttgtatcaaatttgggcatttgtcgcaccagcactctataagcacgaaaaacgcttggtttatccattactcgtgtctagtacattgttattttatactggggttgctttcgcctattatgttgtatttccactagtatttggctttctgaccagtaccgcaccagaaggtgtacaagtagccactgatatcagtagctatttagattttgtcttaactattttcttagcttttggtatttgctttgaagtgcctgtagccatcattttactttgttggtctggcgtaacttcagctgatgatttacgaagcaaacgtccatatattattgtcgctgcatttgcaattggtatgttattaacaccgcctgatgttttttctcaaacgttgttagccattccaatgtgtttattatttgaagttggcctattcttctctaaattctataagcctcgtgatgagcaatcaccaacagaaaatattgaataa

SEQ ID NO: 12755 - protein, 249 aa, Haemophilus ducreyi 35000HP
MSIEESQPLISHLVELRNRLLRAIVCVLVVFCMLVYWANDIYTLLATPLTENFPAGATMIATNVTTPFFTPLKLTGVVAIFLSVPFILYQIWAFVAPALYKHEKRLVYPLLVSSTLLFYTGVAFAYYVVFPLVFGFLTSTAPEGVQVATDISSYLDFVLTIFLAFGICFEVPVAIILLCWSGVTSADDLRSKRPYIIVAAFAIGMLLTPPDVFSQTLLAIPMCLLFEVGLFFSKFYKPRDEQSPTENIE

SEQ ID NO: 12756 - DNA, 801 bp, Bordetella pertussis Tohama I
  CDS (1)..(801): transl_table=11
gtgagccaggacgcctccaacgacaatcccgaccagcagcaggacagcttcatctcgcacctggtcgaactgcgcagccgcctgctcaaggccgccggcgccgtggtcgccgtattcatcgtgctgttcctgtatcccggcgcctcggccatctacgacgtgctggcccagcccatgctggcttcgctgcccgaaggcacccgcatgatcgccaccggcgtcatcacgccgttcatggtgcccgtcaaggtcaccatgatggccgccttcgtggtggccctgccggtggtgctgtaccaggcctgggccttcgtcgcccccggcctgtacaagcacgagaagcgcctggcgctgccgctgatcctctccagcacgctgctgttcatcatcggcatggcgttctgctatttcttcgtgttccgcacggtctttcacttcatcgccacgttcgcgccgcagtcgatcacgccggcgcccgacatcgaggcctatctcagcttcgtcatgacgatgttcatggccttcggcatcacgttcgaggttccggtggccgtggtgctgctggtcaagaccggcatcgtcgaagtggccaagctgcgcgccgcgcgcggctacgtcgtggtgggcgccttcgtcatcgcggccgtggtcaccccgcccgacgtggtcagccagttcatgctggccgtgccgctgtgcctgctgtacgaggtaggcctgctgtgcgcgcgcctggtcacgcccagacgccgcggcgaggaagaatccgaagacgaccaggccctgaccgagcggcactga

SEQ ID NO: 12757 - protein, 266 aa, Bordetella pertussis Tohama I
MSQDASNDNPDQQQDSFISHLVELRSRLLKAAGAVVAVFIVLFLYPGASAIYDVLAQPMLASLPEGTRMIATGVITPFMVPVKVTMMAAFVVALPVVLYQAWAFVAPGLYKHEKRLALPLILSSTLLFIIGMAFCYFFVFRTVFHFIATFAPQSITPAPDIEAYLSFVMTMFMAFGITFEVPVAVVLLVKTGIVEVAKLRAARGYVVVGAFVIAAVVTPPDVVSQFMLAVPLCLLYEVGLLCARLVTPRRRGEEESEDDQALTERH

SEQ ID NO: 12758 - DNA, 747 bp, Prochlorococcus marinus str. MIT 9313
  CDS (1)..(747): transl_table=11
gtggaaatgcctctggttgatcacctggaggaattacggcagcgagtgctgcgcagtctgcttgctgttgttttagcggcaggtgcctgcctgctcatggtgaagccgctcgtacggctgttggaagctccggctggatccattcactttcttcagctggccccaggagagtttctattcgtctcaatcaaggtggcaggctacgcaggcttaacacttgcactgccctatgtgctctaccaagggcttggatttgtattgcctggcctcactcaacgggaacgacgtctgatcgcgccagcagtagctggatcagcgatcttgtttctagccggccttgccttcgcctggtgggccctagcaccagcagctctgaagtttctggtgagttatggcgccgatgtagtcgagccactgtggtcaattgagcggtatctcgattttgtgcttctgctgatgctggctaccggcctggcctttcagctacctgtgctccagttgatattaggaattctggggttattgcactggcaacccatgttgagtgcctggcgatgggtcgtgcttggtgccgccttggctggagctgtattgaccccatccactgatccaatcaccatgctgctgctggctggagccattacagcccttttcctgattggagtaggcctagtggcgctaactgatcaattcaggccagacatgcctgcaagcgaaagcgaccagcctcctacagccacaaattga

SEQ ID NO: 12759 - protein, 248 aa, Prochlorococcus marinus str. MIT 9313
MEMPLVDHLEELRQRVLRSLLAVVLAAGACLLMVKPLVRLLEAPAGSIHFLQLAPGEFLFVSIKVAGYAGLTLALPYVLYQGLGFVLPGLTQRERRLIAPAVAGSAILFLAGLAFAWWALAPAALKFLVSYGADVVEPLWSIERYLDFVLLLMLATGLAFQLPVLQLILGILGLLHWQPMLSAWRWVVLGAALAGAVLTPSTDPITMLLLAGAITALFLIGVGLVALTDQFRPDMPASESDQPPTATN

SEQ ID NO: 12760 - DNA, 900 bp, Synechococcus sp. WH 8102
  CDS (1)..(900): transl_table=11
gtgacccactccgggccgagacccgactcagcagcctcgaggcttctagcctggccattagaaagggctgacgcgtcggccagatcagccatcccctccgtgcccgacagctccgacggtccagttctcaagcccccgccaccgatccgcatcagcggtggcaccgacccgagcgcattgcccaacgaggtggagatgcctctggtggatcaccttgaggaactgcgccagcgcgtgctgcgcagcctgctggcggtggtcgtttcagccctggtctgcctgttggcggtgaagccgttggtgcgactgctggaggttccggcccagggaattcacttcctgcagttggcccccggtgaattcctgttcgtgtcgctgaaggtagccggctacgccggcctcacgcttgcccttccctacgtgctgtttcagctgctggcctttgtgctccctggactaacgattcgggaacgtcggcttatcgcacccgcggttgccggatctgcagtgttgtttctggcggggattgcttttgccgggtgggccctggtccctgcagccctgcgctttctggtgagctacggcgccgatgtggtcgagccgctctggtcgatcgagcgttatctggatttcgttctgttgctgatgctggccacaggcctggcctttcagttgccggtgctgcagctgttgctgggcgtgttggggctggtgcgctggcgcacgatgctgggggcctggcgttgggtggtgctgggctcagccctcgctggggccgtgctgaccccctcaaccgacccaatcacgatgctgttgttggcgggcgccatcacagccttgttcctgatcggcgtggggctggtggcattcaccgagagcctcagaccagaaactccctga

SEQ ID NO: 12761 - protein, 299 aa, Synechococcus sp. WH 8102
MTHSGPRPDSAASRLLAWPLERADASARSAIPSVPDSSDGPVLKPPPPIRISGGTDPSALPNEVEMPLVDHLEELRQRVLRSLLAVVVSALVCLLAVKPLVRLLEVPAQGIHFLQLAPGEFLFVSLKVAGYAGLTLALPYVLFQLLAFVLPGLTIRERRLIAPAVAGSAVLFLAGIAFAGWALVPAALRFLVSYGADVVEPLWSIERYLDFVLLLMLATGLAFQLPVLQLLLGVLGLVRWRTMLGAWRWVVLGSALAGAVLTPSTDPITMLLLAGAITALFLIGVGLVAFTESLRPETP

SEQ ID NO: 12762 - DNA, 744 bp, Chromobacterium violaceum ATCC 12472
  CDS (1)..(744): transl_table=11
atgaacgaacaaccgctgctcgcgcacctgatcgagctgcgcacccggctggtgcgcgcgctgctcggcatcgccctggtcttcctggggctgttccactggtcgtccgacatctaccacctgttggccaagccgctgctggacgctttgccgcagggcggcagcatgatcgccaccgaggtgacctccaccttcttcgtgccgatgaaggtgaccatgctggtggccttcctgatctcgctgcccaacacgctgtaccagatctgggccttcgtcgctcccggcctgtacagccacgagaaaaagctggtgctgccgctggtgctggccagcctgctgctgttcctcaccggcatggccttcgcctatttcctggtgtttccggtggtgttccacttcatgtcggcggtgacgccggccggcgtcagcatgatgacggacatcgacaaatacctgtccttcgtcctgggcatgttcctggccttcggcaccacgttcgaggtgccggtgctggtggtgctgctgacgaggatgggggtggtgacggtggccaagctgcgcgaggcgcggccctacgtgatcgtcggcgcctttgttgtcgccgccatcgtcacgccgcccgacgtgctgtcgcagacgctgctggcggtgccgctgtggctgctgttcgaggccggggtgctggtggcggcgctgctggagcgcaaggcgcgcgcccgcgaacaggcggagtccgcgccttga

SEQ ID NO: 12763 - protein, 247 aa, Chromobacterium violaceum ATCC 12472
MNEQPLLAHLIELRTRLVRALLGIALVFLGLFHWSSDIYHLLAKPLLDALPQGGSMIATEVTSTFFVPMKVTMLVAFLISLPNTLYQIWAFVAPGLYSHEKKLVLPLVLASLLLFLTGMAFAYFLVFPVVFHFMSAVTPAGVSMMTDIDKYLSFVLGMFLAFGTTFEVPVLVVLLTRMGVVTVAKLREARPYVIVGAFVVAAIVTPPDVLSQTLLAVPLWLLFEAGVLVAALLERKARAREQAESAP

SEQ ID NO: 12764 - DNA, 726 bp, Wolinella succinogenes DSM 1740
  CDS (1)..(726): transl_table=11
atgtttgaagagctaaaaccccatattcaagagctaagaaagcgtctcattaacgcggttgttgctctttttattgccttttttatctgttttttcttttgggaaggaatcttagactggatgatcgcccccctcaaagccgccttgcccgcaggtagcaacgtgatctttactgaggtaggagaggctttcttcactgccattaaagtctccttttttagcgctttcatgttctccttgcccgtaattttttggcaagtttggctttttgtcgcccctggactctaccaaaacgaaaagatgctcgtgctcccctttgtcttttttggaacactcatgtttgtcacaggcgcactttttgcctattatgtggtctttccctttggcttcacctatctcatcaactttggaagcaccctcttcacggctctccctagcgttggattttatgtcactttttttgccaagctcatgattggctttgggattgcctttgagcttcctgtcgttacctttttccttgccaagcttggtctagtcaccgataaaacccttagggattttttcaaatatgccatcattattatctttatcgtggccgccatcctcacccctcctgatgtcatcacgcaattcatgatggcgattcctttgaccttcctctattgggtctctatcctcatcgccaaaatggtcaatcctgaaacaagccctaatgaagagtaa

SEQ ID NO: 12765 - protein, 241 aa, Wolinella succinogenes DSM 1740
MFEELKPHIQELRKRLINAVVALFIAFFICFFFWEGILDWMIAPLKAALPAGSNVIFTEVGEAFFTAIKVSFFSAFMFSLPVIFWQVWLFVAPGLYQNEKMLVLPFVFFGTLMFVTGALFAYYVVFPFGFTYLINFGSTLFTALPSVGFYVTFFAKLMIGFGIAFELPVVTFFLAKLGLVTDKTLRDFFKYAIIIIFIVAAILTPPDVITQFMMAIPLTFLYWVSILIAKMVNPETSPNEE

SEQ ID NO: 12766 - DNA, 786 bp, Gloeobacter violaceus PCC 7421
  CDS (1)..(786): transl_table=11
atgaccgctacgcgccccgacttcgaacaagaagacaatccgcccgagaccgacgacgccctcgactccaaggacgaatttccggacgaggtcgagatgaccctgggggagcacctcgaagagttgcgcacccgcctcttctgggcgcttggcacctttatcgcggccactatcggctgttttatcttcgtcaaaccgatcgtcgatctgctgcagaagccggcgggcacgacggtcaaattcatccagaccatcccaggcgaatttttctttgtctcgtttaaagtggcggcctacagcggtctgatggtcgcggccccgatgattctctatcaaattgtgcgcttcgtgctgccggggctcagtcgccgcgagcgcaaactcatcctgcccatcgtggtcggctccagtgtgctgttcgtcgtgggcgtcgtctttgcctttatggtcctggccccggccgccctcaacttttttgtgagctacggcgacggcgtcgtcgatcagacctggacgatcgagcgctatttcgacttgatgttcgtgatgctgatcagcaccggcatcgtctttcaggtaccgatcttgcaggtgctgctcggggtgacggggatcgtctcctccgagcggatgttctcggtctggcgctatgtgagcgtcttcgcggtggtgctgggggccgtcgtcaccccctcgaccgatccgctcacccagacctttctagccggggcggtgacaatcctctattttggcggcgcgggcgcggtcaaactgattggcaagtaa

SEQ ID NO: 12767 - protein, 261 aa, Gloeobacter violaceus PCC 7421
MTATRPDFEQEDNPPETDDALDSKDEFPDEVEMTLGEHLEELRTRLFWALGTFIAATIGCFIFVKPIVDLLQKPAGTTVKFIQTIPGEFFFVSFKVAAYSGLMVAAPMILYQIVRFVLPGLSRRERKLILPIVVGSSVLFVVGVVFAFMVLAPAALNFFVSYGDGVVDQTWTIERYFDLMFVMLISTGIVFQVPILQVLLGVTGIVSSERMFSVWRYVSVFAVVLGAVVTPSTDPLTQTFLAGAVTILYFGGAGAVKLIGK

SEQ ID NO: 12768 - DNA, 783 bp, Photorhabdus luminescens subsp. laumondii TTO1
  CDS (1)..(783): transl_table=11
atggctgttgatgatactcaaccacttatcagtcaccttattgaactgcgtaagcgaattctaaacagtttacttactgtattagtggtttttttagcgttggtttatttttctaacgacatctatcagatgatttctgcacctttgattaagcagttgcctcaaggtgccagtatgatagcgacagatgttgcttcccccttttttacgccaataaaactgaccattatggtgtcaatattcgtatctgcacctatggttctctatcaagtgtgggcatttattgcacctgcgttatataagcatgaacgccgcttgatgatccctctgcttgtttccagtagcctgctattttatttggggatggcgtttgcttattttgttgtatttccgatagcttttggattctttgctaaaacggcacctgaaggagtgctgattgcaacggatatcagtaactacttaagctttgtcatggcactgtttatggcctttggtgtctcttttgaagtacccgttgccattattttattatgttggagtggggtagttacacccgaatctttgaagaaaaagcgtccgtatattttggtcggggcctttgttgttggcatgttgttaacgccgccggatgttttctcgcaaaccttgctggcgattcctatgtatttgctgtttgaactggggattttgctctcccgtttttataccgggcagcggaaattgggggatcgttcagaggaagatgagcaggaagcgccagaagtgaatacggaaaagtga

SEQ ID NO: 12769 - protein, 260 aa, Photorhabdus luminescens subsp. laumondii TTO1
MAVDDTQPLISHLIELRKRILNSLLTVLVVFLALVYFSNDIYQMISAPLIKQLPQGASMIATDVASPFFTPIKLTIMVSIFVSAPMVLYQVWAFIAPALYKHERRLMIPLLVSSSLLFYLGMAFAYFVVFPIAFGFFAKTAPEGVLIATDISNYLSFVMALFMAFGVSFEVPVAIILLCWSGVVTPESLKKKRPYILVGAFVVGMLLTPPDVFSQTLLAIPMYLLFELGILLSRFYTGQRKLGDRSEEDEQEAPEVNTEK

SEQ ID NO: 12770 - DNA, 1095 bp, Corynebacterium diphtheriae NCTC 13129
  CDS (1)..(1095): transl_table=11
atgagcaacgttgatgttcagtccactaccaaggcgacgagggttcgtcggaatcggattcataatcctttttctgtgcgtccgaaacgtcctaccgatggctcgatgtctcttgtagagcatttgcaagaacttcgccgtagagtgatcatatcagttttggctttgattgttggcaccatcgtggggttcatgtggtatcaacacccagtcaatctccattggtttacgctgcgttcccttggcgatatcttgcgcggaccatactgttcgcttccacctgaaaacagggcagtcttaactcttgacggtgaatgcagactcatcgccaccagcccgtttgagatgtttatgcttcgcctcaaagttggcgcgcttgcaggttcagtcttcgcttcgccagtgtggctgcaacagctgtgggctttcatcacgccaggattgatgaaaaacgaacgccggtggacgttatcttttgtcacagcggcggttaccttattcgtttccggtgctgttttagcctattttgttatcgcaattggtctgcagtttctactcacaatgggtggcgagtttcaggtgaccgcgttgtctggcggccaatacttcaatttcatcctcaccctgcttgtcatgttcggtgtgagctttgaggtgccacttattatcgcaatgctcaatctcgccggaattttaagctatgaatcaatcaaagataagcgacgcatcataatcgtatctgtctttatttttgctgcattcatgacaccaggccaagatccatattcaatggtggcgctcggcgcgtcattatgcctgcttgtggaacttgcgattcaattcacgcggttgaatgacaaacgtcgtaagaatacacgtcctgattggatggacgttgatgatgaacatgcttctgtgctcacaccatcatccgactctcttgagggtagtagccctattacttcttcggctccaatcgcaccaaccagtcctatctctgcatcggctccagaatctccgtcagctgtggctccctctacattagaacgaccacaacggcttgatacgcaatctaattttgatgacgtactttag

SEQ ID NO: 12771 - protein, 364 aa, Corynebacterium diphtheriae NCTC 13129
MSNVDVQSTTKATRVRRNRIHNPFSVRPKRPTDGSMSLVEHLQELRRRVIISVLALIVGTIVGFMWYQHPVNLHWFTLRSLGDILRGPYCSLPPENRAVLTLDGECRLIATSPFEMFMLRLKVGALAGSVFASPVWLQQLWAFITPGLMKNERRWTLSFVTAAVTLFVSGAVLAYFVIAIGLQFLLTMGGEFQVTALSGGQYFNFILTLLVMFGVSFEVPLIIAMLNLAGILSYESIKDKRRIIIVSVFIFAAFMTPGQDPYSMVALGASLCLLVELAIQFTRLNDKRRKNTRPDWMDVDDEHASVLTPSSDSLEGSSPITSSAPIAPTSPISASAPESPSAVAPSTLERPQRLDTQSNFDDVL

SEQ ID NO: 12772 - DNA, 816 bp, Rhodopseudomonas palustris CGA009
  CDS (1)..(816): transl_table=11
atgagtgccgaggatatcgaggcctccaaggcgccgctgatggaccacctgatcgagctgcggtcgcggctgatcaaggcgctgcttggcttcggcatcgcgttcatcttctgcttcttcttcgccaagcagatctacaatgtgctggtgtggccgttcgtctgggtcgcggggccggagaactccaagttcatctataccgcgctgctcgaatacttcctcacccagctcaagctggcgatgttcggcgccggcttcatctcgttcccgatcatcgctacccagatctacaaattcgtcgcgccgggcttgtacaagcacgagcgcaacgccttcgtgccgtacctgatcgccaccccgggcttcttcctactcggctcgctggtggtgtacttcctggtgctgccgatgctggtgcggttctcgctcggcatgcagcagatgggcggcgccgagaccgcgcagatccagctcctgcccaaggtcggcgagtatctgtcgctgatgatgtcgctgatctttgcgttcggcctggcgttccagttgccggtgatcctgacgctgctcggccggatcggcgtgctgaccgccaagcagctcaaggagaagcgccgctacttcatcgtcggcgccttcatcatcgccgcggtgctgaccccgcccgacgtgatcagccaggcctcgctcgcgatcccgctgctgctgctgtacgagggctcgatcatcgcggtgtcgatggtggagaagaagcgcgctgcggcagacgctagcgctagcgccaacgccagcaccgactcctcgacaccggccgcctaa

SEQ ID NO: 12773 - protein, 271 aa, Rhodopseudomonas palustris CGA009
MSAEDIEASKAPLMDHLIELRSRLIKALLGFGIAFIFCFFFAKQIYNVLVWPFVWVAGPENSKFIYTALLEYFLTQLKLAMFGAGFISFPIIATQIYKFVAPGLYKHERNAFVPYLIATPGFFLLGSLVVYFLVLPMLVRFSLGMQQMGGAETAQIQLLPKVGEYLSLMMSLIFAFGLAFQLPVILTLLGRIGVLTAKQLKEKRRYFIVGAFIIAAVLTPPDVISQASLAIPLLLLYEGSIIAVSMVEKKRAAADASASANASTDSSTPAA

SEQ ID NO: 12774 - DNA, 867 bp, Geobacter sulfurreducens PCA
  CDS (1)..(867): transl_table=11
atgtcagaagataatcagaaggtcctgccgttcctcgaacatctggtggaactgcgcaagcggcttatcatcatcattgtggcggttgtggtgggcatggggttcgcctggaacctttcgaacggcctccttcactttgttacgaagccgatcaccggcgaaacctacctcactgacatcaagaagcaggtatatcaggaagtgggcaagcgtttcccagccgcttacaagcagtttgagcttgaaaaggcgatgaacgcggcacccaaggagcgcaagctcaactacagcgccccccttgagccctttttcgtccagtgcaagatatcggttatcgccggatttatcctggcgcttcccgttgtgttttaccagctctggcttttcatcgcgccggggctcacccggaaagaaaagcggatggtgctgcccttcgtgaccgtaagtacggtgagtttctgcgtgggggcactctttttcctggtagtcatctggccggtcatcatcaatttctccctgtcctatgaagcggaggggctcaacagcctcttcaacatgagtgcgtacatcaacttctgcctccgcctgatcctgatgttcggcctcatcttcgagttgccgatcctgatgctgcttctgtcgcgcttcggaattgttacctatcagttcttggcccgcaaccgtcgctacgccctcctggcaagttccattgtggctgccttccacgccgacctcatcaccatgttcgtcatcatggtgccgctgtatatgatgtacgagatcagcgtctggctcgtcctcctcttcggcaagaaaaagccggtggaggcagtggccggcgaggggccgaccggcgccgcgtcatga

SEQ ID NO: 12775 - protein, 288 aa, Geobacter sulfurreducens PCA
MSEDNQKVLPFLEHLVELRKRLIIIIVAVVVGMGFAWNLSNGLLHFVTKPITGETYLTDIKKQVYQEVGKRFPAAYKQFELEKAMNAAPKERKLNYSAPLEPFFVQCKISVIAGFILALPVVFYQLWLFIAPGLTRKEKRMVLPFVTVSTVSFCVGALFFLVVIWPVIINFSLSYEAEGLNSLFNMSAYINFCLRLILMFGLIFELPILMLLLSRFGIVTYQFLARNRRYALLASSIVAAFHADLITMFVIMVPLYMMYEISVWLVLLFGKKKPVEAVAGEGPTGAAS

SEQ ID NO: 12776 - DNA, 762 bp, Wolbachia endosymbiont of Drosophila melanogaster
  CDS (1)..(762): transl_table=11
atgaactggaactcaagcaaatacgcctcattttatgagcactttgcggaactcagaaaaagagttatcttttgctttctatttttttgcgttgcttttggtttttgttattactttaaggaaaatatataccgttttttactcgcacctttaatagaagcaacaaaaggtagcgaaggtttttctttaatttacacagacttaacagaggcattttttgtgtatctccaagttgcaataatgagcgcacttttgttttcttttcctgtgtttgcatggcaattttatatgttcttagcacctgggttatataaaagtgaaagggcagtgttgttgccatacttgattgcaacaccggttttatttgtaacgggagctactgtagtctattactatatatttcctttagcctggaagtttttcatcacttttgaacatagtgggaaatctttcggtataccaatagagtttatgccatcagttagcgaatatttagacctcgttctccaatttatgtttgcttttggcactgcatttcaaattccagtaatactcacattaatggtgagagtagggttactcactacacaaagtttgtcaaataaacgcagaatcgcgatagtggtaatttttattatcgctgcaatcttaactccacctgatgtattaagccaagtagggcttgcaatacctatgctgattctatatgaattgtccattctgatatgtaggtatattgaaaaaaagaagacaaagatttaa

SEQ ID NO: 12777 - protein, 253 aa, Wolbachia endosymbiont of Drosophila melanogaster
MNWNSSKYASFYEHFAELRKRVIFCFLFFCVAFGFCYYFKENIYRFLLAPLIEATKGSEGFSLIYTDLTEAFFVYLQVAIMSALLFSFPVFAWQFYMFLAPGLYKSERAVLLPYLIATPVLFVTGATVVYYYIFPLAWKFFITFEHSGKSFGIPIEFMPSVSEYLDLVLQFMFAFGTAFQIPVILTLMVRVGLLTTQSLSNKRRIAIVVIFIIAAILTPPDVLSQVGLAIPMLILYELSILICRYIEKKKTKI

SEQ ID NO: 12778 - DNA, 762 bp, Bdellovibrio bacteriovorus HD100
  CDS (1)..(762): transl_table=11
atgagacgcgaagaactcgattccaaagcccaatctttgtatgagcacctgtcagatcttcgtaaatgtctgatcaattgtgtttggattctgctgatcgcaacgggcatctgctacggcttcagtgaaaagattttcgatttcgtgcgtgagccgatccgcccgtaccttcctggtggcggtctgatctataccggcccgttggataaattcattgcccatctgaagctttctttcgtatgtgggatcttgctgtcttgccctttctggctttatcaggtgtggaagttcattgctccgggcctttacgccaaagagcgcaaatacaccatgggttttattttctcgggcacgggtttgtttgtgttgggggcggcattttcttactggatcgcgcttccgatggccttccagtttttgatgacctatggtggtgaggtcgataaacccatgatttccatcgaccagtacatgggtttcttcacccagatgtgtctgatgtttggtgtggcctttgaattgccgttggtgatcgtggttctgggaatgatgggcattgtgtcccagtccttcctgcgcaagaaccgccgctatgcgattatgacaattgcaacaattgcggcgatcatcactccgccggacctgctgagcatggtgatgatgttggcgccgatgtgggttctatttgaggccgcagtcctgatcgtcggcatctttgaaaagaaacgagaagacgcttacgctgtgaacgagcgcgagtag

SEQ ID NO: 12779 - protein, 253 aa, Bdellovibrio bacteriovorus HD100
MRREELDSKAQSLYEHLSDLRKCLINCVWILLIATGICYGFSEKIFDFVREPIRPYLPGGGLIYTGPLDKFIAHLKLSFVCGILLSCPFWLYQVWKFIAPGLYAKERKYTMGFIFSGTGLFVLGAAFSYWIALPMAFQFLMTYGGEVDKPMISIDQYMGFFTQMCLMFGVAFELPLVIVVLGMMGIVSQSFLRKNRRYAIMTIATIAAIITPPDLLSMVMMLAPMWVLFEAAVLIVGIFEKKREDAYAVNERE

SEQ ID NO: 12780 - DNA, 951 bp, Mycobacterium sp. JLS
  CDS (1)..(951): transl_table=11
gtgcaaacccccggattcctcaagcggctcaacccgcggcaacgccgcgcacgggtcaatcccgacggcaccatgtcgttggtcgaacaccttcacgagctgcgcaaccggctcctggtggccgccgcggcgatcgtgctgacgaccatcttcggtttcttctggtacagccacggcatcctcggcttccacagcctcggcgaatggctgcgcggcccgtactgcgcgctgcccgagtccgcgcgcgcctccatcaccgaggacgggcagtgccgcctgctggccaccgcgccgttcgaccagttcatgcttcgcctgaaggtggcgctgatggcgggcatcgtgctggcctgcccggtgtggctgcatcaggtgtgggcgttcatcacccccggcctgtaccgcaacgaacgccggttcgcgatggcgttcgtgaccatcggggcggtgctcttcatcagcggcgcgatcctggcctacgtggtgctcgccaccgccctgggattcctgctgaccgtcggcagcgacgtgcaggtcaccgcgctctcgggtgaccagtacttcgggttcttgatcaacctgctgctggtgttcggcttcagcttcgaattcccgctgctgatcgtgatgctcaacttcatcgggatgctgccctacgagcgcctcaaggcgtggcggcgcggcctgatcttcgcgctgttcgtgttcgccgccttcttcacacccggctccgacccgttctccatgctcgcgctggcgtgtgcgctgaccgtgctgctcgagttcgcgatccaggtcgcgcgcatccacgacaagcgcaaggcgaagcgggaagccgccgaaaccgtgccggaggacgaggccgcgccgatcggcggcgtcgaaccgatcgaaccgcccagcgcggtgtcgagcccctcccgatccaccattcatgacgaatccacctga

SEQ ID NO: 12781 - protein, 316 aa, Mycobacterium sp. JLS
MQTPGFLKRLNPRQRRARVNPDGTMSLVEHLHELRNRLLVAAAAIVLTTIFGFFWYSHGILGFHSLGEWLRGPYCALPESARASITEDGQCRLLATAPFDQFMLRLKVALMAGIVLACPVWLHQVWAFITPGLYRNERRFAMAFVTIGAVLFISGAILAYVVLATALGFLLTVGSDVQVTALSGDQYFGFLINLLLVFGFSFEFPLLIVMLNFIGMLPYERLKAWRRGLIFALFVFAAFFTPGSDPFSMLALACALTVLLEFAIQVARIHDKRKAKREAAETVPEDEAAPIGGVEPIEPPSAVSSPSRSTIHDEST

SEQ ID NO: 12782 - DNA, 774 bp, Desulfovibrio vulgaris subsp. vulgaris str. Hildenborough
  CDS (1)..(774): transl_table=11
atgacccttctcgaccatctgggcgagttgcgtgtgcgcctcgtgcgctgcctcatcgccgtgggtctcgcctttgcgggctgctactcattcgccgaaaaactcttcgacctgctgatgcagccgctggtcaaggccatgccgcccgacagcaagctcatcttcacagccctgcccgaagccttcttcgtgtacatgcaggtgggtctcgtggcagccacattcgtggcgagccctttcatcttctatcagatatgggcgttcatatctcccggcctctacgaagaggagaagaagaacgccatccccatcgcgctgttctccgcctcgttcttcatcggcggcgcggcgttctgctactttcaggtctttccctacgcgttcgagttcttcatgggttttgcgacagaccgcatcctgcccatgccctcactcagcgaatatctgggcttcgcgctgaagatgcttctggccttcggcatcatcttcgagatgccgctattcaccttcttcctcgccaaactcggcattctcaccgccgggatgatgcgccgcggaaggaaatacgccatactgggcatattcatcgtggccgccatactgacgccccccgacgtcttctcgcagatgctcatggcgtgcccgatgctggtgctgtatgagataagcatcttcatcgccgccgccgtgggtcgcaaggagaagaccgacgaagaggaagatggcgacgctgacgaagccaccccggacgaacgccctgaacagggccactag

SEQ ID NO: 12783 - protein, 257 aa, Desulfovibrio vulgaris subsp. vulgaris str. Hildenborough
MTLLDHLGELRVRLVRCLIAVGLAFAGCYSFAEKLFDLLMQPLVKAMPPDSKLIFTALPEAFFVYMQVGLVAATFVASPFIFYQIWAFISPGLYEEEKKNAIPIALFSASFFIGGAAFCYFQVFPYAFEFFMGFATDRILPMPSLSEYLGFALKMLLAFGIIFEMPLFTFFLAKLGILTAGMMRRGRKYAILGIFIVAAILTPPDVFSQMLMACPMLVLYEISIFIAAAVGRKEKTDEEEDGDADEATPDERPEQGH

SEQ ID NO: 12784 - DNA, 795 bp, Bartonella henselae str. Houston-1
  CDS (1)..(795): transl_table=11
atgaatgttaagaaagatgaagttgatgccaatatggcaccccttttagagcatttgattgaactacgtcagcgaattattgctgctctgatcgcatgttttatcgcttttattatatgttttcttgtcaaagattatatcttaaattttttgatattgccttatcagtgggcaatgaaaatatcaggtggtaatcctgagggtattcgtttgcaatcaacacaagtatgggaaacttttttaacgaagatgaaacttgctgcttttggggcaactattttgtcttttccttatacggcttttcagttttatagctttattgcaccaggactttataaaaatgagcgtatggcttttttaccatttctcattggtggaccgattttattttgtgttggtggggcgtttgtttatgctctgttggcaccgattatgctttggtttagcctttctcagcaatttcttccggatgttcatttaagaatagagtttatagtgcgtatctccgattatttgagttttatgacatcgtttattctaatttttggtttgatttttcaattgcctcttgtcacgagtcttttaatgaaagttggacttttaacttctcatagtttagcgtctaaacgaaagtgggctattctcatctcttttataattgcagcaatagtaacgccatcggatttttttactatgtttgcggtagcattaccaactatagctctttacgagatctcaattttaattgcctactatatggaaaagaaaaaaaattcctttaagagaagtttataa

SEQ ID NO: 12785 - protein, 264 aa, Bartonella henselae str. Houston-1
MNVKKDEVDANMAPLLEHLIELRQRIIAALIACFIAFIICFLVKDYILNFLILPYQWAMKISGGNPEGIRLQSTQVWETFLTKMKLAAFGATILSFPYTAFQFYSFIAPGLYKNERMAFLPFLIGGPILFCVGGAFVYALLAPIMLWFSLSQQFLPDVHLRIEFIVRISDYLSFMTSFILIFGLIFQLPLVTSLLMKVGLLTSHSLASKRKWAILISFIIAAIVTPSDFFTMFAVALPTIALYEISILIAYYMEKKKNSFKRSL

SEQ ID NO: 12786 - DNA, 747 bp, Acinetobacter sp. ADP1
  CDS (1)..(747): transl_table=11
atgacggaacatattgtcagtgaaagcctcactgaaatgaaatatagcgaacatttaaaagaattaagaaaacgactgatctatagcattggtattgttttagcgatttttttattattactcccgcttgctcagaagaactaccattttcttgctcaccctttaatttcattgcttcctagcaactccaccatgattgcaacagatgtgatgagtacatttttagcaccatttaaactcaatatttatttttcgattttattaagtattccctttattctttatcaattttggcaatttgtcgctcccgcactttatcaaaaagaaaaaaggttcggtatagcactcgtgatttcgagtaaccttttattttatttaggaattgtgtttgcctatactttaattttgccacttgctttaaagttcttcgtattggcatcgcccgataatgtgttacccatgacagatatcaatagctatctagatttttgtttaaagctttttctagcttttggtctggcatttcaaattccagttttaacttatattcttatttttattggccttatttctattcaacagctagaagcacatcgtaaacacatcattgtattcttcttttttattgcaatgtttattacccctcctgatgtttttagcatgcttgctcttgcagtcccaatgtggttgttatttgaattgggtttatgggtcacaaaattcacaacgcaaaaaaacatccattaa

SEQ ID NO: 12787 - protein, 248 aa, Acinetobacter sp. ADP1
MTEHIVSESLTEMKYSEHLKELRKRLIYSIGIVLAIFLLLLPLAQKNYHFLAHPLISLLPSNSTMIATDVMSTFLAPFKLNIYFSILLSIPFILYQFWQFVAPALYQKEKRFGIALVISSNLLFYLGIVFAYTLILPLALKFFVLASPDNVLPMTDINSYLDFCLKLFLAFGLAFQIPVLTYILIFIGLISIQQLEAHRKHIIVFFFFIAMFITPPDVFSMLALAVPMWLLFELGLWVTKFTTQKNIH

SEQ ID NO: 12788 - DNA, 756 bp, Erwinia carotovora subsp. atroseptica SCRI1043
  CDS (1)..(756): transl_table=11
atggccgatgaagatactcaaccgctaattagccacctgattgagctacgtaagcggctactgaacagcattatctgtgtgctggcggtatttgttgtgctggtgtactttgccaatgacatttaccaagtggtttctgccccgctcatcaagcaattgcctgtgggcgccagcatgatcgcgaccgatgtcgcctcacctttctttacgccgataaagctgacgatgattgtctcagtgtttgtcgccgcgcctttggtgctgtatcaggtgtgggcgtttgtggctcctgctctgtataaacacgaacgtcgcttaatgatgccgttgctggtatccagcagcctgctgttttattcgggtatggcgttcgcgtactttgtggtattcccgctggcatttggcttttttgcgaaaaccgcgcccgtcggcgtgttgattgcgaccgacatcaataactacctcgatttcgttatggcgctgttcatggcattcgggatatcgtttgaagtgccggttgccattgtgctgctctgctggagtggtgtggtgacgccagaagatctgaagaaaaagcggccttatattttggtgggtgcattcgttgtcgggatgctgctgacgccgccggatgttttctcacaaacgctactggcgattccgatgtatctgctgtttgaaatcggtgtgttcttcgcgcggttttatgttggcaaaggccgacgacggactgaaactgaagagccattgcagtaa

SEQ ID NO: 12789 - protein, 251 aa, Erwinia carotovora subsp. atroseptica SCRI1043
MADEDTQPLISHLIELRKRLLNSIICVLAVFVVLVYFANDIYQVVSAPLIKQLPVGASMIATDVASPFFTPIKLTMIVSVFVAAPLVLYQVWAFVAPALYKHERRLMMPLLVSSSLLFYSGMAFAYFVVFPLAFGFFAKTAPVGVLIATDINNYLDFVMALFMAFGISFEVPVAIVLLCWSGVVTPEDLKKKRPYILVGAFVVGMLLTPPDVFSQTLLAIPMYLLFEIGVFFARFYVGKGRRRTETEEPLQ

SEQ ID NO: 12790 - DNA, 786 bp, Propionibacterium acnes KPA171202
  CDS (1)..(786): transl_table=11
atgtcgctcctggaccacatccgggagctccgttaccggatcattgtgtcgtttatagcggtggtcattacgagctccgtggcctttgtcttttaccgtccgctggttgagatcgtcatgcatccgtaccagcaggcgagcctcgccatcaaggcgaagaacccgacggcctccctccaggtagtcaatactggtgtcgtcgccccgttcgtgctgaatatgagggtggccattgttgctggcctcattgctgcctgccccatttggctctatcaggtctgggcttttattgttcctggcttgctcgtcaatgagaagaagtgggctctgcgattcctgggatcggctatccccctgtttcttctaggatcagtactggggtattgggtgctcccgaagggtattgccttgatgctgaacttcacgcctcacggcatgggcattaccaacctgctcgacatgaatgcgttcttggcactggagattcgcgtcatcttgctctttggagtgagtttcctgctgccggtggtcttggtcttgctcaatctgattcacgtcttgtcgtctgcgcagctgaaggcggcacggaagtggtccatctttggattcttctgtctgggcgcttttgtgaacccgtctggtgacccaatttccatgtgcgctttggctattccgctgagcgtcatgtatgtcattgcggaatggatttgccgcagcaatgaacgtaagcgctcgaccgacaatatgggtattgataagtcagaattcgatattcagatcgattga

SEQ ID NO: 12791 - protein, 261 aa, Propionibacterium acnes KPA171202
MSLLDHIRELRYRIIVSFIAVVITSSVAFVFYRPLVEIVMHPYQQASLAIKAKNPTASLQVVNTGVVAPFVLNMRVAIVAGLIAACPIWLYQVWAFIVPGLLVNEKKWALRFLGSAIPLFLLGSVLGYWVLPKGIALMLNFTPHGMGITNLLDMNAFLALEIRVILLFGVSFLLPVVLVLLNLIHVLSSAQLKAARKWSIFGFFCLGAFVNPSGDPISMCALAIPLSVMYVIAEWICRSNERKRSTDNMGIDKSEFDIQID

SEQ ID NO: 12792 - DNA, 717 bp, Symbiobacterium thermophilum IAM 14863
  CDS (1)..(717): transl_table=11
atgcaggacaaagaactgaccctcgtggagcacctgaccgagctgcgggagcgcatcatcaagtcgctgatcgccgtcgcgatcggcttcttcgccgcggttttcctctcgcagcccgtcttccagcacatcatggaacaggccaaggcggaaggggtccagctgatccagtacaacttcgcggacacgttcatcacgcagatcaagctggcgctgatcctggggctggtgctggcctttcccgtggtgctctaccaggtgatcgccttcatcctgccggccttgaagccggaggagaagcggctgctcttcatcggcctgccgtttgccacagggttgttcctggccggctgggccttcggctacttcatcgtcgtgcccatcacgaaagagttcttcaagtcgatggcacaggcgtcgctggtcgaggtggctgtcacgcccagcaactacctgtcgttcatcctcagcatctgcaacccgctgggcatcgccttcgagctgccgctggtggtgctgatcctggcgcggatcgggctggtgactcaccagttcctgggacgggtgcggaagtacgccttcctggccctgatgatcctggcggccgtgctctccccgcccgatgtcatctccatgatgatcttcctcgtgccgctgtacggcctctacgagttctcgatcatcctggcccggtttgcgcagccgaagaacgagtag

SEQ ID NO: 12793 - protein, 238 aa, Symbiobacterium thermophilum IAM 14863
MQDKELTLVEHLTELRERIIKSLIAVAIGFFAAVFLSQPVFQHIMEQAKAEGVQLIQYNFADTFITQIKLALILGLVLAFPVVLYQVIAFILPALKPEEKRLLFIGLPFATGLFLAGWAFGYFIVVPITKEFFKSMAQASLVEVAVTPSNYLSFILSICNPLGIAFELPLVVLILARIGLVTHQFLGRVRKYAFLALMILAAVLSPPDVISMMIFLVPLYGLYEFSIILARFAQPKNE

SEQ ID NO: 12794 - DNA, 771 bp, Mannheimia succiniciproducens MBEL55E
  CDS (1)..(771): transl_table=11
atgagcagcgttgaagagtctcaacccttaattacccatttagttgaattacgtaatcgtttattacgttcaattatgttcgtattaattgtattttgcggtttagtttatttttcaaacgatatttatcatttaatcgctacgcctttattagaacaaatgccgcaaggctccacaatgattgcaaccaatgttgccgcgcccttttttaccccaatcaaattaaccggtattgccgccgtatttttgtcggtgccttatattttgtatcaggtttgggcgtttgtggcgccggctttgtatcaacatgaaaaacggttgatttatccgttattgttttccagcaccgtgctgttttatacgggcgttgcctttgcttattatgttgtatttccaatcgtatttggttttttaacaaaaaccgcaccggacggcgttgccatcgcaacggatatcagcagctatcttgattttgttctgacgttatttttagctttcggtatttgttttgaagtgccggtcgccattattctattatgctggacaggggtgacaacgcctgaagatttgaaagaaaaacgcccttatattattgtggcggcttttattatcggtatgttattaacgccgccggatattttttctcaaacattgcttgccgtacctatgtgtttattgtttgaaatcgggcttttatttgcaagattctatcgcccgaaagaggatgaaactgataacggcagttcggaattaaccaaacataaagaataa

SEQ ID NO: 12795 - protein, 256 aa, Mannheimia succiniciproducens MBEL55E
MSSVEESQPLITHLVELRNRLLRSIMFVLIVFCGLVYFSNDIYHLIATPLLEQMPQGSTMIATNVAAPFFTPIKLTGIAAVFLSVPYILYQVWAFVAPALYQHEKRLIYPLLFSSTVLFYTGVAFAYYVVFPIVFGFLTKTAPDGVAIATDISSYLDFVLTLFLAFGICFEVPVAIILLCWTGVTTPEDLKEKRPYIIVAAFIIGMLLTPPDIFSQTLLAVPMCLLFEIGLLFARFYRPKEDETDNGSSELTKHKE

SEQ ID NO: 12796 - DNA, 783 bp, Anaplasma marginale str. St. Maries
  CDS (1)..(783): transl_table=11
atgcaacaattccccgatactcttgcaattgtggtgcgtccaatggatacgggtaaaatgtcgctatcggggcatttttgcgaactccggagaagaattgtattctccgtcgtgtgttttatcggaatgtttattgtctgctatctgttctccgataagatatatgagttcctgctagtccctttggtggagcttgcaggcgataatgaagacttttctctgatctacacaggcctcaccgaagccttttttgtgtatgtgaaagtaggggcaactgctgcgctgtttttttcatttcccatttttacctggcagctttatatgttccttgctccgggcctgtacaaggaggaaaaaagggttttgctgccgtatctagtggccgcgccagttctattcgccgccggtgcggctatggtgtactactacatattcccgctggcatggaaattttttatgggtttcgagaatagagatgcctcagtcggtgtacccatagacttcatgccatctgtgagcgaatatctagatttagtattgcaactgatgtttgcctttggcatggcattccaattgcccgtaatactcaccatgatggccagagtgggcctaatctcatccaaaactttggcgggaaaacgcagggtcgcaattgtggctatattcactttggctgcaattttgacgcccccggatgtgataagccagataggtttggcaattcctatgttgctgctgtacgaagcctctatactcgcctgtaggtacattgaacgcaggtag

SEQ ID NO: 12797 - protein, 260 aa, Anaplasma marginale str. St. Maries
MQQFPDTLAIVVRPMDTGKMSLSGHFCELRRRIVFSVVCFIGMFIVCYLFSDKIYEFLLVPLVELAGDNEDFSLIYTGLTEAFFVYVKVGATAALFFSFPIFTWQLYMFLAPGLYKEEKRVLLPYLVAAPVLFAAGAAMVYYYIFPLAWKFFMGFENRDASVGVPIDFMPSVSEYLDLVLQLMFAFGMAFQLPVILTMMARVGLISSKTLAGKRRVAIVAIFTLAAILTPPDVISQIGLAIPMLLLYEASILACRYIERR

SEQ ID NO: 12798 - DNA, 789 bp, Azoarcus sp. EbN1
  CDS (1)..(789): transl_table=11
atgagcgagcttcaagaaaccttcatctcgcatctcgtcgaactgcgcgaccggctgttgcgggcgatggtcgcggtcatcgtggtgttcgtctgcctgatgccctgggcgggcgagatctacgacctgcttgccaagccgatgatgaatacgctgccagaaggcacgcacatgatcgccaccggcgtggtcacgccgtttttcgtgccggtcaaagtcaccatgatggtgtctttcgttctcgcgctgcctttcgtgctctatcaggcctgggcgttcatcgccccgggactgtatgcccacgagcgccgcctcggcctgccgctggtgctcggcagcacgctgctgtttctgctcggcatggccttctgctatttcttcgtgttcggtaccgtcttcaagttcattgccgagttcgcgccgaagagcatagtccccgcgccggatatcgaacagtatctgtcgttcgtgatgaccctgttcatcgccttcggcctgacgttcgaagttcccgtggcggtgatcctgctcgtcaaggcaggggtggtcagcatttccaagctccgcgaagtccggccctacgtcattgtcggcgcgttcgtcatcgcggcgatcatcacgcctcccgatgtggtgtcgcagttcatgctcgcagtgccgatgtgcctgctctacgaagtgggaatcctgctggcgaagttcgttagcaagcgggcgggaacggaagaacctgagcgagtcgagccggacctcgatcgcctcgaagcgccggagcccgaccggaaataa

SEQ ID NO: 12799 - protein, 262 aa, Azoarcus sp. EbN1
MSELQETFISHLVELRDRLLRAMVAVIVVFVCLMPWAGEIYDLLAKPMMNTLPEGTHMIATGVVTPFFVPVKVTMMVSFVLALPFVLYQAWAFIAPGLYAHERRLGLPLVLGSTLLFLLGMAFCYFFVFGTVFKFIAEFAPKSIVPAPDIEQYLSFVMTLFIAFGLTFEVPVAVILLVKAGVVSISKLREVRPYVIVGAFVIAAIITPPDVVSQFMLAVPMCLLYEVGILLAKFVSKRAGTEEPERVEPDLDRLEAPEPDRK

SEQ ID NO: 12800 - DNA, 939 bp, Silicibacter pomeroyi DSS-3
  CDS (1)..(939): transl_table=11
atgagcaagaccgacgagatcgacgatacctcggccccgctgatcgagcatctggccgagctgcgcacccggctgatccgggcggttctggcctttatcgtggggatcgtgctggcctttacggtggccgagccgatcctgcagttccttctggcgccgatcgaggcgacgctgcgtgacctgggcgatccctcgccgacgctgcagtacacctcgccgcaggaatacctgttcacgctgttccgcatctcgatggtgttcggttttgcgctgtcctttccggtgattggctatcagctgtggcgtttcgtggcgccggggctgtatcgctcggaaaagggggcgttcctgccgtttctggtcgcctcgcccttcatgttcctgctgggcgcgtcctttgcgcaattcgtggtcacgccgctggcgatgcagttctttctgggctttgccgacgtcagctcgatctttgccaacctgctgacgggcggtggcggcaccgtgccctcggatgtggctgtggttcccgagaccaccgatggggtcaagatcaccttcttcggcaaggtcaacgaatcgctcgatatcacgctgaaattcatcatggcttttggcctgtgcttccagttgccggtgctgctgacgctgatgggcaaggccgggctggtcagtgccgaggggctgggcagcgtgcgcaaatacgccatggtggcgatcctgaccctggccgcgctggtgaccccgcccgatgtggtgacccaggtcatcctgttcgtggtggtctatgggctttacgaggtctctatcttcctggtggcccgcgtcgagaagaagcgcgaggcgcagctgcgggccgaagggtattatgacgacgaagaggcgttcgacgacccgctgatggccgagtttgacgcggaggaagccgaggagcgcaaggaataa

SEQ ID NO: 12801 - protein, 312 aa, Silicibacter pomeroyi DSS-3
MSKTDEIDDTSAPLIEHLAELRTRLIRAVLAFIVGIVLAFTVAEPILQFLLAPIEATLRDLGDPSPTLQYTSPQEYLFTLFRISMVFGFALSFPVIGYQLWRFVAPGLYRSEKGAFLPFLVASPFMFLLGASFAQFVVTPLAMQFFLGFADVSSIFANLLTGGGGTVPSDVAVVPETTDGVKITFFGKVNESLDITLKFIMAFGLCFQLPVLLTLMGKAGLVSAEGLGSVRKYAMVAILTLAALVTPPDVVTQVILFVVVYGLYEVSIFLVARVEKKREAQLRAEGYYDDEEAFDDPLMAEFDAEEAEERKE

SEQ ID NO: 12802 - DNA, 738 bp, Campylobacter jejuni RM1221
  CDS (1)..(738): transl_table=11
atgtttgaagaattaagacctcatttaatagaacttagaaaacgcctttttataagcgttgcttgcattgtagttatgtttattgtatgttttgctctacgaagctatatcttagatattctaaaagctccacttatagctgttttacccgaagtagccaaacatgtaaatgtaattgaaatacaagaagccttatttaccgcaatgaaggttagtttttttgcagcctttatcttttctctacctgtaattttttggcaattttggaaatttgtagctccaggactttatgataatgaaaaacgccttgtggtgccttttgttagctttgcgagcattatgtttgccttgggggcttgtttttgctattttgttgtagtgcctttggcttttaaatttttgattaattttggtttaaatgaagattttaatcctgtaattaccataggaacttatgtagatttttttacaaaagttgttgtggcttttggcttagcttttgaaatgcctgtaattgcctttttctttgctaaagtcggacttatagatgatagttttttaaaacgccattttcgcatagctgttttagttatttttgttttttcagcctttatgactccacctgatgttttatctcaatttttaatggcaggaccactttgcggactttatggactttctattttaattgttcaaaaggtaaatcctgctccaaaagataaagaaagtgatgaataa

SEQ ID NO: 12803 - protein, 245 aa, Campylobacter jejuni RM1221
MFEELRPHLIELRKRLFISVACIVVMFIVCFALRSYILDILKAPLIAVLPEVAKHVNVIEIQEALFTAMKVSFFAAFIFSLPVIFWQFWKFVAPGLYDNEKRLVVPFVSFASIMFALGACFCYFVVVPLAFKFLINFGLNEDFNPVITIGTYVDFFTKVVVAFGLAFEMPVIAFFFAKVGLIDDSFLKRHFRIAVLVIFVFSAFMTPPDVLSQFLMAGPLCGLYGLSILIVQKVNPAPKDKESDE

SEQ ID NO: 12804 - DNA, 786 bp, Dehalococcoides ethenogenes 195
  CDS (1)..(786): transl_table=11
gtgagcagtaagaacgaaactcccgaaacggacgaagaagaacccccggaggaagccaaggcaaaaggcaaaatgcctatcggcgggcattttaatgagcttcgccagcgttttacccggagtatcattgccctgatagtgggtgtactggtggcctttttctttgccactcccattatcggctttttaaccgctcccggcggcccggatttcaaaccggcccagctgggggtcatggaatatgcctcggtctttttcaatgtatcactctgggcggggtttattctggcttccccttatatcctttaccagctgattgcttttattaccccggctctaaaccgcaatgaaaagaaatttatttttacggccataccggcggtcactggaatgttcctgctgggtctggcttttgcttattatgtggctttgcctcctgctttaaatatcctgctgcactggggcgatgatgtggtactcaccgtggtaggtatccgggactatatgaatgtagtcaccagaatactcattgccttgggacttatatttgaaaccccctttgttattatggtgctggccagactgggagtggtatcccccaagtggctggcttccaagcgcaaaatctggatagtcgtggcctttgtcattgccgcgcttattacacctacctttgacccggtaaaccagaccatcatggccggtccgctgattgttctttatgaaatatccatctggctgtcaaaactggtataccgcaagaagagggaagtcagcgaatcttag

SEQ ID NO: 12805 - protein, 261 aa, Dehalococcoides ethenogenes 195
MSSKNETPETDEEEPPEEAKAKGKMPIGGHFNELRQRFTRSIIALIVGVLVAFFFATPIIGFLTAPGGPDFKPAQLGVMEYASVFFNVSLWAGFILASPYILYQLIAFITPALNRNEKKFIFTAIPAVTGMFLLGLAFAYYVALPPALNILLHWGDDVVLTVVGIRDYMNVVTRILIALGLIFETPFVIMVLARLGVVSPKWLASKRKIWIVVAFVIAALITPTFDPVNQTIMAGPLIVLYEISIWLSKLVYRKKREVSES

SEQ ID NO: 12806 - DNA, 753 bp, Ehrlichia ruminantium str. Welgevonden
  CDS (1)..(753): transl_table=11
atgaaatctacaaatggtgaaatgcccttttttaagcattttgaggaattaagatataggatattcttttgttttgcatttttttgtattatgtttggagtatgctattttttttcagaaaaaatatataatttcttattaattcctttaatagaattagaaggttctaattctgagttttctttaatatatactgatttaacagaagctttttttgtatatttaaaagttgctactatggcagctttattatgttcttgccctgtttttatatggcaattatatatgtttttagctcctggtttatacaaaaaggaaaagttaattcttttgccttacttgatttcagcattactgttgtttattgctggagcagcaatggtatactattatatattccctttagcttggaaattttttattgcctttgaaaatagagatgcttcaatgggtgtacctatagaatttatgccatcagttagtgaatatttagatttggtattacaattgatgtttgcatttggagtagcatttcaaatacctatattcttgacgttaatgtctaggattggtatcttaccagcaagagttttagcgaagaaaagaagatttgcaatagtgattatttttattattgctgctgtattaactccacctgatgtattaagtcaagtaggtttggctgtgccaatgctattgttgtacgaagtctcaatattagcatgtagatatattgagcaaaataataagtag

SEQ ID NO: 12807 - protein, 250 aa, Ehrlichia ruminantium str. Welgevonden
MKSTNGEMPFFKHFEELRYRIFFCFAFFCIMFGVCYFFSEKIYNFLLIPLIELEGSNSEFSLIYTDLTEAFFVYLKVATMAALLCSCPVFIWQLYMFLAPGLYKKEKLILLPYLISALLLFIAGAAMVYYYIFPLAWKFFIAFENRDASMGVPIEFMPSVSEYLDLVLQLMFAFGVAFQIPIFLTLMSRIGILPARVLAKKRRFAIVIIFIIAAVLTPPDVLSQVGLAVPMLLLYEVSILACRYIEQNNK

SEQ ID NO: 12808 - DNA, 795 bp, Bacteroides fragilis NCTC 9343
  CDS (1)..(795): transl_table=11
atggcagaaattaaagaactgactttttgggatcacctggatgaactgcgccgggtgctgtttcgaattataggtgtatggtttgttttggctgtaggctatttcattgctatgccctatctgttcgaccatgtcattctggctccctgccacaacgatttcatcttttaccatcttctgcgggacatcggacaggcattcgaccttaccgatgacttctttacccgtgagtttaaagtcaagctggtaaatatcaatctggcagcacctttttttatccacatgtccaccgctttctggatgtctgtagtcactgccacaccttatttgtttttcgagatatggcgtttcatccgtcctgccctttaccctaatgaacggaaaggagtccgcaaagccctgaccatcggcacggtcatgttttttatcggagtccttttaggttattttatggtctatccgctcacccttcgttttctctctacctatcaactcagcgcagaaatagagaatcagatctccctgaactcttacatcgacaattttatgatgctggtgctctgcatggggctggctttcgaactacctttggtaacctggttgctttccttgcttggattggtaaacaaatcattcttacgaaaataccggagacatgccattgtcctgattgtcatcgctgctgctgtcattactccaacaggagaccctttcacactcagcatcgtagctattcccctctatctgctttatgaaatgagcatattgatgattaaagacaaaaaccgctcgtag

SEQ ID NO: 12809 - protein, 264 aa, Bacteroides fragilis NCTC 9343
MAEIKELTFWDHLDELRRVLFRIIGVWFVLAVGYFIAMPYLFDHVILAPCHNDFIFYHLLRDIGQAFDLTDDFFTREFKVKLVNINLAAPFFIHMSTAFWMSVVTATPYLFFEIWRFIRPALYPNERKGVRKALTIGTVMFFIGVLLGYFMVYPLTLRFLSTYQLSAEIENQISLNSYIDNFMMLVLCMGLAFELPLVTWLLSLLGLVNKSFLRKYRRHAIVLIVIAAAVITPTGDPFTLSIVAIPLYLLYEMSILMIKDKNRS

SEQ ID NO: 12810 - DNA, 768 bp, Colwellia psychrerythraea 34H
  CDS (1)..(768): transl_table=11
atgagtactcccccaacaccagttgccagcctttttgatcatcttttagaactacgtaatcgtttattgcgatcaattcttggagtattaatcgttttttgttgcttagtctactttgcacaagatatatatcaatacgtggctcagccattattagctaccatgccagaagggtcacaaatgatagcgaccgatgtcgcttcaccattttttgcaccttttaaattaactttggttttatccctatttattgcgatgccatttgttttatatcaagtgtggtcatttgttgcgcctggtttgtacagtaatgaaaagcgcatgattgccccgttaatgttcggttcaacgttgctgttttatagtggtattgcctttgcctattttcttgtatttccggtagtatttgccttttttacttcagtagcaccagaaggcgttgttattgcgactgatatcagtagttatctagatttcatcttaaaactgttttttgcttttggtgccgcatttgaaattcctattgccattatcttaatgtgttggacaggtatgacgacacctgatagcttaagagaaaagcgaccttatgttgtagtaggtgcatttgtcattggtatgttattgacaccacctgatattatttcacaaactatgttggccgtgccaatgctgattttatttgaagtcggtattattattgcttcgttttatcataaagaagaagatgaagacgaatcgaataatataaaggaaaatgacaaatga

SEQ ID NO: 12811 - protein, 255 aa, Colwellia psychrerythraea 34H
MSTPPTPVASLFDHLLELRNRLLRSILGVLIVFCCLVYFAQDIYQYVAQPLLATMPEGSQMIATDVASPFFAPFKLTLVLSLFIAMPFVLYQVWSFVAPGLYSNEKRMIAPLMFGSTLLFYSGIAFAYFLVFPVVFAFFTSVAPEGVVIATDISSYLDFILKLFFAFGAAFEIPIAIILMCWTGMTTPDSLREKRPYVVVGAFVIGMLLTPPDIISQTMLAVPMLILFEVGIIIASFYHKEEDEDESNNIKENDK

SEQ ID NO: 12812 - DNA, 828 bp, Dechloromonas aromatica RCB
  CDS (1)..(828): transl_table=11
atgagcgaagcacccgaagactcgtttatctcgcatctggttgaactgcgcgaccgcctgttgcgcagcctgatcgccattgcagtcgttcttggtattctgtgtatttacccagggccgggcgaaatctacgacatccttgccgcaccgttaaccaaggccttgccggaaggcaccaagatggtcgccatcggcgtcatcacgccgttcatggtgccgctaaaggtgacggcgatggtcgctttcataatggcgctgccgttcattctttaccaggcctgggccttcatcgctccgggtctctatgctcacgaaaagcgcctgggcattccgctgatcatttcgagcacgctgttgtttgtggccggtatgtcattctgctacttcttcgtcttcggacaggtattcagcttcattaacagctttgccccgaagagcattacgcctgcaccagatatcgaggcctacctgtccttcgtgatgaccatgttcctggccttcggtattgcctttgaggtgccagttgccttggttgtgctggtcaagctgggtgtggtttcggtcgagaaattgaaggagtggcgctcctactttatcgtcggtgcctttatcgttgctgccgtggtgacgccaccggatgtcgtttcgcaacttgcactggccatcccgatgtgcctgctttacgaactgggaatcctcgccgcacgctttgtgtcggcacctcgaccggtcgaggctccggcagaggtgactccggaaaagtcagccgaaatggatagcgagatggccaaggctgaagaggacttccgcaagctgtctgagcactga

SEQ ID NO: 12813 - protein, 275 aa, Dechloromonas aromatica RCB
MSEAPEDSFISHLVELRDRLLRSLIAIAVVLGILCIYPGPGEIYDILAAPLTKALPEGTKMVAIGVITPFMVPLKVTAMVAFIMALPFILYQAWAFIAPGLYAHEKRLGIPLIISSTLLFVAGMSFCYFFVFGQVFSFINSFAPKSITPAPDIEAYLSFVMTMFLAFGIAFEVPVALVVLVKLGVVSVEKLKEWRSYFIVGAFIVAAVVTPPDVVSQLALAIPMCLLYELGILAARFVSAPRPVEAPAEVTPEKSAEMDSEMAKAEEDFRKLSEH

SEQ ID NO: 12814 - DNA, 789 bp, Ralstonia eutropha JMP134
  CDS (1)..(789): transl_table=11
atgagcgacaaccggtccaacgatcctcaagacgaatcgcagcaggaaaccttcatttcgcacctgatcgagctgcgcgagcggctggtcaaggcggtcgccggcatcatcctggtgttcgtggggctggtgtactgggcgcccgtcatcttcaatctgtttgcgcggccgctgatggaatcgctgcccaagggcggcaagatgatcgtgaccgatgtgaccggctccttctttgtgccgatgaaggtcacgctgctggtcgcgttcctgattgcgctgccgtgggtgctgtaccaagtctggcagttcgtcgcaccgggcctgtaccagcatgagaagcggctgatcgtgccgctggttagcagcagctacgtgctgttcctgtgcggcgtcgcattcgcgtacttcctggtcttcccgaccgtgttccatttcatggcgcactacaacgcgccgctgggcgcggacatgtcgacggacatcgacaagtacctgagcttcgcgatgaccatgttcctcgcgttcggcatcactttcgaagtgccggtggtggtgatcgtgctggtgcgctttggggtggtcgagctggacaagctcaagcagattcgcccgtatgtgattgtcggcgccttcatcattgcggccgttgtcacgccgccggacgtgctttcccagctgctcctcgcactgccgctgatcgccctgtatgaactcgggttgctcatggcgcgctttgtcgggcgtccggaagccagcgcggatgccgctggcgaaactcaggcggattga

SEQ ID NO: 12815 - protein, 262 aa, Ralstonia eutropha JMP134
MSDNRSNDPQDESQQETFISHLIELRERLVKAVAGIILVFVGLVYWAPVIFNLFARPLMESLPKGGKMIVTDVTGSFFVPMKVTLLVAFLIALPWVLYQVWQFVAPGLYQHEKRLIVPLVSSSYVLFLCGVAFAYFLVFPTVFHFMAHYNAPLGADMSTDIDKYLSFAMTMFLAFGITFEVPVVVIVLVRFGVVELDKLKQIRPYVIVGAFIIAAVVTPPDVLSQLLLALPLIALYELGLLMARFVGRPEASADAAGETQAD

SEQ ID NO: 12816 - DNA, 810 bp, Thiobacillus denitrificans ATCC 25259
  CDS (1)..(810): transl_table=11
atgagcgcgcagggagataccttcatttcgcatctgatcgagatgcgcgatcggctgttgcgcgcggtcattgcgatcgtcgtcgtcttcatcgccttgttcccgtgggcccaggacctgtatgccgtgctggcgcaaccgcttctgtcggccctccccgagggcgggcagatgatcgcgaccgaggttacgacgccgttcttcgtgccggtgaaggtcacgctcatgacggcgttcctgttggcgatgccgtgggtgttctatcagatatgggccttcgtcgcgcccggtctgtatcagcacgaaaagcgtatcggcatcccgctggtggtggccagcgtgctgctgttcctgctcggcatggccttcgcgtatttccttgtctttcccgtggtgttcggcttcatcgtcgggatcgcgccggccggcgttgcggtgatgaccgacatcggcaaatacctcgatttcgtgctcacgctgttcatggccttcgggatcaccttcgaggtgcccgtggcggtcgtgctgctggtcaagatgggcatggtgtcggtcgcgaagctgcgggagatccgtccctacgtgatcgtcggcgccttcgttatcggcgcgatcttcaccccgcctgacgtgatctctcagttcatgctcgcagtgcccgtatggcttttgtatgaactcggcattctggtcgcggcgctgattaccaaacctcagccggaagccgagtccgattacacaccgctgtcggaatccgcgctcgacgaagagctcgaccggatcgaacgcgagtcgaccgacaacaagtag

SEQ ID NO: 12817 - protein, 269 aa, Thiobacillus denitrificans ATCC 25259
MSAQGDTFISHLIEMRDRLLRAVIAIVVVFIALFPWAQDLYAVLAQPLLSALPEGGQMIATEVTTPFFVPVKVTLMTAFLLAMPWVFYQIWAFVAPGLYQHEKRIGIPLVVASVLLFLLGMAFAYFLVFPVVFGFIVGIAPAGVAVMTDIGKYLDFVLTLFMAFGITFEVPVAVVLLVKMGMVSVAKLREIRPYVIVGAFVIGAIFTPPDVISQFMLAVPVWLLYELGILVAALITKPQPEAESDYTPLSESALDEELDRIERESTDNK

SEQ ID NO: 12818 - DNA, 795 bp, Anabaena variabilis ATCC 29413
  CDS (1)..(795): transl_table=11
atgacaccctcacaagaagtagatacaagaaccactcctgagattgatacagaaggatacggcaactcagatattgattctctcgatgagttgcctggtgaagtcgaaatgtctctattcgaccacctagaagaattaagacagcgcatcttttattcactgattgccgtagcagtgggtgtagttggctgcttcttcgccgtcaagccaattgttcaattactagaagtcccagctcaaggcgttaaatttctccagctagcccccggagaatatttctttgtttctctcaaagttgcaggctacactggcttgttactttctagtcctttcattctctaccaaattattttgtttgttctccctggattaactcggcgcgaacgtggtctacttgggcctattgttttagggtcaagtgtgctgtttgccgccggtttagtctttgcttatttacttttgattcccgccgctttgaattttttcatcagttacggcgcggatgtagtcgaacaactgtggtctatcgacaaatattttgaatttgtactattgcttttatttagtactgggttggctttccaagttcccatcatccaacttttactagctaatttaggtatcgtttcatcccaaagaatgatttctggctggcgatttgtaattatggcagccgtagttttaggtgctgtacttacaccttccacagaccccctaactcaaagtcttttggcaggcgcagtacttaccctttactttggtggtattggtttagtgaagctcacaggtaaatga

SEQ ID NO: 12819 - protein, 264 aa, Anabaena variabilis ATCC 29413
MTPSQEVDTRTTPEIDTEGYGNSDIDSLDELPGEVEMSLFDHLEELRQRIFYSLIAVAVGVVGCFFAVKPIVQLLEVPAQGVKFLQLAPGEYFFVSLKVAGYTGLLLSSPFILYQIILFVLPGLTRRERGLLGPIVLGSSVLFAAGLVFAYLLLIPAALNFFISYGADVVEQLWSIDKYFEFVLLLLFSTGLAFQVPIIQLLLANLGIVSSQRMISGWRFVIMAAVVLGAVLTPSTDPLTQSLLAGAVLTLYFGGIGLVKLTGK

SEQ ID NO: 12820 - DNA, 795 bp, Pseudomonas fluorescens PfO-1
  CDS (1)..(795): transl_table=11
atgacaggccctagcctccccgaaaacgaccagcacatgccgctggtttcgcacctcaccgagttgcgcacccgcctgctgcgttgcgtggcggcgatcttcatcatctttgccgggctgtttgccttcacccagcagatctacaccttcgtctcgacgccgctgcgcgaatacctgccggccggcgcgacgatgatcgccaccgacgtgtcgtcgccgttcctgacgccgctgaaactgacgatgatggtctcactgttcctggcgattccggtgatcctgcatcagatctggggcttcatcgcaccgggtctgtacaagcacgagaagcgtgtcgcagtgccgttgctgatctccagcatcctgctgttctacaccggcatggcgttcgcctacttcttcgtgttcccgctgatcttcaagttcttcgcctcggccaccccggccggcgtggaaatgatgaccgacatcaccagttacctcgatttcgtcatgacgctgttcttcgccttcggcgtggcgttcgaaatcccggtggccgtggtgctgctggtgtggatcggcgtggtcgacgtcaaatacctgaagaagatccgtccgtacgtgatcatcggctgcttcgtggtcggcatgatcctgaccccgccggacatcttctcccagaccctgctggccgtgccgatgtggatgctgttcgaagtcggcatcctcttcggcagtctggtcagcaagcgcgagcgcccggaagaaaccgccgacgatcacaacgaccagccgccagcgactcagccatga

SEQ ID NO: 12821 - protein, 264 aa, Pseudomonas fluorescens PfO-1
MTGPSLPENDQHMPLVSHLTELRTRLLRCVAAIFIIFAGLFAFTQQIYTFVSTPLREYLPAGATMIATDVSSPFLTPLKLTMMVSLFLAIPVILHQIWGFIAPGLYKHEKRVAVPLLISSILLFYTGMAFAYFFVFPLIFKFFASATPAGVEMMTDITSYLDFVMTLFFAFGVAFEIPVAVVLLVWIGVVDVKYLKKIRPYVIIGCFVVGMILTPPDIFSQTLLAVPMWMLFEVGILFGSLVSKRERPEETADDHNDQPPATQP

SEQ ID NO: 12822 - DNA, 870 bp, Rhodobacter sphaeroides 2.4.1
  CDS (1)..(870): transl_table=11
atgagcctcgacagccgagacgacatcgacagttccagtgctccgctgatcgagcatctggcagagttgcggaaccggatcctgatctcgctcgcggcctttctggtcgctatgctggcgtcgttcacggtctggaacccgatcttcaacttcctcacccacccgatctgcgacgcgctgaacgcgcgggggcaggactgctcgctgatcctcatcaagctgcaggaaggcttcttcgtggccatccgcatctcggtgatggggggcatcatcctctccttcccgatcatcgcatggcagatgtggcgtttcgtggcgccggggctctaccgcaacgaaaaggcggccttcctgccgttcatcgtcgcctcgccgctcatgttcctgctgggcggcatcttcgccttctacatcgtgctgcccatcgccttcgacttcttcctgggcttccagcagttcatgaccgagcagccgggcgctgtgcgcgaagacggcacgatgccgctcgcaggcgtggtgttccaggggtcgatggagcagtatctggcgctgaccacgaccttcatcctggccttcggtctctgcttccagcttccggtcctgctcacgctgatgggcaaggcggggctcgtgacggcgcggggcctctcctcgatgcgcaaatatgccatcgtgctgattctgatcgtggcggccttcgcgacgccgcccgacatgatgtcccagatgatcctcttcggcgcggtctatccgctctacgagatctcgatcctgctcatccgccggatcgagcggaagcgcgaggccgagctgcgggcgcaggggctgtggttcgaggacgagaacgaggaagaggacggcaaggcatga

SEQ ID NO: 12823 - protein, 289 aa, Rhodobacter sphaeroides 2.4.1
MSLDSRDDIDSSSAPLIEHLAELRNRILISLAAFLVAMLASFTVWNPIFNFLTHPICDALNARGQDCSLILIKLQEGFFVAIRISVMGGIILSFPIIAWQMWRFVAPGLYRNEKAAFLPFIVASPLMFLLGGIFAFYIVLPIAFDFFLGFQQFMTEQPGAVREDGTMPLAGVVFQGSMEQYLALTTTFILAFGLCFQLPVLLTLMGKAGLVTARGLSSMRKYAIVLILIVAAFATPPDMMSQMILFGAVYPLYEISILLIRRIERKREAELRAQGLWFEDENEEEDGKA

SEQ ID NO: 12824 - DNA, 732 bp, Carboxydothermus hydrogenoformans Z-2901
  CDS (1)..(732): transl_table=11
atggaagataaaccgatgacgttgtttgaacacttagaagctttacggaaagtaattattattagcgttattgccatagttattggctcaataattgcttataattatgtcgattattttctaaatatcttactccagccggttaccgctcttaaaatgaagttagtttttatcaatgtcaccgaagcatttatgacaaaactgaaaattgccataatactgggaattatacttgcctccccgataattttgtggcaaatctggagtttcgtcgctcccgggttgaaaccggcggaaagaaagtttatcctaaggatgattccagtaataattattttattcgtcgccggtatcgtttttgccttctttacagtctttcaaattgccacccgatttcttttacaatttggcggcgatattatgagtccgatgataaccatcggcaagtatatctcttttgctttaaattttttgataccttttggtctggtttttgagctgccggtagttgtttatatcctggccaagctaaatattatctcccatgaattcttggtaaaaaaccggaaatacgccttactggtggtatttatcctggccgccgccctgactcccggccccgatgtcataagccagctcttaatggctgctcctcttttaatcctctatgaagtaagcatatttatcgctaaatttataaaaccaaaagaattttccggagaacgcaagtaa

SEQ ID NO: 12825 - protein, 243 aa, Carboxydothermus hydrogenoformans Z-2901
MEDKPMTLFEHLEALRKVIIISVIAIVIGSIIAYNYVDYFLNILLQPVTALKMKLVFINVTEAFMTKLKIAIILGIILASPIILWQIWSFVAPGLKPAERKFILRMIPVIIILFVAGIVFAFFTVFQIATRFLLQFGGDIMSPMITIGKYISFALNFLIPFGLVFELPVVVYILAKLNIISHEFLVKNRKYALLVVFILAAALTPGPDVISQLLMAAPLLILYEVSIFIAKFIKPKEFSGERK

SEQ ID NO: 12826 - DNA, 789 bp, Burkholderia sp. 383
  CDS (1)..(789): transl_table=11
gtgagcgacccccagcagaacccgggcgacgccccggaagaaaccttcatttcccatctcgtcgagcttcgcgatcgcatcattcgcgcgggcgcggctgtgatcgtcgtgttcctcgggctcgtctactgggcgcccgacatcttccggctgctcgcgcggccgctgatggagaacctgccgaaggacggcaagatgatcgtcaccgacgtcaccggctcgttcttcgtgccgatgaaggtcacgatgctcgtcgcgctcgtgatcgcgctgccgatcgtgctgtaccagatctgggcgttcgtcgcgccggggctgtaccagcacgagaagaagctcgtcgcgccgctcgtaggcagcagctacttcctgttcctgtgcgggatggcgttcgcgtacttcctcgtgttcccgacgatcttccgcgtgatggcgcactacaacgcgccgctcggggcggaaatgaccaccgacatcgacaactacctgagcttcgtgctcgggatgttcatcgcgttcggggtcacgttcgaggtgccgatcgtcgtcgtgctgctcgtccggatgggcgtgctgtcgctgaagaagctgaaggagatgcggccgtacgtgatcgtcggcgcgttcgtcgtcgcggcggtcgtcacgccgccggacgtgttctcgcaactgatgcttgcactgccgctggtcgtgctgttcgagatcgggctgctggctgcgcggttcttcgtgccgaagaagccggccgaggaaggcgaggcggagaacggcgaagccgccagctga

SEQ ID NO: 12827 - protein, 262 aa, Burkholderia sp. 383
MSDPQQNPGDAPEETFISHLVELRDRIIRAGAAVIVVFLGLVYWAPDIFRLLARPLMENLPKDGKMIVTDVTGSFFVPMKVTMLVALVIALPIVLYQIWAFVAPGLYQHEKKLVAPLVGSSYFLFLCGMAFAYFLVFPTIFRVMAHYNAPLGAEMTTDIDNYLSFVLGMFIAFGVTFEVPIVVVLLVRMGVLSLKKLKEMRPYVIVGAFVVAAVVTPPDVFSQLMLALPLVVLFEIGLLAARFFVPKKPAEEGEAENGEAAS

SEQ ID NO: 12828 - DNA, 804 bp, Synechococcus sp. CC9605
  CDS (1)..(804): transl_table=11
gtgtctgagcgccccgaaggtcccccagctctgcaaccaccaccacccattcgcattgggaggccacctggcgatgccgatctacccaatgaggtggagatgcctctggtggatcaccttgaggaactgcgtcaacgggttctgcgcagcttgctggccgttgtcgttgcagcgctgacctgcctgctgggggttaaaccgctggtgcgcctgctggaagcgccagccagcggaattcattttcttcaactcgcgccgggtgagtttctgttcgtctcgctgaaggtggccggctacgccggcctcaccctggccctgccctacgtgctgttccagatcctggccttcgtgctgccgggcctgacgatccgcgaacgacgcctgattgcccctgccgtcgccggctccgcagtgctgttcatgacgggcctggcctttgcctggtgggccttagttccagccgccctgcgttttctggtgagttacggcgccgatgtggtggagccgctctggtcgatcgagcgctacctggattttgttctgctgctgatgctggccaccgggctggcatttcagctccccgtgctgcagctgctcctcggggccctggggctggtgcgctggaggccgatgcttggggcctggcgctgggttgtgttgggctcagccctggctggcgctgtgctgacgccatccaccgatccgatcacgatgttgctgctggctggagccatcacggcactgttcctgatcggagtcggcctggtggccctgaccgaatccttcagaccagaaactctttga

SEQ ID NO: 12829 - protein, 267 aa, Synechococcus sp. CC9605
MSERPEGPPALQPPPPIRIGRPPGDADLPNEVEMPLVDHLEELRQRVLRSLLAVVVAALTCLLGVKPLVRLLEAPASGIHFLQLAPGEFLFVSLKVAGYAGLTLALPYVLFQILAFVLPGLTIRERRLIAPAVAGSAVLFMTGLAFAWWALVPAALRFLVSYGADVVEPLWSIERYLDFVLLLMLATGLAFQLPVLQLLLGALGLVRWRPMLGAWRWVVLGSALAGAVLTPSTDPITMLLLAGAITALFLIGVGLVALTESFRPETL

SEQ ID NO: 12830 - DNA, 1107 bp, Desulfovibrio desulfuricans G20
  CDS (1)..(1107): transl_table=11
atgagtgacgagctgaaacgcgacgggcagaccggagattccgaagagcacgaaactgcggcaaacggagaaaccggaacttctaccgccgatgccgggcagggcgacacaaacgaacagcccgcagcggaacagcaggatacagcagcagattccacccccggggacggaactgatgctgataccggcgatgccgcagcagatgacccgtctgccgaatccgccgacgataacaataaagccggggcggaaaacgccccggctctttctgaatccgttcctcccgtacctgccgtcaaccgcgtgaccgaggcggcggcagatgaggaagaggatgaagacgaacggcccatgacgctgcttgaacatctggatgagctgcggttccggcttgtgcgctgctgtattgccgtgggtataggctttctggcctgttacggttttgcagaacagcttttcggctatctggtggctccgctgctggcagtaatgcccgaaacaagcactttgattttcaccgagctgcccgaagcgttcttcacctatcttaaaatatccatcgttgccggtatgttcctgaccagcccgtacatattttaccagatatgggcttttatcgctccaggactgtacgacgaggaaaaaaaatacatcattcccatggcaggtgtttccgcactgttctttgcgtcgggcgcctgcttcggctattttattgttttcccgttcgctttcgactttttcatgagctttaacaacgagaccattcaggccatgcccaagcttggtgaatatctcggtttttcgctcaagttgcttatagcgttcggcctgattttcgaaatgcctctgtttgcctttttcggcgcacggataggcattcttaccgctgcagccatgcgcaaagcccgcaaagtggctgtgctgtgcttctttattgtggcggccattcttaccccgcccgatgtcatctcgcagctgcttatggccggtccgctgctgttgctgtatgaagtaagcatctacgtggcacagattttcggccggtccgccaaagccggcgggcaggatgaagatgaaaacgatgagcaggaagaaacagcgtag

SEQ ID NO: 12831 - protein, 368 aa, Desulfovibrio desulfuricans G20
MSDELKRDGQTGDSEEHETAANGETGTSTADAGQGDTNEQPAAEQQDTAADSTPGDGTDADTGDAAADDPSAESADDNNKAGAENAPALSESVPPVPAVNRVTEAAADEEEDEDERPMTLLEHLDELRFRLVRCCIAVGIGFLACYGFAEQLFGYLVAPLLAVMPETSTLIFTELPEAFFTYLKISIVAGMFLTSPYIFYQIWAFIAPGLYDEEKKYIIPMAGVSALFFASGACFGYFIVFPFAFDFFMSFNNETIQAMPKLGEYLGFSLKLLIAFGLIFEMPLFAFFGARIGILTAAAMRKARKVAVLCFFIVAAILTPPDVISQLLMAGPLLLLYEVSIYVAQIFGRSAKAGGQDEDENDEQEETA

SEQ ID NO: 12832 - DNA, 972 bp, Rhodospirillum rubrum ATCC 11170
  CDS (1)..(972): transl_table=11
atggctccggcggacgcgacgcgcgacgaagattccgaccttgaagacaagaaaatgccgctgatcgatcatctgatcgaactgcgcagccgtcttttatggtcgacggtgttcttccttgtcgcctttttcgcctgtttcgcctatgcccaggaaatctataatattctggtcttgccgcttgcccgggtgatggagcgggtgggcgggtcgcagcgcatgatctataccgcgctgaccgaggcgtttttcacctatgtcaaggttggcgcctttggcgcgatcgtgctcagctttccgctgatcgccacccagatctggatgttcgtggctcccggattgtaccgccacgagaagcgcgcctttctgccgttcctcatcgtcagcccgatgttgttcatccttggggcggcgatggtttattatcttgttatgccaatggcttggtcgttcttgctcggctttcagacgacgcgcgagcaaaccgttttgccgatccagctggaagccaaggtcggcgaatatcttggcttggtgatgaagctgatcctggctttcggcttcagcttccagatgcccgtcgccctgacgctgatggcccgggttgggctggtcacctcgcgcgggctggccaaggcgcgcaaatacgccatcgtcgccgttttcgccggcgccgccgtcatcaccccccccgacatcatgagccaggtgatgctggccattccgctgctggtcctctacgagctttcgatcgtcgcggcgcggatggtggaaaagagcaaggggatcgaagacgacgatcttgagaatctcgacgacgacgagccccctccggcggccgcagcgccgtcgaccgcccataagcggggcgggaccacggccttggccgctccgcttgcccgcgatgaagaggccggggccgacggcgatccggggcgcttcgaagagaccgactggaatcatgggcattag

SEQ ID NO: 12833 - protein, 323 aa, Rhodospirillum rubrum ATCC 11170
MAPADATRDEDSDLEDKKMPLIDHLIELRSRLLWSTVFFLVAFFACFAYAQEIYNILVLPLARVMERVGGSQRMIYTALTEAFFTYVKVGAFGAIVLSFPLIATQIWMFVAPGLYRHEKRAFLPFLIVSPMLFILGAAMVYYLVMPMAWSFLLGFQTTREQTVLPIQLEAKVGEYLGLVMKLILAFGFSFQMPVALTLMARVGLVTSRGLAKARKYAIVAVFAGAAVITPPDIMSQVMLAIPLLVLYELSIVAARMVEKSKGIEDDDLENLDDDEPPPAAAAPSTAHKRGGTTALAAPLARDEEAGADGDPGRFEETDWNHGH

SEQ ID NO: 12834 - DNA, 744 bp, Moorella thermoacetica ATCC 39073
  CDS (1)..(744): transl_table=11
atggaagataagtccatgaccctgaccgaacacctggaagccctacgccgggtactcctggtatccattattgccctggttatagctacaatcgccgtctacttcggtttccgggaacaactcctagctttaatcctgcgtcccatgaaggatctgggtatcaagccggtctttattaccccgtgggaggcctttttcacgacgataaagatttgtttcgtagcagccatttttctggccctgccggttatcctctgggaggtctggagtttcgtcctgccggccctgcacagccatgaaagacggctggtatatatactcatgccggcttccataatcctcttcgtgggcggggtagtctttggttacctggttgttttcccggcagcggtacgtttcttgctggtaaccgccagcgaaggttttatgccctttattaccatctccaggtatttcgggttcctgagtatgtttgtccttcccttcggcgcggtttttcaattgcccctgatcattatgctcctgactcacctgggcctggtgacccccaggtttctggctaaaaaccgcaaatacgccgttctaataatattcattgtagctgccgttgtgaccccgacaccggatatggtttcccagaccctcatggcgctgcccatggtagttctttatgaagccagtatctggatatcttacctggttcgccgcaagcgggaagaaaaggtccggcaagaaggtatttaa

SEQ ID NO: 12835 - protein, 247 aa, Moorella thermoacetica ATCC 39073
MEDKSMTLTEHLEALRRVLLVSIIALVIATIAVYFGFREQLLALILRPMKDLGIKPVFITPWEAFFTTIKICFVAAIFLALPVILWEVWSFVLPALHSHERRLVYILMPASIILFVGGVVFGYLVVFPAAVRFLLVTASEGFMPFITISRYFGFLSMFVLPFGAVFQLPLIIMLLTHLGLVTPRFLAKNRKYAVLIIFIVAAVVTPTPDMVSQTLMALPMVVLYEASIWISYLVRRKREEKVRQEGI

SEQ ID NO: 12836 - DNA, 783 bp, Burkholderia thailandensis E264
  CDS (1)..(783): transl_table=11
gtgagcgacccccagcacaatccggacgaaggtccggaagaaaccttcatctcccatctcgtcgagttgcgcgaccggatcattcgggcaggcacggccgtgatcgtcgtgttcctcgggctcgtctactgggcaccggacatcttccggctgctcgcgcgaccgctgatggagaacctgccgaaaggcggcaagatgatcgtgaccgacgtcacgggctcgttcttcgtgccgatgaaggtgacgatgctcgttgcgctcgtgatcgcgctgccggtcgtgctgtaccaaatctgggcgttcgtcgcgccggggctctatcagcacgaaaagaagctcgtcgcgccgcttgtcggcagcagctacgtgctgtttctctgcgggatggcgttcgcgtacttcctcgtgtttccgacgattttccgcgtgatggcgcactacaacgcgccgctcggtgccgagatgtcgaccgatatcgacaattatctgagcttcgtgctcgggatgttcgtcgcgttcggggtcacgttcgaggtgccgatcgtcgtcgtgctgctcgtccggatgggcgtgctgacggtgaagaagctcaaggagattcggccgtacgtgatcgtcggcgcgttcgtcgtcgcggccgtcgtgacgccgcccgacgtgttctcgcagttgatgctcgcgctgccgctcgtgctgctgtacgaggccgggatcatcgcggcgcggctgttcgtgaagccgcccgcgaaggaagaggacgagagcgaggccgcggcgaattga

SEQ ID NO: 12837 - protein, 260 aa, Burkholderia thailandensis E264
MSDPQHNPDEGPEETFISHLVELRDRIIRAGTAVIVVFLGLVYWAPDIFRLLARPLMENLPKGGKMIVTDVTGSFFVPMKVTMLVALVIALPVVLYQIWAFVAPGLYQHEKKLVAPLVGSSYVLFLCGMAFAYFLVFPTIFRVMAHYNAPLGAEMSTDIDNYLSFVLGMFVAFGVTFEVPIVVVLLVRMGVLTVKKLKEIRPYVIVGAFVVAAVVTPPDVFSQLMLALPLVLLYEAGIIAARLFVKPPAKEEDESEAAAN

SEQ ID NO: 12838 - DNA, 834 bp, Syntrophus aciditrophicus SB
  CDS (1)..(834): transl_table=11
atgcccattcaggaattgcccatgactctacctgctgatgaaaaactgcccttgacgtcccatctggaggaattgcgaaaacgtctcattcatgttttcattgccctcggaatcggcttcactctctgctacatgttcaaagactggcttttttttgtggtgacccgtcccctgatcgcagtcatgcccaaaaacagtttcatgatcttcacctccctgccggaggccttttttacctatatgaagatctctttcttttcatcgctgatcctgacgagtccttacattctttatgagatctggaaatttgtttcacccggcctctatccgaaagaaaagagatacgttcttccctttgtctttttttcgaccctgctgtttgccggtggcgtccttttcggatactttatcgcgttgccgccagcttttaaattcttcgtctccttttcctccgatttcctcaaacccatggtctccatgcgggaatatctcagtcttgccctgaaatttctgctggccttcggactctgctttgagttgccggtctttgtttttttcctgaccaaggtcggcgtcatcaacgcccggatgctttcctcacagcgacgctatgccatcctgatcatcttcattgtcgcggccgtgctgacgccgtcaccggacgcggtcagccagatcctcatggcccttcccctcatggttctctatgaagtcagcatcctggtctcccggttagcggggcgcaagcgtcgcggcactctggaggaaaccggcaacgagatcgaccgaaaagaagaagaggaagacatcccggaaacgcccaaggctgaataa

SEQ ID NO: 12839 - protein, 277 aa, Syntrophus aciditrophicus SB
MPIQELPMTLPADEKLPLTSHLEELRKRLIHVFIALGIGFTLCYMFKDWLFFVVTRPLIAVMPKNSFMIFTSLPEAFFTYMKISFFSSLILTSPYILYEIWKFVSPGLYPKEKRYVLPFVFFSTLLFAGGVLFGYFIALPPAFKFFVSFSSDFLKPMVSMREYLSLALKFLLAFGLCFELPVFVFFLTKVGVINARMLSSQRRYAILIIFIVAAVLTPSPDAVSQILMALPLMVLYEVSILVSRLAGRKRRGTLEETGNEIDRKEEEEDIPETPKAE

SEQ ID NO: 12840 - DNA, 1095 bp, Frankia sp. CcI3
  CDS (1)..(1095): transl_table=11
gtgccagggttgcccacgccgcgaaggctcgtcgcctcggtgaactaccgccgcacgcgcactgtcgaggacagtcgcatgccgctcaccgagcatctgcgtgagctgcgcaaccgcgtcgccatcgcgctcctcgcgttcgcgatcgccggtgtcgtctgtttcatcttcgagccgcgcatcttcgactggctcaaggcgccgtactgcgacctgccggcgagcaagcggttcagcccggacggcctggcggcgaacgactgcaccctgtacttcttcggcatcctcgacgcgttcactatccgcctgaagatctccatgatcgccgcggtggtggtctcctcgccggtgtggctgtaccaactctggtccttcatcacccctggtctgcaccgtcatgagcggcgctggtcgttgaccttcgtcggtgtctccctcgtcctgttcgccaccggtgcggtcttcgcctacctgacgttgtcgaccgggctgggcctgctgctcggcttcggcggcaacgggctggtcagcgtcctggacggcaaccggtacctcagctacgtccaggcgatgctgctgatcttcggactgtcgttcgaggttccgctgctcgtcatgatgctgaatctggccgggatcgtcagcaccgccaagctgcgctcctggcggcggcccgagatcttcctggtgttcgtgttcgccgcggtcgtcacccccagccaggacccgttcaccatgctcgcgctgggcctgcccatggtgctcctctacgaggtcgcgctgatcatcggctggctgaacgaccggcgggtggcccgccgcggggacacctccccgtatgccgacctggacgacgacgagacctccccgctggacttcgacgacgccccgccccgcccggcggcctccgcgggccccgcggcgacggccacgtcgcccggcacggcgaacccgcccggcacggcgaacccgcccggcacggcgaacccggtcggcacggcgaacccggtcggcaccgggtcgtcaacacccgtcggcgcggggacggcccccgtctccccaagcaccgacgtcacccacggcgacatcacctga

SEQ ID NO: 12841 - protein, 364 aa, Frankia sp. CcI3
MPGLPTPRRLVASVNYRRTRTVEDSRMPLTEHLRELRNRVAIALLAFAIAGVVCFIFEPRIFDWLKAPYCDLPASKRFSPDGLAANDCTLYFFGILDAFTIRLKISMIAAVVVSSPVWLYQLWSFITPGLHRHERRWSLTFVGVSLVLFATGAVFAYLTLSTGLGLLLGFGGNGLVSVLDGNRYLSYVQAMLLIFGLSFEVPLLVMMLNLAGIVSTAKLRSWRRPEIFLVFVFAAVVTPSQDPFTMLALGLPMVLLYEVALIIGWLNDRRVARRGDTSPYADLDDDETSPLDFDDAPPRPAASAGPAATATSPGTANPPGTANPPGTANPVGTANPVGTGSSTPVGAGTAPVSPSTDVTHGDIT

SEQ ID NO: 12842 - DNA, 840 bp, Novosphingobium aromaticivorans DSM 12444
  CDS (1)..(840): transl_table=11
gtgatctctgacatcgatgaaacccaggcgccgctgctggaccacctgctcgaactgcgcacgcggttgctgcgctgcgtctatgcgctgatcgtggctttcgcggtgtgtttctactttgccgacgacatcttcgcgatccttgcccggccgctggtcgtggccttcccgccggggcagggcaagctgatctacaccaagctctacgaggcgttcttcgtcgagttgaaggtgtcgatgttcgcggcgttcttcatcagttttccggtaatcgccaaccagctctgggcctttgttgcgccggggctctatgcgcgggaaaagaaggcgtttttgccgttcctgttcgcaacgccgatcctgttcacgatgggcgccagccttgcgtatttcatcgtgatgccgaccgcgttcaagtggttcctcgggttcgaggggaacaagggcggccttcagctagaggcgctgccgggaacgggcgattatctcagtctcgtcatgcagttcatcctggccttcggcatcagcttcctgctgccggtcctgctcatgctgctgaaccgcgcggggatcgtcagccgcgagcaactggtcaaggcgcggcgctatgcgatcgtggtgatctttgccgtggcgaccgtggccaccccgccagacgtggtatcccagctcatgctggcgatcccgctgctgatcctgtttgaaggcacgctgctgatcatgcgcttcaccgagcgtgcggatgccaagcgacgggccgaggaagccgccgaggaagctgcggctgaagcacaggcgaggcttctgccagcaggcgaacagccacccctgcttccctga

SEQ ID NO: 12843 - protein, 279 aa, Novosphingobium aromaticivorans DSM 12444
MISDIDETQAPLLDHLLELRTRLLRCVYALIVAFAVCFYFADDIFAILARPLVVAFPPGQGKLIYTKLYEAFFVELKVSMFAAFFISFPVIANQLWAFVAPGLYAREKKAFLPFLFATPILFTMGASLAYFIVMPTAFKWFLGFEGNKGGLQLEALPGTGDYLSLVMQFILAFGISFLLPVLLMLLNRAGIVSREQLVKARRYAIVVIFAVATVATPPDVVSQLMLAIPLLILFEGTLLIMRFTERADAKRRAEEAAEEAAAEAQARLLPAGEQPPLLP

SEQ ID NO: 12844 - DNA, 735 bp, Methylobacillus flagellatus KT
  CDS (1)..(735): transl_table=11
ttgaataacgcttcagatactttcgtctcgcacttgattgagttgcgtgaccgcttgctacgcatcattatcggtatcgtgctgtgtacgctggtgttgttcccgttcgccaacgacatttaccagtttcttgccaaacctctgttgcatagcttgcccgttggcggtcaaatgattgcgactgatgtcacgacgccattctttgtgcccatgaaagtggtatttctcacggcattcatactttccctgccacacaccctgtatcaagtgtgggcatttgtcgcgccagggctttatacacacgagcggcgcctgatcgggccgcttgtatttgcgagtaccgtgttattcctgatggggatggcattcgcttattttctagtgttccccgttgtctttggctttattacccacactgcgcctgaaggggtggcggtgatgacggatattggcaagtacctagactttgccatgactcttttcattgcatttggattggcgtttgaggtgccggttgccgtggtcctgctggtgagtgctggtgtcgtcagtgttgcatccttgcgcgaagcgcgttcatacgtgattgtcggagcatttgtcatcggcgctatttttaccccgcctgatgtgatttctcaggtgatgctggctgtgcctttatgggtgctgtacgaggccggcatcctagtggccagcttgatccagaaaaaaggccaacggcaactggattaa

SEQ ID NO: 12845 - protein, 244 aa, Methylobacillus flagellatus KT
MNNASDTFVSHLIELRDRLLRIIIGIVLCTLVLFPFANDIYQFLAKPLLHSLPVGGQMIATDVTTPFFVPMKVVFLTAFILSLPHTLYQVWAFVAPGLYTHERRLIGPLVFASTVLFLMGMAFAYFLVFPVVFGFITHTAPEGVAVMTDIGKYLDFAMTLFIAFGLAFEVPVAVVLLVSAGVVSVASLREARSYVIVGAFVIGAIFTPPDVISQVMLAVPLWVLYEAGILVASLIQKKGQRQLD

SEQ ID NO: 12846 - DNA, 780 bp, Burkholderia xenovorans LB400
  CDS (1)..(780): transl_table=11
gtgagcgacccccagcaaacccaggacgaaggcactgaagagaccttcatttcccacctcgttgaattgcgcgaccgtatcattcgcgccggccttgccgtcgtcgtggtgttcgtcggactcgtgtattgggcgccggatatcttccggctgctggcgcggccgctgatgcagaatctgccgaaagacggcaagatgatcgtcacggatgtgaccggctcgttcttcgtgccgatgaaggtgaccatgctggtggcctttgtgatcgcactgccaatcgtgctgtatcagatctgggcgttcgttgcgccgggtctttaccagcatgagaagaaactggtcgggccgctggtgggcagcagctacacgctgttcctgtgcggcatggcgttcgcgtacttcgtggtgttcccgactattttccgcgtgatggcgcactacaacgcgccgctcggcgcggagatgaccacggatatcgacaattacctgagcttcgtgctgaccatgttcatcgcgttcggcgtgacgttcgaagtgccgatcgtcgtggtgctgctggtccgcatgaacgtggtgacgctcaagaagctcaaggagattcgtccgtatgtgatcgtgggcgcctttgtcatctccgctgtggtcacgccgccggacgtgttctcgcagttgattctggcgattccgctgatcgtgctttacgaggcggggatcattgcggcgcggttgatcgtaggcaagcagccggtggtgatcgaggatgcgggtgcgtcggagtga

SEQ ID NO: 12847 - protein, 259 aa, Burkholderia xenovorans LB400
MSDPQQTQDEGTEETFISHLVELRDRIIRAGLAVVVVFVGLVYWAPDIFRLLARPLMQNLPKDGKMIVTDVTGSFFVPMKVTMLVAFVIALPIVLYQIWAFVAPGLYQHEKKLVGPLVGSSYTLFLCGMAFAYFVVFPTIFRVMAHYNAPLGAEMTTDIDNYLSFVLTMFIAFGVTFEVPIVVVLLVRMNVVTLKKLKEIRPYVIVGAFVISAVVTPPDVFSQLILAIPLIVLYEAGIIAARLIVGKQPVVIEDAGASE

SEQ ID NO: 12848 - DNA, 816 bp, Acidobacteria bacterium Ellin345
  CDS (1)..(816): transl_table=11
atgcctagtccgacgatcgatcccgccatcagggcacggctttcacaagaagcattaaaggggatgagcttcctcgagcacctcgaggaactgcggcggcgcattatctggacttttgtttacatcgccgccggattcggcgtttgctggtggtggcacgagcagatttacgacttcatgcagcggcccatcatgaaggccctggccgcgaatcacctcgaccagaaactggtgtatctgaacccgaccgagcccttcaatatgtatttgaagatggcgttcatcgccgggctcttcgtggcctcgccttttgtgttgtatcaagtgtggttgtttattgcgccgggtctgtacaaacgtgagcggcgatacgtgctgccgttcatgttcagcacggtactgctgttcctcggcggaggcgttttcgggtactacatggtgtatccgaatgcgctgactttcctgatcggttacagccatcagttctcgccgatgattacgatcagtgaatataccgacctgttcctgacgatcattctcggccttggcattgtgtttgaaatgccgatcctcgtatttttcctcgcgctcatgggcatcgtgagtgcgggatggatgtggcgcaatctgcgctactcgatcctagtgattttcgtcatcgcggcgattattacgccgacaaccgacatcatgaacatgtgcgtcttcgcggcgcccatgattcttctctacatcctgtccatcggagttgcgttccttgtgcatccaaagaaccggcgcaagcggcgcgaggcacaggaagcgcaagaaggctaa

SEQ ID NO: 12849 - protein, 271 aa, Acidobacteria bacterium Ellin345
MPSPTIDPAIRARLSQEALKGMSFLEHLEELRRRIIWTFVYIAAGFGVCWWWHEQIYDFMQRPIMKALAANHLDQKLVYLNPTEPFNMYLKMAFIAGLFVASPFVLYQVWLFIAPGLYKRERRYVLPFMFSTVLLFLGGGVFGYYMVYPNALTFLIGYSHQFSPMITISEYTDLFLTIILGLGIVFEMPILVFFLALMGIVSAGWMWRNLRYSILVIFVIAAIITPTTDIMNMCVFAAPMILLYILSIGVAFLVHPKNRRKRREAQEAQEG

SEQ ID NO: 12850 - DNA, 951 bp, Mycobacterium sp. MCS
  CDS (1)..(951): transl_table=11
gtgcaaacccccggattcctcaagcggctcaacccgcggcaacgccgcgcacgggtcaatcccgacggcaccatgtcgttggtcgaacaccttcacgaactgcgcaaccggctcctggtggccgccgcggcgatcgtgctgacgaccatcttcggtttcttctggtacagccacggcatcctcggcttccacagcctcggcgaatggctgcgcggcccgtactgcgcgctgcctgagtccgcgcgcgcctccatcaccgaggacgggcagtgccgcctgctggccaccgcgccgttcgaccagttcatgctgcgcctgaaggtggcgctgatggcgggcatcgtgctggcctgccccgtgtggctgcatcaggtgtgggcgttcatcacccccggcctgtaccgcaacgaacgccggttcgcgatggcgttcgtgaccatcggggcggtgctcttcatcagcggcgcgatcctggcctacgtggtgctcgccaccgccctgggattcctgctgaccgtcggcagcgacgtgcaggtcaccgcgctctcgggtgaccagtacttcgggttcttgatcaacctgctgctggtcttcggcttcagcttcgaattcccgctgctgatcgtgatgctcaacttcatcgggatgctgccctacgagcgcctcaaggcgtggcggcgcggcctgatcttcgcgctgttcgtgttcgccgccttcttcacacccggctctgacccgttctccatgctcgcgctggcgtgtgcgctgaccgtgctgctcgagttcgcgatccagatcgcacgcatccacgacaagcgcaaggcgaagcgggaagccgccgaaaccgtgccggaggacgaggccgcgccgatcggcggcgtcgaaccgatcgaaccgcccagcgcggtgtcgagcccctcccgatccaccattcatgacgaatccacctga

SEQ ID NO: 12851 - protein, 316 aa, Mycobacterium sp. MCS
MQTPGFLKRLNPRQRRARVNPDGTMSLVEHLHELRNRLLVAAAAIVLTTIFGFFWYSHGILGFHSLGEWLRGPYCALPESARASITEDGQCRLLATAPFDQFMLRLKVALMAGIVLACPVWLHQVWAFITPGLYRNERRFAMAFVTIGAVLFISGAILAYVVLATALGFLLTVGSDVQVTALSGDQYFGFLINLLLVFGFSFEFPLLIVMLNFIGMLPYERLKAWRRGLIFALFVFAAFFTPGSDPFSMLALACALTVLLEFAIQIARIHDKRKAKREAAETVPEDEAAPIGGVEPIEPPSAVSSPSRSTIHDEST

SEQ ID NO: 12852 - DNA, 867 bp, Mesorhizobium sp. BNC1
  CDS (1)..(867): transl_table=11
gtgagtgtcaaggacaacgaggacgaggtggaaaaatcctcggcgccgctgatcgaacacctcatcgagctgcgttcacggctggtttgggcagtcggcgcgttcttcgtcgcctttctcgtctgcttctttttcgcccgcgagatcttcaacctgctggtgatcccgttccaatgggccacccgttgggcgggcctcaactccgagcaggtggacctcatctacaccgcgccgcaggagttcttcttcacgcagatcaagctggcgatgttcggcgggctggtgctcgcttttccgatgatcgccactcagatctataaattcgtggcgccggggctataccgcaatgagcggaaagcgttcctgccctttctggtcgcctcgccgatcctgttcctgatcggcgccgcgctcgtctatttcttcttcacgcccatggtgatgtggttcttcctgtccatgcagcaggtggggccggacaatgaggtccagatttcgcttctgccgcgcgtctccgaatatctcggtctggtgatgacgctgatcctctcattcggcctggtgttccagttgcccgtggtcacgacgctcatggcgcgtgtgggactgctttcctcgcaggcgctcgccgacaagcgcaagatggcgatcgttatcgctttcgtggttgcagcggttctgaccccgcccgatccgatcagccagatcggtcttgcgcttccgaccatccttctctacgaggtctcaatctggagcgcccggatggtggagcgcaagcgcgaggaagaaaggctggcagccgaagccgcgcaggcggcggaggaaaacgccccagcggatgccggaacgagcgcaggctcggcctga

SEQ ID NO: 12853 - protein, 288 aa, Mesorhizobium sp. BNC1
MSVKDNEDEVEKSSAPLIEHLIELRSRLVWAVGAFFVAFLVCFFFAREIFNLLVIPFQWATRWAGLNSEQVDLIYTAPQEFFFTQIKLAMFGGLVLAFPMIATQIYKFVAPGLYRNERKAFLPFLVASPILFLIGAALVYFFFTPMVMWFFLSMQQVGPDNEVQISLLPRVSEYLGLVMTLILSFGLVFQLPVVTTLMARVGLLSSQALADKRKMAIVIAFVVAAVLTPPDPISQIGLALPTILLYEVSIWSARMVERKREEERLAAEAAQAAEENAPADAGTSAGSA

SEQ ID NO: 12854 - DNA, 1041 bp, Rhodococcus sp. RHA1
  CDS (1)..(1041): transl_table=11
gtgcgaattccgttcgatccgcgccacagcaagcggaggaccaatcccgacggcaccatgtcgttggtcgatcacctctacgagctgcgcacgcggttgctcctgtcggtgctggccatcgtggtcaccaccgcggtgggcttcttctggtactcccaccagattctcgggatcgagagtctcggtgagcttctccgcgggccgtactgttcgctgcccgcgtcgagtcgcgccgacctgagcaacgacgggtcgtgccgcctcctcgcgaccggaccgttcgagcagttcatgctccgattcaaggtcgcgctgaccgcgggcgtcgtcctggcctgccccatctggctgtaccagctgtgggcgttcatcacgcccggtctctacgcgaaggagcgccgttacgcgatcggcttcgtggtgtccggtgccgcgctgttcatcgcaggcgccgtcctcgcctacgtggtcgtcgcgaaggcgctgcatttcctgctgacgatcggcgacaacgttcagatcaccgcactcggcggcgcggaatatttcgggttcatcatcaacctgctgatcatcttcggtgtgagcttcgagataccgctgctcatcgtcgcgctgaacttcgtcggcattctgccgtacgcgaagctcaaggcgtggcgccgcggcctgatcttcgctctgttcgtgttcgccgcgatcgcgacccccgggcaggacccattctcgatgctcgcgctcgcgttcgcgttgaccctgctgttcgaggtcgccgtgcagatcgcccgcatcaacgaccgccgcaaggcccgtcgcacggaacaggagtggggtgccctcgacgacgacgaggcgtcgaccatcgccgcaccgtcggacctgaacgaggcgttcgacgtcgccgccacaccggtccccgagccggcgggccggttccggcggtcacgcaagtccggcaagcccgcgggtgccaacaagaacgacgacgcgagcacgaccggcagcaacacaccgggtcaggacttctccgacaccctgtga

SEQ ID NO: 12855 - protein, 346 aa, Rhodococcus sp. RHA1
MRIPFDPRHSKRRTNPDGTMSLVDHLYELRTRLLLSVLAIVVTTAVGFFWYSHQILGIESLGELLRGPYCSLPASSRADLSNDGSCRLLATGPFEQFMLRFKVALTAGVVLACPIWLYQLWAFITPGLYAKERRYAIGFVVSGAALFIAGAVLAYVVVAKALHFLLTIGDNVQITALGGAEYFGFIINLLIIFGVSFEIPLLIVALNFVGILPYAKLKAWRRGLIFALFVFAAIATPGQDPFSMLALAFALTLLFEVAVQIARINDRRKARRTEQEWGALDDDEASTIAAPSDLNEAFDVAATPVPEPAGRFRRSRKSGKPAGANKNDDASTTGSNTPGQDFSDTL

SEQ ID NO: 12856 - DNA, 738 bp, Haemophilus somnus 129PT
  CDS (1)..(738): transl_table=11
atgactgtcgaaaaatctcagcccttaattagccatttattagaactgcgtgatagattattacgttgtatcgtttttgtggtcgtaatatttctcgccctagtttattttgcaaatgatatttataactttgttgcctcgcctttattagatgtattgcctgccggtgcgacaatgattgcgacgaatattgcgacacctttctttactccgattaagttaaccgcagtagttgctttatttatttcagtgccttttctgttatatcaagtttgggcatttgttgctcctgccttgtatcaacatgaaaagcggttggtatatcctttgctgttttccagcacattgttgttttatctcggtgtagcctttgcttattatgtggtattcccattagtatttgcttttttaactaagacagctccggaaggcgttgctatcgctacggatattagtagttatttggattttgttttagccctattcttggcctttgggatatgttttgaagtgccggtagccattgttttattatgctggagcggtgtgactacgccggatgatttaagaaaaaaaagaccttacattattgttgccgcattttttattggcatgctactaacgcctcctgatgcgatttctcaaacattgttggctttgccgatgtgtttattatttgagataggtgttatttgtgcgggtttttatcagccaaaagatgaacaggaaaaatcataa

SEQ ID NO: 12857 - protein, 245 aa, Haemophilus somnus 129PT
MTVEKSQPLISHLLELRDRLLRCIVFVVVIFLALVYFANDIYNFVASPLLDVLPAGATMIATNIATPFFTPIKLTAVVALFISVPFLLYQVWAFVAPALYQHEKRLVYPLLFSSTLLFYLGVAFAYYVVFPLVFAFLTKTAPEGVAIATDISSYLDFVLALFLAFGICFEVPVAIVLLCWSGVTTPDDLRKKRPYIIVAAFFIGMLLTPPDAISQTLLALPMCLLFEIGVICAGFYQPKDEQEKS

SEQ ID NO: 12858 - DNA, 858 bp, Trichodesmium erythraeum IMS101
  CDS (1)..(858): transl_table=11
atgacacttccagaggacttaaataagaatagtttagcacctacacctacaggtctaaaaaatccagaaattagctctgataaagtggaggatattacttccccagacttagaagatccccggaattcggaagcagatgataatcttgacaaagttcctgatgaagttgaaatgtcgatatttgagcatctcgaagagttacgaatgcggatattctcttctttaataggagcaatagtaggtatcttatgttgtttcatttttgttaaacccattgtcaaatttctagaagttccagctcaaggagtgaaatttatccaactcgctccaggagaatacttttttgtcactattaaagttgctgcttatgggggtcttctcttagcaagtccctttatactttatcaaataattaaatttgttctccctggtttaacgactagagaaagaagatttctcggaccaattttcttaggttctacagtcttatttggactggggttagtatttgcttattttgcaattgtaccagcagctttaaagttttttattggttatggtttagaagcggtagagcaagcatggtcaattgaaaaatactttgaatttgtattactattaatgtttagtacggcattagcatttcaagttccaattctacaattattattaggtattgtgggaatagttaattctcaacaaatgttatccagttggaaatatgtattgttaggatctgtagttttaggagctgttttaactccttctactgaccctttgactcaaagtctattaggtggagctgtagttgctctttatcttgcaggtacttttgttgttaagttaattggcaaataa

SEQ ID NO: 12859 - protein, 285 aa, Trichodesmium erythraeum IMS101
MTLPEDLNKNSLAPTPTGLKNPEISSDKVEDITSPDLEDPRNSEADDNLDKVPDEVEMSIFEHLEELRMRIFSSLIGAIVGILCCFIFVKPIVKFLEVPAQGVKFIQLAPGEYFFVTIKVAAYGGLLLASPFILYQIIKFVLPGLTTRERRFLGPIFLGSTVLFGLGLVFAYFAIVPAALKFFIGYGLEAVEQAWSIEKYFEFVLLLMFSTALAFQVPILQLLLGIVGIVNSQQMLSSWKYVLLGSVVLGAVLTPSTDPLTQSLLGGAVVALYLAGTFVVKLIGK

SEQ ID NO: 12860 - DNA, 750 bp, Shewanella sp. MR-4
  CDS (1)..(750): transl_table=11
atgtcgcaacagcagccacttatcagccatttgcttgaacttaggtccaagctgcttaaatccattgccagtgtgttattagtgttcatttgtagcgtgtattgggcaaatgatatttaccattacatggcaatccctttaatgcagtctttgcccttaggtggcagcatgattgcgaccgatgtggccgcacctttcttcgcccctttcaaactaactttggtactgtcattttttgtggcggtaccctatgtgctctatcaaatttggtccttcgtcgcacccggtttgtataagcatgaaaaacgcttagtcatgccgctactctttagcagcacagtgctgttttacttaggaatagcctttgcgtattacattgtattccctgtggtatttggcttctttgccaacacagcccccgagggagtacaagttgcgaccgatatcagcagctatctcgattttgtgctgaagttattttttgcctttggcttatcctttgaaatcccggttgccgtagtcctgctttgctgggcgggtgtaaccactcctgaagatctcaaacaaaaacgcccttatatcattgtcggcgcattcgtggtcggtatgctgttaacgccaccggatgttatatcccagactatgcttgccgtaccaatgctgttattgttcgaaggcggattatttgcagctcgtttttacagtaaacctgatgacgagaccgacgaagaagaatcaacgaacgactaa

SEQ ID NO: 12861 - protein, 249 aa, Shewanella sp. MR-4
MSQQQPLISHLLELRSKLLKSIASVLLVFICSVYWANDIYHYMAIPLMQSLPLGGSMIATDVAAPFFAPFKLTLVLSFFVAVPYVLYQIWSFVAPGLYKHEKRLVMPLLFSSTVLFYLGIAFAYYIVFPVVFGFFANTAPEGVQVATDISSYLDFVLKLFFAFGLSFEIPVAVVLLCWAGVTTPEDLKQKRPYIIVGAFVVGMLLTPPDVISQTMLAVPMLLLFEGGLFAARFYSKPDDETDEEESTND

SEQ ID NO: 12862 - DNA, 789 bp, Alkalilimnicola ehrlichei MLHE-1
  CDS (1)..(789): transl_table=11
gtgagtgaccgttccccggaccgggatcgcgacgaccagcaacgggattccaaccaggaggccttggaggaccagccgctgctgagccacctgctggagttgcgcagccgactgttccgcgcggtggtggtgatcctggtcgcctttctggcgctctatccctttgccgacgagatctaccagtttgtctccggaccgctgcgggcggtgctgccggagggcacctcgatgatcgccatcaaggtggcctcgcccttcctgatcccgatgaagctggccctggtggcggccatcttcctcaccatcccctataccctctaccaggcctgggcctttgtggcccccggcctctaccggcatgagcgccgcctggtggggccgctggtggtggccagcaccttcctgttctacgggggtgcggcgtttgcctactttgtggtgtttccgctggccttttccttcttcgcggccacaacccccgaaggggtgtcgatgatgacggatatcagcgaatatctgtccttcgtgcttaccctcttttttgcctttggtgtggcgttccaggtgccggtggccaccatcctgatggtgcgcaccggggccaccacgcgggaggcgctggcagccaagcggccctatgttatcgtcggggccttcgtcctgggcatgctgttgaccccgccggacgtgatctcgcaagtgctgctggcggtccccgtctacctgctttacgagttggggatcctcctggcgcggcggactgcaacccccgaggagcgggtggactag

SEQ ID NO: 12863 - protein, 262 aa, Alkalilimnicola ehrlichei MLHE-1
MSDRSPDRDRDDQQRDSNQEALEDQPLLSHLLELRSRLFRAVVVILVAFLALYPFADEIYQFVSGPLRAVLPEGTSMIAIKVASPFLIPMKLALVAAIFLTIPYTLYQAWAFVAPGLYRHERRLVGPLVVASTFLFYGGAAFAYFVVFPLAFSFFAATTPEGVSMMTDISEYLSFVLTLFFAFGVAFQVPVATILMVRTGATTREALAAKRPYVIVGAFVLGMLLTPPDVISQVLLAVPVYLLYELGILLARRTATPEERVD

SEQ ID NO: 12864 - DNA, 828 bp, Hyphomonas neptunium ATCC 15444
  CDS (1)..(828): transl_table=11
atgaaccagttgccgccaaaagatgagcagccagaaattctggatgatgaggtggagtcgagccgcgcgccgttgctgacccatctgatcgagctgcgcgggcggctgatcaagattctgctggcgctgggcacggcgaccatctttgcgttcttcttcgccgatcagatttacaacctgctggtcgcgccctttgcctcgatggcggaagatgtacgtggctcgaagctggaattcatcttcaccgcgccgatggaatttttcttcgccaagctgaagcttgcgctgtttgcgggcgtcttcctcgcattccccgttattgcctggcaggtctatgccttcgtcgcgccggggctctataaaaacgagcggggcgcgttctggccctacctggtgttcgcgcctctgttgttctcactgggagcggcgttcgtctatttcataatgctgccgatgctggcgcgcttcaccatttcgatggagcaggtcgacgcggcgcagacgacgatcaagatgatgccgcgggtgagcgattacctggcgctggtgatgtcgctgatgctggcctttggcatttcgttccagctgccggtgatcctcacattgctggccaagatcgggatcgtgacgtccgaaggcctgggcaaggggcgcaaatatgccatcgttggcatcctggcttttgctgcggtgttcacgccgccggatgcaatttcacagcttcttctcgcggtgccggtctactgtctctacgagatttcgatcttttgcgtgcgcctgatcgagaagaaagccgagaaggaagaggccgctacggccgcagagtga

SEQ ID NO: 12865 - protein, 275 aa, Hyphomonas neptunium ATCC 15444
MNQLPPKDEQPEILDDEVESSRAPLLTHLIELRGRLIKILLALGTATIFAFFFADQIYNLLVAPFASMAEDVRGSKLEFIFTAPMEFFFAKLKLALFAGVFLAFPVIAWQVYAFVAPGLYKNERGAFWPYLVFAPLLFSLGAAFVYFIMLPMLARFTISMEQVDAAQTTIKMMPRVSDYLALVMSLMLAFGISFQLPVILTLLAKIGIVTSEGLGKGRKYAIVGILAFAAVFTPPDAISQLLLAVPVYCLYEISIFCVRLIEKKAEKEEAATAAE

SEQ ID NO: 12866 - DNA, 828 bp, Rhizobium leguminosarum bv. viciae 3841
  CDS (1)..(828): transl_table=11
atgagcggtgatatcgaagacaagccgcagccgttgatcgagcacctgatggagctgcgcacgcggctgatgtggtcgatcggcgcgtttttcgtcgccttcatcgcatgcttcttttttgccaagaatctcttcaattatctggtcatcccatacaagacagcggtccagtgggctaatctcgacgtcgagaaggcccagctcatctacaccgcgccgcaggaattcttcttcacccaggtcaaggtggcgatgttcggcggccttgtggtcgctttcccgatcatcgccgcccaagtctacaagttcgtggcgcccggcctctacaagaacgagcgtcaggctttcctgccgttcctggtcgcctcgccggttctgttcctgatgggcggcgcgctcgtctatttcttcttcacgccgatggtcatgtggttcttcctgtcgatgcagcaggcgccgggtcatgacgagatagcgatctcgctgatgccgaaggtctcggaatatctgagcctgatcatgacgctggtcttctccttcggcctagtcttccagctgcctgtcatcaccacgctgctcgcccgtgtcggtcttctgacgtcgcaatggctcgccgaaaagcgcaagtttgccatcgtcctcgccttcgtcgtcgccgccgtgctgacgccgccggacccgatgtcccagatcggccttgcgataccgacgatccttctctacgagatttccatctatgcggcgcgactcgtggagcgccagcgtgcccggcaggcggtcgaaaaggaaaccggatccgcagacgttgccaagacggacagcgtctaa

SEQ ID NO: 12867 - protein, 275 aa, Rhizobium leguminosarum bv. viciae 3841
MSGDIEDKPQPLIEHLMELRTRLMWSIGAFFVAFIACFFFAKNLFNYLVIPYKTAVQWANLDVEKAQLIYTAPQEFFFTQVKVAMFGGLVVAFPIIAAQVYKFVAPGLYKNERQAFLPFLVASPVLFLMGGALVYFFFTPMVMWFFLSMQQAPGHDEIAISLMPKVSEYLSLIMTLVFSFGLVFQLPVITTLLARVGLLTSQWLAEKRKFAIVLAFVVAAVLTPPDPMSQIGLAIPTILLYEISIYAARLVERQRARQAVEKETGSADVAKTDSV

SEQ ID NO: 12868 - DNA, 861 bp, Solibacter usitatus Ellin6076
  CDS (1)..(861): transl_table=11
atgccccctcttcccgaagatgaggagatgctccgcatgtctttcgtggagcacctcaccgaagtgcgcgcgcgaattatcaaagccctgctcggcctgaccgtcgccttcgcggtcagcctgaccttcaccgaccccttgtggcgcttcatctgccgcccggccgcgcatgccctgcaatccctcggttatccgccgcagctctacgtgttcgacccgatggatagtttccagatcatctgggtcaagctccccgtggtctgggcgattttcctgggctcaccgtgggtgctctatcaggtctgggccttcatcgcaccaggactctatcgccacgaacgccgctgggctgcgccgctcatcataggctcctccggccttttcattctcggcggcgtcttcgcttacttcgtgatcttcccctacggcctgaccttcctgctgagtatcgcgaaaagcgaattcgtgattccgcaggtgccgctggatatctactttcagacgttcgtgaatgtagtgctgagcgtcgccgtgattttcgagctgccggtgctggtctttctgctcaccgtgctcggcgttgtcacaccgcgatttctcttgcggcagagccgtttcgtggtactggcgatcttcattctcgccgcctttgtaacgccatccaccgacgtcttcaacctgctgctgttcgctacgccgatgtgcgttctcttctatctcggcgtcctgctcagctacctgttcacgctgcgccgcgaccaccgcgcatttccctggaagccggtcttgctcatcgccggcggcgccgccgccgcaggcggcgcgacgtgggccttcgtccgctcacgccgcgcccactaa

SEQ ID NO: 12869 - protein, 286 aa, Solibacter usitatus Ellin6076
MPPLPEDEEMLRMSFVEHLTEVRARIIKALLGLTVAFAVSLTFTDPLWRFICRPAAHALQSLGYPPQLYVFDPMDSFQIIWVKLPVVWAIFLGSPWVLYQVWAFIAPGLYRHERRWAAPLIIGSSGLFILGGVFAYFVIFPYGLTFLLSIAKSEFVIPQVPLDIYFQTFVNVVLSVAVIFELPVLVFLLTVLGVVTPRFLLRQSRFVVLAIFILAAFVTPSTDVFNLLLFATPMCVLFYLGVLLSYLFTLRRDHRAFPWKPVLLIAGGAAAAGGATWAFVRSRRAH

SEQ ID NO: 12870 - DNA, 816 bp, Magnetococcus sp. MC-1
  CDS (1)..(816): transl_table=11
atgaacctggacgttgaacaaaaagccccgctggttgaacatctcattgagctacgcaaccgattgatgatctcggtaggggcgattattgtcggctttatcttgtgctacagcttttctgagcaaatttttgagtttttggcggcccccctgcatgagattttgggcccccaggcaaagatgatctacacggccctgcatgaagccttttttacgcagatcaaggtctctttttttgcgggactgtttctcgctatgccggtgctgtttacccagatgtggctgtttattgcgccggggctttaccaacatgagcgttcggccatcctgccctttttgtttgtcacaccggttctcttttttatgggtggcaccctagcttactactttgtttttccattggcttttaaatttttcttggggtttcagtcgtctaccatcgaagcgctaccgtccatgcgggagtatctttcgctggtgattaagctcatcattgcctttggtattacctttgagctgccggtggggctgttgttggccattaaggccggggttgtctctacggcgggtttggtagacaaacgtaaatacaatattgtattggcctttgtggcggcggccattttaaccccgccagacccctttacccaggtaatgttggccatacccattatgttgatgtatgaaatttcaatcttttttggtcgcggcatcgagcgcaaacgcgccgagcaagaagccgccgaagaggcccaatgggccgctgaccataatgtcgatgatgatgatgtagaccacccggagcataaagcatga

SEQ ID NO: 12871 - protein, 271 aa, Magnetococcus sp. MC-1
MNLDVEQKAPLVEHLIELRNRLMISVGAIIVGFILCYSFSEQIFEFLAAPLHEILGPQAKMIYTALHEAFFTQIKVSFFAGLFLAMPVLFTQMWLFIAPGLYQHERSAILPFLFVTPVLFFMGGTLAYYFVFPLAFKFFLGFQSSTIEALPSMREYLSLVIKLIIAFGITFELPVGLLLAIKAGVVSTAGLVDKRKYNIVLAFVAAAILTPPDPFTQVMLAIPIMLMYEISIFFGRGIERKRAEQEAAEEAQWAADHNVDDDDVDHPEHKA

SEQ ID NO: 12872 - DNA, 741 bp, Phaeodactylum tricornutum
  CDS (1)..(741): transl_table=11
atgacgactaattctaattttaattttacgaataatacaacagtaacattggaattacctttttcagaacatattgaagaattaagacaacgaatttttcttgtattttggataattctattattaacgtctgtatcatttattgaagtcaaaagtttagttaaaattttagaaatgccaattacaaatgtaaaattctttcaagtagctcctggcgaatattttatttcaactattaaaatttcattttacacagggttacttttttcaagtccatttgtaataggtcaattgattctatttttactaccaggcttaacaaaaaaggaaacaaaaattgttttacctttgctattaagttcattagttttatttgcattaggattagctttttcatattacacgttaattccggctgctttaaactttttcttaaactacagtgaagaagttttagaaccattctggtcttttgatcaatattttgaattcattttagttttattttacagcactggcttagcatttcagataccgattattcaaattttagttgggttattaaatattataacagctaaacaaatgttgggtgcgtggcggtatataatactagtgtcgacaattcttggggcaattttaacgccctcgactgatccttttacacagttgttgttatctttagcaatactgttattatatttatcaggattaggtatcttgtttttaataaagaactaa

SEQ ID NO: 12873 - protein, 246 aa, Phaeodactylum tricornutum
MTTNSNFNFTNNTTVTLELPFSEHIEELRQRIFLVFWIILLLTSVSFIEVKSLVKILEMPITNVKFFQVAPGEYFISTIKISFYTGLLFSSPFVIGQLILFLLPGLTKKETKIVLPLLLSSLVLFALGLAFSYYTLIPAALNFFLNYSEEVLEPFWSFDQYFEFILVLFYSTGLAFQIPIIQILVGLLNIITAKQMLGAWRYIILVSTILGAILTPSTDPFTQLLLSLAILLLYLSGLGILFLIKN

SEQ ID NO: 12874 - DNA, 957 bp, Mycobacterium avium 104
  CDS (1)..(957): transl_table=11
gtgaaagcattcaaggtttcagcgcgcacatccggcctgctgaagcgtctcaatccgcgcaacagacgcagccgcaccaatccggacgcgaccatgtcgctggtcgaccacctgaccgagctgcgcacccggctgctgatctccctggccgcaatcgcgctgaccaccatcttcgggttcttctggtactcgcattcgatcttcgggctggaaagcctcggcgagtggctgcgccatccctactgcgcgcttccgcagtcggcgcgggcggagatcagcgccaacgggcaatgccggctgctggccacggcaccgtttgaccagttcatgctgcggctcaaggtgggcttgacggccggggtggtgctggcctgtccggtgtggttctaccagttgtgggcgttcatcacgcccgggctgtaccagaaggagcgccgcttcgcgatcgcgttcgtgatcccggccgtggcgctgttcgtggccggcgcggtgctggcctacttcgtgctgtccaaggcgctgggctttttgctgacggtcggcagcgacgtgcaggtgaccgctctgtcgggggaccggtatttcggcttcctgatcaacctgctgatcgttttcggggtgagtttcgaattcccgctgctgatcgtcatgctcaacaccatcggcgtgctgacctacccgcggctcaaggcgtggcggcgcggattgatctttgcgatgttcgtgttcgccgcgatcttcacgcccggctccgatcccttttcgatgacggcgctgggcgtggccttgtcggtgctgctcgagttcgccatccagatcgcccggctgcacgacaagcgcaaggccaaacgcgaagcccaggccgtgattcccgacgaccaagcctcggtcatcgaaccgcccacggccataccggagccgtcgctgtcggccggccagcatgacgatgtcacctga

SEQ ID NO: 12875 - protein, 318 aa, Mycobacterium avium 104
MKAFKVSARTSGLLKRLNPRNRRSRTNPDATMSLVDHLTELRTRLLISLAAIALTTIFGFFWYSHSIFGLESLGEWLRHPYCALPQSARAEISANGQCRLLATAPFDQFMLRLKVGLTAGVVLACPVWFYQLWAFITPGLYQKERRFAIAFVIPAVALFVAGAVLAYFVLSKALGFLLTVGSDVQVTALSGDRYFGFLINLLIVFGVSFEFPLLIVMLNTIGVLTYPRLKAWRRGLIFAMFVFAAIFTPGSDPFSMTALGVALSVLLEFAIQIARLHDKRKAKREAQAVIPDDQASVIEPPTAIPEPSLSAGQHDDVT

SEQ ID NO: 12876 - DNA, 789 bp, Acidovorax sp. JS42
  CDS (1)..(789): transl_table=11
atgtccgaaataccgaaccaagaagacgagctcgccggtaccgagcagcctttcgtgcagcacctgatggagctgcgcgaccgcctcgtgaaggccatgatcgcggtgggggtcgtcgcggccgccctgttcttctaccccggtcccggccagctgtacgacttcctggccgcgcccttggtggcccacttgccgcagggggctaccatgatcgccacctcggtgatctcgcccttcatggtgccgctcaagatcctgctgatgtcggcattcctcgtggcgctgcccttcgtgctgtggcaggtgtgggccttcgtggcgccggggctgtattcgcacgagaagcgcctggtgctgccgctggtggtttccagcacggtgctgttcttcatcggcgtggcgttctgctacttcttcgtgtttgggcaggtgttcagcttcatccagggttttgcacccaagagcatcacggccgcgccggacatcgaggcctacctgggcttcgtgatgaccatgttcctcgccttcggcctggcctttgaggtgccgatcgccgtggtggtgctggcgcgcctgaacgtcgtgagcgtggaaaagctcaagagcttccgcggctacttcatcgtggtcgcgttcgtgatcgccgccatcgtcacgccgccggacgtggtgtcgcaactggcgctggcgattcccatgtgcctgctctacgagttgggcatctgggcggcgcagctgttcatccgccataccaaggcacccgaagatccgcaggaatccgcgccgtga

SEQ ID NO: 12877 - protein, 262 aa, Acidovorax sp. JS42
MSEIPNQEDELAGTEQPFVQHLMELRDRLVKAMIAVGVVAAALFFYPGPGQLYDFLAAPLVAHLPQGATMIATSVISPFMVPLKILLMSAFLVALPFVLWQVWAFVAPGLYSHEKRLVLPLVVSSTVLFFIGVAFCYFFVFGQVFSFIQGFAPKSITAAPDIEAYLGFVMTMFLAFGLAFEVPIAVVVLARLNVVSVEKLKSFRGYFIVVAFVIAAIVTPPDVVSQLALAIPMCLLYELGIWAAQLFIRHTKAPEDPQESAP

SEQ ID NO: 12878 - DNA, 825 bp, Magnetospirillum magnetotacticum MS-1
  CDS (1)..(825): transl_table=11
ttgagcgattcccacgacgacaagaccatgccgctgctcgagcatctgatcgagctgcgccggcggctgatctggtcggcgatcagcttcgtcatcgccttcgggatttgctattacttctccaacgagatctacgaattcctgctggagccttattccaaggcggctctggccaagggcggaaaccgccgcctgatctacaccgcgcccaccgaggcgttctttaccttcatgaaggtctcggccttcgccgccgccgccatgtgctttcccgtctgggcggggcagttgtgggccttcgtggcgcctgggctttataagcacgaaaagcaggcctttttgcccttcctgttcgccacgccggttctgttcatcatgggcggggccatggtctatttcctggtgctgcccaacctctacacctatctcctgggcttcgagaatctgatcggcggccccagtacgctgcccatccagatggaggccaaggtcaacgaatccctgtcgctgatcatgaccctgatcttcgccttcgggctggccttccagatgccggtgctgctgaccctgctggcacgcgtcgggctggtcaccgcccaaggtctggccgataagcgccgcttcgccattgtcggcaatttcgtcttcgccgccgtggtgacgccccccgatgtggtcagccagttgtcgctggccattcccatggtcgggctttacgagatttccatcctctcggcccgctgggcggagaagaagcgcgaagccgccctggccgatgacggcgacgacgacacggcccatgacgagaccgatttcaacgcttaa

SEQ ID NO: 12879 - protein, 274 aa, Magnetospirillum magnetotacticum MS-1
MSDSHDDKTMPLLEHLIELRRRLIWSAISFVIAFGICYYFSNEIYEFLLEPYSKAALAKGGNRRLIYTAPTEAFFTFMKVSAFAAAAMCFPVWAGQLWAFVAPGLYKHEKQAFLPFLFATPVLFIMGGAMVYFLVLPNLYTYLLGFENLIGGPSTLPIQMEAKVNESLSLIMTLIFAFGLAFQMPVLLTLLARVGLVTAQGLADKRRFAIVGNFVFAAVVTPPDVVSQLSLAIPMVGLYEISILSARWAEKKREAALADDGDDDTAHDETDFNA

SEQ ID NO: 12880 - DNA, 795 bp, Nostoc punctiforme PCC 73102
  CDS (1)..(795): transl_table=11
atgccgcctttacaagacgtagatactgtaaacgttcccaacatcgacccagaaggatatggcaactcggatacagatcctcttaatgagttgccagatgaagtcgaaatgtcccttttcgaccatctagaagagttacgacaacgaattttttattcgctgattgccgtagcgataggtattattggctgtttctttgccgttaagccgattgtccagctgcttgaggttccagcacaaggagtcaaatttctccaacttgcacctggtgaatatttctttgtctccctcaaagtcgcagcctacactggtttagtgctttctagtcctttcattctttaccaaattatccagtttgtgcttccaggactgactcgccgcgaacgccgtttattggggcctgtggtttttggttcgagtgtactgtttggcgcggggttagtatttgcctatttactccttatccccgcagcgttgaaatttttcatcagctacggagcagatgtagttgaacaactttggtcaatagataaatattttgaatttgtgctgctacttttattcagcactggtttagcatttcaaattcccatcatccaattgttgctcggtaatttgaatattgtctcgtctgaacggatggtttctggttggcgttacgtgattatgggagcagtggttttaggagctgtacttacaccttctaccgatcctctaactcaaagtcttttggcgggagccgttttagggctttatttcggtggtgttgggctggtgaagctcacaggtaaataa

SEQ ID NO: 12881 - protein, 264 aa, Nostoc punctiforme PCC 73102
MPPLQDVDTVNVPNIDPEGYGNSDTDPLNELPDEVEMSLFDHLEELRQRIFYSLIAVAIGIIGCFFAVKPIVQLLEVPAQGVKFLQLAPGEYFFVSLKVAAYTGLVLSSPFILYQIIQFVLPGLTRRERRLLGPVVFGSSVLFGAGLVFAYLLLIPAALKFFISYGADVVEQLWSIDKYFEFVLLLLFSTGLAFQIPIIQLLLGNLNIVSSERMVSGWRYVIMGAVVLGAVLTPSTDPLTQSLLAGAVLGLYFGGVGLVKLTGK

SEQ ID NO: 12882 - DNA, 756 bp, Rickettsia rickettsii
  CDS (1)..(756): transl_table=11
atgaaactatatagttttcaagaacatttattagaattaaaaataaggcttcttagaatatttactgcgtttataattatatttgctatttgctattattttagcgacaatatttatagtgttttattaaaaccgcttgctaagctaagcggtgatacggtacgaaatataatttatacagggcttacagaagcattttttacctatattaaacttgcagcttttactacttttactattattatacctataattgctttagagtgttatttatttatcagtcccgggttacaccgccatgaaaaaaaaattatcgcttttattctttttatgtcgcctattttattttggtgcggtagtatttttgttttttactttgtaatgccgaaagcttggaatttttttcttagttttgaaaaacgtgatatgatcctaccgatagttttggaagcaagaattagcgagtatctaaatttagttattcatttaattattgcttttggagtcgcctttcaactgccggttgtgataatgatattaaatatactaaaaatagttaaggtacaaacacttaagcaaaaaagatgcattgccgtggtaattaactttattattgcaggaatattaacgcctcctgacattttaagccagtttgctcttgcaataccgctacttttattatatgaaacttcaataattatatgtaattttatagaaaaactgaggacactaaatgttaaatatcaaatggattag

SEQ ID NO: 12883 - protein, 251 aa, Rickettsia rickettsii
MKLYSFQEHLLELKIRLLRIFTAFIIIFAICYYFSDNIYSVLLKPLAKLSGDTVRNIIYTGLTEAFFTYIKLAAFTTFTIIIPIIALECYLFISPGLHRHEKKIIAFILFMSPILFWCGSIFVFYFVMPKAWNFFLSFEKRDMILPIVLEARISEYLNLVIHLIIAFGVAFQLPVVIMILNILKIVKVQTLKQKRCIAVVINFIIAGILTPPDILSQFALAIPLLLLYETSIIICNFIEKLRTLNVKYQMD

SEQ ID NO: 12884 - DNA, 765 bp, Crocosphaera watsonii WH 8501
  CDS (1)..(765): transl_table=11
atgacccaaaccaatagtcaaccccgtaccgatgttgaaaaggaagcctatctcaacgaaatacccaatgaggtagaaatgtctttgtttgaccatctcgaagaactgcggatgcgtattttttactctttaattgcagtggcggtgggtatggttggttgtttcctggtggttaaacccttggtccgatggttagaagttccggctcaaggagtcaagtttttacagttagcccctggtgagttcttttttgtctcgattaaagtggctggttatagcggtttattggtggcgagtccttttattctttatcagattattcagtttgttttaccagggttaacccgtggggaacgtcttctattgggccctgtgattttaggatcgagtgtcttattttttgcgggaattggtttttcttattgggctttaattccggctgcgttaaacttttttatcacctacgggggcgatgttgttgaacaatcttggtccattgatcgctattttgagtttgttctattattaatgtttagtacgggtattgctttccaaattcctgtgattcaattaattttaggacagttgggtattgtctcttcaaatcagatgttaaagggatggcgtgtgattgttttaggctcggttattttgggtgcaattttaactccttctaccgatcccttaactcaatctttattagcaggggctgttttaggattatattttggtggtatcggccttgttaaattaactggaaaatag

SEQ ID NO: 12885 - protein, 254 aa, Crocosphaera watsonii WH 8501
MTQTNSQPRTDVEKEAYLNEIPNEVEMSLFDHLEELRMRIFYSLIAVAVGMVGCFLVVKPLVRWLEVPAQGVKFLQLAPGEFFFVSIKVAGYSGLLVASPFILYQIIQFVLPGLTRGERLLLGPVILGSSVLFFAGIGFSYWALIPAALNFFITYGGDVVEQSWSIDRYFEFVLLLMFSTGIAFQIPVIQLILGQLGIVSSNQMLKGWRVIVLGSVILGAILTPSTDPLTQSLLAGAVLGLYFGGIGLVKLTGK

SEQ ID NO: 12886 - DNA, 780 bp, Exiguobacterium sibiricum 255-15
  CDS (1)..(780): transl_table=11
atggcgatcgatcaagaacagagtgtgacatcgcacttagatgaactgcgtaagcggatcgtctggtcgctcatcattgtagtggtcatgtttatcgcagcctttccgctcgtccggccgctcgtccgtttcttacaggccgacttaaaggaactcggaattgggctgaatgcgtttaacgttgttgatccactgatgttatatctgaatcttgcgttcatcatcgcaatcgtcttggcatccccgttttggatgtatcagctttgggcattcatccgtcccggtctgcacgaccaagaacaaaaagcgacgttgacgtatattcccgtgacgtttttcttattccttgcgggtgtttcattttcttatttttggctgttgccgtttttactcgaagtatcgacagaactcggacaagagctcggaatcgaacaggtcatcggagtcgagaattatttcagctttctgatccggttgacgattccgttcggtctgttgttccagttaccggtcgtgacgatgtttttgacacggctcggactcgtgacgccgttcttcatgcggaagaatcggaagtatgcgtattttgcgttgttcgtgattgcggcgttgatctcaccgcccgacattacgtcgcatttgatgatttctgttccgttgttcgttttatatgaaatcagtatcctgatttcagcacggacctataaaaaagtcctgattctcgagcaggaagctgaactcgaacgacaggcggatatgatgcgtgagctgaacaaataa

SEQ ID NO: 12887 - protein, 259 aa, Exiguobacterium sibiricum 255-15
MAIDQEQSVTSHLDELRKRIVWSLIIVVVMFIAAFPLVRPLVRFLQADLKELGIGLNAFNVVDPLMLYLNLAFIIAIVLASPFWMYQLWAFIRPGLHDQEQKATLTYIPVTFFLFLAGVSFSYFWLLPFLLEVSTELGQELGIEQVIGVENYFSFLIRLTIPFGLLFQLPVVTMFLTRLGLVTPFFMRKNRKYAYFALFVIAALISPPDITSHLMISVPLFVLYEISILISARTYKKVLILEQEAELERQADMMRELNK

SEQ ID NO: 12888 - DNA, 807 bp, Kineococcus radiotolerans SRS30216
  CDS (1)..(807): transl_table=11
atgcccctcatggcccacctgaaggagctgcgcgaccgcgtcttcaaggcggccgtcttcctgctcatcggcagcgtggcgggctggttcctctggcggggctggaactacagctggggcgccttcgacggcgtcttccagtacctgcagcggcctctgctggactacgccgcctcggcggggtacgaggacgtcaagctcaacttcacccaggtcggccaggcgttcgacctggcggtgaagggggccatctggtgcggggtgatcgcctccagcccgttctggatctaccagctctgggccttcatcaccccgggcctgacgcggaaggagcggcgctacgcggtcgggttcatcttcgccgccgtcccgctcttcctcgccggcgcggccatcgcctacgcggtgctgcccaacgcgatgcggttcctcgtcgacttcacccccgtcgacgcggcgaacctcatcggggccgacatctacctgtcgttcgtcatgcggatcatcctggccttcggcctgggcttcctcatgccggtcgtgctggtcgggctgaacttcgcccacctgctgtcgggccgggcggtcctgcggcagtggcgcatcagcgtcttcctgagcttcctgttctccgccctcgtgacgccgacgtccgacatcaccacgatgctgctgctggcctgcccgctgctggtcctcttcgcgctggccacggtcatctgcatcctcaacgaccggcgccgctcgaagaactccgacgagccggactacaccgacctcagcgacgacgaagccagcgcgatctga

SEQ ID NO: 12889 - protein, 268 aa, Kineococcus radiotolerans SRS30216
MPLMAHLKELRDRVFKAAVFLLIGSVAGWFLWRGWNYSWGAFDGVFQYLQRPLLDYAASAGYEDVKLNFTQVGQAFDLAVKGAIWCGVIASSPFWIYQLWAFITPGLTRKERRYAVGFIFAAVPLFLAGAAIAYAVLPNAMRFLVDFTPVDAANLIGADIYLSFVMRIILAFGLGFLMPVVLVGLNFAHLLSGRAVLRQWRISVFLSFLFSALVTPTSDITTMLLLACPLLVLFALATVICILNDRRRSKNSDEPDYTDLSDDEASAI

SEQ ID NO: 12890 - DNA, 741 bp, Xylella fastidiosa Dixon
  CDS (1)..(741): transl_table=11
gtgacctcatcggacgatttagagagcgaaagtagcctgattgagcacttgatagaactacgtgcacgcctgatacggatgttgatcggtcttggcttggtggtcagcgcgctgctgccattctcaaaagtcctttaccgttggttggcgacaccgatcatctcgcaattacccactggacagaacgtgatctccacccaacctaccggagcggtgtttgcaccactgaaattgactttctttctgggcctattcatcgccatgccctgggtgttgtaccaggtatgggcgtttatcgcaccaggtttgtatcagcgcgaaaaacgactcgcactccctttgctgatctcagccgtcgtgttgttttatatcggttgcgcattcgcctacttcctggtgttgcccgcagtcttccatttcctgaccacgttcaaaccagacgtcatccagctgaccccagacgctggcgcttacctggacttcgtactagccatcttcttcgccttcggtgccagctttgaacttccagtggccatggtgattttgaccgtactgcactgggtcaaaccaacccaactgcgtgaaagccgcagttatgcgatcgttgccatcttcatctttgcagcagtactgacaccaccggatgttgtctcgcaactcatgctcgcaataccgatgtgcctcctctacgagcttggcattgttgccgcctgggcggtcacccgcccaaaaacggtttga

SEQ ID NO: 12891 - protein, 246 aa, Xylella fastidiosa Dixon
MTSSDDLESESSLIEHLIELRARLIRMLIGLGLVVSALLPFSKVLYRWLATPIISQLPTGQNVISTQPTGAVFAPLKLTFFLGLFIAMPWVLYQVWAFIAPGLYQREKRLALPLLISAVVLFYIGCAFAYFLVLPAVFHFLTTFKPDVIQLTPDAGAYLDFVLAIFFAFGASFELPVAMVILTVLHWVKPTQLRESRSYAIVAIFIFAAVLTPPDVVSQLMLAIPMCLLYELGIVAAWAVTRPKTV

SEQ ID NO: 12892 - DNA, 936 bp, Roseovarius nubinhibens ISM
  CDS (1)..(936): transl_table=11
atgagcgacagcaatattcccggcgatgagctcgaagacagcgccgcgccgctgatcgaacatctggcagagctgcgcatgcggctgatccgctgtgtggtggcgtttctcatcggcatggtgatctgtttcaccgtggcgacgcctatctttacctttctgacctcgccgctctgtcaggtgctggccgagcgggggcaggattgcgacctgatcttcatcagcccgcaagaagggttcttcgtggcgatcaaagtgtcgctcttgggcgggttcatcctgtcctttccctatctcgccaatcagatgtggcggtttgtggcgccggggctctacaaatccgagaagggcgccttcctgccgtttctcgtggcctcgcccttcatgttctttctcggcgcgagttttgcgttctacgtggtgacgccgctcgcctatgatttcttcctgggctttcagcagtttggcaccggtggcgaggcgctgcccgatggcgatccgcaaaatgccgcgccgctgagcgtggtgttccagggctcggcgcaggaatatctcaacctcacgatcaagttcatcgtggcctttggcctctgctttcagctgccggtgctgctcaccctgatgggcaaggcggggctggtgacggcgccggggctcaaggcggtgcgcaaatatgcggtggtgggcattctggtgctggccgcgctggtgacgccgcccgatgtgatcacccagatcatcctcttcaccgtcgtctatggcctttacgaagtgtcgatcttcctcgtggcccgtgtggagcgtgagcgtgaaaagcgtctgcgcgccgaagggctctggttcgacgatgaggacgaggacgcggacgcggatgacgtcgcggagggcatggatgcccatcccgaagagatgctggacgacgagaccaaaaaatga

SEQ ID NO: 12893 - protein, 311 aa, Roseovarius nubinhibens ISM
MSDSNIPGDELEDSAAPLIEHLAELRMRLIRCVVAFLIGMVICFTVATPIFTFLTSPLCQVLAERGQDCDLIFISPQEGFFVAIKVSLLGGFILSFPYLANQMWRFVAPGLYKSEKGAFLPFLVASPFMFFLGASFAFYVVTPLAYDFFLGFQQFGTGGEALPDGDPQNAAPLSVVFQGSAQEYLNLTIKFIVAFGLCFQLPVLLTLMGKAGLVTAPGLKAVRKYAVVGILVLAALVTPPDVITQIILFTVVYGLYEVSIFLVARVEREREKRLRAEGLWFDDEDEDADADDVAEGMDAHPEEMLDDETKK

SEQ ID NO: 12894 - DNA, 915 bp, Oceanicola batsensis HTCC2597
  CDS (1)..(915): transl_table=11
atgaccaccgccgaagacgagatcgacgacagctccgccccgctgatcgaacacctggcggaactgcgcacgcgcctgatccggtcggtgctggccttcatcgccggcatggtgatctgcttcaccgtctggaacccggtgttcaatttcctgacccagccgctctgcgacgccatggcggcccgcggcgaaagcggcgactgcggcctgatcctgatcaagctgcaggagggctttttcgtcgccatctcgatctcgcttctgggcgggctgatcctcgccttcccctacatctccttccagatgtggcgcttcgtggccccgggcctctaccgcacggagaagaacgccttcctgccgttcctgctggcctcgccgggaatgttcttcctcggcgcggccttcgccttctacgtcgtcacgccgctggccttcgacttcttcctgggcttccagcagcccggctcggtcctgggcgaggaaacggccgagaacggcgtcgccggcatcgccttccagggctccgcgcaggaatacctctcgctgacgatcaagttcatcgtcgccttcggcctctgcttccagcttccggtcctgctgacgctcatgggcaaggcggggctggtctcttccgaggggctgggcaatgtccgcaaatatgccgtcgtagcgatcctggtcctggccgccctggtcacgccgccggatgtgatcacccagatcatcctcttcgtcgtggtctacgggctctacgagatttcgatctggctggtccgccgggtcgagacccggcgcgaggaacgcctgcgcgccgaaggctactatgacgacgaggaagagatgtccgatatcgtcgcggccgaagacccgctgcacgaggacgagaccggatcctccggacgcgggaatgactga

SEQ ID NO: 12895 - protein, 304 aa, Oceanicola batsensis HTCC2597
MTTAEDEIDDSSAPLIEHLAELRTRLIRSVLAFIAGMVICFTVWNPVFNFLTQPLCDAMAARGESGDCGLILIKLQEGFFVAISISLLGGLILAFPYISFQMWRFVAPGLYRTEKNAFLPFLLASPGMFFLGAAFAFYVVTPLAFDFFLGFQQPGSVLGEETAENGVAGIAFQGSAQEYLSLTIKFIVAFGLCFQLPVLLTLMGKAGLVSSEGLGNVRKYAVVAILVLAALVTPPDVITQIILFVVVYGLYEISIWLVRRVETRREERLRAEGYYDDEEEMSDIVAAEDPLHEDETGSSGRGND

SEQ ID NO: 12896 - DNA, 849 bp, Erythrobacter sp. NAP1
  CDS (1)..(849): transl_table=11
atggcattcgaaatcaaggatatcgacgaaacacgcgcaccgctgctcgatcacctgatcgagcttcgcacgcggctcgtccgctcggttttcgcgcttctcgtcggtttcggtatctgtttttatttcgccgatccgatcctcggatttctggtgcagccattgaaagaggcgttccctgatggcgagggacagctgatcttcacgcgattgccggagattttcttcgttgagctcaaggtcgggctgtttgcaggctttatggtcagcttcccgatcattgcgaaccagctttgggcctttatcgcccctggtctttacgcaaatgagaagaaggctttcctgccctttctcattgcaacgcctgtgttgtttatcggtggagcggcgctcgcctactatgtggtgatgcccactgccttccggttttttcttggatttggaggcgaggcgggcggtctgtcggtccaggcgctgcccacagcaggcgattatcttagtctcgtcatgcagttcatcctcgccttcgggatcaccttcctgctgccagtgctgctgatgctgcttcaccgcgccggcattgtaacgcggtctcagctcgctggtgctcgccgttatgtgatcgtgggcgtggtcgcgcttgccgcgattgttactccgcctgatccaggtagccaggtgattcttgcggtgcctttgcttttgctgttcgagggttcgcttttgctcatgcgtgtgcaggagagggcgatgaagcgggctggcggcaagtccgatgctggcgaagcagcgaaggaaaaacccgatgaagttgcaagcggcgatgatccgagcgtcaccgctgactag

SEQ ID NO: 12897 - protein, 282 aa, Erythrobacter sp. NAP1
MAFEIKDIDETRAPLLDHLIELRTRLVRSVFALLVGFGICFYFADPILGFLVQPLKEAFPDGEGQLIFTRLPEIFFVELKVGLFAGFMVSFPIIANQLWAFIAPGLYANEKKAFLPFLIATPVLFIGGAALAYYVVMPTAFRFFLGFGGEAGGLSVQALPTAGDYLSLVMQFILAFGITFLLPVLLMLLHRAGIVTRSQLAGARRYVIVGVVALAAIVTPPDPGSQVILAVPLLLLFEGSLLLMRVQERAMKRAGGKSDAGEAAKEKPDEVASGDDPSVTAD

SEQ ID NO: 12898 - DNA, 816 bp, Synechococcus sp. WH 5701
  CDS (1)..(816): transl_table=11
atgagcgaaccaaccccatccacagccagcagcggagccaccgaaaccgccctgcccgcgccagcacccatccgcgtcagctgcccggatgagttccccggcgaagtggagatgagcctgctggagcacctggaggagctgcggcgtcgcgtgctgcgcagcctgctggccctcgtggtttcggcggccgtctgcctggtgctggtgcgccccctggtgcgcctgctgcaggtgccggcggtgggaatgcgtttcctgcaactggccccgggggaatttctgttcgtctccctcaaggtggccggttacgccgggctcacccttgtgctcccctacgtcctctatgaagtgctctccttcgtgcttcccggcctgaccaggcgcgagcgccggctggtggcccccgcggtagcggcctcggcggtgctgttcatggccggattggccttcgcctggtgggcgctggtgcccgcggccctgcgcttcctggtgaactacggcgccgatgtggtggagccgatctggtcaatcgagcgctacctcgacttcgtgctgttgttgatggtggccactgggctggcctttgagctaccggtgctgcagctgctgctcggtgctttcggtctggtgggatcccgcaccatgctgggggcctggcgctgggtggtgctgggctcggccctggccggcgccgtgctcaccccctccaccgacccggtcacgatgctgctgctcaccggagcgatcacggccctgttcctgatcggggtggcgctggtggccctggtggagcaggtgcgccccgagcccgcttga

SEQ ID NO: 12899 - protein, 271 aa, Synechococcus sp. WH 5701
MSEPTPSTASSGATETALPAPAPIRVSCPDEFPGEVEMSLLEHLEELRRRVLRSLLALVVSAAVCLVLVRPLVRLLQVPAVGMRFLQLAPGEFLFVSLKVAGYAGLTLVLPYVLYEVLSFVLPGLTRRERRLVAPAVAASAVLFMAGLAFAWWALVPAALRFLVNYGADVVEPIWSIERYLDFVLLLMVATGLAFELPVLQLLLGAFGLVGSRTMLGAWRWVVLGSALAGAVLTPSTDPVTMLLLTGAITALFLIGVALVALVEQVRPEPA

SEQ ID NO: 12900 - DNA, 753 bp, Pseudoalteromonas tunicata D2
  CDS (1)..(753): transl_table=11
atgactagccagcaggcacactccggctttatcagccatttagttgaactaagaaaccgcttaatgcgcgccatcttcgcaattttaattattttcctcagcttagtgtatttcgccaacgatatttatagctttgtcgctacgccattaattgaacatttacccgcaaatgccagcatgatcgcgaccgatgtcaccgcgccattttttgctccatttaaactaaccttgtttgcagcattgtttttggcttttccttttgttttgcatcaggtttggggatttattgcacctggcctgtatcaaaatgaaaagcgtatgcttattccagtactgatttcgagcgtattgctgttttatagcggtattgcatttagctactttgtggttttccctataattttgggcttttttactagcataggtccagaggtgatgactctcacccccgatatcagtagctatcttgattttgtactaaagttatttttcgcatttggtatcgcttttgaaatcccggtgtttattatgctgttatgctggagcggcatgaccaccacaaccgatttaaaaaacaaacggccttacattattgtaggtgcttttgtattggcgatgtttctaacaccgccggacgtgctatcgcaaacactgctcgccatccccatgctagccctgtttgaactcggcttagttttggcttcattttattcaaaaaaacaatcaacagaagaaatggaacaacaagaatga

SEQ ID NO: 12901 - protein, 250 aa, Pseudoalteromonas tunicata D2
MTSQQAHSGFISHLVELRNRLMRAIFAILIIFLSLVYFANDIYSFVATPLIEHLPANASMIATDVTAPFFAPFKLTLFAALFLAFPFVLHQVWGFIAPGLYQNEKRMLIPVLISSVLLFYSGIAFSYFVVFPIILGFFTSIGPEVMTLTPDISSYLDFVLKLFFAFGIAFEIPVFIMLLCWSGMTTTTDLKNKRPYIIVGAFVLAMFLTPPDVLSQTLLAIPMLALFELGLVLASFYSKKQSTEEMEQQE

SEQ ID NO: 12902 - DNA, 762 bp, Photobacterium sp. SKA34
  CDS (1)..(762): transl_table=11
atgtcaaaagtcgaagatacgcagccgctatttagtcatttacttgaactacgtacgcgacttttgcgttctatcataagtgtactggtggtttttctatgtttagtatggttttccaatgatatctatgccttcttagctgcaccattagtagagcgaatgcctgctggtgcaacgatgatcgcaacagatgtcgcctcaccgttctttacaccgataaaactgaccttagtaacctcagtgtttattgctgtaccaatgattttgtatcaagtatggggctttattgcacctggtctatacaagcatgaacgcaagctgattatgccgttgttgttttccagctcattgctgttttacaccggtgttgcatttgcttattacgtcgtgtttccgttggtctttaagttcttcaccagtgtcgcccctcaaggggtggaggtggcaacagatattgcgaactatctcgatttcgtcctatcgctatttatggcgtttggtatcgcttttgaaattcctgttgctattattctgttgtgttggactggtgcgactgatccagaatcgctacgtagtaaacgtccttacattatcgtaggtgcgtttgtcgttggtatgatgttaacaccgcctgatattgtttctcagaccttgttggctgtgcctatgtgtttattgtttgaagttggcttattcttctcacgtttttatgtacgtgataatgaagagctggatgatcgcgagcacgaagagcagcaataa

SEQ ID NO: 12903 - protein, 253 aa, Photobacterium sp. SKA34
MSKVEDTQPLFSHLLELRTRLLRSIISVLVVFLCLVWFSNDIYAFLAAPLVERMPAGATMIATDVASPFFTPIKLTLVTSVFIAVPMILYQVWGFIAPGLYKHERKLIMPLLFSSSLLFYTGVAFAYYVVFPLVFKFFTSVAPQGVEVATDIANYLDFVLSLFMAFGIAFEIPVAIILLCWTGATDPESLRSKRPYIIVGAFVVGMMLTPPDIVSQTLLAVPMCLLFEVGLFFSRFYVRDNEELDDREHEEQQ

SEQ ID NO: 12904 - DNA, 819 bp, Oceanospirillum sp. MED92
  CDS (1)..(819): transl_table=11
atgagtgataagaatcagggaacccctgaacaagatcaggaacagccactcatcagtcatctggtggaactacgccagagacttatgtatgttctatttgcggtcttagttatctttctgggtctgttctattttgcgaacgatctatatacctacttatctgcaccgctgactgctctgctgccggaaggcaccagtatgatagcaacggatgtcacatcacccttctttgcaccatttaagctaacactggttgctgcgatttttctggcaatgccatttgtgcttcatcagatctggggatttatcgcaccgggtttatataagcatgaaaagcgcctggccgttccgttgttagtctcaagcatctttctcttctatgccggtatagcctttgcttattttgtggtgtttccactgatcttcggcttctttaccagcgtaggtcccgagaatgtagcggtgatgacggatatcagtagttatctaaactttgttctgaagctgttcttcgcgtttggtgttgtgtttgaaattccaatcgcaactttgttactcatctggacaggtgctgcaaccccagaggggcttcgacagaaaagggcctatgtaatcgtcggttgctttgtcttaggtatgttgctgacacccccggatgttatttcgcaaagcttattagcagttccaatgtggttactgtttgaagcaggcattcttttgggtgtgatctttgtccgaaaggagaaagaggaagaagacgaagaattagaggatgaatttgcagaagcaatgcaagaagaggaagagaacagtaaataa

SEQ ID NO: 12905 - protein, 272 aa, Oceanospirillum sp. MED92
MSDKNQGTPEQDQEQPLISHLVELRQRLMYVLFAVLVIFLGLFYFANDLYTYLSAPLTALLPEGTSMIATDVTSPFFAPFKLTLVAAIFLAMPFVLHQIWGFIAPGLYKHEKRLAVPLLVSSIFLFYAGIAFAYFVVFPLIFGFFTSVGPENVAVMTDISSYLNFVLKLFFAFGVVFEIPIATLLLIWTGAATPEGLRQKRAYVIVGCFVLGMLLTPPDVISQSLLAVPMWLLFEAGILLGVIFVRKEKEEEDEELEDEFAEAMQEEEENSK

SEQ ID NO: 12906 - DNA, 753 bp, marine gamma proteobacterium HTCC2143
  CDS (1)..(753): transl_table=11
atgactgacactgaaaaaaatcaagaccaggcgcagccattggtaagccaccttactgagctacgagatagattgctgcgctgcgtattggcaattttagtggtcttctttagtctcttttatttcgctaatgacatatattattttgtttcagagcctctgcgagtattgttgccagagggaactagtatgattgctacagaagtagcgtccccatttttaacgcccttcaagctaactttagtcgcttcgttgatccttgcaatgcctattattctttaccaagtctggggtttcattgctccgggtatgtaccgttcagaaaaacgtattgccattccattactggcttctagcatcgtcttattctacgcaggtctggccttcgcgtattacgtagtctttccgctgatttttggctttttcagcggcgtaggaccagaaggtgtcgcctacactcctgatattgcccgcttccttgatatcgtattgaaattattttttgcgtttggcgtcgccttcgaaattcctatcgcaactatattgttgatttgggctggtatcacaacacctgaaaccctctctgaaaaacgcccttatattgttgttgggtgttttgtgtttggcatgctgctgacaccacccgatataatttcgcaagcactgctagcattaccgatgtggctactttttgaatttggcgtcttctttggtcgttttattcaccctcgagaggacgaaaagaccacgtaa

SEQ ID NO: 12907 - protein, 250 aa, marine gamma proteobacterium HTCC2143
MTDTEKNQDQAQPLVSHLTELRDRLLRCVLAILVVFFSLFYFANDIYYFVSEPLRVLLPEGTSMIATEVASPFLTPFKLTLVASLILAMPIILYQVWGFIAPGMYRSEKRIAIPLLASSIVLFYAGLAFAYYVVFPLIFGFFSGVGPEGVAYTPDIARFLDIVLKLFFAFGVAFEIPIATILLIWAGITTPETLSEKRPYIVVGCFVFGMLLTPPDIISQALLALPMWLLFEFGVFFGRFIHPREDEKTT

SEQ ID NO: 12908 - DNA, 789 bp, Pseudomonas putida GB-1
  CDS (1)..(789): transl_table=11
atgagcgagaatccggaacacgaccagcctatgccgctggtttcgcacctgaccgaactgcgcacccgcctgctgcgctgcgttgccgtcattttcctgatctttgccgggctgttctccttcgcccagcagatctacaccctggtctcggcgcctctgcgcgaccatttgccggccaacgcgacgatgatcgccaccgacgtggcctcgccgttcctcacgccgttcaagctgaccatgatcgtgtcgctgttcctggccatcccgttcattctccagcagatctggggctttatcgcgccagggctgtaccgccatgaaaaacgcattgccattccactgctggtgtcgagcattctgttgttctacgccggtatggcctttgcctatttcctggtgttcccgctgatgttcaagttctttgccgccgccaccccggcaggcgtggcaatgatgaccgacatcgccaactacctcgacttcgtgatgacgctgttcttcgcctttggcgttgccttcgaaatcccggtggcggtggtgctgctggtgtggatcggcgtggtcgacgtgaagtacctgaagaagatccgcccctacgtgatcatcggctgtttcgtggtcggcatggtcctcaccccgccggacatcttctcccagactttgctggccgtgcccatgtggctgctgttcgaggtcggtgtgctgtgcggcagcctgatccgcaagcgtagtgcccacgacgaagaagccaacgaccacaacgaccagccacctgcgacccaaccgtga

SEQ ID NO: 12909 - protein, 262 aa, Pseudomonas putida GB-1
MSENPEHDQPMPLVSHLTELRTRLLRCVAVIFLIFAGLFSFAQQIYTLVSAPLRDHLPANATMIATDVASPFLTPFKLTMIVSLFLAIPFILQQIWGFIAPGLYRHEKRIAIPLLVSSILLFYAGMAFAYFLVFPLMFKFFAAATPAGVAMMTDIANYLDFVMTLFFAFGVAFEIPVAVVLLVWIGVVDVKYLKKIRPYVIIGCFVVGMVLTPPDIFSQTLLAVPMWLLFEVGVLCGSLIRKRSAHDEEANDHNDQPPATQP

SEQ ID NO: 12910 - DNA, 762 bp, Pseudomonas putida GB-1
  CDS (1)..(762): transl_table=11
atgagcagtgccatggacccgacggccagcatgccgttgaccgaacacctgcgcgacctgcgcaaacgcctggtgcgttgtctggggttggtggcattggtgttcgccggcctgttccccttcgcccaaacgctgtacacgctcatctccgagccgcttcggcgctttttgccggaaggcgcgagcatgatcgccaccagcgtcacctcgccgtttttgacgccgttcaagctgacagcgatgtgcgcactgttcgtggccatgccgctgctgctgcatcaggcctggggctttctggcaccggggttgtaccgccgtgaacggcgcattgccctgccgctgctggtgtcgagcatcgtgctgttctatgccggcatggcgttcgcgttcttcctggtgtttccgatgatgttcggcttttttgccagcgtgacaccggacggtgtggcgatgatgactgacatcagccagtacctggactttatcctggcgctgtttttggcattcgggctggcattcgagatcccggtggcgaccttcatcgtggtctgggtggggttggccgatgtggccacattgcggcgcagcaggccctacgtgatcgtcgggtgctttgtggtggggatgatcctgacgccgccggatgtgttttcgcagacgatgctagcggtgccgatgtggatactgttcgaggtgggattgctggcttgtgcctggttgaagcggcctgagcccggcaaggagattgtggccggcttatag

SEQ ID NO: 12911 - protein, 253 aa, Pseudomonas putida GB-1
MSSAMDPTASMPLTEHLRDLRKRLVRCLGLVALVFAGLFPFAQTLYTLISEPLRRFLPEGASMIATSVTSPFLTPFKLTAMCALFVAMPLLLHQAWGFLAPGLYRRERRIALPLLVSSIVLFYAGMAFAFFLVFPMMFGFFASVTPDGVAMMTDISQYLDFILALFLAFGLAFEIPVATFIVVWVGLADVATLRRSRPYVIVGCFVVGMILTPPDVFSQTMLAVPMWILFEVGLLACAWLKRPEPGKEIVAGL

SEQ ID NO: 12912 - DNA, 789 bp, Marinobacter sp. ELB17
  CDS (1)..(789): transl_table=11
atgacagaacagaccggggccgctaaccacgtgcccgaccagcctgaaatgccgctgattgaacatctactggaattgcgtaaccgcctgctgaagatggtgctggcggtggtggtgtgtttcgcctttatttacccgtttgccaacgaactttacctttggttgtctgaacctatccgcagcctgctgccggtgggccagagcatgattgccaccgatgttacctcgccgttttttgcccctctgaagctggccctcgtgctggcggtgtttgccgccatcccggtcattctgtaccagctttggagctttattgccccgggcctgtacacccatgagaaaaaaatagcctttccactgcttttttcgtcagtgctgctgttctatctgggtgctgcttttgcctactacgtggtgtttccactggttttcggtttctttacctcggttggccctgagggcattgtggaactgccagacatcaccagctatctgaatttcgtgttgaaaatgttctttgcctttggcgtggcgttcgagattccaattgccaccattctgctggttattaccggcatcaccacgccggatgacttggcggccaagcgcccttatgtggtggttggttgctttgttatcggcatgctgctgaccccgccggacattatctcgcaaaccttgctggcgctgcccatgtggattttgtttgagctcggcatcctgttcggccgcttgatgaagcgcaaagttgcgggtaccggcgaggaaaaagagcccggcagcgaatga

SEQ ID NO: 12913 - protein, 262 aa, Marinobacter sp. ELB17
MTEQTGAANHVPDQPEMPLIEHLLELRNRLLKMVLAVVVCFAFIYPFANELYLWLSEPIRSLLPVGQSMIATDVTSPFFAPLKLALVLAVFAAIPVILYQLWSFIAPGLYTHEKKIAFPLLFSSVLLFYLGAAFAYYVVFPLVFGFFTSVGPEGIVELPDITSYLNFVLKMFFAFGVAFEIPIATILLVITGITTPDDLAAKRPYVVVGCFVIGMLLTPPDIISQTLLALPMWILFELGILFGRLMKRKVAGTGEEKEPGSE

SEQ ID NO: 12914 - DNA, 813 bp, Erythrobacter sp. SD-21
  CDS (1)..(813): transl_table=11
atggctttcgacgtgaaggatatcgacgacagccaggcccccctgctcgaccatctgatcgagctgcgcggccgcttggtgcgctgcgtggcggcgctggtggtggcgtttggcgcatgcctctattttgccgaccaaatcctcggcttcctgattcagccgctcaagaaagccttcccggacgggcagggccagttgatcttcaccaagctttacgaggtcttcttcgtcgagctgaaagtcgcgctctttgcaggtttctgcatcgcctttccctatatcgcgaaccagctctgggccttcgtcgcacccgggctttacgcgaaggagaagaaggctttcctgcccttcctgttcgccacacccttcctgttcctcgccggggcgagccttgcgtattacgtggtcatgccgaccgccttcgagtggttcctcggcttcgagggcagcgcgggcgggttggaaattcaggcgctgccgacggcgaacgaatatctcggcctcgtgatgcagttcatcctcgctttcgggatgagcttcctgctgccggtcctgctgttgctgctccaccgcgcaggcatcgtgacgcgcgcgcaactggtcggcgcgcggcgctatgtcatcgtgctggtggtggctctggcggcgatcatcacgccgcccgacccgggctcgcagctgctgctcgccgtgccgttgctgctgctcttcgaaggctcgctggtcctaatgcgcattttcgagaagcgcgaagcgaaggcgaagtccgaggaagaggtgagcgagcccgaagccgatcagtcggcctcgtag

SEQ ID NO: 12915 - protein, 270 aa, Erythrobacter sp. SD-21
MAFDVKDIDDSQAPLLDHLIELRGRLVRCVAALVVAFGACLYFADQILGFLIQPLKKAFPDGQGQLIFTKLYEVFFVELKVALFAGFCIAFPYIANQLWAFVAPGLYAKEKKAFLPFLFATPFLFLAGASLAYYVVMPTAFEWFLGFEGSAGGLEIQALPTANEYLGLVMQFILAFGMSFLLPVLLLLLHRAGIVTRAQLVGARRYVIVLVVALAAIITPPDPGSQLLLAVPLLLLFEGSLVLMRIFEKREAKAKSEEEVSEPEADQSAS

SEQ ID NO: 12916 - DNA, 756 bp, Xanthomonas oryzae pv
  CDS (1)..(756): transl_table=11
gtgagcctgttcgacgacgcacaggccgaaagcagtctgatcgagcatctggtcgaattacgcgcccgcctggtgcgcgcgctgagcggtctgggcgtggtgctgttgaccttgctgccgttctcgcgggcgatttactcgtggctggctgcgccgctgatttcgcagctgccgctggggcagaccatgatcgcgatgaacccggccggtgcgttcttcgccccgctcaaactcactttcttcgtggcagtgttcttcagcgtgccgtggttgttgtatcaggcctgggcattcgtggcgccggggttgtaccagcgcgaaaagaaactggcatttccgctgctggcttcggcggtggcgctgttttacatcggctgtgcgttcgcgtatttcctggtgttgccggcggtgttccactttctgaccacgttcaagccggacgtgatcgccattaccccggacgccaattcgtacctggatttcgtcctggccatcttcttcgccttcggtgccagtttcgagctgccggtggcattggtgatcctggtgctgctgggctgggtcacgccgaagcaactcagtgagggccgcggctacgccatcgtcggcatcttcatcctggccgccgtgctcaccccgccagacgtcgtgtcgcagctgatgctggcccttccgatgtgcctgctctacgagctgggcatcatggcttcgcgtgcggtggcaccgaaggacgcggcgtccaacgctgctggttga

SEQ ID NO: 12917 - protein, 251 aa, Xanthomonas oryzae pv
MSLFDDAQAESSLIEHLVELRARLVRALSGLGVVLLTLLPFSRAIYSWLAAPLISQLPLGQTMIAMNPAGAFFAPLKLTFFVAVFFSVPWLLYQAWAFVAPGLYQREKKLAFPLLASAVALFYIGCAFAYFLVLPAVFHFLTTFKPDVIAITPDANSYLDFVLAIFFAFGASFELPVALVILVLLGWVTPKQLSEGRGYAIVGIFILAAVLTPPDVVSQLMLALPMCLLYELGIMASRAVAPKDAASNAAG

SEQ ID NO: 12918 - DNA, 1059 bp, Vitis vinifera
  CDS (1)..(1059)
  misc_feature (19)..(19): y is t or c
  misc_feature (235)..(235): r is g or a
  misc_feature (957)..(957): k is g or t
atgggaagcaccagtggtytcttctctcttcttcgcatcaacaactgctgtttttttaatcagctccaccctatcagacaccacaaacctcccctgcaaatccaccgcaggagagcaccgggctttgggccatctcagaggctccgccttagaaatttcagcacgcttgtttgttctgccgttgaagatgatgcgagggataagcagcagcaactgggtggcggtgttgggtcarttgttgaggagaggcctgtggctgaggactcaggtgaagatacactgcaaaacgttgaccaagataaaaaagaaaatggtctttatgattttctttatcccagtaaagagctcctgccagatgataaagaaatgtccatatttgatcatctagaggagctacgtcagagaatatttgtgtcagttttggcagttggagctgccatgttgggatcttttgcattttcaaaagaactggttatgattcttgaagctcctgttaaagaacagggtgttcgatttctgcaactggctcctggagagtttttctttacaactttgaaggtatcaggatactgtggtcttctcttggggagccccatcatcttatatgaaattatagcttttgttcttccaggtttaacaaaggcagagagaatgtttctggggccaattgtattagggtcctcagtacttttctacgctggtatcatcttctcctactcgattctcaccccggcagccttgaatttctttgttaattacgcagaaggagctgtggaatctttgtggtctattgatcaatactttgagtttgtctttgtgctcatgttcagcactggtttgtcttttcaggttccagtcatacaacttctactgggacaagttggtgtagtgtcaggagatcaaatgctgtcaatttggagatatgtcgtggttggtgctgttgtggctgctgcagtkcttactccatcaactgatcctctaactcaggtgcttctggcagggccccttttgggtctctacttgggtggggcatggatggtaaagcttatggggcggtga

SEQ ID NO: 12919 - protein, 352 aa, Vitis vinifera
  misc_feature (7)..(7): The Xaa at location 7 stands for Leu, or Phe.
  misc_feature (79)..(79): The Xaa at location 79 stands for Ile, or Val.
MGSTSGXFSLLRINNCCFFNQLHPIRHHKPPLQIHRRRAPGFGPSQRLRLRNFSTLVCSAVEDDARDKQQQLGGGVGSXVEERPVAEDSGEDTLQNVDQDKKENGLYDFLYPSKELLPDDKEMSIFDHLEELRQRIFVSVLAVGAAMLGSFAFSKELVMILEAPVKEQGVRFLQLAPGEFFFTTLKVSGYCGLLLGSPIILYEIIAFVLPGLTKAERMFLGPIVLGSSVLFYAGIIFSYSILTPAALNFFVNYAEGAVESLWSIDQYFEFVFVLMFSTGLSFQVPVIQLLLGQVGVVSGDQMLSIWRYVVVGAVVAAAVLTPSTDPLTQVLLAGPLLGLYLGGAWMVKLMGR

SEQ ID NO: 12920 - DNA, 837 bp, Ostreococcus tauri
  CDS (1)..(837)
atgacgacgacgacgcggaagacgcgcgcgttcgtggaggcgccgagcgagccggcgcagcgagagcaagtgcggagctttctgtatccgggggaggatcagctcccggatgacgtgtcgatgacgatctgggaacatctcgaggagcttcgcgagcgcgcgctcgtgagcgcggccgcggtggggtcgctcattttgctgtgcttttgctttgcgaaagatttgacaattttcctcgagcagcccgtggcgagccaaggggtgcggtttcttcaactcggtccgggtgagtacttcttcaccacggtcaaggttgcggggtacaccggtttgctcgcgggcgcgcccgtggtgctgtacgaggcgatcgcgtacgtcttaccgggtttgacgctgaacgagcgcaagacgctgggtccaatcgtgctcggttcctcggtgttgttttacggaggcatcgtcttcgcgtattacatcctggtacccgcggcgctcaaattctttgtcggttacgccgatggtgcggtcgagtcgctctggtccatcgatcagtactttgagttcgtcctcgtccttctcttctccaccggattgtcgttccaggtgcccgtgattcagctcttactcggacagactgggctcgtgagctctcaacagatgctcggtgtttggagatacgtcgtcgtgggctcggtcgtcgccgccgccgtcctcacaccgtcgacggatccgtttacgcagatgctgctcgccgtgccgctcatgtctctgtatttgggcggcgccgcgctcgtcggcgtcgtcgaaaaaggtagagacgccgacgccgccgcgtga

SEQ ID NO: 12921 - protein, 278 aa, Ostreococcus tauri
MTTTTRKTRAFVEAPSEPAQREQVRSFLYPGEDQLPDDVSMTIWEHLEELRERALVSAAAVGSLILLCFCFAKDLTIFLEQPVASQGVRFLQLGPGEYFFTTVKVAGYTGLLAGAPVVLYEAIAYVLPGLTLNERKTLGPIVLGSSVLFYGGIVFAYYILVPAALKFFVGYADGAVESLWSIDQYFEFVLVLLFSTGLSFQVPVIQLLLGQTGLVSSQQMLGVWRYVVVGSVVAAAVLTPSTDPFTQMLLAVPLMSLYLGGAALVGVVEKGRDADAAA

SEQ ID NO: 12922 - DNA, 819 bp, Magnetospirillum gryphiswaldense
  CDS (1)..(819): transl_table=11
atgagcgacgacaagaccatgcccttgctcgaccatctggtcgagttgcgccgccgcctgttgtggtcggtgctggccttcgtcgtcgtcttcgccggctgtttctatttcgccgccgacatctactccatcctgatggacccttatgccaaggtggccctggataagggcggcatgcgccggctgatctatacggcgccgaccgaggccttcttcacctatgtcaaggtgtcggccttcgccgccggcgtcctttgctttccggtgtgggccggccagttgtgggcgttcgtcgcccctggtctctacaagaacgaacgtcaggccttcatgccgttcctgttcgccaccccggtattgttcagcctgggtgccgccctggtgtacttcctggtcctgcccatgctgtacacctatctgctgggcttcgaaaatctggtgccgcatcagggtgagttgcccattcaattggaagccaaggtcagcgaatcgctgtccctgatcatgaccctgatcttcgccttcggcctcgccttccagatgccggtgctgctgacgcttttggcccgcgtcggtctggtcaccgccaaggggctgaaggaaaagcgccgctacgccatcgtcggcgtcttcgtcttcgctgcggtggtcaccccgcccgatgtggtcagccagttgtccctggccgtgcccatggtgattttgtacgaattgtcgatcatttccgcccgtatggcggaaaagaagcgcggcgaaccctcggaagaggatgaggccgacgaagacgaccctgtggacgagaccgatttcaacgcttaa

SEQ ID NO: 12923 - protein, 272 aa, Magnetospirillum gryphiswaldense
MSDDKTMPLLDHLVELRRRLLWSVLAFVVVFAGCFYFAADIYSILMDPYAKVALDKGGMRRLIYTAPTEAFFTYVKVSAFAAGVLCFPVWAGQLWAFVAPGLYKNERQAFMPFLFATPVLFSLGAALVYFLVLPMLYTYLLGFENLVPHQGELPIQLEAKVSESLSLIMTLIFAFGLAFQMPVLLTLLARVGLVTAKGLKEKRRYAIVGVFVFAAVVTPPDVVSQLSLAVPMVILYELSIISARMAEKKRGEPSEEDEADEDDPVDETDFNA

SEQ ID NO: 12924 - DNA, 768 bp, Bacillus licheniformis
  CDS (1)..(768): transl_table=11
atgaagggaaaagaaatgtcgctgttagaacatatcacagaactgcgcagacggcttgtgatcacttttttcttttttgttttgtttgttgcggcaggcttttttttggcgaagccgctcataatctacctgcagcagacggatgaagcgaagctgctgactctcaatgcgttcaagctgaccgatcctttatttgtgtacgtgcagttcgcgttcatcatcggcgctgtcttgacttcgccgcttgttctataccagctgtgggctttcatcagcccggggctgtatgaaaaagaacgaaaagtgacgctcagctatattccaatatcgatcattctttttttaggcggcattgccttttcttactttattttatttccgtttgtcgtggactttatgacgagagtctcagatgatctgaatgtcaaccaggtcatcggaatacacgaatattttcagtttctgcttcagttgacgcttccttttggcttgttgtttcagatgcctgtggtcatcatgtttatcacaaggctcggtctcgtgacgccgatgtttttggcgaaaatccgaaaatatgcatattttgtgttgttcgtcattgcggcgctcattacaccgcctgagttattgtcgcatttaatggtctccgtgccattgctcattctttatgaaatcagtatcgtgatttcaagaatatcctacaggcaggcgcaaaaaacaatgattcaagaggaaaatcaatcgtttttgaacgaccatacaaaataa

SEQ ID NO: 12925 - protein, 255 aa, Bacillus licheniformis
MKGKEMSLLEHITELRRRLVITFFFFVLFVAAGFFLAKPLIIYLQQTDEAKLLTLNAFKLTDPLFVYVQFAFIIGAVLTSPLVLYQLWAFISPGLYEKERKVTLSYIPISIILFLGGIAFSYFILFPFVVDFMTRVSDDLNVNQVIGIHEYFQFLLQLTLPFGLLFQMPVVIMFITRLGLVTPMFLAKIRKYAYFVLFVIAALITPPELLSHLMVSVPLLILYEISIVISRISYRQAQKTMIQEENQSFLNDHTK

SEQ ID NO: 12926 - DNA, 828 bp, Rhizobium leguminosarum bv
  CDS (1)..(828): transl_table=11
atgagcggtgatatcgaagacaagccgcagccgttgatcgagcacctgatggagctgcgcacgcggctgatgtggtcgatcggcgcctttttcgtcgccttcatcgcatgcttcttttttgccaagcatctcttcaactatctggtcataccctacaagacagccgtcgtgtgggcgcatctcgacgtcgagaaagcccagctcatctacaccgcgccgcaggaattcttcttcacgcaggtcaaggtggcgatgttcggcggccttgtggtcgcgttcccgatcattgccgcccaggtctacaagttcgtggcgccgggtctctacaagaatgagcgccaggctttcctgccgttcctgatcgcctcgccggtcctgttcctgatgggcggcgcgctcgtctatttcttcttcacgccgatggtcatgtggttcttcctgtcgatgcagcaggcgccaggtcatgacgaaatagcgatctcgctgatgccgaaggtctcggaatatctgagcctgatcatgacgctggtcttctccttcggcctcgtcttccagcttcccgtcgtcaccacgctgcttgctcgtgtcggtcttctgacgtcgcaatggctcgccgaaaagcgcaagtttgccatcgtcctcgcctttgttgtcgccgccgtgctgacgccgccggatccgatgtcccagatcggccttgcgataccgacgatccttctctacgagatttccatccatgcggcgcgactcgtggagcgccagcgtgcccggcaggcggtcgaaaaggaaactggatccgcagacgttgccaagacggacagcgtctga

SEQ ID NO: 12927 - protein, 275 aa, Rhizobium leguminosarum bv
MSGDIEDKPQPLIEHLMELRTRLMWSIGAFFVAFIACFFFAKHLFNYLVIPYKTAVVWAHLDVEKAQLIYTAPQEFFFTQVKVAMFGGLVVAFPIIAAQVYKFVAPGLYKNERQAFLPFLIASPVLFLMGGALVYFFFTPMVMWFFLSMQQAPGHDEIAISLMPKVSEYLSLIMTLVFSFGLVFQLPVVTTLLARVGLLTSQWLAEKRKFAIVLAFVVAAVLTPPDPMSQIGLAIPTILLYEISIHAARLVERQRARQAVEKETGSADVAKTDSV

SEQ ID NO: 12928 - DNA, 840 bp, Acidianus ambivalens
  CDS (1)..(840): transl_table=11
gtgacggaaagaactgaacttaaaagagacgaagagaagcctcttttgtcgcatattgcagaattagcgatgagactaaggagaggacttatcagtctttttttggcattcgtaatattttttgcctttggatatactactataaatattggcggatatactgttcccatcttatatcctagtttatttcacagtttagccgacagtctaatgttattttttattcaccatgagctaccaaaagggatggaattacttaacttaaatccattcgatcctctatatgcctctgcatatacttctttctatttagcattatttatttcccttccaataatttttagagagttatggggtttcgtttctccagggttatatgagcatgagaaaaagttggttaaatatataatattccctgccgcgttactttttgctgctggttctctttttgcttattttataatagttcctttgatgatgaagttcgtagttttatataccacagccttgggcgttgagccgacgcttagtttaagagccttcgtctcaactgtagtttcccttatgatggttaccggaatagccttcgagtacccactagcgatgtcgatactaacttacgtcggaatggttaaggctgatagctggaagaagaattggagatggggagtgatgggagcttttatcatagcctggattatttctcccggaacaacaggaggagtaattgagactacaataggagttatactctcagtattatatttcgtaggagtagcctcagcaaaaataatagaaaaaaggaagatcaaaaggaatgaagaaacaatacaaaggtaa

SEQ ID NO: 12929 - protein, 279 aa, Acidianus ambivalens
MTERTELKRDEEKPLLSHIAELAMRLRRGLISLFLAFVIFFAFGYTTINIGGYTVPILYPSLFHSLADSLMLFFIHHELPKGMELLNLNPFDPLYASAYTSFYLALFISLPIIFRELWGFVSPGLYEHEKKLVKYIIFPAALLFAAGSLFAYFIIVPLMMKFVVLYTTALGVEPTLSLRAFVSTVVSLMMVTGIAFEYPLAMSILTYVGMVKADSWKKNWRWGVMGAFIIAWIISPGTTGGVIETTIGVILSVLYFVGVASAKIIEKRKIKRNEETIQR

SEQ ID NO: 12930 - DNA, 1005 bp, Corynebacterium glutamicum
  CDS (1)..(1005): transl_table=11
gtggttaagcgccctcggcgagttatctcaaaaaagaagaagaagtctcctacgggagagatgtccattgttgagcacatcaaagagtttcgacgccgacttcttatcgctctggcgggcatcctcgtgggcaccattatcggctttatttggtacgatttctcattttggcagatccccactttgggcgagctgctgagggatccgtactgttctctgcctgctgaatcccgctgggccatgagcgactcagaggaatgtcgactgctcgcaaccggcccgtttgatccattcatgcttcgccttaaagtagcggcgttggtgggtatggttcttggctcacccgtgtggctgagccagctgtggggctttatcaccccaggtttgatgaagaatgagcgccgttacaccgcaatcttcgtcacgattgctgttgtgctgtttgtcggcggtgctgttcttgcgtacttcgtcgttgcatatggtttggagttcctccttaccattggtggagacacccaggcagcggccctgactggtgataagtacttcggattcttgctcgcgttgttggcgattttcggcgtgagcttcgaagttccactggtgatcggcatgctcaacattgtgggtatcttgccttacgatgccattaaagataagcgacgcatgatcatcatgattttgttcgtgttcgctgctttcatgacacccggccaggatcctttcaccatgttggtgttggcgctttcactcaccgttctggtagagcttgccctgcagttctgtcgtttcaacgacaaacgccgggacaagaagcgcccagaatggcttgatggcgatgacctctctgcatcaccactggatacttctgctggtggagaagatgctccaagcccagtcgaaaccccagaggcggtggagccttcgcggatgctgaacccaagtggggaggcgtcgataagctataaacccgggcgcgccgacttcggtgacgtgctctag

SEQ ID NO: 12931 - protein, 334 aa, Corynebacterium glutamicum
MVKRPRRVISKKKKKSPTGEMSIVEHIKEFRRRLLIALAGILVGTIIGFIWYDFSFWQIPTLGELLRDPYCSLPAESRWAMSDSEECRLLATGPFDPFMLRLKVAALVGMVLGSPVWLSQLWGFITPGLMKNERRYTAIFVTIAVVLFVGGAVLAYFVVAYGLEFLLTIGGDTQAAALTGDKYFGFLLALLAIFGVSFEVPLVIGMLNIVGILPYDAIKDKRRMIIMILFVFAAFMTPGQDPFTMLVLALSLTVLVELALQFCRFNDKRRDKKRPEWLDGDDLSASPLDTSAGGEDAPSPVETPEAVEPSRMLNPSGEASISYKPGRADFGDVL

SEQ ID NO: 12932 - DNA, 1062 bp, Pisum sativum
  CDS (1)..(1062)
atgggtttgggaaccaccactgttcctacgaacatccttcctcaattcgggttgcaccgaacccacttaaaccccatccgggtcaacaattcgaccgggttcagctaccctctctctctaagaaagaacaagagttttgatagactcgtttgtttcgccgttgatgacgaaatcagagagaagcaacaacaacagttgagtactagttccactagacttggctccgccgttgaagaaagacccgagaataaagatatgattgatggtataagtgaagaagcattggaaaattttaaggaagatggggaaagaagtgctatctacgattttctttatcctagtaaagagcttctacccgatgataaagagatgagcatatttgatcaccttgaagagctacgagagagaatctttatatcagttctgggagttggaggaagcattttgggatgctttgcgttttcaaaagatttggtaaagattctcgaagctcctgttaaatcagaaggtgtccgatttcttcagcttgctcctggtgaatttttcttcaccactttaaaggtgtctggatactgtggcctcctcttgggaagtcccatcattctctacgaaatcatagcctttataattccaggtctaacgaaagaagaaagaaagtttctcgggccaattgttttaggctcatccgttcttttttatgccggaataaccttctcctacttagttttggtacctgcggcattaaatttctttgtcaattacgccgaaggcgctgttgaatcattatggtccattgatcaatactttgagtttgttctggttcttatgttcagcacaggcttgtctttccaggtgcctattatacaacttctattgggacaacttggattggtatctggagacaagatgctatcggtatggaggtatgttgtagtcggcgcagtagtggcagcagctgtagttacaccatcgacagatcctctgactcaagttcttctagcggcgcccttattaggcctttacttgggtggtgcatggatggtcaaactcgctggacggtaa

SEQ ID NO: 12933 - protein, 353 aa, Pisum sativum
MGLGTTTVPTNILPQFGLHRTHLNPIRVNNSTGFSYPLSLRKNKSFDRLVCFAVDDEIREKQQQQLSTSSTRLGSAVEERPENKDMIDGISEEALENFKEDGERSAIYDFLYPSKELLPDDKEMSIFDHLEELRERIFISVLGVGGSILGCFAFSKDLVKILEAPVKSEGVRFLQLAPGEFFFTTLKVSGYCGLLLGSPIILYEIIAFIIPGLTKEERKFLGPIVLGSSVLFYAGITFSYLVLVPAALNFFVNYAEGAVESLWSIDQYFEFVLVLMFSTGLSFQVPIIQLLLGQLGLVSGDKMLSVWRYVVVGAVVAAAVVTPSTDPLTQVLLAAPLLGLYLGGAWMVKLAGR

SEQ ID NO: 12934 - DNA, 717 bp, Legionella pneumophila
  CDS (1)..(717): transl_table=11
atgttaattcatttaattgaattacggcaaagagcaatctatacccttctctggtttggcgctttagcgctattgttttttttcatatcagaccaactgtttcatctcctggtaaagccgttattgcgatctttaccgaatcaagagggcttgattgccacacagattacttcctcggttttcacccctttaaaacttgcagtggataccgctttgttgctcactgctccgtttgctttattgcaactttggcgttttatgcgcccgggactctataaaaacgagcaggaacaaatcagaggcaccatcattttaagtcttttgctctttgtctttggggcactattttgcttttatcttgtcctcccttatatgttccagttttttgctcaggcccttccggaaggagtgcgactcatgcctgacatggcttacgccatagatttcattacacgcatgctgcttttatttggtttttcttttcaggttccactaatttgtcttgtactggtaaaaacccatttcactacagttgagacacttataaaaatcaggccttatgtgatagttggggcatttattattggtatgctactcaccccccctgatgttttttctcaagttgcattagcattgcctttgtgtttgctttatgaggcggggattattttagccaggatttatgggaaatcccccatgcccactttaattcagtaa

SEQ ID NO: 12935 - protein, 238 aa, Legionella pneumophila
MLIHLIELRQRAIYTLLWFGALALLFFFISDQLFHLLVKPLLRSLPNQEGLIATQITSSVFTPLKLAVDTALLLTAPFALLQLWRFMRPGLYKNEQEQIRGTIILSLLLFVFGALFCFYLVLPYMFQFFAQALPEGVRLMPDMAYAIDFITRMLLLFGFSFQVPLICLVLVKTHFTTVETLIKIRPYVIVGAFIIGMLLTPPDVFSQVALALPLCLLYEAGIILARIYGKSPMPTLIQ

SEQ ID NO: 12936 - DNA, 804 bp, Pseudomonas stutzeri
  CDS (1)..(804): transl_table=11
atgagcaagtcttctatcaacgatcaggaaatgccgctggtcgctcatctgaccgagctgcgcaagcgcctgttgcactgcgtggtcgccatcggcctcttgttcgccgggttgttctacttctcccagcagatctacgcgctggtcgctgctccgctgcgcgcctatttgccggaaggcgcgacgatgattgccactggcgtcgcctcacccttcctgacgccgttcaagctcacgctgatggtcgcgctgtttctctcgatgccggtcatcctgcatcagatctggggcttcatcgcgcccggcctgtacaagcacgaaaagcgcatcgccgtgccgctgctcgtatcgagcatcttcctgttctacgccggcatggcattcgcttatttcgtggtgttcccgatcatgttcggcttcttcgccagcgtgacgccagagggcgtggcgatgatgacggatatcgggcagtacctggatttcgtgctcacgctgttcttcgccttcggcgtggcgttcgagattccagtagcaacctttctgctgatctgggttggcatcgttgatgtggccacgctgcgcaagagccgcccctacgtgatcgtgggctgcttcgccgtcggcatggtactgacgccaccggacgtcttctcgcaagcgctactcgccgtacccatgtggctgctgttcgaagccggcgtgatttgcgggaggttgatcaagaagcgcgacgagcacttccgtggtgatgcagacgacgacgcgccggacgccagcgaccagcctccagcttcgcgcccgtga

SEQ ID NO: 12937 - protein, 267 aa, Pseudomonas stutzeri
MSKSSINDQEMPLVAHLTELRKRLLHCVVAIGLLFAGLFYFSQQIYALVAAPLRAYLPEGATMIATGVASPFLTPFKLTLMVALFLSMPVILHQIWGFIAPGLYKHEKRIAVPLLVSSIFLFYAGMAFAYFVVFPIMFGFFASVTPEGVAMMTDIGQYLDFVLTLFFAFGVAFEIPVATFLLIWVGIVDVATLRKSRPYVIVGCFAVGMVLTPPDVFSQALLAVPMWLLFEAGVICGRLIKKRDEHFRGDADDDAPDASDQPPASRP

SEQ ID NO: 12938 - DNA, 906 bp, Streptomyces lividans
  CDS (1)..(906): transl_table=11
atgccgctcgcggaacaccttcgtgagctccgcaaccggctcgcgaaggcgctgctggccatcgtcgtcgtcacggtggtcgccgccttcttctatcagtggatcatcaacgccctcacggatccgatcctccagtcgatcggctgtgagaagtcgttcgcggagctggcccagtcggaggccggctcggagccgtgcgcgcagatcaccatcaacggtctgctcggccccttcaccctggcgctgaaggtgtccctgacggccggtgtcgtgctggcctcgccggtctggctctaccagctgtgggcgttcgtcgccccggggctgcacaggaacgagaagaagtacgcctacgctttcgtcgccaccggcgccccgctcttcctcgccggcgcgtacttcgcctacgcggtgctccccacctcggcgaaggtgctgatcgagttcacgccgaacgacgtcgacaacctgctgccgctggacgagctgctcgacctcgtcacgcgcatggtggtcgtcttcggtctctccttcgagctgcccctgctgctggtcatgctcaacttcaccggcgtgctgaccggcaagcggatgctcggctggtggcgcgcgatgatcatgggcatcacgctgttcgcggccatcgccacgcccagcaccgacccgctgacgatgatcatgctggccggtccgatctgggttctgtacttcgccgcggtcgtcgtctccctgctgaacgaccgccgcaaggcccgcctcgaggccctggagcccgacgacgacgaggcgtccgacctggacctcacccccgaggacatcggcgaggtcgagcccgtgaccaccgcccgtgccctgcccgagcaggccacgaaggaccgggtcaacggctacgacgacgtgacctga

SEQ ID NO: 12939 - protein, 301 aa, Streptomyces lividans
MPLAEHLRELRNRLAKALLAIVVVTVVAAFFYQWIINALTDPILQSIGCEKSFAELAQSEAGSEPCAQITINGLLGPFTLALKVSLTAGVVLASPVWLYQLWAFVAPGLHRNEKKYAYAFVATGAPLFLAGAYFAYAVLPTSAKVLIEFTPNDVDNLLPLDELLDLVTRMVVVFGLSFELPLLLVMLNFTGVLTGKRMLGWWRAMIMGITLFAAIATPSTDPLTMIMLAGPIWVLYFAAVVVSLLNDRRKARLEALEPDDDEASDLDLTPEDIGEVEPVTTARALPEQATKDRVNGYDDVT

SEQ ID NO: 12940 - DNA, 741 bp, Synechococcus sp
  CDS (1)..(741): transl_table=11
atgcccccaacccgagtccccagatccatgcgggagattcccgatgaagcagaaatgtcctttttcgatcacctcgaagaactccgctggcgcattttttattcgctgatttccgttgttgtcggttgggtcggttgtttcttttttgtcaaaccccatcgtccagatcttagaagcgcctgctgtggggtgaaattcatccaggtggcccccggcgaatttttctttctctcgtttaaggtggcgggctacaccggcgctttactggcgagtccttttatcctgtaccaaattattcagtttgttttgccggggctaaccaggggagaacggcgtctcctcgctcccgttgtcttggggtctggtgtgctgttttttgcgggcttggcctttgcctacgttgctttgattccagcggctctgaattttttcattacctatggtgctgatgtcgtagaggcggcctggtctattgaacggtattttgagttggtgctgggtctgatgttttttacggggctagcgtttcaggtgcctgtggtgcaaatgatcttgtcttggttggggattgtttcttcgagcctgatgctcaagggttggcgctttgtcgttctgggggcagtggtgctcggcgcggtgattacgccctcgacagatccgatgacccaatcactcttggctggggccgtcatgggcttatattttggcggcattggcattgtgaaactttcaggacgctag

SEQ ID NO: 12941 - protein, 246 aa, Synechococcus sp
MPPTRVPRSMREIPDEAEMSFFDHLEELRWRIFYSLISVVVGWVGCFFFVKPHRPDLRSACCGVKFIQVAPGEFFFLSFKVAGYTGALLASPFILYQIIQFVLPGLTRGERRLLAPVVLGSGVLFFAGLAFAYVALIPAALNFFITYGADVVEAAWSIERYFELVLGLMFFTGLAFQVPVVQMILSWLGIVSSSLMLKGWRFVVLGAVVLGAVITPSTDPMTQSLLAGAVMGLYFGGIGIVKLSGR

SEQ ID NO: 12942 - DNA, 738 bp, Bacillus subtilis
  CDS (1)..(738): transl_table=11
atggataaaaaagaaacccatctgatcgggcatttagaagagcttcgccgccggattatcgtcacccttgcggcattttttctatttctcatcacggcttttttgttcgtacaggacatttatgactggctgatcagggatttggatggaaagctggctgtgctaggaccgagtgaaatcctctgggtgtatatgatgctttccggcatttgtgccattgcggcttctatccctgttgccgcgtaccagctgtggcgtttcgttgcaccggcgctgactaaaacggagcgcaaggtgacgatcatgtacatcatgtacataccaggtttatttgcgttgtttttggcgggcatctccttcggatactttgtcttgtttccgatcgtgctcagctttttgactcatttatcctccggccactttgaaacgatgtttacggctgaccgctactttaggtttatggtgaatttgagcctgccgttcggcttcttgtttgagatgcccttggtggtgatgtttttaacaaggctgggcatcttaaatccttacagactggccaaagcgagaaagctttcctattttctgctgattgtcgtgtccatattgattacaccgcctgattttatttctgattttctcgtgatgatcccgcttcttgtcctgtttgaagtgagtgtcaccctatcggcgtttgtctacaaaaagaggatgagggaagaaacagcggcggccgcttag

SEQ ID NO: 12943 - protein, 245 aa, Bacillus subtilis
MDKKETHLIGHLEELRRRIIVTLAAFFLFLITAFLFVQDIYDWLIRDLDGKLAVLGPSEILWVYMMLSGICAIAASIPVAAYQLWRFVAPALTKTERKVTIMYIMYIPGLFALFLAGISFGYFVLFPIVLSFLTHLSSGHFETMFTADRYFRFMVNLSLPFGFLFEMPLVVMFLTRLGILNPYRLAKARKLSYFLLIVVSILITPPDFISDFLVMIPLLVLFEVSVTLSAFVYKKRMREETAAAA

SEQ ID NO: 12944 - DNA, 765 bp, Bacillus subtilis
  CDS (1)..(765): transl_table=11
atgacacgaatgaaagtgaatcaaatgtcgctgctggagcatattgctgagcttcgaaaacggttgctgattgtagcgctggcgtttgtcgttttctttattgctggattttttttagcaaagccgattattgtgtatctgcaagaaacagatgaagcgaagcagcttacgcttaacgcgtttaacctgacagacccgctttatgtgtttatgcaatttgcgtttatcatcggcatagtcttgacctcgccggttattctttatcagctttgggcttttgtgagcccgggcctctatgagaaagagcgcaaagtaacgctcagctacattccggtctctattttgctgtttttagcgggcttatctttttcatattatattttatttccttttgttgttgattttatgaagcggatttctcaggacttgaatgtcaatcaggtgatcggaattaatgaatattttcattttcttctgcagctgacgattccgtttggactgctgttccaaatgccggtcatcctcatgtttttgacaaggctcggaattgtgacaccgatgttcttggcgaaaatcagaaagtatgcgtattttacgctgctggtgatcgcagccctgattacaccgcctgagcttctgtcccatatgatggtcacagtcccgcttttgattttatatgaaatcagtatccttatatcgaaggccgcttatcggaaagcacagaaaagcagtgctgccgatcgggacgtgtcttctgggcaataa

SEQ ID NO: 12945 - protein, 254 aa, Bacillus subtilis
MTRMKVNQMSLLEHIAELRKRLLIVALAFVVFFIAGFFLAKPIIVYLQETDEAKQLTLNAFNLTDPLYVFMQFAFIIGIVLTSPVILYQLWAFVSPGLYEKERKVTLSYIPVSILLFLAGLSFSYYILFPFVVDFMKRISQDLNVNQVIGINEYFHFLLQLTIPFGLLFQMPVILMFLTRLGIVTPMFLAKIRKYAYFTLLVIAALITPPELLSHMMVTVPLLILYEISILISKAAYRKAQKSSAADRDVSSGQ

SEQ ID NO: 12946 - DNA, 768 bp, Azotobacter chroococcum mcd 1
  CDS (1)..(768): transl_table=11
atgacagcccgaccggacagcgaccaggacatgcccctggtcgcgcacctgaccgagctgcgctcgcgcctgctgcgcagcgtggcggcagtgctgctgatcttcgccgcactcttctacttcgcccaggacatctacgccctggtctcggcgcccctgcgcgcctacctgccggaaggcgcgaccatgatcgccaccggcgtggcctcgccgttcctcgcgccgttcaagctgaccctgatgatctcgctgttcctcgccatgccggtggtcctccaccaggtctggggcttcatcgcgccggggctgtaccagcacgagaaacgcatcgccatgccgttgatggcctccagcgtgctgctcttctatgccggcatggccttcgcctacttcgtggtcttcccgatcatgttcggcttcttcgccagcgtgaccccggaaggcgtggcgatgatgaccgatatcggccagtacctggacttcgtgctcaccctgttcttcgccttcggtgtggccttcgaggtgccggtggcgaccttcctgctgatctgggtgggcatcgtcgacgtggcaagcctgcgcaacagtcgcccctacgtgatcgtcggctgcttcgtggtcggcatggtcctcaccccgccagacgtgttctcccagaccctgctcgccgtgcccatgtggctgctgttcgagatcggcgtgttcttcggcgcgcggatccgccaccgcgaggagccggccgcctccgacggcccgtcgcaaccgtga

SEQ ID NO: 12947 - protein, 255 aa, Azotobacter chroococcum mcd 1
MTARPDSDQDMPLVAHLTELRSRLLRSVAAVLLIFAALFYFAQDIYALVSAPLRAYLPEGATMIATGVASPFLAPFKLTLMISLFLAMPVVLHQVWGFIAPGLYQHEKRIAMPLMASSVLLFYAGMAFAYFVVFPIMFGFFASVTPEGVAMMTDIGQYLDFVLTLFFAFGVAFEVPVATFLLIWVGIVDVASLRNSRPYVIVGCFVVGMVLTPPDVFSQTLLAVPMWLLFEIGVFFGARIRHREEPAASDGPSQP

SEQ ID NO: 12948 - DNA, 738 bp, Campylobacter jejuni
  CDS (1)..(738): transl_table=11
atgtttgaagaattaagacctcatttaatagaacttagaaaacgcctttttataagcgttgcttgcattgtagttatgtttattgtatgttttgctctacgaagctatatcttagatattctaaaagctccacttatagctgttttacccgaagtagccaaacatgtgaatgtaattgaagtacaagaagccttatttaccgcaatgaaggttagtttttttgcagcctttatcttttctctacctgtaattttttggcaattttggaaatttgtagctccaggactttatgataatgaaaaacgccttgtagtgccttttgttagctttgcaagcattatgtttgcctttggggcttgtttttgctattttgttgtagtgcctttggcttttaaatttttgattaattttggtttaaatgaagattttaatcctgtgattaccataggaacttatgtagatttttttaccaaagttgttgtggcttttggcttagcttttgaaatgcctgtaattgcctttttctttgctaaaatcggacttatagatgatagttttttaaaacgccattttcgcatagctgttttagttatttttgttttttcagcctttatgactccacctgatgttttatctcaatttttaatggcaggaccactttgcggactttatggactttctattttaattgttcaaaaggtaaatcctgctccaaaagataaagaaagtgatgaataa

SEQ ID NO: 12949 - protein, 245 aa, Campylobacter jejuni
MFEELRPHLIELRKRLFISVACIVVMFIVCFALRSYILDILKAPLIAVLPEVAKHVNVIEVQEALFTAMKVSFFAAFIFSLPVIFWQFWKFVAPGLYDNEKRLVVPFVSFASIMFAFGACFCYFVVVPLAFKFLINFGLNEDFNPVITIGTYVDFFTKVVVAFGLAFEMPVIAFFFAKIGLIDDSFLKRHFRIAVLVIFVFSAFMTPPDVLSQFLMAGPLCGLYGLSILIVQKVNPAPKDKESDE

SEQ ID NO: 12950 - DNA, 777 bp, Escherichia coli O157
  CDS (1)..(777): transl_table=11
atgtctgtagaagatactcaaccgcttatcacgcatctgattgagctgcgtaagcgtctgctgaactgcattatcgcggtgatcgtgatattcctgtgtctggtctatttcgccaatgacatctatcacctggtatccgcgccattgatcaagcagttgccgcaaggttcaacgatgatcgccaccgacgtggcctcgccgttctttacgccgatcaagctgacctttatggtgtcgctgattctgtcagcgccggtgattctctatcaggtgtgggcatttatcgccccagcgctgtataagcatgaacgtcgcctggtggtgccgctgctggtttccagctctctgctattttatatcggcatggcgttcgcctactttgtggtctttccgctggcatttggcttccttgccaataccgcgccggaaggggtgcaggtatccaccgacatcgccagctatttaagcttcgttatggcgctgtttatggcgtttggtgtctcctttgaagtgccggtggcaattgtgctgctgtgctggatggggattacctcgccagaagacttacgcaaaaaacgcccgtatgtgctggttggtgcattcgttgtcgggatgttgctgacgccgccggatgtcttctcgcaaacgctgttggcgatcccgatgtactgtctgtttgaaatcggtgtcttcttctcacgcttttacgttggtaaagggcgaaatcgggaagaggaaaacgacgctgaagcagaaagcgaaaaaactgaagaataa

SEQ ID NO: 12951 - protein, 258 aa, Escherichia coli O157
MSVEDTQPLITHLIELRKRLLNCIIAVIVIFLCLVYFANDIYHLVSAPLIKQLPQGSTMIATDVASPFFTPIKLTFMVSLILSAPVILYQVWAFIAPALYKHERRLVVPLLVSSSLLFYIGMAFAYFVVFPLAFGFLANTAPEGVQVSTDIASYLSFVMALFMAFGVSFEVPVAIVLLCWMGITSPEDLRKKRPYVLVGAFVVGMLLTPPDVFSQTLLAIPMYCLFEIGVFFSRFYVGKGRNREEENDAEAESEKTEE

SEQ ID NO: 12952 - DNA, 762 bp, Helicobacter pylori
  CDS (1)..(762): transl_table=11
atgtttgaagatttaaaaccgcatttacaggaattaagaaagcgtttgatggtttctgtaggaacgattctagtggcgtttttggggtgctttcatttttggaaaagtatttttgaatttgttaaaaattcctataaaggcacgctcattcagctctcccctattgaaggggtcatggtagcggttaaaatcagtttttcagccgctatcgtcatttccatgcccattattttttggcaattatggctctttatcgctccagggctttacaagaatgaaaaaaaagtgattttgccttttgtgttttttgggagtgggatgtttttgattggggcggcgttttcttattatgtggtgttccctttcattattgaatacttagccacttttgggagcgatgtgtttgcggctaatatttctgcgtccagttacgtgagctttttcacgcgcttgattttaggctttggcgtggcgtttgaattgcctgttttggcgtattttttggctaaagtgggcttgattactgatgcgagcttgaaagcgtattttaaatacgctattgtagtgatttttattgtagcagccattatcactccccctgatgtggtgagtcaaatctttatggcgttgcccttagtggggctttatgggctttctattttaatcgccaaaatggtcaatccggctcccaaagataacgaaaataacaacgaaaataataacgaaaataacaccaaagagaatacaaagagcgagtcgtag

SEQ ID NO: 12953 - protein, 253 aa, Helicobacter pylori
MFEDLKPHLQELRKRLMVSVGTILVAFLGCFHFWKSIFEFVKNSYKGTLIQLSPIEGVMVAVKISFSAAIVISMPIIFWQLWLFIAPGLYKNEKKVILPFVFFGSGMFLIGAAFSYYVVFPFIIEYLATFGSDVFAANISASSYVSFFTRLILGFGVAFELPVLAYFLAKVGLITDASLKAYFKYAIVVIFIVAAIITPPDVVSQIFMALPLVGLYGLSILIAKMVNPAPKDNENNNENNNENNTKENTKSES

SEQ ID NO: 12954 - DNA, 927 bp, Mycobacterium bovis
  CDS (1)..(927): transl_table=11
gtgcgcgccgccggtcttctcaaacggctcaacccacgtaacaggcgcagccgcgtcaatcctgacgcgacgatgtcgctggtcgaccacctgaccgagttacgcaccaggttgctgatctccctggccgcgatcttggtcaccacaatcttcgggttcgtctggtattcgcattcgattttcgggttggacagcctcggagagtggctgcggcatccctactgtgccctgccgcagtcggcccgggcggatatcagcgccgacggagagtgccgtttgttggccaccgcgccgttcgaccagttcatgttgcggctcaaggtcgggatggccgccggcattgtgctggcttgcccggtgtggttctaccagctgtgggcgttcatcacgcctggtctctaccagagggagcgccgcttcgcggtggccttcgtgatcccagcagcggtgctgttcgtcgccggtgccgtactggcctacctggtgttgtccaaggcgttgggctttttgttgaccgtcggcagcgacgtgcaggtgaccgcgctgtctggcgaccgctactttggctttctgctcaacctgctggtggtgttcggggtcagcttcgaattccccctgctgatcgtgatgctgaacctggcgggcctgctgacctatgagcggctcaagtcttggcggcgcgggttgatctttgcgatgttcgtcttcgcggcgatcttcacgcccggatccgatccgttctcgatgaccgcgctcggtgcggcgttgaccgtgctgctagagctcgccattcagatcgcccgcgtgcatgacaagcgaaaagccaagcgcgaagccgcgattcccgacgacgaagcttcggtcatcgacccgccctcgccggtgccggcgccatcggtcatcggatctcatgacgacgtcacgtag

SEQ ID NO: 12955 - protein, 308 aa, Mycobacterium bovis [sequence omitted]

SEQ ID NO: 12956 - DNA, 723 bp, Aquifex aeolicus
  CDS (1)..(723): transl_table=11
atgcctctaacggaacatctgagagagcttaggtatcgtttaataatatctataattgccttccttataggctccgggatagccttttactttgcaaagtacgtgtttgaaattttaaaagaacccatcctgaagtcctaccccgaagtggaattaataactctatctcccacagaacctctctttatactcataaagatatctttagcggttggatttataatcgcctctcccgtaatactttaccagttctggcgttttatagagccagccctttactcccatgaaaaaagagcttttatcccgctgcttcttggttcaatacttctctttatgcttggtgcattgtttgcctactttattgtcctgcctttagcccttaagttcttgctcggccttggatttactcagctccttgcaactccttacctttcagttgatatgtacataagctttgtccttaaacttgttgtggccttcggcatagcttttgagatgcccatagtcctttacgttctacaaaaagcaggagtaatcacccccgagcagttagcgagtttcagaaagtacttcatagttatagccttcgtgataggtgcgataatcgctccggatgtttccacacaggttttgatggctattcctcttcttctcctgtacgagatatccatcttccttggaaaactggctacgaggaagaagaaggaaattcaaaaggcataa

SEQ ID NO: 12957 - protein, 240 aa, Aquifex aeolicus
MPLTEHLRELRYRLIISIIAFLIGSGIAFYFAKYVFEILKEPILKSYPEVELITLSPTEPLFILIKISLAVGFIIASPVILYQFWRFIEPALYSHEKRAFIPLLLGSILLFMLGALFAYFIVLPLALKFLLGLGFTQLLATPYLSVDMYISFVLKLVVAFGIAFEMPIVLYVLQKAGVITPEQLASFRKYFIVIAFVIGAIIAPDVSTQVLMAIPLLLLYEISIFLGKLATRKKKEIQKA

SEQ ID NO: 12958 - DNA, 762 bp, Bacillus halodurans
  CDS (1)..(762): transl_table=11
atgaacgaacgagacatgtccttaatggaccatatcgccgagttaaggcggcggattctaatcatcgtcgtcttttttgttatcgccttggttgtcggattttttctggcaacaccgatgattacgtatttacaaggcgcgccgacggcacaagaccttccgatgaacgcattcaaattgacagatccattgcgggtctatatgacatttgcttttacgagtgcgtttattcttgtatttcccattattttatatcaattgtgggccttcgtcagtccaggtcttcatgaaaacgagcgcaaggccacattagcgtatataccgattgcatttttcctatttcttggtggactttcgtttgcctattttattttgtttccgtttctgatccaatttatcgggggattagcggaacggttacacattaacgagctttatgggatcaatgaatactttacgtttttgttccagattacgatgccgttcggtgtgctattccaactgccggtggtggttatgttcctcacgagacttggaatcgtaaccccggaatttttgcgcagtgtacggaaatatgccttttttgtcttactagtcgtcgcaggttttattacaccacctgaattaatttcccatttaatggttacggtacctctattactgctgtacgaatttagcatttgggtatcacacttaacatatcgaaaagtacaaaagctagagaaactgaggcaagaagaatatagacaggaggagggctag

SEQ ID NO: 12959 - protein, 253 aa, Bacillus halodurans
MNERDMSLMDHIAELRRRILIIVVFFVIALVVGFFLATPMITYLQGAPTAQDLPMNAFKLTDPLRVYMTFAFTSAFILVFPIILYQLWAFVSPGLHENERKATLAYIPIAFFLFLGGLSFAYFILFPFLIQFIGGLAERLHINELYGINEYFTFLFQITMPFGVLFQLPVVVMFLTRLGIVTPEFLRSVRKYAFFVLLVVAGFITPPELISHLMVTVPLLLLYEFSIWVSHLTYRKVQKLEKLRQEEYRQEEG

SEQ ID NO: 12960 - DNA, 1080 bp, Oryza sativa
  CDS (1)..(1080)
atggggagcgcgggggcgctgctctcgcactcgcctccggggctcggcggattccctcctcgccaccatcaccaccaccgtctctccgtcctccgttgcgtaccgctcctcccctccccggcgcccgagcccctcagctgtcgccacggccggcaccttcgctgcgccgccgtcgacgggggagccggccgggagacggagcgtccctcgccgcccgcacctcagagggaggagtcgccgtcgggcagcctcggcgcagccctcgaggacccatctcctcaacctgtccaaaatggatcttttggaggtatcacagaggatgaagaacagagtagcctgtacaattttctttatccgagcaaagagctacttcctgatgataaggagatgagtatatttgatcatctagaggaacttcgtgacaggatatttgtctcagtattggctgttggtgctgcgatacttggttgtttcgcttactccaaagatcttattagaattctagaagcaccagttagtgttcagggtgttcggtttctgcagctctctcctggagaatttttctttacaacattgaaggtctctggttattgtggccttctacttgggagtcctgttattctgtatgagataatagcatttgttcttccgggtttaacaagggatgaacgtaaattcctagggcccattgttctgggctcttctgtactattctaccttggcattttcttctcctacacggttcttgctcctgcagcattgaatttcttcgtgaactacgcagatggggcagtggaatcgttatggtcgattgatcagtattttgagtttgtgcttgtgcttttattcagcacaggattatcttttcaggtccctgttatccagctactgctggggcaagtcggtttggtttctagtgaccaaatgctttccatctggagatatgttgttgttggcgctgtagttgctgctgctgtgcttacaccgtcgacagatccgttgactcagatgctcttggctggtccgctgcttggcctgtacttgggtggtgcttggatggtcaagctaactggtcgataa

SEQ ID NO: 12961 - protein, 359 aa, Oryza sativa
MGSAGALLSHSPPGLGGFPPRHHHHHRLSVLRCVPLLPSPAPEPLSCRHGRHLRCAAVDGGAGRETERPSPPAPQREESPSGSLGAALEDPSPQPVQNGSFGGITEDEEQSSLYNFLYPSKELLPDDKEMSIFDHLEELRDRIFVSVLAVGAAILGCFAYSKDLIRILEAPVSVQGVRFLQLSPGEFFFTTLKVSGYCGLLLGSPVILYEIIAFVLPGLTRDERKFLGPIVLGSSVLFYLGIFFSYTVLAPAALNFFVNYADGAVESLWSIDQYFEFVLVLLFSTGLSFQVPVIQLLLGQVGLVSSDQMLSIWRYVVVGAVVAAAVLTPSTDPLTQMLLAGPLLGLYLGGAWMVKLTGR

SEQ ID NO: 12962 - DNA, 1050 bp, Oryza sativa
  CDS (1)..(1050)
atggggagcgcgggggcgctgctctcgcactcgcctccggggctcggcggattccctcctcgccaccatcaccaccaccgtctctccgtcctccgttgcgtaccgctcctcccctccccggcgcccgagcccctcagctgtcgccacggccggcaccttcgctgcgccgccgtcgacgggggagccggccgggagacggagcgtccctcgccgcccgcacctcagagggaggagtcgccgtcgggcagcctcggcgcagccctcgaggacccatctcctcaacctgaggatgaagaacagagtagcctgtacaattttctttatccgagcaaagagctacttcctgatgataaggagatgagtatatttgatcatctagaggaacttcgtgacaggatatttgtctcagtattggctgttggtgctgcgatacttggttgtttcgcttactccaaagatcttattagaattctagaagcaccagttagtgttcagggtgttcggtttctgcagctctctcctggagaatttttctttacaacattgaaggtctctggttattgtggccttctacttgggagtcctgttattctgtatgagataatagcatttgttcttccgggtttaacaagggatgaacgtaaattcctagggcccattgttctgggctcttctgtactattctaccttggcattttcttctcctacacggttcttgctcctgcagcattgaatttcttcgtgaactacgcagatggggcagtggaatcgttatggtcgattgatcagtattttgagtttgtgcttgtgcttttattcagcacaggattatcttttcaggtccctgttatccagctactgctggggcaagtcggtttggtttctagtgaccaaatgctttccatctggagatatgttgttgttggcgctgtagttgctgctgctgtgcttacaccgtcgacagatccgttgactcagatgctcttggctggtccgctgcttggcctgtacttgggtggtgcttggatggtcaagctaactggtcgataa

SEQ ID NO: 12963 - protein, 349 aa, Oryza sativa
MGSAGALLSHSPPGLGGFPPRHHHHHRLSVLRCVPLLPSPAPEPLSCRHGRHLRCAAVDGGAGRETERPSPPAPQREESPSGSLGAALEDPSPQPEDEEQSSLYNFLYPSKELLPDDKEMSIFDHLEELRDRIFVSVLAVGAAILGCFAYSKDLIRILEAPVSVQGVRFLQLSPGEFFFTTLKVSGYCGLLLGSPVILYEIIAFVLPGLTRDERKFLGPIVLGSSVLFYLGIFFSYTVLAPAALNFFVNYADGAVESLWSIDQYFEFVLVLLFSTGLSFQVPVIQLLLGQVGLVSSDQMLSIWRYVVVGAVVAAAVLTPSTDPLTQMLLAGPLLGLYLGGAWMVKLTGR

SEQ ID NO: 12964 - DNA, 1056 bp, Zea mays
  CDS (1)..(1056)
atgggaagcacaggggcgctgctttggcacccgtcgccgcaggtgcactccggtggcgtcctcttccgccagagccggcgcatcgtacgccagcgcaacttgcctctattatcgctagctgacgcggcgcttgagcccgagcgccgccgcgggcagcgcctccgctgcgctgccggcgacggggacggcgggccccgggaggctcagaaggagtctccgagcggcatcggcgcagcactcgaggatccgtctccaggacctcctgtggaaaacggttccttcagaagcccctcacaggaagaacagagtgctctgtataattttctctatccaagcaaagacttacttccagatgataaggagatgagtatatttgatcatctggaggagcttcgcgagaggattttcatctcagttttggctgttggggctgcgatactagtctgttttgctttttcaaaagatctggttctttttctagaggcaccagtgactgttcagggtgttcggtttttgcagctctcgcctggggaatttttctttacaacattaaaggtttcaggttattgtggccttttacttggaagtcctatcattttatatgagatcattgcatttgttatcccaggtttaacaagggatgaacggaaatttctcgggcctattgtgttgggttcttctgttctattctacctaggcattttcttctcctacacggttctcagccctgctgcgttgaacttctttgtgaattatgcagatggggcagtggaatcgttgtggtcaatagaccagtacttcgaattcatacttgtgctgatgtttagcacagggttgtcctttcaggtccctgttatccagcttctgctaggacaacttggattggtttctagtgaccaaatgctttcgatctggagatatgttgttgttggcgctgtcgtcgctgctgctgtgcttacaccttcaacagatccgttgacacaaatgttgttggctggtcctttgcttggtttgtacttgggtggcgcatggatggtcaagctaactgggcgataa

SEQ ID NO: 12965 - protein, 351 aa, Zea mays
MGSTGALLWHPSPQVHSGGVLFRQSRRIVRQRNLPLLSLADAALEPERRRGQRLRCAAGDGDGGPREAQKESPSGIGAALEDPSPGPPVENGSFRSPSQEEQSALYNFLYPSKDLLPDDKEMSIFDHLEELRERIFISVLAVGAAILVCFAFSKDLVLFLEAPVTVQGVRFLQLSPGEFFFTTLKVSGYCGLLLGSPIILYEIIAFVIPGLTRDERKFLGPIVLGSSVLFYLGIFFSYTVLSPAALNFFVNYADGAVESLWSIDQYFEFILVLMFSTGLSFQVPVIQLLLGQLGLVSSDQMLSIWRYVVVGAVVAAAVLTPSTDPLTQMLLAGPLLGLYLGGAWMVKLTGR

SEQ ID NO: 12966 - DNA, 1056 bp, Zea mays
  CDS (1)..(1056)
atgggaagcacaggggcgctgctttggcacccgtcgccgcaggtgcactccggtggcgtcctcttccgccagagccggcgcatcgtacgccagcgcaacttgcctctattatcgctagctgacgcggcgcttgagcccgagcgccgccgcgggcagcgcctccgctgcgctgccggcgacggggacggcgggccccgggaggctcagaaggagtctccgagcggcatcggcgcagcactcgaggatccgtctccaggacctcctgtggaaaacggttccttcagaagcccctcacaggaagaacagagtgctctgtataattttctctatccaagcaaagacttacttccagatgataaggagatgagtatatttgatcatctggaggagcttcgcgagaggattttcatctcagttttggctgttggggctgcgatactaggctgttttgctttttcaaaagatctggttctttttctagaggcaccagtgactgttcagggtgttcggtttttgcagctctcgcctggggaatttttctttacaacattaaaggtttcaggttattgtggccttttacttggaagtcctatcattttatatgagatcattgcatttgttatcccaggtttaacaagggatgagcggaaatttctcgggcctattgtgttgggttcttctgttctattctacctaggcattttcttctcctacacggttctcagccctgctgcgttgaacttctttgtgaattatgcagatggggcagtggaatcgttgtggtcaatagaccagtacttcgaattcatacttgtgctgatgtttagcacagggttgtcctttcaggtccctgttatccagcttctgctaggacaacttggattggtttctagtgaccaaatgctttcgatctggagatatgttgttgttggcgctgtcgtcgctgctgctgtgcttacaccttcaacagatccgttgacacaaatgttgttggctggtcctttgcttggtttgtacttgggtggcgcatggatggtcaagctaactgggcgataa

SEQ ID NO: 12967 - protein, 351 aa, Zea mays
MGSTGALLWHPSPQVHSGGVLFRQSRRIVRQRNLPLLSLADAALEPERRRGQRLRCAAGDGDGGPREAQKESPSGIGAALEDPSPGPPVENGSFRSPSQEEQSALYNFLYPSKDLLPDDKEMSIFDHLEELRERIFISVLAVGAAILGCFAFSKDLVLFLEAPVTVQGVRFLQLSPGEFFFTTLKVSGYCGLLLGSPIILYEIIAFVIPGLTRDERKFLGPIVLGSSVLFYLGIFFSYTVLSPAALNFFVNYADGAVESLWSIDQYFEFILVLMFSTGLSFQVPVIQLLLGQLGLVSSDQMLSIWRYVVVGAVVAAAVLTPSTDPLTQMLLAGPLLGLYLGGAWMVKLTGR

SEQ ID NO: 12968 - DNA, 1071 bp, Zea mays
  CDS (1)..(1071)
atgggaagcgctggggcgctgctctggcacacgccgcagcagctgcacggccgtggcatcctcttccgccagagccggcctctcctgcgccagcgcaacctgcctctaatatcgctagctgccccggcgctcgagcccgagcgccgccgccggcagtgcctccgctgcgctgccgtcgacggggacggcgccctccgggagtctgggccactgccacagaaggagtctccgtccagcggcatcggtgccgcactcgaggacccgcctccaggacctcctgtggagaatggttcctttggaggcccctcacaggaagaacagagtgctctatatacttttctttatccaagcaaagacttacttccagatgataaggagatgagtatatttgatcatctagaggagcttcgtgacaggattttcatctcagttttggctgttggggctgcgatattaggctgttttgctttttcaaaagatttggttatttttcttgaggcaccagtgactgctcagggtgttcggtttttgcagctctcgcctggggaatttttctttacaacattaaaggtttcaggttattgtggccttttacttggaagtcctatcattttgtatgagatcattgcatttgttatcccaggtttaacaagggacgagcggaaatttcttgggcctattgtgttgggttcttctgttctattctatctaggcattttcttctcctacacggttctcagccctgctgcgttgaacttctttgtgaattatgcagatggggcagtggaatcgttgtggtcaatagaccagtactttgaattcatacttgtgctgatgtttagcacagggttgtcctttcaggtccctgttatccagcttttgctgggacaacttggattggtttctagtgaccaaatgctttcgatctggagatatgttgttgttggtgctgttgttgctgctgctgtgcttacaccttcgacggacccgttgacacaaatgctcctggctggtcccttgcttggtttatacttgggtggtgcatggatggtcaagataactgggcgctaa

SEQ ID NO: 12969 - protein, 356 aa, Zea mays
MGSAGALLWHTPQQLHGRGILFRQSRPLLRQRNLPLISLAAPALEPERRRRQCLRCAAVDGDGALRESGPLPQKESPSSGIGAALEDPPPGPPVENGSFGGPSQEEQSALYTFLYPSKDLLPDDKEMSIFDHLEELRDRIFISVLAVGAAILGCFAFSKDLVIFLEAPVTAQGVRFLQLSPGEFFFTTLKVSGYCGLLLGSPIILYEIIAFVIPGLTRDERKFLGPIVLGSSVLFYLGIFFSYTVLSPAALNFFVNYADGAVESLWSIDQYFEFILVLMFSTGLSFQVPVIQLLLGQLGLVSSDQMLSIWRYVVVGAVVAAAVLTPSTDPLTQMLLAGPLLGLYLGGAWMVKITGR

SEQ ID NO: 12970 - DNA, 22 bp, Artificial sequence
  primer
atgaaggaagcccccctggtag

SEQ ID NO: 12971 - DNA, 24 bp, Artificial sequence
  primer
ttaagcggcctcctggggcctctg

SEQ ID NO: 12972 - protein, 281 aa, Artificial sequence
  consensus sequence
  Variant (3)..(3): Xaa in position 3 is any amino acid
  Variant (7)..(7): Xaa in position 7 is any amino acid
  Variant (9)..(50): Xaa in position 9 to 50 is any amino acid
  Variant (51)..(89): Xaa in position 51 to 89 is any or no amino acid
  Variant (91)..(94): Xaa in position 91 to 94 is any amino acid
  Variant (96)..(106): Xaa in position 96 to 106 is any amino acid
  Variant (108)..(111): Xaa in position 108 to 111 is any amino acid
  Variant (113)..(115): Xaa in position 113 to 115 is any amino acid
  Variant (117)..(118): Xaa in position 117 to 118 is any amino acid
  Variant (122)..(124): Xaa in position 122 to 124 is any amino acid
  Variant (126)..(138): Xaa in position 126 to 138 is any amino acid
  Variant (139)..(141): Xaa in position 139 to 141 is any or no amino acid
  Variant (144)..(145): Xaa in position 144 to 145 is any amino acid
  Variant (147)..(150): Xaa in position 147 to 150 is any amino acid
  Variant (152)..(155): Xaa in position 152 to 155 is any amino acid
  Variant (157)..(160): Xaa in position 157 to 160 is any amino acid
  Variant (162)..(177): Xaa in position 162 to 177 is any amino acid
  Variant (178)..(207): Xaa in position 178 to 207 is any or no amino acid
  Variant (209)..(219): Xaa in position 209 to 219 is any amino acid
  Variant (221)..(222): Xaa in position 221 to 222 is any amino acid
  Variant (224)..(225): Xaa in position 224 to 225 is any amino acid
  Variant (227)..(231): Xaa in position 227 to 231 is any amino acid
  Variant (233)..(235): Xaa in position 233 to 235 is any amino acid
  Variant (237)..(261): Xaa in position 237 to 261 is any amino acid
  Variant (264)..(264): Xaa in position 264 is any amino acid
  Variant (265)..(266): Xaa in position 265 to 266 is any or no amino acid
  Variant (268)..(274): Xaa in position 268 to 274 is any amino acid
  Variant (276)..(280): Xaa in position 276 to 280 is any amino acid
HLXELRXRXXXXXXXXXXXXXXXXXXXXXXXXXXXXXXXXXXXXXXXXXXXXXXXXXXXXXXXXXXXXXXXXXXXXXXXXXXXXXXXXXFXXXXKXXXXXXXXXXXPXXXXQXXXFXXPGLXXXEXXXXXXXXXXXXXXXXLFXXGXXXXYXXXXPXXXXFXXXXXXXXXXXXXXXXXXXXXXXXXXXXXXXXXXXXXXXXXXXXXXYXXXXXXXXXXXGXXFXXPXXXXXLXXXGXXXXXXXXXXXXXXXXXXXXXXXXXTPXXXDXXXXXXXAXXXXXL

SEQ ID NO: 12973 - protein, 9 aa, Artificial sequence
  protein pattern
  Variant (3)..(3): Xaa in position 3 is any amino acid
  Variant (7)..(7): Xaa in position 7 is any amino acid
  Variant (9)..(9): Xaa in position 9 is Ile, Leu or Val
HLXELRXRX

SEQ ID NO: 12974 - DNA, 1131 bp, Thermus thermophilus
  CDS (1)..(1131): transl_table=11
atgcgggagtggaagattattgactccaccttacgggaaggggaacagtttgaaaaggcgaacttctccacccaggacaaggtggagatcgccaaggccctggacgagttcggcattgagtacattgaggtcaccaccccggtggcctccccccagtcccgcaaggacgccgaggtcctcgcctccttgggcctcaaggccaaggtggtgacccacatccagtgccgcctggacgcggccaaggtggcggtggagacgggagtccaggggattgacctcctcttcggcacgagcaagtacctccgggccgcccatgggcgggacatccccaggatcattgaggaggccaaagaggtgatcgcctacatccgcgaggcggccccccacgtggaggtgcgcttctccgccgaggacaccttccgctccgaggagcaggacctcctcgccgtctacgaggccgtcgccccctacgtggaccgggtgggcctggcggacaccgtgggcgtggccacgccccggcaggtctacgccctggtgcgggaggtgcggcgggtggtggggcccagggtggacattgagttccacggccacaacgacaccgggtgcgccatcgccaacgcgtatgaggccattgaggccggggccacccacgtggacaccaccatcctggggatcggggagaggaacgggatcacgcctttgggggggttcctcgcccgcatgtacaccctccagcccgagtacgtgcgcaggaagtacaagctggagatgctccccgagctggaccggatggtggcccggatggtgggggtggagatccccttcaacaactacatcaccggggagacggccttcagccacaaggcggggatgcacctcaaggccatctacatcaaccccgaggcctacgagccctaccccccggaggtcttcggggtgaagcggaagctcatcatcgcctcgaggctcaccgggcggcacgccatcaaggcgcgggcggaggagctcggcctccactacggggaggaggagctccaccgggtcacccagcacatcaaggccctggccgaccggggccagctcaccctggaggagctggaccggatcctccgggagtggatcacggcgtaa

SEQ ID NO: 12975 - protein, 376 aa, Thermus thermophilus
MREWKIIDSTLREGEQFEKANFSTQDKVEIAKALDEFGIEYIEVTTPVASPQSRKDAEVLASLGLKAKVVTHIQCRLDAAKVAVETGVQGIDLLFGTSKYLRAAHGRDIPRIIEEAKEVIAYIREAAPHVEVRFSAEDTFRSEEQDLLAVYEAVAPYVDRVGLADTVGVATPRQVYALVREVRRVVGPRVDIEFHGHNDTGCAIANAYEAIEAGATHVDTTILGIGERNGITPLGGFLARMYTLQPEYVRRKYKLEMLPELDRMVARMVGVEIPFNNYITGETAFSHKAGMHLKAIYINPEAYEPYPPEVFGVKRKLIIASRLTGRHAIKARAEELGLHYGEEELHRVTQHIKALADRGQLTLEELDRILREWITA

SEQ ID NO: 12976 - DNA, 2047 bp, Oryza sativa
  CDS (243)..(1712)
aagttcagactcaccaagagcgtccggcaattcggccgtgcgacgaacttcttgctgccgcgactgcgacctgacctcgacctctcttgttcgagtcacatcacacactcatccaattgaacagtcatcttcacccttggctgtcccatttattgtcttctacacttctcctctacagccttgcttctacgttatacccagaccctcttctccaaggcgcagcgacacatacacacgcgaccatgtgccctcaaccagacgagccacaggccctcggtgccaatggcgtgcaccaaaacggcaacggcaccaccaacggtgatcacgaaggctaccgcgccttcaagaccgaccagagcaagaaggtccagagcagcaacccttacgctcctgtaggagacttcctctcaaacgtctccaagtttaagatcattgagtccactctccgcgagggcgagcagttcgccaacgccttcttcgacaccgagaccaagattcgcatcgctaaggccctggacgacttcggcgtcgactacatcgaactcacctctcccgctgccagtgagcagtcccgcctcgactgcgaggccatctgcaacctcggtctcaaggccaagatcctcactcacgtgagatgtaacatgcaggacgccaagctggccgtcgcgactggtgtggacggtgtggatgtggttatcggcaccagcagccaccttatggagcacagccacggcaaggacatcacatacatcaagaacaccgccatcgaggtcatcgagtacgtcaagtcacaaggcaaggagatccgtttctcctccgaggattcgttccgcagtgaccttgtcgatctcctcaccatctacagcgccgtcgacaaggtcggtgtgcacagagtcggtattgctgacaccgtcggctgtgcaactcccagacaagtctacgacctcgtccgcactcttcgcggcgttgtcagctgcgacatcgagactcacttccacaacgacactggctgcgccattgccaacgcctactgcgccctcgaggccggtgccacccacatcgacacctctgttatcggcattggtgagcgcaacggtatcacccctcttggtggcctgatggcccgcatgatcgtcgccgaccgcgactacgtcaagtccaagtacaagcttgagaagctgaaggagatcgaggacatcgtcgccgaggccgtcgagatcaacattcccttcaacaactacatcaccggtttctgcgccttcacccacaaggctggtatccacgccaaggccatcttgaacaacccttccacctacgagatcatcgacccgaaggactttggcatgagccgttacgtccacttcgcttcgcgtctcactggctggaacgccatcaagtcgcgtgctgagcagctcggcctcgacatgaccgacgcgcagatcaagaccgtgactctcaagatcaaggccatggccgatgttcgtcctctcgccatcgatgacgccgacagcattatccgcacttaccactacaacctcaacgctacccaggagaagcctctcctccagcttactgaggaggagaaggagaagttcgccaaggccgagcgtgagcttgctcaggaggacgagaagaaggcgctcgagcgcaaggccgacgacgaggccgatgtgccccgtgccaagaagcagaagaccgagactgtcgcatagatgtctgcgattgacgagatctgaggagtctgctcttacgagtgaacgtgtaaaagaaggagcagaagaagcaggaggaggaggatgacgagaagaatgtgtgctacaagtctctttttatactggcggaagagcatcgaaaaggtttcggctcctccgcccatctgggcattttcatgtatttgaagacggcgctgggattacgaaaaaaatcgggcgctgtacctttgtttgttttgctgtaccttttatatcacctagctttggttgcgagagcgaaatggcgaccacctttgaaataggcaggaagcaatgcaaaaagaacgatctacttg

SEQ ID NO: 12977 - protein, 489 aa, Oryza sativa
MCPQPDEPQALGANGVHQNGNGTTNGDHEGYRAFKTDQSKKVQSSNPYAPVGDFLSNVSKFKIIESTLREGEQFANAFFDTETKIRIAKALDDFGVDYIELTSPAASEQSRLDCEAICNLGLKAKILTHVRCNMQDAKLAVATGVDGVDVVIGTSSHLMEHSHGKDITYIKNTAIEVIEYVKSQGKEIRFSSEDSFRSDLVDLLTIYSAVDKVGVHRVGIADTVGCATPRQVYDLVRTLRGVVSCDIETHFHNDTGCAIANAYCALEAGATHIDTSVIGIGERNGITPLGGLMARMIVADRDYVKSKYKLEKLKEIEDIVAEAVEINIPFNNYITGFCAFTHKAGIHAKAILNNPSTYEIIDPKDFGMSRYVHFASRLTGWNAIKSRAEQLGLDMTDAQIKTVTLKIKAMADVRPLAIDDADSIIRTYHYNLNATQEKPLLQLTEEEKEKFAKAERELAQEDEKKALERKADDEADVPRAKKQKTETVA

SEQ ID NO: 12978 - DNA, 1392 bp, Aspergillus fumigatus
  CDS (1)..(1392)
atgtgtcctggtgcagacaatgagcccaatgggcacaccaacggcgccaatggcaccgttcctcaccccggcttcactgccgtcgagacccgtcaaaaccctcacccttcggcttctcgtaacccttacggccacaacgtcggtgtgaccgacttcttgagcaatgtctctcgttttaagatcattgagagtacccttcgtgaaggtgaacagtttgccaacgccttcttcgatacggagaagaagattgagattgccaaagctctggatgactttggtgtcgactacattgagctcaccagcccctgtgcttccgagcagtcgagaaaggattgtgaggctatctgcaagcttggcttgaaggccaagatcctcacacacatcagatgtcacatggacgacgccagagttgctgtcgagactggtgttgacggagttgacgtcgttattgggacctcgtcctatctccgggagcactctcacggcaaggacatgacctacatcaagaacaccgccattgaagtcatcgaattcgtcaagtccaagggcattgaaatccggttctccagcgaggactccttccgttctgacctcgttgacctgctgtccatttactccgctgtcgacaaggtcggcgttaatcgtgttggtattgctgacactgtcggctgcgcttcgcctcgtcaggtttacgaactcgtccgtgtgttgagaggtgtcgttagctgtgatattgaaactcacttccacaatgacaccgggtgtgccatcgctaacgcttactgcgccctggaggctggtgccactcacatcgatacctctgtccttggtatcggggagcgtaacggcatcactccccttggtggtctcatggcccgtatgatggtcgccgaccctgaatacgtcaagagcaagtacaagctcgagaagctcaaggacattgaggatcttgttgccgctgccgttgaagtcaacattcccttcaacaactacatcactggtttctgcgccttcacccacaaagccggtatccacgccaaggccatcctcaacaaccccagcacatacgagattatcaaccctgccgattttggtatgaccagatacgttcactttgcttcgcgcttgacgggttggaacgctatcaagtctcgtgctcagcagctcaacattgagatgaccgatgctcagtacaaggagtgcactgccaaaatcaaggctcttgctgatatccgtcccattgccgttgacgacgctgacagcattatccgtgcctactaccgcaacctcaagtcaggcgagaacaagcctctccttgacctcacagctgaagagcaagctcaatttgctgccaaggagaaggagcttgctggctcgggtgttattgcttaa

SEQ ID NO: 12979 - protein, 463 aa, Aspergillus fumigatus
MCPGADNEPNGHTNGANGTVPHPGFTAVETRQNPHPSASRNPYGHNVGVTDFLSNVSRFKIIESTLREGEQFANAFFDTEKKIEIAKALDDFGVDYIELTSPCASEQSRKDCEAICKLGLKAKILTHIRCHMDDARVAVETGVDGVDVVIGTSSYLREHSHGKDMTYIKNTAIEVIEFVKSKGIEIRFSSEDSFRSDLVDLLSIYSAVDKVGVNRVGIADTVGCASPRQVYELVRVLRGVVSCDIETHFHNDTGCAIANAYCALEAGATHIDTSVLGIGERNGITPLGGLMARMMVADPEYVKSKYKLEKLKDIEDLVAAAVEVNIPFNNYITGFCAFTHKAGIHAKAILNNPSTYEIINPADFGMTRYVHFASRLTGWNAIKSRAQQLNIEMTDAQYKECTAKIKALADIRPIAVDDADSIIRAYYRNLKSGENKPLLDLTAEEQAQFAAKEKELAGSGVIA

SEQ ID NO: 12980 - DNA, 1920 bp, Oryza sativa (japonica cultivar-group)
  CDS (1)..(1920)
atggcctcctccctcctctcctccccaaaaccctcctccttctcctccgcaaaccccacctccactccacgcccacgcgcccaaactctctcccccttccgcgccgccgccccacgcttctcccatggcctcgccaccgccgccgccgccgcaaaccctagcgcctcccgccgctgctaccaccgcgccttcgcccgccccgtccgggcgtccatggcgcagccgcggcgcccggagtacgtccccaaccgcatcgacgaccccaactacgtccgcatcttcgacaccaccctccgcgacggggagcagtcccccggggccaccatgaccagcgccgagaagctcgtcgtcgcgcgccagctcgcccgcctcggcgtcgacatcatcgaggccgggttcccggcctcctcccccgacgacctcgacgccgtgcgctccatcgccatcgaggtcgggaacacgcccgtcggggaggacggccacgtgccggtcatctgtggcctctcgagatgcaataagcgagacattgatgctgcctgggaggccgtgcggcacgcgcggcggccgcgcatccacaccttcattgccaccagcgagatccatatgcagcacaagctaaggaagacgcccgagcaggtggtggccattgccaaggaaatggtggcctacgcccgcagcctaggctgccctgatgtcgagttcagccctgaagacgctggcaggtcaaacagagagtttctatatcatattctagaggaagtcataaaagctggagcaacaacactcaatatcccagacactgttggatacactcttccttatgaatttgggaagctaattgctgatataaaagcaaacactccaggaattgaaaatgctattatttctactcattgccagaatgaccttggtctagcaaccgccaatacattagcgggcgctcatgcaggagcacggcaattagaggtgactatcaacggtattggtgaaagggctggaaatgcttctttggaagaggttgtgatggcaattaaatgtcgccgagagctcttaggaggtctgtatactggaatcaatacccaacatatcactatgtcaagcaaaatggtacaagagcacagtggacttcatgtacaaccacataaagctattgtcggtgccaatgcctttgcacatgaaagtggaattcatcaggatgggatgcttaaatacaaaggaacttatgaaataatttctcctgatgatattggtctaacacgtgcaaacgagtttggtattgttcttgggaaactcaggttaaaccttgctcacttgacattgaggaaacctctacctggcctgcttggatatgaaatcactgacaaggaatttgaggatttctttaaacgctacaaagaggttgcagagaagaaaaagcgtgtaactgatgaagacattgaggcgctgttgtctgatgagatatttcagcccaaggttttttggtcccttgctgatgtacaggcaacttgtggaacacttggtctgtctacagcaactgtcaaactgataggtccggatggagaggagaagattgcatgtgcagttggaacaggtccagttgatgcagcttacaaggctgttgatgatataatacagatcccaactgttcttcgagaatatagcatgacatcggtcacagaaggcattgatgcaattgcaactactagagtggttgtcactggagatgttagcgactctaaacatgctttgactggtcactccttcagccgggcattcagtgggagtggtgccgcactggatattgttgtttccagtgtgcgagcttacctgagtgccctgaacaagatgtccagttttgttggggctatcaaggctagtagtgaagtatctgaaagccaaagagttcaaaccacagaatga

SEQ ID NO: 12981 - protein, 639 aa, Oryza sativa (japonica cultivar-group)
MASSLLSSPKPSSFSSANPTSTPRPRAQTLSPFRAAAPRFSHGLATAAAAANPSASRRCYHRAFARPVRASMAQPRRPEYVPNRIDDPNYVRIFDTTLRDGEQSPGATMTSAEKLVVARQLARLGVDIIEAGFPASSPDDLDAVRSIAIEVGNTPVGEDGHVPVICGLSRCNKRDIDAAWEAVRHARRPRIHTFIATSEIHMQHKLRKTPEQVVAIAKEMVAYARSLGCPDVEFSPEDAGRSNREFLYHILEEVIKAGATTLNIPDTVGYTLPYEFGKLIADIKANTPGIENAIISTHCQNDLGLATANTLAGAHAGARQLEVTINGIGERAGNASLEEVVMAIKCRRELLGGLYTGINTQHITMSSKMVQEHSGLHVQPHKAIVGANAFAHESGIHQDGMLKYKGTYEIISPDDIGLTRANEFGIVLGKLRLNLAHLTLRKPLPGLLGYEITDKEFEDFFKRYKEVAEKKKRVTDEDIEALLSDEIFQPKVFWSLADVQATCGTLGLSTATVKLIGPDGEEKIACAVGTGPVDAAYKAVDDIIQIPTVLREYSMTSVTEGIDAIATTRVVVTGDVSDSKHALTGHSFSRAFSGSGAALDIVVSSVRAYLSALNKMSSFVGAIKASSEVSESQRVQTTE

SEQ ID NO: 12982 - DNA, 1896 bp, Arabidopsis thaliana
  CDS (1)..(1896)
atggcgtcttcgcttctgagaaaccctaatctctactcatcaacaacaatcaccaccacttcttttcttcccaccttctcctctaaacccacacctatctcctcctctttccgtttccaaccatctcaccaccgttcaatctccctccgaagtcaaaccctccgtctctcatgctcaatctcagatccttctccactaccacctcacactcctcgccgtccccgtcctgaatacatccccaaccgcatttccgatccaaactacgtccgcgtcttcgatactactctccgtgacggtgaacaatctccaggagctacacttacttccaaggaaaaacttgacatcgctcgtcagctagctaaacttggtgttgacatcatcgaggctgggtttcctgctgcttccaaggatgattttgaagcggttaagactatagctgaaacagttggaaacactgttgatgagaatggttatgttcctgttatctgtggactctctagatgcaataagaaggatattgagagagcttgggatgctgtgaaatacgctaaacggcctaggattcatacttttatagctactagtgatatacatttggagtataaactaaagaaaaccaaagcagaggtcatcgaaatcgctaggagtatggttagattcgcgaggagcttggggtgcgaagatgttgagttcagtccagaagatgcaggaagatcggagagagagtacttatacgagattcttggtgaagtgataaaagcaggagcaacaactctcaacatacctgatactgttggtataactttgcctagtgagtttggtcaactgattactgatttaaaggccaatactccggggattgaaaatgttgtcatctcaacacattgtcagaatgatcttggactctctacggccaacactttatctggggcacatgcaggtgcgaggcagatggaagtgacgatcaatggaattggtgaaagagctggaaacgcttcactggaagaggttgtgatggccataaaatgccgtggagatcatgtattaggaggtctatttaccggaattgatactcggcacattgttatgacaagcaagatggtagaggagtacactgggatgcagacacaacctcataaggctattgtaggagcgaatgcctttgcgcatgaaagtggaattcaccaggatggaatgctgaaacacaagggtacatatgaaattatatgtcccgaagaaattggacttgaacgatcaaatgatgctggcattgtcttggggaagcttagtgggcgtcatgcgctgaaagaccgtttgactgagcttggttatcaattagatgatgaacagctaagtaccattttctggcgcttcaaaaccgtggctgagcagaaaaagagagttactgatgcggacataatagctttagtatctgatgaagttttccagccagaagccgtgtggaaactcctggacattcagataacttgtggaactctcgggctttcaacagcaactgtaaaacttgctgacgctgatggcaaagaacatgtcgcttgttctattggaactgggcctgtggattcagcttacaaggcagtagatcttatcgtaaaggaaccggctactctgcttgagtactcaatgaatgcagtaacagaaggcattgatgccatcgcaaccacaagagttcttatccgtggaagcaacaaatactcatctacaaacgcaataactggtgaagaggttcaaagaacctttagtggaactggagcaggaatggatattgtggtgtcaagcgtcaaagcttatgttggagctttgaacaaaatgatggacttcaaagaaaactccgccacaaaaatcccttcccaaaaaaacagagtcgctgcctga

SEQ ID NO: 12983 - protein, 631 aa, Arabidopsis thaliana
MASSLLRNPNLYSSTTITTTSFLPTFSSKPTPISSSFRFQPSHHRSISLRSQTLRLSCSISDPSPLPPHTPRRPRPEYIPNRISDPNYVRVFDTTLRDGEQSPGATLTSKEKLDIARQLAKLGVDIIEAGFPAASKDDFEAVKTIAETVGNTVDENGYVPVICGLSRCNKKDIERAWDAVKYAKRPRIHTFIATSDIHLEYKLKKTKAEVIEIARSMVRFARSLGCEDVEFSPEDAGRSEREYLYEILGEVIKAGATTLNIPDTVGITLPSEFGQLITDLKANTPGIENVVISTHCQNDLGLSTANTLSGAHAGARQMEVTINGIGERAGNASLEEVVMAIKCRGDHVLGGLFTGIDTRHIVMTSKMVEEYTGMQTQPHKAIVGANAFAHESGIHQDGMLKHKGTYEIICPEEIGLERSNDAGIVLGKLSGRHALKDRLTELGYQLDDEQLSTIFWRFKTVAEQKKRVTDADIIALVSDEVFQPEAVWKLLDIQITCGTLGLSTATVKLADADGKEHVACSIGTGPVDSAYKAVDLIVKEPATLLEYSMNAVTEGIDAIATTRVLIRGSNKYSSTNAITGEEVQRTFSGTGAGMDIVVSSVKAYVGALNKMMDFKENSATKIPSQKNRVAA

SEQ ID NO: 12984 - DNA, 1896 bp, Arabidopsis thaliana
  CDS (1)..(1896)
atggagtcttcgattctcaaaagccctaatctctcttcaccatcgttcggtgtaccttcaattcccgccttatcctcctcctccacctcaccattttcatctcttcatctccgatcacagaaccaccgtaccatctctcttaccaccgccggaaaattccgtgtctcgtattctctctccgcttcttcacctctaccacctcatgctcctcgccgtcgtcccaattacatccctaaccgtatatccgatcccaattacgtcagaatcttcgatacaactctccgagacggtgaacagtctcccggagctacactaacctccaaggaaaagctcgatatcgctcgtcaattagccaagctcggagtcgacatcatcgaagctggatttcccgctgcttcaaaagacgatttcgaagctgttaaaaccatagctgagactgttggcaataccgtcgacgaaaatggctatgtccctgtaatctgtggtctctcgagatgtaacaagaaggatattgagacggcttgggaagctgtgaagtacgctaagcggccaagaatccatacgtttattgccactagtgatattcatctgaagtataagttgaagaagagtaaagaagaagttattgagatcgctaggaacatggttagattcgccagaagcttgggatgtgaagatgttgaatttagtccagaagatgccggaagatcggagagagagtacttatacgagattcttggtgaagtgatcaaagctggagcaaccactcttaacatacctgacactgttggtataaccttgcctagtgagtttggtcagttgattgctgatattaaagctaatactcctgggatccaaaatgttataatctctacacattgtcagaatgatcttggactctccaccgccaacactttatctggtgcacattcgggcgcgaggcaagtggaagtgactatcaatggaattggcgaaagagctggaaacgcttcattggaagaggttgtcatggccataaaatgccgtggagatcatgtcttaggaggcctatttactggaatcgatacccggcacattgttatgacaagcaagatggttgaggagtacactggtatgcaaacgcagccccataaggctattgtaggagcaaacgcctttgcgcatgaaagtggtattcatcaggatggaatgctgaagcacaagggtacctatgaaattatgtcccccgaagagattgggcttgagcgatcaaatgatgctggcatcgtgctgggaaagcttagtgggcgtcacgcactgaaagaccgtttaaatgagctcggttatgtcctggatgatgggcagctaagcaaccttttctggcgtttcaaagctgtggcagagcaaaaaaagagagttaccgatgctgacttaatagctttagtatctgatgaagtgtttcagccagaggctgtctggaaactcctggacatgcagataacttgtggaactctcggtctctcaacatctactgtaaaacttgctgactccgatggcaaagagcatgtagcttgttctgttggaaccggacctgtagatgcagcttacaaggcagttgatcttatcgttaaggaacctgcgactctgcttgagtactcgatgaatgcagtaacagaaggcattgatgctattgcaaccacacgggttctaatccgcggagacaacaactactcatcaacaaacgcggtaacgggtgaatctgttgaaagaacttttagtggaaccggagcaggaatggacattgttgtgtcgagcgttaaagcttatgttggagctttgaacaaaatgttgggtttcaaagaacacacctccactttaagtaaaacccctttggagaccaacgaagtccctgcctga

SEQ ID NO: 12985 - protein, 631 aa, Arabidopsis thaliana
MESSILKSPNLSSPSFGVPSIPALSSSSTSPFSSLHLRSQNHRTISLTTAGKFRVSYSLSASSPLPPHAPRRRPNYIPNRISDPNYVRIFDTTLRDGEQSPGATLTSKEKLDIARQLAKLGVDIIEAGFPAASKDDFEAVKTIAETVGNTVDENGYVPVICGLSRCNKKDIETAWEAVKYAKRPRIHTFIATSDIHLKYKLKKSKEEVIEIARNMVRFARSLGCEDVEFSPEDAGRSEREYLYEILGEVIKAGATTLNIPDTVGITLPSEFGQLIADIKANTPGIQNVIISTHCQNDLGLSTANTLSGAHSGARQVEVTINGIGERAGNASLEEVVMAIKCRGDHVLGGLFTGIDTRHIVMTSKMVEEYTGMQTQPHKAIVGANAFAHESGIHQDGMLKHKGTYEIMSPEEIGLERSNDAGIVLGKLSGRHALKDRLNELGYVLDDGQLSNLFWRFKAVAEQKKRVTDADLIALVSDEVFQPEAVWKLLDMQITCGTLGLSTSTVKLADSDGKEHVACSVGTGPVDAAYKAVDLIVKEPATLLEYSMNAVTEGIDAIATTRVLIRGDNNYSSTNAVTGESVERTFSGTGAGMDIVVSSVKAYVGALNKMLGFKEHTSTLSKTPLETNEVPA

SEQ ID NO: 12986 - DNA, 1521 bp, Arabidopsis thaliana
  CDS (1)..(1521)
atggcttcatcgcttctgacatcttccgttatgatccctaccaccggttccaccgtggttggccggtcagtgttaccctttcaatcttccctgcactctctccgcctgacccattcgtacaagaaccccgcattgttcatctcatgttgctcttctgtgtccaaaaatgcggcaactagttctactgatctcaaacccgttgtggaacggtggccggagtacataccgaacaagcttcccgacggaaactatgtgcgtgtattcgacacgacgctccgtgacggtgaacaatctcctggtggatccctcactccgccgcagaagctagagattgcccgacagctcgctaaactccgagtagacatcatggaagtcggttttccgggatcatctgaagaagagttagaaaccattaagaccatcgccaagactgtggggaatgaggtggatgaggaaacaggttacgtccctgtgatatgcgccatagctcgatgcaaacatagagacattgaggcgacttgggaggcgctgaagtacgcgaagaggccaaggatactcgtattcacatctactagtgacattcacatgaaatataagttgaaaaagactcaagaagaagtgattgagatggccgtgagtagtattaggtttgctaaaagcttgggcttcaatgacatccagtttgggtgcgaagatggcggcaggtcggacaaggatttcctatgcaagattctaggagaagccataaaagccggtgttacggtggtgaccatcggtgatacggtagggatcaacatgccacatgaatacggggaactcgtgacttatctcaaagcaaacacccctggaattgacgatgttgtcgtcgctgttcattgtcacaacgaccttggtcttgcaaccgccaactcaatcgccggtatacgtgcgggagcaagacaggtcgaagtaactatcaacggaattggtgaaagaagtggcaatgcgtcgcttgaggaggtcgtgatggctttgaaatgtcgaggggcatatgtgatcaatggggtttacacaaaaatagacacacgccaaatcatggctaccagcaagatggttcaagagtacacgggcttgtatgttcaagcacataagcccatagttggagcgaactgttttgttcatgagagcggcattcatcaggatggaatattgaaaaataggagtacttatgagatcttatcaccagaagatattgggattgtaaaatctcaaaattccggccttgttcttggaaagcttagtggacgtcacgctgtgaaagatcggctgaaagagttgggatatgaactcgatgatgagaaattgaacgctgtcttctcactattcagagatttaaccaagaataaaaagagaatcacggatgctgatttgaaggcattagtaacatctagcgatgaaatctctttggagaaattaaacggcgctaacggtttaaagtctaacggctatataccagttcctcaggtttcatcgaatgtgtaa

SEQ ID NO: 12987 - protein, 506 aa, Arabidopsis thaliana
MASSLLTSSVMIPTTGSTVVGRSVLPFQSSLHSLRLTHSYKNPALFISCCSSVSKNAATSSTDLKPVVERWPEYIPNKLPDGNYVRVFDTTLRDGEQSPGGSLTPPQKLEIARQLAKLRVDIMEVGFPGSSEEELETIKTIAKTVGNEVDEETGYVPVICAIARCKHRDIEATWEALKYAKRPRILVFTSTSDIHMKYKLKKTQEEVIEMAVSSIRFAKSLGFNDIQFGCEDGGRSDKDFLCKILGEAIKAGVTVVTIGDTVGINMPHEYGELVTYLKANTPGIDDVVVAVHCHNDLGLATANSIAGIRAGARQVEVTINGIGERSGNASLEEVVMALKCRGAYVINGVYTKIDTRQIMATSKMVQEYTGLYVQAHKPIVGANCFVHESGIHQDGILKNRSTYEILSPEDIGIVKSQNSGLVLGKLSGRHAVKDRLKELGYELDDEKLNAVFSLFRDLTKNKKRITDADLKALVTSSDEISLEKLNGANGLKSNGYIPVPQVSSNV

SEQ ID NO: 12988 - DNA, 1512 bp, Arabidopsis thaliana
  CDS (1)..(1512)
atggcttcgttacttctcacatcgtcgagtatgataaccactagctgtcgctccatggttctccggtcagggttacccatcggatcttcttttccctctcttcgcctgacccgtccatacgacaaggcgactctgttcgtctcatgttgctccgctgagtccaaaaaggtggcaactagtgctactgatctcaaacctatcatggaacggaggccggagtacattccgaacaagcttccccacaagaactatgtgcgtgtattagacacgacgcttcgtgacggtgaacaatctcccggtgcagcacttactccaccgcagaagttagagattgccaggcagctagctaaactccgagtagacatcatggaagttggttttccggtgtcgtctgaggaagaattcgaagctattaaaaccatcgccaagaccgtggggaacgaggtggatgaggaaaccggttacgttcctgtgatatgcggcattgcacgatgcaaaaagagagacatcgaggcaacttgggaggcactgaagtatgcgaagaggccgagggtaatgctattcacatctactagtgaaattcacatgaaatataagttgaaaaagactaaagaagaagtgatcgagatggccgtgaacagtgttaagtacgctaaaagcttgggcttcaaagacatccaatttgggtgcgaagatggcggcaggacggagaaagattttatatgtaagattctaggagaatcgataaaagcgggtgcaaccacggtggggtttgcggacacggtcgggatcaacatgccgcaagaattcggagaactcgtggcctatgtcatagaaaacactccaggggctgatgatattgtcttcgccattcattgtcataacgaccttggtgttgctaccgccaacacaatatccggtatatgtgcgggagcaagacaagtcgaagtgacgatcaacggaattggtgaaagaagtgggaatgcgccgcttgaagaggtcgtgatggctttgaaatgtcgaggagaatctctgatggatggtgtttacacaaaaatagactcacgccaaattatggctacaagcaagatggttcaagagcataccggcatgtatgttcaaccacataagccaatagttggagacaactgttttgttcatgagagcggcattcaccaggatggaatattgaaaaatcgaagtacatatgagatcttatcaccagaagatgttgggatcgtaaaatctgaaaattctggcattgttcttggaaagcttagcggacgtcatgctgtaaaagaccggcttaaagagttgggatatgaaatcagtgatgagaaattcaacgacatcttctcacgatacagagaattaacgaaggacaaaaagagaatcacagacgctgatctgaaggcattagtggtgaacggtgctgaaatctcatcagaaaaattaaacagtaaaggaattaacgaccttatgtcaagccctcagatttccgctgttgtataa

SEQ ID NO: 12989 - protein, 503 aa, Arabidopsis thaliana
MASLLLTSSSMITTSCRSMVLRSGLPIGSSFPSLRLTRPYDKATLFVSCCSAESKKVATSATDLKPIMERRPEYIPNKLPHKNYVRVLDTTLRDGEQSPGAALTPPQKLEIARQLAKLRVDIMEVGFPVSSEEEFEAIKTIAKTVGNEVDEETGYVPVICGIARCKKRDIEATWEALKYAKRPRVMLFTSTSEIHMKYKLKKTKEEVIEMAVNSVKYAKSLGFKDIQFGCEDGGRTEKDFICKILGESIKAGATTVGFADTVGINMPQEFGELVAYVIENTPGADDIVFAIHCHNDLGVATANTISGICAGARQVEVTINGIGERSGNAPLEEVVMALKCRGESLMDGVYTKIDSRQIMATSKMVQEHTGMYVQPHKPIVGDNCFVHESGIHQDGILKNRSTYEILSPEDVGIVKSENSGIVLGKLSGRHAVKDRLKELGYEISDEKFNDIFSRYRELTKDKKRITDADLKALVVNGAEISSEKLNSKGINDLMSSPQISAVV

SEQ ID NO: 12990 - DNA, 1182 bp, Deinococcus radiodurans R1
  CDS (1)..(1182): transl_table=11
atggccgggatttttatgaccgacgccccgccccccctgattcctgcccgttcctgggccatcatcgactcgaccctgcgcgagggggaacagttcgcccgtggcaacttcggcacggacgacaaagtggaaatcgcccgggcgctcgacgccttcggggccgagtacatcgaagtcaccacgccgatggtgagcgagcagacccggcaggatattcgcaagctgaccgggctggggctgcgggccaagttcctgacccacgtgcgctgccacatggaagacgtgcagcgggcggtggacaccggcgtggacggcctcgacctgctgttcggcaccagcagtttcctgcgcgagttctcgcacggcaagagcatcgcgcagattatcgacacggcgggcgaggtcatcggctggatcaagacccaccaccccgaactcgaaatccgcttttccgccgaggacaccttccgctcggaggaagccgacctgatggcggtctacagcgccgtttccgaactcggcgtgcaccgggtggggctggccgacacggtgggggtcgccacaccccggcaggtgtacacgctggtgcgcgaggtccgtaaggtgattcacgagggctgcggcatcgagtttcacggtcacaacgacaccggctgcgcggtcagcaacgcttacgaggcgatcgaggcgggcgcgacccacatcgacacgaccatcctcggcatcggcgagcgcaacggcattacgccgctcggcggcctgcttgcccgcatgttcaccttcgacccgcaagggctgatcgacaaatacaaccttgagctgctgcccgaactcgaccgcatgattgcccgcatggtggacctgccggtgccctggaacaactacctgaccggcgaattcgcctacaaccacaaggcggggatgcacctcaaggccatctacctcaaccccggcgcgtatgaggcgattccgcccggcgtgttcggcgtgggccggcgcattcaggccgcgagcaaggtgaccggcaagcacgcgattgcctacaaggcccgcgaactcgggctgcactacggtgaggacgccctgcgccgcgtgaccgatcacatcaagtcgctggccgaacaggacgaactcgacgacgcccatctggaacaggtgctgcgcgagtgggtcagcgcctga

SEQ ID NO: 12991 - protein, 393 aa, Deinococcus radiodurans R1
MAGIFMTDAPPPLIPARSWAIIDSTLREGEQFARGNFGTDDKVEIARALDAFGAEYIEVTTPMVSEQTRQDIRKLTGLGLRAKFLTHVRCHMEDVQRAVDTGVDGLDLLFGTSSFLREFSHGKSIAQIIDTAGEVIGWIKTHHPELEIRFSAEDTFRSEEADLMAVYSAVSELGVHRVGLADTVGVATPRQVYTLVREVRKVIHEGCGIEFHGHNDTGCAVSNAYEAIEAGATHIDTTILGIGERNGITPLGGLLARMFTFDPQGLIDKYNLELLPELDRMIARMVDLPVPWNNYLTGEFAYNHKAGMHLKAIYLNPGAYEAIPPGVFGVGRRIQAASKVTGKHAIAYKARELGLHYGEDALRRVTDHIKSLAEQDELDDAHLEQVLREWVSA

SEQ ID NO: 12992 - DNA, 1635 bp, Nostoc sp. PCC 7120
  CDS (1)..(1635): transl_table=11
atgaccaaaaatccctcaccccacatttggctttatgacaccacactacgggatggcactcagcgcgaagggctatcaatttctacagaagacaagctacgcattgcccacagactcgatcaactagggattcccttcattgaaggtggatggccaggagccaaccctaaggatgttcaatttttctggcaacttcacgaagatccgctcaaacattcacaaattgttgcattttgttcaactcgccgccctcatactcatgccgcagatgaaccaatgctccaagatatcctggctgcgggttctagctgggtgacaatttttggcaaatcctgggatttacacgtcacaacaggtctaaaaactactttagaagaaaacttggcaatgatccgcgatactatcgagttttttcgctctcaagggcgatgcgtgatctatgatgctgaacactggtttgatggctataagcacaaccgagattatgctttacagaccctcaaggcagcaatgacagccggtgcagaatggttagtcctctgtgatacgaatggcggtactttacctcacgaagttagccagattgttcaagatgttgtcgaggtgactagggaagatttgacccaattaccaataccccaaatcggtattcatactcataatgattcagatatggctgttgccaatgctttagcagcagtaatggcaggggcgacaatggtacaaggtactatcaacggttatggcgaacgttgtgggaatgctaatttatgttcattaattcctaatctacaactgaaattagggtatagctgtatcacagaacaccagctaggacaactagcagaagccagccgatttgtgagtgaagtggtaaatcttgcccctgatgaacacgctccttttgtgggacgttcggcttttgctcacaaaggtggtattcatgtctccgccgtggaacgtaatcccctaacttatgaacacattcagccggaacaagtggggaaccgccgccggattgtcatttctgaacaagcggggattagtaatgtgttagctaaagcccggacttttggcattgaactcgacaagcaaacaccagaagccaagcaaattcttcagcgcctcaaggaattagaaagtgaaggatatcaatttgaagcagccgaagcgagttttgctttattgatgtatgaagctttgggcggaagacagcagttttttgaagttaaaggctttcaagtccactgtgatttagtggaaggcaaagaaatgaccaatgctttagcgacggtgaaagtcgcggtgaatggtaagaacattttagaagctgccgaaggtaatgggccagtagcagccttagatgcagcgttacgcaaagctttagtcaacttctatccccaacttgccacctttgagttaacagattacaaagtgcggattctcgacggtcacacaggcacttctgccaaaacccgtgccttagtcgaatcaggcaatggttatcaacgctggacaacggttggcgtttcaccgaacattttggcagcttcctatcaagcggttgtcgaaggtttggaatatggtctgttattacacgcccaagcagaagccgcagtaaaagcgtctggttaa

SEQ ID NO: 12993 - protein, 544 aa, Nostoc sp. PCC 7120
MTKNPSPHIWLYDTTLRDGTQREGLSISTEDKLRIAHRLDQLGIPFIEGGWPGANPKDVQFFWQLHEDPLKHSQIVAFCSTRRPHTHAADEPMLQDILAAGSSWVTIFGKSWDLHVTTGLKTTLEENLAMIRDTIEFFRSQGRCVIYDAEHWFDGYKHNRDYALQTLKAAMTAGAEWLVLCDTNGGTLPHEVSQIVQDVVEVTREDLTQLPIPQIGIHTHNDSDMAVANALAAVMAGATMVQGTINGYGERCGNANLCSLIPNLQLKLGYSCITEHQLGQLAEASRFVSEVVNLAPDEHAPFVGRSAFAHKGGIHVSAVERNPLTYEHIQPEQVGNRRRIVISEQAGISNVLAKARTFGIELDKQTPEAKQILQRLKELESEGYQFEAAEASFALLMYEALGGRQQFFEVKGFQVHCDLVEGKEMTNALATVKVAVNGKNILEAAEGNGPVAALDAALRKALVNFYPQLATFELTDYKVRILDGHTGTSAKTRALVESGNGYQRWTTVGVSPNILAASYQAVVEGLEYGLLLHAQAEAAVKASG

SEQ ID NO: 12994 - DNA, 1578 bp, Pyrobaculum aerophilum str. IM2
  CDS (1)..(1578): transl_table=11
gtgctggacacaactctccgagacggagcccaaggcgccaacgtctccttcgctctccaagacaagataagaattgccctgaagctcgacgagttaggcgtcgactatatagaggggggctggccctactcaaatcccaaagactaccagttcttcaaggcaatgaaggagtacccccttgccagggcgaagctggcggctttcggcagcactcggaggaaaaacactaggcccagccaagacgagagtttgaactcaattgtaaaggccgacgtccccgtcgctgtaatattcgggaagagctggactttacacgtggacaaagtgctggaggccactagggaggagaacctagccatgataagcgaaagcgttgagtacttgagggaacacggcatggaggtgatatacgacgccgagcatttctaccagggctatcaagaggatcccgaatacgccttggccactttagaggcggcgtggagggccggggcgagggtaatcgtgctggctgatacaaacggggggactccgccccacgaggtgtacagaataacggcggaggtgaggaggaggtttcccaacatgcccctaggcgcccacatgcacaacgacattggatgcgccgtggctaacactttaatggcggtggcggccggcgccagacacgtgcagggcactataaacggcataggggagaggaccggcaacgccgacctcgtccaaatcctgccttcgctggagttaaaaatggggcttagggtgttgagagaagaggcgcctcctgtgaagttcgcaaaactaagagaggtctcgaggtttgtgtacgaggcgctgggcctccagcctaacccctatcagccctatgtcggtgaattcgccttcgcccacaaaggcggcgtacacgcagacgccgttatgaaagtgccgagggcttacgagcacatagatccccagctagtgggcaacaggagagtgttcgtcgtgtcggagatggccgggggcgcgagcgttgttttaaaagccgcggaggtgctgggcctcgcccttaacaaaagagacgaggcggtgaggagggccctcgaggagattaaaatgctggagaaagaggggtattcctttgacgtcgcccccgcctcagccatgttaatcctgctgaggcatctgggcctctatagggagaggttcagaatactggagtggagagtggtcacggggccggccgaggcctcttacgccgttgtaaaagtcctagtggaggggaggacaatgttagaggccggggagggcgtcggccccgtacacgcaatagacgtggcattgagaaaggccctcgtgggggcgttccccgagctttccgacgtacagctcagagactacaaagtgatcctccccacggcagtgaagagcactgaaagcgtcgtgagagtggtgtcggagttcacagacggggagaggatctggcgaaccacgggggtgtccagcaatatagtaatggcgtctctcatggcgttgcgagacggatacgacttcgtattacaaacaaactcgcttaacaaaaacaatatcggcagatga

SEQ ID NO: 12995 - protein, 525 aa, Pyrobaculum aerophilum str. IM2
MLDTTLRDGAQGANVSFALQDKIRIALKLDELGVDYIEGGWPYSNPKDYQFFKAMKEYPLARAKLAAFGSTRRKNTRPSQDESLNSIVKADVPVAVIFGKSWTLHVDKVLEATREENLAMISESVEYLREHGMEVIYDAEHFYQGYQEDPEYALATLEAAWRAGARVIVLADTNGGTPPHEVYRITAEVRRRFPNMPLGAHMHNDIGCAVANTLMAVAAGARHVQGTINGIGERTGNADLVQILPSLELKMGLRVLREEAPPVKFAKLREVSRFVYEALGLQPNPYQPYVGEFAFAHKGGVHADAVMKVPRAYEHIDPQLVGNRRVFVVSEMAGGASVVLKAAEVLGLALNKRDEAVRRALEEIKMLEKEGYSFDVAPASAMLILLRHLGLYRERFRILEWRVVTGPAEASYAVVKVLVEGRTMLEAGEGVGPVHAIDVALRKALVGAFPELSDVQLRDYKVILPTAVKSTESVVRVVSEFTDGERIWRTTGVSSNIVMASLMALRDGYDFVLQTNSLNKNNIGR

SEQ ID NO: 12996 - DNA, 1131 bp, Chlorobium tepidum TLS
  CDS (1)..(1131): transl_table=11
gtgatccgcaaaccgtggatcatcgatacgaccctccgggatggagagcaggcccccggcgtggtgttcagtccgcacgaaaaaaagcggatagcagcaatgcttgcagaaaccggcgtcgatgagatcgaagtgggctacccggccatcagtgcggcggagcggaaggtgattcgcgagatcgtcgccatgaaactgccggtacgcctgacttcgtggtcgcgggccaatatggcggacatcgagttggcggcagaatgcggcaccgatgcggtgcacatcagttttccggcctcccggctctatctggagctgatacacaagaaggatgactggattcaggagcagcttcacgcgcttgtttccaaagctcgcgaacggttcgatttcgtcagcgtcggcggacaggacgccacgagaagtagcactgattttctgcaacgcttcatgctcgatgctgaagctgccggagccaaacggttcaggatcgccgatacggtaggcatcgccacgccggtgtcggtgatggccctcggcgcagcgttgcgccaaagctcgtcgctgccgctggagttccacgcgcacaacgatctcggcatggcgaccgccaacgccttcacggcactcaacgagggattcgaagcggtcagcgtgtcggtgaccggtctcggagagcgtgcgggcaacgcggccctcgaagagctggcaatggcgcttgcgctgaatggagacttcgacacgcatctcgacacatcgatgctctcccggctttgcgacgccgtggccacggcttccggacgagccattcaggagcaaaaaccggtggtcggacgttcagccttccagcacgaatcgggcattcattgcgccgcgctgttgcaggatccgctctcctaccagccgttcctgccgtcgcgggttggccgcagcgatttcgagatagtcatcggcaaacactcaggcacagcggcgatcatcgcccatttcaaccggcgcggaatcacgatttcgaaaaaggaggcccgcgaactgctcgatctgatccgtagtcagtccgaccgcctcaaacgggcgctccggaccgacgagatcgacgcgctccgtgaacaaaactctgtgaaacacgcttaa

SEQ ID NO: 12997 - protein, 376 aa, Chlorobium tepidum TLS
MIRKPWIIDTTLRDGEQAPGVVFSPHEKKRIAAMLAETGVDEIEVGYPAISAAERKVIREIVAMKLPVRLTSWSRANMADIELAAECGTDAVHISFPASRLYLELIHKKDDWIQEQLHALVSKARERFDFVSVGGQDATRSSTDFLQRFMLDAEAAGAKRFRIADTVGIATPVSVMALGAALRQSSSLPLEFHAHNDLGMATANAFTALNEGFEAVSVSVTGLGERAGNAALEELAMALALNGDFDTHLDTSMLSRLCDAVATASGRAIQEQKPVVGRSAFQHESGIHCAALLQDPLSYQPFLPSRVGRSDFEIVIGKHSGTAAIIAHFNRRGITISKKEARELLDLIRSQSDRLKRALRTDEIDALREQNSVKHA

SEQ ID NO: 12998 - DNA, 1566 bp, Streptococcus mutans UA159
  CDS (1)..(1566): transl_table=11
atgcgtaaggttgaatttcttgacacaacgctccgtgatggcgaacaaacaccgggggttaatttttcgattaaagaaaaagtagctattgccaagcaattggagaagtggggaatctctgatattgaagccggttttccagctgctagccctgactcttttgaagctgtgaagcaaattgcagcagcgatgacaacgactgctgtatcaggtctggctcgttctgtgaaatctgatattgatgcctgttatgaggcgcttaaggatgccaaatttccacaatgtcatgtctttattgcaaccagtcctattcatcgtgaatttaagcttaaaaaatccaaagaagaaattcttgaagtaattaaggaacatgtaacttatgcgcgctcaaaatttgatgtgattgaattttcaccagaggatgccacacgtacagaacttgatttcctattgcaggtagtgcaaactgctgtagatgctggcgctacttatattaatatccctgatacagttggctttaccacgccagtagaatttggccatattttcaagtatctcattgaaaatgttaaatctgaccgtgacattattttcagccctcattgtcatgatgacttaggaatggcaaccgctaataccctcgctgccattaaaaatggtgctggacgtgttgaaggaacggttaatggtatcggagaacgtgctggtaacgtagctcttgaagaagtggccgtagctcttaatattcgtgaagattactatgatgcgaccagtgctatcgttcttgatgagacagtgaccacttcagaaatggtatcacgtttctcgggtattcctattcctaaaaataaagctgttgttggtggcaatgctttttcacatgaatccggtattcatcaagatggttttcttaagaatcccctcacttatgaaattatcacgcctgaattggttggtgttaagaaaagttccctgccgcttgggaaattatctggccgtcatgcctttattgaaaaattaaaagaattgaagcttgattttgaagaaggagaggttgcacctctttttgcaaaatttaaatcgttggccgataaaaaacacgatatcacagatgctgatattagagctttggtagcagggactagtgttgaaaatcctgaaggtttccactttaaggacttaaggctgacatcaaatgatgacgacacgatcacagcacaagttattatggtcaatgagggtgaggaagaagtaactatcattgctaatggtaagggttctgttgaagctattttcaatgctgtcgataaattctttaatcaaactgttaagttagatagttataatatcgaggctgttactgatggtattgatgctcaggcacgtgtgctcgtttctgtggaaaatattgatacggataccattttcaatgcttctggtcttgactttgatgttttaaaagctagtgctattgcttatatcaatgctaatacctttgttcaaaaggaaaatgctggtgaaattggtcacaaagtttcagaacgtgattatccaagtaatgactag

SEQ ID NO: 12999 - protein, 521 aa, Streptococcus mutans UA159
MRKVEFLDTTLRDGEQTPGVNFSIKEKVAIAKQLEKWGISDIEAGFPAASPDSFEAVKQIAAAMTTTAVSGLARSVKSDIDACYEALKDAKFPQCHVFIATSPIHREFKLKKSKEEILEVIKEHVTYARSKFDVIEFSPEDATRTELDFLLQVVQTAVDAGATYINIPDTVGFTTPVEFGHIFKYLIENVKSDRDIIFSPHCHDDLGMATANTLAAIKNGAGRVEGTVNGIGERAGNVALEEVAVALNIREDYYDATSAIVLDETVTTSEMVSRFSGIPIPKNKAVVGGNAFSHESGIHQDGFLKNPLTYEIITPELVGVKKSSLPLGKLSGRHAFIEKLKELKLDFEEGEVAPLFAKFKSLADKKHDITDADIRALVAGTSVENPEGFHFKDLRLTSNDDDTITAQVIMVNEGEEEVTIIANGKGSVEAIFNAVDKFFNQTVKLDSYNIEAVTDGIDAQARVLVSVENIDTDTIFNASGLDFDVLKASAIAYINANTFVQKENAGEIGHKVSERDYPSND

SEQ ID NO: 13000 - DNA, 1131 bp, Wolinella succinogenes DSM 1740
  CDS (1)..(1131): transl_table=11
atgatcacgatcaacgacacaacgcttagggatggagagcaggctcccacggtggctttcacccaagaggagaagtgcgagatcgccaagcttctttatgaagcgggagcggatgagctagagattggaatcccagccatgggtgaggcagagcgcgaagacattagagccatcctctctctcgggcttcctttgcgcctcatgagctggaatcgagccacccaaagcgacctagaggcgagtttggcgtgtgggatgaaggcggtcgatctctcgattcctgtctcgactaaaatggtcgcggcgaagtttcgcgggaagtatgccaaagtgctctccaatctagaagagaccctcactatcgctaaaaaagaggggctttttgtctgtgtggggatggaggatacatcgcgcgcgaacgctcgattcctcaaggaggtgatcgcactggccatggagaggggtgcggatagagtgcgattttgtgatacggtgggtatcctcacgccactccagacctacagggcgattcgctctcttcggcgccattgcacgcttcctgttgagatgcactgccataatgattatgggatggcggtggcgaactctattgcaggaatcgaggcgggagcccaaagcgtcaatacgaccgtgataggaatcggtgagcgcgcagggaatgcgggatttgagcaggttcttttgagcctcatcgggcagtttggacaaaatcgtacactcgattctactattttgaaagcccttgtccaaaaggtcgccaaagccgcaggcgtggctctagcccccacggctcctgtggtggggagtcgcctcttttggcatgagagcggaattcatgccgatggaaatcaaaaaagcgagggcctctatgagcctttttcccctgaactggtgggtgcgagccgcgaataccctattggcaagcattcagggagtgccaatctaatctatcatctcaagcagtttgtcccactgatcgagaagggcgaagcgagcgatctactcccactggtgcgtgaaatcgtcaccaaaaacaaaaaacccctgagcgctaaagagctcttttgtctctacctctcgcacaagcgccactcccaaaaagaggggtaa

SEQ ID NO: 13001 - protein, 376 aa, Wolinella succinogenes DSM 1740
MITINDTTLRDGEQAPTVAFTQEEKCEIAKLLYEAGADELEIGIPAMGEAEREDIRAILSLGLPLRLMSWNRATQSDLEASLACGMKAVDLSIPVSTKMVAAKFRGKYAKVLSNLEETLTIAKKEGLFVCVGMEDTSRANARFLKEVIALAMERGADRVRFCDTVGILTPLQTYRAIRSLRRHCTLPVEMHCHNDYGMAVANSIAGIEAGAQSVNTTVIGIGERAGNAGFEQVLLSLIGQFGQNRTLDSTILKALVQKVAKAAGVALAPTAPVVGSRLFWHESGIHADGNQKSEGLYEPFSPELVGASREYPIGKHSGSANLIYHLKQFVPLIEKGEASDLLPLVREIVTKNKKPLSAKELFCLYLSHKRHSQKEG

SEQ ID NO: 13002 - DNA, 1194 bp, Rhodopseudomonas palustris CGA009
  CDS (1)..(1194): transl_table=11
atgtctgagatcaagtctgagatcgtccggccggatcagtcctgcggtttccagtccgccccaatcgtgctcaacgacaccacattgcgcgatggtgagcaggcgccgggtgttgccttctccaccgccgagaaggttgcgatcgcccgagcgctggcgcgcgccggcgtgccggaaatcgaggcggggacgcccgcgatgggcgtcgacgagatcgcggcgatccgcgccatcgtcgaagccggcctgccgctgacgacgattgcctggtgccggatgcgcaccgaggacgtcgatgccgcgctgaaggccggcgtggcgatggtcaatgtctcggtgccggtgtcggacgtgcagatcgccgccaagctcggcggcaagcggtcgaatgcgatcgagaccgtcaagcgcgtggtcggctatgctcgggaccgcggcctcgacgtcgccgtcggcggtgaggattcctcgcgagccgatcccgaattcctcgccgaggtgatcgccaccgcaaaggcatccggcgcgcgtcggtttcggatcgccgatacgctgagtgtgctcgacccattctccagccatgcgctgctggcgacgcttcgcgcctcgactgacctcgagctcgaattccacggccatgacgacctcggcctcgccaccgccaacacgctggctgcgctccgcgccggtgccagccatgcctcggtgacggtgatcggcctcggcgaacgtgccggcaatgcgccgcttgaagaggtcgcggtggcgctgaagcagctctatggccgcgacaccggcatcgtgctctcggagctcggcaacgtcgccgatctcgttgccaccgcagccgcccgtaccattccgttaaacaaggcgatcgtcggtgagcacgtcttcacccatgaatcgggaatacatgtcgatggcctgctcaaggatcagcgcacctaccagtcgctcgatccgaatttgttcggccgctccaaccgcattgtcatcggcaagcactccgggctatcggcgatcacctcgtcgctcgccaagttggatctgccggcgaccgcggacgaggcgcagggtatcctggccaaggtccgccgctatgcagtcacccacaagggcccggtcggcaacgagacattgattgcgatttggcgcgaggtccgcgagcggacgctcaccaactgcgcctga

SEQ ID NO: 13003 - protein, 397 aa, Rhodopseudomonas palustris CGA009
MSEIKSEIVRPDQSCGFQSAPIVLNDTTLRDGEQAPGVAFSTAEKVAIARALARAGVPEIEAGTPAMGVDEIAAIRAIVEAGLPLTTIAWCRMRTEDVDAALKAGVAMVNVSVPVSDVQIAAKLGGKRSNAIETVKRVVGYARDRGLDVAVGGEDSSRADPEFLAEVIATAKASGARRFRIADTLSVLDPFSSHALLATLRASTDLELEFHGHDDLGLATANTLAALRAGASHASVTVIGLGERAGNAPLEEVAVALKQLYGRDTGIVLSELGNVADLVATAAARTIPLNKAIVGEHVFTHESGIHVDGLLKDQRTYQSLDPNLFGRSNRIVIGKHSGLSAITSSLAKLDLPATADEAQGILAKVRRYAVTHKGPVGNETLIAIWREVRERTLTNCA

SEQ ID NO: 13004 - DNA, 1539 bp, Geobacter sulfurreducens PCA
  CDS (1)..(1539): transl_table=11
atggcagagcagaaaactatcaagatattcgatacaacactgcgtgacggagaacagtctcccggcaacagtatgaacatcgaggaaaaactcagggttgccaagcagctccaaaaactgaacgtagatgtaattgaagccggttttcccatcgcgtctgagggtgactttgaagcggtcatgcgggttgcacagaccattaagggccctgagattgcgggtctgtgccgcgccaacgacaaggatatagacagggcctgggaggctctcaagtatgctggcgagaaggggcgtatccatacctttattgccacctctgatatccatatgaagcacaagctgaagatgtccccgtcccaggtaatggatgcggcggtaaaggcggtgaagagggctaagtcgtacactcccaacgtggagttttcctgcgaggacgctgtacgaaccaacctgaaattcatggccgaggtggtagaggcagtcattgatgcgggggtgaccaccgtgaatatccccgatacggtgggctataccattccttttgaatacttcaatatcattaagtatctgaaggaaaacgttcccaatatcgagaaggcggtcatatccgtccactgccacaacgacctcggtctggcggttgcaaactccatcgccgcggttcaggcgggcgcgggccaggttgagtgcaccatcaacggtattggcgagcgtgcaggcaactgttccctggaagagtttgtcatggcaatccggactcgccacgatatccttccctttaagacgaacgtggcaacggaccagattgtgccggccagcagacttctttctaccatcaccggcattggcgttcagcccaacaaagctgttgtcggcgccaatgcctttgctcacgagtcgggcattcatcaacacggcgtcctgatggaaaagtccacttatgaaattatgaccccggaatcggttgggctccgggccaatgttctggttctcggcaagcattctggtcgtcacgcttttaaaaagcgccttaccgaactgggctatgagttgagcgacgaggatctgaataaagccttcgagcggttcaaggctcttgcggatatgaagaaggaggttttcgacgaagatctggacgccatcgtggcggacgaagttatgcgcccctccgagaagtatcggttggcacatatcacggtgacctgcggatcgtttgcggtggcaacagcaacagtgcagatggagatcgacggggtcgccgtgcgtactgcagagctgggggatggtcctgtcgatgccacactcaaggccatcaaaaagctcaccaagaccaaggcccgactccagcagtacaatgtaggctccattaccggtggtaccgatgctcagggcgaagtgacagtgcgcctcgttgacggtgatgagacggtggtcggccgcggttcatccaccgacatcatcgaggcatcggcaaaagcctatattaacgccctcaaccgtcttcatttcaggaaagaacgggcacccgagagcctgtaa

SEQ ID NO: 13005 - protein, 512 aa, Geobacter sulfurreducens PCA
MAEQKTIKIFDTTLRDGEQSPGNSMNIEEKLRVAKQLQKLNVDVIEAGFPIASEGDFEAVMRVAQTIKGPEIAGLCRANDKDIDRAWEALKYAGEKGRIHTFIATSDIHMKHKLKMSPSQVMDAAVKAVKRAKSYTPNVEFSCEDAVRTNLKFMAEVVEAVIDAGVTTVNIPDTVGYTIPFEYFNIIKYLKENVPNIEKAVISVHCHNDLGLAVANSIAAVQAGAGQVECTINGIGERAGNCSLEEFVMAIRTRHDILPFKTNVATDQIVPASRLLSTITGIGVQPNKAVVGANAFAHESGIHQHGVLMEKSTYEIMTPESVGLRANVLVLGKHSGRHAFKKRLTELGYELSDEDLNKAFERFKALADMKKEVFDEDLDAIVADEVMRPSEKYRLAHITVTCGSFAVATATVQMEIDGVAVRTAELGDGPVDATLKAIKKLTKTKARLQQYNVGSITGGTDAQGEVTVRLVDGDETVVGRGSSTDIIEASAKAYINALNRLHFRKERAPESL

SEQ ID NO: 13006 - DNA, 1161 bp, Methanococcus maripaludis S2
  CDS (1)..(1161): transl_table=11
atggactggaaagctgtatctccgtacaacccaaaattagatttaaaagactgttatttgtatgatacaacattgagagatggtgaacagacccctggagtttgttttgcaggagaccaaaaacttgaaattgctaagaaactggatgaacttaaaattaaacagattgaagcaggttttccaattgtttctgaaaatgaaagaaaagccatcaaatcaattactggagaaggcttaaatgcgcagattttagcattatcaagagttttaaaagaagatattgataaagccatcgaatgtgacgttgacgggataattacatttattgcaacttctccaatgcatttgaaatataaattacataagaatcttgatgaagtagaagaaatgggtatgaaagccgtagaatatgcaaaagatcacggcctttttgtagcattctccgcagaagatgcaacgagaacccctcttgaagacataattagaattcataaaaatgcagaagaacacggcgctgatagggtccatattgcagatactcttggatgtgcaacaccacaggcaatgtatcatatatgttctgaactaagcaaacacctgaaaaaagcacatattggagtacactgccacaatgactttggatttgcagttataaactcaatatacggtttaatcggtggtgcaaaagctgtatctaccacagttaatggtataggtgaaagagcaggaaatgctgcaattgaagaaattgcaatggccttaaaagtactttacgaccacgatatgggattaaatactgaaatactaactgaaatatctaaactcgttgaaaactattcaaaaatcaaaattcctgaaaataaaccgcttgttggagaaatggtattctaccatgaaagcggaatacacgtcgatgccgttttagaaaacccattaacatatgaaccatttttgcccgaaaaaatcggtcagaaaagaaaaattatccttggaaaacattccggttgtagggctgtcgcacacagactacaggaactcggacttgaagcttcaagagacgaattatgggaaattgtaaagaaaactaaagaaactagagaagacggtactgaaataagcgacgaagtgtttaaaaacattgcagaaaaaatcataaaataa

SEQ ID NO: 13007 - protein, 386 aa, Methanococcus maripaludis S2
MDWKAVSPYNPKLDLKDCYLYDTTLRDGEQTPGVCFAGDQKLEIAKKLDELKIKQIEAGFPIVSENERKAIKSITGEGLNAQILALSRVLKEDIDKAIECDVDGIITFIATSPMHLKYKLHKNLDEVEEMGMKAVEYAKDHGLFVAFSAEDATRTPLEDIIRIHKNAEEHGADRVHIADTLGCATPQAMYHICSELSKHLKKAHIGVHCHNDFGFAVINSIYGLIGGAKAVSTTVNGIGERAGNAAIEEIAMALKVLYDHDMGLNTEILTEISKLVENYSKIKIPENKPLVGEMVFYHESGIHVDAVLENPLTYEPFLPEKIGQKRKIILGKHSGCRAVAHRLQELGLEASRDELWEIVKKTKETREDGTEISDEVFKNIAEKIIK

SEQ ID NO: 13008 - DNA, 1545 bp, Methanococcus maripaludis S2
  CDS (1)..(1545): transl_table=11
atggaatcttatttaaacagcaatgaaattatcaaaaactccctaaaatcaatgaaactgccagaaaaagtacgtgtttttgacactacgctaagggatggagaacagactccaggagtctccctaatgcctgatcaaaaaatggatattgcaaaaaatctaagtgaaatcggtgttgatgcaatagaagcaggctttccagtttcttctgaaggagaacaggaatctattaaaaatataacgtccctagggctggatgcagaaatctgcggacttgcaagggctgttaaaaaagatatagatgttgcaattgactgtggagttgacagtatccacacatttattgctacgtccccgctacatcgggaatacaaattaaaaatgagtaaagaaaagattatcgacattgcagttgaatctatagaatatataaaagaacatggcgtaattgtagaattttccgcagaagacgctacaagaactgaacttgattatttaaaagaagtttacaaaaaagcagttgaagctggagctgaccggataaatgttccggataccgttggtgttatggttccaaattcgatgtcctatttaataaaagaattaaaaaacgatataaaagttccaatatccgtgcactgccacaatgactttggaattgctgtatcaaactctgttgcagcagttgaagctggagccgaacaggtacactgtactgtaaacggccttggtgaaagagcgggaaacgcatcactagaagaaaccgtgatgactttaaacatggtttatggaattaataccaatgtaaatacaaaaatgttaacaaaactttcaaaactggtttcacactacactggaattaaaacacagcctaataaagcaattgttggtgaaaattcatttgcacacgaaagtggaattcacgcacacggtgttttagcaaatgccctaacatacgaaccaattgatccagaaatagttggaaacagacgtagaattgttcttggaaaacacagcggtgctcacgcaataaaatcaaaactctcagaaatcggtgttgaagttggagaaatcgtttcagaagagcagttctgtgaaatagttgaaagagtaaaagcaattggcgataagggaaaaatcgtgacagatgcggatgtaatggcaattgcagaagatattactaaaagaacattgaaatctgaaagaatagtggatttagaacagtttgcagtaattactggaaatcatgtacttccaactgcaagcgttgcgttgaaagtaaaagataaaatttataaaacgtctgaacttggagtagggcctgttgatgctgcactaaaagcaattcaagccgcagttggtgaaaatatccgattaaacgaatacaacatcagtgcaatttctggaggaactgacgccattgcagaagttacagttagacttgaaaatcaagaaaaagaagttatagcaaaagctactggcgatgacgttgttaaagcatccgtagaagcagttatcgatggaataaacaaattaatgggttaa

SEQ ID NO: 13009 - protein, 514 aa, Methanococcus maripaludis S2
MESYLNSNEIIKNSLKSMKLPEKVRVFDTTLRDGEQTPGVSLMPDQKMDIAKNLSEIGVDAIEAGFPVSSEGEQESIKNITSLGLDAEICGLARAVKKDIDVAIDCGVDSIHTFIATSPLHREYKLKMSKEKIIDIAVESIEYIKEHGVIVEFSAEDATRTELDYLKEVYKKAVEAGADRINVPDTVGVMVPNSMSYLIKELKNDIKVPISVHCHNDFGIAVSNSVAAVEAGAEQVHCTVNGLGERAGNASLEETVMTLNMVYGINTNVNTKMLTKLSKLVSHYTGIKTQPNKAIVGENSFAHESGIHAHGVLANALTYEPIDPEIVGNRRRIVLGKHSGAHAIKSKLSEIGVEVGEIVSEEQFCEIVERVKAIGDKGKIVTDADVMAIAEDITKRTLKSERIVDLEQFAVITGNHVLPTASVALKVKDKIYKTSELGVGPVDAALKAIQAAVGENIRLNEYNISAISGGTDAIAEVTVRLENQEKEVIAKATGDDVVKASVEAVIDGINKLMG

SEQ ID NO: 13010 - DNA, 1458 bp, Magnaporthe grisea 70-15
  CDS (1)..(1458)
atgtgcccatcctgcgagcctgagcaagccgctgcctccaatggcaatgcgaacggcaatggcgcctccaatggcaatggaaaccacgacggaatgactggtattgagactcgccaagcacaaaacgcacgctaccagccatcacggaatccctaccagcccgtcggtgactttttgtccaacgtgaacaacttcaagatcattgagagcaccctgcgagagggcgagcagttcgccaatgccttcttcgacacggccaagaagattgagatcgccaaggcgctggacgactttggcgtcgactacatcgagctcaccagcccggctgcctcggagcagtccaggcttgactgcgctgccatctgcaagctgggactcaaggccaagatcctcacccacatcaggtgccacatggacgacgcgcgcatcgccgtcgagaccggtgttgacggcgtcgacattgtcatcggcacctcttcgttcctcatggagcactcgcacggcaaggacatgacctacatcaccaacacggccattgaggtcatcaactttgtcaagagcaagggcatcgaggtccgcttctcatccgaggactcgttccgcagcaacctggttgacctgctgagcatctactcgaccgtcgacaagattggtgtcaaccgtgtcggtattgctgataccgtcggttgcgcctcgccccgccaggtctacgacctggtcaagaccctgcgtggtgttgtctcttgtgacattgagacacacttccacaacgacactggctgtgccatctcaaatgctttttgcgctttggaggccggtgctacccacatcgacacgtgtgtcctgggtatcggcgagcgtaacggaattacccctcttggaggtctgatggctcgcatgattgtcggctccaaggactacgttctgagcaagtacaagctgcacaagctcaaggacattgaggagcttgttgccgacgccgttcaggtcaacattcctttcaataactacatcactggtttctgtgctttcacccacaaggccggtatccatgccaaggctattctcaagaacccctcaacatatgagattattgacccgactctgttcggcatcactcgctatgtccacttcgccagcagattgacgggatggaacgcaatcaagagcagagcatcgcagctcaacattgagatgacggatgagcagtgcaaggagtgcactgccaagatcaagctgttggctgacattaggccgatcgctatcgacgacgccgactccatcattcacgcattccaccgcagcatcaactcgggccagcctattcagtctctcggaagcctgctccccaacatgacggaggaggagaaggccgccctggcagatgtagagcgccgtgagtcgaacgatgccgagcaaccggcggccaagagggccaaggtcgaggctgttgcatga

SEQ ID NO: 13011 - protein, 485 aa, Magnaporthe grisea 70-15
MCPSCEPEQAAASNGNANGNGASNGNGNHDGMTGIETRQAQNARYQPSRNPYQPVGDFLSNVNNFKIIESTLREGEQFANAFFDTAKKIEIAKALDDFGVDYIELTSPAASEQSRLDCAAICKLGLKAKILTHIRCHMDDARIAVETGVDGVDIVIGTSSFLMEHSHGKDMTYITNTAIEVINFVKSKGIEVRFSSEDSFRSNLVDLLSIYSTVDKIGVNRVGIADTVGCASPRQVYDLVKTLRGVVSCDIETHFHNDTGCAISNAFCALEAGATHIDTCVLGIGERNGITPLGGLMARMIVGSKDYVLSKYKLHKLKDIEELVADAVQVNIPFNNYITGFCAFTHKAGIHAKAILKNPSTYEIIDPTLFGITRYVHFASRLTGWNAIKSRASQLNIEMTDEQCKECTAKIKLLADIRPIAIDDADSIIHAFHRSINSGQPIQSLGSLLPNMTEEEKAALADVERRESNDAEQPAAKRAKVEAVA

SEQ ID NO: 13012 - DNA, 1785 bp, Gibberella zeae PH-1
  CDS (1)..(1785)
atgaaaattgcaaagtcccagcgacaagacaaagcaaacaagcacacgacaccagatgcaaatgcagctactgcagctacacaaacagaagctctgtcaaatacggattgggaatacggaacattgcagtccaaccccgcaaagaacaagggcccccctaattggtggttcatatgtgtcttgcagcagcagcagcagcagcagcagcagcagcatactgtcataaattctctttctgccgcactctctaatcggactaatcccggccacagggtcagggtcggtcagggtctttgtaccgtgctagcaaagtttgccctcagcttggcgtatgatttgatagtgccaatgctcaagtgcgtcactctttatggaaactttttcatctctcctccgccattcggagctcagccattagcccaaatccacgtccccaagtcattgcccgcctcttctgctcgtgcttcggaatctccttcttcttccagataccccagatttcctttcctttcccatcatatcataacatcaaaactgcccatcatgtccaacgtcgaggtcacagagaacggggctgctcccaccatccacaagcctcaccacaatgctgctctgccttaccagtccgtcggcgactttctctcaaacaccaacaacttcaagatcattgagagcaccttgagagagggcgagcagtttgccaatgcctactttgacacagagaccaagatcaagattgccaaggctctctctgactttggtgtcgagtacattgagctcaccagccctctcgcctctccccagtcccgcaaggactgtgaggagatctgcaagctcggcctcaaggccaagatcctcactcacgtgcgatgcacaatggaagatgccaaggtcgctgttgagaccggtgtcgacggtgtcgatgttgttattggtacttctcagtacctgagagagcactctcacggaaaggacatggcttacatcaaggagtctgccattgaggtcatccgatacatcaagagccaaggcaaggaggtccgattctcttctgaggactctttccgaagtgaccttgtcgaccttctcagcctttaccaggctgttgacaaggagggtgttcaccgtgttggtgtcgctgacacagtcggctgcgcttctcctcgccaggtctacgaccttgtccgaactctccgtggtgttgtcggctgcgacatcgagtgccatttccacaacgacactggctgtgccattgccaacgcccacgctgccctcgaggccggagccacccacatcgacacctcagtcctcggaatcggcgagcgcaacggtatcacccctctcggaggtctcttggcccgtatgattgtcaacagccacgactacgtcacctctcgatacaagctccacaagctcaaggagattgaggatctcgtcgccgaggctgtcgagattaatgtccccttcaacaactacatcaccggtttctgtgcctttacccacaaggccggtatccacgccaaggctatcctcaaccagcccagcacatacgagatcatcgaccctgctgatttcggcatgtcccgatatgttcacttcgcttctagattgactggctggaacgccatcaagagtcgtgttgagcagctcggattgaacatgactgatgatcagatcaagcaagttactgccaagatcaaggacctggctgatgtgcgtcctctcgctattgacgatacggattcaattatccgctctttccactttgatcttcagagatcttag

SEQ ID NO: 13013 - protein, 594 aa, Gibberella zeae PH-1
MKIAKSQRQDKANKHTTPDANAATAATQTEALSNTDWEYGTLQSNPAKNKGPPNWWFICVLQQQQQQQQQQHTVINSLSAALSNRTNPGHRVRVGQGLCTVLAKFALSLAYDLIVPMLKCVTLYGNFFISPPPFGAQPLAQIHVPKSLPASSARASESPSSSRYPRFPFLSHHIITSKLPIMSNVEVTENGAAPTIHKPHHNAALPYQSVGDFLSNTNNFKIIESTLREGEQFANAYFDTETKIKIAKALSDFGVEYIELTSPLASPQSRKDCEEICKLGLKAKILTHVRCTMEDAKVAVETGVDGVDVVIGTSQYLREHSHGKDMAYIKESAIEVIRYIKSQGKEVRFSSEDSFRSDLVDLLSLYQAVDKEGVHRVGVADTVGCASPRQVYDLVRTLRGVVGCDIECHFHNDTGCAIANAHAALEAGATHIDTSVLGIGERNGITPLGGLLARMIVNSHDYVTSRYKLHKLKEIEDLVAEAVEINVPFNNYITGFCAFTHKAGIHAKAILNQPSTYEIIDPADFGMSRYVHFASRLTGWNAIKSRVEQLGLNMTDDQIKQVTAKIKDLADVRPLAIDDTDSIIRSFHFDLQRS

SEQ ID NO: 13014 - DNA, 1296 bp, Candida glabrata CBS 138
  CDS (1)..(1296)
atgaccgcaaataataatccatacgcgccaagtccaactgattacttgtccaacgttaacagctttcaattaattgactcgacgctgagagaaggtgagcaatttgctaatgcgttttttgataccgaaaagaagatagagattgcaaaggctctggatgactttggtgtcgactatattgagctgacatccccagttgcttctgaacagtcttacaaagattgtaaggcaatctgtaatctagggttgaaggcaaaaattctgacccacattcgttgccacatggacgatgccaaagtggccgttgagactggtgttgatggtgttgatgttgtcatcggtacatccaagtttttaaggcaatactctcatggtaaggacatgaactatattgccaagagtgccattgaggttatcgaatttgttaaatccaaaggcattgagatcagattttcttctgaagatagtttcagaagtgacctggtcgatctgctgaatatttacaagactgtcgacaagatcggtgtcaacagagtcggtattgccgacactgttggttgcgccaaccctagacaagtttacgaattggtaaggactttgaaatctgtggtttcctgtgatattgagtgccatttccataatgatacagggtgtgccattgcaaatgcatacaccgcattggaaggtggtgctaagttgatagatgtcagtgttctgggtattggtgaaagaaatggtattaccccgctaggtggtctgatggccagaatgattgtagccgcaccagactatgtcaaatccaagtacaaattgcataagatcagagatatcgaaaaccttgttgcagaggcagttgaggttaatatccctttcaataacccaattactggtttctgtgctttcacacacaaagctggtattcacgctaaagccattctagcgaacccatccacatatgaaatcctggacccacatgatttcggtatgaagagatatatacattttgctaacaggcttacaggttggaacgccatcaaggcgagagttgatcaattgaacttgaatttgaccgatgatcaaatcaaggaagttaccgccaagatcaagaaactaggtgatgtcagacctctaaatattgatgatgtggattctataatcaaggacttccatgcagaaattactacaccacaactacgcagtattaatggccaagctaggaccagtgctattgacctacaaagcttggacacagtagaagaaaatgagccagctcaaaagaaagcaagagttgattaa

SEQ ID NO: 13015 - protein, 431 aa, Candida glabrata CBS 138
MTANNNPYAPSPTDYLSNVNSFQLIDSTLREGEQFANAFFDTEKKIEIAKALDDFGVDYIELTSPVASEQSYKDCKAICNLGLKAKILTHIRCHMDDAKVAVETGVDGVDVVIGTSKFLRQYSHGKDMNYIAKSAIEVIEFVKSKGIEIRFSSEDSFRSDLVDLLNIYKTVDKIGVNRVGIADTVGCANPRQVYELVRTLKSVVSCDIECHFHNDTGCAIANAYTALEGGAKLIDVSVLGIGERNGITPLGGLMARMIVAAPDYVKSKYKLHKIRDIENLVAEAVEVNIPFNNPITGFCAFTHKAGIHAKAILANPSTYEILDPHDFGMKRYIHFANRLTGWNAIKARVDQLNLNLTDDQIKEVTAKIKKLGDVRPLNIDDVDSIIKDFHAEITTPQLRSINGQARTSAIDLQSLDTVEENEPAQKKARVD

SEQ ID NO: 13016 - DNA, 1314 bp, Candida glabrata CBS 138
  CDS (1)..(1314)
atggatcaataccaacaagtaactgaatcaactccaactgtggagacaagtaatccatatggaccaaacccagctgacttcttgtccaatgtcaaggaatttcaactgattgactctaccttgagagaaggtgagcaatttgccaatgctttcttcgacactgagaagaagattgaaattgccaaggccttggatgacttcggtgtcgactacattgaattgacctctccagtggcctctgagcagtctttcagagattgtaaggctatttgcaacctgggattaaaggcaaagattcttacccacattcgttgtcacatggacgatgccaaggtggccgttgagactggtgtcgatggtgttgatgttgtcattggtacttccaagttcttgagacagtactcccacggtaaggacatgaattatattgccaagagtgccattgaggtcatcgagttcgttaagtcaaagggtattgagatcagattttcctccgaagatagtttcagaagtgacctggttgatctactgaatatttataagactgtcgacaagatcggtgtcaacagagttggtattgctgatactgttggctgtgctaacccaagacaagtttacgagttggtcagaactttgaagtctgtggtctcctgtgacattgagtgtcatttccataacgatactggttgtgccatcgctaatgcttacacggctctagaaggtggtgccaagctaatagatgtcagtgttctaggtattggtgaaagaaacggtatcacaccattgggtggtctaatggctagaatgattgtcgccgctccagaatatgtcaagtccaagtacaagctgcacaagatcagagacattgagaatttggtcgccgaagctgttgaagtcaacattccattcaacaacccaatcactggtttctgtgccttcacacacaaggctggtatccacgccaaggccattcttgccaacccatccacatacgaaatccttgacccacatgatttcggtatgaagagatatatacattttgctaacaggctaacaggctggaacgccattaagtcgagagttgatcaattgaacttgaacttgacagatgaccaagtcaaggaagttaccactaagattaagaagctgggtgatatcagacctctgaatatcgacgatgttgactccattatcaaggacttccacgctgatctagcgacaccaatggtcagaccaaccgaagacggtgctgacaacgaagagccactacaacttgatgaaccagctaagaagaaatctaagctatcccaataa

SEQ ID NO: 13017 - protein, 437 aa, Candida glabrata CBS 138
MDQYQQVTESTPTVETSNPYGPNPADFLSNVKEFQLIDSTLREGEQFANAFFDTEKKIEIAKALDDFGVDYIELTSPVASEQSFRDCKAICNLGLKAKILTHIRCHMDDAKVAVETGVDGVDVVIGTSKFLRQYSHGKDMNYIAKSAIEVIEFVKSKGIEIRFSSEDSFRSDLVDLLNIYKTVDKIGVNRVGIADTVGCANPRQVYELVRTLKSVVSCDIECHFHNDTGCAIANAYTALEGGAKLIDVSVLGIGERNGITPLGGLMARMIVAAPEYVKSKYKLHKIRDIENLVAEAVEVNIPFNNPITGFCAFTHKAGIHAKAILANPSTYEILDPHDFGMKRYIHFANRLTGWNAIKSRVDQLNLNLTDDQVKEVTTKIKKLGDIRPLNIDDVDSIIKDFHADLATPMVRPTEDGADNEEPLQLDEPAKKKSKLSQ

SEQ ID NO: 13018 - DNA, 1182 bp, Kluyveromyces lactis NRRL Y-1140
  CDS (1)..(1182)
atgtccgtaaattcgaatccatatgccccatctccaaatgatttattatcaaatgtttgcaacttccagctaatcgaatcaaccctaagagaaggtgagcaatttgcaagtgcatttttctctactgagaagaaaatcgaaatcgccaaggctttagatgatttcggtgtcgattatatcgaacttacctctccggtggcctctgaacaatctagaagcgattgtgaagcaatctgtaagctgggcttgaaggctaagattttgacgcatattcgttgtcatatggatgatgctagagtcgctgttgaaactggtgttgacggtgtcgatgtcgtcatcggtacttccaaatttttgagagaatattctcatggtaaagatatgaactacatagcgaaatcagctatcgaagttatcgaattcgttaaatccaagggtctagagatcagattttcctctgaagattctttcagatcagatattgttgatcttttgaacatttacaagactgtggataagatcggtgtcaacagagtcggtattgctgacaccgttggttgcgcaaacccaagacaagtatatgagctagtcagaacattgaagagtgtagtttcttgtgatatcgaatgtcatttccatgatgatactggttgtgctatcggtaactcatattctgcgttagaagccggcgccagattaatcgatgtctccgtgttgggtattggtgaaagaaacggtatcacctctcttggtggtctaatggcaagaatgattgtatctgccccagaatacgtcaagtccaaatataagctacacaagctacgtgatttggaaaatctagtcgcagatgctgtcagtgttaatgtgccatttaacaaccctatcactggattctgtgcattcacacataaggctggtattcatgccaaggccatcttggctaacccatctacgtacgaaattctaaatccagaagatttcggtatgaagagatatattcactttgccaacagattaactggttggaacgcaatcaagtctcgtgtcgaacaactaaatttgcatttatccgatgaccaaattaaggaagtaacatctaagattaaacagataggtgatgtcaggcaactaagtatcgaagatgtcgatactatcatcaaggactaccattctgaactataa

SEQ ID NO: 13019 - protein, 393 aa, Kluyveromyces lactis NRRL Y-1140
MSVNSNPYAPSPNDLLSNVCNFQLIESTLREGEQFASAFFSTEKKIEIAKALDDFGVDYIELTSPVASEQSRSDCEAICKLGLKAKILTHIRCHMDDARVAVETGVDGVDVVIGTSKFLREYSHGKDMNYIAKSAIEVIEFVKSKGLEIRFSSEDSFRSDIVDLLNIYKTVDKIGVNRVGIADTVGCANPRQVYELVRTLKSVVSCDIECHFHDDTGCAIGNSYSALEAGARLIDVSVLGIGERNGITSLGGLMARMIVSAPEYVKSKYKLHKLRDLENLVADAVSVNVPFNNPITGFCAFTHKAGIHAKAILANPSTYEILNPEDFGMKRYIHFANRLTGWNAIKSRVEQLNLHLSDDQIKEVTSKIKQIGDVRQLSIEDVDTIIKDYHSEL

SEQ ID NO: 13020 - DNA, 1326 bp, Kluyveromyces lactis NRRL Y-1140
  CDS (1)..(1326)
atgagtagcaatcaggatttccaaccagtgactgaatctgcatcaagtgtgacaaaatttcaacaaaatccatacggtccaaacccagctgattatttatcaaatgttaacaactatcagttgatcgattctacattaagagaaggtgaacaatttgccaacgcctttttcgatactgaaaagaagatcgagattgccaaggccctagatgactttggtgttgattatattgaacttacttctcctgtcgcatctgaacaatctagaagagattgtgaagccatttgcaagcttggattgaaggcaaagattttgacccatatccgttgtcacatggacgatgctagagtggcagtagaaactggtgttgatggtgttgatgttgttatcggtacttccaagtttttgagacaatattctcacggtaaggacatgaattacattgccaagtctgctattgaagtcattgaatttgtcaaatccaagggtattgaaatcagattctcttctgaggattctttcagatcggatttggtcgatttgctaaacatttacaagactgtcgataagattggtgttaacagagttggtattgctgataccgtcggatgtgctaatccaagacaagtttacgaattggtcagaacattgaagagtgtggtttcatgtgatatcgaatgccatttccacaacgacaccggttgtgctattgcaaacgcttacacagcattagaaggtggtgcaagacttatcgatgtcgctgtattaggtatcggtgagagaaatggtatcactcctctaggtgggctaatggctagaatgattgttgcagctccagagtacaccaaatctaagtacaaattgcataagatcagagatatcgaaaacttgattgctgaagccgtggaggtaaatatcccattcaacaacccaattacaggattctgtgccttcacacataaagctggtattcatgctaaggccatcttggctaacccatctacatacgaaatcttggaccctcacgatttcggtatgaagagatacatccatttcgctaacaggcttaccggttggaacgctatcaagtcacgtgttgatcaattaaacttgaacttgacagatgatcaagtcaaagaagttaccgctaagattaagaagcttggtgacatcagacccctaaatatcgatgatgtcgactccatcatcaaggacttccatgctgaagtatctacgccgcaattgagagctgtaagaagagatgacaacgacgtcaatgacattgatatccaagagccatccaacaagaaaaccaaggtagagtaa

SEQ ID NO: 13021 - protein, 441 aa, Kluyveromyces lactis NRRL Y-1140
MSSNQDFQPVTESASSVTKFQQNPYGPNPADYLSNVNNYQLIDSTLREGEQFANAFFDTEKKIEIAKALDDFGVDYIELTSPVASEQSRRDCEAICKLGLKAKILTHIRCHMDDARVAVETGVDGVDVVIGTSKFLRQYSHGKDMNYIAKSAIEVIEFVKSKGIEIRFSSEDSFRSDLVDLLNIYKTVDKIGVNRVGIADTVGCANPRQVYELVRTLKSVVSCDIECHFHNDTGCAIANAYTALEGGARLIDVAVLGIGERNGITPLGGLMARMIVAAPEYTKSKYKLHKIRDIENLIAEAVEVNIPFNNPITGFCAFTHKAGIHAKAILANPSTYEILDPHDFGMKRYIHFANRLTGWNAIKSRVDQLNLNLTDDQVKEVTAKIKKLGDIRPLNIDDVDSIIKDFHAEVSTPQLRAVRRDDNDVNDIDIQEPSNKKTKVE

SEQ ID NO: 13022 - DNA, 1320 bp, Debaryomyces hansenii CBS767
  CDS (1)..(1320)
atgtcggctcctgaaggctttaaaaaggtcagtgaagacgcacataaatcaaatcaagaaatcaattctaatccatacgggccaaacccagcagacttcttatccaatgtttcaaactttcaattaatcgaatctacgttaagagaaggtgagcagttcgcaaatgccttcttttcaactgagaaaaagattgagatcgctaaggctttagatgaatttggtgtcgattatattgaattgacatcaccagttgcttctgaacagagtagaaaggactgtgaagccatttgtaaattaggtttaaaggccaagatcttaacacacattagatgtcatatggatgacgcaagagttgcagtcgagactggtgttgatggtgtcgatgttgtcatcggtacatctcaattcttgagacaattttctcacggtaaggatatgaactacattgcggaatctgccgttgaagttattgaattcgttaaatccaagggtatagaaatcaggttctcgtctgaagattcctttagatctgacttggttgatttattgaatatctacaagacagtcgataagattggtgtcaatagagtgggtattgccgacactgtgggttgtgctaatccaagacaagtctacgaattagttagaactttaagatctgttgttcattgtgatattgaatgtcatttccataacgatactggttgtgccattgccaatgcctacactgctttggaaggtggtgctagactcatagatgtatcagttcttggtatcggtgaaagaaacggtattactcctttgggtggcttgatggccagaatggttgctgctgacagagattatgttttatccaaatataaattgcataaattaagagacttggaaaacttggttgctgaagcggttcaggttaatattccattcaataatcctattactggattctgtgcattcacccataaagctggtattcatgctaaagctattttggctaatccttcgacatacgaaattttaagtcctgcagattttgggttgactagatacattcatttcgccaacagattaactggttggaatgctatcaagtcaagagttgatcaattaaacttacaattatctgatgagcaatgtaaggaagtcaccaacaagattaagaaattgggtgatgttagacagttgaccattgatgacgtcgattccattatcaaagatttccatgctgatgttgctactcctcatgtgagaccaacggaacctgttccccatgtgattgaaggcttggaagaatcggatgttaagagatctaaaaattaa

SEQ ID NO: 13023 - protein, 439 aa, Debaryomyces hansenii CBS767
MSAPEGFKKVSEDAHKSNQEINSNPYGPNPADFLSNVSNFQLIESTLREGEQFANAFFSTEKKIEIAKALDEFGVDYIELTSPVASEQSRKDCEAICKLGLKAKILTHIRCHMDDARVAVETGVDGVDVVIGTSQFLRQFSHGKDMNYIAESAVEVIEFVKSKGIEIRFSSEDSFRSDLVDLLNIYKTVDKIGVNRVGIADTVGCANPRQVYELVRTLRSVVHCDIECHFHNDTGCAIANAYTALEGGARLIDVSVLGIGERNGITPLGGLMARMVAADRDYVLSKYKLHKLRDLENLVAEAVQVNIPFNNPITGFCAFTHKAGIHAKAILANPSTYEILSPADFGLTRYIHFANRLTGWNAIKSRVDQLNLQLSDEQCKEVTNKIKKLGDVRQLTIDDVDSIIKDFHADVATPHVRPTEPVPHVIEGLEESDVKRSKN

SEQ ID NO: 13024 - DNA, 1263 bp, Debaryomyces hansenii CBS767
  CDS (1)..(1263)
atgtccattcaatcgaatccatatggtccaaatccatccgacttcttatcgaatgttaacaaattcgaagttatcgaatctactttaagagaaggtgaacaattcgccaacgctttcttcagtaccgagaagaaaatcgaaattgctaaagcattagatgacttcggtgttgactatattgaattgacttccccagttgcttctgaacaaagtagaagtgattgtgaagccatttgtaaattaggtttaaaagccaagattttgacccatattagatgtcatatggacgatgctagagttgccgttgaaactggtgttgacggtgttgatgttgttattggtacttcccaattcttaagacaatactcacatggtaaagacatgaactacattgctcaatctgctattgaagtgattgagttcgtcaaatctaaaggtattgaaattagattttcatccgaagattccttcagatctgatatcgttgatttgttgaacatctatagaactgttgataaaatcggtgttaatagagtcggtattgctgatactgttggttgtgccaacccaagacaagtttacgaattagttaagaccttgaaatccgttgtttcatgtgatattgaatgtcatttccacaacgatactggttgtgctattgctaacgcttacaccgctttagaagctggtgctaagttgattgatgtttctgtcttaggtattggtgaaagaaatggtattactccattaggtgctttaatggcaagaatgatcactgccgacagagactacgttttatccaagtataagttacacaaattaagagacttagagaatttggttgctgatgccgttcaagtcaacgttcctttcaacaacccaatcactggtttctgtgccttcactcacaaggccggtatccatgctaaggccattttagccaacccatctacatatgaaattttaaacccttcagatttcggtttgactagatatattcatttcgctaacagattaactggttggaatgcaatcaaatcaagagtcgatcaattgaacttgcacttaactgacgaccaatgtaaagaagtcactactaagattaagataatgggtgatgttagacaattaaatattgatgacgttgattctatcatcaaagatttccatgctgatttgtctactccgttattaaagccacaagctgaaggtgacaaagacgttaccgaggaaccagtttctaagaagcaaaagtcaggttaa

SEQ ID NO: 13025 - protein, 420 aa, Debaryomyces hansenii CBS767
MSIQSNPYGPNPSDFLSNVNKFEVIESTLREGEQFANAFFSTEKKIEIAKALDDFGVDYIELTSPVASEQSRSDCEAICKLGLKAKILTHIRCHMDDARVAVETGVDGVDVVIGTSQFLRQYSHGKDMNYIAQSAIEVIEFVKSKGIEIRFSSEDSFRSDIVDLLNIYRTVDKIGVNRVGIADTVGCANPRQVYELVKTLKSVVSCDIECHFHNDTGCAIANAYTALEAGAKLIDVSVLGIGERNGITPLGALMARMITADRDYVLSKYKLHKLRDLENLVADAVQVNVPFNNPITGFCAFTHKAGIHAKAILANPSTYEILNPSDFGLTRYIHFANRLTGWNAIKSRVDQLNLHLTDDQCKEVTTKIKIMGDVRQLNIDDVDSIIKDFHADLSTPLLKPQAEGDKDVTEEPVSKKQKSG

SEQ ID NO: 13026 - DNA, 1338 bp, Aspergillus nidulans FGSC A4
  CDS (1)..(1338)
atgtgccctggagaccaccccggtttcaccgcggttcagacccgccagaaccctcatccttcccgtaacccctacggtcacaatgtcggcgtgactgattttttgagcaatgtctcccgcttcaagatcatcgagagtactcttcgtgagggcgaacagttcgccaacgctttctttgatacccagaagaagattgaaattgccaaggcattggatgagtttggagtcgactacattgaacttactagcccttgtgcttctgaacagtcaaggcttgactgcgaagccatctgcaaacttggcttgaaggccaagatcctcactcatattcgatgccacatggatgacgctcgggtcgctgtcgagactggtgttgacggagtcgacgtcgtcattggaacttcctcgtatctccgcgagcactctcacggcaaggacatgacctacattaagaacaccgccatcgaagttattgaattcgtcaaatccaagggcatcgaaatccgattctccagcgaggactctttccgctccgacctcgtcgacctgctttccatctactcagccgtcgaccaagttggtgtgaaccgcgttggtattgcagacactgttggctgcgcttctcctcgccaggtgtacgagctcatccgtgttctgaggggagttgtgagctgtgacattgaaactcacttccacaacgacactggttgcgccattgccaatgcttactgtgctctcgaggctggtgctactcacattgatacctctgtccttggtattggtgagcgcaatggtattactcctcttggtggtctcatggctcgcatgatggtcgccgacccccagtacgtcaagagcaagtataagctggagaagcttaaggatattgaggaccttgtcgccgaggctgttgaggtcaacattcccttcaacaactacatcaccggtttctgtgccttcacccacaaggcgggtatccacgccaaggctatcctgaacaaccccagcacctacgagatcatcaaccccgctgatttcggcatgtcaagatatgtgcacttcgcgtctcgtctaacaggctggaacgctatcaagtcgcgtgctcaacagcttaacgtccacatgactgacgatcagtacaaggagtgcacggccaagatcaaggctcttgctgacatccgacctattgctattgatgatgcggatagcatcatccgtgcttattaccgcaaccttagctccggcgagaacaagcccctcatggatctgactgccgatgagcacgctcagttcctcgccaaggaaaaggagcttaccgagagtggcaccgctctttaa

SEQ ID NO: 13027 - protein, 445 aa, Aspergillus nidulans FGSC A4
MCPGDHPGFTAVQTRQNPHPSRNPYGHNVGVTDFLSNVSRFKIIESTLREGEQFANAFFDTQKKIEIAKALDEFGVDYIELTSPCASEQSRLDCEAICKLGLKAKILTHIRCHMDDARVAVETGVDGVDVVIGTSSYLREHSHGKDMTYIKNTAIEVIEFVKSKGIEIRFSSEDSFRSDLVDLLSIYSAVDQVGVNRVGIADTVGCASPRQVYELIRVLRGVVSCDIETHFHNDTGCAIANAYCALEAGATHIDTSVLGIGERNGITPLGGLMARMMVADPQYVKSKYKLEKLKDIEDLVAEAVEVNIPFNNYITGFCAFTHKAGIHAKAILNNPSTYEIINPADFGMSRYVHFASRLTGWNAIKSRAQQLNVHMTDDQYKECTAKIKALADIRPIAIDDADSIIRAYYRNLSSGENKPLMDLTADEHAQFLAKEKELTESGTAL

SEQ ID NO: 13028 - DNA, 1254 bp, Candida albicans SC5314
  CDS (1)..(1254): transl_table=12
atgtctgttgcttctaatccatatggtccaaatccatctgatttcttatctaatgtgaataaatttgaagtcattgaatcaactttaagagaaggtgaacaatttgccaatgcctttttcaccactgaaaaaaaaattgaaattgctaaagctttagatgattttggagttgattatattgaattgacttcaccagtagcatctgaacaatcaagaagagattgtgaagccatttgtaaattaggtttaaaagctaaaatattgactcatattagatgtcatatggatgatgcccgtgttgccgttgaaactggggttgatggggttgatgtggttattggaacttcacaatttttaagacaatattctcatggtaaagatatgaattatattgctcaaagtgctattgaagtcattgaatttgttaaatctaaaggtattgaaattcgttttagttctgaagattcttttagatcagatattgttgatttattaaacatttatcgtactgttgataaaatcggagtgaatagagttggtattgccgatactgttggttgtgctaatccaagacaagtttatgaattggtcaaaactttgaaatcagtggtttcttgtgatattgaatgtcatttccataacgatactggttgtgccattgctaatgcttatactgccttggaagccggtgctaaattaattgatgtttctgtgttgggtattggtgaaaggaatggtattactccattgggggcattaatggcaagaatgattactgctgatcgtgattatgtgttatctaaatataaattacacaaattgagagatttagaaaatttggttgctgatgccgtacaaattaatattccattcaataatccaattactggattctgtgcttttactcataaagctggtattcatgctaaagccatcttggccaatccatcaacatatgaaattttaaatccaaatgatttcggtttaaccagatatattcactttgctaatagattgactggttggaatgccattaaatcaagagttgatcaattgaatttacatttgactgatgatcaagttaaagaagttacgaataaaattaaaaaattgggtgatgttagacaattgaacattgatgatgtcgattcaattattaaagatttccatgctgaacaaagcactactaatactcctcttttaaaaccagtagaggatgatgaaggtccagaaattaaaaaacaaaaagtatag

SEQ ID NO: 13029 - protein, 417 aa, Candida albicans SC5314
MSVASNPYGPNPSDFLSNVNKFEVIESTLREGEQFANAFFTTEKKIEIAKALDDFGVDYIELTSPVASEQSRRDCEAICKLGLKAKILTHIRCHMDDARVAVETGVDGVDVVIGTSQFLRQYSHGKDMNYIAQSAIEVIEFVKSKGIEIRFSSEDSFRSDIVDLLNIYRTVDKIGVNRVGIADTVGCANPRQVYELVKTLKSVVSCDIECHFHNDTGCAIANAYTALEAGAKLIDVSVLGIGERNGITPLGALMARMITADRDYVLSKYKLHKLRDLENLVADAVQINIPFNNPITGFCAFTHKAGIHAKAILANPSTYEILNPNDFGLTRYIHFANRLTGWNAIKSRVDQLNLHLTDDQVKEVTNKIKKLGDVRQLNIDDVDSIIKDFHAEQSTTNTPLLKPVEDDEGPEIKKQKV

SEQ ID NO: 13030 - DNA, 1287 bp, Candida albicans SC5314
  CDS (1)..(1287): transl_table=12
atggttgacggatataaagaagtatcagaatcatttgatcgttccaaaatccaacataacccttatggtcctaatccaggtgattttctttcgaatgttggcaattttcaattgattgaatcaactttgagagaaggtgaacagtttgccaatgcatttttcagcaccgaaaccaaaattgaaattgctaaagccttagatgattttggggttgattatattgaattgacttcaccagtggcatctgaacaatcaagaaaagattgtgaagccatttgtaaattaggtttaaaagccaaaatattgactcacattagatgtcatatggatgatgccagagttgctgttgaaactggggtcgatggagttgatgtggttattggaacttcccaatttttaagacaatactctcatggtaaggatatgaattatattgcacaaagtgctattgaagtcattgaatttgtcaaatctaaaggtattgaaatccgtttcagttctgaagattcttttagatcagatttggttgatttattaaacatttaccgtactgttgataaaattggggttaacagagttggtattgctgatactgttggttgtgctaatccaagacaagtttatgaattggtgagaacattgaaatcagtagtcaagtgtgacattgaatgtcatttccataatgatactggctgtgccattgccaatgcatacacagctttggaaggtggggccagattgattgatgtttccgtattgggtattggtgaaagaaatggtattactccattgggtgggttaatggcgagaatgattgctgctgatcgtgaatatgttttgtcaaaatataaagttcataaattgagagatattgaaaatttggttgctgaggcggttcaagttaacattccattcaataatccgatcactgggttctgtgctttcactcataaagctggtatccatgctaaagctatcttggccaatccatctacttatgaaattttgagtccaagtgatttcggtttaaccagatatattcactttgctaatagattgactggttggaatgccatcaaatcaagagttgatcagttgaacttgcatttaactgatgaacagtgtaaagaagtcactaacaagattaagaaattgggtgatgtcagacaattgaatatcgatgatgtggattcaatcatcaaagatttccatgctgatatgtcaacaccacttttgaaatcaaatggagcggaagaagaaccagatgtaaaaaaacaaaaagtttaa

SEQ ID NO: 13031 - protein, 428 aa, Candida albicans SC5314
MVDGYKEVSESFDRSKIQHNPYGPNPGDFLSNVGNFQLIESTLREGEQFANAFFSTETKIEIAKALDDFGVDYIELTSPVASEQSRKDCEAICKLGLKAKILTHIRCHMDDARVAVETGVDGVDVVIGTSQFLRQYSHGKDMNYIAQSAIEVIEFVKSKGIEIRFSSEDSFRSDLVDLLNIYRTVDKIGVNRVGIADTVGCANPRQVYELVRTLKSVVKCDIECHFHNDTGCAIANAYTALEGGARLIDVSVLGIGERNGITPLGGLMARMIAADREYVLSKYKVHKLRDIENLVAEAVQVNIPFNNPITGFCAFTHKAGIHAKAILANPSTYEILSPSDFGLTRYIHFANRLTGWNAIKSRVDQLNLHLTDEQCKEVTNKIKKLGDVRQLNIDDVDSIIKDFHADMSTPLLKSNGAEEEPDVKKQKV

SEQ ID NO: 13032 - DNA, 1344 bp, Ustilago maydis 521
  CDS (1)..(1344)
atgtgcgatcactctgagcctactcctatccagcacgtcaacggcactgcgcccgacacccatgtcgccatcgacacctcggctcccaacacgaacggcagcgtcgccaacggcggcgtcgtcgccagagacaatggtaatgcgggctcagtgcagcctttcaactcgcgctactcggactttttgagcaacgtctccaacttcaagatcatcgaatccacgctgcgtgagggcgagcagtttgcaaatgccttctttgacacagagaccaagatcaagatcgccaaggcactcgacaagtttggtgttgactgcatcgagctcacctcgcccgccgcttccgagcagtcgcgcaaggactgcgaggccatctgcaagctcggtctcaaggccaaggttatcactcacatccgatgtcacatggacgatgccaggatcgccgtcgagacgggtgtcgacggtgttgacgtcgtcatgggcacctccaagtttctccgcgagttttcgcacggcaaagacatgacctacattaccaagaccgccatcgaggtcattcagtttgtcaagagcaagggcatcgagattcgcttctccaccgaagactcgttccgttccgatctcgtcgacctgctcagcatctaccaggccgtcgacaaggtgggcgtcaaccgtgttggtatcgccgacaccgttggtgttgccaacccaagacaggtgtacgacctcgtgcgcacactgcgtggcgtcgtcggctgcgacatcgagtgccacttccacaacgacacgggttgcgccatcgccaacgcctacaccgcactcgaggccggcgccacccacgtcgatacctcggtactcggcattggcgagcgaaatggcatcccttcgctcggcggctttatcgcgcgcatgtacaccgccgatcgcgagtacgtgatgagcaagtacaacctcaaggcgttgcgcgaggtcgagaacctcgtcgccgaagccgtccaaatccaggtgccattcaacaactacgtcaccggctactgcgcctttacgcacaaggcgggcatccacgccaaggcgattctggccaacccttcgacatacgagatcatccgtcccgaagactttggtatgagccgatacgtctcgatcggccaccgtctcaccggctggaacgcggtcaagtcaaggtgcgagcagctcgaacttagcctcaccgaggagcaggtcaagcaggtcaccgccaagatcaagcagttggccgacgtgcgcgaacagactatggaggacgtcgattcgatcttgaggaattacgcgcgcgccatcgagaacggttcctcagtcgccgcctga

SEQ ID NO: 13033 - protein, 447 aa, Ustilago maydis 521
MCDHSEPTPIQHVNGTAPDTHVAIDTSAPNTNGSVANGGVVARDNGNAGSVQPFNSRYSDFLSNVSNFKIIESTLREGEQFANAFFDTETKIKIAKALDKFGVDCIELTSPAASEQSRKDCEAICKLGLKAKVITHIRCHMDDARIAVETGVDGVDVVMGTSKFLREFSHGKDMTYITKTAIEVIQFVKSKGIEIRFSTEDSFRSDLVDLLSIYQAVDKVGVNRVGIADTVGVANPRQVYDLVRTLRGVVGCDIECHFHNDTGCAIANAYTALEAGATHVDTSVLGIGERNGIPSLGGFIARMYTADREYVMSKYNLKALREVENLVAEAVQIQVPFNNYVTGYCAFTHKAGIHAKAILANPSTYEIIRPEDFGMSRYVSIGHRLTGWNAVKSRCEQLELSLTEEQVKQVTAKIKQLADVREQTMEDVDSILRNYARAIENGSSVAA

SEQ ID NO: 13034 - DNA, 1476 bp, Cryptococcus neoformans var. neoformans B-3501A
  CDS (1)..(1476)
atgtgccctcctgcagacgagcccatcaacgccggcgctgaccaggacatggtcgccatcgaaaccaacaccccccacatctccacgtcctccgccaaccaagtgaacggcaccaccggtaccgctgaggcgcagccccctgctgtcaagacccacaagggcttgtatggtcgtgcttccgacttcttgagcaacacttccaactggaagatcattgagtccacattgcgagaaggagagcagtttgctaatgctttcttcaccctcgagaccaagatcaagattgccaagatgcttgacgagtttggtgtcgagtacattgagcttacttcccctgctgcctctcccgagtcccgtgcccactgtgaggccatctgcaaccttggtttgaagaggaccaagattttaacccacattcgatgccacatggacgatgctcgattggctgttgagactggtgtcgacggcgttgacgttgtcatcggtacttcttctttcttgagggagcactctcacggtaaggacatgacctggattaccaagaccgctatcgaggttattgagttcgtcaagtccaagggtattgagatccgattctcctctgaggactctttccgatccgaactcgtcgatttgctctctatctaccgaaccgtcgacaagattggtgtcaaccgtgttggtgttgccgatactgttggttgtgccgacgctcgacaggtttacgaactggtgaggacattgcgaggtgtggtcagctgtgacattgagactcacttccacaacgacaccggttgtgctatcgccaacgcctatgccgccctcgaagccggtgctacccacgtcgacacatctatcctcggtattggtgagcgaaatggtatcacccctcttggtggtctcattgctcgaatgatggttgccgaccctgagtacgtcaagagcaagtacaacctcactatgcttcgagagctcgaaaacttcgttgccgaagccgttgaggttcaggttcctttcaacaactacatcactggtttctgtgccttcacccacaaggccggtatccacgccaaggccatccttgccaacccctccacctacgagatcctcaaccctgccgacttcgggatgacccgatacgtctctatcggtcaccgattgactggttggaacgccgttaaaagccgggttgagcaactcaacctcaagcttaatgacgaacaggtcaaggatgccactgccaagatcaaggagctcgccgacgttcgaacacagtctatggaggacgttgacatgatcctccgtatttaccacactggtatccagagtggtgacctcaaggtcggccagtccgccgtcctcgaccgattgctcgagaagcacatgccctcaagagataactctcccagcggcaggtcctccaacgctgacggtactcccgccaagcgtcaacgagtcggagagccttccgcctaa

SEQ ID NO: 13035 - protein, 491 aa, Cryptococcus neoformans var. neoformans B-3501A
MCPPADEPINAGADQDMVAIETNTPHISTSSANQVNGTTGTAEAQPPAVKTHKGLYGRASDFLSNTSNWKIIESTLREGEQFANAFFTLETKIKIAKMLDEFGVEYIELTSPAASPESRAHCEAICNLGLKRTKILTHIRCHMDDARLAVETGVDGVDVVIGTSSFLREHSHGKDMTWITKTAIEVIEFVKSKGIEIRFSSEDSFRSELVDLLSIYRTVDKIGVNRVGVADTVGCADARQVYELVRTLRGVVSCDIETHFHNDTGCAIANAYAALEAGATHVDTSILGIGERNGITPLGGLIARMMVADPEYVKSKYNLTMLRELENFVAEAVEVQVPFNNYITGFCAFTHKAGIHAKAILANPSTYEILNPADFGMTRYVSIGHRLTGWNAVKSRVEQLNLKLNDEQVKDATAKIKELADVRTQSMEDVDMILRIYHTGIQSGDLKVGQSAVLDRLLEKHMPSRDNSPSGRSSNADGTPAKRQRVGEPSA

SEQ ID NO: 13036 - DNA, 1623 bp, Prochlorococcus marinus str. MIT 9303
  CDS (1)..(1623): transl_table=11
atggccaaggatccaggccgcgttttgatttttgacaccaccctcagggatggggagcagtcccctggtgcaagtctcaatctcgaggaaaagctggctattgcccagcaactcgctcgtttgggtgtggatgtgattgaagcgggctttccttttgccagccagggtgatttttctgccgtgcaacgtattgcccagcaggttggcggggatgaaggcccaatcatttgtggcttggctagggcttcgcgtgctgatatcaaggcttgtgctgatgccgttgccccagcccctcgacgacgaattcacacattcattgccacgagtgatattcacttggagcacaagctgcgtaaatctcgggcggaggttctggcgatcgttccagagatggtcgcctacgcccgctcactcgttgatgatgttgagttctcctgtgaggatgccgctcgaagcgaccctgagtttctttatgaggtgatcgaggctgcgattgctgcgggggcgggcaccatcaatatccccgacacagttggttttacaactccctcggagttcggggcgttgattgctggtatcgattgccatgttccaaatatgaatgaggccattctttctgttcatggtcacaacgatctcggactggctgtagccaattttttagaagctgtgaaaagtggagcccggcagtttgaatgcacgatcaacggcattggagagcgtgcagggaatgctgcgcttgaggagctggtgatggctttgtatgtgaggcggcgttatttcaatcccttctttgggcgtgaatctgatagccctactcctctaacggccgttcgcacggaggaaatcaccaagacatctcgattggtctcaaatctcaccggcatggtggtgcagcccaataaggcgattgtcggcagcaatgctttcgcccatgagtcaggtattcatcaagatggtgtgcttaaaaatcgtcttacttatgaaattgttgatgcccgtacggttgggctgaccgacaatcggatctcgctgggcaagctaagtggtcgcagtgccgtccgagctcgccttgaggagctcggttacgacttgactcgggaggatcttgacgaagcctttgcacgatttaaggatctggccgatcgcaagcgcgatataaccgatcgagatcttgaggccattgtcagcgaacaggtccagcagcctgaagctcgttttcagttacgactggtgcaagtcagttgcggtagcagtcttaggcctacggctactgtcattcttgcgcaagaggatggacaggagcagactgccgctgcagtgggcaccggtccagtagatgctgtctgtcgtgcattgaatgctctggctggcgaacctaatgagctgatcgagttctcggttaagtcggtaacggaagggattgatgcgatgggtgaagtcacgattcggctacgtcgggatgggcagcttttctcaggtcattccgctgacactgatgtggtggttgctgcagctcaagcatttgtgaatgcgcttaatcggctggtggcaggttgcggtcgccagtctcttcatccccaacatgatgctgtgctagctgatcgacggccaggcatctga

SEQ ID NO: 13037 - protein, 540 aa, Prochlorococcus marinus str. MIT 9303
MAKDPGRVLIFDTTLRDGEQSPGASLNLEEKLAIAQQLARLGVDVIEAGFPFASQGDFSAVQRIAQQVGGDEGPIICGLARASRADIKACADAVAPAPRRRIHTFIATSDIHLEHKLRKSRAEVLAIVPEMVAYARSLVDDVEFSCEDAARSDPEFLYEVIEAAIAAGAGTINIPDTVGFTTPSEFGALIAGIDCHVPNMNEAILSVHGHNDLGLAVANFLEAVKSGARQFECTINGIGERAGNAALEELVMALYVRRRYFNPFFGRESDSPTPLTAVRTEEITKTSRLVSNLTGMVVQPNKAIVGSNAFAHESGIHQDGVLKNRLTYEIVDARTVGLTDNRISLGKLSGRSAVRARLEELGYDLTREDLDEAFARFKDLADRKRDITDRDLEAIVSEQVQQPEARFQLRLVQVSCGSSLRPTATVILAQEDGQEQTAAAVGTGPVDAVCRALNALAGEPNELIEFSVKSVTEGIDAMGEVTIRLRRDGQLFSGHSADTDVVVAAAQAFVNALNRLVAGCGRQSLHPQHDAVLADRRPGI

SEQ ID NO: 13038 - DNA, 1194 bp, Clostridium difficile 630
  CDS (1)..(1194): transl_table=11
atgtgcgttatatcaaaagatagagcaaaggaaataaaaatagtagatactactttaagagatggagagcaaacagctggggttgtatttgcaaatagagaaaaaataatgattgctgaaatgttaagtgacctaggtgttgaccaaattgaagttggtatacctactatgggtggagatgaaaaaaatgtaataaagcacatatgtagtagaaatttaaaatcagatataatggcttggaatagagcagtaataaaagatgttgaagaatctatttcttgtggtgttgatgcagtagctatatcaatatcagtatctgacattcatatagaaaataaattgagaacttctagaggctgggttttagaaaatatggctaaaacagttgaatttgcaaagaaaaatggattatatgtttcagtaaatggagaagatgcttcaagagcagatatagacttcttaactgaatttataaatgttggaaaacaagcaggggcagatagatttagatactgtgatacagtaggagttatgaatcctttttctataaagaatgcaatagaaactctttatgaaagaactaattttgatatagaaatgcatacacataatgactttgggatggcaactgcaaatgcacttgcaggaatagcagcaggagcaaattatgttggtgttacagtaaatggattaggtgaaagagcaggaaatgcagcattagaagaagttttaatggcacttaagtgtgtttataaatgtgatttaaataatatagatactagaaaatttagaggaatatgtgagtatgtagcacaggcatcaggaagaatacttcctacatggaaaccagtagttggggataatatgtttatacatgaatctggtatacatgcagatggagctttaaaagacccacataactatgaaccatttgacccaagtgaagtaaatcttgaaagaaaaatagtaataggtaaacattcaggaagagctgcagttgtaaataagttgagtgaatatgaaatgtatatttctccagaaaacgctaccaagctattaaatgctataagagctacatctataagattaaaaagaagtttaatggataaagaaattcttcaattatattgtgatatactagcacatgagaaaggcacaacagaagaagaagcagttagaggttcatatatttaa

SEQ ID NO: 13039 - protein, 397 aa, Clostridium difficile 630
MCVISKDRAKEIKIVDTTLRDGEQTAGVVFANREKIMIAEMLSDLGVDQIEVGIPTMGGDEKNVIKHICSRNLKSDIMAWNRAVIKDVEESISCGVDAVAISISVSDIHIENKLRTSRGWVLENMAKTVEFAKKNGLYVSVNGEDASRADIDFLTEFINVGKQAGADRFRYCDTVGVMNPFSIKNAIETLYERTNFDIEMHTHNDFGMATANALAGIAAGANYVGVTVNGLGERAGNAALEEVLMALKCVYKCDLNNIDTRKFRGICEYVAQASGRILPTWKPVVGDNMFIHESGIHADGALKDPHNYEPFDPSEVNLERKIVIGKHSGRAAVVNKLSEYEMYISPENATKLLNAIRATSIRLKRSLMDKEILQLYCDILAHEKGTTEEEAVRGSYI

SEQ ID NO: 13040 - DNA, 1137 bp, Burkholderia vietnamiensis G4
  CDS (1)..(1137): transl_table=11
atgtccattccgatcatcaacgacacgacactgcgcgacggcgaacagaccgccggcgtcgcgttcaccgtcgaggagaaatgcgcgatcgcgaccgcgttgtcgaacgccggcgtgcccgaactcgaaatcggcatcccgtcgatgggcgccgacgagattgcggacatccgctcgatcgtcgacctgaatctcgacgcgagcgtcatggtatggggacgcctgacgccgggcgacctcgccgcggcgctgcgctgccggcccgacatcatccacctgtccgtgccggtgtcggacattcatctgcaatacaagctgcgccagccgcgcgcctgggtgttcgcgcagatcaggcgcgtgatcggcgaggccgtgcgcagcgatctgaagatctcgctcggcgccgaggacgcgtcgcgcgcggacccggcgttcctcgccgacgtcgcgcggctcgcgcagcaatgcggcgcgcagcgcatccgcttcgccgacacgctcggcgtgctcgatccgttctcgacctacgaagccgtcgcgcgcctgcgcgacgccatcgacatcgagatcgagatgcacgcgcacaacgatctcgggctcgccaccgccaacacgctcgcggcgctgcgggctggcgcgacgcatgcgaacacgacggtcaacggcctcggcgagcgcgcgggcaacgcggcgctcgaggaggtcgtgatgtgctcgcgccatctgctcggccgcgacaccggcgtcgacaccaccgcgctcgtcggcatttcgcggctcgtcgagcatgcgtccgggcggcaggtcgcgctcaacaagagcatcgtcggcggcggcgtgttcacgcacgagtcgggcatccacaccgacggcctcgcgaagaatccgacgacctacgagagcttcgatccggccgagctcggccgcgcgcgctcgctcgtgctcggcaagcattccggctcgcacggcgtgcgccatgcgtacgaggcgctcgggctgccggtcgccgaccagctcgtgccgctgctgctcgcgcgcatccgccagcatgcgacccagacgaagcaggcgccgaacgcggccgatctgtaccggttcctggtcgagacgcgcgaactaatcgaggaatggtcatga

SEQ ID NO: 13041 - protein, 378 aa, Burkholderia vietnamiensis G4
MSIPIINDTTLRDGEQTAGVAFTVEEKCAIATALSNAGVPELEIGIPSMGADEIADIRSIVDLNLDASVMVWGRLTPGDLAAALRCRPDIIHLSVPVSDIHLQYKLRQPRAWVFAQIRRVIGEAVRSDLKISLGAEDASRADPAFLADVARLAQQCGAQRIRFADTLGVLDPFSTYEAVARLRDAIDIEIEMHAHNDLGLATANTLAALRAGATHANTTVNGLGERAGNAALEEVVMCSRHLLGRDTGVDTTALVGISRLVEHASGRQVALNKSIVGGGVFTHESGIHTDGLAKNPTTYESFDPAELGRARSLVLGKHSGSHGVRHAYEALGLPVADQLVPLLLARIRQHATQTKQAPNAADLYRFLVETRELIEEWS

SEQ ID NO: 13042 - DNA, 1545 bp, Burkholderia vietnamiensis G4
  CDS (1)..(1545): transl_table=11
atgacagacaagctgatcattttcgatacgacgttgcgtgacggtgaacaatcgcccggcgcgtcgatgacgaaggaagagaaaatccgcatcgcgaagcacctcgagcggatgaaggtcgacgtgatcgaggcaggtttcgcggccagctcgaacggcgacttcgacgcgatccacacgatcgccgggctcgtgaaggacagcacgatctgctcgctcgcgcgcgccaacgacaaggacatccagcgcgcagccgatgcactgaagccggccagcagcgcgcggatccacacgttcatcgcgacgtcgccgctgcacatggaaaagaagctgcgcatgacgccggaccaggtgttcgagcaggcgcggctcgcggtgcgctttgcacgcaagttcaccgacaacgtcgagttctcgccggaagacggcagccgctcggatctcgacttcctgtgccgcgtgctggaagcggtgatcgccgaaggcgcgacgacgatcaacatcgccgatacggtcggctacggcgtgccggagctttacggcaacctggtgaagacgctgcgcgaacgcattccgaactcggacaaggcgatcttctccgtgcattgccacaacgacctcgggatggcggtcgcgaactcgctcgcgggcgtgaagatcggcggggcgcgtcaggtcgaatgcacgatcaacggtctcggcgagcgcgcgggcaatacgtcgctcgaagaaatcgtgatggccgtgaagacgcgcaaggactacttcggcctcgacgtcggcatcgacacgacgcagatcgtgccgacctcgaagctcgtgtcgcagatcaccggtttcgtcgtgcagccgaacaaggccgtggtcggggcgaacgcgttcgcgcacgcttccggcatccaccaggacggcgtgctgaaggcgcgcgacacctacgagatcatgcgcgcggaagacgtgggctggaccgcgaacaagatcgtgctcggcaagctgtcgggccgcaacgcgttcaagcagcggctgcaggagctcggcgtgtcgctcgacagcgaagccgaactgaacgccgcgttcatgcgcttcaaggatctcgccgaccgcaaggccgagatcttcgacgaggacatcatcgcgatcgtctccgaagaatcggcgctcgcgcaggagcaggagcacgtcaagttcgtgtcgctgtcgcagcattcggaaaccggcgagcagccgcaagcgaaggtcgtgttcgcggtcgaaggcagcgaggtgaccggcgaggcgcgcggcaacggcccggtcgatgcgacgttcaacgcgatcgagggcgaagtcggcagcggttccgagctgctgctgtattcggtgaacgcgatcacgaccggcacgcaggcgcagggcgaagtgacggtgcggctgtcgaagaacgggcgcatcgtgaacggcgtcggcaccgacccggacatcgtcgcggcttccgcgaaggcgtacatcgccgcgttgaacaagctgcactcgaaggacgacaagctcaacccgcaacgcgcataa

SEQ ID NO: 13043 - protein, 514 aa, Burkholderia vietnamiensis G4
MTDKLIIFDTTLRDGEQSPGASMTKEEKIRIAKHLERMKVDVIEAGFAASSNGDFDAIHTIAGLVKDSTICSLARANDKDIQRAADALKPASSARIHTFIATSPLHMEKKLRMTPDQVFEQARLAVRFARKFTDNVEFSPEDGSRSDLDFLCRVLEAVIAEGATTINIADTVGYGVPELYGNLVKTLRERIPNSDKAIFSVHCHNDLGMAVANSLAGVKIGGARQVECTINGLGERAGNTSLEEIVMAVKTRKDYFGLDVGIDTTQIVPTSKLVSQITGFVVQPNKAVVGANAFAHASGIHQDGVLKARDTYEIMRAEDVGWTANKIVLGKLSGRNAFKQRLQELGVSLDSEAELNAAFMRFKDLADRKAEIFDEDIIAIVSEESALAQEQEHVKFVSLSQHSETGEQPQAKVVFAVEGSEVTGEARGNGPVDATFNAIEGEVGSGSELLLYSVNAITTGTQAQGEVTVRLSKNGRIVNGVGTDPDIVAASAKAYIAALNKLHSKDDKLNPQRA

SEQ ID NO: 13044 - DNA, 1140 bp, Bradyrhizobium sp. ORS278
  CDS (1)..(1140): transl_table=11
atgcgccgggttatcctgaacgacaccacgcttcgcgacggcgagcaggccccgggcgtcgctttcgcccttaccgagaaggtcgcgatcgcccgcgcgctggcgcgggccggcgttcccgagatcgaagccggcacgcccgcgatgggggccgacgagatcgccgcgatcagggcaatcgtcgaggccggtctgccggcgaccatcatcggctggtgccggatgcgcgaggcggatgtcgatgccgccgtcgcagccggtgtgtcgatggtcaatgtctccattccgacgtcggatgttcagatcgcagccaagctcggcggtggccgcagcgtcgcgctggaattgctcaagcgcgttgtcagctatgcaaagagccggggattggacgttgccgtcggcggcgaggattcctcgcgcgcggacgtcggcttcctggcggaagtgattgcgaccgcaaaggcgctcggcgcgcggcgcttccgtgtcgccgataccctgagcgtgctcgatcccgacgcgacatcggcgctggtcggagccttgcgcgcgacgaccgacctggagatcgaatttcacggccacgatgatctcggccttgccaccgccaacacgctcgccgccgtgaaggccggcgcgacgcatgcgtcggtcacggtgatcggcctcggcgagcgcgccggcaatgcgccgctggaggaggtggcggtcgcgttgcggcagctctaccgtcgcgagaccggcatcgtgctcgccgagctcgatcatgtcgccaatgtcgtcgcagccgctgcggcgcgcgcgatcccgctcaacaaggcgatcgttggcgagcatgtcttcacccacgagtccggtattcacgtcgatggcctgctcaaggatcagcgcacctaccaggcgctcgatcccatgctgttcggccgttccaaccggatcgtgatcggcaagcattccggtctctcggcgatcacctcgctgctgtccgacctgcgtctgccggcgagcgccgaccaggcgcaacgcatcctcgcgcgcgtgcgcaagcatgcggtcgcgcacaagggtcctgtgccgaaggaagccgttgccgccatctggcgcgaagtttgtgatcacccgcatgcgagctttgcctga

SEQ ID NO: 13045 - protein, 379 aa, Bradyrhizobium sp. ORS278
MRRVILNDTTLRDGEQAPGVAFALTEKVAIARALARAGVPEIEAGTPAMGADEIAAIRAIVEAGLPATIIGWCRMREADVDAAVAAGVSMVNVSIPTSDVQIAAKLGGGRSVALELLKRVVSYAKSRGLDVAVGGEDSSRADVGFLAEVIATAKALGARRFRVADTLSVLDPDATSALVGALRATTDLEIEFHGHDDLGLATANTLAAVKAGATHASVTVIGLGERAGNAPLEEVAVALRQLYRRETGIVLAELDHVANVVAAAAARAIPLNKAIVGEHVFTHESGIHVDGLLKDQRTYQALDPMLFGRSNRIVIGKHSGLSAITSLLSDLRLPASADQAQRILARVRKHAVAHKGPVPKEAVAAIWREVCDHPHASFA

SEQ ID NO: 13046 - DNA, 1623 bp, Synechococcus sp. WH 7803
  CDS (1)..(1623): transl_table=11
atggcccatgatccaggccgcgttctgatcttcgacaccaccctcagggatggtgagcagtcgccgggcgccagcctcaaccttgaagaaaagctggccattgcccagcagctggcgcgccttggcgtcgacgtgatcgaagcgggctttccttttgccagccctggcgacttcaatgccgttcagcgcatcgcccagcaggtgggtggagagcaggggccgatcatctgcggcctggcccgcgcctcccgcggggatatcaaggcctgcgctgatgcggtggcccctgcaccgcgccgccgcattcacaccttcatcgccacgagcgacattcacctcgagcacaaactgcgcaaaagccgccaggaggtgttggcgatcgtgcccgagatggtggcctacgcccgctctctggtcgacgacgtggagttctcctgcgaggacgccggtcgcagtgatcccgagttcctttacgccgtgatcgaagcggccatcaacgctggtgccagcacgatcaacatccccgacacggtggggtacaccacaccggccgagttcggcgccttgatcgctgggatcgaccagcacgtgcccaacatcagtgaggcggtgctgtcggtgcatggccacaacgacctaggcctggccgtggccaacttcctggaggctgtgaagaacggggcccgccagttggagtgcaccatcaatggcatcggcgaacgcgccggtaacgcagcgctcgaagagctggtgatggcgttgcacgtccgccgccgctacttcaatccctttttcggccgagcggaagactcccccacccccttaacaggtgtgcgcaccgaggagatcaccaaaacgtcgcgtctggtttccaacctcaccggcatggtggttcagcccaacaaggcgattgtgggtgcgaatgcctttgcccatgaatcaggcattcaccaggacggcgttctcaaaaaccgcctcacctacgagatcgtcgatgcccgcacggttggtctcaccgataaccgcatctcccttggcaagctgagcggccgcagcgcggtgcgtgcccgtctcgaggaactcggctacgacctcagccgcgaagacctcgacgatgccttcgcccgcttcaaggagttggccgatcgcaagcgcgacatcaccgatcgcgaccttgaggcgatcgtgagcgagcaggtgcaacaacccgatgcccgttatcagctcaagttggtgcaggtgagctgcggcagcagtctgcagcccacagccaccgtgaccctgctcgatgaggagggccaagaacagagcgaggctgcgatcggcacaggccctgtggatgcggtgtgccgtgccctcaatgccctggccggggagcccaacgaactggtggagttttcggtgaagtccgtcaccgagggcatcgatgccatgggcgaggtcacgatccggctgcggcgtgacggtcagctcttttccggccatgctgccgacaccgatgtggtggtcgccgccgctcaggcctttgtgaatgccctcaatcgcctggtggccgggtctttgaacccaacccttcatccccagcgggatgccacgcctttggacgccagcccgaccctctga

SEQ ID NO: 13047 - protein, 540 aa, Synechococcus sp. WH 7803
MAHDPGRVLIFDTTLRDGEQSPGASLNLEEKLAIAQQLARLGVDVIEAGFPFASPGDFNAVQRIAQQVGGEQGPIICGLARASRGDIKACADAVAPAPRRRIHTFIATSDIHLEHKLRKSRQEVLAIVPEMVAYARSLVDDVEFSCEDAGRSDPEFLYAVIEAAINAGASTINIPDTVGYTTPAEFGALIAGIDQHVPNISEAVLSVHGHNDLGLAVANFLEAVKNGARQLECTINGIGERAGNAALEELVMALHVRRRYFNPFFGRAEDSPTPLTGVRTEEITKTSRLVSNLTGMVVQPNKAIVGANAFAHESGIHQDGVLKNRLTYEIVDARTVGLTDNRISLGKLSGRSAVRARLEELGYDLSREDLDDAFARFKELADRKRDITDRDLEAIVSEQVQQPDARYQLKLVQVSCGSSLQPTATVTLLDEEGQEQSEAAIGTGPVDAVCRALNALAGEPNELVEFSVKSVTEGIDAMGEVTIRLRRDGQLFSGHAADTDVVVAAAQAFVNALNRLVAGSLNPTLHPQRDATPLDASPTL

SEQ ID NO: 13048 - DNA, 1575 bp, Thermus thermophilus HB27
  CDS (1)..(1575): transl_table=11
gtggtagaaatcctggacaccaccttaagggacggcacccaaggggagggggtaagcctctccgtggacgacaaggtggccatcgcgaggcgccttgccgccttcgggatccacctcattgagggggggtggcccggctccaaccccaaggacgccgagttcttccagcgcatgaggggggtggacctgggggcggcgaggcttgccgccttcggggccacgaggcgaaagggcctcgcccccgaggaagacccctcggtcctcgcccttttggaggcggagacccccgtggtggtcctcttcggcaaaagctggaccctgcacgttttggaggctttggagacctccttggaggagaacctccgcatgattgaggagacggtggccttcttcgcccggaggggcaggcgggtggtctacgacgccgagcacttctttgacggctacaaggaggatcccgcttacgccctcgccaccctcgaggccgccttcaggggcggggccgacaccctggtcctttgcgacaccaacggggggagcctccccgaggaggtctacgccatcaccaaggcggtggtggagcggtttccgggggtccgggtgggcatccacccccacaacgacgccgacctcgccgtggccaacgccctcgcggcggtgcgggccggggccacccacgtccagggcaccatcaacggctacggggaaaggtgcggcaacctcaacctcacgagcttcctccccaccctggtcttcaagtacgggatccccgccatctccccggaaaagctgagggagctcagggaggtttcccacttcgtggacgaaagggccaacctcacccccaaccgccgcgccccctacgtgggggaggcggccttcgcccacaaggccggggtgcacgtctccgccgtcctcaagaacccccgcacctacgagcacatccccccggagtgggtggggaaccagcggcgctttctggtctcggacgtctcgggccgctccaacctcctcgccaagctccaggagctcggggtggacctaagcaaggaggaggccaggcgccttctggaggaggtcaaggccctggagtacgagggctacgcctttgagggggcggaggcgagcttctacctcctcgcccaccgcctgaagggcgggagccttcccttcagcgtggagggctttagcgtcttcgtccacggaaggggcctttccaccgcctgggccgaggccacggtgcgggttagggtgggggagagcctccagcacaccgccgcggaaagccccttcgggcccgtctccgccctggatagggccttccgcaaggccgtgttgcagttctatccggagctttccgaggtggagctcacggactacaaggtgcggatcctctccggccaggaggcggggacgaactccggggtgcgggtcatggtggagatgaagcggggggaggagcgcttcgccaccgtgggggcgagcgagaacatcctcgaggcctccctcaaggccctcaccgacgggtacgcctacgccctcctctacccggtggctacgcccaggggagcctga

SEQ ID NO: 13049 - protein, 524 aa, Thermus thermophilus HB27
MVEILDTTLRDGTQGEGVSLSVDDKVAIARRLAAFGIHLIEGGWPGSNPKDAEFFQRMRGVDLGAARLAAFGATRRKGLAPEEDPSVLALLEAETPVVVLFGKSWTLHVLEALETSLEENLRMIEETVAFFARRGRRVVYDAEHFFDGYKEDPAYALATLEAAFRGGADTLVLCDTNGGSLPEEVYAITKAVVERFPGVRVGIHPHNDADLAVANALAAVRAGATHVQGTINGYGERCGNLNLTSFLPTLVFKYGIPAISPEKLRELREVSHFVDERANLTPNRRAPYVGEAAFAHKAGVHVSAVLKNPRTYEHIPPEWVGNQRRFLVSDVSGRSNLLAKLQELGVDLSKEEARRLLEEVKALEYEGYAFEGAEASFYLLAHRLKGGSLPFSVEGFSVFVHGRGLSTAWAEATVRVRVGESLQHTAAESPFGPVSALDRAFRKAVLQFYPELSEVELTDYKVRILSGQEAGTNSGVRVMVEMKRGEERFATVGASENILEASLKALTDGYAYALLYPVATPRGA

SEQ ID NO: 13050 - DNA, 1563 bp, Thermus thermophilus HB27
  CDS (1)..(1563): transl_table=11
atggagaaggaacggcacatccggatctttgacaccacgctcagggacggggagcaaagcccaggggtggccctctccctggaccagaagctggagatcgcccaggccctcgcccagctcaacgtggacatcattgaggcgggcttccccgtatcggggcccatggagtttgaggcggtgcgccgcatcgccaccgaggtcaagggccccatcatcgccgccctcgcccgcacccacaccctggacattgaccaggcggccaaggccctggagaaggcggagaagcccaggatccacgtcttcacctccgcctccaaggtccacctgcagtacatgctgaggaagacggaggaggaggtcctggagatggcggatagaatggtccgctacgccaggaggtacgtggacgacgtggagttctccgcccaggacgtgatgcgggcggactgggagttcgtcaagaggctttacgaggtggccattgaggccggggccaccaccatcaacatccccgacaccacgggctacggcacgccccaggagtacggggccctgatccgcaggatccgggacgaggtggtgcgggggcgggacgtgatcatctccacccacacccacgacgacctgggcatggccacggccaacgccctggcgggcgtggagaacggggcgggccagattgagtgcaccatcaacggcatcggggagcgggcggggaactgcgccctggaggaggtggtcatggccctctacgtccgccgggactggtacaaggcctacacgcggatcaacacccgggagatctaccgggtgagccgcctggtggagcgctacaccgggatgcccgtcccccccaacaaggccatcgtgggggacaacgccttcgcgcacgagtccggcatccaccaggacggggtcatcaagcaccgggccacctacgagatcatggacgccgagctcatcgggaggcggcccgccgtgctcgtcctcggcaagcactcgggccgggcggcttttaaaaaggccctcgaggacctgggctacaaggacctctccgaggaggaggtgaagaagctcttcgcccgcttcaaggagatcgccgagaagaaggggcccctttccgccgaggagctccaagccctggtggaaagcgagcgggagcccacctctcacttcttccagctggagcatgtccagtttttctcgggctccgggctcctgcccacggccacggtcaaggtgaagaccccggacggggagagggtggccacccacaccggggacggtcccgtggacgccgtgtacaaggccatccaggaggccatcggcctgaggccggaacttgagctctaccgggtggaggccatcacggggagcaccgaagccctgggccaggtcacggtgcgcctccggctcggcgagctccaggccgtgggggtgggggtctccccggacatcattgaggcgagcgccttggcctttttggacgccgccgggaagctcgcctcgggccgggccacccgccacccgccctccattgaggaggtccaccgtggggtctag

SEQ ID NO: 13051 - protein, 520 aa, Thermus thermophilus HB27
MEKERHIRIFDTTLRDGEQSPGVALSLDQKLEIAQALAQLNVDIIEAGFPVSGPMEFEAVRRIATEVKGPIIAALARTHTLDIDQAAKALEKAEKPRIHVFTSASKVHLQYMLRKTEEEVLEMADRMVRYARRYVDDVEFSAQDVMRADWEFVKRLYEVAIEAGATTINIPDTTGYGTPQEYGALIRRIRDEVVRGRDVIISTHTHDDLGMATANALAGVENGAGQIECTINGIGERAGNCALEEVVMALYVRRDWYKAYTRINTREIYRVSRLVERYTGMPVPPNKAIVGDNAFAHESGIHQDGVIKHRATYEIMDAELIGRRPAVLVLGKHSGRAAFKKALEDLGYKDLSEEEVKKLFARFKEIAEKKGPLSAEELQALVESEREPTSHFFQLEHVQFFSGSGLLPTATVKVKTPDGERVATHTGDGPVDAVYKAIQEAIGLRPELELYRVEAITGSTEALGQVTVRLRLGELQAVGVGVSPDIIEASALAFLDAAGKLASGRATRHPPSIEEVHRGV

SEQ ID NO: 13052 - DNA, 1128 bp, Picrophilus torridus DSM 9790
  CDS (1)..(1128): transl_table=11
atgataggcttgcttgacagtacacttagagagggagagcagacccctggcgtttcattttccatggatgcccgggtggaaatagccagggcgctttcagatgctggcgtttcaatgatagaggccggccatccggcagtttcagaaacagttttaaaatcaataaaaagcatcatggaattaaaatcatcaggaataataagatcaacgatagttgcacacagcagggccgtaagatcagatatagatgttgcggcctcgctcaatatcgacatgatagcaatattctatggaataagtgatcttcatttaaaatacaaaacgttaaagacccgcgaggatgcaataagaattatcgttgatagcattgattatgcaaggtcatatggtttaaatgtaagattcaccgcagaggatgccacaagaactgattataattatttactggatgttgcaagggccgccagggatgcaggtgcaaaaagaatatccatagcggacaccgttggaatattaaatcctgacacatcatataaactttttaaaatgataataaaagacgtaaaaaacgttgagtttgacatacatgcgcataacgatcttggaatggcagttgcaaacagcattgcggcatatcgtgcaggcgcgacaataatacattcaacggtaaacggtcttggtgaacgcagcggtataacgccaacacagataataggcccggcactaaaataccattacaatgaggccgttatcgatttaaaaaggctctacagcctgtcaaatcttgttgaaaaatacagtggggtaatggttccatacaattatccggtaacgggcaaaaatgcatttacacataaatcaggcgttcatatagccggtataataaacaaacctgaaacctatgaattcatggatccgtgtttatttggaaataaaaggtattatacaataagcagctacagtggcaggcatgcagtaattacaagattgcaggagcttggaatatcccttaacgatgagcatttaaaaatattaatgaagatgataaaaaataaaaatagggaattaaatgatgatgaattatatgccatggcagaatcaataaaaagatctgctgtttcaatgtaa

SEQ ID NO: 13053 - protein, 375 aa, Picrophilus torridus DSM 9790
MIGLLDSTLREGEQTPGVSFSMDARVEIARALSDAGVSMIEAGHPAVSETVLKSIKSIMELKSSGIIRSTIVAHSRAVRSDIDVAASLNIDMIAIFYGISDLHLKYKTLKTREDAIRIIVDSIDYARSYGLNVRFTAEDATRTDYNYLLDVARAARDAGAKRISIADTVGILNPDTSYKLFKMIIKDVKNVEFDIHAHNDLGMAVANSIAAYRAGATIIHSTVNGLGERSGITPTQIIGPALKYHYNEAVIDLKRLYSLSNLVEKYSGVMVPYNYPVTGKNAFTHKSGVHIAGIINKPETYEFMDPCLFGNKRYYTISSYSGRHAVITRLQELGISLNDEHLKILMKMIKNKNRELNDDELYAMAESIKRSAVSM

SEQ ID NO: 13054 - DNA, 1176 bp, Erwinia carotovora subsp. atroseptica SCRI1043
  CDS (1)..(1176): transl_table=11
atggcggatatcattatcaatgacactacgctgcgtgatggtgagcagagccccggcgtagcgtttcgcgccagcgaaaaactggcgattgccgaggcattagttgatgctggggtgaccgcgttggaagtgggcaccccggcgatgggagacgatgaacgggcgcgtattgcggttattcgccgccgcctgccggacacggtgctgatgacctggtgccggatgaatgcgctggaaatccggcaaagtgccgatctgggcatgaattgggtggatatctcggttcctgcatcggatcgattgcgcgaacagaagctgcgtcagccgcttaacgtcttattggcacagctttcctcgctgattgctcaggctcgtcagcaagggttacgtgtgtgtgtcggctgtgaagatgcatcgcgcgctagcgatgacaccttgcgtcagatagcgattgctgccgatgcagcaggggctgaacggctgcgctttgcggatacgctgggcgtgcttgacccgttctccaccttcgcccgtatcagtaccttgcggcaaaactggggcggtgagattgaaatgcatgcgcataacgatcttgggctggctacggccaatacgctggcagcgatagaggctggcgtttcccatgttaataccacggtgttgggtctgggggaacgggcaggtaatgctgcattggaaaccgtggcgttagcgctggaacgctgtctcgatcgtgacagtggcatccacttcgctcgtttgcccgcgctgtgccaactggtggcaagcgcggcacagcgcaccatcgacaagcagcagccgctggtgggggagcaggtatttactcacgaatccggcgtgcatgtcgcagctttgctaaacgacagccgcagttatcagggcatcgacccggcgctcatggggcgtgagttctgtttggttctaggtaagcattcgggacggcaagcggtggcggggattttcgcccgtttaggttttcagccgcaggcgagtgagacggaagcgctgttgcgcagcgtccgcgcttttgcggaaaactggaagcgtaatcctctggattatgaattgctggagatgtatcgcgaactgtgtggcagtgatgcggtgatggggagggcaaacgatggaatggttctaccagttacccggcgttga

SEQ ID NO: 13055 - protein, 391 aa, Erwinia carotovora subsp. atroseptica SCRI1043
MADIIINDTTLRDGEQSPGVAFRASEKLAIAEALVDAGVTALEVGTPAMGDDERARIAVIRRRLPDTVLMTWCRMNALEIRQSADLGMNWVDISVPASDRLREQKLRQPLNVLLAQLSSLIAQARQQGLRVCVGCEDASRASDDTLRQIAIAADAAGAERLRFADTLGVLDPFSTFARISTLRQNWGGEIEMHAHNDLGLATANTLAAIEAGVSHVNTTVLGLGERAGNAALETVALALERCLDRDSGIHFARLPALCQLVASAAQRTIDKQQPLVGEQVFTHESGVHVAALLNDSRSYQGIDPALMGREFCLVLGKHSGRQAVAGIFARLGFQPQASETEALLRSVRAFAENWKRNPLDYELLEMYRELCGSDAVMGRANDGMVLPVTRR

SEQ ID NO: 13056 - DNA, 1599 bp, Erwinia carotovora subsp. atroseptica SCRI1043
  CDS (1)..(1599): transl_table=11
atgagcgagcaagtcattatttttgataccacattacgcgatggtgaacaggctttacaggcgagtttgagtgtaaaagaaaaactgcaaattgccttcgctctggagcgtatgggcgttgatgtcatggaggttggctttccagtgtcatctcccggtgactttgaatccgttcaaaccattgcccgcaacatcaaaaatagtcgtgtgtgcggtctgactcgctgcgtagaaaaggatatcgatgttgccgcagaagcgctgcgtgtcgcagaagccttccgtatccacacctttatcgcgacctcaccgatgcacatcgccacgaagctgcgcagcacgctggacgaagtcattgaacgcgccatttacatgataaaacgcgcacgtaactatacagacgatgttgagttctcctgcgaagatgcgggccggacacccattccagacttgtgtcgcgtggttgaggccgcaatcaacgcgggcgctcgcacgattaatatcccggacaccgtcggctacaccatgccgcatgagttcggtaatatcatcgcctcgctgtaccaacatgttccgaatatcgataaagccatcatttctgttcacactcacgacgatctgggcttggcagtcggcaacgcaatggcagccgttcacgcaggagcgcgtcaggtagaaggtacgttgaacggtatcggtgaacgtgccggcaactgttcactggaagaagtgatcatggcgataaaaacccgccatgacatcttgaacgtccataccaacatcaaccatcaggaaatctaccgcaccagccaactggtcagccagatttgcaacatgcccatcccagctaacaaagcggtcgtgggtgccaacgctttcgcccactcttctggtattcatcaggatggcgtgctgaagaatcgtgaaaactacgaaatcatgacaccggaatccatcggcctgaaagaagtgcagttgaacctgacttcccgctctggtcgtgcggcggtgaaacaccgtatggaagagatgggctatcaggataacgattataatctggacgatctgtactctgccttcctgaaactggcggataaaaaaggccaggtatttgattacgatctggaagcgctggcctttatcagccgccagcaggaagaacctgagttctaccatctggattatttcagcgttcagtctggttctagcgtgatggcaacggcctcagtcaaactgatctgcggagaagaaacgcagtcagaagcggcgacgggtaatggcccagtggatgccgtttatcaggcgatcaaccgcatcacgggttatcaagtttcgctggtcaaataccaactgacggccaaaggtcaggggcgcgatgcgctgggtcaagttgatatcgtcgcggattatcaggggcgtcgtttccacggcgttggtctggcaacggatatcgttgaatcttccgcacaagcaatggtaaatgtattaaacaacatcaaacgtgctcagcaggtagaaaaagaaattcagcgtctgcagcagcacaataaccaacaacaaaacgatagcaaacaacaaaacagtcaggaaacagtgtga

SEQ ID NO: 13057 - protein, 532 aa, Erwinia carotovora subsp. atroseptica SCRI1043
MSEQVIIFDTTLRDGEQALQASLSVKEKLQIAFALERMGVDVMEVGFPVSSPGDFESVQTIARNIKNSRVCGLTRCVEKDIDVAAEALRVAEAFRIHTFIATSPMHIATKLRSTLDEVIERAIYMIKRARNYTDDVEFSCEDAGRTPIPDLCRVVEAAINAGARTINIPDTVGYTMPHEFGNIIASLYQHVPNIDKAIISVHTHDDLGLAVGNAMAAVHAGARQVEGTLNGIGERAGNCSLEEVIMAIKTRHDILNVHTNINHQEIYRTSQLVSQICNMPIPANKAVVGANAFAHSSGIHQDGVLKNRENYEIMTPESIGLKEVQLNLTSRSGRAAVKHRMEEMGYQDNDYNLDDLYSAFLKLADKKGQVFDYDLEALAFISRQQEEPEFYHLDYFSVQSGSSVMATASVKLICGEETQSEAATGNGPVDAVYQAINRITGYQVSLVKYQLTAKGQGRDALGQVDIVADYQGRRFHGVGLATDIVESSAQAMVNVLNNIKRAQQVEKEIQRLQQHNNQQQNDSKQQNSQETV

SEQ ID NO: 13058 - DNA, 1599 bp, Desulfotalea psychrophila LSv54
  CDS (1)..(1599): transl_table=11
atgatgaggaatttgatgcgaattgaaatatacgatacaaccctacgtgatggaacccaggctgaaaattttaatatttctgtcgacgataagttacgcatcgcccaggaacttgatactctgggtgttgattttatcgagggtggttggccggggtctaatccagtgaccatcgaattttttaatcgtattggagagatagatcttaagcatagcaagattgttgcctttggttctacccggcatataaaaaacaggccggaagaagatgcaaatctgcaggccctgcttgctgccaagacacctgccattatcatctttgggaaaagttgggatatccatgcaacggatgccctcaatattagcctggaagagaatctgcaaattatcgaggatagtcttgcctatctacgccctcatgtagagcatctcttctatgatgcggaacatttttttgatggtttcaagaataatgaagagtatgcccttaaaactgtggcaagtgccattgccggtggtgctgagcgcattgtcctctgtgataccaatggtggaaccctgccccatgaaatccctcccattatcaagcgggtaaaagagtttgttgccggtttgagtgagacagttggtcttggtattcatcctcacaatgattcagactcagcggtagccaatgctctgatggccgcatcctcgggggtagagcagattcaggggactatgaatggttttggtgagcgctgcggaaatgcgaatctgacctcaattatacccgccctagtctttaagatgggttttgactgtggggtaaaagagcacataagtcgactctatggttgttcacgtttggtgactgaactggccaaccttccccataaccactatcaaccctatgtgggtaagtctgcctttgctcataaggggggcatccatgtcagtgccgttaagcgtaatccacttacctatgagcatattgctccggagctggtgggcaatagcagaaggattttgctctcggatcaggcgggccgggccaatattctctttaaggccaaggagtggggaattcacattcgtccggatgatcctatcttgccggccattatcaaggagcttaaggaacttgagaaccttggctatcagtatgaggctgcagaggcaagttttgagcttattatgcgcaagcttttgggcttgaggagaaactatttttcctttcagggctttcgggtaacggataataagtatcgcatggataagccacctctcaccgaggcaactattcgtctctctgtggggggggtggaggtacatactgccgctggtggcgatggcccggtaaatgcccttgattctgcaatccgtaaggcgcttatacgattttatcccatcctggaagagatggagcttgtcgattttaaggtgcgggttctttcaggagagtatggaacagaggccaaggtacgtgttcttatcgagagccgtgatggtgaggagagttggggtacggtcggcgtttcggttaacataatagaggcaagttggcaggcccttatcgactctattacctataaattaatgaaagaagaaaagaagtag

SEQ ID NO: 13059 - protein, 532 aa, Desulfotalea psychrophila LSv54
MMRNLMRIEIYDTTLRDGTQAENFNISVDDKLRIAQELDTLGVDFIEGGWPGSNPVTIEFFNRIGEIDLKHSKIVAFGSTRHIKNRPEEDANLQALLAAKTPAIIIFGKSWDIHATDALNISLEENLQIIEDSLAYLRPHVEHLFYDAEHFFDGFKNNEEYALKTVASAIAGGAERIVLCDTNGGTLPHEIPPIIKRVKEFVAGLSETVGLGIHPHNDSDSAVANALMAASSGVEQIQGTMNGFGERCGNANLTSIIPALVFKMGFDCGVKEHISRLYGCSRLVTELANLPHNHYQPYVGKSAFAHKGGIHVSAVKRNPLTYEHIAPELVGNSRRILLSDQAGRANILFKAKEWGIHIRPDDPILPAIIKELKELENLGYQYEAAEASFELIMRKLLGLRRNYFSFQGFRVTDNKYRMDKPPLTEATIRLSVGGVEVHTAAGGDGPVNALDSAIRKALIRFYPILEEMELVDFKVRVLSGEYGTEAKVRVLIESRDGEESWGTVGVSVNIIEASWQALIDSITYKLMKEEKK

SEQ ID NO: 13060 - DNA, 1155 bp, Methylococcus capsulatus str. Bath
  CDS (1)..(1155): transl_table=11
atggttgcacagcgggtcaccatcaacgacaccacccttcgcgacggcgagcagaccgccggcgtcgctttcaccgccgaggaaaagctttccatagctcgtgcgctggctcgggccggcgtgccggaaatggaagtgggcattcccgtcatgggcgccgaggagcaggaggtgatccgggccatcgccggcctgggactatcggcccggctgatggtctggggtcggatgtgcgagcgggatctggcggcggccgccgattgcggcgccgatcgggtgaacctgtcgatcccggtatcggacatccatctccgccacaaggtgaaccggacccgcgaatgggtgttggccagcatcgaccgtttcgtgaagcgggggctggacgccggtctggaggtctgtgtcgggtgtgaggatgcctcccgcgccgatcccgacttcatgctgcaggtcgcagaggcggcgcagcgggccggcgcccggcggatccgcttcgccgacaccctgggcctgctggagccgatgtccaccttcgagcgcatccgccggctggccgtggccaccgatctggaaatcgagatgcacgcccacaacgacttcggcctggcgacggccaacaccctgatggcggtgcaggccggggcgagccatgtgaacaccacggtcaacggactgggggagcgggccggtaacgcggccatcgaggaaaccgtgatggctctgcaccagctctatggcatcgataccggcatcgccgtcgatcatttcccggagatttccggactggtggcggccgcctccggccggccggtggccgcgaacaagagcatcgtcggcgaggccgtgttcacccatgaggccggcatccatgtcgacggtctgctcaagaacctcatcaactaccagggcgtggatccgaaggatctgggccgtgagcaccgtctggtgctgggcaagcattccggcacccacgcggtgaagcggagcttccgccagctcgggatcgagctaagcgaaacggacgccggcaggctgctcaagcgcatccgcatccacgccagccagaccaagcgcccgcccagcgagaccgaactgaagctgttctacgccgaaacctcggtgtcgtcccagccgcgtccgggtcttttcggctga

SEQ ID NO: 13061 - protein, 384 aa, Methylococcus capsulatus str. Bath
MVAQRVTINDTTLRDGEQTAGVAFTAEEKLSIARALARAGVPEMEVGIPVMGAEEQEVIRAIAGLGLSARLMVWGRMCERDLAAAADCGADRVNLSIPVSDIHLRHKVNRTREWVLASIDRFVKRGLDAGLEVCVGCEDASRADPDFMLQVAEAAQRAGARRIRFADTLGLLEPMSTFERIRRLAVATDLEIEMHAHNDFGLATANTLMAVQAGASHVNTTVNGLGERAGNAAIEETVMALHQLYGIDTGIAVDHFPEISGLVAAASGRPVAANKSIVGEAVFTHEAGIHVDGLLKNLINYQGVDPKDLGREHRLVLGKHSGTHAVKRSFRQLGIELSETDAGRLLKRIRIHASQTKRPPSETELKLFYAETSVSSQPRPGLFG

SEQ ID NO: 13062 - DNA, 1545 bp, Methylococcus capsulatus str. Bath
  CDS (1)..(1545): transl_table=11
atgcacgacagactgatcattttcgacacgaccttgcgcgacggagagcagagccccggcgcgtccatgacccgcgatgaaaaggtccgcatcgcccgggcgctggagcgtctgaaggtcgacgtcatcgaggcgggctttcccgccgccagccccggcgatttcgaggccgtccaggccgtggcccggaccatcaaggacagcagggtctgcggcctggcccgcgccctcgaccgcgacatcgaccgcgccggcgaagccctcaaggacgcccagcgcgcccgcatccacaccttcatcgccacctcgcccatccacatgcggcacaagctgcagatgtcgcccgaccaggtggtggaatacgcggtcaaggccgtcaagcgggcccgccagtacaccgacgacgtggaattctcgcccgaggacgccggacgctccgaggaggatttcctctgccgcatcctggaagccgtgatcgatgcgggggcgaccacgctgaacatccccgacaccgtcggctacgccttcccggaacagttcgggcacatgatcggccggctgatcgagcggattccgaactccgacaaggccgtgttctcggttcactgccacaacgacctgggactggcggtcgccaattcgctggccgccgtgctgcacggcgcgcgccaggtggaatgcaccatcaacgggctgggcgagcgggccggcaacgccgcgctggaagagatcgtcatggcggtgcgcacccgtaaagacatcttcccctgccacaccgacatcgagacacgggaaatcgtggcctgctccaaactggtctccagcatcaccggtttcccgatccagcccaacaaggccatcgtcggcgccaacgccttcgcccacgagtcgggcatccaccaggacggtgtgctcaagagccgggaaacctacgagatcatgagcgccgaggacgtggggtggagcaccaaccgcatggtgctgggcaaacattccggccgcaacgcgttccgtacccggatgcaggaactcggcatcgagttcgcctcggaagaggaactgaactcggtgttccagcgcttcaaggtgctggccgacaagaagcacgagatcttcgacgaggacctccaggccctcatcaccgaagccggcgcagaagccgaagacgaacgggtcaagctggtcgcgctgcgggtctgctcggaaacgggcgagattccccacgcccaggtcaccatcaaggtggacaacgaggaacgcaccggcacatcgagcggcggcggcgccgtggacgccagcctcaaggccatcgaatcgctgctgcacacggacaccgcgctgacgctgtactcggtcaacaacatcaccagcggcaccgacgcccagggcgaggtcaccgtgcggctcgagaaaggcgggcgcatcgtcaacggccagggcgccgataccgacatcgtgatcgcctcggccaaggcctacgtcaacgccgtgaacaagctgctggcgcccatccagcgcacccacccgcaagtcggggatgtgtga

SEQ ID NO: 13063 - protein, 514 aa, Methylococcus capsulatus str. Bath
MHDRLIIFDTTLRDGEQSPGASMTRDEKVRIARALERLKVDVIEAGFPAASPGDFEAVQAVARTIKDSRVCGLARALDRDIDRAGEALKDAQRARIHTFIATSPIHMRHKLQMSPDQVVEYAVKAVKRARQYTDDVEFSPEDAGRSEEDFLCRILEAVIDAGATTLNIPDTVGYAFPEQFGHMIGRLIERIPNSDKAVFSVHCHNDLGLAVANSLAAVLHGARQVECTINGLGERAGNAALEEIVMAVRTRKDIFPCHTDIETREIVACSKLVSSITGFPIQPNKAIVGANAFAHESGIHQDGVLKSRETYEIMSAEDVGWSTNRMVLGKHSGRNAFRTRMQELGIEFASEEELNSVFQRFKVLADKKHEIFDEDLQALITEAGAEAEDERVKLVALRVCSETGEIPHAQVTIKVDNEERTGTSSGGGAVDASLKAIESLLHTDTALTLYSVNNITSGTDAQGEVTVRLEKGGRIVNGQGADTDIVIASAKAYVNAVNKLLAPIQRTHPQVGDV

SEQ ID NO: 13064 - DNA, 1635 bp, Silicibacter pomeroyi DSS-3
  CDS (1)..(1635): transl_table=11
atgacccgcgagcgcctttatctctacgacaccaccctgcgcgatgggcagcagacccagggcgtgcaattctcgaccccggaaaaactgcgcatcgccagcgcgctggatagcctcggcatcgactatatcgaaggcggttggcctggcgccaacccgaccgacagcgcctttttcgacgctgccccggcaacccgcgcgcggctgaccgcctttggcatgaccaaacggtcgggccgctcggcggagaacgacgatgtactggccgccgtgatgaatgcgggcaccggcaccgtctgtctggtcggcaaggcgcatgattaccacgtgacccaggcgctggggatcgagctggccgagaacaccgagaacatccgcgcctcgatggcccatatcgtggcgcaggggcgcgaggcactgtttgatgccgagcatttctttgacggctatcgcgacaatcccgcctatgcgctggaggtctgtcgcgccgcgctggaggcgggggcgcgctggatcgtgctctgtgacaccaatggcggcgccatgcccgccgatgtggcccgcgtggtgggcgaggtgatcgctgccggtatccccggcgaccgtctgggcatccattgccataacgacaccgatcaggcggtggcctgttcgctggccgccgtgatcgcgggcgcgcgccagatccagggcacgctgaacgggctgggcgagcgctgtggcaatgccaacctgacctcgctgatcccgacgcttttgctcaaggagccttatgccagccggttcgagaccggtgtcagcgcgggggcgctggccgatctgacccggatcagccgcatgctggacgatattctgaaccgggtgccggtgaaacaggcgccctatgtcggctcgtccgcctttgcccataaggccgggctgcatgccagcgcgatcctcaaggatccgtcgacctacgagcatatcgacccgtctttggtcggcaacgagcgcatcatcccgatgtcgaaccaggccggccagtcgaacctgcgtaaacggctgaccgatgcggggctgagcgtgccgccgggcgatccggcgctggggcatatcctggagcggatcaaggcgcgcgaggacgagggttattcctatgacacagcgcaggccagtttcgagctgctggcgcggcgcgaactgggccagatgcccgcgttcttcgaggtcaagcgctacaaggtcacggtcgagcggcgcaagaacaagtatgaccgcatggtcagcctgtccgaggcggtcgtggtggtcaaggtggatggcgaaaagctgctttcggtcagcgagtcgctggatgacaccggcagcgaccgcggcccggtcaacgcgctctacaaggcgctggccaaggatctggggcgctactcggcgatcctgagcgacatgcggctggtggatttcaaggtgcgcatcacgcaaggcggcaccgaggcggtgacccgcgtcatcatcgacagcgaggatggcaaggggcggcgctggtccaccgttggggtcagcgccaacatagtcgacgcctcgttcgaggcgcttctggacgcgatcaactggaagctgctgcgcgattgcgccgggcaaggggcggcggcggagtga

SEQ ID NO: 13065 - protein, 544 aa, Silicibacter pomeroyi DSS-3
MTRERLYLYDTTLRDGQQTQGVQFSTPEKLRIASALDSLGIDYIEGGWPGANPTDSAFFDAAPATRARLTAFGMTKRSGRSAENDDVLAAVMNAGTGTVCLVGKAHDYHVTQALGIELAENTENIRASMAHIVAQGREALFDAEHFFDGYRDNPAYALEVCRAALEAGARWIVLCDTNGGAMPADVARVVGEVIAAGIPGDRLGIHCHNDTDQAVACSLAAVIAGARQIQGTLNGLGERCGNANLTSLIPTLLLKEPYASRFETGVSAGALADLTRISRMLDDILNRVPVKQAPYVGSSAFAHKAGLHASAILKDPSTYEHIDPSLVGNERIIPMSNQAGQSNLRKRLTDAGLSVPPGDPALGHILERIKAREDEGYSYDTAQASFELLARRELGQMPAFFEVKRYKVTVERRKNKYDRMVSLSEAVVVVKVDGEKLLSVSESLDDTGSDRGPVNALYKALAKDLGRYSAILSDMRLVDFKVRITQGGTEAVTRVIIDSEDGKGRRWSTVGVSANIVDASFEALLDAINWKLLRDCAGQGAAAE

SEQ ID NO: 13066 - DNA, 1623 bp, Synechococcus elongatus PCC 6301
  CDS (1)..(1623): transl_table=11
atggccagcgcaagctcgaacgaccggattctcattttcgataccacgctccgggatggcgaacagtcacctggtgcaagcctaaacctagaagagaaactggtgatcgcgcgtcaactggctcgactgaatgtcgacattattgaggccggttttgcctttgctagtcccggtgattttggagcggtgcagcgcattgccgctgaagtcggcacaccggatggccccacgatttgtagtttggcgcgggcaactcgtcaggatatcaaagcagcggctgaagccttggcaccggcagccaaaggccgcattcacacctttatcgccacttccgacatccacctcgagtacaagctcaagaaaactcgggctgaggttttggcggtcatccccgagatggttggctatgccgcttccttggtcgatgacgtcgaattttcgccggaagatgcggggcgatcggatcctgaattcctctatgagtgtttggaagcggcgatcgcggcaggggccaaaacgatcaatattcccgacaccgtcggctacacgactcctagcgagtttggagccttgattggcggcattaaacagaatgtctgcaacattgatcaggcaatcatttccgtccatggtcacaacgacttaggccttgctgtcgccaacttcctagaagcggtcaaaaacggcgcgcgccagctggaatgtacgatcaacggcattggcgaacgagctggtaatgcggctctagaagagctggtgatggccctgcatgtgcgtcgccaatacttcaatccgttcttgggacgcgctgcagattcagaagcacccctaacccaagtcaacactcgcgaaatctacaaaacctcgcgcttggtctcgaatctgactgggatgttggtgcagccgaataaagcgatcgtgggggccaatgcctttgcacatgaatcgggtattcaccaagacggcgtcctcaaaaataagctgacctacgaaatcgtcgacgccgaaacgattggcctaagtaccaatcgcattaccctcggtaagctgtcggggcgcaatgccttccgtacccgtttgcaggagttgggctacgaccttggcgaggacgacttgaaccgagctttcctgcgcttcaaggaactagccgataaaaagcgggaagtcaccgatcgcgacttggaagcgatcgtcaatgacgaaacccagcaagcacccgagctgttcaagctggaattggtgcaggtttcagcgggcgatcatgcgcgtcccaccgccaccgtcaccctacgcactcccgaaggggaagaactgactgacgcagcgatcggtacggggccggttgatgcgatttatcgagccatcaatcgtgtggtgaacatcccgaatgagctgatcgagttttcggtcaagtctgtcacagcagggattgatgcgatcggcgaggtcacgattcgtctgcgtcatgaagaccggattttctctggacattcggctaataccgacatcctcgtagcctcggcccaagcctatattcacgctctcaaccggcttgccgaagcgttgcagaaggataagcccttgcatccgcaagaaccgattgtcgctggtatgggtcgttag

SEQ ID NO: 13067 - protein, 540 aa, Synechococcus elongatus PCC 6301
MASASSNDRILIFDTTLRDGEQSPGASLNLEEKLVIARQLARLNVDIIEAGFAFASPGDFGAVQRIAAEVGTPDGPTICSLARATRQDIKAAAEALAPAAKGRIHTFIATSDIHLEYKLKKTRAEVLAVIPEMVGYAASLVDDVEFSPEDAGRSDPEFLYECLEAAIAAGAKTINIPDTVGYTTPSEFGALIGGIKQNVCNIDQAIISVHGHNDLGLAVANFLEAVKNGARQLECTINGIGERAGNAALEELVMALHVRRQYFNPFLGRAADSEAPLTQVNTREIYKTSRLVSNLTGMLVQPNKAIVGANAFAHESGIHQDGVLKNKLTYEIVDAETIGLSTNRITLGKLSGRNAFRTRLQELGYDLGEDDLNRAFLRFKELADKKREVTDRDLEAIVNDETQQAPELFKLELVQVSAGDHARPTATVTLRTPEGEELTDAAIGTGPVDAIYRAINRVVNIPNELIEFSVKSVTAGIDAIGEVTIRLRHEDRIFSGHSANTDILVASAQAYIHALNRLAEALQKDKPLHPQEPIVAGMGR

SEQ ID NO: 13068 - DNA, 1545 bp, Bacillus clausii KSM-K16
  CDS (1)..(1545): transl_table=11
atgcgaaaaattaacgtgtttgatacgtcgctgcgcgatggagaacaaatgcctggcatcgctttgactgtaaaagagaagttagaaattgcccggcaattggaacgtctaggtgtggacattattgaggctggttttccagcctcctcacctggcgattttcaagcagtcaaggaaattgctgaaacagtaaaaggttcatccattaccggtcttgctcgggccaagaaaagcgatattgactctgcttgggaggcgttaaaatcaagcgctgaaccaagagtccacgtttttctggcgacatcgccgattcatatggaacataaacttaaactgactccagatcaagtagtggagcgtgcggtagaaagcgttcgttacgcagcggaaaaatttccccacgtccagttttcggcagaggatgcaaaccgttcagaatggccgttcttaaaacgaattattgaagcggcgattgatgcaggcgcttctgtcattaatcttcctgatacagttgggtatagaaccccagaagaaatatcgaaattgtttgaatttgtaaccgaaaatgtcaaaaacatcgaccgtgccattttatccactcataaccatgacgatcttggcatgggtgtagccaattcacttgccgctatttctgcgggggcgggccaagtagagtgtacaatcaatggcattggcgaacgtgctggaaacgcggcgctagaagaaatcgctgttgctttgcaaattcggtctgattattaccaggcgaaaacagggctaaaactatcagaactaaagcgcacaagcgcccttgtcagcaggctaacgtcgatgaatgttcctggaaataaagcggttgtaggagcgaacgcgtttgctcatgagtcaggcatccaccaagacggaatgctcaaaaacaaagaaacctatgaaatcattacgcctgaactggtcggcgctacgtcttcattgcctttaggaaaacattctggccgtcatgcatttaaaacaaagttgaatgaattaggtttttctggctctgacgaaaagctacaaacgattttcagcgcgtttaaacaactttgcgataagaaaaaagaagtgaccgaagatgatttgtatgcattgattgccgatgcaaccgatgatcaagatagcacagcttatgaactaactgcgctgcaagtcacgtatggaatgaaccacgtaccaactgccacgattcgccttaagaaacaggatgacagagaaatcgaagaagcagggactggttctggaagcgtcgaagcaatctacaatacattggcaaaaatgactggtggcaattacagcttagctgattaccgaatccagtcggtaaatggtggagaagatgcgttagcggaagttcatgtgcgcattcaagcagacgatttcgaacaaagcggacggggcgtggcacatgatgtgttagaggcatcagccaaagcgtatttgcacgctgtgaaccgcgtaatagcccggaagcattatgcaaaacgcgaaatggcgaaggtggaaagctaa

SEQ ID NO: 13069 - protein, 514 aa, Bacillus clausii KSM-K16
MRKINVFDTSLRDGEQMPGIALTVKEKLEIARQLERLGVDIIEAGFPASSPGDFQAVKEIAETVKGSSITGLARAKKSDIDSAWEALKSSAEPRVHVFLATSPIHMEHKLKLTPDQVVERAVESVRYAAEKFPHVQFSAEDANRSEWPFLKRIIEAAIDAGASVINLPDTVGYRTPEEISKLFEFVTENVKNIDRAILSTHNHDDLGMGVANSLAAISAGAGQVECTINGIGERAGNAALEEIAVALQIRSDYYQAKTGLKLSELKRTSALVSRLTSMNVPGNKAVVGANAFAHESGIHQDGMLKNKETYEIITPELVGATSSLPLGKHSGRHAFKTKLNELGFSGSDEKLQTIFSAFKQLCDKKKEVTEDDLYALIADATDDQDSTAYELTALQVTYGMNHVPTATIRLKKQDDREIEEAGTGSGSVEAIYNTLAKMTGGNYSLADYRIQSVNGGEDALAEVHVRIQADDFEQSGRGVAHDVLEASAKAYLHAVNRVIARKHYAKREMAKVES

SEQ ID NO: 13070 - DNA, 1086 bp, Thermococcus kodakarensis KOD1
  CDS (1)..(1086): transl_table=11
atggtgctggattcaacgctcagggaaggggagcagacacccggggtaaacttcagcccggaggacaggcttagaataggaatcgccctcgatgaggtcggagtcgattttatagaggccggccatccggcagtaagcggggagatccttgaggggatacgccttctcgcttcccatggcctcaacgcgaacattctggcgcactcaagggccctgaggagcgatatcgacctcgttctgaaggccgaagcagaatggataggtatcttcatgtgcctctctcagaggtgcctggaaaggaggttcaggacggatctcagcggagccctcaccagggtcgaggatgctattctatacgccaaggaccacgggctgaagatccgcttcacaccggaggacaccacgaggacggagtggaagaacctcacagcagctctgaacctcgccagggagctcaaggtcgacagggtgagcatagcggacacaaccggagccgctcatcccctcgagttctacgacctcgtcaagcgcgtcgtcgagttcgggattcccgtaaatgtgcactgccacaacgacctgggattggccctggcaaacgcgataatgggaatcgaggccggggctacgctggtggatgccaccgttaacggaattggggagagggcagggatagtcgacctgtcccatcttctggcggcgctctactaccactacggggtcaaaaagtacaggctggagaagctctactcgctgagcagactcgtgagcgagataaccggccttcaggtccaggtcaactaccccatagtcggccagaacgccttcacacacaaggccggcctgcacgtttcggcggtcgtcagggatccgtctttctacgagttccttccggctgaaacattcggcagggagaggaccatctacgtcgaccgcttcgcaggcagggagacgatacgcttccatctatccagattcggaatccacgacgaggagataatcgaagagctcctcaggagggtaaaggcctcaaggaggcccttcacacccgagatgctggccgaagaagcgaggaggatgatgacatga

SEQ ID NO: 13071 - protein, 361 aa, Thermococcus kodakarensis KOD1
MVLDSTLREGEQTPGVNFSPEDRLRIGIALDEVGVDFIEAGHPAVSGEILEGIRLLASHGLNANILAHSRALRSDIDLVLKAEAEWIGIFMCLSQRCLERRFRTDLSGALTRVEDAILYAKDHGLKIRFTPEDTTRTEWKNLTAALNLARELKVDRVSIADTTGAAHPLEFYDLVKRVVEFGIPVNVHCHNDLGLALANAIMGIEAGATLVDATVNGIGERAGIVDLSHLLAALYYHYGVKKYRLEKLYSLSRLVSEITGLQVQVNYPIVGQNAFTHKAGLHVSAVVRDPSFYEFLPAETFGRERTIYVDRFAGRETIRFHLSRFGIHDEEIIEELLRRVKASRRPFTPEMLAEEARRMMT

SEQ ID NO: 13072 - DNA, 1581 bp, Colwellia psychrerythraea 34H
  CDS (1)..(1581): transl_table=11
atgagcaacccacaaattaataatgaccaagttataatttttgacactactttacgtgatggtgagcaagcattaaatgccagcttatcggtacatgaaaaacttcaaattgccttagcaattgaacgcttaggggtagacgtaatggaagtcggttttccggtttcttctcctggcgattttgaatcagtacagcaaattgcccgcacaataaaaaatgctcgtgtttgtggtttagcgcgcgcagtagaagcagatattgatgcctgtgcagaagcgttaaaagttgcggaccaatttcgtatccatacctttatttcaacctctgatgtgcacgtacagcaaaaactaaaaaaagaatttagtgatgtagaagcaatggcaattcacgcggttaagcatgcaagaaagtacactgatgacgtcgagttctcttgtgaggatgcaggccgtacgccaattgataatttatgtcgcatggtagaaggtgctattaaagccggcgccaccacagtcaatattcccgatacagtcggctacaccctacccttcgaatttcaaggcatcataactgacttgtttaatcgtgtacctaatattgaccaagcgataatctctgtccattgtcataatgacttaggtttagctgtcgctaactctatggctgcagttcaagctggagcacgtcaaattgaatgtactatcaatggtattggtgaacgtgcgggtaactgttcgttagaagaagtcgccatgatcatgcaaacacgtcaagcattgttaggtgtaaaaaccaatatcaatcaccaagaaatagcacgtgtgtctaagttagtcagcacagtatgtaatatgcctgtacaattaaataaagccattgttggcggtaatgcgtttagccattcatcaggtattcatcaagatggcatgttaaaagctagtaatacgtacgagatcatgacacctgaaagtgtcggtatcgccaaaactaaattaaacctaacctctcgcagtggccgtcatgtcataaaacaccgcatggaaagtttaggttaccaagaaagtgattatgaaattgaagaattatatgctgactttttaacattggcagataaaaaaggtcaagtatttgatgatgacttagaggcgttagtgtttaagttacagcaaaaagatttacaagattttttccagttagacacgattaatgtgcaatgtggtgatggcgagttttctaccgctagcatcaagctcatctctggtgaagtaacaggtgataaagagaatagcaagacacatgctgctacaggtaacggtcctgttgatgcgctgtatcaagcaattaagcaaagtgttgatatagaatttgaagtcagtgattacaaaatatctaataaaggctcaggtgaagatggtttaggccaagccgatttaataatcatttggcaaggtagaaatttccacggctatggtttagaaactgatgtaattgaagcatcaggacaagcattaattaatgcactaaacagcatccatagagcgatgactattgctgatttgaaatccgcaaaacaagcttaa

SEQ ID NO: 13073 - protein, 526 aa, Colwellia psychrerythraea 34H
MSNPQINNDQVIIFDTTLRDGEQALNASLSVHEKLQIALAIERLGVDVMEVGFPVSSPGDFESVQQIARTIKNARVCGLARAVEADIDACAEALKVADQFRIHTFISTSDVHVQQKLKKEFSDVEAMAIHAVKHARKYTDDVEFSCEDAGRTPIDNLCRMVEGAIKAGATTVNIPDTVGYTLPFEFQGIITDLFNRVPNIDQAIISVHCHNDLGLAVANSMAAVQAGARQIECTINGIGERAGNCSLEEVAMIMQTRQALLGVKTNINHQEIARVSKLVSTVCNMPVQLNKAIVGGNAFSHSSGIHQDGMLKASNTYEIMTPESVGIAKTKLNLTSRSGRHVIKHRMESLGYQESDYEIEELYADFLTLADKKGQVFDDDLEALVFKLQQKDLQDFFQLDTINVQCGDGEFSTASIKLISGEVTGDKENSKTHAATGNGPVDALYQAIKQSVDIEFEVSDYKISNKGSGEDGLGQADLIIIWQGRNFHGYGLETDVIEASGQALINALNSIHRAMTIADLKSAKQA

SEQ ID NO: 13074 - DNA, 1137 bp, Dechloromonas aromatica RCB
  CDS (1)..(1137): transl_table=11
atgcaacagcccttcatcaccatcaacgacacgacattacgcgacggcgagcaatcggccggcgtggccttttcgttggatgaaaaactggacatcgcccgccagctcgccgccatcggcgtgccggaactggaagtcggcattcctgcgatgggcgacgaggagcgcgactcgatccgcgccgtcgccgatctccagctcgccccgcgcctgatggtgtggagccgcatgcacccgaccgacatcgccgcctgcgccggcctgggcgcccacttgatcgacatttcggtaccggcctcagaccagcacctggcctacaagttgaagcaggaccgcgcctggttgctgcgcgaactgcccaagttcattggcgccgccctgtcgcttggcctcgaagttggcctcggttgcgaagacgcctcgcgtgccgacatgaatttcctttgtgcgctggccgaaacggccgaacgggccggcgcccgccgcctgcgcttcgccgatacgctgggtattctcgaaccctttggcaccttcgaccgcatttcgaccctgcgccgcaacaccggcctggaaatcgaaatgcacgcccacgacgacatgggcctggccaccgccaacacgctggccgcctgcaaggccggtgcgacgcacgtcaataccacggtcaacggtctgggcgaacgggccggcaatgccccgctggaagaagttgtcctcggcctgaccaagctttatggcatcgagaccaatgtcagcctcaagggcttcccgtcactgtcagccaaggtggccagcgcttcggggcgcgccatcccctggcagaagagcgtcgtcggcgccggcgccttcacgcacgaagccggaatccatgtcgatggcctgttgaagcaccctgacaattaccagggtttcgacccgcgcgaagttggccagtcacaccgcatcgtgctcggcaagcattccggttcgcgcgccgtgcaggtcgtctatgcgggcctcggtttcgaactcggcgagaccgaagcccaggccatgctgccgcgcgtccgcacctttgtcgccgaacacaaacacccgccggaagtgtccgatctgcgcgaccttctgagctccctccggagcaacctccatgtctga

SEQ ID NO: 13075 - protein, 378 aa, Dechloromonas aromatica RCB
MQQPFITINDTTLRDGEQSAGVAFSLDEKLDIARQLAAIGVPELEVGIPAMGDEERDSIRAVADLQLAPRLMVWSRMHPTDIAACAGLGAHLIDISVPASDQHLAYKLKQDRAWLLRELPKFIGAALSLGLEVGLGCEDASRADMNFLCALAETAERAGARRLRFADTLGILEPFGTFDRISTLRRNTGLEIEMHAHDDMGLATANTLAACKAGATHVNTTVNGLGERAGNAPLEEVVLGLTKLYGIETNVSLKGFPSLSAKVASASGRAIPWQKSVVGAGAFTHEAGIHVDGLLKHPDNYQGFDPREVGQSHRIVLGKHSGSRAVQVVYAGLGFELGETEAQAMLPRVRTFVAEHKHPPEVSDLRDLLSSLRSNLHV

SEQ ID NO: 13076 - DNA, 1542 bp, Dechloromonas aromatica RCB
  CDS (1)..(1542): transl_table=11
atgaaacagcacctggttattttcgatactaccctgcgcgacggcgagcaaagccccggcgcatcaatgaccaaagaagaaaaaatccgcgttgcccgccagcttgagaaaatgcgggttgatgtcatcgaagcaggttttgcggcagcttcgccaggcgattttgacgccattcactccattgcacagaccatcaaggattcgacggtctgctcgctggcacgggccaacgagaacgatattcgccgggctggtgaggcaatcaaaccagcgcaatcgggtcgtattcatacttttatcgccacttctcccattcacatggagaagaagttgcggatgacgcccgatcaagtggtcgagcaggcggttaaagcgattggctgggcgcgcgaatatacggacgatattgaattttcggccgaggatgccgggcgttctgatctggattttctctgtcgcattttcgaggaggtcatcaaggccggagcaacgaccatcaatgtgccggatacggttggctacaacattccatcgcagtatgcggaaaccatgcgccagttgatcgaacgggtgcctaattccgacaaggtggtctggtcagtccactgtcacaacgacctcgggctggctgtctccaactcgctggcggcggtcctttgcggggcgcgccaggttgaatgcacgatcaacggccttggcgagcgggccggcaatgcggcgctggaagaaatcgtcatggcggtgcgtacccgggccgatgtctttccggtcgagacgcgtatcgatacgacccagatcgtgccggcttcaaagctggtgtcgcagattacaggttatcccgtgcagccgaacaaggccgtggtcggcgctaatgcttttgcccacgagtcgggcatccatcaggatggcgtgctgaagcatcgcgaaacctatgagatcatgcgggcgcaggatgtgggctggacgcagaacaagctggtgcttggcaagcattccggtcgcaatgccttcaagaatcgcctgcaggagttgggtattgagctggaaagcgacgaggcgttgaatgctgcttttgcccgtttcaaggaattggccgacaagaagcatgaaatcttcgacgaagacctgcatgccttggtatccgacgatctggtgacgccggatcaggagtactacaagctggtttattcccgcgtctgttcagagaccggcgagatgccgcgggcttcagtgattcttaatatcggcggagtcgagcacaaggccgaagccgatggcggtggtccggtcgatgcgaccttcaaggccatcgagagcattgctggtagtggtgccgaattgctgctttattcagtcaatgcgattacgaccgggaccgatgcgcagggcgaggtgacaacccgtctttccaagggcgaccgtatcgtcaatggcaatggtgcggatacggatatcgtgatcgcttcagcgcgttcctatctgaatgcgctgaacaagctgcattcgacgctcgataaggtcaaggcgcaaggcggcgtctga

SEQ ID NO: 13077 - protein, 513 aa, Dechloromonas aromatica RCB
MKQHLVIFDTTLRDGEQSPGASMTKEEKIRVARQLEKMRVDVIEAGFAAASPGDFDAIHSIAQTIKDSTVCSLARANENDIRRAGEAIKPAQSGRIHTFIATSPIHMEKKLRMTPDQVVEQAVKAIGWAREYTDDIEFSAEDAGRSDLDFLCRIFEEVIKAGATTINVPDTVGYNIPSQYAETMRQLIERVPNSDKVVWSVHCHNDLGLAVSNSLAAVLCGARQVECTINGLGERAGNAALEEIVMAVRTRADVFPVETRIDTTQIVPASKLVSQITGYPVQPNKAVVGANAFAHESGIHQDGVLKHRETYEIMRAQDVGWTQNKLVLGKHSGRNAFKNRLQELGIELESDEALNAAFARFKELADKKHEIFDEDLHALVSDDLVTPDQEYYKLVYSRVCSETGEMPRASVILNIGGVEHKAEADGGGPVDATFKAIESIAGSGAELLLYSVNAITTGTDAQGEVTTRLSKGDRIVNGNGADTDIVIASARSYLNALNKLHSTLDKVKAQGGV

SEQ ID NO: 13078 - DNA, 1137 bp, Anabaena variabilis ATCC 29413
  CDS (1)..(1137): transl_table=11
atgcaaatgaataaagttctaattaatgacactacactacgcgatggagagcaagcggcgggtgttgcttttagcgtagaggaaaaaatcgcgatcgccaaatttctggatgcgatcggtgtggatgaaatcgaagtgggaatacccgcaatgggtaaagcagaacaagaggcgatcgctaatattgtgaagttgaatttgtccgccaatctacttggttggaaccgcgccgtgatttctgatattcaggcttccatcgcttgtggtttacagcgagtacatatctctattcccgtttctgcaatccaaatcgccgccaaatttcacggacaatggcaagtagttttacaaaaactccacgacagtattagctttgctgttgaccaaggtttatttgtatccatcggtggtgaagactcatcaagagccgaagaaagcttcctccttgatgtagtactggctgctcaagaatggggtgcctcacggtttcgcttttgtgacacagtaggtattcttgacccatttactacccacgccaaaataaaacaattggtggcatctttgacaatacctgtagaaatgcacacccacaatgattttggtttggcaacagctaacgctctcgcaggtatcaaagcaggcgctttatcggtaaatactactgtgaatggattgggtgaacgagctgggaatgctgctttagaagaggtggttatggctctcaagcacttgtatcaccatgatttaggaattgatacgcggcgtttactggaaatatctcaactcgtagtatcagcatcaggtcatcctgtaccaccttggaaagcaattgttggtgaaaatacttttgctcacgaatccgggattcatgctcatggtgtactgcaaaatccccagacctacgaaccatttgcaccagaagaagtagggagagagcgccgtttagttgtgggtaaacattctggtagacatttactgtccagtattttgcagcaacacgacattattctcaatcacgaagaaacccaatctgtcttagatgcagttagacaagaatcagtagaaaaaaaacgcagcctcacacctcaagaacttttacatttagtgcagacaaaacaacattttcgtgcctgttga

SEQ ID NO: 13079 - protein, 378 aa, Anabaena variabilis ATCC 29413
MQMNKVLINDTTLRDGEQAAGVAFSVEEKIAIAKFLDAIGVDEIEVGIPAMGKAEQEAIANIVKLNLSANLLGWNRAVISDIQASIACGLQRVHISIPVSAIQIAAKFHGQWQVVLQKLHDSISFAVDQGLFVSIGGEDSSRAEESFLLDVVLAAQEWGASRFRFCDTVGILDPFTTHAKIKQLVASLTIPVEMHTHNDFGLATANALAGIKAGALSVNTTVNGLGERAGNAALEEVVMALKHLYHHDLGIDTRRLLEISQLVVSASGHPVPPWKAIVGENTFAHESGIHAHGVLQNPQTYEPFAPEEVGRERRLVVGKHSGRHLLSSILQQHDIILNHEETQSVLDAVRQESVEKKRSLTPQELLHLVQTKQHFRAC

SEQ ID NO: 13080 - DNA, 1596 bp, Anabaena variabilis ATCC 29413
  CDS (1)..(1596): transl_table=11
atgactactaaaccagagagaattatcatttttgatacaacactccgtgacggggaacagtgtcctggtgcaacactgaatatagatgaaaagctggcgatcgccaaacagttagcccgcttaggtgtagatatcatagaggcaggtttcgcttttgctagccctggggattttgaagcagtccataaaattgcccaaactgtagggacggaaaatggcccggtaatttgcagtttggcaagagctaggcatgatgatatcaaagcggcagccgaagctattaaaccagcagctaaaggcaggattcacacctttattgctacctcagatattcacctccagtacaagctgaaaaaaaccagaccagaagtgattgcgatcgccgaagaaatggtagcttatgccaaaagtttcaccgatgatgtggaattttccccggaagatgctggacgttcagacccagaatttttgtatcaggttttagagcgagcgatcgccgccggtgcaacaacaattaacattccggataccgttggttacaccacaccaagcgaatttggggcaataattaagggcattaaagaaaatgtccccaacatcgaccaagcaattatttctgttcacggacacaatgatttaggcttggcagttgccaacttcttagaagcagttaaaaatggtgcaagacaactagaatgcaccatcaatggtattggtgaaagagcaggaaacgccgccttagaagaattggtaatggcgatgcacgtccgcagacaatactttaatcccttcttaggtagacacccagattcggaagaaccactcaccaatattgacaccaagcaaatatataaaacctcacgcttggtttctaatttaacaggaatgttagtacaacccaataaggcgatcgttggggctaacgccttcgcccatgaatcaggaattcaccaagatggagttttgaaaaacaaactcacctacgaaatcatggatgcccaattgattggcttaacagacaatcaaatagttttaggcaaacattctgggcgtaatgctttccgtacccgcttgaaagaattaggctttgaactatcagaaactgagttaaataaagccttcgtcaaattcaaagaagtcgccgataaaaagaaagaaatttctgattgggacttggaagcaattgttaatgacgaaatccagcaagcccctgatttattccgcgtagagttggtacaagtttcctgcggtagcaatgcacgtccaacagcaacagttaccctccgcaccccagacggcgaagaactcaccgacgcagccattggtacagggccagtagacgcggtatataaagcaattaaccgcgtggtcaacgtccccaaccaattaattgagttctccgtgcagtcagtaacagccgggattgatgccattggggaagtgacaattcgtttgcggtatgaatcacgagtattttccggtcatgcggccaacaccgatatcatcgtcgcctctgcacaagcctacgttaacgccctaaatcgtttatacgcatccttgcagactcaagataagcaaacagaagtaacagcataa

SEQ ID NO: 13081 - protein, 531 aa, Anabaena variabilis ATCC 29413
MTTKPERIIIFDTTLRDGEQCPGATLNIDEKLAIAKQLARLGVDIIEAGFAFASPGDFEAVHKIAQTVGTENGPVICSLARARHDDIKAAAEAIKPAAKGRIHTFIATSDIHLQYKLKKTRPEVIAIAEEMVAYAKSFTDDVEFSPEDAGRSDPEFLYQVLERAIAAGATTINIPDTVGYTTPSEFGAIIKGIKENVPNIDQAIISVHGHNDLGLAVANFLEAVKNGARQLECTINGIGERAGNAALEELVMAMHVRRQYFNPFLGRHPDSEEPLTNIDTKQIYKTSRLVSNLTGMLVQPNKAIVGANAFAHESGIHQDGVLKNKLTYEIMDAQLIGLTDNQIVLGKHSGRNAFRTRLKELGFELSETELNKAFVKFKEVADKKKEISDWDLEAIVNDEIQQAPDLFRVELVQVSCGSNARPTATVTLRTPDGEELTDAAIGTGPVDAVYKAINRVVNVPNQLIEFSVQSVTAGIDAIGEVTIRLRYESRVFSGHAANTDIIVASAQAYVNALNRLYASLQTQDKQTEVTA

SEQ ID NO: 13082 - DNA, 1134 bp, Anabaena variabilis ATCC 29413
  CDS (1)..(1134): transl_table=11
atgaataaagttctcattaatgacactacattacgtgatggcgaacaagccgcaggtgttgtttttaccttagaagagaaagtggcgatcgctaaatttctcgataccatcggcgtacccgaattagaagtggggattccggcgatgggtgaggaagaaatgcgggcgatctgcgccatttctaacttaggtttaaaagctaacctcctggcgtggaaccgcgccgtaatttcagatatcaaagcttctgttgcttgcgggatggagcgagtgcatattgcgatccctgtttccgggattcaaatcgccgcaaaattccacggacaatggcgggtaagtctgcaaagactcaaagattgtatcagcttcgcagttgatcaaggtctttgggtagcagtcgggggggaagattcctctagagctgatgaaaacttcctcttggatgtagcactatacgctcaagaatggggtgcatctcgattccgcttctgtgacacagtaggagtcctcgatcctttcaccacctacggaaaagttaagctactcgtctcagctttaacaattcctgtagaagtccatactcacaatgattttggtatggcgacagctaacgccctagcaggaattaaagctggagccgcatctgtcaatactaccgtgattggcttgggtgaaagagcaggtaacgccgccttagaagaagtcgttatggctatcaaacgcatctatggcgtagatatggggattgacacaccccgtttgttggaattgtcccaactggtagcagccgcctctggtgctaacgtaccaccttggaaggcgatcgttggtgaaaatacctttgctcacgaatcaggtattcatgcacatggtgtactgcaaaatcctgatacctatgaaccattcgcacctgaagaagtcggttgggaacgccgcttagttgtaggtaagcattctggcagacattcagtctccaacttgctagaacagcacgggatatttttgaacccagaagaaacccagtctgttttagatgcagtgcgccaacagtcagttaagaaaaaacgcagtttgactacagaagaactgttgaacttggtcaaagaacagaggtattctcatgcagcgcgatga

SEQ ID NO: 13083 - protein, 377 aa, Anabaena variabilis ATCC 29413
MNKVLINDTTLRDGEQAAGVVFTLEEKVAIAKFLDTIGVPELEVGIPAMGEEEMRAICAISNLGLKANLLAWNRAVISDIKASVACGMERVHIAIPVSGIQIAAKFHGQWRVSLQRLKDCISFAVDQGLWVAVGGEDSSRADENFLLDVALYAQEWGASRFRFCDTVGVLDPFTTYGKVKLLVSALTIPVEVHTHNDFGMATANALAGIKAGAASVNTTVIGLGERAGNAALEEVVMAIKRIYGVDMGIDTPRLLELSQLVAAASGANVPPWKAIVGENTFAHESGIHAHGVLQNPDTYEPFAPEEVGWERRLVVGKHSGRHSVSNLLEQHGIFLNPEETQSVLDAVRQQSVKKKRSLTTEELLNLVKEQRYSHAAR

SEQ ID NO: 13084 - DNA, 1119 bp, Anabaena variabilis ATCC 29413
  CDS (1)..(1119): transl_table=11
atgaacaacgtggttattcacattaacgatacaaccttgcgagatggggaacaggcggcgggtatagcctttaatgtggaagaaaaaattgcgatcgcctctctactcgattctatcggtgttcacgaattagaagttggcattcccgcaatgggacatgaagaagctgaatcgattacaaggattgccaaattaggattaaatgccaaactactcggctggaatcgggcgaatttgtcagatatccaagcatctatcgattgtggtttggatagagttcatgtttctgttcccgtctccgatattcagatagctgctaaattcaaaggacaacgacagttagtcttagataaactacgggatgcaattaattttgcctgcgatcgcggtttatctgtctccgtcggtggcgaagactcttccagagccgatgaatccttcctactagaagttgcccaatctgcccaagaatggggcgcgtttcggtttcgcttctgtgataccgtaggaattctcgaccccacaaccacctacaaaaaagttagtcatttggtatcgcacctatcaattgttatcgaaatgcacacacatgacgactttggtatggccttagcgaacaccttagccggtgtaaaagctggcgcgatatctgtgaacaccaccgtcaatggtataggtgaacgagccggaaatgcacccttagaagaagtagtgatgggactcaaatatctctacgatatacccacaggtattgataccaaacgactcgtagaagtatcaagactagtctccaaagcgactaatttccctgtacttccttggaaagcgatcgttggtgaaaatacctttgcacacgaatcagggattcatgctcatggcgtactgcaaaaccccatcacctatgaaccattcgcaccagaagacgtaggttgggaacgacgcttagtagtaggtaaacattccggtcgccatctcctactcagcgtcctggaacaacacggtatcaccctcggccaagccgaaattcaatcagtattagatgcagtccgccatcaatcagtcaaaaccaaacgcagcctcaccgttgaagaactactaagtttagttcctcaaagataa

SEQ ID NO: 13085 - protein, 372 aa, Anabaena variabilis ATCC 29413
MNNVVIHINDTTLRDGEQAAGIAFNVEEKIAIASLLDSIGVHELEVGIPAMGHEEAESITRIAKLGLNAKLLGWNRANLSDIQASIDCGLDRVHVSVPVSDIQIAAKFKGQRQLVLDKLRDAINFACDRGLSVSVGGEDSSRADESFLLEVAQSAQEWGAFRFRFCDTVGILDPTTTYKKVSHLVSHLSIVIEMHTHDDFGMALANTLAGVKAGAISVNTTVNGIGERAGNAPLEEVVMGLKYLYDIPTGIDTKRLVEVSRLVSKATNFPVLPWKAIVGENTFAHESGIHAHGVLQNPITYEPFAPEDVGWERRLVVGKHSGRHLLLSVLEQHGITLGQAEIQSVLDAVRHQSVKTKRSLTVEELLSLVPQR

SEQ ID NO: 13086 - DNA, 1590 bp, Rhodobacter sphaeroides 2.4.1
  CDS (1)..(1590): transl_table=11
atgaccgacacgaccaagaccgcctccgagcaggaccgcgtcctgattttcgacaccacgctcagggatggcgaacagtcgcccggcgcgaccatgacgcatgacgagaagctcgagatcgcggcgctgctcgacgagatgggcgtggacatcatagaggcgggcttccccatcgcctccgagggcgatttcgaggccgtctcggccatcgcgcggcagtcgaagaacgccacgatctgcggcctcgcgcgggccaactacaaggacatcgaccgctgctgggaggcggtgcgccacgcgaaatccccccgcatccacaccttcatcggcacctcgccgctgcaccgggcgatcccgaacctcgacatggaccagatggccgagcggatccacgacacggtgagccacgcccgcaacctctgcgacaatgtgcaatggtcgccgatggatgcgacgcggaccgagcacgattatctctgccgcgtggtcgagatcgcgatcaaggcgggcgccaccacgatcaacatccccgacacggtgggctacaccgccccgcgcgaaagcgccgacctgatccggatgctcgtcgagcgcgtgccgggtgcggacacgatcgtcttcgccacccactgccacaacgatctgggcatggcgacggcgaacgcgctggcggccgtcgaggcgggcgcgcggcagatcgaatgcacgatcaacggcctcggcgagcgcgcgggcaacaccgccctcgaagaggtggtgatggcgctgaaggtgcgcaacgacatcatgccgttccgcaccggcatcgatacgaccaagatcatgaacatcagccgcaaggtcgccaccgtctcgggcttcccggtgcagttcaacaaggccgtcgtcggcaagaacgccttcgcccacgagtccggcatccatcaggacgggatgctgaagaacgcccagaccttcgagatcatgcgacccgcggacgtgggcctcgccgacacgtcgctggtgatgggcaagcattcgggccgggcggcgctgcgcgccaagctcaaggatctgggctacgatctggccgacaaccagctgaacgacgtcttcgtgcggttcaaggcgctcgccgaccgcaagaaggaggtctatgacgacgacatcgtcgccctgatccaggatcaggtgacctcggccgaacatgacacgctgcagctcaagcggctgcgcgtggtctgcggcaccgacggcccgcaggaggccgagatgacgctctcggtcgagggggtggaccatgccatcgacgcgaccggcgacgggccggtggatgcggccttcaacgcggtgaagatgatctatccgcaccatgccaagctgcatctctatcaggtccatgcggtgaccgagggcaccgacgcgcaggcgacggtctcggtccggctcgaggaggacggcaagatcgccacgggtcaggccgccgacaccgacacggtggtggcgagcgtgaaggcctatgtgaacgcgctgaaccgcctgatccaccgtcgccagaagtcggcgccgggcgcggacatgaaggacgtgcattacagctcgcacgcctga

SEQ ID NO: 13087 - protein, 529 aa, Rhodobacter sphaeroides 2.4.1
MTDTTKTASEQDRVLIFDTTLRDGEQSPGATMTHDEKLEIAALLDEMGVDIIEAGFPIASEGDFEAVSAIARQSKNATICGLARANYKDIDRCWEAVRHAKSPRIHTFIGTSPLHRAIPNLDMDQMAERIHDTVSHARNLCDNVQWSPMDATRTEHDYLCRVVEIAIKAGATTINIPDTVGYTAPRESADLIRMLVERVPGADTIVFATHCHNDLGMATANALAAVEAGARQIECTINGLGERAGNTALEEVVMALKVRNDIMPFRTGIDTTKIMNISRKVATVSGFPVQFNKAVVGKNAFAHESGIHQDGMLKNAQTFEIMRPADVGLADTSLVMGKHSGRAALRAKLKDLGYDLADNQLNDVFVRFKALADRKKEVYDDDIVALIQDQVTSAEHDTLQLKRLRVVCGTDGPQEAEMTLSVEGVDHAIDATGDGPVDAAFNAVKMIYPHHAKLHLYQVHAVTEGTDAQATVSVRLEEDGKIATGQAADTDTVVASVKAYVNALNRLIHRRQKSAPGADMKDVHYSSHA

SEQ ID NO: 13088 - DNA, 1653 bp, Rhodobacter sphaeroides 2.4.1
  CDS (1)..(1653): transl_table=11
gtgacggggcagggggcggcgccggggccggtgaaggagcggctctggatctatgacacgacgctgcgcgacgggcagcagacgcagggcgtgcagttctcgacgcccgagaagcggcagatcgccgaggcgctcgaccggctcggggtggattacatcgagggcggctggccgggggccaacccgaccgactcggagttctttgcggccttgccccgcgtccgggcgcgggtgacggccttcggcatgaccaagcgcgcgggccgctcggccgagaatgacgatgtgctggccgcggtgctcgatgcgggcacggacacggtctgcctcgtcggcaagacgcacgaattccatgtgacgacggcgctcggcgtgacgctcgaggagaacctcgaggcgatccgcgcctcggtcgcgcatgtcgtggcgaaggggcgcgaggcgatcctcgatgccgagcatttcttcgacggctaccgcgccaatcccgcctatgcgctggattgcctgcaggcggcgctcggggcgggggcgcgctgggtggtgctctgcgacacgaacggcggcacgctgcccgccgaggtggggcgcatcgtggccgaggtcatcgccgcgggcgtgcccggcgaccggctggggatccacacccatgacgacacgggcaccgcggtggcggccacgcttgcggccgtcgatgccggggcgcggcaggtgcagggcacgctgaacggcttgggcgagcgctgcggcaacgcgaacctcaccacgctcatccccaccttcctgctgaaggagccctatgccagccgcttcgagaccgggatcgaccgcgaggccctgagcggcatggtgcgggtgagccggatgctcgacgacatcctgaaccgggtgccgcgccgggcctcggcctatgtcggcgcctcggccttcgcgcacaaggcggggctccatgcctcggcgatcctgaaggatcccgccacctacgaacatgtcgatcccgcgctggtgggcaacgtgcgggtgatccccatgtcgaaccaggccgggcagtcgaacctgcgggcgcggctggccgaggcggggctcgaggtgccttcgggcgatccgcggctgggccggatcctcgagacggtcaaggcgcgcgaggatcagggctatgcctacgattccgcgcaggcgagcttcgagctggtggcgcggcgagagctgggcctcctgcccagcttcttcgaggtgaagcgctaccgcgtgaccgtcgagcggcggcgggtgggcgagggcaccatgacgctctcggaagcggtggtcgtggtgctgatcgacgggcagcgcgtgctgtcggtctcggaaagcctcgacgagaacggcaccgagcgcggcccggtgaacgcgctgtcgaaggcgctggccaaggatctcggccgctggcagtcggtgatcgacgacatgcggctggtggatttcaaggtgcggatcacgcagggcggcaccgaggccgcgacccgcgtcatcatcgacagcgaggacgggcagggccggcgctggtcgacggtgggggtctcgcccaacatcgtcgatgcctcgttcgaggcgctgctcgacgcgatcaactggaagctcgtgcgcgatgcacggcaggaggacagccgatga

SEQ ID NO: 13089 - protein, 550 aa, Rhodobacter sphaeroides 2.4.1
MTGQGAAPGPVKERLWIYDTTLRDGQQTQGVQFSTPEKRQIAEALDRLGVDYIEGGWPGANPTDSEFFAALPRVRARVTAFGMTKRAGRSAENDDVLAAVLDAGTDTVCLVGKTHEFHVTTALGVTLEENLEAIRASVAHVVAKGREAILDAEHFFDGYRANPAYALDCLQAALGAGARWVVLCDTNGGTLPAEVGRIVAEVIAAGVPGDRLGIHTHDDTGTAVAATLAAVDAGARQVQGTLNGLGERCGNANLTTLIPTFLLKEPYASRFETGIDREALSGMVRVSRMLDDILNRVPRRASAYVGASAFAHKAGLHASAILKDPATYEHVDPALVGNVRVIPMSNQAGQSNLRARLAEAGLEVPSGDPRLGRILETVKAREDQGYAYDSAQASFELVARRELGLLPSFFEVKRYRVTVERRRVGEGTMTLSEAVVVVLIDGQRVLSVSESLDENGTERGPVNALSKALAKDLGRWQSVIDDMRLVDFKVRITQGGTEAATRVIIDSEDGQGRRWSTVGVSPNIVDASFEALLDAINWKLVRDARQEDSR

SEQ ID NO: 13090 - DNA, 1530 bp, Carboxydothermus hydrogenoformans Z-2901
  CDS (1)..(1530): transl_table=11
atggaaagggttaggatttttgatacgacgttaagggatggggaacagtcgccaggagttagtttaaatgctatggagaaattgcaaatcgcccggcagttacaaaagctgggcgttgatgttatagaggcaggttttcctataacttctcccggagataaggaagccgtttccttaattgcccgggaagtaaaaggggtggtagtggctgccctggcccgggcttcggctttggatatagaaacggcctgggacgccattaaagatgcggaaagtccccggattcatacttttattgccacttccgatattcatttgaaatataagctgaaaatggaccgggaaacggtagtggaacgggcggtagcagcggtcaaacttgctaaaaaatttaccgccgatgtggagttttcggcggaagatgcttcaagaagtgacctggactttttgtgccgggtggtggaagcggcggtaaaagcgggagctactaccataaacattcccgataccgttggctatgccgaaccggaagagtttggggagtttatttgcaaaattttagaaaaagttccggtaatggaccgggcggtgttaagcgttcactgtcatgatgatttgggccttgcggtggccaatagtttagctgccatcaaaaacggcgcccggcaggtggaatgtaccattaacggaattggtgaacgggctggaaactgttccttagaggagattgtaatggctctttatacccgcaaagatgtattgcctttttataccggcattaaaaccgaggagatttaccggaccagtaagctcgttagcaatttaaccgggatgccggtacagcccaacaaagcgattgtagggaaaaatgccttttcccacgaatcggggattcaccaggatggggttttaaaggaaagaactacttatgaaataatgaatcccaggctggtgggtattcccgaatcccgtctggtactgggtaaacattcgggaagacatgcgttaaaggagaggttattagagcttggttatgaattaaccgaagagcagttgaatgaggcttttgttaaatttaaagctttagccgataagaaaaaagaagttaccgatcaggatttagaagcaatgatggaagaagaaataagaaaagttcccgaaacttacaccctggattatttccatatttctaccggttcaacgattattcccacggccacggtgggcttaatcaaggaaggggaaaaattagaagacgccgccaccggcgatggaccggtggatgccatttataaagctatcaataaaataaccggtttaactccggttttagagcaatattcaattaatgccgtaacttctggcgaagatgccctgggagaagtagtggtaaaactaaaaaatggcctcgggaaaattgtcaccggtcgcggagtttccaccgatattttagaagcatcggccaaggcttatttaaatggtatcaataaattactttttgattaccaggcgaaaggggagaagcagtaa

SEQ ID NO: 13091 - protein, 509 aa, Carboxydothermus hydrogenoformans Z-2901
MERVRIFDTTLRDGEQSPGVSLNAMEKLQIARQLQKLGVDVIEAGFPITSPGDKEAVSLIAREVKGVVVAALARASALDIETAWDAIKDAESPRIHTFIATSDIHLKYKLKMDRETVVERAVAAVKLAKKFTADVEFSAEDASRSDLDFLCRVVEAAVKAGATTINIPDTVGYAEPEEFGEFICKILEKVPVMDRAVLSVHCHDDLGLAVANSLAAIKNGARQVECTINGIGERAGNCSLEEIVMALYTRKDVLPFYTGIKTEEIYRTSKLVSNLTGMPVQPNKAIVGKNAFSHESGIHQDGVLKERTTYEIMNPRLVGIPESRLVLGKHSGRHALKERLLELGYELTEEQLNEAFVKFKALADKKKEVTDQDLEAMMEEEIRKVPETYTLDYFHISTGSTIIPTATVGLIKEGEKLEDAATGDGPVDAIYKAINKITGLTPVLEQYSINAVTSGEDALGEVVVKLKNGLGKIVTGRGVSTDILEASAKAYLNGINKLLFDYQAKGEKQ

SEQ ID NO: 13092 - DNA, 1572 bp, Carboxydothermus hydrogenoformans Z-2901
  CDS (1)..(1572): transl_table=11
atgaaggtttacctttatgatactactttaagggatggagctcaggcggaagggataaattataccgtttccgataaattaaaaattgccaggaaattaattgcctttggcattgattatttagaaggtgggtggccgggagcaaatcctaaagatttagagtttttccaggaagccaaaaagcttgattttaataaaactaagcttgcggcttttggttcaacccgccatccaaggctaaaagttaaggacgaccctaaccttctgaacctgataaaaagtgaagccccggtagttacggtatttggtaaatcatgggacttgcatgtagagagtgctctggctacaaccctggaaaacaaccttttaatggtgtacgaaacggttgcctttttaaaagaggttgggcgggaagtggtttttgatgcggaacatttttttgacggttttaaaaataatcccgagtatgctctcaaagttatcgaacaggccgccagggctggagccgatttcatagtattatgtgataccaacggtggaagtttgcccaaagagattcgggccggggtggaagcagctttaaaaattcacccccgtatcggtattcacgctcataacgattcggaactggcggtggccaacagtttaatagcggtggaaacgggagctactatggttcaggggacgattaacggctatggagaacggtgcggtaatgccaacctctgttccgtaattcctaaccttattttaaaaatgggagtggaggtaaattgtcaggataatttaaaaaacctgacccggctttcccgttatgtatcggagatagccaacctccatcccaatccctatcagccgtataccgggcagagcgcctttacccataaaggcggggttcatgccagtgcgctcttaaaggataagggtacttatgagcatattccgccggaactggtaggcaaccaccggaaagtttccatttccgaccaagccggagtttcaaaccttctttttaacagtgagaacctggggctatcggaagaagaggtaaaaacctatggtaaagaactggtggcggcaattaaggcgatggagcaccagggctaccagtttgaaggggccgaagcttctttggagcttttggttcgaaaagttacgggaaagctttcggaaccgtttaaaattgacaactccaagctgatcattgaaatcaaggaagatggccgggtcttatccgaagcggtggttaaagtccgggtgggggataccaccattcataccgcttccgatggcaacggtccggttaacgctttagataatgccttaaggaaagctcttttagaaatataccccaatctttcggagcttaagcttaccgactataaggtccgggtcttaaacgaaaaagccgggacggaggcggtggtgcgggtgttaattgaatcgtcagctggcgagaaaagtatcaacaccgtgggagtttccaccaatatcattgaagccagtttaaaagccctgaccgacagcttgatttactttttaatcaataacaatgaagggactgtttcttaa

SEQ ID NO: 13093 - protein, 523 aa, Carboxydothermus hydrogenoformans Z-2901
MKVYLYDTTLRDGAQAEGINYTVSDKLKIARKLIAFGIDYLEGGWPGANPKDLEFFQEAKKLDFNKTKLAAFGSTRHPRLKVKDDPNLLNLIKSEAPVVTVFGKSWDLHVESALATTLENNLLMVYETVAFLKEVGREVVFDAEHFFDGFKNNPEYALKVIEQAARAGADFIVLCDTNGGSLPKEIRAGVEAALKIHPRIGIHAHNDSELAVANSLIAVETGATMVQGTINGYGERCGNANLCSVIPNLILKMGVEVNCQDNLKNLTRLSRYVSEIANLHPNPYQPYTGQSAFTHKGGVHASALLKDKGTYEHIPPELVGNHRKVSISDQAGVSNLLFNSENLGLSEEEVKTYGKELVAAIKAMEHQGYQFEGAEASLELLVRKVTGKLSEPFKIDNSKLIIEIKEDGRVLSEAVVKVRVGDTTIHTASDGNGPVNALDNALRKALLEIYPNLSELKLTDYKVRVLNEKAGTEAVVRVLIESSAGEKSINTVGVSTNIIEASLKALTDSLIYFLINNNEGTVS

SEQ ID NO: 13094 - DNA, 1143 bp, Carboxydothermus hydrogenoformans Z-2901
  CDS (1)..(1143): transl_table=11
gtgaaattaaaagataaaccaatttatatcgttgatacgaccctaagagatggagaacaaaccgcaggagtagtttttgcaaataaggaaaaaattcgaattgcccagatgctggatgaacttggtgttgaccagattgaggccggtattcccacgatgggtggcgatgaaaaagaggcaattaccgccatctgtaaacttggactaaaagccagtatcatgggctggaaccgtccggtaattaaagatattgaagagtcgctgcgctgcggggtagatgcggttgctatatctatttctacctcggatatccatattgaacataaactccgggcctcccgggaatgggttattgaaaatatggttaaagcctgcgagtttgctaaaaaagaaggtttgtacgtttcggtgaacgctgaggatgccagccgctccgacatggaatttttagtgcagtttggtttggcggcgaaacaagcgggagccgaccgtttaagatattgcgataccgtgggtatccttgatccctttactacttatgaaagggtcaaggaattgcgggaaagagtaggtattgaaattgaaatgcatacccacaacgactttggcatggccacggccaatgctttagccggggttaaagccggagctaagtttgtaggggttacggttattggccttggagagcgggccggaaacgctgctttagaagaagtggtaatggccttaaaacatatttacggtatcgatcttggctttaagaccgagcttttccgggaagttgctctttatgtttccaaggcttccggccgggaacttcccgcctggaaagctattgtgggttccaacatgtttgcccacgaatcgggaatccatgccgatggagcgttaaagaatcctaaaacctacgaggctttccagcccgaagaagtgggtctggagcgacaaattgttatcggtaagcactccggttcggcagcgttaaaagcgaaatttgccgagtacggaattcacttaaccgatgaacaggcagcagagcttctaccccatgtccgggcccatgcggtggaattaaaacggtctttgtttgataaagagcttgttttaatctacgaagaacatttcggaaagcggggaatgtag

SEQ ID NO: 13095 - protein, 380 aa, Carboxydothermus hydrogenoformans Z-2901
MKLKDKPIYIVDTTLRDGEQTAGVVFANKEKIRIAQMLDELGVDQIEAGIPTMGGDEKEAITAICKLGLKASIMGWNRPVIKDIEESLRCGVDAVAISISTSDIHIEHKLRASREWVIENMVKACEFAKKEGLYVSVNAEDASRSDMEFLVQFGLAAKQAGADRLRYCDTVGILDPFTTYERVKELRERVGIEIEMHTHNDFGMATANALAGVKAGAKFVGVTVIGLGERAGNAALEEVVMALKHIYGIDLGFKTELFREVALYVSKASGRELPAWKAIVGSNMFAHESGIHADGALKNPKTYEAFQPEEVGLERQIVIGKHSGSAALKAKFAEYGIHLTDEQAAELLPHVRAHAVELKRSLFDKELVLIYEEHFGKRGM

SEQ ID NO: 13096 - DNA, 1623 bp, Synechococcus sp. CC9605
  CDS (1)..(1623): transl_table=11
atggccaaggaccccggtcgcgtcctgatttttgacaccaccctgcgggatggtgagcagtcgcccggggcgagcctcaacctggaggaaaaactggccatcgcccagcagctggctcggctcggcgttgatgtgattgaggcgggattccccttcgccagtcccggggatttcgccgccgtgcagcggatcgcccagcaggtgggtggcgacaacggcccgatcatctgcggcctggcccgtgcctcaagggccgacatcaaagcctgcgctgatgccgtggccccggcaccgcggcgccgcattcacaccttcatcgccaccagcgacatccacctcgagcacaagctgcgcaagagccgcggcgacgtgctcggcatcgttcccgagatggtgagctacgcccgttctctggtggaagacgttgagttctcctgtgaagacgccggccgcagcgacccggagttcctttatgaggtgattgaggcggcgattgctgccggcgccaccacgatcaacattcccgacaccgtcggctacacgacaccgtcggagttcggcgcgctgatcgcaggcatcaatcagcacgtgcccaacatcggcgaggcggtgatatcggtgcacggccacaacgatctcggcctggccgtggcgaacttcctggaggcggtcaagaacggtgctcgtcagctcgaatgcacgatcaatggcatcggcgaacgggccggcaatgcctcgctcgaggagttggtgatggcgctgcatgtgcggcggcgttactacaaccccttctttggccgggaggaagacagccccacgccgctcactgccgtgcgcactgaagagatcaccaagacctcacggctggtgtccaaccttaccggcatggtggtgcagcccaacaaggccatcgttggtgccaatgccttcgcccatgaatccggcatccaccaggacggcgttctcaagaaccggcttacctacgaaatcattgatgcccagaccgtgggcttgtccgacaaccgcatctccctcggcaagctgagcggccgcagtgccgttcgcgcccgtctggaggaactgggctacgacctcacccgtgaggatctcgatgaggccttcgcccgcttcaaggaactcgccgaccgcaagcgcgagatcactgaccgtgatctggaggcgatcgtcagcgaacaggtgcagcagccggaagcccgcttccagctcaagctggtgcaagtgagctgcggcagcagcctgcgccccaccgccaccgtcacccttttggatgaagagggcagtgagaccacaggctcggcggtgggcaccggtccggtggatgccgtctgccgtgccttgaatgatctggcgggtgtgcccaatgagttgatcgagttctcggtcaagtcggtcaccgagggcattgatgccatgggcgatgtgaccatccgcctgcgccgcaatggtgcgctctactccggtcacgcagccgacaccgatgtggtggtggcggcggggatggccttcgtgaatgccctcaatcgcctggtggctggcgaggagcgccagtcattgcatccgcagaaggatcctgttgttctggagagccgaccgacgctctag

SEQ ID NO: 13097 - protein, 540 aa, Synechococcus sp. CC9605
MAKDPGRVLIFDTTLRDGEQSPGASLNLEEKLAIAQQLARLGVDVIEAGFPFASPGDFAAVQRIAQQVGGDNGPIICGLARASRADIKACADAVAPAPRRRIHTFIATSDIHLEHKLRKSRGDVLGIVPEMVSYARSLVEDVEFSCEDAGRSDPEFLYEVIEAAIAAGATTINIPDTVGYTTPSEFGALIAGINQHVPNIGEAVISVHGHNDLGLAVANFLEAVKNGARQLECTINGIGERAGNASLEELVMALHVRRRYYNPFFGREEDSPTPLTAVRTEEITKTSRLVSNLTGMVVQPNKAIVGANAFAHESGIHQDGVLKNRLTYEIIDAQTVGLSDNRISLGKLSGRSAVRARLEELGYDLTREDLDEAFARFKELADRKREITDRDLEAIVSEQVQQPEARFQLKLVQVSCGSSLRPTATVTLLDEEGSETTGSAVGTGPVDAVCRALNDLAGVPNELIEFSVKSVTEGIDAMGDVTIRLRRNGALYSGHAADTDVVVAAGMAFVNALNRLVAGEERQSLHPQKDPVVLESRPTL

SEQ ID NO: 13098 - DNA, 1524 bp, Desulfovibrio desulfuricans G20
  CDS (1)..(1524): transl_table=11
atggctgacagattgtacattttcgacaccacgttgcgcgacggcgaacagtcgcccggcgccaccatgaacattcatgaaaaggtgcagctggcccgccagctggaaatggtcggtgtggacattatggaggccggctttccggctgccagcaaaggcgactttgaagctgtgaaaaccatagccgccaccgtgaaaaatgcacaggtcgccggtctgtgccgcgccgtgcagcccgacatcgaccacgcatgggcagccatcagaaacgcagcacatccgcgtattcacacctttatcgccacctcgccggtgcatatgcagtacaaactgcgcaaatcgcccgaacaggtgctggaaatggcgcgcgacgcagtgcggtatgccgcaggcctgtgctccaatgtggaattcagcgccgaagacgcatcgcgttccgactgggattttcttacccgcgttgtggaaaccgccattgacgccggtgccaccaccatcaacattcccgacaccgtgggctatgcacaaccggacgaattcggcgcactggtgcgttatgtcatggaaaacgcgcgcaacagccacaaggccgtcttttccgtccactgccacaacgacctcggtctggcggtggccaacacgctggccgcgctcaaagcaggtgcacggcaggcagaggtcaccgtatcaggcataggcgaacgtgccggcaacgccgcgctggaagaacttgtcatggccctgcggacacggcatgcttactacgacatggaaacaggaataaagtcagagcagcttttccctgcctgccgcctgctttccatgatcatcgggcagcccatacccgccaacaaagccattgtaggggccaacgcctttgcgcacgagtcaggcatccatcaggacggcatgctgaaaaaccgcgagacatacgaaataatgacgccggaatccgtgggtcgcaccaagacggaaatcgttctgggcaagcactcgggccgcaacgccatcaacggcaagcttgaagagctcggctaccgcctgactccggaacagacccagctggtgttcgatgccgtaaagaagctcgccgacaggaaaaaacagatctacgacgaagatatggaagcgctggtgcttgaagaggtgttccgcatacccgacatgttccggcttgtgcacctcagcgtgcaggccagcgatacgggagttcccccttccgccgccattgtcatggaagtgggcggcgaacgccgccagcacaccaccttcggcgtgggtcccattgacgcggtattcaatgccatatcacagatagtgggacgtgccccgcagctgcggcattattcggtcaacgccatcaccggcggcaccgacgcgcagggcgaggtaacagtcaagctgcaggaaaacggcagtgccgcggtaggccgcggtgccgatgctgatatcatcacagccagtgcaaaagcgtatctcaatgcgctgaacaggcttgccaaaaaagaacaggaggacaaatag

SEQ ID NO: 13099 - protein, 507 aa, Desulfovibrio desulfuricans G20
MADRLYIFDTTLRDGEQSPGATMNIHEKVQLARQLEMVGVDIMEAGFPAASKGDFEAVKTIAATVKNAQVAGLCRAVQPDIDHAWAAIRNAAHPRIHTFIATSPVHMQYKLRKSPEQVLEMARDAVRYAAGLCSNVEFSAEDASRSDWDFLTRVVETAIDAGATTINIPDTVGYAQPDEFGALVRYVMENARNSHKAVFSVHCHNDLGLAVANTLAALKAGARQAEVTVSGIGERAGNAALEELVMALRTRHAYYDMETGIKSEQLFPACRLLSMIIGQPIPANKAIVGANAFAHESGIHQDGMLKNRETYEIMTPESVGRTKTEIVLGKHSGRNAINGKLEELGYRLTPEQTQLVFDAVKKLADRKKQIYDEDMEALVLEEVFRIPDMFRLVHLSVQASDTGVPPSAAIVMEVGGERRQHTTFGVGPIDAVFNAISQIVGRAPQLRHYSVNAITGGTDAQGEVTVKLQENGSAAVGRGADADIITASAKAYLNALNRLAKKEQEDK

SEQ ID NO: 13100 - DNA, 1623 bp, Synechococcus elongatus PCC 7942
  CDS (1)..(1623): transl_table=11
atggccagcgcaagctcgaacgaccggattctcattttcgataccacgctccgggatggcgaacagtcacctggtgcaagcctaaacctagaagagaaactggcgatcgcgcgtcaactggctcgactgaatgtcgacattattgaggccggttttgcctttgctagtcccggtgattttgaagcggtgcagcgcattgccgctgaagtcggcacaccggatggccccacgatttgtagtttggcgcgggcaactcgtcaggatatcaaagcagcggctgaagccttggcaccggcagccaaaggccgcattcacacctttatcgccacttccgacatccacctcgagtacaagctcaagaaaactcgggctgaggttttggcggtcatccccgagatggttggctatgccgcttccttggtcgatgacgtcgaattttcgccggaagatgcggggcgatcggatcctgaattcctctatgagtgtttggaagcggcgatcgcggcaggggccaaaacgatcaatattcccgacaccgtcggctacacgactcctagcgagtttggagccttgattggcggcattaaacagaatgtctgcaacattgatcaggcaatcatttccgtccatggtcacaacgacttaggccttgctgtcgccaacttcctagaagcggtcaaaaacggcgcgcgccagctggaatgtacgatcaacggcattggcgaacgagctggtaatgcggctctagaagagctggtgatggccctgcatgtgcgtcgccaatacttcaatccgttcttgggacgcgctgcagattcagaagcacccctaacccaagtcaacactcgcgaaatctacaaaacctcgcgcttggtctcgaatctgactgggatgttggtgcagccgaataaagcgatcgtgggggccaatgcctttgcacatgaatcgggtattcaccaagacggcgtcctcaaaaataagctgacctacgaaatcgtcgacgccgaaacgattggcctaagtaccaatcgcattaccctcggtaagctgtcggggcgcaatgccttccgtacccgtttgcaggagttgggctacgaccttggcgaggacgacttgaaccgagctttcctgcgcttcaaggaactagccgataaaaagcgggaagtcaccgatcgcgacttggaagcgatcgtcaatgacgaaacccagcaagcacccgagctgttcaagctggaattggtgcaggtttcagcgggcgatcatgcgcgtcccaccgccaccgtcaccctacgcactcccgaaggggaagaactgactgacgcagcgatcggtacggggccggttgatgcgatttatcgagccatcaatcgtgtggtgaacatcccgaatgagctgatcgagttttcggtcaagtctgtcacagcagggattgatgcgatcggcgaggtcacgattcgtctgcgtcatgaagaccggattttctctggacattcggctaataccgacatcctcgtagcctcggcccaagcctatattcacgctctcaaccggcttgccgaagcgttgcagaaggataagcccttgcatccgcaagaaccgattgtcgctggtatgggtcgttag

SEQ ID NO: 13101 - protein, 540 aa, Synechococcus elongatus PCC 7942
MASASSNDRILIFDTTLRDGEQSPGASLNLEEKLAIARQLARLNVDIIEAGFAFASPGDFEAVQRIAAEVGTPDGPTICSLARATRQDIKAAAEALAPAAKGRIHTFIATSDIHLEYKLKKTRAEVLAVIPEMVGYAASLVDDVEFSPEDAGRSDPEFLYECLEAAIAAGAKTINIPDTVGYTTPSEFGALIGGIKQNVCNIDQAIISVHGHNDLGLAVANFLEAVKNGARQLECTINGIGERAGNAALEELVMALHVRRQYFNPFLGRAADSEAPLTQVNTREIYKTSRLVSNLTGMLVQPNKAIVGANAFAHESGIHQDGVLKNKLTYEIVDAETIGLSTNRITLGKLSGRNAFRTRLQELGYDLGEDDLNRAFLRFKELADKKREVTDRDLEAIVNDETQQAPELFKLELVQVSAGDHARPTATVTLRTPEGEELTDAAIGTGPVDAIYRAINRVVNIPNELIEFSVKSVTAGIDAIGEVTIRLRHEDRIFSGHSANTDILVASAQAYIHALNRLAEALQKDKPLHPQEPIVAGMGR

SEQ ID NO: 13102 - DNA, 1602 bp, Rhodospirillum rubrum ATCC 11170
  CDS (1)..(1602): transl_table=11
atgagcgataagcgcgtctatctttatgacagcaccctgcgcgatggggcgcagacccaaggtgtggatttctcggccaccgacaaggccgcgatcgcccgcgagttggatgccctgggcattgactatgtcgaaggcggctggcccggcgccaatccgaccgatgacgccttgttcgccaacccgccggttttgcggcgggcccgcctatcggcctttggcatgacccggcgttcggggcgcagcgccgaaaacgatcccagcctgcaggcgctgttctgtccgggggtgcgggtggtgaccatggtcggcaagacctgggatttccagtgcgaggtggcgatcggcgtgcctttggatgaaaaccgcaagatgatcgccgacagcatcgcccatgccgccgcccgtgtcgaagaagcggtgtttgacgccgagcatttcttcgacggctataaaagcaatcccgactatgccttatcgtgcgtgcgcgccgcctatgaggccggggcgcgctgggtggtgctgtgcgacaccaacggcggaacgctgccccatcagatcgaggcgatcgtcggcgccgtcgccgccgtcattcccggcgatcacctgggcatccattgccacaacgacaccgagaacgccgtggccaatagtctggccgccgtgcgcgccggcgcccgtcaggtccaaggcacgttgaacggcctgggcgagcgctgcggcaacgccaatctggtcagcatcattcccaatctgatgctgaagatgggctttgaaaccggggtgtccgagcacgacctgcgccatctgacccatgtgtcgcgcatgctcgacgagcggctgaaccgggcgcccaaccgcaatgccgccttcgtcggcgacagcgcctttgcccataaggggggcttgcatgtttcggcggtggaacgcgatccgcgctgttacgagcatatcgcccccgaaaccgtcggcaacgcccgccagatcctggtgtcgaaccagtccgggcggtccaatgtcatcgcccgtttccgcgagatcggtctggagatcgatcccggcgagcccaaggttaacgacctgcttgacgcggtgaagcgccgtgaatccgagggctacgcctatgacggcgccgaggccagtttcgagctgctggcccgccgggcgctggagggcgtgccggaatatttccgcctcaacagcttccgggtgatcgacgaacggcgctggaacgcgcgcggtcagttgatcacgctgtcggaagccaccatcaaggcggtggtccaggggcgcgactatatgaccgtggccgagggcaacggcccgatcaacgccttggacgcggcgctgcgcaaggttttgctgccggtctatccgcagctggcggatttgcggctggtcgattacaaggtgcgtatccttacccccgatgacgccacggcggccatcacccgggtgatgatcgaaagtgcggattcaaagggcgggcggtggaacaccgtcggggtgtcgggcaatatcatcgacgcctcttataacgccttgcacgattccttgacctataagctcttcaagggcgaacaggcatcgcgagcggcttga

SEQ ID NO: 13103 - protein, 533 aa, Rhodospirillum rubrum ATCC 11170
MSDKRVYLYDSTLRDGAQTQGVDFSATDKAAIARELDALGIDYVEGGWPGANPTDDALFANPPVLRRARLSAFGMTRRSGRSAENDPSLQALFCPGVRVVTMVGKTWDFQCEVAIGVPLDENRKMIADSIAHAAARVEEAVFDAEHFFDGYKSNPDYALSCVRAAYEAGARWVVLCDTNGGTLPHQIEAIVGAVAAVIPGDHLGIHCHNDTENAVANSLAAVRAGARQVQGTLNGLGERCGNANLVSIIPNLMLKMGFETGVSEHDLRHLTHVSRMLDERLNRAPNRNAAFVGDSAFAHKGGLHVSAVERDPRCYEHIAPETVGNARQILVSNQSGRSNVIARFREIGLEIDPGEPKVNDLLDAVKRRESEGYAYDGAEASFELLARRALEGVPEYFRLNSFRVIDERRWNARGQLITLSEATIKAVVQGRDYMTVAEGNGPINALDAALRKVLLPVYPQLADLRLVDYKVRILTPDDATAAITRVMIESADSKGGRWNTVGVSGNIIDASYNALHDSLTYKLFKGEQASRAA

SEQ ID NO: 13104 - DNA, 1179 bp, Rhodospirillum rubrum ATCC 11170
  CDS (1)..(1179): transl_table=11
atggattggtcatcggtcatcgtcaacgataccacgctgcgcgacggcgagcagaccgccggggtgatcttcaccctgggcgaaaaggtggcgatcgccaaggccctggagcgcgccggcgtgcccgagatggaagtcggcatcccggccatggggcccgaggagcaggagtcgatccgcgccgtcgtcgcccaatgcgaggccagccggccgatcgcctggtgccgcatgcatatgaccgaccttgacgcggcggcggcctgcggcgtcgatatggtcaatctgtcgatcccggtttccgaccagcagatcaagggcaagctgggccgcgatcgcggctgggtgctcgcccatctggagaccatgatcaagaccgccctggaaaaggggctggaggtcgccctgggcggcgaggattccagccgcgccgatcccgagttcctgcttcgggtgatcgaacgcgccgaagccagcggcgcccggcgcttccgcttcgccgataccctggggatcatggatcccttcaccaccttgcagatgttcaagcgcctgcgcgccgccagcggcctggaactggaaatccatgcccacgatgatctggggctggcgacggcgaattccctgggcgccgtgcttggcggggccacccatgtttcgaccaccgtcaatggcctgggcgagcgggccggcaacgccccccttgaagaggtggtgatggcctgccgcaatctgtatggccgccataccggcatcgcgccgatggccctggcggcggtctccaaactggtggccgaggcctcggggcggccggttccggcgaacaagccgatcgtcggcgaggcgatcttcacccatgaatcggggatccatgtcagcggcctgctgcgcgatcccaagaattacgaggcgttgtcccccgccgatctcgggcgttgccatcgtctggttctgggcaagcattcgggcgtcgccagcatcgttcacgcctgcaacgccctggggctggcccccggagaggcccaggcgcgggccatgctggcgcgcgtccgcctccatgccggggcgaccaagcgcccgccgacggacgccgatctgcgccgcttcttcgacgaaacccgctcggtggccgaggccatcgaaacccttgatttcagccgcccgccccaggcggcgagctga

SEQ ID NO: 13105 - protein, 392 aa, Rhodospirillum rubrum ATCC 11170
MDWSSVIVNDTTLRDGEQTAGVIFTLGEKVAIAKALERAGVPEMEVGIPAMGPEEQESIRAVVAQCEASRPIAWCRMHMTDLDAAAACGVDMVNLSIPVSDQQIKGKLGRDRGWVLAHLETMIKTALEKGLEVALGGEDSSRADPEFLLRVIERAEASGARRFRFADTLGIMDPFTTLQMFKRLRAASGLELEIHAHDDLGLATANSLGAVLGGATHVSTTVNGLGERAGNAPLEEVVMACRNLYGRHTGIAPMALAAVSKLVAEASGRPVPANKPIVGEAIFTHESGIHVSGLLRDPKNYEALSPADLGRCHRLVLGKHSGVASIVHACNALGLAPGEAQARAMLARVRLHAGATKRPPTDADLRRFFDETRSVAEAIETLDFSRPPQAAS

SEQ ID NO: 13106 - DNA, 1554 bp, Moorella thermoacetica ATCC 39073
  CDS (1)..(1554): transl_table=11
ttggcagataccggcaagcggatttatattttcgacacgacactgcgtgacggcgaacagtcgccgggggtaagcctcaatatccaggaaaagctggagattgcccgccagctggcccgcctgggggtcgatgttattgaagccggctttcccatcgcctcccccggggactttgaggccgtccgggccgtggctcgagaggtggagggaccggtcatcgccggcctggcccggattaacgaacgggatatcgaccgcgcctgggaggccctccaggaggcccaaaagccgcggatccacgtctttattgccacctccgatatccacctgaaatacaaactgcggatgagccggcaggaggtcctggaggctgtccggcggggagtggcccgggccaagggttactgccaggatattgagttttctccggaggatgctgtccggagcgacctggacttcctctgccaggtcctggccacggccattgaggccggggctaccgttcttaatatcccggataccgtgggctacgctaccccggaggagttcggccgtctgatcagccagatccggcagcgggtgccgggtattgataaagtccggatcagcgttcactgccataacgatctgggcctggccgtggccaactccctggcggccattgagaacggcgccctgcaggtcgagggggccatcaatggcattggcgaaagggctggaaatgccgccctggaggaagtgattatggccctttatacccggcgggattactacggctgccggacgggcatcgtcaccgaggagatctaccgcaccagcaaactggtcagtagcttgacgggtatgcccgtccagtacaataaagccattgtcggcaagaacgccttcacccatgaggccggcattcaccaggacggggtcttaaaagagcggactacctacgaaatcatgaatccggccatgatcggcctggtccagaataatattttcctgggcaagcactccggccgccacgccctgcgtagccgcctggaggaactgggctttaagctcacggaggccgagctggataaggccttcgcccgcttcaaagaactggccgaccgcaagaaagaaatcagcgaccgcgacctggaggccattgtcgagcacgaagtcaagcgcatcccggagaagtttgttctagagcatattcatatctccaccggcaaccgggttgtacccacagccaccatcggtatccgggtgggtgaagaattaaaggaagaggccgcctgcggtgaaggcccggtagacgccgccttcaaggccatagataagctgacccgcatcccggtttgcctcaaatcttacaatctcaatgccgtcaccggcggcaaggacgccgtcggtgaggtaacggtaaagattgagtacgatgggcgggtcttcataggtcgcggtatcagcaccgatgtcctggaagccagtgcccgcgcttacttgaacgccatcaataaggtggtttacgaggtaggggaagaaaacctgcagcaggccagtacggcccagtag

SEQ ID NO: 13107 - protein, 517 aa, Moorella thermoacetica ATCC 39073
MADTGKRIYIFDTTLRDGEQSPGVSLNIQEKLEIARQLARLGVDVIEAGFPIASPGDFEAVRAVAREVEGPVIAGLARINERDIDRAWEALQEAQKPRIHVFIATSDIHLKYKLRMSRQEVLEAVRRGVARAKGYCQDIEFSPEDAVRSDLDFLCQVLATAIEAGATVLNIPDTVGYATPEEFGRLISQIRQRVPGIDKVRISVHCHNDLGLAVANSLAAIENGALQVEGAINGIGERAGNAALEEVIMALYTRRDYYGCRTGIVTEEIYRTSKLVSSLTGMPVQYNKAIVGKNAFTHEAGIHQDGVLKERTTYEIMNPAMIGLVQNNIFLGKHSGRHALRSRLEELGFKLTEAELDKAFARFKELADRKKEISDRDLEAIVEHEVKRIPEKFVLEHIHISTGNRVVPTATIGIRVGEELKEEAACGEGPVDAAFKAIDKLTRIPVCLKSYNLNAVTGGKDAVGEVTVKIEYDGRVFIGRGISTDVLEASARAYLNAINKVVYEVGEENLQQASTAQ

SEQ ID NO: 13108 - DNA, 1599 bp, Syntrophus aciditrophicus SB
  CDS (1)..(1599): transl_table=11
atgactgaccggacagatgttttaatttatgatactaccctcagggacggcacccagggtgaaaagatcaatttttccgcagaagagaaagtgcgcatcgcccagcggcttgacgaaatgggctttcattacatcgaaggcgggtggccgggttccaatcccaaggacatgcgatttttcgaacttgggaaacacattccgttcaagaacgcacggctgacggcgtttggcagcacccgcagacccaatatcaaagtggaaaactgtgcaaatatccagacactgctggcggctgagacaccggccgttacaattttcggtaaatcctgggatcttcatgtcaccgatattctgacaattcctctggaagaaaacctggccatgatccatgagtccattgcatatctgaaggcgaacggcaaggaagtcatctatgacgcggagcactttttcgatggctacaagaaaaaccgtttctatgcgcttcagacgattgaaacggcatggaaggctggtgctgattttatcgtcctctgtgataccaacggaggaacgataccacatgaattgacggtaatcgtggaatatgtccgaagtttccttccagatgccccactgggcattcatgttcacaacgatggagaccttgctgtggctaactccattgccgccgtttctgccggcgcaaccatggtccagggcactatcaacggatatggcgagcgatgcggtaatgctgatcttattcccatcatcgccaatctccagcttaaaatgaaccggtggtgtctgccagacaactcgatccggcaactgaccaatctgtcgtattacatcagcgatgtggccaacattccgccgcagaattcaaggccctttgtagggcgcagtgcctttacccataaaggaggcgttcatgtcagcgcgatccttaaaaatcctgcggcatacgagcacatcaggccggaacttgtgggcaatgagcagcgcgtcctggtttctgatctctccggcaagagcaatatcgaatataaagcccgggaactcggaatcgatttggggaccgaagacgccatcagcaccctgatcgttcagaagatcaagatcatggaagacgaaggctatcaattcgacgctgcggacggatccctgtccctgctgatcaagaagatcaccggagaatttaaggaacctttcgtgctagagtgtttccatgttatcaatgccaaaacgaaaaacaacccttccctctcccaggcaacgatcaagatcgtcgtggggaatgaagaggaactgaccgccgcggaaggcaacggccccgtcaacgccctggacaatgccctgcgcaaagccctggtgaaattctacccgcagataagcgaagttcaccttgtggatttcaaggttagaactctggagggcgctgatggaacagccgccaaagtgagggttttactggactcgaaggacaacgaggatgtctggagcacgatcggcgtttccacaaatgtaattgaagcaagctggcacgccctggtggacagcattcagtacaagctctgcaaagataaaattaacaagcaccatgtgggagaataa

SEQ ID NO: 13109 - protein, 532 aa, Syntrophus aciditrophicus SB
MTDRTDVLIYDTTLRDGTQGEKINFSAEEKVRIAQRLDEMGFHYIEGGWPGSNPKDMRFFELGKHIPFKNARLTAFGSTRRPNIKVENCANIQTLLAAETPAVTIFGKSWDLHVTDILTIPLEENLAMIHESIAYLKANGKEVIYDAEHFFDGYKKNRFYALQTIETAWKAGADFIVLCDTNGGTIPHELTVIVEYVRSFLPDAPLGIHVHNDGDLAVANSIAAVSAGATMVQGTINGYGERCGNADLIPIIANLQLKMNRWCLPDNSIRQLTNLSYYISDVANIPPQNSRPFVGRSAFTHKGGVHVSAILKNPAAYEHIRPELVGNEQRVLVSDLSGKSNIEYKARELGIDLGTEDAISTLIVQKIKIMEDEGYQFDAADGSLSLLIKKITGEFKEPFVLECFHVINAKTKNNPSLSQATIKIVVGNEEELTAAEGNGPVNALDNALRKALVKFYPQISEVHLVDFKVRTLEGADGTAAKVRVLLDSKDNEDVWSTIGVSTNVIEASWHALVDSIQYKLCKDKINKHHVGE

SEQ ID NO: 13110 - DNA, 1215 bp, Desulfitobacterium hafniense Y51
  CDS (1)..(1215): transl_table=11
gtgaacggaaagtggtggacgaaggattggtgggtaagcgaatacaattaccacgaagaagtagtcaaggatttgcaccttccccaaaagattgagatacacgacgcgacgctgcgggatggggaacagactcccggcgtggtgttcagcaaagaggataaagtaagaattgcggaattgctggccgaagtgggagttgaccgggttgaggccggcatgccggcggtatccaaagatgatgcccaagcgattgaggagatcgccaaacgcaatttgggacccaagattatggtattctgccgggcgatgcgggaggatgtggatcgggccgtggattgcggagcaaatgggatcgttctggaagcgcccagcggctatccgaagcttaaatatcaatttgccagtaagtggacggaagaaagcctgaccgaagccgtcatcaataccatcaattacgccaaggaaaaggggctgtttgtcaactatttcccctttgatacgaccagagcggaacttccttttctcaagaggcttctgaccaatgtaacaactcaagccaaaccggattcggtaacggtggtcgataccacaggttcgatcactcccaccgccatgcgttttctggtcaggcaggtcagggaaaccatcgctctgcccctggaagttcatacccacaacgatttcgggctgggcacagccacgaccttcgccgcggtggaggaaggtgtgcaggtcgtgcacagctgcatcaacggtctgggcgagcggaccggaaatactgctctggaagagatagctctgggcttaaagctgctctatggcatagagctgcccaaattcaacttccagaaactgagtgagctttcccaggaagtgcaaaggatgtccggcaagaccctggcccaaaacaagccggtggtcgggctgctgccttttacccgggagattggcttgggaatgaaagttctggaagattacccgacggctgttttcccatttatgccggattttgtgggccaaaaaatgaaaatcgtcatgggcaagaagagcggcaaggaatctgttctgatgaagcttgaaggggcaggattaaaggccaatgaagagcaggtacaggaaattgttgcgcgcaccaaagctgccgggatcgccaaacgcaactggcttgaagacgaggagttcttggtgatcgcacgccaggtattggaccgttaa

SEQ ID NO: 13111 - protein, 404 aa, Desulfitobacterium hafniense Y51
MNGKWWTKDWWVSEYNYHEEVVKDLHLPQKIEIHDATLRDGEQTPGVVFSKEDKVRIAELLAEVGVDRVEAGMPAVSKDDAQAIEEIAKRNLGPKIMVFCRAMREDVDRAVDCGANGIVLEAPSGYPKLKYQFASKWTEESLTEAVINTINYAKEKGLFVNYFPFDTTRAELPFLKRLLTNVTTQAKPDSVTVVDTTGSITPTAMRFLVRQVRETIALPLEVHTHNDFGLGTATTFAAVEEGVQVVHSCINGLGERTGNTALEEIALGLKLLYGIELPKFNFQKLSELSQEVQRMSGKTLAQNKPVVGLLPFTREIGLGMKVLEDYPTAVFPFMPDFVGQKMKIVMGKKSGKESVLMKLEGAGLKANEEQVQEIVARTKAAGIAKRNWLEDEEFLVIARQVLDR

SEQ ID NO: 13112 - DNA, 1164 bp, Desulfitobacterium hafniense Y51
  CDS (1)..(1164): transl_table=11
gtggaggaaagaaaattaaccatcgtggacacgacattgcgggatggagaacagaccgcaggagtagtattttctaatcaggagaagctgatgattgcccggatgctggatgatctcggtgtccatcagattgaagccggggttccggtcatgggcggcgatgagcagaaggcaatccgtgatattgttaaaatgggtttgaaagccagtattatgggatggaaccgggcggtcatagccgatattgaaaagtccattgaatgtggatgcgatgcggtggctatatccatttccacctcagacattcatatcgaacataaactgatgaccacacgggaagacgttttggccagaatggtcaaggctgctgaatttgccaagagaaacgggctttacatatccgtgaatgcggaggatgcctcccgttccgatctggatttcctcctggaatttgctcgtcaggccaaagaggcgggggcagaccggcttcgctattgcgatacggtggggatccttgagcctttcacgacttttgaacgaattacgaagatcaaagaaaccatcgatatcgatgtggagatgcatactcataatgactttggtatggcaacggccaatgccttagccggtgtgaaagcgggagccagccatattggggtaacggtcaacggcttgggcgagcgggccggtaatgcagctttagaggaaattgtcatggccctgaagtatttggtcggagtcgatctgaaatttgccacagagcgatttgtcgaggtttcagaatttgtagcgagagcgtcaggacgttctgttcctgcctggaaggctatcgtgggcagcaatatgtttgcccatgagtcggggattcacgctgatggggctttgaaaaatcccctcacttacgaagtgtttaaaccggaggaagtgggcctggagcgccagattgtgattggcaagcactcgggaacttcggccatcaaagctaagttccgcaatgaatacggcaaagagatttccgaggaagaagccaatgagctgttggcccgggtaagagcttttgctgtggatatgaagcgctccctttttgataaggagctcatgtatatttacgaagatttgcatagggaagcggaaaatcgtcaacctaacccaaagtggttttaa

SEQ ID NO: 13113 - protein, 387 aa, Desulfitobacterium hafniense Y51
MEERKLTIVDTTLRDGEQTAGVVFSNQEKLMIARMLDDLGVHQIEAGVPVMGGDEQKAIRDIVKMGLKASIMGWNRAVIADIEKSIECGCDAVAISISTSDIHIEHKLMTTREDVLARMVKAAEFAKRNGLYISVNAEDASRSDLDFLLEFARQAKEAGADRLRYCDTVGILEPFTTFERITKIKETIDIDVEMHTHNDFGMATANALAGVKAGASHIGVTVNGLGERAGNAALEEIVMALKYLVGVDLKFATERFVEVSEFVARASGRSVPAWKAIVGSNMFAHESGIHADGALKNPLTYEVFKPEEVGLERQIVIGKHSGTSAIKAKFRNEYGKEISEEEANELLARVRAFAVDMKRSLFDKELMYIYEDLHREAENRQPNPKWF

SEQ ID NO: 13114 - DNA, 1548 bp, Saccharophagus degradans 2-40
  CDS (1)..(1548): transl_table=11
atgcaaaaagataagcttgttattttcgatacaacattgcgggatggcgaacaaagccccggcgcttccatgacgcaggaagaaaaaattcgcattgccaaaatgttggaaaaaatgcgtgtagacgtcattgaagcaggctttgcgatcgcaagcccaggtgattttgcagcagtaaaagccgtggcagaagcggtaaaagattcacgcgtatgcagcttggcacgcgctttagatggcgatatagacagagcggcagaggcattgaagggcgcgaatgcatcgcgtatccacacttttattgccacatcgcctattcatatgaagcataagctgaagatggagcccgatgcggtgttggcgcaagctattcacgccgtaaagcgcgcacgaagctataccgatgatgtggagttctcgttagaggacggcagtcgctctgagtttgattttatgtgtcgtataaccgaagcggcaattgctgccggtgcacgtactatcaatgtgcccgatacagttggctacggtgagccgggtgagtacggcgcaatgttcaagcgcttaattgaagcggttccaaattctgatttggccattttctctacccattgtcacaacgacttgggcttggctgtggctaattctttgtctgctgtaatgaacggcgtgcgccaaatcgaatgtaccattaatggtttgggggagcgtgcaggtaacgccgcgttagaagaggttgtaatggccgtgcgcacacgcaaagacctattcccagtagaaaccaatattgttacagagcacatagtgcctacctcgcgcttggtatccacaattaccggttttcctgttcagcccaacaaagccattgttggcgctaatgcgtttgcgcatgagtctggtatacatcaggatggtgtacttaagcatcgggaaacctatgaaattatgcgcgcggaagatgtgggctggaataccaataaaattgtattaggtaagcactctggccgcgctgctgtaaaagcgcgatttgaagatttaggtattacatttgataccccagaggcgttaagcgaagcgtttgcacgctttaaggcgctcgctgataaaaaacacgaaatttttgaccaagacttacaggcgttagtgtctgaagcagataatgctagccgtgaagaaaagtacaagctagtggctttagaggtagtgtgtaaaaccggtcagaacccccatgcgcaacttacgttaagtattggcggtgagttggtagaggcaagctccgaaggtggtggcccggtagatgcggcctataaggccattgaaagcgtggtaaatagccatacagaccttttactttactcggtgaataatatcactcagggcacagactctcagggtgaggtgacggtgcggttggagcgcaatggcaatattgtaaatggcataggtgccgataccgatattgtgacagcttctattaaatcctatttggatgccttgaacctgctcgaatctaataaatcccgcgcgcaccctcagcgtgaaggggtatga

SEQ ID NO: 13115 - protein, 515 aa, Saccharophagus degradans 2-40
MQKDKLVIFDTTLRDGEQSPGASMTQEEKIRIAKMLEKMRVDVIEAGFAIASPGDFAAVKAVAEAVKDSRVCSLARALDGDIDRAAEALKGANASRIHTFIATSPIHMKHKLKMEPDAVLAQAIHAVKRARSYTDDVEFSLEDGSRSEFDFMCRITEAAIAAGARTINVPDTVGYGEPGEYGAMFKRLIEAVPNSDLAIFSTHCHNDLGLAVANSLSAVMNGVRQIECTINGLGERAGNAALEEVVMAVRTRKDLFPVETNIVTEHIVPTSRLVSTITGFPVQPNKAIVGANAFAHESGIHQDGVLKHRETYEIMRAEDVGWNTNKIVLGKHSGRAAVKARFEDLGITFDTPEALSEAFARFKALADKKHEIFDQDLQALVSEADNASREEKYKLVALEVVCKTGQNPHAQLTLSIGGELVEASSEGGGPVDAAYKAIESVVNSHTDLLLYSVNNITQGTDSQGEVTVRLERNGNIVNGIGADTDIVTASIKSYLDALNLLESNKSRAHPQREGV

SEQ ID NO: 13116 - DNA, 1137 bp, Burkholderia xenovorans LB400
  CDS (1)..(1137): transl_table=11
atgtcgaatccgatcatcaacgacaccacgctgcgcgacggcgagcagacggccggcgtcgccttcacgattgccgaaaaatgcgcgattgccgaggcgctcgcacgcgccggcgtacccgaattggaaatcggtatccccgcgatgggtgacgaggaaatcgattgcatccagaccatcgtcgcgctgaatctcgacgccgatctgatggtctggggccgcctcaccgatgcggacctggcctcggcgctgcgctgcaatcccgacatcgtccacctgtcgattcccgtttccgatatccacctgcaacacaagctgcgccagccgcgctcatgggtattggcgcagatcaatcgcgtgatcggcgccgctgtcaggagcgggcgcaaggtttcgctgggcgcggaggatgcctcccgcgcggacccggctttcctcgccgacgtggcgcggcgcgcgcaacagtgcggcgcgcagcgcatccgctttgcggacacgctcggcgttctcgatccgttttcgacctatgaagcgatagcgcgattgcgcgacgcggtggatctggaaatcgaaatccacgcgcacaacgatctcggactcgcgaccgcgaacacgcttgccgcgctgcgcgccggcgcgacccacgccaatacgaccgtcaacggtctgggcgaacgggccggcaatgcggcactggaagaaatcgtgatgggcgtgcgccatatcatgggccgcgataccgccgtcgacacgaccgcgttgctgggcatctcgcgtctcgtcgaacgggcttcgggacgcccggtcgcgttgaacaagagcattgtcggcggcggcgtattcacgcacgagtcgggcatccacacagacgggctcgccaagaatgcctcgacttacgagagcttcgaccccgccgaactcggccgcgagcgctcggtcgtgctcggcaagcattcgggttcgcaaagcgtgcgccaggcttatgacgcgctcggcctgccggtcagcgacacgcttgtcgcgttgctgctcacgcgcatccgccaccatgcgacccatcacaagcaggcgcccagcgccgccgacctgtatcgcttcctgatcgaagcgcgcgacaccgtgggagagttgtcgtga

SEQ ID NO: 13117 - protein, 378 aa, Burkholderia xenovorans LB400
MSNPIINDTTLRDGEQTAGVAFTIAEKCAIAEALARAGVPELEIGIPAMGDEEIDCIQTIVALNLDADLMVWGRLTDADLASALRCNPDIVHLSIPVSDIHLQHKLRQPRSWVLAQINRVIGAAVRSGRKVSLGAEDASRADPAFLADVARRAQQCGAQRIRFADTLGVLDPFSTYEAIARLRDAVDLEIEIHAHNDLGLATANTLAALRAGATHANTTVNGLGERAGNAALEEIVMGVRHIMGRDTAVDTTALLGISRLVERASGRPVALNKSIVGGGVFTHESGIHTDGLAKNASTYESFDPAELGRERSVVLGKHSGSQSVRQAYDALGLPVSDTLVALLLTRIRHHATHHKQAPSAADLYRFLIEARDTVGELS

SEQ ID NO: 13118 - DNA, 1548 bp, Burkholderia xenovorans LB400
  CDS (1)..(1548): transl_table=11
atgtccgacaaactgatcatattcgacaccacgttgcgagacggcgaacaatcgcctggcgcatcgatgacgaaagaagaaaaaatccgtatcgcgaagcaactcgaacggatgaaggtggacgtgatcgaagcaggcttcgcggcaagctcgaacggcgacttcgattcgatccataccatcgcgggcctgatcaaggacagcacgatctgctcgctggcccgcgcgaacgacaaggacattcagcgcgcggccgacgcgctcaaaccggccgaccgcttccgcattcacacgtttatcgcaacttcgccgctgcacatggaaaagaagctgcgcatgacgccggaccaggtgttcgagcaggcgaagctggcagtgcgtttcgcccgcaaattcaccgacgacgtcgagttttcgccggaagacggcagccgctcggacatggactttctgtgccgcgtgctggaagccgtgattgccgaaggcgcgactaccatcaatatcgcggatacggtcggctacggcgtgccggagctgtacggccagctcgtgaaaacgctgcgcgagcgcattccgaactcgcataaagccgtgttctcggtgcattgccacaatgacctcggcatggcggtggcgaattcgctggccggcgtgcagatcggcggcgcgcgccaggtcgagtgcacgatcaatggccttggcgagcgcgcgggcaacacgtcgctcgaagaaatcgtcatggccgtgaagacccgcagggattacttcgggctcgatgtcggtctcgataccacgcagatcgtgccggcttcgaaactggtgtcgcagatcaccggtttcgtcgtgcagccgaacaaggcggtggtcggcgcgaacgcgttcgcccatgcttcgggcatccaccaggacggcgtgctgaaggcgcgcgacacctacgaaatcatgcgcgccgaggacgtgggctggagcgcgaacaagatcgtgctcggcaagctgtcgggccgtaacgcgttcaagcagcgtttgcaggaactgggcattgcgctggatagcgaaggcgagttgaacacggcgttcgcgcgcttcaaggaactggccgaccgcaagtcggaaatcttcgacgaagacatcatcgcgatcgtcacggaagaatccgccgaggcgcaggagaaagagcactacaagttcctgtcgctgtcgcaacattcggaaaccggcgagcagccgcacgcgaagatcgtgttctccgtcgaaggcaaggaagtgaccggtgaggcgcgcggcaacggcccggtcgacgccacgctgaacgcgatcgaaacggaagtggggagcggttcggaactgctgctgtactcggtgaacgcgatcaccaccggcacgcaggcacaaggcgaagtgaccgtgcgtttgtcgaagagcgggcgcatcgtcaacggcgtgggcacggatccggatatcgtcgcggcttccgcgaaagcgtatatctccgcgctcaacaagctgtattcgaacgtggacaagttgaatccgcaacgttcggagtga

SEQ ID NO: 13119 - protein, 515 aa, Burkholderia xenovorans LB400
MSDKLIIFDTTLRDGEQSPGASMTKEEKIRIAKQLERMKVDVIEAGFAASSNGDFDSIHTIAGLIKDSTICSLARANDKDIQRAADALKPADRFRIHTFIATSPLHMEKKLRMTPDQVFEQAKLAVRFARKFTDDVEFSPEDGSRSDMDFLCRVLEAVIAEGATTINIADTVGYGVPELYGQLVKTLRERIPNSHKAVFSVHCHNDLGMAVANSLAGVQIGGARQVECTINGLGERAGNTSLEEIVMAVKTRRDYFGLDVGLDTTQIVPASKLVSQITGFVVQPNKAVVGANAFAHASGIHQDGVLKARDTYEIMRAEDVGWSANKIVLGKLSGRNAFKQRLQELGIALDSEGELNTAFARFKELADRKSEIFDEDIIAIVTEESAEAQEKEHYKFLSLSQHSETGEQPHAKIVFSVEGKEVTGEARGNGPVDATLNAIETEVGSGSELLLYSVNAITTGTQAQGEVTVRLSKSGRIVNGVGTDPDIVAASAKAYISALNKLYSNVDKLNPQRSE

SEQ ID NO: 13120 - DNA, 1170 bp, Methanococcoides burtonii DSM 6242
  CDS (1)..(1170): transl_table=11
atggcaaatactgattattctaaaaatgaactaatgaacttcattgatcagagtcctcttgatatcgagatatgtgatgttacattaagagatggcgaacaaactcctggtgttgcttttacaagagatgaaaaaatcgaccttgcccttgaacttgattctatcggcgttgaggtcattgaagctggttttccagtagtctcgacttcggagaaagatattgtcaaggagatcagcaatttgggacttgatgccagcatctgctgccttgcacgctctgtcatagatgatgtcgatgcagctatcgattgcgatgttgatattgtcagcatattcattgctatgtcagatcttcatttaaagttcaaataccacaaaagctgtgctgatgttttcagttgcgcgatgggtgctatcgagcatgcaaaggatcacggtctcaaggtaaggtttgccgctgaggatgccacaaggactaatattgagaccctcaaaagggcctttctggcagcagaagattatcatgtggactatgtgagcattgctgataccattggtatattgagtccggctacaacacactatcttgtcagtgagatcaagaaggtcgttcatacacctatctgtatccactgccacaatgatcttgggatggcgaccgcaaatacgctggttgctgctgaagctggtgcaaaacaattacatacaactattaacggcatcggtgagcgtgcaggtaatgcatctcttgaggagctgctggtggcattgagggtacagcatggtattgaaacgtatgatacgaccaaactgaacagcatttcccggaaactcgaggaatattcaggccttcccacagctgttaataaagctgttgttggaaaatatgcgtttacacatgaatctggtattcatgtaatggcaattcttgaagaaccaaggacctatgaacttttcactcctgagatggttggtggcaaacgcaatcttgttgttggcaaacatactggtaaaaaggctttgaaaggtattgtaaatgatcttggatatgagcttgacaatgatgaattatgcgaattgattaacaaagtaaagaactgtactgaggtaaaaaaaggtatttcaagggaaaggcttgaggaaatgatccgcaatgtgcagtcacattga

SEQ ID NO: 13121 - protein, 389 aa, Methanococcoides burtonii DSM 6242
MANTDYSKNELMNFIDQSPLDIEICDVTLRDGEQTPGVAFTRDEKIDLALELDSIGVEVIEAGFPVVSTSEKDIVKEISNLGLDASICCLARSVIDDVDAAIDCDVDIVSIFIAMSDLHLKFKYHKSCADVFSCAMGAIEHAKDHGLKVRFAAEDATRTNIETLKRAFLAAEDYHVDYVSIADTIGILSPATTHYLVSEIKKVVHTPICIHCHNDLGMATANTLVAAEAGAKQLHTTINGIGERAGNASLEELLVALRVQHGIETYDTTKLNSISRKLEEYSGLPTAVNKAVVGKYAFTHESGIHVMAILEEPRTYELFTPEMVGGKRNLVVGKHTGKKALKGIVNDLGYELDNDELCELINKVKNCTEVKKGISRERLEEMIRNVQSH

SEQ ID NO: 13122 - DNA, 1161 bp, Cytophaga hutchinsonii ATCC 33406
  CDS (1)..(1161): transl_table=11
atgggaaagagaattttcgttttcgacacaacacttagagatggtgaacaggtccctggttgtcaattgaacactgaggaaaaaatcatcgttgcgaaagcgttggacgaattaggtgtcgacgtaatcgaagcaggtttcccggtttcaagcccaggagactttaattcagttgtagaaattaccaaagcagtaacgcgccctactatttgcgcacttacacgtgccaaagaagcggacatcaatattgccggtgaagccctgcgttttgcaaagcgcagccgtattcatacaggtattggcagttcggatattcatattgaacataaacttcgttctacccgtgaaaacattcttgaaatggctgtagctgctgtaaagcaagcgaagaaggttgttcatgaagttgagttcttctgcgaagatgcaggccgcgcagatcaggcattccttgcacgtatggttgaagcggtaattgaagcaggtgcagacgtagtaaacattcccgatacaacaggctatatgttgccatggcagtatggtgagcgtatcaaatatttgatggacaatgtatcaaatattgataaagctattttatctgcgcattgccacaacgatttagggttggcaacagctaattctcttgcagccttacaaaacggtgcacgtcaggttgaatgtacaatcaacggtatcggtgaacgtgccggtaatacagcacttgaagaagtagtaatggcgatggaatgtcacaaagagacgttaggccttgagacaggaatcaatcataagaaattggttccgatcagtcatttggtatccacgttgatgcgtatgcaggttcaatcaaacaaagcaattgttggcagaaatgcatttgcacactcttcaggtattcaccaggatggtttcttaaagcaccgtgaaacatacgagatcattgatccggctgctgttggagcagattcttcttcgatcattcttactgcacgcagcggacgtgcagcattgaatcaccgtttggcaacaatcggttacatgttgtctaaagatcaattggatcaggcatatacacagttcctggatatggccgatcatttgagaaaagtcgaagacgaaaacttacacgaattaatgcgtggtaaagtttacgcgaaataa

SEQ ID NO: 13123 - protein, 386 aa, Cytophaga hutchinsonii ATCC 33406
MGKRIFVFDTTLRDGEQVPGCQLNTEEKIIVAKALDELGVDVIEAGFPVSSPGDFNSVVEITKAVTRPTICALTRAKEADINIAGEALRFAKRSRIHTGIGSSDIHIEHKLRSTRENILEMAVAAVKQAKKVVHEVEFFCEDAGRADQAFLARMVEAVIEAGADVVNIPDTTGYMLPWQYGERIKYLMDNVSNIDKAILSAHCHNDLGLATANSLAALQNGARQVECTINGIGERAGNTALEEVVMAMECHKETLGLETGINHKKLVPISHLVSTLMRMQVQSNKAIVGRNAFAHSSGIHQDGFLKHRETYEIIDPAAVGADSSSIILTARSGRAALNHRLATIGYMLSKDQLDQAYTQFLDMADHLRKVEDENLHELMRGKVYAK

SEQ ID NO: 13124 - DNA, 1623 bp, Synechococcus sp. CC9311
  CDS (1)..(1623): transl_table=11
atggccaaggatccaggtcgcgttttgatcttcgacaccactcttagagatggtgaacaatccccaggggccagcctcaaccttgaggagaagcttgcgattgcgcagcaactggcccgtcttggtgttgatgtcatcgaggctggattcccgtttgcgagccctggtgatttcgctgctgtgcagcgcattgcccagcaggttggtggtgagaatggcccgatcatctgtggtttggcccgtgcctcccgcggcgacatcaaggcctgcgctgatgccgtcgctccggccccaaagcaacgcatacatacatttattgccaccagcgacatccatctcgaacacaagttgcgaaagagccgtaaagatgtgctcggcatcgttccagagatggttgcctacgcccgctcttttgtagacgacgttgaattttcatgtgaagacgcggggcgcagcgaccctgagtttttgtatgaagtgatcgaagcggccatctctgctggtgctagcaccgtgaacattccagatacggtgggctacaccacaccgactgaattcggccgcttgattgagggcattaatcgaaacgtgcccaacatcgatgaagcggtgatttcggttcatggccataacgatcttgggctggcagttgcaaacttcctcgaggctgttaagtcaggtgcgcgtcagttggagtgcacggtgaatggcatcggcgaacgcgccggtaacgccgctttggaagagttggtgatggcgatgcatgtacgccggcgctatttcaatcctttctttggacgtgatgaggattcaccaaccccgctcactgcagtccgtacggaggaaatcacgaagacctcgcgcctggtctccaatctcaccggcatggtggtgcaacccaataaggcgattgtgggtgccaatgcgttcgcgcatgaatctggcatccatcaagacggagtgctgaaaaaccggctcacctacgaaatcgttgatgcgcgcaccgttgggctcaccgacaatcggatctcgctgggcaagctcagcggccgaagcgctgttcgggctcggctcgaagagctcggctatgacctcagccgtgaggaccttgatgatgcctttgctcgcttcaaggatcttgctgatcgcaagcgggaaattacggaccgcgatctcgaatcgatcgtcagtgttcaggtgcaacaacccgatgccaagtaccagctcaagctggtgcaggtgagctgcggcagcagtcttcagcccacagcgactgtgacactcgccgatgagaatggccaggagcaaacagcagcctctgttggcaccggaccggtggatgctgtttgtcgttccctcaaccaactggcaggagagcccaatgaattggtggagttttctgtgaagtcggtgacggaaggcattgatgccatgggtgatgtcaccattcgtctgcgtagagacggccaactctattccggtcattccgcgcatacggatgtggtggtggccgccgctgaggcttttgtgaatgctctgaatcgtcttgttgcaggaacagcaggaccaaccattcatccgcaactggatatggctcagctggattcaagccctgttcattaa

SEQ ID NO: 13125 - protein, 540 aa, Synechococcus sp. CC9311
MAKDPGRVLIFDTTLRDGEQSPGASLNLEEKLAIAQQLARLGVDVIEAGFPFASPGDFAAVQRIAQQVGGENGPIICGLARASRGDIKACADAVAPAPKQRIHTFIATSDIHLEHKLRKSRKDVLGIVPEMVAYARSFVDDVEFSCEDAGRSDPEFLYEVIEAAISAGASTVNIPDTVGYTTPTEFGRLIEGINRNVPNIDEAVISVHGHNDLGLAVANFLEAVKSGARQLECTVNGIGERAGNAALEELVMAMHVRRRYFNPFFGRDEDSPTPLTAVRTEEITKTSRLVSNLTGMVVQPNKAIVGANAFAHESGIHQDGVLKNRLTYEIVDARTVGLTDNRISLGKLSGRSAVRARLEELGYDLSREDLDDAFARFKDLADRKREITDRDLESIVSVQVQQPDAKYQLKLVQVSCGSSLQPTATVTLADENGQEQTAASVGTGPVDAVCRSLNQLAGEPNELVEFSVKSVTEGIDAMGDVTIRLRRDGQLYSGHSAHTDVVVAAAEAFVNALNRLVAGTAGPTIHPQLDMAQLDSSPVH

SEQ ID NO: 13126 - DNA, 1569 bp, Shewanella sp. MR-7
  CDS (1)..(1569): transl_table=11
atgtctaacagagtaattatatttgataccaccttacgtgatggcgagcaggcgttagcggcaagcctgtcggtcaaagaaaagttacagatcgccatggcgttagaacgtctcggtgtggatgtgatggaagtggggttccctgtgtcgtcacccggtgattttgagtcggtgcagaccattgcccgtaccatcaaaaatagccgtgtatgcgccttatctcgcgcacttgaaaaggacatcgatgccgccgctcaggcattatccgttgccgaacagttccgtattcatacctttatctccacctccactatccatgtggagagcaagttaaagcgctcattcgagcaagtgttggagatggcggtaggcgcggtgaaatatgcccgtaggtttaccgatgatgtggagttttcctgcgaagatgcgggacgcacgccaatcgataatctgtgccgtatggtggaagcggcgattcatgctggcgctcgcaccatcaatatcccagataccgtgggttacacagtgccaagcgagtttggtggcattattcaaaccctgtttaatcgcgtaccgaatatcgaccaagccattatttcggttcactgccacgatgacttaggcatgtcggtagccaattcgattaccgccgtgcagcatggcgcccgccaaatcgaatgtaccatgaacggtattggtgagcgtgcgggtaactgctccctagaagaaatcgccatgatcttagcaacgcgtaagaatctgttgggagttgaaactgggatcaatgctaaggagatccaccgcacgtcgaatctagtcagccagttatgcaatatgccgatccagtcgaataaggcgattgtgggggccaatgcctttactcactcttcaggtattcaccaagatggcatgttaaaggcgcaaaatacctatgaaatcatgacgccagagagtatcggcctaaaccgaaacaacctgaatatgacctcgcgctccggccgccatgtgattaagcatcgcatggaggaaatgggctacagtgagcagaattacaatctggacgccctctacgaacagtttttacatttggcggataaaaagggccaagtcttcgattacgacttagaagccttagcctttatggaagcgcaagcggcggaagataacttctatcaattacagcagttagtggtgcagtccgactccaccgaaggcgttgctacggcaacagtgcgcatcgatgtcggcggtgaaattaaaaccgaagccgcgaccggtaatggtcccgtcgatgccgcctataacgccattgcccgtgcgacggaccgtcgtatcgatatcatcagctacaaattgagcgccaagggcgaggggcaaaatgccttgggccaagtcgacattaccgcggtttaccatgagcaaaatttccacggtgtcgggttagcgaccgacgtggttgaggcatcagcccgtgcgttagtgcatgtgatgaacctgacatgccgcgccgataaggtcgcagattacaaacagaatatgcataaaaacagagagctgggcggcgtatag

SEQ ID NO: 13127 - protein, 522 aa, Shewanella sp. MR-7
MSNRVIIFDTTLRDGEQALAASLSVKEKLQIAMALERLGVDVMEVGFPVSSPGDFESVQTIARTIKNSRVCALSRALEKDIDAAAQALSVAEQFRIHTFISTSTIHVESKLKRSFEQVLEMAVGAVKYARRFTDDVEFSCEDAGRTPIDNLCRMVEAAIHAGARTINIPDTVGYTVPSEFGGIIQTLFNRVPNIDQAIISVHCHDDLGMSVANSITAVQHGARQIECTMNGIGERAGNCSLEEIAMILATRKNLLGVETGINAKEIHRTSNLVSQLCNMPIQSNKAIVGANAFTHSSGIHQDGMLKAQNTYEIMTPESIGLNRNNLNMTSRSGRHVIKHRMEEMGYSEQNYNLDALYEQFLHLADKKGQVFDYDLEALAFMEAQAAEDNFYQLQQLVVQSDSTEGVATATVRIDVGGEIKTEAATGNGPVDAAYNAIARATDRRIDIISYKLSAKGEGQNALGQVDITAVYHEQNFHGVGLATDVVEASARALVHVMNLTCRADKVADYKQNMHKNRELGGV

SEQ ID NO: 13128 - DNA, 1173 bp, Leuconostoc mesenteroides subsp. mesenteroides ATCC 8293
  CDS (1)..(1173): transl_table=11
atggcaagcaaagtaactttttatgacacaacaatgcgtgatggtgaacaaacaattggggttaacttttcaattgaagaaaagattgaaatagcaaaaggattggatgattatggcgttgcagcaattgaagcgggatttcctgcggcttctcagaaagactttgaagaagtgaaaagaattgcagaagttgtggataacgcaaaagttgtcggtttggcacgaatggtcagaaatgatattaatgcggttattgaggcaaccaaggatgcaaaacatccaatgattcatgtgttcattgcaacttcaccaattcatcgtgagtttaaattacacatgaccaaagcagaaattttggacaaaatcaaagcagacgttacttttactaagcaacatatgcaagatattgtattctcacctgaagatgcgacacgaactgaacctgattttttggtagccagcgtgcaaacagctattgacgctggagcaacaatgattaacataccagacacagttggttatgatacgccagaagaatacggtgaagtttttgaaaacttgcgtcaaaatattgttggttttgacacagttggttggtcaacacatacacataatgatttgggtatggcaacggctaatgctttggcaggcattgagcatggtgcgacggaaattcaaggtacaatcaacgggattggtgaacgtgccggaaacgttgatatgattgaagcagcagcagctattcatgtgcgtcatgaaaagtttaatgcagaaacagatattgtcttagctcagtcaaaagccatttctgacattgtcgcacgcgcaacccgcatgccagttgcgggtaataaacccattatgggacgcaatgcctttgctcatgaatctgggattcatcaggatggttacttaaaaaatccagaaacttatgaaattttgaagccagaaatggttggtgctacggcatccctacctctggggaaattgtcgggatcgcatgcggtaatgtcaaaactaaatagcctaggttatgaggtgactcgtgatgatatgaaatcaattttcccaatctttaaatcagttgccgaagagtctgatttgattacagatgatcaattaaaggttattatgcaagtcgttgaagaaaaagaaatggtgagttatcaataa

SEQ ID NO: 13129 - protein, 390 aa, Leuconostoc mesenteroides subsp. mesenteroides ATCC 8293
MASKVTFYDTTMRDGEQTIGVNFSIEEKIEIAKGLDDYGVAAIEAGFPAASQKDFEEVKRIAEVVDNAKVVGLARMVRNDINAVIEATKDAKHPMIHVFIATSPIHREFKLHMTKAEILDKIKADVTFTKQHMQDIVFSPEDATRTEPDFLVASVQTAIDAGATMINIPDTVGYDTPEEYGEVFENLRQNIVGFDTVGWSTHTHNDLGMATANALAGIEHGATEIQGTINGIGERAGNVDMIEAAAAIHVRHEKFNAETDIVLAQSKAISDIVARATRMPVAGNKPIMGRNAFAHESGIHQDGYLKNPETYEILKPEMVGATASLPLGKLSGSHAVMSKLNSLGYEVTRDDMKSIFPIFKSVAEESDLITDDQLKVIMQVVEEKEMVSYQ

SEQ ID NO: 13130 - DNA, 1542 bp, Magnetococcus sp. MC-1
  CDS (1)..(1542): transl_table=11
atgtctgaaaatcgcattgtaatctttgatacaaccttgcgggatggtgaacagtctcccggttgctccatgaatgtggaagagaaactgcgtattgccagacagcttgagcggcttaaagtggatgtgatcgaggcgggttttcccattgcctcccccggtgattttattggggtaaaaaccgtcgcggataccattaaggagtgtcaggttgcgggtctctgtcgtgcgaaagataccgatattgatcgcgcctgggaggccctacagggtgcggtcgatccccgtattcacacctttattgccaccagtcccatccatatgcagcataaattgcgcatggaacccgacgaggtgattgaggcggcggtggcggcggttaaacgggccaagtcccacaccagcaatgtggagtggtcggcggaggatgcgggacgtaccgagccagattttctgtgccggattgtcgaagcggtgattgcggcgggggctaccacggttaatattcccgatacggtgggttacaccttgccccacgaatatggggagcgtattcgcaccctctgtgagcgggtgcccaatattcataaggcgatcatctcggtacactgccacaacgatttgggcttggcggtggccaactcgctctcggcggtgatcaatggggcgcggcaggtggagtgtaccatcaatggtttgggggagcgggcgggcaatgcctcgttggaagaggtggtgatggccctgcgcacccgcaaggatattttaccctacagctgtggggtggataccaccgagattatgcgcagctctaaactggtctcctcggtgacgggttttccggtgcagcccaataaagccattgtgggggccaatgcctttgcccatgagtcgggtattcatcaagatggtgtgctgaaaaaggccgatacctacgagattatgacccccgcctcggtggggttgagcaccaaccgtatggtgctgggtaaacattcgggacggcacgccttcaaagagcggctgaagagtttgggccacgatctggacaatgaacaactcaagcgtgcctttgaacgctttaaggagttggccgataaaaagcatgagctgtttgatgaagatctggaagtgctggtggatgaagagatgtaccggcattttggcgcctattataaactgacacggctacatgtggcgagtggtacgcgggatacgccggtggcggtggttcaggttgagtataatggcgaagagagcatgcacagcgcctggggcaagggctcggtggagtcggtctttaatgcgctgcgtaaattgattcccgaggccgccgaggctgaggtgctgctctatcaggtgcgggcggtgaccgaggggattgatgcccagggtgaggtgacggtgcgtttgcgtttgggcgaatccattgtgcaggggcagggggcggataccgatattattattgcttcggcccatgcctttatcaacgccctgaacaaggcggcttatcagcggcataagccgggtaaaggggtttaa

SEQ ID NO: 13131 - protein, 513 aa, Magnetococcus sp. MC-1
MSENRIVIFDTTLRDGEQSPGCSMNVEEKLRIARQLERLKVDVIEAGFPIASPGDFIGVKTVADTIKECQVAGLCRAKDTDIDRAWEALQGAVDPRIHTFIATSPIHMQHKLRMEPDEVIEAAVAAVKRAKSHTSNVEWSAEDAGRTEPDFLCRIVEAVIAAGATTVNIPDTVGYTLPHEYGERIRTLCERVPNIHKAIISVHCHNDLGLAVANSLSAVINGARQVECTINGLGERAGNASLEEVVMALRTRKDILPYSCGVDTTEIMRSSKLVSSVTGFPVQPNKAIVGANAFAHESGIHQDGVLKKADTYEIMTPASVGLSTNRMVLGKHSGRHAFKERLKSLGHDLDNEQLKRAFERFKELADKKHELFDEDLEVLVDEEMYRHFGAYYKLTRLHVASGTRDTPVAVVQVEYNGEESMHSAWGKGSVESVFNALRKLIPEAAEAEVLLYQVRAVTEGIDAQGEVTVRLRLGESIVQGQGADTDIIIASAHAFINALNKAAYQRHKPGKGV

SEQ ID NO: 13132 - DNA, 1605 bp, Magnetococcus sp. MC-1
  CDS (1)..(1605): transl_table=11
atgtccgctcaagcgcacccccctgttgttctctatgataccactctgcgtgatggctctcagagcgaggatgtgctcttttctgccgaagataaattgcgcattgccaagcgtttggatgcgcttgggttggactatatcgagggtggctggcccggtgctaatcctaaggatgatgactttttccggcaggctaaacagctcaagctgcaaaaaagccgcattaccgcctttggttccacccgccgggccgggtctaaggtggaagaggatcaggttatcaagggtctgttggggtcgggtgcgcaggtgattacggtgtttggcaaaagttgggatctgcatgtttcccgcgctttgggcatccccctggcacaaaatttagagttaatttttgataccattcgctatctcaaacggcatgtggatgaggtgttctatgatgcagagcacttttttgatggctatcggcgtaatccagaatatgcccgccagaccctgcaagccgcctatgagggcggtgccgacgcactggttttgtgcgacaccaatggcggcacgatggttgaagatttacgccgcatgatcggcgaggtgacggatctgggcgcaccattgggcatccattgccacaacgattgtgagctggcggtagccaactccttggcggcggtggaggccggtgtcacccatattcagggcaccattaatgggattggggagcgctgtggcaacgctaatttgatctccattatcccgaatcttaaatttaaaatgcagcgcagcttaaccttggacgatgaggatcttacccaacttacggcggtgagccgttttgttaatgaaatggccaaccgtcccacccagaaaaatcaaccctatgtgggggtgtcggcgtttgcccacaaggggggtatccatgtatcggcggtgcttaaagatgccagcacctatgaacatattagtccagacttggtgggcaatcagcagcgggtattggtcagtgagcaggcggggcgcagcaatctgatctataagttagaggagttgggtattgaaggggtggatgccaaagatccccgtctaactgaactgctgctggatgttaaagagctggagcaccaaggctaccaatttgatggggcagatgcctcgttccaactgcgggtgtggaaggcgctgggggagttgcccaactattttgagctgctgggctttcgggtcatagatgaacgccgggtgcgcaaggatggtcaacaccccatgggggcagaagcgacggtcaaaatgcgggtagcgggggaatcggtgcatctggtggccgaaggggctggcccggtggatgccctgcacaaggcgctaagtaaagcgctgcggcgggattaccccatggtgacagagctgaagttagaagattttaaggtgcgtattttgggcaatcgcaagggtaccgaggctaccgtgcgggtgcttattgagtggtatgatggccgttgccgctggggcactgtgggggtttcggaccatattatcgccgcctcttacgatgccatggttgaggcggttaagtacaagctgtttaaagataaagttaaacctgtttaa

SEQ ID NO: 13133 - protein, 534 aa, Magnetococcus sp. MC-1
MSAQAHPPVVLYDTTLRDGSQSEDVLFSAEDKLRIAKRLDALGLDYIEGGWPGANPKDDDFFRQAKQLKLQKSRITAFGSTRRAGSKVEEDQVIKGLLGSGAQVITVFGKSWDLHVSRALGIPLAQNLELIFDTIRYLKRHVDEVFYDAEHFFDGYRRNPEYARQTLQAAYEGGADALVLCDTNGGTMVEDLRRMIGEVTDLGAPLGIHCHNDCELAVANSLAAVEAGVTHIQGTINGIGERCGNANLISIIPNLKFKMQRSLTLDDEDLTQLTAVSRFVNEMANRPTQKNQPYVGVSAFAHKGGIHVSAVLKDASTYEHISPDLVGNQQRVLVSEQAGRSNLIYKLEELGIEGVDAKDPRLTELLLDVKELEHQGYQFDGADASFQLRVWKALGELPNYFELLGFRVIDERRVRKDGQHPMGAEATVKMRVAGESVHLVAEGAGPVDALHKALSKALRRDYPMVTELKLEDFKVRILGNRKGTEATVRVLIEWYDGRCRWGTVGVSDHIIAASYDAMVEAVKYKLFKDKVKPV

SEQ ID NO: 13134 - DNA, 1185 bp, Magnetococcus sp. MC-1
  CDS (1)..(1185): transl_table=11
atggatcaatcgaccgtcattttagacgacaccaccctgcgggatggtgaacaatcggcgggggtggcctttagcttggaagaaaagctaaagatcgccaccctgctggatcgtgctggtgtacccgagttggaggtgggtatacccgctatgggcgaagaggagcggcaggatatccgcgccatcgcgcaactgggtttgcgggcgcgactgttggtatggctgcgcatgcatgatgccgacatcagccacctaccgggtttgggggtggcgatggcggatctctccacctcggcttcggatcaacagatccggcataaactgggtcgcaatcggcgttgggtactcaacaccatccaacaccaagtcacccgggttagccaagagatggggattgaggtgtgtgtggggtgtgaagatgcctcgcgggcggagatcgactttttgctgcgcatgggcgaaaccgcacaaaaggcgggggcaaaacggctacgctttgccgacaccttgggtattttggacccctttaccacctatgagcggtttaaaacattgcgggctaatttggatctggagttagagatccatgcccacgatgatctggggctggcgacggccaacaccctagcggccattcgcggtggggccagccacgccaacaccacggtcaacggcctgggtgagcgggcgggcaatgcccccctcgaagaggtggcggtggcgttacagaccctacacggcggttataccggtattcagtgtgaccagctacaggtgctttcgcagtttgtggagagcgcatcgggccggccactctcgtgtcaaaagagtgtggtgggcagtgcggtatttcgccatgagtcaggcatccatgtggatggcctgcttaaagatcgccgcaactaccagggggtcgatcccgacattttgggtcggcaccatgagttggtgttgggcaagcattcgggacgccaaggggtgattgacgcctatggacgcatggggattgccataagccaggagctggctgggcaactcttgcagagcgtcaaaggctttgccacccgttataagcgctccccggagcaagcggaactgcaaagtttttaccgcttcttaaccgagcctgcccccctaacccccgccaaccacggaggattgctccatgcaacaccaagagtatga

SEQ ID NO: 13135 - protein, 394 aa, Magnetococcus sp. MC-1
MDQSTVILDDTTLRDGEQSAGVAFSLEEKLKIATLLDRAGVPELEVGIPAMGEEERQDIRAIAQLGLRARLLVWLRMHDADISHLPGLGVAMADLSTSASDQQIRHKLGRNRRWVLNTIQHQVTRVSQEMGIEVCVGCEDASRAEIDFLLRMGETAQKAGAKRLRFADTLGILDPFTTYERFKTLRANLDLELEIHAHDDLGLATANTLAAIRGGASHANTTVNGLGERAGNAPLEEVAVALQTLHGGYTGIQCDQLQVLSQFVESASGRPLSCQKSVVGSAVFRHESGIHVDGLLKDRRNYQGVDPDILGRHHELVLGKHSGRQGVIDAYGRMGIAISQELAGQLLQSVKGFATRYKRSPEQAELQSFYRFLTEPAPLTPANHGGLLHATPRV

SEQ ID NO: 13136 - DNA, 1569 bp, Shewanella sp. ANA-3
  CDS (1)..(1569): transl_table=11
atgtctaacagagtaattatatttgataccaccttacgtgatggcgagcaggcgttagcggcaagcctgtcggtcaaagaaaagttacagatcgccatggcgttagaacgtctcggtgtagatgtaatggaagtcgggtttcccgtgtcttcccccggtgactttgagtcggtgcagactattgcccgtaccatcaaaaatagccgtgtgtgcgccttatcccgcgccttggaaaaagatatcgatgccgccgcccaagcattatcggttgccgaacagttccgtattcatacctttatctccacctcgactatccatgtggagagcaagttaaagcgctcattcgagcaagtgttggagatggcggtgggcgcggtgaaatatgcccgcaggtttaccgatgatgtagagttttcctgcgaagatgcgggacgcacaccaatcgacaacctgtgccgtatggtagaagcggcgattcacgcaggggctcgtaccatcaatatccctgataccgtgggttacacagtgccaagcgagtttgggggtattattcaaaccttgtttaatcgcgtaccgaatatcgaccaagccattatctcggttcactgccatgatgacttaggcatgtcggtggccaattcgattaccgccgtgcagcatggtgcccgccaaatcgaatgtaccatgaacggcattggtgagcgtgcgggtaactgctccctagaagaaatcgccatgatcttagcgacgcgtaagaatctgttgggagttgaaactgggatcaatgccaaggagatccaccgtacgtcgaatctggtcagccagttgtgcaatatgccgattcagtcgaataaggcgattgtgggcgcgaatgcctttacccactcttcggggattcaccaagatggcatgttaaaagcgcaaaacacctatgaaatcatgacgccagagagcatcggcctaaaccgtaacaacctgaatatgacctcgcgctcaggtcgccatgtgattaagcatcgcatggaggaaatgggctacagcgagcaggatttcaatctggatgccctgtacgaacagtttttacatttggccgataaaaagggtcaagtcttcgattacgacttagaagccttagcctttatggaagcgcaagcggcggaagataacttctatcaattacagcagttagtggtgcaatccgactccaccgaaggcgtggccacggctactgtacgcatcgatgtcggcggagaaattaaaaccgaagctgcgaccggtaatggtcccgtcgatgccgcctataacgccattgcccgtgcgacggaccgtcgtatcgatatcatcagttacaaattgggcgctaagggtgaggggcaaaatgccctgggccaagtcgacattaccgcggtttaccatgaacaaaattttcacggtgttgggttagctaccgatgtggttgaggcatcagcccgtgcgttagtgcatgtgatgaacctgacgtgccgtgccgataaggtcgcagattacaaacagaatatgcataaaaacagagagctgggtggcgtataa

SEQ ID NO: 13137 - protein, 522 aa, Shewanella sp. ANA-3
MSNRVIIFDTTLRDGEQALAASLSVKEKLQIAMALERLGVDVMEVGFPVSSPGDFESVQTIARTIKNSRVCALSRALEKDIDAAAQALSVAEQFRIHTFISTSTIHVESKLKRSFEQVLEMAVGAVKYARRFTDDVEFSCEDAGRTPIDNLCRMVEAAIHAGARTINIPDTVGYTVPSEFGGIIQTLFNRVPNIDQAIISVHCHDDLGMSVANSITAVQHGARQIECTMNGIGERAGNCSLEEIAMILATRKNLLGVETGINAKEIHRTSNLVSQLCNMPIQSNKAIVGANAFTHSSGIHQDGMLKAQNTYEIMTPESIGLNRNNLNMTSRSGRHVIKHRMEEMGYSEQDFNLDALYEQFLHLADKKGQVFDYDLEALAFMEAQAAEDNFYQLQQLVVQSDSTEGVATATVRIDVGGEIKTEAATGNGPVDAAYNAIARATDRRIDIISYKLGAKGEGQNALGQVDITAVYHEQNFHGVGLATDVVEASARALVHVMNLTCRADKVADYKQNMHKNRELGGV

SEQ ID NO: 13138 - DNA, 1593 bp, Nocardioides sp. JS614
  CDS (1)..(1593): transl_table=11
atggacctgcacggcgccttccacgtctacgacaccaccctgcgcgacggcgcccagcaggaggggctcaacctctccgtcaccgacaagctgtcgatcgcgcggcagctcgacgggctgggcgtcggctacatcgagggcggctggccgggcgcgaacccgaaggacaccgagttcttccgccgcgccgccgccgagctcgacctccagcacgcgcggctcgcggcgttcggcgccacccggcgcgcgggcgtcaaagcggccgacgacccactggtcgcggcgctgcgcgacagcggcgcgagcgtggtcacggtggtggccaagtcctacgaccggcacgtcgagctcgcgctgcggaccacgctcgaggagaacctcgccatgatccgcgacaccgtcagccacctgcgcgccgaggggcagacggtcttcctcgacgccgagcacttcttcgacggctaccgggccaaccgcgactacgcgctcgaggtgctgcgcacggcgtacgacgcgggcgccgaggtgatcgcgctgtgcgacaccaacggcgggatgctgcccggctgggtgagcgatgtcgtccacgacgtgcgcgagaacgcccaggtgcgggtcggcatccactgccacaacgacaccggctgcgcggtcgccaacacgctggccgccgtcgacgccggcgcgacccatgtccagggcacgatcaacgggtacggcgagcgcaccgggaacgccgacctgctcgcggtggtcgccaacctcgagctcaagctggaccggcaggtgctgcccccgggcctgctcaccgaggccacccggatcgcgcacgcggtcgccgaggtcacgaacttcccgccggcatcgcggcagccgtacgtcggcagctccgcgttcacccacaaggccgggctgcacgccagcgcgatcaaggtggacccgaacctctaccagcacatggaccccgccggcgtcggcaacgacatgcggctgctggtctccgacatggccggccgggcctcgatcgagctcaagggacgcgagctcggtttcgacctctccggcgatcgcgacctcgtcgcccggatcaccgagcgggtcaaggtgctcgagagtcgtgggttcacgttcgaggcggccgacgcctccttcgagctgctgctgatcgaggaggtcgaggggcagcgcccgtcgtacttcgacgtcgagtcgtggcgggtgatcaccgagaccctcgccaagcgcagtgccggggaggaggcggtctccgaggccacggtgaagctcaaggccgggggcgtccggtacgtcgtcaccggggagggcaacggcccggtcaacgccctcgaccacgcgctgcgtgaggcgatcgtccaggcctacccgcaggtcgcgaagttcgagctgatcgactacaaggtccggatcctcgaccaggggcacggcaccgacgcgatcacccgggtgctgatcgagacgagtgacggcgagacctcctgggtcaccgtcggggtcggcgccaacgtcatcgaggcgtcgtggggggcgctggtcgacgggctcacgttcgggttgcgcaagcacgaggcctga

SEQ ID NO: 13139 - protein, 530 aa, Nocardioides sp. JS614
MDLHGAFHVYDTTLRDGAQQEGLNLSVTDKLSIARQLDGLGVGYIEGGWPGANPKDTEFFRRAAAELDLQHARLAAFGATRRAGVKAADDPLVAALRDSGASVVTVVAKSYDRHVELALRTTLEENLAMIRDTVSHLRAEGQTVFLDAEHFFDGYRANRDYALEVLRTAYDAGAEVIALCDTNGGMLPGWVSDVVHDVRENAQVRVGIHCHNDTGCAVANTLAAVDAGATHVQGTINGYGERTGNADLLAVVANLELKLDRQVLPPGLLTEATRIAHAVAEVTNFPPASRQPYVGSSAFTHKAGLHASAIKVDPNLYQHMDPAGVGNDMRLLVSDMAGRASIELKGRELGFDLSGDRDLVARITERVKVLESRGFTFEAADASFELLLIEEVEGQRPSYFDVESWRVITETLAKRSAGEEAVSEATVKLKAGGVRYVVTGEGNGPVNALDHALREAIVQAYPQVAKFELIDYKVRILDQGHGTDAITRVLIETSDGETSWVTVGVGANVIEASWGALVDGLTFGLRKHEA

SEQ ID NO: 13140 - DNA, 1191 bp, Azoarcus sp. BH72
  CDS (1)..(1191): transl_table=11
atgtctgcaccagtcaccatcgacgacaccaccctgcgcgacggcgagcaatcggccggcgtcgccttcacccgcgcggagaagtgcggcatcgcccgcatcctcgccgagatcggcgtgccggagctggagatcggcatcccggcgatgggcagcgaagagtgcggcgacatccgcgcgatcgccgacacgctcgccgacggcggccacgacacccgcctgatcgtctggggccgcctcaccagcgccgacatcgacgcctgtcgcagcctgccggtgcagatgctggaactgtcggtgccggtctccgaccagcaaatccgccacaagctcggcgccacccgtgacgaggtgctggcgcggatcgcgcgttgggtgccggtggcgcgtgaggcgggcttcgatgtcggcgtcggcggcgaagacgcctcgcgcgccgacccggccttcctcgcggaggtcatccaggccgccgaagccgccggcgcgcgccgtttccgcttcgccgacacgctgggcatcctcgaccccttcgccaccttcgaggcgatccgcgcgctgcgcgccgcttcaaagctggaaatcgaaatgcacgcgcatgacgacctcgggctggccaccgccaacaccctggccgcggtgcgcgccggcgccagccatgtgaacaccacggtgaacgggctcggcgaacgtgccggcaacgcggcgctggaagaagtcgcgcttggcctgcgccagttccatggcatgggcgagatcatcgacttcacccgcctgctcgacacctccgaagcagtcgcgcgcgcctccggccgcccggtgggctggcacaagagcgtggtcggcgaaggcgtattcacccacgaagccggcatccacgtggatggcctgctgaaggaccccgccaactaccagggcatcgaccccgcgctgctcggccgcagccaccgcatgctgctcggcaaacactcgggcggccgcggcgtcgccgccgcctacgccgggctgggcatcgaactcgacgccgcccgcaccgcctgcctgctggcccgcatccgcgagttcacctcgcgcaccaagcgcaccccgcagcgcgaagacctgctcgcgttctgggaagagctggaagccggcagcgcgcagtgcgacgacctgctgcacgacctgctcgacaccgccgcgggagcctga

SEQ ID NO: 13141 - protein, 396 aa, Azoarcus sp. BH72
MSAPVTIDDTTLRDGEQSAGVAFTRAEKCGIARILAEIGVPELEIGIPAMGSEECGDIRAIADTLADGGHDTRLIVWGRLTSADIDACRSLPVQMLELSVPVSDQQIRHKLGATRDEVLARIARWVPVAREAGFDVGVGGEDASRADPAFLAEVIQAAEAAGARRFRFADTLGILDPFATFEAIRALRAASKLEIEMHAHDDLGLATANTLAAVRAGASHVNTTVNGLGERAGNAALEEVALGLRQFHGMGEIIDFTRLLDTSEAVARASGRPVGWHKSVVGEGVFTHEAGIHVDGLLKDPANYQGIDPALLGRSHRMLLGKHSGGRGVAAAYAGLGIELDAARTACLLARIREFTSRTKRTPQREDLLAFWEELEAGSAQCDDLLHDLLDTAAGA

SEQ ID NO: 13142 - DNA, 1536 bp, Azoarcus sp. BH72
  CDS (1)..(1536): transl_table=11
atgaaagacgcattgatcatcttcgataccaccttgcgcgacggcgaacagagcccgggcgcctcgatgacccgcgacgagaagctgcgcatcgcgcgccagctcgaacgcatgcgggtcgacgtgatcgaggccggctttgcggcggcctccaacggcgacttcgagtcggtgcgctcgatcgccgaggcgatcaaggaatccaccgtctgttcgttggcgcgcgccaacgagaacgacatccgccgcgccggcgaggcgatccgccccgccgcccgcggccgcatccacaccttcatcgcgaccagcccgatccacatggagaagaagctgcggatgacgccggaccaggtggtggaacaggcggtgaaggcgatcggctgggcgcgcgaatacaccgatgacatcgagttctcggccgaggacgcgggccgctccgagatcgatttcctgtgccgcatcttcgacgcggtgatcaaggccggtgcaaagacgatcaacgtacccgacaccgtaggctacaacgtcccggagcagtacgccgcgaccctgcgcaccctgatcgagcgcgtaccgaacgcggacaaggtgatctggtcggtgcactgccacaacgacctcggcctcgcggtatcgaattccctcgccgccgtgatggcgggcgcgcgtcaggtggaatgcacgatcaacggcctgggcgaacgcgccggcaacgcgtcgctcgaagagatcgtcatggcggtgcgtacccgggccgacgtgttcccggtcagcaccaacatcgacaccacgcagatcgtcccggcatccaagctggtgtcgcagatcaccggctacccggtgcagccgaacaaggccatcgtcggcgccaacgccttcgcgcacgaatccggcatccaccaggatggcgtgctcaagcatcgtgaaacctacgagatcatgcgcgccgaagacgtgggctggggcgcgaacaagctcgtgctcggcaagcactcggggcgcaacgcgttccgcgcgcgcctgcaggaactgggtatcgagatcggctccgaagaacagctcaaccatgccttcgcccgcttcaaggaacttgccgacaagaagcacgagatcttcgacgaggatctccacgcgctgatgagcgatgaggcggtgacgcccgagcaggagcatttccgtctggtggccacccgcttccattcggaaaccggcgaaacgccgcgcgccgaagtcacgctcgcgatcggcggccaggaaacgcgcagccaggcggaaggctccggaccggtcgatgcggcgttcaaggcgatcgagtcggtggccggcagcggcagcgaactgctgctctattcggtcaacgcgatcaccaccggcaccgatgcgcagggcgaggtgaccgtgcgcctcgccaaggacggccgcgtcgtgaatggccagggcgccgacaccgacatcatcgtcgcctcggcgaaggcctacctcaacgcgctcaacaagctctgcggcggctcggaaaaactcaacccgcaagtctga

SEQ ID NO: 13143 - protein, 511 aa, Azoarcus sp. BH72
MKDALIIFDTTLRDGEQSPGASMTRDEKLRIARQLERMRVDVIEAGFAAASNGDFESVRSIAEAIKESTVCSLARANENDIRRAGEAIRPAARGRIHTFIATSPIHMEKKLRMTPDQVVEQAVKAIGWAREYTDDIEFSAEDAGRSEIDFLCRIFDAVIKAGAKTINVPDTVGYNVPEQYAATLRTLIERVPNADKVIWSVHCHNDLGLAVSNSLAAVMAGARQVECTINGLGERAGNASLEEIVMAVRTRADVFPVSTNIDTTQIVPASKLVSQITGYPVQPNKAIVGANAFAHESGIHQDGVLKHRETYEIMRAEDVGWGANKLVLGKHSGRNAFRARLQELGIEIGSEEQLNHAFARFKELADKKHEIFDEDLHALMSDEAVTPEQEHFRLVATRFHSETGETPRAEVTLAIGGQETRSQAEGSGPVDAAFKAIESVAGSGSELLLYSVNAITTGTDAQGEVTVRLAKDGRVVNGQGADTDIIVASAKAYLNALNKLCGGSEKLNPQV

SEQ ID NO: 13144 - DNA, 1539 bp, Acidovorax sp. JS42
  CDS (1)..(1539): transl_table=11
atgaccgacaagctcatcattttcgacaccaccttgcgcgacggcgagcagtcgccgggagcttccatgacgcgcgatgaaaagctgcgcattgcccgtcaattggagcggctgcgtgtggatgtgatcgaggcgggttttgccgccagttccaacggcgacttcgaatcggtgcaggccattgcgcgcgcagtgaaggattccacggtctgctcgctggcacgtgccaacgaccgggacatcgcacgtgctgccgaggcgctcaaagaggcaaaccgcgcgcgcatccatacgttcatcgccaccagcgcgctgcacatggaaaagaagctgcgcatgacgcccgagcaggtgctggagcaagccaggcaggcggtgcgttttgcacgcaacctggtggaggacatcgaattcagccccgaggatggctaccgcagcgatccggacttcctgtgccgcgtgatcgagacggtgatcgcggagggcgccaccaccatcaacgtgcccgacaccgtgggttacgccattcccgagctgtacggcaacttcatcaagaaccttcgcgagcgcattcccaacagtgacaaggccatctggtccgtgcactgccacaacgatctgggcatggcggtcgccaactcgctggcgggtgtgaagatcggcggggcacgccaggtggagtgcaccatcaacggcctgggcgagcgtgcgggcaattgttcgctggaggaggtggtgatggccgtgaagacgcggcgcgactacttcggcctggacgtcggcattgatacccagcacatcgtggccgccagccgcatggtcagccagaccaccggctttgtggtgcagcccaacaaggccgtggtgggcgccaatgcgttcgcccacgcctcgggcatccaccaggacggcgtgctcaaggcgcgcgacacgtacgagatcatgcgcgccgaggacgtgggctggagcgcgaacaagatcgtgctgggcaaactcagcggccgcaatgcgttcaagcaacgtctgcaggaactgggcgtccagttggagagcgaaggcgaaatcaacgtggcgtttgccaaattcaaggaactcgccgaccgcaagagcgagatctttgacgaggacatcctggcactcgtgagcgacgaaagcgtgaccagcgagaaggagcagttcggcttcgtgtccctggcgcagcacagcgagacgggcgaacggcccgaggcgaccatcgtgttcaccgtggacggcaaggaagtccgcagctcctcggagggcaacggcccggtcgatgcctcgatgaaggccatcgaggcgcatgtgcgcagcggtgccgagatggtgctgtactcggtgaacgccatcagtggctccaccgaaagccagggcgaagtcaccgtgcggttgcagagcgccggccgggtggtgaatggcgtaggggccgaccccgacatcgtggtggcatcggccaaggcctacctcagtgccctgaataaattacaaagtaaagctgagcgcgtggcagcgcagggctga

SEQ ID NO: 13145 - protein, 512 aa, Acidovorax sp. JS42
MTDKLIIFDTTLRDGEQSPGASMTRDEKLRIARQLERLRVDVIEAGFAASSNGDFESVQAIARAVKDSTVCSLARANDRDIARAAEALKEANRARIHTFIATSALHMEKKLRMTPEQVLEQARQAVRFARNLVEDIEFSPEDGYRSDPDFLCRVIETVIAEGATTINVPDTVGYAIPELYGNFIKNLRERIPNSDKAIWSVHCHNDLGMAVANSLAGVKIGGARQVECTINGLGERAGNCSLEEVVMAVKTRRDYFGLDVGIDTQHIVAASRMVSQTTGFVVQPNKAVVGANAFAHASGIHQDGVLKARDTYEIMRAEDVGWSANKIVLGKLSGRNAFKQRLQELGVQLESEGEINVAFAKFKELADRKSEIFDEDILALVSDESVTSEKEQFGFVSLAQHSETGERPEATIVFTVDGKEVRSSSEGNGPVDASMKAIEAHVRSGAEMVLYSVNAISGSTESQGEVTVRLQSAGRVVNGVGADPDIVVASAKAYLSALNKLQSKAERVAAQG

SEQ ID NO: 13146 - DNA, 1551 bp, Magnetospirillum magnetotacticum MS-1
  CDS (1)..(1551): transl_table=11
atggacaagaaccgcgtcatcatcttcgacaccacgctgcgcgacggcgagcaatcgcccggcgcctccatgaatctggaggagaaggtccgcattgcgctggcactggaagagatgggcgtcgatgtgatcgaggcgggctttcccattgcgtccaacggcgatttcgaggccgtggaggccgtggccagggcggtgaagacttcggtgatctgtggcctggcccgcgccaccaagggcgatatcgagcgctgcgccgaagccgtcaaaccggcggggcggggccgcatccataccttcttgtccaccagcccgctgcacatgaaatacaagctgcagatggagccggaaaaggtcctggagaagatctccgaatcggtggcctatgcccgcaacctgaccgacgacgtggaatggtcggccgaggacggctcgcgcaccgaacacgacttcctgtgcacctgtgtcgaggccgccatcaaggccggggcgcgcaccatcaatatccccgacacggtgggctatgccatcccggatgaatatgcggccctgatcgctatgctgttcaaccgcgtgcccaatatcgacaaggcgatcatctcggtccattgccacaacgatctcggcctcgccgtggccaattccctggccgccgtgggcaagggcgcgcggcagatcgaatgcaccatcaacggcttgggcgaacgcgctggcaatgccgccatggaagagatcgtcatggcgctgcgcacgcgccccgacctcctgccctacaagtcgggcgttaagaccgagaacatcacgcgggcgtcgcggctggtgtccaccatcaccggcttcgtggtgcagcccaacaaggccatcgtcggcaagaacgccttcgcccatgaatcgggcatccaccaggacggcgtccttaagcacgcccagacctacgagatcatgaccccggaatccgtgggtctgaaccgttcgtccctggtgatgggcaagcattcgggccgcgccgccttcaaggccaagctgaaggatctgggttacgaactgggcgacaacgccgtcgaggacgcctttacccgcttcaaggacctggccgaccgcaagaaggacgtgttcgacgaggatatcgtcgccctggtcgatgacgccgtggtgcgcggcaacgaccggctcaagctggtctcgctggaagtgctgtgcggcaccaagcaccagccgccctcggccgaactggagctttcggtggacggcgtggtgaaaagcgtgcgcgctacgggtgacggcccggtggacgccaccttcaacgccatcaaggcgctgttcccccatgaggtcaagctgcagctctatcaggtgagcgcggtaacccagggcaccgacgcccaggccgaggtgaccgtgcgcctggaagaggacggcaaaagcgtcaacggccaggggcgccgaaaccgatactttggtggcctcggcgcgggcctatgtcaacgcgttgaacaaacttctggtcaaacggcaaaaaaccgcccccgatgccgccggagcgtgatatag

SEQ ID NO: 13147 - protein, 516 aa, Magnetospirillum magnetotacticum MS-1
MDKNRVIIFDTTLRDGEQSPGASMNLEEKVRIALALEEMGVDVIEAGFPIASNGDFEAVEAVARAVKTSVICGLARATKGDIERCAEAVKPAGRGRIHTFLSTSPLHMKYKLQMEPEKVLEKISESVAYARNLTDDVEWSAEDGSRTEHDFLCTCVEAAIKAGARTINIPDTVGYAIPDEYAALIAMLFNRVPNIDKAIISVHCHNDLGLAVANSLAAVGKGARQIECTINGLGERAGNAAMEEIVMALRTRPDLLPYKSGVKTENITRASRLVSTITGFVVQPNKAIVGKNAFAHESGIHQDGVLKHAQTYEIMTPESVGLNRSSLVMGKHSGRAAFKAKLKDLGYELGDNAVEDAFTRFKDLADRKKDVFDEDIVALVDDAVVRGNDRLKLVSLEVLCGTKHQPPSAELELSVDGVVKSVRATGDGPVDATFNAIKALFPHEVKLQLYQVSAVTQGTDAQAEVTVRLEEDGKSVNGQGRRNRYFGGLGAGLCQRVEQTSGQTAKNRPRCRRSVI

SEQ ID NO: 13148 - DNA, 1623 bp, Nostoc punctiforme PCC 73102
  CDS (1)..(1623): transl_table=11
atgagcatcacatctcaaccagaccgagttatcatcttcgacaccacgctacgggatggcgaacagtcaccgggcgcaaccctcaatgtagaagaaaagctggcgatcgctcatcaactagctctccttggtgtcgatgtgattgaagcaggttttgccgttgctagtccgggagattttcaagctgttaaaaccattgctgaacaagttggaatacctggtggaccaatcatttgcagtttagctagagccattcgccaggatattcacgccgccgccgaagccttgaagggagcggctcgtcccagaatccacacgatgatttctacctctgatattcacctgaaatatcagttgaaaaagtctcgcagcgaagtattagcgatcgcatcagaaatggttgcttatgctaagtcgtttgtagacgatgtagaattttcaccaatggatgccagccgcactgaaccagagttcctgtatgaagttttggaggcggcgatcgcagcaggtgcaactacaatcaacattcctgataccgttggttactgcacacccaaggaaatcggaactctaattcaaggaattcgagaacatgttcctaatatcgatggggtgattctttcgattcacactcaaaatgatttgggtttggcgacagctaacgctttggcagcaattgaatatggtgtgcgtcaggtggaatgtacgattaatggtattggagaacgggctggaaatgcagcattagaagagattgtgatggcgttgcaagttcgcaaaccatttttcaatccttactttggtcgtccggttgatgctgatacacctctgactaatattaagactcaggagatttataaaacctcatccttggtttcccaattaactgggatgctgattcagcccaataaggcgatcgtgggagcaaacgctttcgcccatgagtctggtattcaccaagatgggattatcaagcatcgccagacttatgaaattatggaagctgctgcgatcggtttgccagaaaatcgtattgttttgggcaagcactctggacgaaatgcttttcgtaccaggctcaaggaattggggtttgaattgaacgaggcggacttgaataaagccttcaatcgattcaaagatgtcgccgataagaaaaaagaaatctcagattgggatttagaagcgatcgttcgagatgaaacgcagattcaagtagaaagtggcttccaaatcgaacacgttcaggtaatttgtggtgactgcacttgcccaactgcaaccattacaattgttacccccgatggtaaaatcctcacagatgcgagtgtaggcactggcccagtggatgcggtgtatcaagcaatcaatcgattggtgcagattcccaatcaactaattgaattttccgtccaatctgtgactggagggattgatgcactaggaacagttacagttcgcttgaaacatcaagagcggatattctctggacaagcatctgatactgatatcgtggtagcagcagcttacgcccatatcaacgccttgaatcgtctttatcgttacttgcaaactgagaaatccgagtttcatgagataaactctgctgttgtctctgggtag

SEQ ID NO: 13149 - protein, 540 aa, Nostoc punctiforme PCC 73102
MSITSQPDRVIIFDTTLRDGEQSPGATLNVEEKLAIAHQLALLGVDVIEAGFAVASPGDFQAVKTIAEQVGIPGGPIICSLARAIRQDIHAAAEALKGAARPRIHTMISTSDIHLKYQLKKSRSEVLAIASEMVAYAKSFVDDVEFSPMDASRTEPEFLYEVLEAAIAAGATTINIPDTVGYCTPKEIGTLIQGIREHVPNIDGVILSIHTQNDLGLATANALAAIEYGVRQVECTINGIGERAGNAALEEIVMALQVRKPFFNPYFGRPVDADTPLTNIKTQEIYKTSSLVSQLTGMLIQPNKAIVGANAFAHESGIHQDGIIKHRQTYEIMEAAAIGLPENRIVLGKHSGRNAFRTRLKELGFELNEADLNKAFNRFKDVADKKKEISDWDLEAIVRDETQIQVESGFQIEHVQVICGDCTCPTATITIVTPDGKILTDASVGTGPVDAVYQAINRLVQIPNQLIEFSVQSVTGGIDALGTVTVRLKHQERIFSGQASDTDIVVAAAYAHINALNRLYRYLQTEKSEFHEINSAVVSG

SEQ ID NO: 13150 - DNA, 1134 bp, Nostoc punctiforme PCC 73102
  CDS (1)..(1134): transl_table=11
atgaatcaaatcataattaatgacactacactacgtgatggcgaacaggcagcaggtgttgcttttaccctacaagaaaaagtagcgatcgctaagtttctcgattctattggtattcccgaattagaagtcggtataccagcaatgggtgacgaagaaacccgtgcgatcgccgcaatttctgacttgggtttacaagcaaaactcctgggctggaaccgcgctgtcatctcagatattaaggcttctatcgcttgcggtctgaaccgggtgcatattgccattcccgtctctggtatccaaatcgccgccaaattccacggtcaatggcgagtaagtttgcaaaaactcaaagactgtattagcttcgccgtcgatcaaggtctttgggtagcagtcggcggagaagattcttccagggctgacgaaaacttccttttagatgtagcgctttatgctcaagaatggggtgcatcccggttccgcttctgcgacaccgtaggagttctcgaccctttcaccacctacaccaaggttaaacggctggtttcagctttgatgattcctctagaaatccacacccacaacgattttggtctggcaacagccaacgcccttgcgggtatcaaagctggagccttatcagtgaataccacagttaacggattaggcgaaagagcgggaaacgcagctttagaagaagttgtcatggcaatcaaacgcatctatggcgttgatttgggcattgacacacccggtttgctggaactatctcaactagttgcagccgcatcaggagctagcgtaccaccttggaaagcgatcgttggcgaaaatacctttgctcacgaatctggcatccatgctcacggggtattgcaaaatcccattacctacgaaccatttgctcccgaagaggtgggttgggaacggcgtctagtattaggtaaacattctggacggcatttggtttcaaacttgctagaacaacatggaattttcttgaactcccaagaaacccaatctgttttagatgcagtgcgccatcaatcggtacagaaaaaacgcagcctgacgacagaagaactattgaatttggtcagagaacagaggtactctcatgcaacgcgatga

SEQ ID NO: 13151 - protein, 377 aa, Nostoc punctiforme PCC 73102
MNQIIINDTTLRDGEQAAGVAFTLQEKVAIAKFLDSIGIPELEVGIPAMGDEETRAIAAISDLGLQAKLLGWNRAVISDIKASIACGLNRVHIAIPVSGIQIAAKFHGQWRVSLQKLKDCISFAVDQGLWVAVGGEDSSRADENFLLDVALYAQEWGASRFRFCDTVGVLDPFTTYTKVKRLVSALMIPLEIHTHNDFGLATANALAGIKAGALSVNTTVNGLGERAGNAALEEVVMAIKRIYGVDLGIDTPGLLELSQLVAAASGASVPPWKAIVGENTFAHESGIHAHGVLQNPITYEPFAPEEVGWERRLVLGKHSGRHLVSNLLEQHGIFLNSQETQSVLDAVRHQSVQKKRSLTTEELLNLVREQRYSHATR

SEQ ID NO: 13152 - DNA, 1134 bp, Crocosphaera watsonii WH 8501
  CDS (1)..(1134): transl_table=11
ttgacaaatattcatatcaatgatacaaccctacgggacggggagcaagctgctggtattgttttcagtgccgccgaaaaaatagcgatcgcttcgatgatggatagtatgggtattcctgaattggaagtgggtatccctgctatgggaggctcagaagcccaagccatcaccaccattgtccaaaaaggtttaaaggccaagcttttaggctggaaccgtgccgtccgttccgatatagaagcctccattgcctgtggcttaaaaagggttcatatctctgtccctgtttctgaaattcaaattaaggcaaaatttaaaggaaaaactaatcttgtttggcaacgcttaaaagatagtctgaattttgctttagatcaggatttatttgtttctgtgggggctgaagacgcttcgagggcggatgaatcctttttactcgaagtagctcagtttgctcagtctttaggtgcttcacgtttccgtttttgcgatacggtgggcattcttgagcctttaaccacggcgcaaaaagtgggaaaattggttgagtgcctgaagattcccattgaaatgcacacccacaatgactttggtttagctactgctaacgccttagccgggttgcaagcaggggcaacggcggttaataccaccgttaacggcttgggagaaagagctggtaatgcggccttagaagagatgattatggctctcaaacgactctatcaggttgatttagccatagaaacctctcgcctacgggaattatctcaacaggtgatagctgcctctggtattgcccttcccccttggaaggcgatcgtcggggacaatgtttttgcccacgagtcgggtattcacgcccacggtgtcttagaaaacccccaaacctacgaacccttttcccccgatgaggtgggttggaaacgccgtttagtggtgggcaaacattcgggacgacatttattgaccaatgtattgagtcaacatggtattcgtttaaaccatgaagagtcccaagtggtgttagactccgtgcgccatttatcggtgcaaatgaaacgcagtctaaccgttgaagagttactttatgttgtatctaataggagtatgtctcatgggattgtatag

SEQ ID NO: 13153 - protein, 377 aa, Crocosphaera watsonii WH 8501
MTNIHINDTTLRDGEQAAGIVFSAAEKIAIASMMDSMGIPELEVGIPAMGGSEAQAITTIVQKGLKAKLLGWNRAVRSDIEASIACGLKRVHISVPVSEIQIKAKFKGKTNLVWQRLKDSLNFALDQDLFVSVGAEDASRADESFLLEVAQFAQSLGASRFRFCDTVGILEPLTTAQKVGKLVECLKIPIEMHTHNDFGLATANALAGLQAGATAVNTTVNGLGERAGNAALEEMIMALKRLYQVDLAIETSRLRELSQQVIAASGIALPPWKAIVGDNVFAHESGIHAHGVLENPQTYEPFSPDEVGWKRRLVVGKHSGRHLLTNVLSQHGIRLNHEESQVVLDSVRHLSVQMKRSLTVEELLYVVSNRSMSHGIV

SEQ ID NO: 13154 - DNA, 1614 bp, Crocosphaera watsonii WH 8501
  CDS (1)..(1614): transl_table=11
atgagcaatcaaaccgatcgcattatcatatttgataccaccctcagagacggggaacagtccccaggtgcaagtttaacggttgaagaaaaacttaccattgctcgcgctttagcacgacttggggtagatataatagaggccggtttcccctacgctagtccaggtgattttcaggcagtacagaaaattgctgaaactgtaggcacggaaaacggtccgagaatctgtggtttggcaagagcatctacaaaagatatcaaggcagcaggagaagcactaaaaccggcatttaagtcccgtattcatacctttatcgctacttctgacatccatctcaagcataaactgaaaaaaacacggtctgaagtgttagacattgtgccggaaatggtagcttatgctaaaaccttcaccgatgatatagaattttctccagaagatgcaggccgtagtgatcctgagtttatgtatcaggtattggaaactgcgatcgcagcaggtgcaactactgttaatattcccgacaccgtaggttataccacccccagcgagttcggtgcaatcatcaaaggtattaaagataatgtccccaacatagaccaagctatcatctcagtgcatggtcatgatgatctgggtttagctgtggccaacttcctggaagcggtgaaaaatggagccagacagctagaatgtaccattaatggtattggggaacgtgcgggcaatgcggctttagaagagttggttatggctctccacgtgcgtcgtcaatattttaaccccttcttgggtcgtgcagtagattccacggaacctttaactaatattaacacccaagaaatttacaaaacctcccgtctggtatccaacctcacaggaatgattgtacaacctaataaagctattgtgggagcaaatgcttttgctcacgagtctggtatccatcaagacggggttcttaaaaataagttaacctacgaaattatggatgcagagtccatcggtttgaccaataatcagattgtactgggtaaactttctggacggaatgcttttcgcacccgtttaagtgagttagggtttgagttatccgacaatgacttgaataacgctttcttgcggtttaaagaggttgctgacaagaaaaaagagatcaccgactgggatctcgaagccattgttaatgatgagattcaacaggcaccagaattgttccgtctcgaattagtacaagtatcctgtggcgatcacgctgtctctactgctacagttactctgaggaatccagaagggaaagaattaaccgatgctgcgatcggtactggtccggtggatgctgtttataaagccatcaaccgtgtagtgaatgttcccaacgagttgatcgagttttccgttaagtcggttactgctggtatcgatgcaatgggagaagttaccatcagattacgtcatgagggacgcacctactccggttatgcagccaataccgacattataactgcttctgcccgtgcttatattagcgcgttaaatcgtctttatggagcgatccaagaacaatctaaagttaactcttctgaagctgttttaacccctcaaggttaa

SEQ ID NO: 13155 - protein, 537 aa, Crocosphaera watsonii WH 8501
MSNQTDRIIIFDTTLRDGEQSPGASLTVEEKLTIARALARLGVDIIEAGFPYASPGDFQAVQKIAETVGTENGPRICGLARASTKDIKAAGEALKPAFKSRIHTFIATSDIHLKHKLKKTRSEVLDIVPEMVAYAKTFTDDIEFSPEDAGRSDPEFMYQVLETAIAAGATTVNIPDTVGYTTPSEFGAIIKGIKDNVPNIDQAIISVHGHDDLGLAVANFLEAVKNGARQLECTINGIGERAGNAALEELVMALHVRRQYFNPFLGRAVDSTEPLTNINTQEIYKTSRLVSNLTGMIVQPNKAIVGANAFAHESGIHQDGVLKNKLTYEIMDAESIGLTNNQIVLGKLSGRNAFRTRLSELGFELSDNDLNNAFLRFKEVADKKKEITDWDLEAIVNDEIQQAPELFRLELVQVSCGDHAVSTATVTLRNPEGKELTDAAIGTGPVDAVYKAINRVVNVPNELIEFSVKSVTAGIDAMGEVTIRLRHEGRTYSGYAANTDIITASARAYISALNRLYGAIQEQSKVNSSEAVLTPQG

SEQ ID NO: 13156 - DNA, 1173 bp, Prosthecochloris aestuarii DSM 271
  CDS (1)..(1173): transl_table=11
atgatacataaacgagagaaggctgatatcgcgaaacgacccgtatggataatcgatacgacattacgtgatggtgaacaggctcccggagtagcattcacccccgaagaaaagaaaacaatcgccggaaaactggctgaatgcggggtcaatgaacttgaaataggctatccggcaatcagcagtgaagaacaggccgttattacagaaattgcacggatgcagcttccgctccgcctcacctcctgggctcgggcaaaatgggaagatatcgatgcagcgatcagatgcaaaacacaaggcgtccacatcagcttccccctgtcagaactctacctgcaactgatggataaaccatatgagtgggttgaggaacaactgcatctgctcgtacccaaagcaaaaaaatactttgactttgtcagtgttggcggccaggatgcaacaagaacagggccggatattctggagcgcttcattcgtgaagccgtcgaatgcggagctgacagaataagaattgccgataccgttggtatcgcaacgccgctgcatctcatgcagctgatatcacgaataaaaaaagctgttcccgctacacttgaatttcatgcccacaatgatctcggcatggctacagccaatgcgttcagcgccatggaagccggctgcgacgctgtcagcgtttctgttaccgggctcggtgaacgggccggcaatgccgcactggaagaacttgcgatcgcactgaaactctccggtcgttaccattcatctatcaaaacagaacgcctgcaggaactctgcggcatcgtcgccaaagcctcgaacaggaacatcgaggaccagaaaccggtaatcggcgcatcagtcttccgccatgaatcaggcattcactgtaacgccctcctgaaaaaccctctttcctaccagcccttcctcccgggagaaatcgggcgcgacaactatgaactggttatcggcaaacattcgggaagcgccgcgatccagcatgttcttgcaggaaacgggatcgcgatcgaccgcaaagaggcatccagactgcttgctccggttcgcatgactgcagacagaaacaaacgcggcatttcagccgatgaactgaccagaatctatcaacaatacattgtcaaccctcaagacatatgcagataa

SEQ ID NO: 13157 - protein, 390 aa, Prosthecochloris aestuarii DSM 271
MIHKREKADIAKRPVWIIDTTLRDGEQAPGVAFTPEEKKTIAGKLAECGVNELEIGYPAISSEEQAVITEIARMQLPLRLTSWARAKWEDIDAAIRCKTQGVHISFPLSELYLQLMDKPYEWVEEQLHLLVPKAKKYFDFVSVGGQDATRTGPDILERFIREAVECGADRIRIADTVGIATPLHLMQLISRIKKAVPATLEFHAHNDLGMATANAFSAMEAGCDAVSVSVTGLGERAGNAALEELAIALKLSGRYHSSIKTERLQELCGIVAKASNRNIEDQKPVIGASVFRHESGIHCNALLKNPLSYQPFLPGEIGRDNYELVIGKHSGSAAIQHVLAGNGIAIDRKEASRLLAPVRMTADRNKRGISADELTRIYQQYIVNPQDICR

SEQ ID NO: 13158 - DNA, 1692 bp, Prosthecochloris aestuarii DSM 271
  CDS (1)..(1692): transl_table=11
atgttcttgaaatcgtcaaggcaggcggcatttttgcctatgccaggcaggaaaaccttatggcttgaactcgatatgaaggaaagaaacgcaatcgaactctacgatacaacgctccgggacggaacccagggtgaaaaaatcaacctctccgtacaagataagctgcttattgctgaaaaactcgatgagttcggtgctgactatatagaaggaggatggcccagcagcaatcccaaggatgaagagtttttccgaaaagcgctcggcctgcgtctcagcaatgccaaaatctgcgcatttggctcaacagccagaaaaccggacaatatcgcaaacgatccgaatcttgcaggcctcctcgcttctgaaacaccggtcattaccatctttggtaaaacctggaaggcacactccgctgtaagccttggcctctgcgatgaagaaaatgccgagctcatttaccgctctgtcgagcatctcaagaaagaaggacgtgaagtgctcttcgacgcagagcattttttcgatggttataaagacaatcccgccttcgccatcaaaatgcttctctcagccgaggaagccggagcggaccgactggtcctgtgcgatacgaatggaggaaccctcccgaatgaaatctatgaaatagtaaaagatgtagcatcatcgaccactgtcccgctgggaattcattcacataatgacggagaccttgctgtagccaatgccctttcagctctcagagcaggcgcgatgcacgttcagggcacgatcaacggaattggcgaacggtgcggcaatgccaatcttatcagcatcatccccaatgtcgttctgaaaatgaatgggaggttccgccacaaactgcagctcaaccagctgacaccgctctcaaagttcgtttacgaaattctgaacatgcctcctgataaccgggccccgttcgtcggacgatcagcatttgcccacaaaggaggaattcatgtcagtgccgttatgaaagagagctcactctacgagcacattgatccgaaaagtgtcggaaaccgtcagagagttcttgtttcagagctctcaggtcagagcaatattcgatacaaggcaaatgagcttggaattaacctcccggctgataatgcagccctctttaaaacgcttgttcagcgcattaaaacactcgaacacgaagggtttcagtttgatgtcgccgaagcatcgtttgaactgcttctgcgtcaccaactcggccagttcaagccgtttttcactgttctggaatccaagctccacatcgagtccggaaaaaaccgcgaatcagtcgatcaggctgtcctgaaaatcgaggtttgtgatgagattgagttgacagcagcagacggtgacgggccggtcaacgctctggacaaagcattacgaaaatcgcttcgtggattttatcctgaaatccgcagcatgcgccttgtcgattataaggttcgcgtacttgaagaaaaaaaaggtaccagcgccaaagtgagagtccttattgaatccagcgatggtcagaacagctggtcgacggtaggcgtttcacccaatatcatcgatgcaagccttcaggcgctcagcgacagcattaactactatctgttcacatacagaacagaaaaagcaaaccgcctcagcactgcccaatccgcctcataa

SEQ ID NO: 13159 - protein, 563 aa, Prosthecochloris aestuarii DSM 271
MFLKSSRQAAFLPMPGRKTLWLELDMKERNAIELYDTTLRDGTQGEKINLSVQDKLLIAEKLDEFGADYIEGGWPSSNPKDEEFFRKALGLRLSNAKICAFGSTARKPDNIANDPNLAGLLASETPVITIFGKTWKAHSAVSLGLCDEENAELIYRSVEHLKKEGREVLFDAEHFFDGYKDNPAFAIKMLLSAEEAGADRLVLCDTNGGTLPNEIYEIVKDVASSTTVPLGIHSHNDGDLAVANALSALRAGAMHVQGTINGIGERCGNANLISIIPNVVLKMNGRFRHKLQLNQLTPLSKFVYEILNMPPDNRAPFVGRSAFAHKGGIHVSAVMKESSLYEHIDPKSVGNRQRVLVSELSGQSNIRYKANELGINLPADNAALFKTLVQRIKTLEHEGFQFDVAEASFELLLRHQLGQFKPFFTVLESKLHIESGKNRESVDQAVLKIEVCDEIELTAADGDGPVNALDKALRKSLRGFYPEIRSMRLVDYKVRVLEEKKGTSAKVRVLIESSDGQNSWSTVGVSPNIIDASLQALSDSINYYLFTYRTEKANRLSTAQSAS

SEQ ID NO: 13160 - DNA, 1560 bp, Xylella fastidiosa Ann-1
  CDS (1)..(1560): transl_table=11
gtgaacacgagcatatccagccagccgccctgtatccggatttttgataccaccctgcgggacggtgagcaatctcccggttgcagtatgcctgcacaacaaaaactggtcatggcacgcgcattagatgcattgggcgtagacattatcgagactggtttcccagccagttcccaatccgactacgaagccatgacgctgatcgcacgcgagttacgtagaccaactctggcagtactgtcacgttgtctgcaagccgatatcgaaacttcagcacgcgcactggaatcagcaaccaaaccacgcttgcatgtatttctgtcaaccagcccattacaccgcgagcacaagctacgcatgagcaaggaacaggtgctggagtcagtgcacaagcatgtgagtctcagtcgaaccttaattgacgatgtggaattctcggccgaggatgcgacgcgcactgaggaggatttcctgatagaggttacccgcgtggcaatcgccgctggtgcaaccacgatcaacctgccagacaccgtagggttcagcacgcctgaagaaatccgcaacatgtttacgcgcgtcatcgcgaacgtcgaaggtgcaaacaaagtgatctttagtgcgcactgccacgacgatctgggtttggccgttgctaactcgctggcagccattgagggtggtgcacgccaaatcgaatgtactatcaatggcattggtgagcgcgctggtaactgcgcgctggaagaactcactatggtgttgaaagtacgcaacgcgttttacaacattgatacttcgatccacacatcacgtatcgtctccacctcccagttactgcaacgattggttggcatgcccgtgcaacgtaacaaggcagtagtaggtgccaatgcctttgcacatgaatcgggtatccatcagcacggtatgctgcgccatcgcggcacctacgaaatcatgcgtccacaagaagtcggttgggtatgttcgcacatggtactcggccgccatagcggccgtgctgcggtcgaacagcgtctacgcgcactgggctacttgctggaggaagaagatctaaaactggtatttgaagaattcaaacagctttgtgagaaacagcgtttggtcaccgatgtcgacctgcaagtactgatgcaagatacaacagtacagcatggctatcgcttggcctcaatgacaatcagtgatgttggtaaccgggccaatgcactggtggaattgtccgatccccaaggtcagcgtgttgccgaaactgcgcaaggcaacggcccagtagatgcactgttcggagcgctggctgcagcaactggggtcaaactggagttggacagctatcaggtacacagtgttggtatcggggccgatgcacgtggtgaagcaaacctcagtgtacgccacaacgatactcagtacgaaggtacagggaccagtaaagacattatcgaagccagtgcgctcgcttggctagacgtcgccaaccgtttgctacgtaatcccgaaaatatgcaaaataaacaaaacacagcactggcctga

SEQ ID NO: 13161 - protein, 519 aa, Xylella fastidiosa Ann-1
MNTSISSQPPCIRIFDTTLRDGEQSPGCSMPAQQKLVMARALDALGVDIIETGFPASSQSDYEAMTLIARELRRPTLAVLSRCLQADIETSARALESATKPRLHVFLSTSPLHREHKLRMSKEQVLESVHKHVSLSRTLIDDVEFSAEDATRTEEDFLIEVTRVAIAAGATTINLPDTVGFSTPEEIRNMFTRVIANVEGANKVIFSAHCHDDLGLAVANSLAAIEGGARQIECTINGIGERAGNCALEELTMVLKVRNAFYNIDTSIHTSRIVSTSQLLQRLVGMPVQRNKAVVGANAFAHESGIHQHGMLRHRGTYEIMRPQEVGWVCSHMVLGRHSGRAAVEQRLRALGYLLEEEDLKLVFEEFKQLCEKQRLVTDVDLQVLMQDTTVQHGYRLASMTISDVGNRANALVELSDPQGQRVAETAQGNGPVDALFGALAAATGVKLELDSYQVHSVGIGADARGEANLSVRHNDTQYEGTGTSKDIIEASALAWLDVANRLLRNPENMQNKQNTALA

SEQ ID NO: 13162 - DNA, 1563 bp, Streptococcus suis 89/1591
  CDS (1)..(1563): transl_table=11
atgcgtgtgattgaatttttagatacgactttacgagatggtgaacagacgccgggtgtgaatttttcgattaaagaaaaagtgaccatcgccaagcagttggaaaaatgggggatttctgctattgaagcgggtttcccagcggccagtcctgattcgtttgaagcggttcgtcagattgcggcagcgatgaccaagacggctgtgacaggtttggcacggtcagtaaaatcagacattgatgcttgttatgaggctctgaaagatgccaagtatccgcagatccatgttttcattgcgaccagccccattcatcgtgaatttaaacttcaaaagaccaaagaagaaattttggcgcaaatcactgaacatgtcagctatgcacgtgagcgttttgaggtggtggaattctcgccagaggatgcgacacggacggagttggattacttgcttgaagtggtgcagacagcggtagatgctggtgcgacctacatcaacattccagatacagtcggctttacgactcctcagcactacggagaaattttccgtcacttgataacaaacgtcaaatcggaccgtgagattattttcagtccgcattgccacaatgacctaggtatggcagttgccaataccctatcggccattaaaaacggtgccggtcgtgtcgagggcaccattaacggtatcggtgagcgagcagggaatgcggcccttgaagaagtagctgttgcccttgaaattcggaaagatttctatgatgtgactagtccgattgttcttaaggaaatgctcaatacttcggaattagtatctcgcttttctgggattgccattccacgcaataaggcggtggttggtggcaatgccttctcacatgaatctggtatccatcaggatggtgtcttgaaaaatccattgacctatgaaatcattacacctgagttggtaggggtcaagaaaaattctctgccactgggtaaactatctggtcgtcacgcctttgtagaaaagctaaaagaactagacttgtattttgaagaaggagacgttgctagcttgtttgctcgtttcaaaaacctggcagacaagaaggaaaaaatcacggatgcagatattcgtgccttggtagctgggacagaaattagcaaccgtgatggtttccaatttaaagatttgcgtttggatagtcagtctgacggaagtattcaggctcaggtcatcttcatcaatcaggatgaggaagaagtggttgttgcagagtcaggcaagggttctgttgaggctgtctttaatgctgttgaccaattcttccaccaagagattagcttggaacgctaccatattgacgccatcaccgatggaattgatgcccaggcgcgtgtgcttgtcgctgtagaaaacaaggcaacggaaacaatcttcaatgcctctggtattgactttgacgtggtgaaggcttctgccattgcctatatccatgccaatgtcatggtacagaaagaaaatagcggacagattgataagaaattatctgagaaagagttgccaactagctag

SEQ ID NO: 13163 - protein, 520 aa, Streptococcus suis 89/1591
MRVIEFLDTTLRDGEQTPGVNFSIKEKVTIAKQLEKWGISAIEAGFPAASPDSFEAVRQIAAAMTKTAVTGLARSVKSDIDACYEALKDAKYPQIHVFIATSPIHREFKLQKTKEEILAQITEHVSYARERFEVVEFSPEDATRTELDYLLEVVQTAVDAGATYINIPDTVGFTTPQHYGEIFRHLITNVKSDREIIFSPHCHNDLGMAVANTLSAIKNGAGRVEGTINGIGERAGNAALEEVAVALEIRKDFYDVTSPIVLKEMLNTSELVSRFSGIAIPRNKAVVGGNAFSHESGIHQDGVLKNPLTYEIITPELVGVKKNSLPLGKLSGRHAFVEKLKELDLYFEEGDVASLFARFKNLADKKEKITDADIRALVAGTEISNRDGFQFKDLRLDSQSDGSIQAQVIFINQDEEEVVVAESGKGSVEAVFNAVDQFFHQEISLERYHIDAITDGIDAQARVLVAVENKATETIFNASGIDFDVVKASAIAYIHANVMVQKENSGQIDKKLSEKELPTS

SEQ ID NO: 13164 - DNA, 1623 bp, Synechococcus sp. RS9917
  CDS (1)..(1623): transl_table=11
atggccaaggaccccggccgcgttctgatcttcgataccaccctgcgggatggtgaacagtcgcctggcgccagcctcaacctggaggagaagctggcgatcgcgcagcagctggcccggctcggtgtcgacatcatcgaagccggatttccctttgccagtgccggcgatttcgaggcggtgcagcgcatcgcccaacaggtgggtggtgcgcaggggccgatcatctgcggcctcgcccgcgcctcccgtggcgatatcaaggcctgtgccgatgcggtggccccagccccgcgccgccgcatccacaccttcatcgccaccagcgacatccacctcgagcacaagctgcgcaagagccgcaaggaggtgctggcgattgttcccgagatggtcgcgtatgcccgctccctcgtcgacgacgtcgagttctcctgtgaggacgccggccgcagtgatccggagtttctctacgaggtgatcgaagcggcgatcgcggctggtgctggcacgatcaacattcccgacaccgtcggctacaccaccccggcggaattcggtgccctgatcgccggcatcgatcagcacgtgcccaacatccaggaggcggtcctgtcggtgcatggccacaacgatctgggcctggccgtggccaatttccttgaggcggtcaagaacggggcccgtcaactcgagtgcaccatcaatggcatcggcgaacgggccggtaatgcggccctggaggagttggtgatggccctgcatgtgcgccgccgctacttcaatccttttttgggtcgcgacgaggagtccccgacgccgctcacggccgttcgcaccgaggagatcaccaagacctcccgcttggtgtcgaatctcaccggcatggtggtgcaacccaacaaggcgatcgtgggtgccaacgctttcgcccacgagtcgggcattcaccaggacggcgtgctcaagaaccggctgacctatgaaattgttgatgcccgcaccgtcggcctcagcgataaccgcatctccctgggcaaattgagtggtcgcagtgccgtgcgcgctcgcctcgaggagctgggctacgacctcagccgcgaggatctcgatgaggcctttgcccgcttcaaggatctggccgatcgcaagcgtgagatcaccgatcgcgatctggaagcgatcgtgagcgagcaggtgcagcagcccgaggcccgctaccagctcaagctggtgcaggtgagttgtggcagcagcctgcggcccaccgccaccgtcaccctggccgacgaagaggggcgggaacagaccgcggccgcgatcggcaccgggccggtggatgcggtgtgtcgggcgctcaatgctctggcggaggagcccaaccagctggtggagttctccgtgaaatcggtcaccgagggcatcgacgccatgggggaggtcacgatccggttgcgccgcgacggtgcgctctattccggccattccgctgacaccgatgtggtggtggcggcggcccaggcgttcgtcaatgccctcaaccgcctggtggccggtgcgtcccgctccgccatccacccccagcgcgatcatgcggtcctggagacccgcccgagcctctga

SEQ ID NO: 13165 - protein, 540 aa, Synechococcus sp. RS9917
MAKDPGRVLIFDTTLRDGEQSPGASLNLEEKLAIAQQLARLGVDIIEAGFPFASAGDFEAVQRIAQQVGGAQGPIICGLARASRGDIKACADAVAPAPRRRIHTFIATSDIHLEHKLRKSRKEVLAIVPEMVAYARSLVDDVEFSCEDAGRSDPEFLYEVIEAAIAAGAGTINIPDTVGYTTPAEFGALIAGIDQHVPNIQEAVLSVHGHNDLGLAVANFLEAVKNGARQLECTINGIGERAGNAALEELVMALHVRRRYFNPFLGRDEESPTPLTAVRTEEITKTSRLVSNLTGMVVQPNKAIVGANAFAHESGIHQDGVLKNRLTYEIVDARTVGLSDNRISLGKLSGRSAVRARLEELGYDLSREDLDEAFARFKDLADRKREITDRDLEAIVSEQVQQPEARYQLKLVQVSCGSSLRPTATVTLADEEGREQTAAAIGTGPVDAVCRALNALAEEPNQLVEFSVKSVTEGIDAMGEVTIRLRRDGALYSGHSADTDVVVAAAQAFVNALNRLVAGASRSAIHPQRDHAVLETRPSL

SEQ ID NO: 13166 - DNA, 1623 bp, Synechococcus sp. WH 5701
  CDS (1)..(1623): transl_table=11
atggccaaggaccccggccgcgttctgatcttcgacaccaccctccgggatggtgagcaatcccccggggccagcctcaacctggaggagaagctggcgattgcccatcagcttgcgcgcctgcgcgtcgacatcattgaagccggctttcccttcgccagccccggtgatttcaatgcggttcagcgcatcgccgccgctgtcggcacccccgaagggccggtgatctgtggcctggcccgggctgcccgcggcgacatcaaggcctgcgcagaagcggtggcccccgccgccaaccgccgcattcacaccttcatcgccaccagcgacatccatctggagcacaagctgcgcaagagccgcgccgaggtggtggcgatcaccgcagagatggtggcctatgcccgctccctcgtcgaggacgtggaattctcctgcgaggacgctggccgctccgatcctcactacctctatgaggtgatcgaggccgccatcgctgctggcgccaccacgatcaacatccccgacaccgtgggctacaccaccccggccgaattcgggggcctgatcgccggcattgaggcccatgtgcccaacattgatcaggcggtgatctcggtgcacggccataacgacctcggtctggcggtggccaacttcctcgaggcggtcaagaacggtgcccgccagctggagtgcacgatcaacggtatcggcgagcgggccggcaacgcctctctcgaggagctggtgatggcgctgcatgtgcgccgggcctatttcaaccccttcctcggccgccaggccagcagcagcgagccgctcacaggggtgcgcaccgaggagatctacaagacttcccgcctggtgagtaatctcaccggcatggcggtgcaacccaacaaagcgatcgtgggtgccaacgcctttgcccatgaatcgggcatccatcaggacggtgtgctcaagaaccgcctcacctacgagatcgtcgatgcccgcaccatcggcctggccgacaaccgcatctccctcggcaaactgagcggccgcagtgccttccgggcgcgcctggaggatctgggttacaccctcgagcgcgacgacctcgacgaggctttcgcccgcttcaaggagctggccgatcgcaagcgggaaatcaccgaccgggatctcgaggcgatcgtgagtgatcaggcccagcagaccgaggcccgttacgtgctcaagctggtgcaggtgagcacgggcaccaacctgcagcccaccgccaccgtgactctcaccaccagtgatggcgccgagctcaccgaggccgccatcggcaccggtccggtcgatgccgtctgccaggccctcaacagcctggcgcgggtgcccaacgagctggtggagttcagcgtcaagtcggtcaccgagggcatcgatgccatgggcgaggtcacgatccgcctgcgccaccatggggttctctacgccggccatgccgctgacaccgacatcgtggtggctgcggcccaggccttcgtcaatgccctcaaccggctggtgcacgggatggagcgtcagcccctgcatcctcagaaagcgtcgctgccggtggcggagctgccgcggctgtga

SEQ ID NO: 13167 - protein, 540 aa, Synechococcus sp. WH 5701
MAKDPGRVLIFDTTLRDGEQSPGASLNLEEKLAIAHQLARLRVDIIEAGFPFASPGDFNAVQRIAAAVGTPEGPVICGLARAARGDIKACAEAVAPAANRRIHTFIATSDIHLEHKLRKSRAEVVAITAEMVAYARSLVEDVEFSCEDAGRSDPHYLYEVIEAAIAAGATTINIPDTVGYTTPAEFGGLIAGIEAHVPNIDQAVISVHGHNDLGLAVANFLEAVKNGARQLECTINGIGERAGNASLEELVMALHVRRAYFNPFLGRQASSSEPLTGVRTEEIYKTSRLVSNLTGMAVQPNKAIVGANAFAHESGIHQDGVLKNRLTYEIVDARTIGLADNRISLGKLSGRSAFRARLEDLGYTLERDDLDEAFARFKELADRKREITDRDLEAIVSDQAQQTEARYVLKLVQVSTGTNLQPTATVTLTTSDGAELTEAAIGTGPVDAVCQALNSLARVPNELVEFSVKSVTEGIDAMGEVTIRLRHHGVLYAGHAADTDIVVAAAQAFVNALNRLVHGMERQPLHPQKASLPVAELPRL

SEQ ID NO: 13168 - DNA, 1548 bp, Pseudoalteromonas tunicata D2
  CDS (1)..(1548): transl_table=11
atgagcgataaagtttggatttttgatacaacactacgtgatggtgaacaagccttaaaagcaagcttgactgaagatgataaattacaactcgctcatactattagccgactgaatgtagatgtcatggaggtggggtttccagtatcaagcccagcagattttcgctcggtgcagcgtattgcaactgaagtaaaaggaccaattatttgtggtttagcgcgggcagttgtgaaagatattgaagcgtgtggcgaagcgcttcgccctgctgagcagcgccgtattcatacttttattgccacaagtccattgcatcttgaacataagttacgaatgagtttagaccaagcaactgaaatggcagttaagtcgataaagttagcgcgtaattacaccgatgatgttgaattctcatgtgaagatgcagggcgtactccacatgatgatttatgccgtattgttgagcgcgcaattgctgcaggtgcttctaccatcaatcttcctgatacggtcggatatgttactccgcaagaatatgcggcgatgatcagtcatttaatgaataacgtgcctaacattgataaagcgcgtttaagtgtgcattgccacaatgatttaggtttagccgtggcgaactcgattgctgcagtgcaagcaggtgcgcgtcaaatcgaatgtactatcaatggtattggtgagcgagccggtaactgttcgatggaagaagtggcaatgattttaaaaatgcgtcacgactaccttaatttgcataccgatattaatagtgaggaaatttatcgagcgtcgcgtcaagtaagccaaatttgcaacatgccagtgcaaccgaataaagcgattgtcggtgaaaatgccttcgcgcatagttcgggtattcatcaagatggtgtattaaaagcacaaaatacctatgaaattatgtcaccagaaacagtgggtgtgccaagcaaccaattaaatatgacttcgcgctcaggccgtcatgttattcaacatcgtttaagtgagcttggctatcaaaccggcgattatgatatggaaagcttatatgaaagctttttagccttggcagatcaaaagggcacagtgtatgactatgaccttgaagcaatgatccactttaataaaatcagtgataaagatgactattatcagctggattttgttaattcaacatcgaattcacagtcagttgccagcagcacagttggcttggtcattggtggtgaaaaagtctctgaagccgcgaccggcaatggccctgttgaggcatcttataaggcgattaagcgcattacagcaatggatgttgaagtgattgaatacaaccttgatgcaactggcgcgggtgaaagctcactgggccaagttgatatcatcgccaaatttgatggtaaacaatatcacggtgcaggccttgcagccgatattgtagaggcatcagtccgcgctatggtacgagtttacaatttaatttatagggcgcagcaagtgtctgatataaaacaacaaaggaaagcaggatga

SEQ ID NO: 13169 - protein, 515 aa, Pseudoalteromonas tunicata D2
MSDKVWIFDTTLRDGEQALKASLTEDDKLQLAHTISRLNVDVMEVGFPVSSPADFRSVQRIATEVKGPIICGLARAVVKDIEACGEALRPAEQRRIHTFIATSPLHLEHKLRMSLDQATEMAVKSIKLARNYTDDVEFSCEDAGRTPHDDLCRIVERAIAAGASTINLPDTVGYVTPQEYAAMISHLMNNVPNIDKARLSVHCHNDLGLAVANSIAAVQAGARQIECTINGIGERAGNCSMEEVAMILKMRHDYLNLHTDINSEEIYRASRQVSQICNMPVQPNKAIVGENAFAHSSGIHQDGVLKAQNTYEIMSPETVGVPSNQLNMTSRSGRHVIQHRLSELGYQTGDYDMESLYESFLALADQKGTVYDYDLEAMIHFNKISDKDDYYQLDFVNSTSNSQSVASSTVGLVIGGEKVSEAATGNGPVEASYKAIKRITAMDVEVIEYNLDATGAGESSLGQVDIIAKFDGKQYHGAGLAADIVEASVRAMVRVYNLIYRAQQVSDIKQQRKAG

SEQ ID NO: 13170 - DNA, 1545 bp, Photobacterium sp. SKA34
  CDS (1)..(1545): transl_table=11
atgaaagatcaggtcattattttcgatactacgctacgtgacggtgaacaagcgttgtcggcaagccttaccgtaaaagaaaaactacagatcgcatacgcattagagcgtttaggtgttgatgtgattgaagcaggctttcctgtgtcatccccaggcgattttgagtcagtacaaaccatcgcgaaacacatcaaaaacagtcgtatttgtgcactatcccgagcggtagcaaaagatattgatgttgcggctaagtcattaaaagtcgcagaagctttccgcattcatacctttatttcaacctcaaccgttcacgtgcaagacaagctacgtcgtagctatgatgatgtcattgatatgggtgtcgcagctgtaaagcgtgcgcgtaattatactgatgacgttgagttctcatgtgaagatgctggccgtacaccgatcgataatctatgccgcatggtagaagcagctatcgacgcgggggctaacaccattaacatccctgacaccgtgggttacaccctgccgagtgaatttggcggcattatcacccagctatttaatcgcgttccaaacatagataaggcagtgatttctgtccactgtcacgatgatttaggcatgtctgttgccaattcaatggcggccgttcaagcaggtgctcgtcaggtagaaggaaccattaatggtctaggtgagcgtgctggtaactgctcactagaagaaattgcgatgatcatcaaaactcgtcaggagttactgggtgtaacaaccaatatcaaacacaatgaaattcaccgaaccagtaaaatggttagtcagttgtgtaatatgccaattcaagccaataaagcgattgtcggtgccaatgcctttagtcactcatcgggtattcaccaagatgggatgctaaaaaataaaaacacctatgagatcatgacgcctgaatcgattggccttaaaaaccaagcactaaacctaaccagtcgctctggtcgtgcggctgttaaaagtcacatggatgcattaggctacaccgagaacgaatatagcctagataaactgtatgctgatttcttaaaactggcagatcgaaaaggccaagtgtttgattatgacttagaagcgctgatgcatttttctaaccttcgtgatgaagatgactacttcaaactgaactacctaagtgttcaatcaggtagtgttatggcaacgaccagcatcaagctattgtgtggtgacgaagaaaaatgtgaagcggcagtcggtaatggtcctgtcgatgcgttataccagtgtatttaccgcctaacaggttatgacattgtactggataaatttgatttaaccgcaaaaggcgaaggtgaagacggcttaggacaagcagatatcatcgctaattataaaggcagaaaataccacggaacgggcttagcaaccgatattgtagaagcgtctggtcaagcgttactgcacgttatcaacagcattcaccgtgcagatcaaattgaagaaattaagcaacgctcagcaactcactag

SEQ ID NO: 13171 - protein, 514 aa, Photobacterium sp. SKA34
MKDQVIIFDTTLRDGEQALSASLTVKEKLQIAYALERLGVDVIEAGFPVSSPGDFESVQTIAKHIKNSRICALSRAVAKDIDVAAKSLKVAEAFRIHTFISTSTVHVQDKLRRSYDDVIDMGVAAVKRARNYTDDVEFSCEDAGRTPIDNLCRMVEAAIDAGANTINIPDTVGYTLPSEFGGIITQLFNRVPNIDKAVISVHCHDDLGMSVANSMAAVQAGARQVEGTINGLGERAGNCSLEEIAMIIKTRQELLGVTTNIKHNEIHRTSKMVSQLCNMPIQANKAIVGANAFSHSSGIHQDGMLKNKNTYEIMTPESIGLKNQALNLTSRSGRAAVKSHMDALGYTENEYSLDKLYADFLKLADRKGQVFDYDLEALMHFSNLRDEDDYFKLNYLSVQSGSVMATTSIKLLCGDEEKCEAAVGNGPVDALYQCIYRLTGYDIVLDKFDLTAKGEGEDGLGQADIIANYKGRKYHGTGLATDIVEASGQALLHVINSIHRADQIEEIKQRSATH

SEQ ID NO: 13172 - DNA, 1215 bp, Desulfitobacterium hafniense DCB-2
  CDS (1)..(1215): transl_table=11
gtgaacggaaagtggtggacgaaggattggtgggtaagcgaatacaattaccacgaagaagtagtcaaggatttgcaccttccccaaaagattgagatacacgacgcgacgctgcgggatggggaacagactcccggcgtggtgttcagcaaagaggataaagtaagaattgccgaattgctggccgaagtgggagttgagcggattgaagccggcatgccggcggtatccaaagatgatgcccaagcgattgaggagatcgccaaacgcaatttgggacccaagattatggtattctgccgggcgatgcgggaggatgtggatcgggccgtggattgcggagcagatgggatcgttctggaagcgcccagcggctatccgaagcttaaatatcaatttgccagtaagtggacggaagaaagcctgaccgaagccgtcgtcaataccatcaattacgccaaggaaaaggggctgtttgtcaactatttcccctttgatacgaccagagcggaacttccttttctcaagcggcttctgaccaatgtaacaactcaagccaaaccggattcggtaacggtggtcgataccacaggttcgatcactcccaccgccatgcgttttctggtcaggcaggtcagggaaaccatcgctctgcccctggaagttcatacccacaacgatttcgggctgggcacagccacgaccttcgccgcggtggaggaaggtgtgcaggtcgtgcacagctgcatcaacggtttgggtgagcggaccggcaatactgctctggaagagatagctctgggcttaaagctgctctatggcatagagctgcccaaattcaacttccagaaactgagtgagctttcccaggaagtgcaaaggatgtccggcaagaccctggcccaaaacaagccggtggtcgggctgctgccttttacccgggagattggcttgggaatgaaagttctggaagattacccgacggctgttttcccttttatgccggattttgtgggtcaaaaaatgaaaatcgtcatgggcaagaaaagcggcaaggaatccgttctgatgaagcttgaggcggcagggttaaaggccaatgaagagcaggtacaggaaattgttgcgcgcaccaaagctgccgggatcgccaaacgcaactggcttgaagacgaggagttcttggtgatcgcacgtcaggtattggaccgttaa

SEQ ID NO: 13173 - protein, 404 aa, Desulfitobacterium hafniense DCB-2
MNGKWWTKDWWVSEYNYHEEVVKDLHLPQKIEIHDATLRDGEQTPGVVFSKEDKVRIAELLAEVGVERIEAGMPAVSKDDAQAIEEIAKRNLGPKIMVFCRAMREDVDRAVDCGADGIVLEAPSGYPKLKYQFASKWTEESLTEAVVNTINYAKEKGLFVNYFPFDTTRAELPFLKRLLTNVTTQAKPDSVTVVDTTGSITPTAMRFLVRQVRETIALPLEVHTHNDFGLGTATTFAAVEEGVQVVHSCINGLGERTGNTALEEIALGLKLLYGIELPKFNFQKLSELSQEVQRMSGKTLAQNKPVVGLLPFTREIGLGMKVLEDYPTAVFPFMPDFVGQKMKIVMGKKSGKESVLMKLEAAGLKANEEQVQEIVARTKAAGIAKRNWLEDEEFLVIARQVLDR

SEQ ID NO: 13174 - DNA, 1164 bp, Desulfitobacterium hafniense DCB-2
  CDS (1)..(1164): transl_table=11
gtggaggaaagaaaattaaccatcgtggacacgacattgcgggatggagaacagaccgcaggagtagtattttctaatcaggagaagctgatgattgcccggatgctggatgatctcggtgtccatcagattgaagccggggttccggtcatgggcggcgatgagcagaaggcaatccgtgatattgttaaaatgggtttgaaagccagtattatgggatggaaccgggcggtcatagccgatattgaaaaatccattgaatgtggatgcgatgcggtggctatatccatttccacctcagatattcatatcgaacataaactgatgaccacacgggaagacgttttggccagaatggtcaaggctgctgaatttgccaagagaaacgggctttacatatccgtgaatgcggaggatgcctcccgttccgatctggattttctcctggaatttgctcgtcaggccaaagaggcgggggcagaccggcttcgctattgcgatacggtggggatccttgagcctttcacgacctttgagcgaatcacgaagctcaaagaaaccatcgatatcgatgtggagatgcatactcataatgactttggtatggcaacggccaatgccttagccggtgtgaaagcgggagccagccatattggggtaacggtcaacggcttgggcgagcgggccggtaatgcagctttagaggaaattgtcatggccctgaagtatttggccggagtcgatctgaaatttgccacagagcgttttgtcgaggtttcagagtttgtagcgagagcgtcaggacgttctgttcctgcctggaaggctatcgtgggcagcaatatgtttgcccatgagtcggggattcacgctgatggggctttgaaaaatcccctcacttacgaagtgtttaaaccggaggaagtgggcctggagcgtcagattgtgattggcaagcactcgggaactgcggccatcaaagctaagttccgcaatgaatacggcaaagagatttccgaggaagaagccaatgagctgctggcccgggtaagagcttttgctgtggatatgaagcgctccctttttgataaggagctcatgtatatttacgaagatttgcatagggaagcggaaaatcgtcaacctaacccaaagtggttttaa

SEQ ID NO: 13175 - protein, 387 aa, Desulfitobacterium hafniense DCB-2
MEERKLTIVDTTLRDGEQTAGVVFSNQEKLMIARMLDDLGVHQIEAGVPVMGGDEQKAIRDIVKMGLKASIMGWNRAVIADIEKSIECGCDAVAISISTSDIHIEHKLMTTREDVLARMVKAAEFAKRNGLYISVNAEDASRSDLDFLLEFARQAKEAGADRLRYCDTVGILEPFTTFERITKLKETIDIDVEMHTHNDFGMATANALAGVKAGASHIGVTVNGLGERAGNAALEEIVMALKYLAGVDLKFATERFVEVSEFVARASGRSVPAWKAIVGSNMFAHESGIHADGALKNPLTYEVFKPEEVGLERQIVIGKHSGTAAIKAKFRNEYGKEISEEEANELLARVRAFAVDMKRSLFDKELMYIYEDLHREAENRQPNPKWF

SEQ ID NO: 13176 - DNA, 1623 bp, Synechococcus sp. RS9916
  CDS (1)..(1623): transl_table=11
atggccaaggaccccggccgcgttttgatcttcgacaccaccctgcgggatggtgagcaatctcctggcgccagcctcaatcttgaagagaagctggccattgcccagcagctggcgcgcctgggcgtcgacgtgatcgaggcggggttcccctttgccagccccggggatttctcggccgtgcagcgcattgcccagcaggtgggcggcgaaaacggtccgatcatctgcggcctggcgcgcgcctcccgcgctgatatcaaggcctgtgctgatgctgtagcgccggcgcctcgccgtcgcattcacaccttcatcgccaccagcgacatccacctcgaacacaaattgcgcaagagccgcaaggaggtgctggcgatcgtgccggagatggtggcctatgcccgctctctggtggatgacgtggagttctcctgcgaagacgcaggccgcagcgatcccgagtttctttacgaggtgatcgaggccgccatcgctgccggcgccagcaccatcaacattcccgacacggtcgggtacaccaccccgtcggaatttggtgccctgattggtggcatcaacacccacgtgcccaacatcgatgaagcggtgttgtcggtgcacggccacaacgatctcggcctggcagtcgccaatttcctcgaggcggtgaaaaacggagcacgccagttggagtgcaccatcaacggcatcggtgaacgggccggtaacgctgcgctggaagaactggtgatggcgttgcacgtgcgtcgccgctactacaaccccttcttcggtcgagcagaggattcacctacgccgctcacggcggtgcgcacggaggaaatcaccaaaacttcccgcctggtgtcgaatctcaccggcatggtggtgcagcccaacaaggcgatcgtgggggccaacgcctttgcccacgagtcgggtatccatcaagacggggtgctgaagaaccggctcacctacgaaatcgttgatgcccagaccgttggcctcagcgacaaccgcatttccctgggcaagctcagtggccgcagtgctgtgcgcgctcgcttggaagagctcggctacgacctcagccgcgatgatctcgatgaagcgtttgcccgtttcaaagatctggctgatcgcaagcgtgaaatcaccgatcgtgatctagaagcgatcgtgagcgagcaggtgcagcaacctgaagcccgttatcagctgaagctcgtgcaggtgagctgcggcagcagccttcagcccacggccacggtcaccctggccgatgaagaggggcaggagcagaccgctgcttccatcggcaccggtccggtggatgcggtgtgtagggccctgaatgccctggcaggcgttcccaatgagttggtggagttttcggtgaagtccgtcaccgaaggcattgatgccatgggtgaggtgaccattcgccttcgccgcgatggccaacttttctccggtcattcggccgacaccgatgtggtggtggcggcagctcaggcgtttgtgaatgccctcaaccggctcgttgccgggcagcaccatcagcccatccacccgcagcgagacaccgctgaggtgtccgcccgcccgagcctctga

SEQ ID NO: 13177 - protein, 540 aa, Synechococcus sp. RS9916
MAKDPGRVLIFDTTLRDGEQSPGASLNLEEKLAIAQQLARLGVDVIEAGFPFASPGDFSAVQRIAQQVGGENGPIICGLARASRADIKACADAVAPAPRRRIHTFIATSDIHLEHKLRKSRKEVLAIVPEMVAYARSLVDDVEFSCEDAGRSDPEFLYEVIEAAIAAGASTINIPDTVGYTTPSEFGALIGGINTHVPNIDEAVLSVHGHNDLGLAVANFLEAVKNGARQLECTINGIGERAGNAALEELVMALHVRRRYYNPFFGRAEDSPTPLTAVRTEEITKTSRLVSNLTGMVVQPNKAIVGANAFAHESGIHQDGVLKNRLTYEIVDAQTVGLSDNRISLGKLSGRSAVRARLEELGYDLSRDDLDEAFARFKDLADRKREITDRDLEAIVSEQVQQPEARYQLKLVQVSCGSSLQPTATVTLADEEGQEQTAASIGTGPVDAVCRALNALAGVPNELVEFSVKSVTEGIDAMGEVTIRLRRDGQLFSGHSADTDVVVAAAQAFVNALNRLVAGQHHQPIHPQRDTAEVSARPSL

SEQ ID NO: 13178 - DNA, 1554 bp, Alteromonadales bacterium TW-7
  CDS (1)..(1554): transl_table=11
atgcaagacaaagataaagtatggatttttgataccactttacgtgatggcgagcaggcacttaaggcaagccttactgaagatgataaaattcagttagcgcatactattagccgtttgaatgttgatgtgatggaagtgggttttccggtatccagccctgctgactttcgctcggtgcaacgaattgcaactgaagtaaaaggtccaattatttgtggtttagcacgctctgtagcaaaagatattgaagcctgtggtgaggcacttcgcacagcacagcaaagccgtattcatacttttattgccacaagccctttgcaccttgaacataaattacgtatgagccttgatgacgcaacggccatggcggttaaatcaattaaattagcgcgtaactacacagacgatgtggagttttcgtgtgaagatgcagggcgcacgccgcactgggatttatgtaaaattgttgagcaggccattaaagcaggtgcctctactattaatttacccgacaccgttggctttgttacgccagatgaatacgccgcgatgatccgccatttaatgaataatgtgccgaatatagataaagcgcgtttaagtgtacattgtcataacgatttaggtttagctgtagctaactcggtcgccgcggtacaagcgggggctcgccaaattgaatgtacaataaatggtattggtgagcgtgcgggtaactgttcgcttgaagaagtggcgatgatcatgaaaatgcgcaaagaccacttaaaagttcacaccgatattaaaagcgaagaaatttatcgcgcatctcgccaagtggcaaaaatttgtaatatgccagtacagccaaataaagccattgtgggcgaaaatgcctttgcacatagctcgggtattcaccaagatggcgtattaaaagcacaaaatacgtacgaaataatgtcgccagaaagcgtaggcgtaccaaacaaccaattaaacatgacctcgcgttcgggccgtcatgttattgagcaccgcttagaagagttagggtatcaaaaagcggattacgatatggacagcctatacgaaagctttttagcgttagctgatcaaaaaggcacggtgtacgactacgaccttgaagccatgatttacttaaatcaaattaacgacaaagacgaaaaataccagttagagtttgttaactcagcgtctaactcgcaatcggtagccagctctactattggtatggtgattgatggcgaagttaagcaagaagccgcaacaggtaatggcccagtagaggcgtcgtttgcagctattgagcgcttaaccggtatgagcgttgaaatgattgaatataacttagaagcgacaggccaaggtgcaagctcattaggccaagtaaatattatagctaaatacgatggccgcccttaccacggtgcgggcattgcagcggatgtggtagaagcgtcggtacgcgccatgatccgtgtttacaacttaatttatcgtgcacaaaaagtgtctgatttaaaacaacaaaggaaagcaggatga

SEQ ID NO: 13179 - protein, 517 aa, Alteromonadales bacterium TW-7
MQDKDKVWIFDTTLRDGEQALKASLTEDDKIQLAHTISRLNVDVMEVGFPVSSPADFRSVQRIATEVKGPIICGLARSVAKDIEACGEALRTAQQSRIHTFIATSPLHLEHKLRMSLDDATAMAVKSIKLARNYTDDVEFSCEDAGRTPHWDLCKIVEQAIKAGASTINLPDTVGFVTPDEYAAMIRHLMNNVPNIDKARLSVHCHNDLGLAVANSVAAVQAGARQIECTINGIGERAGNCSLEEVAMIMKMRKDHLKVHTDIKSEEIYRASRQVAKICNMPVQPNKAIVGENAFAHSSGIHQDGVLKAQNTYEIMSPESVGVPNNQLNMTSRSGRHVIEHRLEELGYQKADYDMDSLYESFLALADQKGTVYDYDLEAMIYLNQINDKDEKYQLEFVNSASNSQSVASSTIGMVIDGEVKQEAATGNGPVEASFAAIERLTGMSVEMIEYNLEATGQGASSLGQVNIIAKYDGRPYHGAGIAADVVEASVRAMIRVYNLIYRAQKVSDLKQQRKAG

SEQ ID NO: 13180 - DNA, 1566 bp, Moritella sp. PE36
  CDS (1)..(1566): transl_table=11
atgtcagaccaggttattatttttgatacgaccttgagggatggagagcaagcattatctgcaagcttaaccgtaaaagaaaaattacaaatcgcctttgcacttgagcgcttaggtgttgatgtaatggaagttggttttccaatttcatcacctggtgattttgaatccgtgcagacgattgcacgtaatattaaaaatagtcgtgtttgcgccctttctcgcgcgcttgaaaaagatattgatgctgctgcccaagcgctttcagttgctaaagacttccgtattcatacctttatttcaacctctgatattcatgttaaaagtaaactaaaacgtagctttgacgatgtcctcaatatgggtcgccacgccattaaacatgcacgtcgctatactgatgacgttgagttttcttgtgaagatgccggccgtaccccaatcgataatctatgtcgtatggttgaagaagccattaaagccggtgcaacaacgattaacattccagataccgttggttataccgtgccatcgcaattcggcggcatcatcaccgacttattcaatcgcgtgccaaatattgataaagccgtgatctcggtacattgtcatgatgaccttggcttatcggttgcgaactccattgctgccatacagcaaggtgctcgtcaaatcgaatgtaccatcaatggtattggtgaacgcgcaggtaactgttcattagaagaaatagccatgatcttgcacacacgccaagatttattaggtaaaaccaccaatattaacgcacaagaaatttaccgaaccagccagctagtcagtcaactctgcaacatgccagtacaggctaataaagcgattgtgggtgctaacgcattttcacattcctcaggtattcatcaggatggcgtactgaaagcaaaaaatacttacgaaattattaccccagaaagtattggtctaacgcaaaacaagttaaatctgacctcacgttctggtcgtcatgtgatcaaacatcgtatggcagagctgggttataccgacaatgattataatcttgaagagctgtatgaaagcttcttacaacttgcagataaaaaaggtcaagtattcgattatgaccttgaagcattaatcttctttaataatttgcacgaagatgaagcacattttaaattagattatctcagtgttcagtccggttctggcgtgaaagcaaccgcaacaattagcttaatttcacaattagaaacaacgggtgaatctcgtacagatactgaagcggcgataggtaatggtccagttgatgcggtttataaatgtttaagccgtatttctggcttcgatatcgatattgccgattatcacatcactgcaaaaggtgaaggtaaagacgcactgggtcaagtcgatattgtcgcaacgtatgaaggccgtaagttccacggtatcggcttagcaaccgatatcatcgaatcgtcggcgctggcttatatccacgtaatgaataatatccatcgcgccaacgcggtagaacaacagaaacttaaaaaacaaaatcaataa

SEQ ID NO: 13181 - protein, 521 aa, Moritella sp. PE36
MSDQVIIFDTTLRDGEQALSASLTVKEKLQIAFALERLGVDVMEVGFPISSPGDFESVQTIARNIKNSRVCALSRALEKDIDAAAQALSVAKDFRIHTFISTSDIHVKSKLKRSFDDVLNMGRHAIKHARRYTDDVEFSCEDAGRTPIDNLCRMVEEAIKAGATTINIPDTVGYTVPSQFGGIITDLFNRVPNIDKAVISVHCHDDLGLSVANSIAAIQQGARQIECTINGIGERAGNCSLEEIAMILHTRQDLLGKTTNINAQEIYRTSQLVSQLCNMPVQANKAIVGANAFSHSSGIHQDGVLKAKNTYEIITPESIGLTQNKLNLTSRSGRHVIKHRMAELGYTDNDYNLEELYESFLQLADKKGQVFDYDLEALIFFNNLHEDEAHFKLDYLSVQSGSGVKATATISLISQLETTGESRTDTEAAIGNGPVDAVYKCLSRISGFDIDIADYHITAKGEGKDALGQVDIVATYEGRKFHGIGLATDIIESSALAYIHVMNNIHRANAVEQQKLKKQNQ

SEQ ID NO: 13182 - DNA, 1164 bp, Moritella sp. PE36
  CDS (1)..(1164): transl_table=11
atgaaaaaaatatcaatactggatacaacactaagggatggtgaacaagctcccgaaaatgcaatggatccggagaaaaaactcaaaatggccttgatgcttgaagagtgcggcgtagaccatatcgaaacgggattcccagcatcttcaaaatttgactatgaagcgacaaagctgatcagcaaagaagttacacagtcaggtatagctactttttctagaacactaacaagtgatgtccaattatcactagaatcaggtggacgtgaaaaaaatcacactattcaaatggtggcgacaggtagcgatcttcatttaaagaacaaacgaaatatttctcgatctcaagcaattgaagaagtaatcaacaccgtaaaattcgccaaacaaaatagtgactgcagaattgcagttgggattgaggacgcgagccgagcagattttgattttatgggtgaaataacagaggcagcagtgtttgcaggtgcgcatcaaataattcttgcggatacaactggctacgcgacaccgtctgaatttaagaaattgattcaatttattagatccaaaactggcgacggtatcagtatttcaacacactgccataacgaccttggcctggcgcatgcgaacacacttgcgggtatagagggtggtgcagatgaagttcaagttacattagggggaataggtgaacgtgccggtaatgcttcgcttgagatgatagcctcaactctgttctttaagcctgaatgttattcttcttttaccgacataaagctagacaaattgtataaagtttatcaagaactttgctctgaaattggtctagacattccaagaaaccaacctgtttttggtacttacgctttctcaactgctgccggtatccatcaacagggggtcttggctaaccccgatacgtatgagttcgtgaaaccagatgtgtttaatcgtgaacgtgaattttttgtatcacgtcattctggtaaatccatcatcaaatacattctttctaataaagctatggatcaagacccgaaattacttgaaaccctatacgctaactgtattagcagccgtgccgaaaatagctgtttaagtatgattgagttggaatttgaaattgataaattcatgaaaaccttttgtaaggtggcttaa

SEQ ID NO: 13183 - protein, 387 aa, Moritella sp. PE36
MKKISILDTTLRDGEQAPENAMDPEKKLKMALMLEECGVDHIETGFPASSKFDYEATKLISKEVTQSGIATFSRTLTSDVQLSLESGGREKNHTIQMVATGSDLHLKNKRNISRSQAIEEVINTVKFAKQNSDCRIAVGIEDASRADFDFMGEITEAAVFAGAHQIILADTTGYATPSEFKKLIQFIRSKTGDGISISTHCHNDLGLAHANTLAGIEGGADEVQVTLGGIGERAGNASLEMIASTLFFKPECYSSFTDIKLDKLYKVYQELCSEIGLDIPRNQPVFGTYAFSTAAGIHQQGVLANPDTYEFVKPDVFNREREFFVSRHSGKSIIKYILSNKAMDQDPKLLETLYANCISSRAENSCLSMIELEFEIDKFMKTFCKVA

SEQ ID NO: 13184 - DNA, 1131 bp, Cyanothece
  CDS (1)..(1131): transl_table=11
atgaatcatgtccatgttaatgatacaaccctacgggatggagaacaagcagccggtattgtttttagtgccatcgaaaaaatagcgatcgcttgtttaatggatgccatcggtattcctgagttggaagtgggtattcctgcgatgggaggctctgaagccgaaagccatcaccgccattgtccaaaaaggttaaaaaccgccctcttaggtttggaaccgtgcggtagttcggatattgaagcctccattgcctgtggcttgagaagggttcatatctcggttcctgtatcagacatacaaattaaggcaaaatttaaaggaaaaactaatcttgtttgggatcggttacgagatagtattaattttgcgctagatcacgatttattcgtttctgtgggggctgaagatgcttcacgggcagatgagtcctttttagtggaagtagctcaatttgccgaaagtttaggggcttctcggttccgtttctgcgatacggtgggcattcttaaccctttaaccacggctcaaaaagtgggaaaattggtgaagtctatcaagatgcctatcgaaatgcacacccataatgattttggcttagccaccgccaatgctttagcggggttgcaagcaggtgcggtttcggtgaataccaccgttaatgggttaggagaaagggcaggtaacgcagccttagaagagatgatcatggctctcaaacgactctatcaggttgatttagggatggagagttctcgtctacgagaactatctcaactggtggttaaagcctccggtattccccttcccccttggaaagcgatcgttgggacaatgtttgcccacgagtctggtattcatgctcatggtgtcttacaaaacccccaaacctacgaacccttttccccagatgaggtaggttggaaacgccgtttagtggtgggtaagcattcgggacgacatttattgaccaatttattgagtcaacatggcattagtttaaaccatgaagagtcccaagtggtgttagactcggttcgtcatttatcggtacaaatgaaacgcagtctaacggttgaggagttaattgatgttgtaaccaataggagtatgtctcatgggattgtataa

SEQ ID NO: 13185 - protein, 376 aa, Cyanothece
MNHVHVNDTTLRDGEQAAGIVFSAIEKIAIACLMDAIGIPELEVGIPAMGGSEAESHHRHCPKRLKTALLGLEPCGSSDIEASIACGLRRVHISVPVSDIQIKAKFKGKTNLVWDRLRDSINFALDHDLFVSVGAEDASRADESFLVEVAQFAESLGASRFRFCDTVGILNPLTTAQKVGKLVKSIKMPIEMHTHNDFGLATANALAGLQAGAVSVNTTVNGLGERAGNAALEEMIMALKRLYQVDLGMESSRLRELSQLVVKASGIPLPPWKAIVGTMFAHESGIHAHGVLQNPQTYEPFSPDEVGWKRRLVVGKHSGRHLLTNLLSQHGISLNHEESQVVLDSVRHLSVQMKRSLTVEELIDVVTNRSMSHGIV

SEQ ID NO: 13186 - DNA, 1134 bp, Gloeothece sp
  CDS (1)..(1134): transl_table=11
atgaatcatatccatattaatgatacgaccctacgggatggagaacaagcggctggcattgtttttagtgctgctgaaaaaattgcgatcgccgttcttctggatgcgatcggcactcctgaattagaagtcggtatcccagcaatggggggcaatgaagcagaagccattaccaccattgcacgtttgggactcaatacggctttattgggttggaaccgagcaatacggtctgatatcgaggcttctattgcttgtggcttgaaacgggttcatgtctctgttcctgtctccgatatccaaattaaagctaagttccagggtaactcccagttagtctttcaaagattggaagaaagtctcaagtttgctttagatcatggcttatttgtgtctgttggagctgaagactcttcccgagctgataccgcttttttaagtgaagtagctcagtttgctcaggacttaggtgcttcccgtttccgtttctgtgaaacggtgggcattcttgaccccctcaccacagcccaaaaggtgggaaaattggtgaagtccctcaagattcctgtggaaatgcacacccataacgattttgaactatcaactgccaatgccttagccggaattaaggcaggggcccaatcagtcgataccaccgtgaatgggttgggagaacgggccgggaatgcggccttagaggagatgatcatggctctcaaacaactctatcaggttgatttaggctttgatacctctcgtctacgggaactctcccaattggtgatccaagcttctggtgtatctcttcccccttggaaagcgatcgttggggagaatatctttgcccacgaatcgggaattcatgcccatggggtcttacaaaatccccaaacctatgaacccttttcccccgatgaagtgggttgggaacgtcgtttagtcgttggcaaacattcgggacgacatttattgctcaatttattgagtcaacatgggattcgtctagaccatgaagaatctcaagtggtgttagaggcagtgcgtcatttatcggttcagatgaagcgaagtctaaccgttgaagaattgcttgatttagtacccaataggaggatgtctcatgggattgtataa

SEQ ID NO: 13187 - protein, 377 aa, Gloeothece sp
MNHIHINDTTLRDGEQAAGIVFSAAEKIAIAVLLDAIGTPELEVGIPAMGGNEAEAITTIARLGLNTALLGWNRAIRSDIEASIACGLKRVHVSVPVSDIQIKAKFQGNSQLVFQRLEESLKFALDHGLFVSVGAEDSSRADTAFLSEVAQFAQDLGASRFRFCETVGILDPLTTAQKVGKLVKSLKIPVEMHTHNDFELSTANALAGIKAGAQSVDTTVNGLGERAGNAALEEMIMALKQLYQVDLGFDTSRLRELSQLVIQASGVSLPPWKAIVGENIFAHESGIHAHGVLQNPQTYEPFSPDEVGWERRLVVGKHSGRHLLLNLLSQHGIRLDHEESQVVLEAVRHLSVQMKRSLTVEELLDLVPNRRMSHGIV

SEQ ID NO: 13188 - DNA, 1761 bp, Ostreococcus tauri
  CDS (1)..(1761)
atgcggtgcgagcggttcgtcgcggtggcgtccgtggggtcggagagcgcggtgacgcgagcgccgagaccggcgtacgttccgggggttatctcggacccgaagtacgtgcgcgtgttcgacacgacgctgcgcgacggtgaacagagcccgggagcgacgctgacgagtcgcgagaagctggatatcgcgacgtcgctggcgaagctcggtgtggacgtcatcgaggccgggtttccgatcgcgagtccggacgatctggaggcggtgcgaggcatcgcgaaaaaggttggcaacgaggtgtacgaggatggatacgtgccggttatttgcgggttatcgcgagcgaataagaaggatatcgacgcggcgtgggagggcgttcgtcacgcgctgcgaccgcgcattcacaccttcatcgcgacgagccagatccacatggactacaagctgcgcaaaaccccagatgaggtggtgcaaatcgccgtggacgccgtcaagtacgctcgatcgctcgggtgcgaggacgtggagttctcgccggaagatgcgggtagatccgatcctcagttcttgtaccgcatcctgaacgccgtggtcgaggcgggggcgacgacgttgaacattccggacacggtcgggatttgtttgccggatgagtttgggacgctcatcaagggcattaaggagaacgtgaagggtgcgggggagactgtggtcatctctacacactgtcaaaatgatttaggtctttccacggcgaactctttggcgggcgtcgccaacggtgcgcgccaggttgagtgcaccatcaacggcatcggagagcgtgcgggtaacgcgtcgttggaagaagtcactatggccatcttcatgcgtggacaagagcgattgatgggtgcctatacgggtatcaatccggtgtacatctacccgtcgtctcagatggtgaagaatttcagtggtatggccattcagccgcacaaggcgattgttggcgcgaatgcattcgctcacgaatccggcatccaccaagacggtatgctcaagaataagctcacgtacgaaattatcgctccggagcaaatcggttatttccgaggcgaggacgagtgcggcgtagtgatgggtaagcactccggccgccacgccttgtcttccaagttgaagcaactcggcgtgccgatggagggtgcggcgctcgatgaagtcttcaaccgcttcaagctcgtcgcagagacgaaactcggtggggtgaacgacgacgaattgttggcaatcgtgcgtgacggtgaatccgtccaagatccggcgtggtctttggaaaccgttcaagtcgtgtgcggcaccaccggtttgcccacggcgacggtgaggatgaacaacagagatggcactcaacacatctccgccgtggtcggcaccggtccggtcgacgccgcgttcaaggccatcgatgcgctggttggtttggacgtcgtactcaccgagtaccgagtcaccgcggtgactaagggtattaactcgatggcggagactaccatcaccatcaagccaaaggagggcgtggaacaaaagctcggcacggatgtctacaaaaccaacgtccaaacgggcgagaagaccatgcgcgcgttcacggctaccggtgcagacacggatatcgtcgtctcgtctgcgcgtgcctacgtcatcgcgctcaaccgtatggttgagtacgtcgccaaggcgtacgtacacgccgaacccgtcagccgatga

SEQ ID NO: 13189 - protein, 586 aa, Ostreococcus tauri
MRCERFVAVASVGSESAVTRAPRPAYVPGVISDPKYVRVFDTTLRDGEQSPGATLTSREKLDIATSLAKLGVDVIEAGFPIASPDDLEAVRGIAKKVGNEVYEDGYVPVICGLSRANKKDIDAAWEGVRHALRPRIHTFIATSQIHMDYKLRKTPDEVVQIAVDAVKYARSLGCEDVEFSPEDAGRSDPQFLYRILNAVVEAGATTLNIPDTVGICLPDEFGTLIKGIKENVKGAGETVVISTHCQNDLGLSTANSLAGVANGARQVECTINGIGERAGNASLEEVTMAIFMRGQERLMGAYTGINPVYIYPSSQMVKNFSGMAIQPHKAIVGANAFAHESGIHQDGMLKNKLTYEIIAPEQIGYFRGEDECGVVMGKHSGRHALSSKLKQLGVPMEGAALDEVFNRFKLVAETKLGGVNDDELLAIVRDGESVQDPAWSLETVQVVCGTTGLPTATVRMNNRDGTQHISAVVGTGPVDAAFKAIDALVGLDVVLTEYRVTAVTKGINSMAETTITIKPKEGVEQKLGTDVYKTNVQTGEKTMRAFTATGADTDIVVSSARAYVIALNRMVEYVAKAYVHAEPVSR

SEQ ID NO: 13190 - DNA, 1524 bp, Arabidopsis lyrata subsp
  CDS (1)..(1524)
atggcttcatcacttctgacatcttccggtatgatccataccaccggttccaccgtggttggccggtcattgttaccctttcaatcttccctgcactctctcagcctcacccattcatacaagaagccggcatatttcatctcatgttgctcttctgtgtccaaaaatggggcaactaatgctactgatctcaaacccgttgtggatcggtggccggagtacataccaaacaagctccccgacaagaactatgtgcgtgtattcgacacaacgctccgagacggtgaacaagctcccggtggatcccttactccgccgcagaagctagagattgccaggcagcttgctaaactccgagtagacatcatggaagttggttttccgggatcatctgaagaagagttagaaaccgttaagaccatcgccaagaccgtgggaaatgaggtggatgaggaaacaggttacgtccccgtgatatgcgccatcgcacgaagcaaacatagagacattgaggcggcttgggaagcggtaaagtacgcgaagaggccaaggatactcatattcacatctactagtgacattcacatgaaatataagttgaaaaagactaaagaagaagtgattgagatggccgtgagtagtatcaggctcgctaaaagcttgggcttcaatgacatccaactcgggtgcgaagatggcggcaggtcggacaaggagttcctatgcaagattctaggagaagcaataaaagcgggtgttacggtggtgaacgtcgcagacacggtagggatcaacatgccacatgaatatggagaactcgtaacctatctcaaagcaaacactcctggaattgatgatatcgtcttcagtgttcattgtcacaacgaccttggtcttgctaccgccaactcaatcgccggtatacgtgcgggagcaagacaagtggaagtaacgatcaacggaatcggtgaaagaagtgggaatgcgtcccttgaagaggtcgtgatggctttgaaatgtcgaggagcatatgtgatcaatggtgtttacacaagaatagacacacgccaaattatggctacaagcaagatggttcaagagtacaccggcttgtatgttcaaccacataagcccatagttggaaccaactgttttgttcatgagagcggcattcaccaggatggaatattgaaaaatcggagtacatatgagatcttatcaccagaagatattggggtcgtaaaatctcaaaactccggccttgttcttggaaagcttagtggacgtcatgctgtgaaagatcggctgaacgagttgggatatgaactcgatgatgagaaactgaacgatgtcttctcacggttcagagatttaaccaagcataaaaagaggatcacggatgctgatatgaaggcgttagtaacatccagcgatgaaatctctttagagaaattaaacagcgctaacggtttaaagtctaacggctatgtaccagttcctcaggtttcatcaaatatgctataa

SEQ ID NO: 13191 - protein, 507 aa, Arabidopsis lyrata subsp
MASSLLTSSGMIHTTGSTVVGRSLLPFQSSLHSLSLTHSYKKPAYFISCCSSVSKNGATNATDLKPVVDRWPEYIPNKLPDKNYVRVFDTTLRDGEQAPGGSLTPPQKLEIARQLAKLRVDIMEVGFPGSSEEELETVKTIAKTVGNEVDEETGYVPVICAIARSKHRDIEAAWEAVKYAKRPRILIFTSTSDIHMKYKLKKTKEEVIEMAVSSIRLAKSLGFNDIQLGCEDGGRSDKEFLCKILGEAIKAGVTVVNVADTVGINMPHEYGELVTYLKANTPGIDDIVFSVHCHNDLGLATANSIAGIRAGARQVEVTINGIGERSGNASLEEVVMALKCRGAYVINGVYTRIDTRQIMATSKMVQEYTGLYVQPHKPIVGTNCFVHESGIHQDGILKNRSTYEILSPEDIGVVKSQNSGLVLGKLSGRHAVKDRLNELGYELDDEKLNDVFSRFRDLTKHKKRITDADMKALVTSSDEISLEKLNSANGLKSNGYVPVPQVSSNML

SEQ ID NO: 13192 - DNA, 1446 bp, Boechera divaricarpa
  CDS (1)..(1446)
atggcctcggtacttctcacatcttccggtatgatcactaccactggtcccaccgtcgttgtccggtcagtgttacccattaaatcttctctgccctctatccacctgacccgtccgtgcaacaaaccgactttgttcatctcatgttgctcatcggagtccaaaaaggctgcaactagtgctactgacctcaaacccatcgtggaacggtggccggagtacataccgaacaagctccccgacaagaactatgtacgtgtactcgacaccacccttcgtgaaggcgaacaagctccaggtggatcccttactccaccacagaagctagagattgcccggcaactcgctaaactccgagtggacatcatggaagtcggttttccggggtcatctgaagaagagtttgagaccgttaaagtcatcgccaagaccgtggggaatgaggtggatgtggaaacaggttatgtcccggtgatatccacccttgcacgaagcaaaaatagagacatcgaggccgcttggaaggcggtgaagtacgccaagaggccgaggatatgcatattcacatctacgagtgacattcacatgaaatataagttgaaaaagactcaagaagaagtgatcgagatgtccttgagtggtattaggttcgccaaaagcttaggcttccatgacatccaatttggttgcgaagacggctgcaggtcggagaaggactttgtctgtaagattctaggagaagcgataaaagcgggtgctacctcggtgtgcatcgcggacacggtagggatcaccatgccccaagaattcggagaactcgtgacctatgtgaaagcaaacactcctggaattaatgatgttgtcttcagcgttcattgtcacaacgacctcggtcttgctaccgccaacacaatcgccgctgtatgtgccggagtaagacaattcgaagtaacgatcaacggaataggtgaaagaagtgggaatgcgccgcttgaagaggtcgtgatggctttgaaatgtcgaggagaatatctgatggatggtgtttacacaagaatagacacacgccaaattatggctactagcaagatggttcaagagtataccggcttgtatgttcaaccacataagcctatagtcggagacaactgttttgttcatgagagcggcattcaccaggatggaatattgaaaaatcgaagtacatatgagatcttatcaccagaagatgttgggatcgtaaaatctcaaaattctggcattgttcttggaaagcttagtggacgtcatgctgtaaaagaacggctgaaagagttgggatacgaaatcaatgatgagaaattgaaagatatcttctcacaattcagagatttaaccaaacagaaaaagaggatcgcggatgctgatctaaaagcattagttgtgaacggtgttgagagaaattaa

SEQ ID NO: 13193 - protein, 481 aa, Boechera divaricarpa
MASVLLTSSGMITTTGPTVVVRSVLPIKSSLPSIHLTRPCNKPTLFISCCSSESKKAATSATDLKPIVERWPEYIPNKLPDKNYVRVLDTTLREGEQAPGGSLTPPQKLEIARQLAKLRVDIMEVGFPGSSEEEFETVKVIAKTVGNEVDVETGYVPVISTLARSKNRDIEAAWKAVKYAKRPRICIFTSTSDIHMKYKLKKTQEEVIEMSLSGIRFAKSLGFHDIQFGCEDGCRSEKDFVCKILGEAIKAGATSVCIADTVGITMPQEFGELVTYVKANTPGINDVVFSVHCHNDLGLATANTIAAVCAGVRQFEVTINGIGERSGNAPLEEVVMALKCRGEYLMDGVYTRIDTRQIMATSKMVQEYTGLYVQPHKPIVGDNCFVHESGIHQDGILKNRSTYEILSPEDVGIVKSQNSGIVLGKLSGRHAVKERLKELGYEINDEKLKDIFSQFRDLTKQKKRIADADLKALVVNGVERN

SEQ ID NO: 13194 - DNA, 1512 bp, Boechera divaricarpa
  CDS (1)..(1512)
atggcttcgttacttcacacatcttccagtatgatcaccaccatcagtcccaccatggttgcccggtcagtgttacccattggatcttctctgccctctatccgcctgacccgtccgttcaacaagccgactttgttcatctcatgtagctcctctgagtccaaaaaagcggcaactagtggtactgacctcaaacccatcgtggaacggtggcctgagtacataccgaacaagctcccccacaagaactatgtgcgtatattagacacgacactccgtgacggtgaacaatctcccggtgcagctcttactccaccgcagaagctagagattgcccgccagctcgctaaactccgagtagacatcatggaagtcggttttccggtgtcgtctgaggaagagttcgaagccattaaaaccatagctaagaccgtggggaacgaggtggatgaggaaaccggttacgtcccggtgatatgcgccattgcacgatgcaaacaaagtgacatcgaggcggtttgggaggcgctgaagtacgcgaagaagcagagggtaataatattcacatctactagtgacattcacatgaaatataagttgaaaaagactcaagaagaagtgatcgagatggccgtgagtagtattaagtacgctaaaagcttgggcttcactgacatccaacttgggtgcgaagatggcggcaggtcggagaaggagtttctatgtaagattctaggagaatcgattaaagcgggggcaaccacggtgggcttcgcggacacggtcgggatcaacatgccccaagaattcggagaactcatggcttatgtcaaagaaaacactcctgggtttaatgatattgtcttcgccattcattgtcacaacgaccttggtgttgctactgccaacacaatcgccggtatatgtgcgggcgcaagacaagtcgaagtaacgatcaacggaataggtgaaagaagtgggaatgcgccgcttgaagaggtcgtgatggctttgaaatgtcgaggagaatatctgatggatggtgtttacacaaaaatagatacacgccaaattatggcgactagcaagatggttcaagagcataccggcatgtatgttcaaccacataagcccatagttggagacaactgttttgttcatgagagcggcattcaccaggatggaatattgaaaaatcggagtacatatgagatcttatcaccagaagatgttgggatcgtaaaatctcaaaattctggcattgttcttggaaagcttagtggacgtcatgctgtaaaagaacggctgaaagagttgggatatgaaatcaatgatgagaactttaacgacatcttctcacgattcagagatttaaccaagcataaaaagagaatcaccgatgctgatctgaaggcattagtggtgagcggtgatgaaatctcattagagaaattaaacagtaaaggaattaacaaacttatgtcaagccctcagattccctctgtggtataa

SEQ ID NO: 13195 - protein, 503 aa, Boechera divaricarpa
MASLLHTSSSMITTISPTMVARSVLPIGSSLPSIRLTRPFNKPTLFISCSSSESKKAATSGTDLKPIVERWPEYIPNKLPHKNYVRILDTTLRDGEQSPGAALTPPQKLEIARQLAKLRVDIMEVGFPVSSEEEFEAIKTIAKTVGNEVDEETGYVPVICAIARCKQSDIEAVWEALKYAKKQRVIIFTSTSDIHMKYKLKKTQEEVIEMAVSSIKYAKSLGFTDIQLGCEDGGRSEKEFLCKILGESIKAGATTVGFADTVGINMPQEFGELMAYVKENTPGFNDIVFAIHCHNDLGVATANTIAGICAGARQVEVTINGIGERSGNAPLEEVVMALKCRGEYLMDGVYTKIDTRQIMATSKMVQEHTGMYVQPHKPIVGDNCFVHESGIHQDGILKNRSTYEILSPEDVGIVKSQNSGIVLGKLSGRHAVKERLKELGYEINDENFNDIFSRFRDLTKHKKRITDADLKALVVSGDEISLEKLNSKGINKLMSSPQIPSVV

SEQ ID NO: 13196 - DNA, 1515 bp, Boechera divaricarpa
  CDS (1)..(1515)
atggcttcgtcacttctgacatcttcgggtataagccctaccaccggttctaccgtggttgtcgggtccgtgttaccctttcgcacttctatgctctctctccgcctgacccgaccgtacaagaagccggccttgttcatctcatgttgctcctctgagtccagaaagactgcaactaatgctactgacctcaaacccgttgtggaacggtggccagagtacataccgaacaagctcccggacaagaactatgtgcgtgtattcgacacgacgctccgtgacggtgaacaagctcccggtggatcccttactccgccacagaagctagagattgccaggcagctcgctaaactccgagtagacatcatggaagtcggttttccggggtcgtctgaagaagagttagaaaccgttaaaaccatcgccaagactgtgggaaatgaggtggatgaggaaacaggctacgtcccggcgatatgcgccattgcacgaagcaaacatagcgatattgaggccgcttgggaggcagtgaagtatgcgaagaggccgaggatactcattttcacatctactagtgacattcacatgaaatataagttgaagaaaactaaagaagaagtgatcgagatggctgcgagtagtgttaggttcgctaaaagcttgggctttaatgacattcaatttggttgcgaagatggcggcaggtcggacaaggagtttctatgcaagattctaggagaatcgatcaaagcgggtgctacggtggtgaacgtcgcagatactgttgggatcaacatgccacatgaatacggagaactcgtgacctatgtcaaagcaaacacgcctggaattgatgatattgtcttcagtgttcattgtcacaacgaccttggtcttgctaccgccaactcaatcgccggtatacgtgcgggagcaagacaagtcgaagtaacgataaacggaattggtgaaagaagtgggaatgcgtcgcttgaagaggtcgtgatggctttgaaatgtcgaggagcatatgtactggatggtgtttacacaggaatagacacccgggaaattatggctacaagcaagatggttcaagagtataccggcttgtatgttcaaccacataaacccatagttggagccaactgttttgttcatgagagcggcattcaccaggatggaatattgaaaaatcggagtacgtatgagatcttatcaccagaagatgttggggtcgttaaatctcaaaattccggcattgttcttggaaagcttagtggacgtcatgctatgaaaggtcggctgaaagagttgggatatgaactcgatgatgagaaattgaacgacgtcttctcacgattcagggatttaaccaagcataaaaagagaatcacggatgctgatctgaaggcattagtaacatctagtgatgaaatttctttcgagaaattaaaccgcgctaatggtaaaatgtccaacggctatataccagttcctcaggtttccctctaa

SEQ ID NO: 13197 - protein, 504 aa, Boechera divaricarpa
MASSLLTSSGISPTTGSTVVVGSVLPFRTSMLSLRLTRPYKKPALFISCCSSESRKTATNATDLKPVVERWPEYIPNKLPDKNYVRVFDTTLRDGEQAPGGSLTPPQKLEIARQLAKLRVDIMEVGFPGSSEEELETVKTIAKTVGNEVDEETGYVPAICAIARSKHSDIEAAWEAVKYAKRPRILIFTSTSDIHMKYKLKKTKEEVIEMAASSVRFAKSLGFNDIQFGCEDGGRSDKEFLCKILGESIKAGATVVNVADTVGINMPHEYGELVTYVKANTPGIDDIVFSVHCHNDLGLATANSIAGIRAGARQVEVTINGIGERSGNASLEEVVMALKCRGAYVLDGVYTGIDTREIMATSKMVQEYTGLYVQPHKPIVGANCFVHESGIHQDGILKNRSTYEILSPEDVGVVKSQNSGIVLGKLSGRHAMKGRLKELGYELDDEKLNDVFSRFRDLTKHKKRITDADLKALVTSSDEISFEKLNRANGKMSNGYIPVPQVSL

SEQ ID NO: 13198 - DNA, 1509 bp, Arabidopsis cebennensis
  CDS (1)..(1509)
atggcttcgtttcttctcacatcttccagtatgataaccaccacatgtccctccatggttctccggtcagggttacccattggatcttcccttccctctcttcgcctgacccgtccatacaacaaggcgactttgttcaccgcatgttactcttctgagtccaaaaaggtggcaagtagtgctgatctcaaacctgccgttgaacggaggccggagtacataccgaacaagcttcctcacaagaactatgttcgtgtattagacacgacgctccgtgacggtgaacaatctcccggtgcagcacttactccaccgcagaagctagagattgcccggcagctcgctaaactccgagttgacatcatggaagttggttttccggtgtcgtctgaggaagagttcgaagccattaaaaccatcgccaagaccgtggggaacgaggtggatgaggaaacaggttacgtccctgtgatatgcggcattgcccgatgcaaaaatagagacattgaggcggcttgggaggcactgaagtatgcgaagaggccgagggtaatactattcacatctactagtgacattcacatgaaatataagttgaaaaagactaaagaagaagtgatcgagatggccgtgaacagtgttaagtacgctaaaagcttgggcttcaaagacatcgaatttgggtgcgaagatggcggcaggacggagaaggattttctatgtaagattctaggagaatcgataaaagcgggtgcaaccacggtgggctttgcggacacggtcgggatcaacatgccgccagaattcggagaactcgtggcctatgtcaaagaaaacactcctggagctgatgatattgtcttcaccattcattgccacaacgaccttggtgttgctaccgccaacacaatatccggtatatgtgcgggagcaagacaagtagaagtaacgatcaacggaattggtgaaagaagtgggaatgcgccgcttgaagaggtcgtgatggctttgaaatgtcgaggagaatatcttatggatggtgtttacacaaaaatagacacacgccaaattatggctacaagcaagatggttcaagagcataccggcatgtatgttcaaccacataagccaatagttggagacaactgttttgttcatgagagcggcatacaccaggatggaatattgaaaaatcgaagtacatatgagattttatcaccagaagatgttgggatcgtaaaatctgaaaattctggcattatttttggaaagcttagtggacgtcatgctgtaaaagaccggcttaaagagttgggatatgaaatcagtgatgagaaattcaacgacatcttctcacgatacagagaattaaccaaggagaaaaagagaatcacggacgatgatctgaaagcattagtggtgaacggtgatgaaatctcatcagataaattaaacagtaaaggaattaacaaccttacgtcaagccctcagatttccgctgttgtataa

SEQ ID NO: 13199 - protein, 502 aa, Arabidopsis cebennensis
MASFLLTSSSMITTTCPSMVLRSGLPIGSSLPSLRLTRPYNKATLFTACYSSESKKVASSADLKPAVERRPEYIPNKLPHKNYVRVLDTTLRDGEQSPGAALTPPQKLEIARQLAKLRVDIMEVGFPVSSEEEFEAIKTIAKTVGNEVDEETGYVPVICGIARCKNRDIEAAWEALKYAKRPRVILFTSTSDIHMKYKLKKTKEEVIEMAVNSVKYAKSLGFKDIEFGCEDGGRTEKDFLCKILGESIKAGATTVGFADTVGINMPPEFGELVAYVKENTPGADDIVFTIHCHNDLGVATANTISGICAGARQVEVTINGIGERSGNAPLEEVVMALKCRGEYLMDGVYTKIDTRQIMATSKMVQEHTGMYVQPHKPIVGDNCFVHESGIHQDGILKNRSTYEILSPEDVGIVKSENSGIIFGKLSGRHAVKDRLKELGYEISDEKFNDIFSRYRELTKEKKRITDDDLKALVVNGDEISSDKLNSKGINNLTSSPQISAVV

SEQ ID NO: 13200 - DNA, 1524 bp, Arabidopsis cebennensis
  CDS (1)..(1524)
atggcttcatcacttctgacatcttccggtatgatccataccaccggttccaccgtggttggccggtcagtgttaccctttcaatcttccctgcactctcttcccctcacccatctatacaagaagccggcatatttcatctcatgttgctcttctgtgtccaaaattggggcaactaatgctactgatctcaaacccgttgtggaacggtggccggagtacataccaaacaagctccccgacaacaactatgtgcgtgtattcgacacaacgctccgtgacggtgaacaagctccaggtggatcccttactccgccgcagaagctagagattgcccggcagcttgctaaactccgagtagacatcatggaagtcggttttccgggatcatctgaagaagagttagaaaccgttaagaccatcgccaagaccgtggggaatgaggtggatgaggacacaggttacgtccccgtaatatgtgccatcgcacgaagcaaacatagagacattgaggcggcttgggaagcggtaaagtatgcgaagaggccaaggatactcatattcacatctactagtgacattcacatgaaatataagttgaaaaagactaaagaagaagtgattgagatggccgtgagtagtattaggctcgctaaaagcttgggcttcaatgacatccaacttgggtgcgaagatgccggcaggtcggacaaggagttcctatgcaagattctaggagaagcaataaaagcgggtgttatggtggtgaacgtcgcagacacggtagggatcaacatgccacatgaatatggagaactcgtaacctatctaaaagcaaacactcctggaattgatgatatcgttttcagtgttcattgtcacaacgatcttggtcttgctaccgccaactcaatcgccggtatacgtgcgggagcaagacaagtggaagtaacgatcaacggaattggtgaaagaagtgggaatgcgtcgcttgaagaggtcgtgatggctttgaaatgtcgaggagcatatgtgattaatggtgtttacacaagaatagacacacgccaaattatggctaccagcaagatggttcaagagtacaccggcttgtatgttcaaccacataagcccatagttggagccaactgttttgttcatgagagcggcattcaccaggatggaatattgaaaaatcggagtacatatgagatcttatcaccagatgatattgggatcgtcaaatctcaaaactccggccttgttcttggaaagcttagtggacggcatgctgtgaaagatcggctgaacgagttgggatatgaacttgatgatgaaaaactgaacgacgtcttctcacggttcagagatttaaccaagcataaaaagaggatcacggatgctgatatgaaggcattagtaacatctagcgatgaaatctctttagagaaattaaacggcgctaacagtataaagtctaacgtctatgtaccagttcctcaggtttcatcaaatatgctataa

SEQ ID NO: 13201 - protein, 507 aa, Arabidopsis cebennensis
MASSLLTSSGMIHTTGSTVVGRSVLPFQSSLHSLPLTHLYKKPAYFISCCSSVSKIGATNATDLKPVVERWPEYIPNKLPDNNYVRVFDTTLRDGEQAPGGSLTPPQKLEIARQLAKLRVDIMEVGFPGSSEEELETVKTIAKTVGNEVDEDTGYVPVICAIARSKHRDIEAAWEAVKYAKRPRILIFTSTSDIHMKYKLKKTKEEVIEMAVSSIRLAKSLGFNDIQLGCEDAGRSDKEFLCKILGEAIKAGVMVVNVADTVGINMPHEYGELVTYLKANTPGIDDIVFSVHCHNDLGLATANSIAGIRAGARQVEVTINGIGERSGNASLEEVVMALKCRGAYVINGVYTRIDTRQIMATSKMVQEYTGLYVQPHKPIVGANCFVHESGIHQDGILKNRSTYEILSPDDIGIVKSQNSGLVLGKLSGRHAVKDRLNELGYELDDEKLNDVFSRFRDLTKHKKRITDADMKALVTSSDEISLEKLNGANSIKSNVYVPVPQVSSNML

SEQ ID NO: 13202 - DNA, 1524 bp, Arabidopsis lyrata subsp
  CDS (1)..(1524)
atggcttcatcacttctgacatcttccggtatgatccataccaccggttccaccgtggttggccggtcattgttaccctttcaatcttccctgcactctctcagcctcacccattcatacaagaagccggcatatttcatctcatattgctcttctgtgtccaaaaatggggcaactaatgctactgatctcaaacccgtggtggaacggtggccagagtacataccaaacaagctccccgacaagaactatgtgcgtgtattcgacacaacgctccgcgacggtgaacaagctcccggtggatcccttactccgccgcagaagctagagattgcccggcagcttgctaaactccgagtagacatcatggaagttggttttccgggatcatctgaagaagagttagaaaccgttaagaccatcgccaagaccgtggggaatgaggtggatgaggaaacaggttacgtccccgtgatatgcgccatcgcacgaagcaaacaaagagacattgaggcggcttgggaggcggtaaagtacgcgaagaggccaaggatactcatattcacatctaccagtgacattcacatgaaatataagttgaaaaagactaaagaagaagtgattgagatggccgtgagtagtatcaggctcgctaaaagcttgggcttcaatgacatccaactcgggtgcgaagatggcggcaggtcggacaaggagttcctatgcaagattctaggagaagcaataaaagcgggtgttacggtggtgaacgtcgcagacacggtagggatcaacatgccacatgaatatggagaactcgtaacctatctcaaagcaaacactcctggaattgatgatatcgtcttcagtgttcattgtcacaacgaccttggtcttgctaccgccaactcaatcgccggtatacgtgcgggagcaagacaagtggaagtaacgatcaacggaatcggtgaaagaagtgggaatgcgtcccttgaagaggtcgtgatggctttgaaatgtcgaggagcatatgtgatcaatggtgtttacacgagaatagacacacgccaaattatggctacaagcaagatggttcaagagtacaccggcttgtatgttcaaccacataagcccatagttggagccaactgttttgttcatgagagcggcattcaccaggatggaatattgaaaaatcggagcacatatgagatcttatcaccagaagatattggggtcgtaaaatctcaaaactccggccttgttcttggaaagcttagtggacgtcatgctgtgaaagatcggctgaacgagttgggatatgaactcgatgatgagaaactgaacgatgtcttctcacggttcagagatttaaccaagcataaaaagaggatcacggatgctgatatgaaggcgttagtaacatccagcgatgaaatctctttagagaaattaaacagcgctaacggtttaaagtctaacggctatgtaccagttcctcaggtttcatcaaatatgctataa

SEQ ID NO: 13203 - protein, 507 aa, Arabidopsis lyrata subsp
MASSLLTSSGMIHTTGSTVVGRSLLPFQSSLHSLSLTHSYKKPAYFISYCSSVSKNGATNATDLKPVVERWPEYIPNKLPDKNYVRVFDTTLRDGEQAPGGSLTPPQKLEIARQLAKLRVDIMEVGFPGSSEEELETVKTIAKTVGNEVDEETGYVPVICAIARSKQRDIEAAWEAVKYAKRPRILIFTSTSDIHMKYKLKKTKEEVIEMAVSSIRLAKSLGFNDIQLGCEDGGRSDKEFLCKILGEAIKAGVTVVNVADTVGINMPHEYGELVTYLKANTPGIDDIVFSVHCHNDLGLATANSIAGIRAGARQVEVTINGIGERSGNASLEEVVMALKCRGAYVINGVYTRIDTRQIMATSKMVQEYTGLYVQPHKPIVGANCFVHESGIHQDGILKNRSTYEILSPEDIGVVKSQNSGLVLGKLSGRHAVKDRLNELGYELDDEKLNDVFSRFRDLTKHKKRITDADMKALVTSSDEISLEKLNSANGLKSNGYVPVPQVSSNML

SEQ ID NO: 13204 - DNA, 1311 bp, Aspergillus oryzae
  CDS (1)..(1311)
atgccgagcgccagtgagacaagtacagatctgacgagccgcaatccctacggccacggcaatggggttagcgattttttgagcaatgtctcgcggttcaagattatcgagagtaccctgcgtgagggcgagcaatttgccaatgccttcttcgacacgcagaagaagatcgagattgccagggcactagatgagtttggggttgattacattgagctcacaaacccgtgcgcctcagagcagtcgaggcttgactgcgaggccatctgcaagctaggccttaaggctaagattctgacccatattcggtgccatatggacgatgcgcgcatcgcggtggccaccggcgttgatggcgtcgatgtaatgatcggaacatcgtctcttatgcgccagcactcccatggcaaggacattgagtatatcaagaagaccgccattgaagtaatcaacttcgtcaagtcgcaaggcattgaagtccgcttttcaacagaagactccttccgctcggacctggtggacctcctctcaatctactctgccgttgaccaagtcggcgtgaaccgagtcggtgttgccgatacaatcggctgtgcctccccacgacaggtgtatgagctcatccgcgtccttcgcggtgtagtcagctgcgatatagagacccatttccacgacgacgcgggatgtgcaatcgcaaatgcatattgcgctctggaagcaggtgcaacacatatcgacacttcggtactggggatcggtgagcggaatggtatcaccccgcttggagggctgatggcgcgcatggttgccacgcatccagagtatgtgaagtcaaagtaccgcctcgataagattaaagatatcgaggatcttgttgccgaggctgtggagattaatatcccgttcaacaactatatcacgggcttttgcgcgttcacgcacaaggctggtatccatgccaaagccatcctcaacgacccaagtacctacgaaatcatcaaccccgcagattttggcatgacccgctatgtgcattttgcctcgcggctgaccggttggaacgccatccgatcccgggcgcagcaactaaacatcagcatgaccgacaagcaatacaaggagtgcacggccaagatcaaggctctagcagatatccgcccgattgcgatcgatgatgccgacagtatcatccgggcgtactatcgcaatattcaatcgggcgaggacaatccgttgatggagctcactgcagacgaggcagcgcagcttgcggcgaaggagaaggagctcggggaggtggtgactgcgtga

SEQ ID NO: 13205 - protein, 436 aa, Aspergillus oryzae
MPSASETSTDLTSRNPYGHGNGVSDFLSNVSRFKIIESTLREGEQFANAFFDTQKKIEIARALDEFGVDYIELTNPCASEQSRLDCEAICKLGLKAKILTHIRCHMDDARIAVATGVDGVDVMIGTSSLMRQHSHGKDIEYIKKTAIEVINFVKSQGIEVRFSTEDSFRSDLVDLLSIYSAVDQVGVNRVGVADTIGCASPRQVYELIRVLRGVVSCDIETHFHDDAGCAIANAYCALEAGATHIDTSVLGIGERNGITPLGGLMARMVATHPEYVKSKYRLDKIKDIEDLVAEAVEINIPFNNYITGFCAFTHKAGIHAKAILNDPSTYEIINPADFGMTRYVHFASRLTGWNAIRSRAQQLNISMTDKQYKECTAKIKALADIRPIAIDDADSIIRAYYRNIQSGEDNPLMELTADEAAQLAAKEKELGEVVTA

SEQ ID NO: 13206 - DNA, 1326 bp, Aspergillus oryzae
  CDS (1)..(1326)
atgggcacgcggcccctgccaatggcaatgaaccctcacccctccgcctcccggaacccctatggccacaacgttggtgtgaccgactttctgagcaacgtctcccggttcaagatcattgagagtaccctccgtgagggtgaacagttcgccaatgctttctttgataccgaaaagaagattgaaatcgctaaggctctggatgatttcggtgtcgactacatcgaacttaccagtccttgtgcctctgagcagtcgagacttgactgcgaggctatctgcaagctcggcttgaaggccaagattcttactcacattcgatgccacatggatgatgcccgtgttgccgtcgagactggtgttgatggagttgacgtcgtcatcggcacttcgtcctacctccgtgagcactctcacggcaaggatatgacctacatcaagaacactgctattgaagttattgaatatgtcaagtccaagggcatcgagattcgattctctagtgaggactccttccgttctgacctcgtcgacctcttgtccatctactccgctgttgacaaggttggtgtgaaccgtgttggtattgccgatactgtcggctgcgcttctcctcgccaagtttacgagcttgttcgtgtcctgaggggtgttgttggctgcgacattgagacccacttccacaacgacactggctgtgccattgccaacgcttactgtgccctggaggccggtgccactcacattgatacctccgttctcggtatcggtgagcgtaacggtatcacccctcttggtggtctcatggctcgtatgatggttgccgatcctgcctacgtcaagggcaagtacaagctggagaagctcaaggacattgaagatcttgtggccgaggctgttgaggtcaacattcctttcaacaactacatcaccggtttctgtgctttcacccacaaggctggtatccatgctaaggccatcctgaacaaccccagcacctacgagatcatcaaccctgccgactttggcatgaccagatacgttcacttcgcctctcgtctgactggctggaacgctatcaagtctcgtgctcagcagctcaagattgagatgactgacagccaatacaaggagtgcacggctaagatcaaggctcttgctgatatccgtcccatcgccgtcgacgatgccgacagtatcatccgtgcttactaccgtaacctcaagtcgggtgagaacaagcctctccttgatctgacggctgatgagcaggctcagttcgctgccaaggagaaggagcttgctgcttccggtgttgtggcttaa

SEQ ID NO: 13207 - protein, 441 aa, Aspergillus oryzae
MGTRPLPMAMNPHPSASRNPYGHNVGVTDFLSNVSRFKIIESTLREGEQFANAFFDTEKKIEIAKALDDFGVDYIELTSPCASEQSRLDCEAICKLGLKAKILTHIRCHMDDARVAVETGVDGVDVVIGTSSYLREHSHGKDMTYIKNTAIEVIEYVKSKGIEIRFSSEDSFRSDLVDLLSIYSAVDKVGVNRVGIADTVGCASPRQVYELVRVLRGVVGCDIETHFHNDTGCAIANAYCALEAGATHIDTSVLGIGERNGITPLGGLMARMMVADPAYVKGKYKLEKLKDIEDLVAEAVEVNIPFNNYITGFCAFTHKAGIHAKAILNNPSTYEIINPADFGMTRYVHFASRLTGWNAIKSRAQQLKIEMTDSQYKECTAKIKALADIRPIAVDDADSIIRAYYRNLKSGENKPLLDLTADEQAQFAAKEKELAASGVVA

SEQ ID NO: 13208 - DNA, 1128 bp, Heliobacterium chlorum
  CDS (1)..(1128): transl_table=11
atgggccaacgggtatggatgatggatacaactttgcgggacggggagcaatcccccggtgccgccttctcgccggaagaaaaagaatcaatcgcccgtgcgctggtggaagcgggagttcatgagatcgaggcgggggttccggccatgggcgaagacgaacaagcgaccatcgcccgcctcgtcgctttgaacctccctgttcgcttgaccacttggaaccgagcggtgatcgatgatctggaagcaagtttgaagactggggtccgagcggtagccatctccgttccctcttccgatcaacagattcggcggaagcttcaacaaagccgcgagtgggtccttgagacgttgggaaaatgcctgtaccgggccaagcaagaaggtctttatgtatgcattggcttggaagatgccagccgggccgatacagactttctcatccgcttaggcttagaagcccaacgtctcaaagccaaccgtctgcgtgtttccgatacgctcggtgtccttgaccccatccgaacctttacgctctttgaccgcttggccacatcgttaacgatccccttggaaattcacgcccacaatgatttaggcatggcgactgccaatacggttgcggcgatccaagccggtgcaaaagccgccagcgtcaccgtctgtggtcttggagaacgagccgggaacgcaccattggaagaagtagccgtggcgttgcggcaatgctgcaacgccgatactcatattcagatgacaaaactgcagagcctttgccaactggtaagccggatcacccgacgaccgattccgctggcgaaaccggtcgtcggccgctatgctttcacccatgcttccgccatccatgtcgatggcttacgcaaggataaaggaaactacgaaggcctgcctcccgagtatatcaaccgcaagcatcgcatcgccttaggcaaatacagcgggaaaaaatcactcgtacaggtcatacaaacgctcaatcttgagatggatccaacaatgttggatcacttgatccaaaaggttcgtctaaaaagccaaatcctcaaacgtcccctacgtcgccaagacatcttggaaatcgtcgcaaacgaacaaatcgtgaaatag

SEQ ID NO: 13209 - protein, 375 aa, Heliobacterium chlorum
MGQRVWMMDTTLRDGEQSPGAAFSPEEKESIARALVEAGVHEIEAGVPAMGEDEQATIARLVALNLPVRLTTWNRAVIDDLEASLKTGVRAVAISVPSSDQQIRRKLQQSREWVLETLGKCLYRAKQEGLYVCIGLEDASRADTDFLIRLGLEAQRLKANRLRVSDTLGVLDPIRTFTLFDRLATSLTIPLEIHAHNDLGMATANTVAAIQAGAKAASVTVCGLGERAGNAPLEEVAVALRQCCNADTHIQMTKLQSLCQLVSRITRRPIPLAKPVVGRYAFTHASAIHVDGLRKDKGNYEGLPPEYINRKHRIALGKYSGKKSLVQVIQTLNLEMDPTMLDHLIQKVRLKSQILKRPLRRQDILEIVANEQIVK

SEQ ID NO: 13210 - DNA, 1872 bp, Brassica oleracea
  CDS (1)..(1872)
atggcgtcttcgattctcagaaaccctatgctctcatcaccaacaacaatcaccaccccttctcttccctccttctcctcgaaaccctcacctctctcattccgcttcccaccctcccaccaccgctcctctctccgcatcaaatccctccgcctctcgtgctccctctcagatccctctcctcccctccgccgctgccgcccggagtacatccccaaccgcatttccgaccccaactacgtccgagtcttcgacaccactctccgcgacggcgaacagtcccccggagccaccctcacctccaaagagaagctcgacatcgcgcgccagctcgcgaagctgggcgtcgacgtaatcgaggccgggttccccgccgcctccaaggacgacttcgaagccgtgaaaaccatagccgaaaccgtgggaaacgccgtcgacggagacggttacgtccccgtcatctgcggactctcgagatgcaacaagagagatatcgagacggcgtgggaggctgtgaagtacgccaaaaggccgaggatccataccttcatcgccacgagtgacattcacttggagtataagctgaagaagagcaaagacgaggtcatcgaattcgctaggaatatggtaaagttcgcgaggagcttggggtgtgaggacgttgagtttagtcctgaagatgccggaagatcggagagagagtttttgtatcagattcttggggaagtgataaaagctggagcgacaacgcttaatatacctgacactgttggtataacgttgcctagtgagtttggtcagttgattgctgatatcaaagccaatactcctgggatcgagaatgttatcatctcaacgcattgtcagaatgatcttgggctctccactgccaacactttatctggtgcacattcgggtgcaaggcaagtggaagtgactatcaatggcattggcgaaagagctggaaacgcttcactagaagaggttgtgatggccataaaatgccgtggagatcatgtacttggaggcctatatactggaattgatactcggcacattgttatgacaagcaagatggttgaagattacacaggaatgcaaacacagccccataaggctattgtaggagcgaatgcctttgcgcatgaaagtggtattcatcaggatggaatgctcaaacacaagggcacatatgaaattatatgccccgaagaaattggacttgaacgatctaatgatgctggtattgttttggggaagcttagtgggcgtcatgcgttgaaagaccgtttgactgagcttggttatgtactagatgatgaacaactaagttccattttctggcgcttcaaatctgtggctgagcggaaaaagagagttaccgacgcagatataatagctttggtttctgatgaggttttccagccagaagctctgtggaaactcctggacattcagataacttgtgggactttggggctttcaacagcaaccgtgaaacttgctgacgctgatggcaaagagcatgttgcttgttctatgggaaccgggcctgtcgattcagcatataaggcagtcgatcttattgtcaaggaaccagcgactctgcttgagtactcaatgaatgcagtaacagaaggcatcgatgccattgcaaccacaagagttcttatccgaggaaacaacaattactcaactacaaacgcaatcactggtgaagaagttcaaaggacctttagtggaaccggagcaggaatggacatcgtggtctcgagcgtcaaagcttatgtcggagctctgaacaagatgctcgatttcaaagagaacacaacaacaaaaatcccttctcaaaacaacaaagtacctgcctga

SEQ ID NO: 13211 - protein, 623 aa, Brassica oleracea
MASSILRNPMLSSPTTITTPSLPSFSSKPSPLSFRFPPSHHRSSLRIKSLRLSCSLSDPSPPLRRCRPEYIPNRISDPNYVRVFDTTLRDGEQSPGATLTSKEKLDIARQLAKLGVDVIEAGFPAASKDDFEAVKTIAETVGNAVDGDGYVPVICGLSRCNKRDIETAWEAVKYAKRPRIHTFIATSDIHLEYKLKKSKDEVIEFARNMVKFARSLGCEDVEFSPEDAGRSEREFLYQILGEVIKAGATTLNIPDTVGITLPSEFGQLIADIKANTPGIENVIISTHCQNDLGLSTANTLSGAHSGARQVEVTINGIGERAGNASLEEVVMAIKCRGDHVLGGLYTGIDTRHIVMTSKMVEDYTGMQTQPHKAIVGANAFAHESGIHQDGMLKHKGTYEIICPEEIGLERSNDAGIVLGKLSGRHALKDRLTELGYVLDDEQLSSIFWRFKSVAERKKRVTDADIIALVSDEVFQPEALWKLLDIQITCGTLGLSTATVKLADADGKEHVACSMGTGPVDSAYKAVDLIVKEPATLLEYSMNAVTEGIDAIATTRVLIRGNNNYSTTNAITGEEVQRTFSGTGAGMDIVVSSVKAYVGALNKMLDFKENTTTKIPSQNNKVPA

SEQ ID NO: 13212 - DNA, 1518 bp, Brassica oleracea
  CDS (1)..(1518)
atggcatcgtcacttctgacatcttccggaattatccctaccaccagttccaacatggttgtccggtcattcttaccctttggatctgtccgcctgacccgtccgtacaacaagtcgtccttgctcatctcatgttgctcctctgtgtccaagaaggctgagactagtggtactgacctcaaaaccgttgtggaacggtggccagagtatattccgaacaagctccccgacaagaactacgtgcgtgtatttgatacgacgctccgtgacggcgaacaatctcccggtgcagcccttactccaccgcagaagatagagattgcccggcagctcgctaaactcagagtagacatcatggaagttggttttcccgtgtcatcagaggaagagttcgaaaccatcaaaaccatcgccaaaaccgtgggaaacgaggttgatgaggaaacaggttatatcccagtgatatgcgtcatcgcacgaagcaaagaaagagatataaaggcggcttgggagtcagtgaagtacgcaaagaggccgaggatagtcatattcacttctactagtgacattcacttgaaatataagttgaaaatgactagagaagaagtcgtcgagatggtcgcgagtagcattaggtttgctaaaagtttaggcttcgaagacatcgagtttggttgcgaagatggcggcaggtccgacaaggattatatatgcaaggtttttgaagaagcgatcaaagcgggtgcaaccaccctggcctgcccggacacggtggggatcaacatgccgcacgaatacgggaaacttgtgagatacatcaaagcaaacactcctggaattgatgatgttatcttcagcgctcattgtcacaatgaccttggtgttgctaccgccaacacaatcgccggtatatgtgcgggagcacgacaagtcgaagtaacaatcaatggaataggtgaaagaagtgggaatgcaccgcttgaagaggtcgtgatggctttgaaatgtcgaggagcatttgtgatgggtggtgtttacacaagaatagacacacgccaaattatggctaccagcaagatggttcaagaatatactggcttgtatgttcagccacataaacctatagttggagccaactgttttgttcatgagagcggcattcaccaggatgggatattgaaaaatcggagtacatatgagatcttatcaccagaagatgttggagttgtgaaatctcaaaattcaggcattgttcttggaaagcttagtggacgtcatgcggttaaaggtcgtctgaaagagttgggatatgaaatcagtgatgagaaactgaacgaggttttctcacggttcagagatttaaccaagcagaaaaagagagtcacggatgatgatctaagggcattagtaacgtgtggtgatgaaatcttctcctcagagaaattaaacggcactaacgacaacgaaatcaacagaaacggctatgtaccgtctcctcagatttcctctgtggtatga

SEQ ID NO: 13213 - protein, 505 aa, Brassica oleracea
MASSLLTSSGIIPTTSSNMVVRSFLPFGSVRLTRPYNKSSLLISCCSSVSKKAETSGTDLKTVVERWPEYIPNKLPDKNYVRVFDTTLRDGEQSPGAALTPPQKIEIARQLAKLRVDIMEVGFPVSSEEEFETIKTIAKTVGNEVDEETGYIPVICVIARSKERDIKAAWESVKYAKRPRIVIFTSTSDIHLKYKLKMTREEVVEMVASSIRFAKSLGFEDIEFGCEDGGRSDKDYICKVFEEAIKAGATTLACPDTVGINMPHEYGKLVRYIKANTPGIDDVIFSAHCHNDLGVATANTIAGICAGARQVEVTINGIGERSGNAPLEEVVMALKCRGAFVMGGVYTRIDTRQIMATSKMVQEYTGLYVQPHKPIVGANCFVHESGIHQDGILKNRSTYEILSPEDVGVVKSQNSGIVLGKLSGRHAVKGRLKELGYEISDEKLNEVFSRFRDLTKQKKRVTDDDLRALVTCGDEIFSSEKLNGTNDNEINRNGYVPSPQISSVV

SEQ ID NO: 13214 - DNA, 1323 bp, Saccharomyces cerevisiae
  CDS (1)..(1323)
atgtctgaaaataacgaattccagagtgtcaccgaatcgacgactgctccaaccactagtaacccatatggcccaaatcctgcggattatctatccaatgttaagaatttccagttgattgattcaacactaagagagggtgaacaatttgccaacgcattcttcgatactgaaaaaaagattgaaattgctagagccttggatgatttcggtgtggactacatcgagttaacctctcccgtagcatccgaacaatcaagaaaggactgtgaagctatatgtaaactaggtttaaaggccaagatccttacacacattcgttgtcacatggacgatgccagagtcgccgtagagactggtgtcgacggtgtcgatgttgttatcggcacctccaaatttttaagacaatattcccacggtaaggatatgaactacatcgccaagagtgctgttgaagtcattgaatttgtcaaatccaaaggtattgaaatcagattttcctctgaagattccttcagaagtgatctcgttgatcttttgaacatttataaaaccgttgacaagatcggtgtaaatagagtcggtattgccgacgcagttggatgtgccaacccaagacaagtatatgaactgatcagaactttgaagagtgttgtctcatgtgacatcgaatgccatttccacaatgataccggttgtgccattgcaaacgcctacactgctttggaaggtggtgccagattgattgacgtcagtgtactgggtattggtgaaagaaacggtatcactcctctaggtgggctcatggcaagaatgattgttgccgcaccagactatgtcagatctaaatacaagctgcacaagatcagagacatcgaaaacctggtcgctgatgctgtggaagttaacattccattcaacaaccctatcaccgggttctgtgcattcacacataaagcaggtatccatgccaaggccattttggctaacccatctacctacgaaatcttggaccctcacgatttcggtatgaagagatatatccacttcgccaacagactaactggttggaatgcaatcaaatcaagagtcgaccaattgaacttgaatttgacggatgatcaaatcaaggaagttactgctaagattaagaagctgggtgatgtcagaccgctaaatattgatgatgtagactccattatcaaggacttccatgcagaattgagcaccccacttttaaaaccagtaaataagggtacagatgacgacaatatcgatatttccaatgggcatgtttctaaaaaggcaaaggtcaccaaatag

SEQ ID NO: 13215 - protein, 440 aa, Saccharomyces cerevisiae
MSENNEFQSVTESTTAPTTSNPYGPNPADYLSNVKNFQLIDSTLREGEQFANAFFDTEKKIEIARALDDFGVDYIELTSPVASEQSRKDCEAICKLGLKAKILTHIRCHMDDARVAVETGVDGVDVVIGTSKFLRQYSHGKDMNYIAKSAVEVIEFVKSKGIEIRFSSEDSFRSDLVDLLNIYKTVDKIGVNRVGIADAVGCANPRQVYELIRTLKSVVSCDIECHFHNDTGCAIANAYTALEGGARLIDVSVLGIGERNGITPLGGLMARMIVAAPDYVRSKYKLHKIRDIENLVADAVEVNIPFNNPITGFCAFTHKAGIHAKAILANPSTYEILDPHDFGMKRYIHFANRLTGWNAIKSRVDQLNLNLTDDQIKEVTAKIKKLGDVRPLNIDDVDSIIKDFHAELSTPLLKPVNKGTDDDNIDISNGHVSKKAKVTK

SEQ ID NO: 13216 - DNA, 1437 bp, Thermoproteus tenax
  CDS (1)..(1437): transl_table=11
gtgggtcggttcagccgccatgagttcggggaaagcataaaaattctcgactcgacgctgagagagggcgagcagactccgggcgttatattctctgaggaatggaggatcaagatagcgaagtctctgtcggatgtaggcgtccacttaatagaggtgggcgacccaaacgtggcgcccgacgtcagatcggctatctcgaagataatagctctgaagcgagacggcgaaatcaagagcgagatagtcgtccacagcagatccgtcaaatcagatatagagaacgcgacgtcgcttgagcccgacagagtcgccatcttctacggcgtcagcgatatacatctgaagcacaaacacaggaagaccagagaggaggctttggccataatcgccgaacacgtggagttcgcgagaggcgccggcgtgaaggtgaggttcacagccgaagacgccactagggcagacctcgactaccttatacaagtggtaaaaactgcgcgagacgcaggcgcggacagagtgagcattgccgacacagtggggatactcactcccgatagagcgcgccaactcttctcgaagctgaaggaggccgtgcctggggtcggactagatatacacgcccacaacgacttagggatggccgtggccaactcaatggctgcgaccgagggcggagccgacgtagttcacacgacagtgaacggcctcggggagagagcaggtatcacccctctccaagtcttcgtcgcggcctactactaccacaagggcgtcaagctcatcgatatggcgaagctcccctacttggcctcgctggtggaggcggccagcgggatcgcccagatgcccaccttccccataactggcgacaatgtgttcactcacaaggccggcgtccaccaagcaggtgtactggcgaatccagagacctacgagccgtttccgcccgaggtcgtggggaggtcgagggacttctccctagacaaatatagcggaaggcgcgccgtggcccaccggcttgagagactcggcgtgaaggtagacgaggagactctggccaaagtcgtggaggagctcaaatccacgaacgcgaggaggcttagagacgaggacctcttggagatcttggagaaggtcacgggcgtgagatataaggcgtatgtaaacaaacatattgaggcgttcatctggataaaagtggacgaaaacgtatacaccacctcggtggcccgcagagtgtccacgattagcggcgtcgtcaacgtgggagaggtcactggggatttcgatatcgtcgcaagagtggtggcctccaacgctgaggaattgaacagaataatagaggatataaggtcggtcagaggcgttaaatccacgttgaccaacatagtgttgaaacagctgggctccctccaagcgccctccgccccttag

SEQ ID NO: 13217 - protein, 478 aa, Thermoproteus tenax
MGRFSRHEFGESIKILDSTLREGEQTPGVIFSEEWRIKIAKSLSDVGVHLIEVGDPNVAPDVRSAISKIIALKRDGEIKSEIVVHSRSVKSDIENATSLEPDRVAIFYGVSDIHLKHKHRKTREEALAIIAEHVEFARGAGVKVRFTAEDATRADLDYLIQVVKTARDAGADRVSIADTVGILTPDRARQLFSKLKEAVPGVGLDIHAHNDLGMAVANSMAATEGGADVVHTTVNGLGERAGITPLQVFVAAYYYHKGVKLIDMAKLPYLASLVEAASGIAQMPTFPITGDNVFTHKAGVHQAGVLANPETYEPFPPEVVGRSRDFSLDKYSGRRAVAHRLERLGVKVDEETLAKVVEELKSTNARRLRDEDLLEILEKVTGVRYKAYVNKHIEAFIWIKVDENVYTTSVARRVSTISGVVNVGEVTGDFDIVARVVASNAEELNRIIEDIRSVRGVKSTLTNIVLKQLGSLQAPSAP

SEQ ID NO: 13218 - DNA, 1512 bp, Arabidopsis thaliana
  CDS (1)..(1512)
atggcttcgttacttctcacatcgtcgagtatgataaccactagctgtccctccatggttctccggtcagggttacccatcggatcttcttttccctctcttcgcctgacccgtccatacgacaaggcgactctgttcgtctcatgttgctccgctgagtccaaaaaggtggcaactagtgctactgatctcaaacctatcatggaacggaggccggagtacattccgaacaagcttccccacaagaactatgtgcgtgtattagacacgacgcttcgtgacggtgaacaatctcccggtgcagcacttactccaccgcagaagttagagattgccaggcagctagctaaactccgagtagacatcatggaagttggttttccggtgtcgtctgaggaagaattcgaagctattaaaaccatcgccaagaccgtggggaacgaggtggatgaggaaaccggttacgttcctgtgatatgcggcattgcacgatgcaaaaagagagacatcgaggcaacttgggaggcactgaagtatgcgaagaggccgagggtaatgctattcacatctactagtgaaattcacatgaaatataagttgaaaaagactaaagaagaagtgatcgagatggccgtgaacagtgttaagtacgctaaaagcttgggcttcaaagacatccaatttgggtgcgaagatggcggcaggacggagaaagattttatatgtaagattctaggagaatcgataaaagcgggtgcaaccacggtggggtttgcggacacggtcgggatcaacatgccgcaagaattcggagaactcgtggcctatgtcatagaaaacactccaggggctgatgatattgtcttcgccattcattgtcataacgaccttggtgttgctaccgccaacacaatatccggtatatgtgcgggagcaagacaagtcgaagtgacgatcaacggaattggtgaaagaagtgggaatgcgccgcttgaagaggtagtgatggctttgaaatgtcgaggagaatctctgatggatggtgtttacacaaaaatagactcacgccaaattatggctacaagcaagatggttcaagagcataccggcatgtatgttcaaccacataagccaatagttggagacaactgttttgttcatgagagcggcattcaccaggatggaatattgaaaaatcgaagtacatatgagatcttatcaccagaagatgttgggatcgtaaaatctgaaaattctggcattgttcttggaaagcttagtggacgtcatgctgtaaaagaccggcttaaagagttgggatatgaaatcagtgatgagaaattcaacgacatcttctcacgatacagagaattaacgaaggacaaaaagagaatcacagacgctgatctgaaggcattagtggtgaacggtgctgaaatctcatcagaaaaattaaacagtaaaggaattaacgaccttatgtcaagccctcagatttccgctgttgtataa

SEQ ID NO: 13219 - protein, 503 aa, Arabidopsis thaliana
MASLLLTSSSMITTSCPSMVLRSGLPIGSSFPSLRLTRPYDKATLFVSCCSAESKKVATSATDLKPIMERRPEYIPNKLPHKNYVRVLDTTLRDGEQSPGAALTPPQKLEIARQLAKLRVDIMEVGFPVSSEEEFEAIKTIAKTVGNEVDEETGYVPVICGIARCKKRDIEATWEALKYAKRPRVMLFTSTSEIHMKYKLKKTKEEVIEMAVNSVKYAKSLGFKDIQFGCEDGGRTEKDFICKILGESIKAGATTVGFADTVGINMPQEFGELVAYVIENTPGADDIVFAIHCHNDLGVATANTISGICAGARQVEVTINGIGERSGNAPLEEVVMALKCRGESLMDGVYTKIDSRQIMATSKMVQEHTGMYVQPHKPIVGDNCFVHESGIHQDGILKNRSTYEILSPEDVGIVKSENSGIVLGKLSGRHAVKDRLKELGYEISDEKFNDIFSRYRELTKDKKRITDADLKALVVNGAEISSEKLNSKGINDLMSSPQISAVV

SEQ ID NO: 13220 - DNA, 1512 bp, Arabidopsis thaliana
  CDS (1)..(1512)
atggcttcgttacttctcacatcttccattatgataaccactagctgtccctccatggttctccggtcagcgttacccatcggatcttcttttccctctcttcgcctgacccgtccatacgacaaggcgactctgctcgtctcgtgttgctccgctgagtccaaaaaggtggcaactagtgctactgatctcaaacctatcatggaacggaggccggagtacattccgaacaagcttccccacaagaactatgtgcgtgtattagacacgacgcttcgtgacggtgaacaatctcccggtgcagcacttactccaccgcagaagttagagattgccaggcagctagctaaactccgagtagacatcatggaagttggttttccggtgtcgtctgaggaagaattcgaagctattaaaaccatcgccaagaccgtggggaacgaggtggatgaggaaaccggttacgttcctgtgatatgcggcattgcacgatgcaaaaagagagacatcgaggcaacttgggaggcactgaagtatgcgaagaggccgagggtaatgctattcacatctactagtgaaattcacatgaaatataagttgaaaaagactaaagaagaagtgatcgagatggccgtgaacagtgttaagtacgctaaaagcttgggcttcaaagacatccaatttgggtgcgaagatggcggcaggacggagaaagattttatatgtaagattctaggagaatcgataaaagcgggtgcaaccacggtggggtttgcggacacggtcgggatcaacatgccgcaagaattcggagaactcgtggcctatgtcatagaaaacactccaggggctgatgatattgtcttcgccattcattgtcataacgaccttggtgttgctaccgccaacacaatatccggtatatgtgcgggagcaagacaagtcgaagtgacgatcaacggaattggtgaaagaagtgggaatgcgccgcttgaagaggtcgtgatggctttgaaatgtcgaggagaatctctgatggatggtgtttacacaaaaatagactcacgccaaattatggctacaagcaagatggttcaagagcataccggcatgtatgttcaaccacataagccaatagttggagacaactgttttgttcatgagagcggcattcaccaggatggaatattgaaaaatcgaagtacatatgagatcttatcaccagaagatgttgggatcgtaaaatctgaaaattctggcattgttcttggaaagcttagcggacgtcatgctgtaaaagaccggcttaaagagttgggatatgaaatcagtgatgagaaattcaacgacatcttctcacgatacagagaattaacgaaggacaaaaagagaatcacagacgctgatctgaaggcattagtggtgaacggtgctgaaatctcatcagaaaaattaaacagtaaaggaattaacgaccttatgtcaagccctcagatttccgctgttgtataa

SEQ ID NO: 13221 - protein, 503 aa, Arabidopsis thaliana
MASLLLTSSIMITTSCPSMVLRSALPIGSSFPSLRLTRPYDKATLLVSCCSAESKKVATSATDLKPIMERRPEYIPNKLPHKNYVRVLDTTLRDGEQSPGAALTPPQKLEIARQLAKLRVDIMEVGFPVSSEEEFEAIKTIAKTVGNEVDEETGYVPVICGIARCKKRDIEATWEALKYAKRPRVMLFTSTSEIHMKYKLKKTKEEVIEMAVNSVKYAKSLGFKDIQFGCEDGGRTEKDFICKILGESIKAGATTVGFADTVGINMPQEFGELVAYVIENTPGADDIVFAIHCHNDLGVATANTISGICAGARQVEVTINGIGERSGNAPLEEVVMALKCRGESLMDGVYTKIDSRQIMATSKMVQEHTGMYVQPHKPIVGDNCFVHESGIHQDGILKNRSTYEILSPEDVGIVKSENSGIVLGKLSGRHAVKDRLKELGYEISDEKFNDIFSRYRELTKDKKRITDADLKALVVNGAEISSEKLNSKGINDLMSSPQISAVV

SEQ ID NO: 13222 - DNA, 1512 bp, Arabidopsis thaliana
  CDS (1)..(1512)
atggcttcgttacttctcacatcttccagtatgataaccactagctgtccctccatggttctccggtcagggttacccatcggatcttcttttccctctcttcgcctgacccgtccatacgacaaggcgactctgttcgtctcatgttgctccgctgagtccaaaaaggtggcaactagtgctactgatctcaaacctatcatggaacggaggccggagtacattccgaacaagcttccccacaagaactacgtgcgtgtattagacacgacgcttcgtgacggtgaacaatctcccggtgcagcacttactccaccgcagaagttagagattgccaggcagctagctaaactccgagtagacatcatggaagttggttttccggtgtcgtctgaggaagaattcgaagctattaaaaccatcgccaagaccgtggggaacgaggtggatgaggaaaccggttacgctcctgtgatatgcggcattgcacgatgcaaaaagagagacatcgaggcaacttgggaggcactgaagtatgcgaagaggccgagggtaatgctattcacatctactagtgaaattcacatgaaatataagttgaaaaagactaaagaagaagtgatcgagatggccgtgaacagtgttaagtacgctaaaagcttgggcttcaaagacatccaatttgggtgcgaagatggcggcaggacggagaaagattttttatgtaagattctaggagaatcgataaaagcgggtgcaaccacggtggggtttgcggacacggtcgggatcaacatgccgcaagaattcggagaactcgtggcctatgtcatagaaaacactccaggggctgatgatattgtcttcgccattcattgtcataacgaccttggtgttgctaccgccaacacaatatccggtatatgtgcgggagcaagacaagtcgaagtgacgatcaacggaattggtgaaagaagtgggaatgcgccgcttgaagaggtcgtgatggctttgaaatgtcgaggagaatctctgatggatggtgtttacacaaaaatagactcacgccaaattatggctacaagcaagatggttcaagagcataccggcatgtatgttcaaccacataagccaatagttggagacaactgttttgttcatgagagcggcattcaccaggatggaatattgaaaaatcgaagtacatatgagatcttatcaccagaagatgttgggatcgtaaaatctgaaaattctggcattgttcttggaaagcttagcggacgtcatgctgtaaaagaccggcttaaagagttgggatatgaaatcagtgatgagaaattcaacgacatcttctcacgatacagagaattaacgaaggacaaaaagagaatcacagacgctgatctgaaggcattagtggtgaacggtgctgaaatctcatcagaaaaattaaacagtaaaggaattaacgaccttatgtcaagccctcagatttccgctgttgtataa

SEQ ID NO: 13223 - protein, 503 aa, Arabidopsis thaliana
MASLLLTSSSMITTSCPSMVLRSGLPIGSSFPSLRLTRPYDKATLFVSCCSAESKKVATSATDLKPIMERRPEYIPNKLPHKNYVRVLDTTLRDGEQSPGAALTPPQKLEIARQLAKLRVDIMEVGFPVSSEEEFEAIKTIAKTVGNEVDEETGYAPVICGIARCKKRDIEATWEALKYAKRPRVMLFTSTSEIHMKYKLKKTKEEVIEMAVNSVKYAKSLGFKDIQFGCEDGGRTEKDFLCKILGESIKAGATTVGFADTVGINMPQEFGELVAYVIENTPGADDIVFAIHCHNDLGVATANTISGICAGARQVEVTINGIGERSGNAPLEEVVMALKCRGESLMDGVYTKIDSRQIMATSKMVQEHTGMYVQPHKPIVGDNCFVHESGIHQDGILKNRSTYEILSPEDVGIVKSENSGIVLGKLSGRHAVKDRLKELGYEISDEKFNDIFSRYRELTKDKKRITDADLKALVVNGAEISSEKLNSKGINDLMSSPQISAVV

SEQ ID NO: 13224 - DNA, 1512 bp, Arabidopsis thaliana
  CDS (1)..(1512)
atggcttcgttacttctcacatcgtcgagtatgataaccactagctgtccctccatggttctccggtcagggttacccatcggatcttcttttccctctcttcgcctgacccgtccatacgacaaggcgactctgtccgtctcatgttgctccgctgagtccaaaaaggtggcaactagtgctactgatctcaaacctatcatggaacggaggccggagtacattccgaacaagcttccccacaagaactatgtgcgtgtattagacacgacgcttcgtgacggtgaacaatctcccggtgcagcacttactccaccgcagaagttagagattgccaggcagctagctaaactccgagtagacatcatggaagttggttttccggtgtcgtctgaggaagaattcgaagctattaaaaccatcgccaagaccgtggggaacgaggtggatgaggaaaccggttacgttcctgtgatatgcggcattgcacgatgcaaaaagagagacatcgaggcaacttgggaggcactgaagtatgcgaagaggccgagggtaatgctattcacatctactagtgaaattcacatgaaatataagttgaaaaagactaaagaagaagtgatcgagatggccgtgaacagtgttaagtacgctaaaagcttgggcttcaaagacatccaatttgggtgcgaagatggcggcaggacggagaaagattttatatgtaagattctaggagaatcgataaaagcgggtgcaaccacggtggggtttgcggacacggtcgggatcaacatgccgcaagaattcggagaactcgtggcctatgtcatagaaaacactccaggggctgatgatattgtcttcgccattcattgtcataacgaccttggtgttgctaccgccaacacaatatccggtatatgtgcgggagcaagacaagtcgaagtgacgatcaacggaattggtgaaagaagtgggaatgcgccgcttgaagaggtagtgatggctttgaaatgtcgaggagaatctctgatggatggtgtttacacaaaaatagactcacgccaaattatggctacaagcaagatggttcaagagcataccggcatgtatgttcaaccacataagccaatagttggagacaactgttttgttcatgagagcggcattcaccaggatggaatattgaaaaatcgaagtacatatgagatcttatcaccagaagatgttgggatcgtaaaatctgaaaattctggcattgttcttggaaagcttagtggacgtcatgctgtaaaagaccggcttaaagagttgggatatgaaatcagtgatgagaaattcaacgacatcttctcacgatacagagaattaacgaaggacaaaaagagaatcacagacgctgatctgaaggcattagtggtgaacggtgctgaaatctcatcagaaaaattaaacagtaaaggaattaacgaccttatgtcaagccctcagatttccgctgttgtataa

SEQ ID NO: 13225 - protein, 503 aa, Arabidopsis thaliana
MASLLLTSSSMITTSCPSMVLRSGLPIGSSFPSLRLTRPYDKATLSVSCCSAESKKVATSATDLKPIMERRPEYIPNKLPHKNYVRVLDTTLRDGEQSPGAALTPPQKLEIARQLAKLRVDIMEVGFPVSSEEEFEAIKTIAKTVGNEVDEETGYVPVICGIARCKKRDIEATWEALKYAKRPRVMLFTSTSEIHMKYKLKKTKEEVIEMAVNSVKYAKSLGFKDIQFGCEDGGRTEKDFICKILGESIKAGATTVGFADTVGINMPQEFGELVAYVIENTPGADDIVFAIHCHNDLGVATANTISGICAGARQVEVTINGIGERSGNAPLEEVVMALKCRGESLMDGVYTKIDSRQIMATSKMVQEHTGMYVQPHKPIVGDNCFVHESGIHQDGILKNRSTYEILSPEDVGIVKSENSGIVLGKLSGRHAVKDRLKELGYEISDEKFNDIFSRYRELTKDKKRITDADLKALVVNGAEISSEKLNSKGINDLMSSPQISAVV

SEQ ID NO: 13226 - DNA, 1521 bp, Arabidopsis thaliana
  CDS (1)..(1521)
atggcttcatcgcttctgacatcttccggtatgatccctaccaccggttccaccgtggttggccggtcagtgttaccctttcaatcttccctgcactctctccgcctgacccattcgtacaagaaccccgcattgttcatctcatgttgctcttctgtgtccaaaaatgcggcaactagttctactgatctcaaacccgctgtggaacggtggccggagtacttaccgaacaagcttcccgacgaaaactatgtgcgtgtattcgacacgacgctccgtgacggtgaacaagctcctggtggatccctcactccaccgcagaagcaagagattgcccgacagctcgctaaactccgagtagacatcatggaagtcggttttccgggatcatctgaagaagagttagaaaccgttaagaccatcgccaagaccgtgggaaatgaggtggatgaggaaacaggctacgtccctgtgatatgcgccatagctcgaagcaaacatagagacattgaggcggcttgggaggcggtgaagtacgcgaagaggccaaggatactcatattcacatctactagtgacattcacatgaaatataagttgaaaaagactcaagaagaagtgattgagatggccgtgagtagtattaggttcgctaaaagcttaggcttcaatgacatccaacttgggtgcgaagatggcggcaggtcggacaaggattttctatgcaagattcttggagaagccataaaagccggtgttacggtggtgaacgtcgcggatacggtagggatcaacatgccacatgaatacgcggaactcgtgacctatctcaaagcaaacacccctggaattgacgatgttgtcttcagtgttcattgtcacaacgaccttggtcttgcaaccgccaactcaatcgccggtatacgtgcgggagcaagacaggtcgaagtaactatcaacggaattggtgaaagaagtggcaatgcgtcgcttgaggaggtggtgatggctttgaaatgtcgaggggcatatgtgatcaatggtgtttacacaagaatagacacacgtcaaatcatggctaccagcaagatggttcaagagtacacgggcttgtatgttcaagcacataagcccatagttggagcgaactgttttgttcatgagagcggcattcatcaggatggaatattgaaaaataggagtacttatgagatcttatcaccagaagatattgggattgtaaaatctcaaaattccggccttgttcttggaaagcttagtggacgtcacgctgtgaaagatcggctgaaagagttgggatatgaactcgatgatgagaaattgaacgctgtcttctcactattcagagatttaaccaagaataaaaagagaatcacagatgctgatatgaaggcattagtaacatctagcgatggaatttctttagagaaatcaaacggcgctaacggtttaaagtctaacggctatataccagttcttcaggtttcatctaatgtataa

SEQ ID NO: 13227 - protein, 506 aa, Arabidopsis thaliana
MASSLLTSSGMIPTTGSTVVGRSVLPFQSSLHSLRLTHSYKNPALFISCCSSVSKNAATSSTDLKPAVERWPEYLPNKLPDENYVRVFDTTLRDGEQAPGGSLTPPQKQEIARQLAKLRVDIMEVGFPGSSEEELETVKTIAKTVGNEVDEETGYVPVICAIARSKHRDIEAAWEAVKYAKRPRILIFTSTSDIHMKYKLKKTQEEVIEMAVSSIRFAKSLGFNDIQLGCEDGGRSDKDFLCKILGEAIKAGVTVVNVADTVGINMPHEYAELVTYLKANTPGIDDVVFSVHCHNDLGLATANSIAGIRAGARQVEVTINGIGERSGNASLEEVVMALKCRGAYVINGVYTRIDTRQIMATSKMVQEYTGLYVQAHKPIVGANCFVHESGIHQDGILKNRSTYEILSPEDIGIVKSQNSGLVLGKLSGRHAVKDRLKELGYELDDEKLNAVFSLFRDLTKNKKRITDADMKALVTSSDGISLEKSNGANGLKSNGYIPVLQVSSNV

SEQ ID NO: 13228 - DNA, 1521 bp, Arabidopsis thaliana
  CDS (1)..(1521)
atggcttcatcgcttctgacatcttccggtatgatccctaccaccggttccaccgtggttggccggtcagtgttaccctttcaatcttccctgcactctctccgcctgacccattcgtacaagaaccccgcattgttcatctcatgttgctcttctgtgtccaaaaatgcggcaactagttctactgatctcaaacccgttgtggaacggtggccggagtacataccgaacaagcttcccgacgaaaactatgtgcatgtattcgacacgacgctccgtgacggtgaacaagctcctggtggatccctcactccaccgcagaagctagagattgcccgacagctcgctaaactccgagtagacatcatggaagtcggttttccgggatcatctgaagaagagttagaaaccgttaagaccatcgccaagaccgtgggaaatgaggtggatgaggaaacaggctacgtccctgtgatatgcgccatagctcgaagcaaacatagagacattgaggcggcttgggaggcggtgaagtacgcgaagaggccaaggatactcatattcacatctactagtgacattcacatgaaatataagttgaaaaagactcaagaagaagtgattgagatggccgtgagtagtattaggttcgctaaaagcttaggcttcaatgacatccaacttgggtgcgaagatggcggcaggtcggacaaggattttctatgcaagattcttggagaagccataaaagccggtgttacggtggtgaacgtcgcggatacggtagggatcaacatgccacatgaatacgcggaactcgtgacctatctcaaagcaaacacccctggaattgacgatgttgtcttcagtgttcattgtcacaacgaccttggtcttgcaaccgccaactcaatcgccggtatacgtgcgggagcaagacaggtcgaagtaactatcaacggaattggtgaaagaagtggcaatgcgtcgcttgaggaggtggtgatggctttgaaatgtcgaggggcatatgtgatcaatggtgtttacacaagaatagacacacgtcaaatcatggctaccagcaagatggttcaagagtacacgggcttgtatgttcaagcacataagcccatagttggagcgaactgttttgttcatgagagcggcattcatcaggatggaatattgaaaaataggagtacttatgagatcttatcaccagaagatattgggattgtaaaatctcaaaattccggccttgttcttggaaagcttagtggacgtcacgctgtgaaagatcggctgaaagagttgggatatgaactcgatgatgagaaattgaacgttgtcttctcactattcagagatttaaccaagaataaaaagagaatcacggatgctgatttgaaggcattagtaacatctagcgatgaaatctctttggagaaattaaacggcgctaacggtttaaagtctaacggctatataccagttcttcaggtttcatcgaatgtgtaa

SEQ ID NO: 13229 - protein, 506 aa, Arabidopsis thaliana
MASSLLTSSGMIPTTGSTVVGRSVLPFQSSLHSLRLTHSYKNPALFISCCSSVSKNAATSSTDLKPVVERWPEYIPNKLPDENYVHVFDTTLRDGEQAPGGSLTPPQKLEIARQLAKLRVDIMEVGFPGSSEEELETVKTIAKTVGNEVDEETGYVPVICAIARSKHRDIEAAWEAVKYAKRPRILIFTSTSDIHMKYKLKKTQEEVIEMAVSSIRFAKSLGFNDIQLGCEDGGRSDKDFLCKILGEAIKAGVTVVNVADTVGINMPHEYAELVTYLKANTPGIDDVVFSVHCHNDLGLATANSIAGIRAGARQVEVTINGIGERSGNASLEEVVMALKCRGAYVINGVYTRIDTRQIMATSKMVQEYTGLYVQAHKPIVGANCFVHESGIHQDGILKNRSTYEILSPEDIGIVKSQNSGLVLGKLSGRHAVKDRLKELGYELDDEKLNVVFSLFRDLTKNKKRITDADLKALVTSSDEISLEKLNGANGLKSNGYIPVLQVSSNV

SEQ ID NO: 13230 - DNA, 1521 bp, Arabidopsis thaliana
  CDS (1)..(1521)
atggcttcatcgcttctgacatcttccggtatgatccctaccaccggttccaccgtggttggccggtcagtgttaccctttcaatcttccctgcactctctccgcctgacccattcgtacaagaaccccgcattgttcatctcatgttgctcttctgtgtccaaaaatgcggcaactagttctactgatctcaaacccgctgtggaacggtggccggagtacttaccgaacaagcttcccgacgaaaactatgtgcgtgtattcgacacgacgctccgtgacggtgaacaagctcctggtggatccctcactccaccgcagaagctagagattgcccgacagctcgctaaactccgagtagacatcatggaagtcggttttccgggatcatctgaagaagagttagaaaccgttaagaccatcgccaagaccgtgggaaatgaggtggatgaggaaacaggctacgtccctgtgatatgcgccatagctcgaagcaaacatagagacattgaggcggcttgggaggcggtgaagtacgcgaagaggccaaggatactcatattcacatctactagtgacattcacatgaaatataagttgaaaaagactcaagaagaagtgattgagatggccgtgagtagtattaggttcgctaaaagcttaggcttcaatgacatccaacttgggtgcgaagatggcggcaggtcggacaaggattttctatgcaagattcttggagaagccataaaagccggtgttacggtggtgaacgtcgcggatacggtagggatcaacatgccacatgaatacgcggaactcgtgacctatctcaaagcaaacacccctggaattgacgatgttgtcttcagtgttcattgtcacaacgaccttggtcttgcaaccgccaactcaatcgccggtatacgtgcgggagcaagacaggtcgaagtaactatcaacggaattggtgaaagaagtggcaatgcgtcgcttgaggaggtggtgatggctttgaaatgtcgaggggcatatgtgatcaatggtgtttacacaagaatagacacacgtcaaatcatggctaccagcaagatggttcaagagtacacgggcttgtatgttcaagcacataagcccatagttggagcgaactgttttgttcatgagagcggcattcatcaggatggaatattgaaaaataggagtacttatgagatcttatcaccagaagatattgggattgtaaaatctcaaaattccggccttgttcttggaaagcttagtggacgtcacgctgtgaaagatcggctgaaagagttgggatatgaactcgatgatgagaaattgaacgctgtcttctcactattcagagatttaaccaagaataaaaagagaatcacagatgctgatatgaaggcattagtaacatctagcgatggaatttctttagagaaatcaaacggcgctaacggtttaaagtctaacggctatataccagttcttcaggtttcatctaatgtgtaa

SEQ ID NO: 13231 - protein, 506 aa, Arabidopsis thaliana
MASSLLTSSGMIPTTGSTVVGRSVLPFQSSLHSLRLTHSYKNPALFISCCSSVSKNAATSSTDLKPAVERWPEYLPNKLPDENYVRVFDTTLRDGEQAPGGSLTPPQKLEIARQLAKLRVDIMEVGFPGSSEEELETVKTIAKTVGNEVDEETGYVPVICAIARSKHRDIEAAWEAVKYAKRPRILIFTSTSDIHMKYKLKKTQEEVIEMAVSSIRFAKSLGFNDIQLGCEDGGRSDKDFLCKILGEAIKAGVTVVNVADTVGINMPHEYAELVTYLKANTPGIDDVVFSVHCHNDLGLATANSIAGIRAGARQVEVTINGIGERSGNASLEEVVMALKCRGAYVINGVYTRIDTRQIMATSKMVQEYTGLYVQAHKPIVGANCFVHESGIHQDGILKNRSTYEILSPEDIGIVKSQNSGLVLGKLSGRHAVKDRLKELGYELDDEKLNAVFSLFRDLTKNKKRITDADMKALVTSSDGISLEKSNGANGLKSNGYIPVLQVSSNV

SEQ ID NO: 13232 - DNA, 1521 bp, Arabidopsis thaliana
  CDS (1)..(1521)
atggcttcatcgcttctgacatcttccgttatgatccctaccaccggctccaccgtggttggccggtcagtgttaccctttcaatcttccctgcactctctccgcctgacccattcgtacaagaagcccgcattgttcatctcatgttgctcttctgtgtccaaaaatgcggcaactagttctactgatctcaaacccgttgtggaacggtggccggagtacataccgaacaagcttcccgacggaaactatgtgcgtgtattcgacacgacgctccgtgacggtgaacaatctcctggtggatccctcactccgccgcagaagctagagattgcccgacagctcgctaaactccgagtagacatcatggaagtcggttttccgggatcatctgaagaagagttagaaaccattaagaccatcgccaagactgtggggaatgaggtggatgaggaaacaggttacgtccctgtgatatgcgccatagctcgatgcaaacatagagacattgaggcgacttgggaggcgctgaagtacgcgaagaggccaaggatactcgtattcacatctactagtgacattcacatgaaatataagttgaaaaagactcaagaagaagtgattgagatggccgtgagtagtattaggtttgctaaaagcttgggcttcaatgacatccagtttgggtgcgaagatggcggcaggtcggacaaggatttcctatgcaagattctaggagaagccataaaagccggtgttacggtggtgaccatcggtgatacggtagggatcaacatgccacatgaatacggggaactcgtgacttatctcaaagcaaacacccctggaattgacgatgttgtcgtcgctgttcattgtcacaacgaccttggtcttgcaaccgccaactcaatcgccggtatacgtgcgggagcaagacaggtcgaagtaactatcaacggaattggtgaaagaagtggcaatgcgtcgcttgaggaggtcgtgatggctttgaaatgtcgaggggcatatgtgatcaatggggtttacacaaaaatagacacacgccaaatcatggctaccagcaagatggttcaagagtacacgggcttgtatgttcaagcacataagcccatagttggagcgaactgttttgttcatgagagcggcattcatcaggatggaatattgaaaaataggagtacttatgagatcttatcaccagaagatattgggattgtaaaatctcaaaattccggccttgttcttggaaagcttagtggacgtcacgctgtgaaagatcggctgaaagagttgggatatgaactcgatgatgagaaattgaacgctgtcttctcactattcagagatttaaccaagaataaaaagagaatcacggatgctgatttgaaggcattagtaacatctagcgatgaaatctctttggagaaattaaacggcgctaacggtttaaagtctaacggctatataccagttcctcaggtttcatcgaatgtgtaa

SEQ ID NO: 13233 - protein, 506 aa, Arabidopsis thaliana
MASSLLTSSVMIPTTGSTVVGRSVLPFQSSLHSLRLTHSYKKPALFISCCSSVSKNAATSSTDLKPVVERWPEYIPNKLPDGNYVRVFDTTLRDGEQSPGGSLTPPQKLEIARQLAKLRVDIMEVGFPGSSEEELETIKTIAKTVGNEVDEETGYVPVICAIARCKHRDIEATWEALKYAKRPRILVFTSTSDIHMKYKLKKTQEEVIEMAVSSIRFAKSLGFNDIQFGCEDGGRSDKDFLCKILGEAIKAGVTVVTIGDTVGINMPHEYGELVTYLKANTPGIDDVVVAVHCHNDLGLATANSIAGIRAGARQVEVTINGIGERSGNASLEEVVMALKCRGAYVINGVYTKIDTRQIMATSKMVQEYTGLYVQAHKPIVGANCFVHESGIHQDGILKNRSTYEILSPEDIGIVKSQNSGLVLGKLSGRHAVKDRLKELGYELDDEKLNAVFSLFRDLTKNKKRITDADLKALVTSSDEISLEKLNGANGLKSNGYIPVPQVSSNV

SEQ ID NO: 13234 - DNA, 1521 bp, Arabidopsis thaliana
  CDS (1)..(1521)
atggcttcatcgcttttgacatcttccggtatgatccctaccaccggttccaccgtggttggccggtcagtgttaccctttcaatcttccctgcactctctccgcctgacccattcgtacaagaaccccacattgttcatctcatgttgctcttctgtgtccaaaaatgcggcaactagttctactgatctcaaacccgttgtggaacggtggccggagtacataccgaacaagcttcccgacggaaactatgtgcgtgtattcgacacgacgctccgtgacggtgaacaatctcctggtggatccctcactccgccgcagaagctagagattgcccgacagctcgctaaactccgagtagacatcatggaagtcggttttccgggatcatctgaagaagagttagaaaccattaagaccatcgccaagactgtggggaatgaggtggatgaggaaacaggttacgtccctgtgatatgcgccatagctcgatgcaaacatagagacattgaggcgacttgggaggcgctgaagtacgcgaagaggccaaggatactcgtattcacatctactagtgacattcacatgaaatataagttgaaaaagactcaagaagaagtgattgagatggccgtgagtagtattaggttcgctaaaagcttgggcttcaatgacatccagtttgggtgcgaagatggcggcaggtcggacaaggatttcctatgcaagattctaggagaagccataaaagccggtgttacggtggtgaccatcggtgatacggtagggatcaacatgccacatgaatacggggaactcgtgacttatctcaaagcaaacacccctggaattgacgatgttgtcgtcgctgttcattgtcacaacgaccttggtcttgcaaccgccaactcaatcgccggtatacgtgcgggagcaagacaggtcgaagtaactatcaacggaattggtgaaagaagtggcaatgcgtcgcttgaggaggtcgtgatggctttgaaatgtcgaggggcatatgtgatcaatggggtttacacaaaaatagacacacgccaaatcatggctaccagcaagatggttcaagagtacacgggcttgtatgttcaagcacataagcccatagttggagcgaactgttttgttcatgagagcggcattcatcaggatggaatattgaaaaataggagtacttatgagatcttatcaccagaagatattgggattgtaaaatctcaaaattccggccttgttcttggaaagcttagtggacgtcacgctgtgaaagatcggctgaaagagttgggatatgaactcgatgatgagaaattgaacgctgtcttctcactattcagagatttaaccaagaataaaaagagaatcacggatgctgatttgaaggcattagtaacatctagcgatgaaatctctttggagaaattaaacggcgctaacggtttaaagtctaacggctacataccagttcctcaggtttcgtcgactgtgtaa

SEQ ID NO: 13235 - protein, 506 aa, Arabidopsis thaliana
MASSLLTSSGMIPTTGSTVVGRSVLPFQSSLHSLRLTHSYKNPTLFISCCSSVSKNAATSSTDLKPVVERWPEYIPNKLPDGNYVRVFDTTLRDGEQSPGGSLTPPQKLEIARQLAKLRVDIMEVGFPGSSEEELETIKTIAKTVGNEVDEETGYVPVICAIARCKHRDIEATWEALKYAKRPRILVFTSTSDIHMKYKLKKTQEEVIEMAVSSIRFAKSLGFNDIQFGCEDGGRSDKDFLCKILGEAIKAGVTVVTIGDTVGINMPHEYGELVTYLKANTPGIDDVVVAVHCHNDLGLATANSIAGIRAGARQVEVTINGIGERSGNASLEEVVMALKCRGAYVINGVYTKIDTRQIMATSKMVQEYTGLYVQAHKPIVGANCFVHESGIHQDGILKNRSTYEILSPEDIGIVKSQNSGLVLGKLSGRHAVKDRLKELGYELDDEKLNAVFSLFRDLTKNKKRITDADLKALVTSSDEISLEKLNGANGLKSNGYIPVPQVSSTV

SEQ ID NO: 13236 - DNA, 1464 bp, Brassica oleracea
  CDS (1)..(1464)
atggttgtccggtcattcttaccctttggatctgtccgcctgacccgtccgtacaacaagtcgtccttgctcatctcatgttgctcctctgtgtccaagaaggctgagactagtggtactgacctcaaaaccgttgtggaacggtggccagagtatattccgaacaagctccccgacaagaactacgtgcgtgtatttgatacgacgctccgtgacggcgaacaatctcccggtgcagcccttactccaccgcagaagatagagattgcccggcagctcgctaaactcagagtagacatcatggaagttggttttcccgtgtcatcagaggaagagttcgaaaccatcaaaaccatcgccaaaaccgtgggaaacgaggttgatgaggaaacaggttatatcccagtgatatgcgtcatcgcacgaagcaaagaaagagatataaaggcggcttgggagtcagtgaagtacgcaaagaggccgaggatagtcatattcacttctactagtgacattcacttgaaatataagttgaaaatgactagagaagaagtcgtcgagatggtcgcgagtagcattaggtttgctaaaagtttaggcttcgaagacatcgagtttggttgcgaagatggcggcaggtccgacaaggattatatatgcaaggtttttgaagaagcgatcaaagcgggtgcaaccaccctggcctgcccggacacggtggggatcaacatgccgcacgaatacgggaaacttgtgagatacatcaaagcaaacactcctggaattgatgatgttatcttcagcgctcattgtcacaatgaccttggtgttgctaccgccaacacaatcgccggtatatgtgcgggagcacgacaagtcgaagtaacaatcaatggaataggtgaaagaagtgggaatgcaccgcttgaagaggtcgtgatggctttgaaatgtcgaggagcatttgtgatgggtggtgtttacacaagaatagacacacgccaaattatggctaccagcaagatggttcaagaatatactggcttgtatgttcagccacataaacctatagttggagccaactgttttgttcatgagagcggcattcaccaggatgggatattgaaaaatcggagtacatatgagatcttatcaccagaagatgttggagttgtgaaatctcaaaattcaggcattgttcttggaaagcttagtggacgtcatgcggttaaaggtcgtctgaaagagttgggatatgaaatcagtgatgagaaactgaacgaggttttctcacggttcagagatttaaccaagcagaaaaagagagtcacggatgatgatctaagggcattagtaacgtgtggtgatgaaatcttctcctcagagaaattaaacggcactaacgacaacgaaatcaacagaaacggctatgtaccgtctcctcagatttcctctgtggtatga

SEQ ID NO: 13237 - protein, 487 aa, Brassica oleracea
MVVRSFLPFGSVRLTRPYNKSSLLISCCSSVSKKAETSGTDLKTVVERWPEYIPNKLPDKNYVRVFDTTLRDGEQSPGAALTPPQKIEIARQLAKLRVDIMEVGFPVSSEEEFETIKTIAKTVGNEVDEETGYIPVICVIARSKERDIKAAWESVKYAKRPRIVIFTSTSDIHLKYKLKMTREEVVEMVASSIRFAKSLGFEDIEFGCEDGGRSDKDYICKVFEEAIKAGATTLACPDTVGINMPHEYGKLVRYIKANTPGIDDVIFSAHCHNDLGVATANTIAGICAGARQVEVTINGIGERSGNAPLEEVVMALKCRGAFVMGGVYTRIDTRQIMATSKMVQEYTGLYVQPHKPIVGANCFVHESGIHQDGILKNRSTYEILSPEDVGVVKSQNSGIVLGKLSGRHAVKGRLKELGYEISDEKLNEVFSRFRDLTKQKKRVTDDDLRALVTCGDEIFSSEKLNGTNDNEINRNGYVPSPQISSVV

SEQ ID NO: 13238 - DNA, 1173 bp, Tremblaya princeps
  CDS (1)..(1173): transl_table=11
atggcacgtagcagacgtaggcgcatcgccatcctagacactacgctccgtgatggcgagcaggcgccgtgcatagtaatggggccagatgctaaagcagagatggccaggcgccttgagatagcgggcgtggatgtcgtcgaggctgggttcgcagcaagttcgtcctcagactttgaggcaatccgtcgcatatcttgctgcgtacggggttgcgtggtgtgctcgctagccagagcagtcgggcatgatgtcaggaaggcagccaaggctctcgagttcgctcggcaccctaggatccatgtctttatagggtcatctagtctgcacatagaggaaaagctaaggatgcatccacttgatgtggttgacagggctgcggcgatggtgcggctggcaagggcatattgcgacgacgttgagttctcaccagaggactcaagccgggctgatccttcgttcctatgcagcctggcgaaggcggccgtagaagctggcgccacaatagttaacgtaactgacactgttggccatggcatcccggagcagcttagcgacgttgctggtatgctgtgccgctctgtgcccatatctgacagggtcacgctttctgtgcactgccataacgacgttgggctggctctcgctaacactatggcagcaatagcatgctgcgcgggacaggcggagtgtactgtgaccggcataggagagagggctggaaacgctgcccttgaggaggtcgtggttgcagctgggctagagtactcgggcgctgggatggacgttcgcgtggacgctaggcacatgaggtccattgcacagcttgcgtccgcgattgcacgacggaggttgcctgcaactaagcctgtggttggatgccatgccttcgcacacgcctcaggtatacaccaggacggagtgataaagaaccgcaggacatacgaggcactaagggctgaggacgttggtggaagaggcggtagcatagtgctagggaagctttccggtacccatgcactgagaaataggctcgaaggcggtggggtcaccatcggtgcaatgggtgttcctaggctggctactatgatgaaggggctagccagccatttgcccgtagtatatgactccgcactggctgcgctccatgccattgcatcccgtccttgctag

SEQ ID NO: 13239 - protein, 390 aa, Tremblaya princeps
MARSRRRRIAILDTTLRDGEQAPCIVMGPDAKAEMARRLEIAGVDVVEAGFAASSSSDFEAIRRISCCVRGCVVCSLARAVGHDVRKAAKALEFARHPRIHVFIGSSSLHIEEKLRMHPLDVVDRAAAMVRLARAYCDDVEFSPEDSSRADPSFLCSLAKAAVEAGATIVNVTDTVGHGIPEQLSDVAGMLCRSVPISDRVTLSVHCHNDVGLALANTMAAIACCAGQAECTVTGIGERAGNAALEEVVVAAGLEYSGAGMDVRVDARHMRSIAQLASAIARRRLPATKPVVGCHAFAHASGIHQDGVIKNRRTYEALRAEDVGGRGGSIVLGKLSGTHALRNRLEGGGVTIGAMGVPRLATMMKGLASHLPVVYDSALAALHAIASRPC

SEQ ID NO: 13240 - DNA, 1521 bp, Arabidopsis thaliana
  CDS (1)..(1521)
atggcttcatcgcttctgacatcttccggtatgatccctaccaccggttccaccgtggttggccggtcagtgttaccctttcaatcttccctgcactctctccgcctgacccattcgtacaagaaccccgcattgttcatctcatgttgctcttctgtgtccaaaaatgcggcaactagttctactgatctcaaacccgctgtggaacggtggccggagtacttaccgaacaagcttcccgacgaaaactatgtgcgtgtattcgacacgacgctccgtgacggtgaacaagctcctggtggatccctcactccaccgcagaagctagagattgcccgacagctcgctaaactccgagtagacatcatggaagtcggttttccgggatcatctgaagaagagttagaaaccgttaagaccatcgccaagaccgtgggaaatgaggtggatgaggaaacaggctacgtccctgtgatatgcgccatagctcgaagcaaacatagagacattgaggcggcttgggaggcggtgaagtacgcgaagaggccaaggatactcatattcacatctactagtgacattcacatgaaatataagttgaaaaagactcaagaagaagtgattgagatggccgtgagtagtattaggttcgctaaaagcttaggcttcaatgacatccaacttgggtgcgaagatggcggcaggtcggacaaggattttctatgcaagattcttggagaagccataaaagccgatgttacggtggtgaacgtcgcggatacggtagggatcaacatgccacatgaatacgcggaactcgtgacctatctcaaagcaaacacccctggaattgacgatgttgtcttcagtgttcattgtcacaacgaccttggtcttgcaaccgccaactcaatcgccggtatacgtgcgggagcaagacaggtcgaagtaactatcaacggaattggtgaaagaagtggcaatgcgtcgcttgaggaggtggtgatggctttgaaatgtcgaggggcatatgtgatcaatggtgtttacacaagaatagacacacgtcaaatcatggctaccagcaagatggttcaagagtacacgggcttgtatgttcaagcacataagcccatagttggagcgaactgttttgttcatgagagcggcattcatcaggatggaatattgaaaaataggagtacttatgagatcttatcaccagaagatattgggattgtaaaatctcaaaattccggccttgttcttggaaagcttagtggacgtcacgctgtgaaagatcggctgaaagagttgggatatgaactcgatgatgagaaattgaacgctgtcttctcactattcagagatttaaccaagaataaaaagagaatcacagatgctgatatgaaggcattagtaacatctagcgatggaatttctttagagaaatcaaacggcgctaacggtttaaagtctaacggctatataccagttcttcaggtttcatctaatgtgtaa

SEQ ID NO: 13241 - protein, 506 aa, Arabidopsis thaliana
MASSLLTSSGMIPTTGSTVVGRSVLPFQSSLHSLRLTHSYKNPALFISCCSSVSKNAATSSTDLKPAVERWPEYLPNKLPDENYVRVFDTTLRDGEQAPGGSLTPPQKLEIARQLAKLRVDIMEVGFPGSSEEELETVKTIAKTVGNEVDEETGYVPVICAIARSKHRDIEAAWEAVKYAKRPRILIFTSTSDIHMKYKLKKTQEEVIEMAVSSIRFAKSLGFNDIQLGCEDGGRSDKDFLCKILGEAIKADVTVVNVADTVGINMPHEYAELVTYLKANTPGIDDVVFSVHCHNDLGLATANSIAGIRAGARQVEVTINGIGERSGNASLEEVVMALKCRGAYVINGVYTRIDTRQIMATSKMVQEYTGLYVQAHKPIVGANCFVHESGIHQDGILKNRSTYEILSPEDIGIVKSQNSGLVLGKLSGRHAVKDRLKELGYELDDEKLNAVFSLFRDLTKNKKRITDADMKALVTSSDGISLEKSNGANGLKSNGYIPVLQVSSNV

SEQ ID NO: 13242 - DNA, 1512 bp, Arabidopsis thaliana
  CDS (1)..(1512)
atggcttcgttacttctcacatcttccagtatgataaccactagctgtccctccatggttctccggtcagggttacccatcggatcttcttttccctctcttcgcctgacccgtccatacgacaaggcgactctgttcgtctcatgttgctccgctgagtccaaaaaggtggcaactagtgctactgatctcaaacctatcgtggaacggaggccggagtacattccgaacaagcttccccacaagaactatgtgcgtgtattagacacaacgcttcgtgacggtgaacaatctcccggtgcagcacttactccaccgcagaagttagagattgccaggcagctagctaaactccgagtagacatcatggaagttggttttccggtgtcgtctgaggaagaattcgaagctattaaaaccatcgccaagaccgtggggaacgaggtggatgaggaaaccggttacgttcctgtgatatgcggcattgcacgatgcaaaaagagagacatcgaggcaacttgggaggcactgaagtatgcgaagaggccgagggtaatgctattcacatctactagtgaaattcacatgaaatataagttgaaaaagactaaagaagaagtgatcgagatggccgtgaacagtgttaagtacgctaaaagcttgggcttcaaagacatccaatttgggtgcgaagatggcggcaggacggagaaagattttctatgtaagattctaggagaatcgataaaagcgggtgcaaccacggtggggtttgcggacacggtcgggatcaacatgccgcaagaattcggagaactcgtggcctatgtcatagaaaacactccaggggctgatgatattgtcttcgccattcattgtcataacgaccttggtgttgctaccgccaacacaatatccggtatatgtgcgggagcaagacaagtcgaagtgacgatcaacggaattggtgaaagaagtgggaatgcgccgcttgaagaggtcgtgatggctttgaaatgtcgaggagaatctctgatggatggtgtttacacaaaaatagactcacgccaaattatggctacaagcaagatggttcaagagcataccggcatgtatgttcaaccacataagccaatagttggagacaactgttttgttcatgagagcggcattcaccaggatggaatattgaaaaatcgaagtacatatgagatcttatcaccagaagatgttgggatcgtaaaatctgaaaattctggcattgttcttggaaagcttagtggacgtcatgctgtaaaagaccggcttaaagagttgggatatgaaatcagtgatgagaaattcaacgacatcttctcacgatacagagaattaacgaaggacaaaaagagaatcacagacgctgatctgaaggcattagtggtgaacggtgctgaaatctcatcagaaaaattaaacagtaaaggaattaacgaccttatgtcaagccctcagatttccgctgttgtataa

SEQ ID NO: 13243 - protein, 503 aa, Arabidopsis thaliana
MASLLLTSSSMITTSCPSMVLRSGLPIGSSFPSLRLTRPYDKATLFVSCCSAESKKVATSATDLKPIVERRPEYIPNKLPHKNYVRVLDTTLRDGEQSPGAALTPPQKLEIARQLAKLRVDIMEVGFPVSSEEEFEAIKTIAKTVGNEVDEETGYVPVICGIARCKKRDIEATWEALKYAKRPRVMLFTSTSEIHMKYKLKKTKEEVIEMAVNSVKYAKSLGFKDIQFGCEDGGRTEKDFLCKILGESIKAGATTVGFADTVGINMPQEFGELVAYVIENTPGADDIVFAIHCHNDLGVATANTISGICAGARQVEVTINGIGERSGNAPLEEVVMALKCRGESLMDGVYTKIDSRQIMATSKMVQEHTGMYVQPHKPIVGDNCFVHESGIHQDGILKNRSTYEILSPEDVGIVKSENSGIVLGKLSGRHAVKDRLKELGYEISDEKFNDIFSRYRELTKDKKRITDADLKALVVNGAEISSEKLNSKGINDLMSSPQISAVV

SEQ ID NO: 13244 - DNA, 1512 bp, Arabidopsis thaliana
  CDS (1)..(1512)
atggcttcgttacttctcacatcgtcgagtatgataaccactagctgtcgctccatggttctccggtcagggttacccatcggatcttcttttccctctcttcgcctgacccgtccatacgacaaggcgactctgttcgtctcatgttgctccgctgagtccaaaaaggtggcaactagtgctactgatctcaaacctatcatggaacggaggccggagtacattccgaacaagcttccccacaagaactacgtgcgtgtattagacacgacgcttcgtgacggtgaacaatctcccggtgcagcacttactccaccgcagaagttagagattgccaggcagctagctaaactccgagtagacatcatggaagttggttttccggtgtcgtctgaggaagaattcgaagctattaaaaccatcgccaagaccgtggggaacgaggtggatgaggaaaccggttacgctcctgtgatatgcggcattgcacgatgcaaaaagagagacatcgaggcaacttgggaggcactgaagtatgcgaagaggccgagggtaatgctattcacatctactagtgaaattcacatgaaatataagttgaaaaagactaaagaagaagtgatcgagatggccgtgaacagtgttaagtacgctaaaagcttgggcttcaaagacatccaatttgggtgcgaagatggcggcaggacggagaaagattttttatgtaagattctaggagaatcgataaaagcgggtgcaaccacggtggggtttgcggacacggtcgggatcaacatgccgcaagaattcggagaactcgtggcctatgtcatagaaaacactccaggggctgatgatattgtcttcgccattcattgtcataacgaccttggtgttgctaccgccaacacaatatccggtatatgtgcgggagcaagacaagtcgaagtgacgatcaacggaattggtgaaagaagtgggaatgcgccgcttgaagaggtcgtgatggctttgaaatgtcgaggagaatctctgatggatggtgtttacacaaaaatagactcacgccaaattatggctacaagcaagatggttcaagagcataccggcatgtatgttcaaccacataagccaatagttggagacaactgttttgttcatgagagcggcattcaccaggatggaatattgaaaaatcgaagtacatatgagatcttatcaccagaagatgttgggatcgtaaaatctgaaaattctggcattgttcttggaaagcttagcgacgttcatgctgtaaaagaccggcttaaagagttgggatatgaaatcagtgatgagaaattcaacgacatcttctcacgatacagagaattaacgaaggacaaaaagagaatcacagacgctgatctgaaggcattagtggtgaacggtgctgaaatctcatcagaaaaattaaacagtaaaggaattaacgaccttatgtcaagccctcagatttccgctgttgtataa

SEQ ID NO: 13245 - protein, 503 aa, Arabidopsis thaliana
MASLLLTSSSMITTSCRSMVLRSGLPIGSSFPSLRLTRPYDKATLFVSCCSAESKKVATSATDLKPIMERRPEYIPNKLPHKNYVRVLDTTLRDGEQSPGAALTPPQKLEIARQLAKLRVDIMEVGFPVSSEEEFEAIKTIAKTVGNEVDEETGYAPVICGIARCKKRDIEATWEALKYAKRPRVMLFTSTSEIHMKYKLKKTKEEVIEMAVNSVKYAKSLGFKDIQFGCEDGGRTEKDFLCKILGESIKAGATTVGFADTVGINMPQEFGELVAYVIENTPGADDIVFAIHCHNDLGVATANTISGICAGARQVEVTINGIGERSGNAPLEEVVMALKCRGESLMDGVYTKIDSRQIMATSKMVQEHTGMYVQPHKPIVGDNCFVHESGIHQDGILKNRSTYEILSPEDVGIVKSENSGIVLGKLSDVHAVKDRLKELGYEISDEKFNDIFSRYRELTKDKKRITDADLKALVVNGAEISSEKLNSKGINDLMSSPQISAVV

SEQ ID NO: 13246 - DNA, 1512 bp, Arabidopsis thaliana
  CDS (1)..(1512)
atggcttcgttacttctcacatcgtcgagtatgataaccactagctgtcgctccatggttctccggtcagggttacccatcggatcttcttttccctctcttcgcctgacccgtccatacgacaaggcgactctgttcgtctcatgttgctccgctgagtccaaaaaggtggcaactagtgctactgatctcaaacctatcatggaacggaggccggagtacattccgaacaagcttccccacaagaactatgtgcgtgtattagacacgacgcttcgtgacggtgaacaatctcccggtgcagcacttactccaccgcagaagttagagattgccaggcagctagctaaactccgagtagacatcatggaagttggttttccggtgtcgtctgaggaagaattcgaagctattaaaaccatcgccaagaccgtggggaacgaggtggatgaggaaaccggttacgttcctgtgatatcaggcattgcacgatgcaaaaagagagacatcgaggcaacttgggaggcactgaagtatgcgaagaggccgagggtaatgctattcacatctactagtgaaattcacatgaaatataagttgaaaaagactaaagaagaagtgatcgagatggccgtgaacagtgttaagtacgctaaaagcttgggcttcaaagacatccaatttgggtgcgaagatggcggcaggacggagaaagattttatatgtaagattctaggagaatcgataaaagcgggtgcaaccacggtggggtttgcggacacggtcgggatcaacatgccgcaagaattcggagaactcgtggcctatgtcatagaaaacactccaggggctgatgatattgtcttcgccattcattgtcataacgaccttggtgttgctaccgccaacacaatatccggtatatgtgcgggagcaagacaagtcgaagtgacgatcaacggaattggtgaaagaagtgggaatgcgccgcttgaagaggtcgtgatggctttgaaatgtcgaggagaatctctgatggatggtgtttacacaaaaatagactcacgccaaattatggctacaagcaagatggttcaagagcataccggcatgtatgttcaaccacataagccaatagttggagacaactgttttgttcatgagagcggcattcaccaggatggaatattgaaaaatcgaagtacatatgagatcttatcaccagaagatgttgggatcgtaaaatctgaaaattctggcattgttcttggaaagcttagcggacgtcatgctgtaaaagaccggcttaaagagttgggatatgaaatcagtgatgagaaattcaacgacatcttctcacgatacagagaattaacgaaggacaaaaagagaatcacagacgctgatctgaaggcattagtggtgaacggtgctgaaatctcatcagaaaaattaaacagtaaaggaattaacgaccttatgtcaagccctcagatttccgctgttgtataa

SEQ ID NO: 13247 - protein, 503 aa, Arabidopsis thaliana
MASLLLTSSSMITTSCRSMVLRSGLPIGSSFPSLRLTRPYDKATLFVSCCSAESKKVATSATDLKPIMERRPEYIPNKLPHKNYVRVLDTTLRDGEQSPGAALTPPQKLEIARQLAKLRVDIMEVGFPVSSEEEFEAIKTIAKTVGNEVDEETGYVPVISGIARCKKRDIEATWEALKYAKRPRVMLFTSTSEIHMKYKLKKTKEEVIEMAVNSVKYAKSLGFKDIQFGCEDGGRTEKDFICKILGESIKAGATTVGFADTVGINMPQEFGELVAYVIENTPGADDIVFAIHCHNDLGVATANTISGICAGARQVEVTINGIGERSGNAPLEEVVMALKCRGESLMDGVYTKIDSRQIMATSKMVQEHTGMYVQPHKPIVGDNCFVHESGIHQDGILKNRSTYEILSPEDVGIVKSENSGIVLGKLSGRHAVKDRLKELGYEISDEKFNDIFSRYRELTKDKKRITDADLKALVVNGAEISSEKLNSKGINDLMSSPQISAVV

SEQ ID NO: 13248 - DNA, 1137 bp, Acetobacter diazotrophicus
  CDS (1)..(1137): transl_table=11
atgtcggaaaacgcgcgtctgctgatcagcgacaccaccctgcgcgatggagagcaggcgccgggggtggcctttaccgcgtgggaaaagctggccatcgccggcgccctcgacgcggccggcgtggatgagatcgaggccggcgttccggccatgggggatgccgagatcgccatgatcgcggcgatcggcgacgaggtggaacgcgcccgcgtcatcccctggtgtcgcatgcgcgacgaagacgtgcacgcggcgcggcggacggggctgggcagcgtgcacctgtccgtttcgacctcgtccggcagatccaggcgaaataccgcatgtcgcgcgtcgcacgctggacatggcgcgcgagtcgtctcccgcgccagggattacggcctggcggtgtcggtggggggcgaggacgccagccgggccgatccggcctatctggtcgatctgctgggcgtgatcgccgaggcaggggcgttccgcttccgcttcgccgatacgctgggcgtgatggacccgttcggcgtgcacgaggtcatgcggtatctctgccagtccagcccgcttcagcttgaatttcacggccatgacgatctgggcctggcaacggccaatacgctggccgccgtgcgggccggcgcggcgtgcgccagtgtcaccgtcctgggactgggcgaacgcgcgggcaacgccccgctggaggaagtggtggcgggggtatatcgcctgctgggccgtccggcgggcgtgaagctggacagcctgcccgggcttgccaccctggtctcgcgcgccgccgtgcgtgatatcccgcccgacaaggcgatcgtcggcgacgcggtctttcgtcatgaatcgggcatccatgtctcgggcctgctgcgtgacgccgcgacgtatgaggcactggaccccgtgcagttcggccgccagcgcgaaatcgtgctgggcaagcattccggccgggccgcggtacggcacgcgctggcggcgctgggcctggatgccgacgaaaccgtcatcgcggccacgcttgccgccgtgcgcgcgcgtgcctccgccgccaagcgcacggtggcgctggccgaactggccgaaatgcatgcgggcctgatggcaggcgtgtcgaaataa

SEQ ID NO: 13249 - protein, 378 aa, Acetobacter diazotrophicus
MSENARLLISDTTLRDGEQAPGVAFTAWEKLAIAGALDAAGVDEIEAGVPAMGDAEIAMIAAIGDEVERARVIPWCRMRDEDVHAARRTGLGSVHLSVSTSSGRSRRNTACRASHAGHGARVVSRARDYGLAVSVGGEDASRADPAYLVDLLGVIAEAGAFRFRFADTLGVMDPFGVHEVMRYLCQSSPLQLEFHGHDDLGLATANTLAAVRAGAACASVTVLGLGERAGNAPLEEVVAGVYRLLGRPAGVKLDSLPGLATLVSRAAVRDIPPDKAIVGDAVFRHESGIHVSGLLRDAATYEALDPVQFGRQREIVLGKHSGRAAVRHALAALGLDADETVIAATLAAVRARASAAKRTVALAELAEMHAGLMAGVSK

SEQ ID NO: 13250 - DNA, 1146 bp, Anabaena variabilis
  CDS (1)..(1146): transl_table=11
atgaataaagttctcattaatgacactacattacgtgatggcgaacaagccgcaggtgttgtttttaccttagaagagaaagtggcgatcgctaaatttctcgataccatcggcgtacccgaattagaagtggggattccggcgatgggtgaggaagaaatgcgggcgatctgcgccatttctaacttaggtttaaaagctaacctcctggcgtggaaccgcgccgtaatttcagatatcaaagcttctgttgcttgcgggatggagcgagtgcatattgcgatccctgtttccgggattcaaatcgccgcaaaattccacggacaatggcgggtaagtctgcaaagactcaaagattgtatcagcttcgcagttgatcaaggtctttgggtagcagtcgggggggaagattcctctagagctgatgaaaacttcctcttggatgtagcactatacgctcaagaatggggtgcatctcgattccgcttctgtgacacagtaggagtcctcgatcctttcaccacctacggaaaagttaagctactcgtctcagctttaacaattcctgtagaagtccatactcacaatgattttggtatggcgacagctaacgccctagcaggaattaaagctggagccgcatctgtcaatactaccgtgattggcttgggtgaaagagcaggtaacgccgccttagaagaagtcgttatggctatcaaacgcatctatggcgtagatatggggattgacacaccccgtttgttggaattgtcccaactggtagcagccgcctctggtgctaacgtaccaccttggaaggcgatcgttggtgaaaatacctttgctcacgaatcaggtattcatgcacatggtgtactgcaaaatcctgatacctatgaaccattcgcacctgaagaagtcggttgggaacgccgcttagttgtaggtaagcattctggcagacattcagtctccaacttgctagaacagcacgggatatttttgaacccagaagaaacccagtctgttttagatgcagtgcgccaacagtcagttaagaaaaaacgcagtttgactacagaagaactgttgaaccttggtcaaagaacagaggtattctcatgcagcgcgatgaaaacgagttag

SEQ ID NO: 13251 - protein, 381 aa, Anabaena variabilis
MNKVLINDTTLRDGEQAAGVVFTLEEKVAIAKFLDTIGVPELEVGIPAMGEEEMRAICAISNLGLKANLLAWNRAVISDIKASVACGMERVHIAIPVSGIQIAAKFHGQWRVSLQRLKDCISFAVDQGLWVAVGGEDSSRADENFLLDVALYAQEWGASRFRFCDTVGVLDPFTTYGKVKLLVSALTIPVEVHTHNDFGMATANALAGIKAGAASVNTTVIGLGERAGNAALEEVVMAIKRIYGVDMGIDTPRLLELSQLVAAASGANVPPWKAIVGENTFAHESGIHAHGVLQNPDTYEPFAPEEVGWERRLVVGKHSGRHSVSNLLEQHGIFLNPEETQSVLDAVRQQSVKKKRSLTTEELLNLGQRTEVFSCSAMKTS

SEQ ID NO: 13252 - DNA, 1140 bp, Anabaena variabilis
  CDS (1)..(1140): transl_table=11
atgaataaagttctaattaatgacactacactacgcgatggagagcaagcggcgggtgttgcttttagcgtagaggaaaaaatcgcgatcgccaaatttctggatgcgatcggtgtggatgaaatcgaagtgggaatacccgcaatgggtaaagcagaacaagaggcgatcgctaatattgtgaagttgaatttgtccgccaatctacttggttggaaccgcgccgtgatttctgatattcaggcttccatcgcttgtggtttacagcgagtacatatctctattcccgtttctgcaatccaaatcgccgccaaatttcacggacaatggcaagtagttttacaaaaactccacgacagtattagctttgctgttgaccaaggtttatttgtatccatcggtggtgaagactcatcaagagccgaagaaagcttcctccttgatgtagtactggctgctcaagaatggggtgccttacggtttcgcttttgtgacacagtaggtattcttgacccatttactacccacgccaaaataaaacaattggtggcatctttgacaatacctgtagaaatgcacacccacaatgattttggtttggcaacagctaacgctctcgcaggtatcaaagcaggcgctttatcggtaaatactactgtgaatggattgggtgaacgagctgggaatgctgctttagaagaggtggttatggctctcaagcacttgtatcaccatgatttaggaattgatacgcggcgtttactggaaatatctcaactcgtagtatcagcatcaggtcatcctgtaccaccttggaaagcaattgttggtgaaaatacttttgctcacgaatccgggattcatgctcatggtgtactgcaaaatccccagacctacgaaccatttgcaccagaagaagtagggagagagcgccgtttagttgtgggtaaacattctggtagacctttaggcatgtccagtattttgcagcaacacgacattattctcaatcacgaagaaacccaatctgtcttagatgcagttagacaagaatcagtgagaaaaaaaacgcagtctcacacctcaagaacttttacatttagtgcagacaaaaactacattttcgtgcctgttgaatga

SEQ ID NO: 13253 - protein, 379 aa, Anabaena variabilis
MNKVLINDTTLRDGEQAAGVAFSVEEKIAIAKFLDAIGVDEIEVGIPAMGKAEQEAIANIVKLNLSANLLGWNRAVISDIQASIACGLQRVHISIPVSAIQIAAKFHGQWQVVLQKLHDSISFAVDQGLFVSIGGEDSSRAEESFLLDVVLAAQEWGALRFRFCDTVGILDPFTTHAKIKQLVASLTIPVEMHTHNDFGLATANALAGIKAGALSVNTTVNGLGERAGNAALEEVVMALKHLYHHDLGIDTRRLLEISQLVVSASGHPVPPWKAIVGENTFAHESGIHAHGVLQNPQTYEPFAPEEVGRERRLVVGKHSGRPLGMSSILQQHDIILNHEETQSVLDAVRQESVRKKTQSHTSRTFTFSADKNYIFVPVE

SEQ ID NO: 13254 - DNA, 1476 bp, Methanococcus jannaschii
  CDS (1)..(1476): transl_table=11
atgatggtaaggatatttgatacaacacttagagatggagagcaaacaccaggagtttctttaacaccaaatgataagttagagatagcaaaaaaattggatgagcttggagttgatgttatagaggcaggttcagctataacttcaaaaggagagagagaaggaataaaattaataacaaaagaaggtttaaatgcagaaatctgctcatttgttagagctttacctgtagatattgatgctgccttagaatgtgatgtagatagtgtccatttagtagtgccaacatctccaatacacatgaaatataagcttagaaaaacagaagatgaggttttagagacagctttaaaggctgtagagtatgctaaagaacatggattgattgttgagttatctgcagaggatgcaacaagaagtgatgtaaatttcttaataaaactatttaatgaaggggaaaaggttggagcagacagagtttgtgtttgtgacacagtaggagttttaactccacaaaagagtcaggaattatttaaaaaaataactgaaaatgttaatttaccggtctcagttcattgccacaacgactttggaatggctactgctaatacttgctcagcagttttaggtggagctgttcagtgccacgtaacagttaatggtattggagagagagcaggaaatgcctcattggaagaggttgttgctgctttaaaaatactctatggctatgatactaagataaagatggaaaagttatatgaggtttcaagaattgtctcaagattgatgaaacttcctgttccaccaaataaagcaattgttggggacaatgcatttgctcatgaagcaggaatacatgttgatggattaataaaaaatactgaaacctatgagccaataaaaccagaaatggttgggaatagaagaagaattattttgggtaagcattctggtagaaaagctttaaaatacaaacttgatttgatgggcataaacgttagtgatgagcaattaaataaaatatatgaaagagttaaagaatttggggatttgggtaaatacatttcagacgctgatttgttggctatagttagagaagttactggaaaattggtagaagagaaaatcaaattagatgaattaactgttgtatctggaaataaaataacaccaattgcatctgttaaactccattataaaggagaagatataactttaatagaaactgcttatggtgttggaccggtagatgcagcaataaatgctgtgagaaaggcaataagtggagttgcagatattaagttggtagagtatagagttgaagcaattggtggaggaactgatgcgttaatagaggttgttgttaaattaagaaaaggaactgaaattgttgaagttagaaaatcagacgctgatataataagggcttctgtagatgctgtaatggaaggaatcaatatgttattgaattaa

SEQ ID NO: 13255 - protein, 491 aa, Methanococcus jannaschii
MMVRIFDTTLRDGEQTPGVSLTPNDKLEIAKKLDELGVDVIEAGSAITSKGEREGIKLITKEGLNAEICSFVRALPVDIDAALECDVDSVHLVVPTSPIHMKYKLRKTEDEVLETALKAVEYAKEHGLIVELSAEDATRSDVNFLIKLFNEGEKVGADRVCVCDTVGVLTPQKSQELFKKITENVNLPVSVHCHNDFGMATANTCSAVLGGAVQCHVTVNGIGERAGNASLEEVVAALKILYGYDTKIKMEKLYEVSRIVSRLMKLPVPPNKAIVGDNAFAHEAGIHVDGLIKNTETYEPIKPEMVGNRRRIILGKHSGRKALKYKLDLMGINVSDEQLNKIYERVKEFGDLGKYISDADLLAIVREVTGKLVEEKIKLDELTVVSGNKITPIASVKLHYKGEDITLIETAYGVGPVDAAINAVRKAISGVADIKLVEYRVEAIGGGTDALIEVVVKLRKGTEIVEVRKSDADIIRASVDAVMEGINMLLN

SEQ ID NO: 13256 - DNA, 1500 bp, Methanopyrus kandleri
  CDS (1)..(1500): transl_table=11
ttgcccgatcgggtacggatcttcgacacgacgctaagagacggtgagcagacaccgggcgtcagcctcacggtggaggaaaaggtcgagatcgcgaggaagttggacgagttcggcgtggataccatcgaagcgggcttccccgtagccagtgagggtgagttcgaggcagtgagggcgatagcaggcgaggaactggacgcggagatatgcgggttggccaggtgcgtgaagggggacatagacgcggcgatcgacgccgacgtggactgcgtgcacgtgttcatagccacgtcggacatccacctcagatacaagttggagatgtcccgggaagaggcattggagcgtgccatagagggcgtggagtatgccagtgaccacggagtcaccgtggagttctccgcggaggacgccacacggacggaccgggactacctactcgaggtctataaagctaccgtggaagccggcgcggatcgtgtcaacgtcccggatactgtgggagttatgacccctcccgagatgtatcgactgacggcggaagttgtcgacgccgtagacgtgccggtcagcgtgcactgccacaacgacttcggcatggccgtggccaactcattggccgccgtcgaagccggggctgaacaggttcatgtgaccgtgaacgggatcggcgagcgtgccggtaacgcctcgctggaacaggtcgtaatggccctcaaagcgctgtacgatatcgagttggacgtgaggaccgagatgctcgtcgagctctcacggctcgtggagcgactgacgggcgtcgtagtaccgccgaacaccccgatagtcggcgagaacgccttcgcccacgagtcggggattcactcccacggcgtgatcaagaaggcggagacgtacgaacctatacggcccgaggacgtcggtcatagacggcgtatagtactaggtaagcacgccggtcggcacgcgatcaagaagaagctcgaggagatggggatcgaggtcacggaggaacaactcgacgagatcgttcggcgcgtcaaggagctcggggataagggcaagcgcgtcaccgaagacgatcttgaagccatagcccgagacgtcgtcggcgaggtacccgagtccgaagctgcggtcaagctggaagagatcgccgtgatgaccgggaacaaattcacgccgacggcgtcggtccgtgtgtacctggacggtgaagagcacgaagcggcatcgaccggtgtgggctccgttgacgcggcgatacgggcactgcgcgaagcgatcgaggagctcggtatggacgtggagctgaaggagtaccgcctagaggccatcaccgggggcaccgacgccctcgccgaggtcacggtgaggttggaggacgaggacgggaacgtcaccacggcccgcggtgccgccgaggatatcgtgatggccagcgtgaaggcgttcgttcggggcgtgaatcggctggcacgtcgacgtagggactaa

SEQ ID NO: 13257 - protein, 499 aa, Methanopyrus kandleri
MPDRVRIFDTTLRDGEQTPGVSLTVEEKVEIARKLDEFGVDTIEAGFPVASEGEFEAVRAIAGEELDAEICGLARCVKGDIDAAIDADVDCVHVFIATSDIHLRYKLEMSREEALERAIEGVEYASDHGVTVEFSAEDATRTDRDYLLEVYKATVEAGADRVNVPDTVGVMTPPEMYRLTAEVVDAVDVPVSVHCHNDFGMAVANSLAAVEAGAEQVHVTVNGIGERAGNASLEQVVMALKALYDIELDVRTEMLVELSRLVERLTGVVVPPNTPIVGENAFAHESGIHSHGVIKKAETYEPIRPEDVGHRRRIVLGKHAGRHAIKKKLEEMGIEVTEEQLDEIVRRVKELGDKGKRVTEDDLEAIARDVVGEVPESEAAVKLEEIAVMTGNKFTPTASVRVYLDGEEHEAASTGVGSVDAAIRALREAIEELGMDVELKEYRLEAITGGTDALAEVTVRLEDEDGNVTTARGAAEDIVMASVKAFVRGVNRLARRRRD

SEQ ID NO: 13258 - DNA, 1287 bp, Saccharomyces cerevisiae
  CDS (1)..(1287)
atgactgctgctaaaccaaatccatatgctgccaaaccgggcgactatctttctaatgtaaataatttccagttaatcgattcgacgctgagagaaggtgaacaatttgccaacgcattcttcgatactgaaaaaaagatcgaaattgctagagccttggacgatttcggtgtggactacatcgagttaacctcaccagtagcatctgaacaatcaagaaaggactgtgaagctatatgtaaactaggtttaaaggccaagatccttacacacattcgttgtcatatggatgacgccaaagtcgccgtagagactggtgtcgacggtgtcgatgtcgttatcggcacctccaaatttttaagacaatattcccacggtaaggatatgaactacatcgccaagagtgctgttgaagtcattgaatttgtcaaatccaaaggtattgaaatcagattttcctctgaagattccttcagaagtgatctcgttgatcttttgaacatttataaaaccgttgacaagatcggtgtaaatagagtcggtattgccgacacagttggatgtgccaacccaagacaagtatatgaactgatcagaactttgaagagtgttgtttcatgtgacatcgaatgccatttccacaacgatactggttgtgccattgcaaacgcctacactgctttggaaggtggtgccagattgattgacgtcagtgtactgggtattggtgaaagaaacggtatcactcctctaggtgggctcatggcaagaatgattgttgccgcaccagactatgtcaagtccaaatacaagttgcacaagatcagagacattgaaaacctggtcgctgatgctgtggaagttaacattccattcaacaaccctatcaccgggttctgtgcattcacacataaagcaggtatccatgccaaggccattttggctaacccatctacctacgaaatcttggaccctcacgatttcggtatgaagaggtatatccacttcgccaacagactaactggctggaacgccatcaaagccagagtcgaccagttgaacttgaacttgacggatgaccaaatcaaggaagttactgctaagattaagaagctgggtgatgtcagatcgctgaatatcgatgatgttgactctatcatcaagaacttccacgcagaggtcagcactcctcaagtactatctgcaaaaaagaacaagaagaatgacagcgatgtaccggaactggccaccatccccgccgccaagcggactaagccatccgcctaa

SEQ ID NO: 13259 - protein, 428 aa, Saccharomyces cerevisiae
MTAAKPNPYAAKPGDYLSNVNNFQLIDSTLREGEQFANAFFDTEKKIEIARALDDFGVDYIELTSPVASEQSRKDCEAICKLGLKAKILTHIRCHMDDAKVAVETGVDGVDVVIGTSKFLRQYSHGKDMNYIAKSAVEVIEFVKSKGIEIRFSSEDSFRSDLVDLLNIYKTVDKIGVNRVGIADTVGCANPRQVYELIRTLKSVVSCDIECHFHNDTGCAIANAYTALEGGARLIDVSVLGIGERNGITPLGGLMARMIVAAPDYVKSKYKLHKIRDIENLVADAVEVNIPFNNPITGFCAFTHKAGIHAKAILANPSTYEILDPHDFGMKRYIHFANRLTGWNAIKARVDQLNLNLTDDQIKEVTAKIKKLGDVRSLNIDDVDSIIKNFHAEVSTPQVLSAKKNKKNDSDVPELATIPAAKRTKPSA

SEQ ID NO: 13260 - DNA, 1425 bp, Penicillium chrysogenum
  CDS (1)..(1425)
atggtgctcctgccaccgtcgctgccagtatgtcaattgaaagtcactgcgccagaatttccctctaacttttatttagacggcgaccactctggtttcgttggcattgaaactcgccagaacccccacccctccgcatcccgcaacccctacggccacgacgctggcgtcaccgatttccttagcaatgtctcacgcttccagattattgagtctactttgcgtgagggagagcagttcgccaacgctttcttcgataccgccaagaagatcgagattgccaaggctctcgatgacttcggtgtggactacatcgagctcactagtccctgtgcttctgagcagtcacgtgcggattgcgaggccatttgcaagctcggcctgaaggctaagattctcactcacattcgctgccatatggatgatgcccgtattgctgtcgagaccggtgttgatggagtcgatgttgttatcggtacttcttcttacctccgtgagcactctcacggcaaggacatgacctacatcaagaacgccgccattgaagttattgagttcgtcaagtctaagggcattgagatccgtttctccagcgaggactctttccgttccgacctggttgaccttctgtccatctactccgctgtggacaaggttggtgtgaaccgtgtcggtattgccgacaccgttggctgtgcttccccccgtcaggtctacgagctcgtccgtgtcctgcgcggtgttgttggctgtgacatcgagactcacttccacaacgacactggctgtgccattgccaacgccttctgtgccctcgaggccggtgccactcacatcgatacctccgttctcggtatcggtgagcgtaacggtatcacccctctcggtggtctgatggcccgcatgatggtcgccgaccgcgagtacgtcaagagcaagtacaagctcgagaagctcaaggagattgaggacctcgtcgccgaggccgttgaggtcaacattcctttcaacaactacatcaccggattctgcgccttcacccacaaggctggtatccacgccaaggctatcctcaacaaccccagcacttacgagattatcaaccccgccgacttcggcatgtcccgttacgtccacttcgcctcccgtttgaccggctggaacgccatcaagtcgcgtgctcagcagctcaagcttgagatgactgacactcaatacaaggagtgcactgccaagatcaaggccatggctgatattcgtcccattgccgtcgatgatgctgacagcattatccgtgcctaccaccgtaacctgaagtccggcgagaacaagcccctccttgacctgactgctgaggagcaggccgcatttgccgccaaggagaaggaactccttgaggcccaggctgccggtcttcccgtatag

SEQ ID NO: 13261 - protein, 474 aa, Penicillium chrysogenum
MVLLPPSLPVCQLKVTAPEFPSNFYLDGDHSGFVGIETRQNPHPSASRNPYGHDAGVTDFLSNVSRFQIIESTLREGEQFANAFFDTAKKIEIAKALDDFGVDYIELTSPCASEQSRADCEAICKLGLKAKILTHIRCHMDDARIAVETGVDGVDVVIGTSSYLREHSHGKDMTYIKNAAIEVIEFVKSKGIEIRFSSEDSFRSDLVDLLSIYSAVDKVGVNRVGIADTVGCASPRQVYELVRVLRGVVGCDIETHFHNDTGCAIANAFCALEAGATHIDTSVLGIGERNGITPLGGLMARMMVADREYVKSKYKLEKLKEIEDLVAEAVEVNIPFNNYITGFCAFTHKAGIHAKAILNNPSTYEIINPADFGMSRYVHFASRLTGWNAIKSRAQQLKLEMTDTQYKECTAKIKAMADIRPIAVDDADSIIRAYHRNLKSGENKPLLDLTAEEQAAFAAKEKELLEAQAAGLPV

SEQ ID NO: 13262 - DNA, 1257 bp, Schizosaccharomyces pombe
  CDS (1)..(1257)
atgtctgtgtccgaagctaatggtactgagaccatcaagcctcctatgaatggaaacccttatggtcccaacccatctgattttctttcacgtgtcaataacttttccattattgagtctactcttcgtgaaggtgagcaattcgcaaacgcttttttcgacaccgagaagaaaattcaaattgctaaggcattggacaactttggtgtcgattacattgaattgacttctcccgtggcttctgagcagtcccgccaagattgcgaagctatttgcaaattgggcttaaagtgtaaaattttaactcatattcgctgtcatatggatgacgctcgtgtcgctgttgagactggagttgatggtgttgatgttgttatcggaacttctcaatatcttcgcaaatattcccatggaaaggacatgacttacattattgacagcgctaccgaagttatcaactttgtcaagagcaagggtattgaagtccgcttttcatctgaggattctttccgttctgatcttgtcgatctcctttctctctacaaggctgtagacaagattggcgtcaaccgtgttggtattgctgacaccgttggttgcgctactcctcgccaagtctacgatcttattcgtaccttacgtggtgttgtctcttgtgatattgaatgtcattttcacaatgacactggtatggctattgctaatgcctattgcgcattggaagctggtgctacccatatcgatacttccattcttggtattggtgagcgtaatggtattactcctcttggtgccttgttggctcgtatgtatgtcaccgatagggaatacattacccacaaatacaagcttaaccagttacgtgagcttgaaaaccttgtcgctgatgccgttgaagttcaaattcctttcaacaattacattaccggaatgtgtgcttttacccataaggctggtatccatgctaaagctattctcgctaacccttctacatatgaaattcttaagcccgaggactttggcatgagtcgttatgttcatgttggctctcgtttgactggttggaatgccatcaaatctcgtgctgagcagcttaaccttcatcttactgatgcccaagccaaggaacttaccgttcgcatcaagaaattggctgatgtccgtactttagccatggatgatgttgatcgtgttctacgtgaataccatgctgacttgagtgatgctgatagaatcaccaaagaagcgtctgcttaa

SEQ ID NO: 13263 - protein, 418 aa, Schizosaccharomyces pombe
MSVSEANGTETIKPPMNGNPYGPNPSDFLSRVNNFSIIESTLREGEQFANAFFDTEKKIQIAKALDNFGVDYIELTSPVASEQSRQDCEAICKLGLKCKILTHIRCHMDDARVAVETGVDGVDVVIGTSQYLRKYSHGKDMTYIIDSATEVINFVKSKGIEVRFSSEDSFRSDLVDLLSLYKAVDKIGVNRVGIADTVGCATPRQVYDLIRTLRGVVSCDIECHFHNDTGMAIANAYCALEAGATHIDTSILGIGERNGITPLGALLARMYVTDREYITHKYKLNQLRELENLVADAVEVQIPFNNYITGMCAFTHKAGIHAKAILANPSTYEILKPEDFGMSRYVHVGSRLTGWNAIKSRAEQLNLHLTDAQAKELTVRIKKLADVRTLAMDDVDRVLREYHADLSDADRITKEASA

SEQ ID NO: 13264 - DNA, 1341 bp, Yarrowia lipolytica
  CDS (1)..(1341)
atgtgcgcaacagataacgcccccgccgctaacgctgctcctgagaagccctccaacgttggagtcgaggtcggtcacaccggcgagcagactaatccttacggagccaaccccgccgatttcctttctaacgtgtccaagttccagctcatcgagtccactctgcgagagggagagcagtttgcctctgccttctttgacaccgagaccaagatcgagattgccaaggctctggacgactttggtgtcgactacatcgagctgacctcccccgcagcatcggagcagtcgcggtccgattgcgaggccatctgcaagctcggtcttaaggccaagattctcactcacatccgatgccacatggacgacgcaagactcgctgtctccaccggtgtcgatggtgtcgatgtcgtcattggtacctcccagttcctgcgacagtactcccacggcaaggacatgaactacattgcacagtccgctgtcgaggtcattgagtttgtcaagagccacggcattgagatccgattctcctccgaggattctttccgatccgacctggtcgatctcctcaacatctaccgaactgtcgacaagattggtgtcaaccgagtcggtattgctgacactgttggatgcgccaacccccgacaggtctacgagcttgtccgaaccctcaagtccgttgtctcgtgcgacattgagtgccatttccacaacgacaccggctgtgccattgccaacgcctacaccgccctcgaggctggtgccaacctcatcgatgtctccgttctcggtatcggtgagcgaaacggtatcacctctctcggtggtctgatggctcgaatgattgctgctgaccgagactacgttctctccaagtacaagctgcacaagctgcgagacctcgagaacctcgtcgccgacgccgtccaggtcaacatccccttcaacaaccccatcaccggtttctgcgccttcacccacaaggccggtatccacgccaaggccattctcgccaacccctccacttacgagattctcaaccccgccgatttcggtctgacccgatacatccactttgccaaccgtcttaccggctggaacgccatcaagtcgcgagttgaccagctcaacctgcacctgaccgacgcccagtgcaaggatgtcactgccaagatcaagaagcttggtgacgttcgatctctcaacattgacgatgttgactccatcatccgagagttccacgccgatgtcaccagcactcccaccgttgctgccaccgagggacctgccgttgaggacgagcccgccgccaagaaggccaagactgaagagtaa

SEQ ID NO: 13265 - protein, 446 aa, Yarrowia lipolytica
MCATDNAPAANAAPEKPSNVGVEVGHTGEQTNPYGANPADFLSNVSKFQLIESTLREGEQFASAFFDTETKIEIAKALDDFGVDYIELTSPAASEQSRSDCEAICKLGLKAKILTHIRCHMDDARLAVSTGVDGVDVVIGTSQFLRQYSHGKDMNYIAQSAVEVIEFVKSHGIEIRFSSEDSFRSDLVDLLNIYRTVDKIGVNRVGIADTVGCANPRQVYELVRTLKSVVSCDIECHFHNDTGCAIANAYTALEAGANLIDVSVLGIGERNGITSLGGLMARMIAADRDYVLSKYKLHKLRDLENLVADAVQVNIPFNNPITGFCAFTHKAGIHAKAILANPSTYEILNPADFGLTRYIHFANRLTGWNAIKSRVDQLNLHLTDAQCKDVTAKIKKLGDVRSLNIDDVDSIIREFHADVTSTPTVAATEGPAVEDEPAAKKAKTEE

SEQ ID NO: 13266 - DNA, 1323 bp, Saccharomyces cerevisiae
  CDS (1)..(1323)
atgtctgaaaataacgaattccagagtgtcaccgaatcgacgactgctccaaccactagtaacccatatggcccaaatcctgcggattatctatccaatgttaagaatttccagttgattgattcaacactaagagagggtgaacaatttgccaacgcattcttcgatactgaaaaaaagattgaaattgctagagccttggatgatttcggtgtggactacatcgagttaacctctcccgtagcatccgaacaatcaagaaaggactgtgaagctatatgtaaactaggtttaaaggccaagatccttacacacattcgttgtcacatggacgatgccagagtcgccgtagagactggtgtcgacggtgtcgatgttgttatcggcacctccaaatttttaagacaatattcccacggtaaggatatgaactacatcgccaagagtgctgttgaagtcattgaatttgtcaaatccaaaggtattgaaatcagattttcctctgaagattccttcagaagtgatctcgttgatcttttgaacatttataaaaccgttgacaagatcggtgtaaatagagtcggtattgccgacacagttggatgtgccaacccaagacaagtatatgaactgatcagaactttgaagagtgttgtctcatgtgacatcgaatgccatttccacaatgataccggttgtgccattgcaaacgcctacactgctttggaaggtggtgccagattgattgacgtcagtgtactgggtattggtgaaagaaacggtatcactcctctaggtgggctcatggcaagaatgattgttgccgcaccagactatgtcagatctaaatacaagctgcacaagatcagagacatcgaaaacctggtcgctgatgctgtggaagttaacattccattcaacaaccctatcaccgggttctgtgcattcacacataaagcaggtatccatgccaaggccattttggctaacccatctacctacgaaatcttggaccctcacgatttcggtatgaagagatatatccacttcgccaacagactaactggttggaatgcaatcaaatcaagagtcgaccaattgaacttgaatttgacggatgatcaaatcaaggaagttactgctaagattaagaagctgggtgatgtcagaccgctaaatattgatgatgtagactccattatcaaggacttccatgcagaattgagcaccccacttttaaaaccagtaaataagggtacagatgacgacaatatcgatatttccaatgggcatgtttctaaaaaggcaaaggtcaccaaatag

SEQ ID NO: 13267 - protein, 440 aa, Saccharomyces cerevisiae
MSENNEFQSVTESTTAPTTSNPYGPNPADYLSNVKNFQLIDSTLREGEQFANAFFDTEKKIEIARALDDFGVDYIELTSPVASEQSRKDCEAICKLGLKAKILTHIRCHMDDARVAVETGVDGVDVVIGTSKFLRQYSHGKDMNYIAKSAVEVIEFVKSKGIEIRFSSEDSFRSDLVDLLNIYKTVDKIGVNRVGIADTVGCANPRQVYELIRTLKSVVSCDIECHFHNDTGCAIANAYTALEGGARLIDVSVLGIGERNGITPLGGLMARMIVAAPDYVRSKYKLHKIRDIENLVADAVEVNIPFNNPITGFCAFTHKAGIHAKAILANPSTYEILDPHDFGMKRYIHFANRLTGWNAIKSRVDQLNLNLTDDQIKEVTAKIKKLGDVRPLNIDDVDSIIKDFHAELSTPLLKPVNKGTDDDNIDISNGHVSKKAKVTK

SEQ ID NO: 13268 - DNA, 1221 bp, Methanococcus jannaschii
  CDS (25)..(1221): transl_table=11
atgacaaaagtgctggtgatgtttatggatttcttatttgagaacagctggaaagcagtttgtccctacaatccaaagttggatttaaaggacatttatatttatgacacaaccctaagagatggagagcaaaccccaggagtttgctttaccaaagaacaaaaattggagattgcaaggaagttggatgaacttggattaaagcagattgaagctggcttcccaatagtatctgaaagagaagcagatatagttaaaacaattgctaatgaagggctaaatgctgatatcttagctttatgcagggctttaaagaaagatatagataaagcaatagagtgcgatgtagatgggattattaccttcatagcaacatctcctctccacttaaaatataaattcaacaacaaaagcttagatgaaatattagagatgggagttgaggcagttgagtatgcaaaggaacatggcttatttgttgctttctctgcagaggatgcgacaagaacaccaatagaggacttgattaaagtgcataaagccgctgaagaggctggagcagatagggttcatatagcagacacaactggctgtgctaccccccaaagtatggagtttatatgtaaaacattgaaggagaacttaaaaaaggcacatattggagtgcattgtcacaacgactttggatttgcagttataaattcaatatatggtttaattggaggagctaaggcagtttcaacaacagttaatggtattggagagagggcagggaatgcagctttagaagagctaattatggctttaactgtcttgtatgatgttgatttgggattaaacttggaggttcttccagagttatgcagaatggttgaggaatactctggaataaagatgccaaagaacaaaccaatagttggagagcttgtatttgctcatgaaagtggaattcacgttgatgctgtcatagagaatccattaacctatgaacccttccttccagagaaaatagggcttaagagaaatattttgttagggaagcattctggatgcagagccgttgcctataagctaaaacttatgggaattgattacgatagagagatgttgtgcgagattgttaaaaaggttaaagagattagagaggaaggtaaatttataactgatgaagtctttaaggagattgttgaagaagttttaaggaagagaaataaaaattaa

SEQ ID NO: 13269 - protein, 398 aa, Methanococcus jannaschii
MDFLFENSWKAVCPYNPKLDLKDIYIYDTTLRDGEQTPGVCFTKEQKLEIARKLDELGLKQIEAGFPIVSEREADIVKTIANEGLNADILALCRALKKDIDKAIECDVDGIITFIATSPLHLKYKFNNKSLDEILEMGVEAVEYAKEHGLFVAFSAEDATRTPIEDLIKVHKAAEEAGADRVHIADTTGCATPQSMEFICKTLKENLKKAHIGVHCHNDFGFAVINSIYGLIGGAKAVSTTVNGIGERAGNAALEELIMALTVLYDVDLGLNLEVLPELCRMVEEYSGIKMPKNKPIVGELVFAHESGIHVDAVIENPLTYEPFLPEKIGLKRNILLGKHSGCRAVAYKLKLMGIDYDREMLCEIVKKVKEIREEGKFITDEVFKEIVEEVLRKRNKN

SEQ ID NO: 13270 - DNA, 1194 bp, Methanopyrus kandleri
  CDS (1)..(1194): transl_table=11
gtgcagagtccgtacgtacgtgaagccgttagggagatggacctcccggacgaggtgatcgtctacgacacgacgctgagggacggtgagcagaccccgggtgtcagcttcacgcccgagcagaagctggagatcgcgcacctactggacgagctgggcgtgcagcagatcgaggccgggttcccggtggtgtccgagggcgagcgggacgccgtgcgtaggatcgcgcacgagggactgaacgccgacattctatgcctggcgaggacgctacgtggtgacgtggacgcggcgttggactgcgacgtggacggagtgatcaccttcatcgccacctccgagctgcatctgaagcacaagctccggatgtcgagggaggaggtactcgagcggatcgccgacacggtcgagtacgcgaaggaccacgggctgtgggtggcgttctccgcggaggacgggacgaggacggagttcgagttcctggagagggtgtaccggacggcggaggagtgcggggcggaccgcgtccacgcgacggacaccgtcggcgtcatgataccggcggcgatgcggcttttcgtggcgaagatccgcgaggtcgtggacctgccgatcggcgtgcactgccacgacgacttcggcatggccgtggccaactcgctggccgcggtcgaggcgggggcgcaggcgatctccaccacggtgaacggtatcggtgagcgcgcgggtaacgcagccctcgaggaggtgatcatggccctcaaggagctgtacgggatcgacccggggttcaacaccgaggtgctcgcggagctctcgaggaaggtctcggagtactccggtatcgacgtgcccccgaacaaggccgtcgtgggcgagaacgccttcaggcacgagtccgggatccacgtggccgcggttctggaggagccgcgcacctacgagccgatcgaccccaaggaggtgggtatgaaccggaagatcgtcctcggtaagcacaccgggcggaaggcggtggtcgcgaagttggaggaactgggcgtggaaccggaggaggagatcgtcgaggaggtcctcaagcggatcaaggcgctcggggaccggcgtgtcagggtcaccgactccaagctcgaggagatcgtccggaatgtgctggaatcgagaggtgaccgagacgatccaggtagtcgatga

SEQ ID NO: 13271 - protein, 397 aa, Methanopyrus kandleri
MQSPYVREAVREMDLPDEVIVYDTTLRDGEQTPGVSFTPEQKLEIAHLLDELGVQQIEAGFPVVSEGERDAVRRIAHEGLNADILCLARTLRGDVDAALDCDVDGVITFIATSELHLKHKLRMSREEVLERIADTVEYAKDHGLWVAFSAEDGTRTEFEFLERVYRTAEECGADRVHATDTVGVMIPAAMRLFVAKIREVVDLPIGVHCHDDFGMAVANSLAAVEAGAQAISTTVNGIGERAGNAALEEVIMALKELYGIDPGFNTEVLAELSRKVSEYSGIDVPPNKAVVGENAFRHESGIHVAAVLEEPRTYEPIDPKEVGMNRKIVLGKHTGRKAVVAKLEELGVEPEEEIVEEVLKRIKALGDRRVRVTDSKLEEIVRNVLESRGDRDDPGSR

SEQ ID NO: 13272 - DNA, 1176 bp, Methanobacterium thermoautotrophicum
  CDS (1)..(1176): transl_table=11
ttgagatactttgttagccccttcaataaagaagctgaattaaaatttcctgacaggatcacgatttacgatacaacactgcgtgacggggagcagacccccggtgtatgccttggaacagaagaaaaacttgaaatagccagaaaacttgatgagctcggcatacatcagatagagagcggatttccggttgtatcagaacaggaaagagtttcagtgaagtccattgcaaatgagggcctcaatgcagagatactggcactctgcaggacaaagaaggatgacatcgacgcagcaatagactgtgatgtggatggagtcataaccttcatggcaacatcggacctccacctgaaacacaaactcaaactcacaagggaggaggccctcaacgtctgtatgaactccatagagtatgccaaggatcacgggcttttcctggcattttcagcagaggatgcaacaaggacagacctcgacttcctcaagcagatctaccggaaggccgagaactatggtgcagacagggtccacattgcagataccgtgggcgccataagcccccagggtatggactaccttgtcagggaactgcgcagggacatcaaggttgacatagcactccactgccacaacgactttggaatggccctatcgaactcaatagcagggctacttgcaggtgggactgcagtctcaaccacagttaacggtataggtgaaagggcgggcaacacatcccttgaggagctgatcatggccctgaggataatctatgaggttgacctcggattcaacataggcgtcctctatgaactttcaaggcttgtggagaaacacacaagaatgaaggtacctgagaacaagccgatagtcggcaggaacgtattcagacacgaatcaggtatacacgtcgacgcggtcatagaggagcccctaacctatgagccattccttccagagatgataggccaccagcgcaagatagtgctggggaaacactccgggtgccgtgcggtcaaggccaaacttgaggagtacggcatcgatgttacgagggatgaactctgcaggatagtggaggaggtaaagaaaaacagggagaagggtaagtacatcaacgatgaactcttctacaggattgtgaagtccgtaaggggacctgtagacttctag

SEQ ID NO: 13273 - protein, 391 aa, Methanobacterium thermoautotrophicum
MRYFVSPFNKEAELKFPDRITIYDTTLRDGEQTPGVCLGTEEKLEIARKLDELGIHQIESGFPVVSEQERVSVKSIANEGLNAEILALCRTKKDDIDAAIDCDVDGVITFMATSDLHLKHKLKLTREEALNVCMNSIEYAKDHGLFLAFSAEDATRTDLDFLKQIYRKAENYGADRVHIADTVGAISPQGMDYLVRELRRDIKVDIALHCHNDFGMALSNSIAGLLAGGTAVSTTVNGIGERAGNTSLEELIMALRIIYEVDLGFNIGVLYELSRLVEKHTRMKVPENKPIVGRNVFRHESGIHVDAVIEEPLTYEPFLPEMIGHQRKIVLGKHSGCRAVKAKLEEYGIDVTRDELCRIVEEVKKNREKGKYINDELFYRIVKSVRGPVDF

SEQ ID NO: 13274 - DNA, 1461 bp, Pyrococcus abyssi
  CDS (1)..(1461): transl_table=11
atgaggaaagtttacatctttgacacaacactaagggatggggagcaaactccgggagttagtttaaccgttgaagaaaaggttgagatagctaaacagctagctaagctcaacgtggatgttatagaggctggatttccaatagcgtctgagggagagttcaaggctgtaaagaaaatagcaacagaggtggaagatccaacaatagcagccctagctagagctgtggagaaggatatagacagggctggggaggctctaaggaatgcagaaaagaataggatacatacattcatagccacctcaccgatacacatgaaatataaactcagaaaggaacctgaggaagttaaaaagctagctgttaaagcggtagaacacgcaaccaagtatactgaggatgtagaattctcggccgaagatgcaacgagaagcgactgggatttcctagttgaggtttatgaggctgttatagacgctggagctaccgtgataaacgttcccgacaccgtaggttacgctacccctgaagagttttacgagttagtgagatatctaaggaggaacattagtaacatcaagggggttcaaataagcgttcactgtcacgatgacctcggcttagcagttgcaaactccctttcagcgattagagctggagcggatcaagttgaagtaacggttaacggaataggggagagagctggaaacgctgctctagaggaggttatcgtagctcttgacgttaggagggatttctacaaggttaaaacggatgtaaacttaaaagagatagccaggacaagtaagttagtttctcacttaaccggaatagaagtcccaccaaacaaggcgattgttggagggaatgcttttgcgcacgaatccggaattcatcaggatggtgtgctcaaagaaagaacgacttatgaaataatagaccctaagaaactaggattctccgggagtaagatagtgcttggaaagcactctggaaggcatgcatttaggaagaagcttgaagaactaggttacagcttaacagaagagcaccttgagagggctttcaagaagttcaaggatatcgccgataggaagaggtggataactgacacagacatagaggctataatccaggaggagcttacgaaatcgaatggaaagctcaaggttgagataatacacgtaacttcagggaaagtatcaaccgctacagtcaggattagtatgaacggagaggaaagaatagaggttgcttggtttaagaatggaccaatagatgctctattctcggcaatcaataaagcccttggagaggaattcaagcttagggagtacagggtatcttctgtaacatctggtaaagattctcttggagaagttctagttagagttgaagtaaatggggaaattttcgttggtaggggattaagtaccgatattatcgaggctagcgcttag

SEQ ID NO: 13275 - protein, 486 aa, Pyrococcus abyssi
MRKVYIFDTTLRDGEQTPGVSLTVEEKVEIAKQLAKLNVDVIEAGFPIASEGEFKAVKKIATEVEDPTIAALARAVEKDIDRAGEALRNAEKNRIHTFIATSPIHMKYKLRKEPEEVKKLAVKAVEHATKYTEDVEFSAEDATRSDWDFLVEVYEAVIDAGATVINVPDTVGYATPEEFYELVRYLRRNISNIKGVQISVHCHDDLGLAVANSLSAIRAGADQVEVTVNGIGERAGNAALEEVIVALDVRRDFYKVKTDVNLKEIARTSKLVSHLTGIEVPPNKAIVGGNAFAHESGIHQDGVLKERTTYEIIDPKKLGFSGSKIVLGKHSGRHAFRKKLEELGYSLTEEHLERAFKKFKDIADRKRWITDTDIEAIIQEELTKSNGKLKVEIIHVTSGKVSTATVRISMNGEERIEVAWFKNGPIDALFSAINKALGEEFKLREYRVSSVTSGKDSLGEVLVRVEVNGEIFVGRGLSTDIIEASA

SEQ ID NO: 13276 - DNA, 1386 bp, Sulfolobus solfataricus
  CDS (1)..(1386): transl_table=11
atgataaaagtaggtattttagattcgacgttaagagaaggagaacaaactcctggagtaatatttactgtagaccaaagagtagagatagctaaggctctatccgatttaggagtatctatgatagaagccggtcatccggctgtatctccagatatttacgaagggataaaaagaatagtcaaattgaaaaaagagggtattataacatcagaaattgtaggacacagtagagccgtaaaaagagatatagaaattgcagcagaattagaggtagataggatagcaatattttacggcgtaagtgatatacatctaaaggcgaaacataaagcaacaagagaagaggctttaagggtaatagctgagacaattagttacgctaggagtcacggcgtaaaagtcagatttaccgcagaagatggttcaaggacagactttgacttcttagttacagtatcgagaacggctagagatgcaggtgcggatagggttagtatagctgatactgtaggcatattatatccatcaaaaaccaaggaattatttagcgcgttaataagggaagttccaaacttggagtatgatattcacgctcacaatgacttaggtctagcagtagcaaatgcattggctgcagtagaaggtggagctacgattgttcatgcaacggttaatgggcttggagagagggttggtatagtacctttgcaacaaatcgtagcagctattaagtatcattttggtatagaagtagttaaactagataaattacagtacgtttccagtttaattgaaaagtacagtggaattccgatgccacctaattatcccataactggggattacgcttttttgcataaggcaggagttcatgttgcgggtgtgttgagtgatcctagaacatatgaatttatgcctccagagacgtttggtagaacaagagattacactattgataaatatacaggaaagcatgcgttaagagataaatatgaaaaactaggtgtgaaaatcagtgaggctgaaatggatcagattttagctaaaattaagtcaaatacgactataagattttacagagatgtggatttactagagttagctgaagaagttaccggaagagttttgaagccaagaccacctgagcaaatagaagcgttaatttcagttaagtgtgattctaacgtttataccacatcagtaactcgtcgtttatcagttattaatggcgttaaagaggttatggaaatttcaggagattatgacatactggtcaaggttcaagctaaggactctaatgaattaaaccagataatcgaaagtataagagcaactaaaggtgtgagatcaacattaacatcattagtccttaagaaaatgtaa

SEQ ID NO: 13277 - protein, 461 aa, Sulfolobus solfataricus
MIKVGILDSTLREGEQTPGVIFTVDQRVEIAKALSDLGVSMIEAGHPAVSPDIYEGIKRIVKLKKEGIITSEIVGHSRAVKRDIEIAAELEVDRIAIFYGVSDIHLKAKHKATREEALRVIAETISYARSHGVKVRFTAEDGSRTDFDFLVTVSRTARDAGADRVSIADTVGILYPSKTKELFSALIREVPNLEYDIHAHNDLGLAVANALAAVEGGATIVHATVNGLGERVGIVPLQQIVAAIKYHFGIEVVKLDKLQYVSSLIEKYSGIPMPPNYPITGDYAFLHKAGVHVAGVLSDPRTYEFMPPETFGRTRDYTIDKYTGKHALRDKYEKLGVKISEAEMDQILAKIKSNTTIRFYRDVDLLELAEEVTGRVLKPRPPEQIEALISVKCDSNVYTTSVTRRLSVINGVKEVMEISGDYDILVKVQAKDSNELNQIIESIRATKGVRSTLTSLVLKKM

SEQ ID NO: 13278 - DNA, 1194 bp, Thermoanaerobacter tengcongensis
  CDS (1)..(1194): transl_table=11
atgggggttaagagagttatagtttttgacactactttaagagatggtgaacagacgccaggggtaaattttaacagcagggataagcttgaaattgcctatcagctggcaaagcttggggtagacgtgatagaagcgggatttcctgcagcttccaatggggattttgaggcagtaaagaatattgctgactacgtaaaaggcgtaaccattgctgcgatgggaagagctgtgaaagaggacattgacagggccagcagtgctcttaaaaatgcagaaaagtccagattgcacgtctttatagctacttctgatatacaccttcagtacaagttgaagatgacaagagatgaggttctgaaaaaagcagttgaaatggtgaaatacgctagagggaagtttgatgagatagagttttcagcagaggatgcctcaaggactgattgggactttttagtgaaagtgtttagcgaagtaattgatgcaggagcccatattataaatgtgcctgatacggtaggttatgctatgccgagggagtatggagagcttataaggtatataagaaacaatgttccaaatattgatggagtaacaataagtgcgcattgccacaatgatttagggctggctgtagccaattctctttctgctatagaaaatggagcaactcaagtagaggttactgtgaacgggataggagagagggcaggaaatgcggctatggaagaggtgataatggctttaaataccagaaaagattattttggacttgtacacggcataaatacaaaagagatatacaatacgagcaaactagttagcgaactcacagggattaagttacagccaaataaagctatagtaggagctaatgctttcaggcaccagtccgggatacaccagcatggagtcataaacaatagattaacttatgaaataatgaggccagaggatataggagttgttcctgacactttcgctttaggtaaactttcaggaagaaacgcttttgaacttaaagtaaggcaactgggctacaacctttctcccggtgagataagtgaagcttttagaaagtttaaagatttagccgataggaaaaagaccatagtggaagaggatattcgatttgttgtagaggagactatagaagaatttaggggctttagggagggagaagcttgggcttaa

SEQ ID NO: 13279 - protein, 397 aa, Thermoanaerobacter tengcongensis
MGVKRVIVFDTTLRDGEQTPGVNFNSRDKLEIAYQLAKLGVDVIEAGFPAASNGDFEAVKNIADYVKGVTIAAMGRAVKEDIDRASSALKNAEKSRLHVFIATSDIHLQYKLKMTRDEVLKKAVEMVKYARGKFDEIEFSAEDASRTDWDFLVKVFSEVIDAGAHIINVPDTVGYAMPREYGELIRYIRNNVPNIDGVTISAHCHNDLGLAVANSLSAIENGATQVEVTVNGIGERAGNAAMEEVIMALNTRKDYFGLVHGINTKEIYNTSKLVSELTGIKLQPNKAIVGANAFRHQSGIHQHGVINNRLTYEIMRPEDIGVVPDTFALGKLSGRNAFELKVRQLGYNLSPGEISEAFRKFKDLADRKKTIVEEDIRFVVEETIEEFRGFREGEAWA

SEQ ID NO: 13280 - DNA, 1557 bp, Methanococcus jannaschii
  CDS (1)..(1557): transl_table=11
atgataatttatagggaagagaatgaaattataaaaaaggcacttgagaatttaaacattccagatagggtttatatctttgacacaacactcagagatggagagcaaactccaggtgtctctttaactccagaggagaaaatagacatagccataaaattagatgatttaggagttgatgttattgaggctggttttccagtatcatcattaggagagcaggaggctattaaaaaaatctgctcattaaacttagatgctgaaatctgcggattggcaagggctgtaaaaaaggatatagatgtagctatagattgcggagttgatagaatccatacatttatagcaacctctccattgcatagaaaatataaattaaaaaaatcaaaggaagagattattgatattgcagttgatgccatagagtacataaaagaacatgggattagagttgagttttcagcagaagatgcaacaagaacagagattgactatttaatagaagtttataaaaaggcagtagatgctggagcagatataatcaacgttccagataccgttggagttatgattccaagggctatgtattatctaataaatgagctaaagaaggaaataaaagtccctatatctgtgcattgccacaacgactttggtttagctgttgcaaactcattggcagcagttgaagcaggagcagagcaagtacattgtacaataaacggcttaggagagagaggaggaaatgcagcattggaagaggtagttatgagcttaatgtcaatctatggagttaaaactaatataaaaacacaaaaactttatgagatatctcagcttgtatcaaaatacactgaaattaaagtccaaccaaacaaggcaattgttggagagaacgctttcgctcatgaaagtggaatacatgcacatggagttttagctcatgctttaacctatgaacctatacccccagagttagttgggcagaagagaaaaataatcttaggtaagcacacaggaacacatgcaattgaggcaaagttaaaagaattaggaattgaggttggtaaggatataaataaagatcaatttgatgagatagttaagagaattaaagctcttggagataaaggaaagagagtcactgacagagatgttgaggcaatagttgaggatgttgttggtaagttggctaaaaaagatagagttgttgagttggagcaaatagcggttatgacaggtaatagagttattccaactgcatcagttgctttaaagattgaagaagagattaagaagagctcagctattggtgttggaccagtagatgcggcagttaaggcaatacaaaaagccattggagagaagattaaacttaaagagtatcatataaatgccataactggaggaactgatgcattggcggaggttattgtaaccttagaaggatatggaagggagataacaacaaaggcagcaagtgaagatatagttagggcttcagttgaggcagttatagatggaatcaacaaaatcttggcaaaaagagaaaaatga

SEQ ID NO: 13281 - protein, 518 aa, Methanococcus jannaschii
MIIYREENEIIKKALENLNIPDRVYIFDTTLRDGEQTPGVSLTPEEKIDIAIKLDDLGVDVIEAGFPVSSLGEQEAIKKICSLNLDAEICGLARAVKKDIDVAIDCGVDRIHTFIATSPLHRKYKLKKSKEEIIDIAVDAIEYIKEHGIRVEFSAEDATRTEIDYLIEVYKKAVDAGADIINVPDTVGVMIPRAMYYLINELKKEIKVPISVHCHNDFGLAVANSLAAVEAGAEQVHCTINGLGERGGNAALEEVVMSLMSIYGVKTNIKTQKLYEISQLVSKYTEIKVQPNKAIVGENAFAHESGIHAHGVLAHALTYEPIPPELVGQKRKIILGKHTGTHAIEAKLKELGIEVGKDINKDQFDEIVKRIKALGDKGKRVTDRDVEAIVEDVVGKLAKKDRVVELEQIAVMTGNRVIPTASVALKIEEEIKKSSAIGVGPVDAAVKAIQKAIGEKIKLKEYHINAITGGTDALAEVIVTLEGYGREITTKAASEDIVRASVEAVIDGINKILAKREK

SEQ ID NO: 13282 - DNA, 1086 bp, Pyrococcus abyssi
  CDS (1)..(1086): transl_table=11
atggtgctagactcaactttgagagaaggagagcaaactccaggagttaattacaccccagaacagagacttgaaatagcaatagccctagatgaggttggagttgacttcatagagattggacatccagcggttagcgaagatgtattcagagggatgaaattaatagcggagcaggggttaaatgttgagttactagctcattcaagagcgctaatagaggacattgattatgttctaaagactggagtcgattgggtgggaatattcttctgtctatcggaggcttgccttaggaagaggttcagaataacgttagaccatgcccttgaaaagatatctagggccattgagtacgcaaaagaccatggacttaaggttcgctttacacccgaagacaccactaggactgaatgggcgaacttgaagagggctataaggcttgcaaaggagttaaaagttgataggataagcgttgctgacaccactggaagcacgcatccgctgaggttctacactctcgtcaagaaaattgtcaactttggaatacccgttaacgttcactgtcacaacgatctcgggttagcactagcaaatgcgattatgggaatagaggctggagcaactctcgtggatgctaccgttaacggtcttggggagagggctggaatagttgacttggctcaaataataacggtgctctactatcactatggaatcaaaaagtacaggctggatctcctctacagggtaagcaacctagttagcgagataactggaatatcgccccaacctaactatccaatagttggtgagaacgcattcacgcataaggctggtttgcacgtttcagcggtgcttaaggatccaaggttctacgagttcttgcccgctgaggttttcggaagggagagaacgatatacgtcgataggtacgccggtaaggatacgataaggtactacctcgagaaattcggaataagagatcatggaattgtgacatctcttcttaggaaggttaagagcagcagagaacctttcacctgggaaaagttgttagaagaggctaggagggttaaagaatga

SEQ ID NO: 13283 - protein, 361 aa, Pyrococcus abyssi
MVLDSTLREGEQTPGVNYTPEQRLEIAIALDEVGVDFIEIGHPAVSEDVFRGMKLIAEQGLNVELLAHSRALIEDIDYVLKTGVDWVGIFFCLSEACLRKRFRITLDHALEKISRAIEYAKDHGLKVRFTPEDTTRTEWANLKRAIRLAKELKVDRISVADTTGSTHPLRFYTLVKKIVNFGIPVNVHCHNDLGLALANAIMGIEAGATLVDATVNGLGERAGIVDLAQIITVLYYHYGIKKYRLDLLYRVSNLVSEITGISPQPNYPIVGENAFTHKAGLHVSAVLKDPRFYEFLPAEVFGRERTIYVDRYAGKDTIRYYLEKFGIRDHGIVTSLLRKVKSSREPFTWEKLLEEARRVKE

SEQ ID NO: 13284 - DNA, 1383 bp, Sulfolobus tokodaii
  CDS (1)..(1383): transl_table=11
atgaaagtaggaatccttgactcaaccctaagagaaggagaacaaacacccggagttgtattcacaatagatcaaagagtcgaaatagcaaaagcattatcagatgttggtgttcagatgatagaagcaggacatcctgcggtatcctcggatatttatgagggaataaaaaggattatgaaacttaaaagagaaggacttattacatcagaaatagtagggcatagtagggctgtaaaaaaagatatcgaagtagcagcagaattagaagtagatagaatagcaatattttatggtgtaagtgatatccaccttaaagcaaaacatcatgttacaagagaggaggcacttaatataatagcagaaacaataagttatgcaaaaagtcatggtgttaaagtaagatttacagcagaagacggtagcagaaccgatttagattatttaataaaagtgtgtaaaacagcaagagatgctggtgctgacagagtaagtatagccgatactgtgggtattctttatcccacaaaaacaagagaattatttagtaccttagtaagggaagtaccaggtttagaatttgatattcatgctcataatgatttaggtttagccgttgctaatgcgttggcagcaatagaaggcggagctactataattcatactacagtaaatggattaggagaaagagtaggaattgttcctctccaagtaattgcggcagcaataaaatatcattttggaattgaagttgtaaagttaaataaattacaacaattagccagtctagttgaaaaatatagtggtataccgatgcctccaaactatccaataacaggagattatgcatttattcataaagctggtattcatgtggctggagttcttaatgatccatcaacttacgagtttatgccaccagagacttttggaagaagtagagactacgttattgataaatatactggtaagcacgcactaaaagataggtttgaaaaattgggcgttaaattaagtgatgtagaactagatcaagtactagctaaaataaaatccaatccaaatgttagattctatagagatgtagacttattagaaatagctgagtcagttactggcagagtattaaaacctaaaccgccagaaaatattgaagctttaatttcagttaaatgtgagtcaaatgtttatactacagcagtaactagaagattatctgttattccaggagtaaaagaagtcatggaaatctctggagattatgatattctcgttaaagttgaggcaaaagatcctaatgaacttaatcaaattattgaaaatatcagagctgtaaagggtgtaagctctactttaacatcattagttcttaaaaagatgtaa

SEQ ID NO: 13285 - protein, 460 aa, Sulfolobus tokodaii
MKVGILDSTLREGEQTPGVVFTIDQRVEIAKALSDVGVQMIEAGHPAVSSDIYEGIKRIMKLKREGLITSEIVGHSRAVKKDIEVAAELEVDRIAIFYGVSDIHLKAKHHVTREEALNIIAETISYAKSHGVKVRFTAEDGSRTDLDYLIKVCKTARDAGADRVSIADTVGILYPTKTRELFSTLVREVPGLEFDIHAHNDLGLAVANALAAIEGGATIIHTTVNGLGERVGIVPLQVIAAAIKYHFGIEVVKLNKLQQLASLVEKYSGIPMPPNYPITGDYAFIHKAGIHVAGVLNDPSTYEFMPPETFGRSRDYVIDKYTGKHALKDRFEKLGVKLSDVELDQVLAKIKSNPNVRFYRDVDLLEIAESVTGRVLKPKPPENIEALISVKCESNVYTTAVTRRLSVIPGVKEVMEISGDYDILVKVEAKDPNELNQIIENIRAVKGVSSTLTSLVLKKM

SEQ ID NO: 13286 - DNA, 1155 bp, Thermoanaerobacter tengcongensis
  CDS (1)..(1155): transl_table=11
atggctttcaaaaaagacaaacctgtttacattgttgacactactttaagggatggtgagcaaactgcaggtgttgtatttgcaaataacgaaaaaatcagaattgcgcaaatgttagatgagattggcatagaccagctggaagttggcatccccacaatgggaggagatgaaaaggagacggtagctaaaattgcaaaattaggattgaaggctagtataatggcatggaacagagcggttgtaaaagatgttcaggaatctcttgagtgcggtgtagatgcagtggccatttctatttctacatcagacattcacatagagcacaagttgaaaaagacaaggcaatgggtattggacagcatgacagaagcggtgagatttgctaaaaaagaaggcgtttatgtttctgttaacgcggaggatgcctccaggactgatatgaattttttgattgagtttgcaaggtgtgcaaaacaagcaggggcagatagattgagattttgcgacactgtaggttttttggatcctttcaaaacctatgagatggtaaaagccattaaagatgcagtagatattgagattgaaatgcatacccataatgattttggtatggctacggcaaacgctcttgcaggagttaaggctggggctaaatttgtgggggttacagttaatggactaggagagagagctggcaatgcggctttagaagaggtagtcatggcgttaaagtacgtgtacaaaatggatttaggtattgacaccagccgctttagagagatatccgagtatgtagctttagcatcaggtagaccacttcctccttctaaggctattgtaggtaaaaacgtgtttgcccatgagtcaggaattcacgtggatggagctcttaagaatccgtatacttatgaagtgtttgaccctcaagaagtaggacttgagaggcagatagtgataggaaagcattctggcactgcggctttaataaacaagtttaaagagtacgggagagttttaactgaagaggaggctaatttgctgctccctcatgttaggaagatggccattcaattaaagaggcctttatttgataaggagctaatgtacctttatgaagatgtgattgtgaaaggaaaagctaaagcaatctaa

SEQ ID NO: 13287 - protein, 384 aa, Thermoanaerobacter tengcongensis
MAFKKDKPVYIVDTTLRDGEQTAGVVFANNEKIRIAQMLDEIGIDQLEVGIPTMGGDEKETVAKIAKLGLKASIMAWNRAVVKDVQESLECGVDAVAISISTSDIHIEHKLKKTRQWVLDSMTEAVRFAKKEGVYVSVNAEDASRTDMNFLIEFARCAKQAGADRLRFCDTVGFLDPFKTYEMVKAIKDAVDIEIEMHTHNDFGMATANALAGVKAGAKFVGVTVNGLGERAGNAALEEVVMALKYVYKMDLGIDTSRFREISEYVALASGRPLPPSKAIVGKNVFAHESGIHVDGALKNPYTYEVFDPQEVGLERQIVIGKHSGTAALINKFKEYGRVLTEEEANLLLPHVRKMAIQLKRPLFDKELMYLYEDVIVKGKAKAI

SEQ ID NO: 13288 - DNA, 1770 bp, Solanum pennellii
  CDS (1)..(1770)
atgttcttcttcctccaacttctagtaccaataatttcagtttttcaatcaaaaaaacactactactccacatttatccggtgttcgatttcgaatcgtcgaccggaatatgtacccagtaaaatctccgacccgaaatacgttcgcatattcgatactactcttcgtgacggtgagcaatctccaggtgctacaatgactacgaaagagaaactcgacgtcgctcgtcagctagcgaaactcggtgtcgatataattgaagctggattcccagcttcatctgaagcagatttcgaatctgtgaaattaattgcagaggaaattggtaataatactgatgaaaatggatttgttcctgtaatttgtgggttatctagatgtaataaaagtgatattgataaagcttgggaagcagtgaaatatgctaaaaaacctagggttcatacgtttattgctacgagtgaaatacatatgaagtataaattgaagatgagtagagaacaagtggtggaaaaagcaaggagtatggtagcttatgctagaagccttggatgtgaagatgttgaatttagtccagaagatgcaggaaggtctgatcgagagttcctttatgatatcctcggagaagttattaaagctggtgcaacaacacttaacatacctgatactgttggatacactgttccaagtgaatttggacaattaattactgacataaaagccaatactccggggattgaaaatgtgataatttcaacacattgccagaacgatcttgggctttctactgccaacactttagctggagcttgtgcaggagcaagacaactagaggtgaccattaatggcattggtgaaagagctggaaatgcttctctggaggaggttgtaatggccttaaaatgtcgcggagagcaagtattaggtggcctctacacggggattaacactcaacatattgttccatcgagcaaaatggtggaggagtacagtgggctacaggtgcagccacataaggccattgttggagctaatgcatttgctcatgaaagtggcatccatcaggatggaatgttaaaacacaaggacacctatgagattatatctcctgatgatgttgggcttagtcgttctaatgaagcgggtattgtccttgggaaactcagtggtcgccatgcactgaaatccaaaatgcttgagcttggatatgacattgatggaaaagaactagaggacctcttttggcgttttaagtcagtagctgagaagaaaaagaaaattacagatgatgacttaatagcactgatgtcagatgaagttctccaacctaatgtttattggaagcttggagatgtacagattatgtgtggaagtcttggcctctctacagcaactgtgaagcttataaacactgatggtcaagagcatattgcttgttcagttggaacaggacctgttgatgcagcttacaaggcagtggacctcattgtgaaggtgcctattacgctccttgaatattccatgaatgcagtcacagaaggtatagatgccatagcatcaaccagagtgtcaatctgcagtattgataggcatactataatgaatggttcaactggacagactattcaccgcacatttagtggaaccggagcagatatggatgttgttatctctagtgtccgagcgtatattggtgcattgaacaaaatgttgagttacgaaaagctggtgtcaagatacagcaaacctgaagacagtgtggtggtataa

SEQ ID NO: 13289 - protein, 589 aa, Solanum pennellii
MFFFLQLLVPIISVFQSKKHYYSTFIRCSISNRRPEYVPSKISDPKYVRIFDTTLRDGEQSPGATMTTKEKLDVARQLAKLGVDIIEAGFPASSEADFESVKLIAEEIGNNTDENGFVPVICGLSRCNKSDIDKAWEAVKYAKKPRVHTFIATSEIHMKYKLKMSREQVVEKARSMVAYARSLGCEDVEFSPEDAGRSDREFLYDILGEVIKAGATTLNIPDTVGYTVPSEFGQLITDIKANTPGIENVIISTHCQNDLGLSTANTLAGACAGARQLEVTINGIGERAGNASLEEVVMALKCRGEQVLGGLYTGINTQHIVPSSKMVEEYSGLQVQPHKAIVGANAFAHESGIHQDGMLKHKDTYEIISPDDVGLSRSNEAGIVLGKLSGRHALKSKMLELGYDIDGKELEDLFWRFKSVAEKKKKITDDDLIALMSDEVLQPNVYWKLGDVQIMCGSLGLSTATVKLINTDGQEHIACSVGTGPVDAAYKAVDLIVKVPITLLEYSMNAVTEGIDAIASTRVSICSIDRHTIMNGSTGQTIHRTFSGTGADMDVVISSVRAYIGALNKMLSYEKLVSRYSKPEDSVVV

SEQ ID NO: 13290 - DNA, 1839 bp, Solanum pennellii
  CDS (1)..(1839)
atggcgtctatcaccgcaaatcatccaatctccggtaaaccattaatctcattccgtcccaaaaaccctttacttcaaacccaaactctcttcaatttcaaaccatcaatctccaagcactccaattcttcattttccattcccgttgtccgctgctcaatccgccgtataccggaatatactccgagtcacattcccgatccaaactacgtccggatattcgacaccactctccgtgatggcgaacaatcaccaggggctacaatgactacaaaggagaaactggatgttgcgcgtcagtcagctaagcttggtgttgatataattgaggctggttttcctgcttcttctgaagctgatcttgaagctgtgaaattgatagctaaggaagttgggaatggtgtttatgaagaggaatacgttccggttatttgtggattggcgaggtgtaataagaaggatattgataaggcgtgggaggctgtgaagtatgctaagaaaccgaggattcatacgtttattgctacaagtgaggtacatatgaattataagctgaaaatgagtagagatcaagttgttgagaaagctaggagtatggtggcttatgcaaggagtattgggtgtgaggatgttgaatttagccctgaagatgctggaagatctgatccggagtttctttatcatatcttgggagaggttatcaaagctggggcaacaacccttaacatccctgatactgttggatacactgtacccgaagaatttggacaattgattgctaaaataaaagcgaataccccaggagttgaagatgtgatcatttcaacacactgccagaacgatcttgggctttctactgccaacaccttagctggagcatgtgcaggtgcaagacaattggaagtgaccatcaatggaattggtgaaagagctggaaatgcttctttagaggaggttgtaatggccttaaagtgtcgtggagagcaagtactaggtggcctatatacagggattaatacacaacatatactcatgtcaagcaagatggtagagggtatttcgggacttcatgtgcaaccacacaaggccattgttggagctaatgcttttgttcatgaaagtggcatccatcaggatggaatgttaaaacacaaagatacatatgagattatatctcctgaagatattgggcttaatcgtgctaatgaatctggtattgtcttcgggaaactcagtggggtcatgctttgcaagccaaaaatgcttgagcttggatacgagattgagggaaaagaacttgatgacctgttctggcgattcaaatctgtggctgagaagaaaaagaaaattacagatgatgacctggtagcactgatgtcagatgaagttttccagcctcaatttgtgtggcaacttcaaaatgtacaggttacttgtggaagtcttggcctttctacagcaaccgttaagcttattgatgctgatggtcgagagcatatttcttgttctgttggaacggggccagttgacgcggcttataaggcagttgatctcattgttaaggttcctgtaacactccttgagtattccatgaatgcagtcacacaaggtatagatgctatagcttcaaccagagtcttgattcgtggagaaaatggccatacatcaacccatgccttaactggagagactgttcaccgtacatttagtggaaccggagcagatatggatattgtcatctccagtgtccgagcctatgttggtgcattgaataagatgatgagtttcagaaaattaatggcgaaaaataacaaacccgaaagcagtgcagtcatatag

SEQ ID NO: 13291 - protein, 612 aa, Solanum pennellii
MASITANHPISGKPLISFRPKNPLLQTQTLFNFKPSISKHSNSSFSIPVVRCSIRRIPEYTPSHIPDPNYVRIFDTTLRDGEQSPGATMTTKEKLDVARQSAKLGVDIIEAGFPASSEADLEAVKLIAKEVGNGVYEEEYVPVICGLARCNKKDIDKAWEAVKYAKKPRIHTFIATSEVHMNYKLKMSRDQVVEKARSMVAYARSIGCEDVEFSPEDAGRSDPEFLYHILGEVIKAGATTLNIPDTVGYTVPEEFGQLIAKIKANTPGVEDVIISTHCQNDLGLSTANTLAGACAGARQLEVTINGIGERAGNASLEEVVMALKCRGEQVLGGLYTGINTQHILMSSKMVEGISGLHVQPHKAIVGANAFVHESGIHQDGMLKHKDTYEIISPEDIGLNRANESGIVFGKLSGVMLCKPKMLELGYEIEGKELDDLFWRFKSVAEKKKKITDDDLVALMSDEVFQPQFVWQLQNVQVTCGSLGLSTATVKLIDADGREHISCSVGTGPVDAAYKAVDLIVKVPVTLLEYSMNAVTQGIDAIASTRVLIRGENGHTSTHALTGETVHRTFSGTGADMDIVISSVRAYVGALNKMMSFRKLMAKNNKPESSAVI

SEQ ID NO: 13292 - DNA, 1521 bp, Bacillus anthracis
  CDS (1)..(1521): transl_table=11
atgaagcaaattttgttcatggatacgacgctacgtgatggcgaacaatcaccaggagtaaatttaaatgaacaagagaaattgcaaattgcaaggcaattagagagactagggattcatgtcatggaagctggctttgcagcagcttccgaaggggattttcaatcggtaaagcgcatcgcaaatacaattcaaaatgctacagttatgagtttagcaagagcgaaagaaagtgatattcgaagagcatatgaagctgtgaaaggtgcggtatctcctcgtttacacgtatttttagctacgagtgatattcatatgaagtataaactttgtatgtcaaaagaagatgtattagatagtatttatcgatcggttacacttgggaaatcgttatttccgacagtacaattttcagcagaagatgcaacaagaacagcaagagattttttagctgaagcggtagaagttgcgattcgtgcaggagcgaatgtaattaatattccagatacagttgggtatacgaatccagaagaatattatgctctttttaaatatttacaagaatccgttccttcatatgaaaaagcaattttctcttgtcattgtcatgatgatcttgggatggcggtagcaaattcattagctgcagttgaaggcggagcgttgcaagtagaaggaacaattaatgggattggagaaagagcagggaatgcggcgttagaagaggttgcagttgctcttcatattaggaaagatttctataaagcagagccttctatgacgctaaaagaaattaaagcgacaagtacattagtaagcagattaacgggtatggttgtatcgaaaaataaagcgattgttggagcaaatgcattcgctcatgaatcaggcattcatcaagatggtgtattaaaagaagtgacaacatatgaaattattgaaccagcgctagtaggcgaatctcaaaatctatttgtacttggaaaacattctgggcgtcacgcgtttacagaaaaaatgaaagaacttggctatgaatttacaaacgacgagcgggatgcagtatttgaagcatttaaaaaattagctgatcgtaagaaggaaattactgaggaagatttacgagcacttatgcttggtgaagcagcatttgcggctcagcaatataacattacgcaattgcaagtacatttcgtatcaaatagtacacaatgtgcgacagttgtactaaaagatgaggaaggaaatgtattcgaagatgcagctactggctctggtagtattgaagcgatttataatgcaatccaaagaattttaggattggaatgtgaattggcggattatcgcatacaatctattacacaaggtcaagatgcactggctcatgttcatgttgaattaaaagaaggagcacatcaagtatcaggttttggtgttgcacaagacgtattggaagcgtcggcaagagcatatgtccacgcagcggggaaattgaaatcttttatccagcttgtgaaataa

SEQ ID NO: 13293 - protein, 506 aa, Bacillus anthracis
MKQILFMDTTLRDGEQSPGVNLNEQEKLQIARQLERLGIHVMEAGFAAASEGDFQSVKRIANTIQNATVMSLARAKESDIRRAYEAVKGAVSPRLHVFLATSDIHMKYKLCMSKEDVLDSIYRSVTLGKSLFPTVQFSAEDATRTARDFLAEAVEVAIRAGANVINIPDTVGYTNPEEYYALFKYLQESVPSYEKAIFSCHCHDDLGMAVANSLAAVEGGALQVEGTINGIGERAGNAALEEVAVALHIRKDFYKAEPSMTLKEIKATSTLVSRLTGMVVSKNKAIVGANAFAHESGIHQDGVLKEVTTYEIIEPALVGESQNLFVLGKHSGRHAFTEKMKELGYEFTNDERDAVFEAFKKLADRKKEITEEDLRALMLGEAAFAAQQYNITQLQVHFVSNSTQCATVVLKDEEGNVFEDAATGSGSIEAIYNAIQRILGLECELADYRIQSITQGQDALAHVHVELKEGAHQVSGFGVAQDVLEASARAYVHAAGKLKSFIQLVK

SEQ ID NO: 13294 - DNA, 1548 bp, Bacillus halodurans
  CDS (1)..(1548): transl_table=11
gtgcgaaaaattagcgtcttcgatacgacgttgcgtgacggtgagcagtcagccggagtgaacctcaactttgaggaaaagatggaaatcgcaaaacagttagagcgtctcggtgtggatattattgaggctggttttccagcctcttcccaaggggattttcaatcggttaaagcgattgcggagaccgtaaaaggaagctccgttactgggctggcccgctctgtgcaaaaagatatcgacgcagcgtgggaggcgttaaaatcggctgaggagccacggattcatctctttattgctacttctcccattcatatggaacataaattacgaatgactccagaacaagtgattgaaaaggctgttgagtctgtgaagtatgcagccagtcgtttcaagcatgttcaatggtcagctgaggatgcgagccgctcggactttccgtttttagcgcaaatcattgaagcggtgatccaagcgggagcaaccgttattaatttacctgacaccgttggatatacgacgccgcaagagattaagcgaatgtttcaatatatgaagcaaaacgttccaagcatcgacaaagtcagcttgtctactcataaccatgacgaccttggaatggcagttgctaactcattagcagcgattcagggcggggccgatcaagtggaatgcacgattaatggcattggggaaagagccggtaatgcctctcttgaagagattgccgtcgcccttaatattcgtaaagatcattatgaaacagaaactggacttattttaaaagaaattaaacgtacgagtagccttgtaagcaaattaacgggcatggttgtaccgaacaataaagcggtcgtaggagcgaatgcatttgctcatgaatcgggcatccaccaagatggcgttctaaaaaataaacaaacatatgaaattattacacctgagatggtcggtgtgtcatccaattcgatggtgcttggaaaacattcagggcgccatgcgttcaaaacgaaagttcaggaacttggatttacaggaacagatgagcagctaaacaacatttttaaagcatttaaagacctagcagataaaaagaaagaaattaccgaagacgatctatttgctttaatgaccgaacagaccgttggaggagaaacgaaccattacgaattgcaaactcttcaagtgaattacgggtccaacctgacgaatacggcaacgatcacgatgaagttaccatcaggggaagtggcggaagaggcggccactgggtctggaagtgttgaggcgatttacaatacacttgagcgcctgctcgatgccccggtgaaattgttagattatcgaattcagtccattactggcggtagggatgctctggcagatgtctatgttcaaatggattatcaaggagtcgtctcaagtggacgcggcacggcccatgatgtgttagaagcgtcagcaaaagcctatttaaacgcagttaatcgaacgattaatcgaaagaaatatgcagaagtttatggatcgaaggtggaggtgtag

SEQ ID NO: 13295 - protein, 515 aa, Bacillus halodurans
MRKISVFDTTLRDGEQSAGVNLNFEEKMEIAKQLERLGVDIIEAGFPASSQGDFQSVKAIAETVKGSSVTGLARSVQKDIDAAWEALKSAEEPRIHLFIATSPIHMEHKLRMTPEQVIEKAVESVKYAASRFKHVQWSAEDASRSDFPFLAQIIEAVIQAGATVINLPDTVGYTTPQEIKRMFQYMKQNVPSIDKVSLSTHNHDDLGMAVANSLAAIQGGADQVECTINGIGERAGNASLEEIAVALNIRKDHYETETGLILKEIKRTSSLVSKLTGMVVPNNKAVVGANAFAHESGIHQDGVLKNKQTYEIITPEMVGVSSNSMVLGKHSGRHAFKTKVQELGFTGTDEQLNNIFKAFKDLADKKKEITEDDLFALMTEQTVGGETNHYELQTLQVNYGSNLTNTATITMKLPSGEVAEEAATGSGSVEAIYNTLERLLDAPVKLLDYRIQSITGGRDALADVYVQMDYQGVVSSGRGTAHDVLEASAKAYLNAVNRTINRKKYAEVYGSKVEV

SEQ ID NO: 13296 - DNA, 1560 bp, Blochmannia floridanus
  CDS (1)..(1560): transl_table=11
atgcatcaacaagtgattatttttgatacaactttacgagatggagaacaatccttacaaactagcttaagtgtaaaagaaaaactccaaatagctttcgctttagaaaaattaggagtagatgttatggaagtaggatttccaatatcttctccaggagattttgaatcagtacacacaatagctcaaaatatacaaaatagctgtgtatgtggattagctcgatgtctagaaaaagatattgatattgcagccgaagctttaaaatctgcaaaaaaatttcgcattcatatatttttaccaacatctgctatacatattcaatctaaattgagaaaaaatttcgatcaaattatagatatgactacccattcaattcgttatgcaagaaaatatactgatgatgtagaattttcctgtgaagatgctgggcgtacatcaattgataacttatgccgtattgtcgaaatcgctattaaatcaggagcacgtactatcaatataccagacacagttggttatactatccccaatcaatttagtgaaattatttattctttatataaaaaagtcccgattattgaccaagctattatctccgtccattgtcatgatgatttaggaatggcagtaggtaattcgatttctgcaatacaagctggagctcgccaaatagaaggtactatcaatggtatcggagaacgagcaggaaacacagctctagaagaaataattatggctatcaaaatacgacatgatctattacacgtatatactaatattcaccaccatgaaatttatcaaaccagccaagtagtaagtcaactatgcaacatgcctattccagcaaacaaagcaatagttggatcaaatgcattttctcactcttcaggtattcatcaagatggagtattaaaaaataaaaaaaattatgaaataatgaatcccaaaaacatcggattaaaaaaagttcaacttaatttaacatcacgatcaggaagagcagctgttaaatatcacatggaaaaaatgggataccaagaacatgattacaatatagatgaactatataaagtttttctaaaattagctgatcaaaaaggaagagtattcaattatgaactagaagcgttagcttttacaaagtactctcaagaatacttagaatattttgcattagaatctttccacattcattctacttcatcagcattatctaatgctataattaatttatattgcgggaaagaaaaaaaaatacatagctgttcaacaacaggtagaggcccaatagatgcagcatataaagcattaacactaatctctaaattacctataaaattagaaaaatatcaacttcattccaaaaaatacgaatacaatatattaggacaagtaaatattattgtatcataccaaggacgtcattttcatggcattggatcaaatatagatattattaaagcatcgattatagcaatgattcaagcgttaaataatatttggcaaactaaacaaataacgataaatcataaaaatacccagcatataaaaaaatag

SEQ ID NO: 13297 - protein, 519 aa, Blochmannia floridanus
MHQQVIIFDTTLRDGEQSLQTSLSVKEKLQIAFALEKLGVDVMEVGFPISSPGDFESVHTIAQNIQNSCVCGLARCLEKDIDIAAEALKSAKKFRIHIFLPTSAIHIQSKLRKNFDQIIDMTTHSIRYARKYTDDVEFSCEDAGRTSIDNLCRIVEIAIKSGARTINIPDTVGYTIPNQFSEIIYSLYKKVPIIDQAIISVHCHDDLGMAVGNSISAIQAGARQIEGTINGIGERAGNTALEEIIMAIKIRHDLLHVYTNIHHHEIYQTSQVVSQLCNMPIPANKAIVGSNAFSHSSGIHQDGVLKNKKNYEIMNPKNIGLKKVQLNLTSRSGRAAVKYHMEKMGYQEHDYNIDELYKVFLKLADQKGRVFNYELEALAFTKYSQEYLEYFALESFHIHSTSSALSNAIINLYCGKEKKIHSCSTTGRGPIDAAYKALTLISKLPIKLEKYQLHSKKYEYNILGQVNIIVSYQGRHFHGIGSNIDIIKASIIAMIQALNNIWQTKQITINHKNTQHIKK

SEQ ID NO: 13298 - DNA, 1563 bp, Bradyrhizobium japonicum
  CDS (1)..(1563): transl_table=11
atggcccccgtgaacaagtccgacaaggaccgcgtcatcattttcgacaccacgctgcgcgacggcgagcagtgccccggcgccaccatgaccttcgaggagaagctcgaggtcgccgagctcttggatgatatgggcgtcgacgtcatcgaggccggcttcccgatcacctccgagggcgacttccaggcggtcagcgagatcgcccgccgctccaagaacgccgtcatcgccggcctgtcccgcgcccatcccgccgacatcgaccgctgcgcggaggctgtgaaattcgcaaagcgcggccgcgtccacaccgtgatcgcgacctcgccgctgcacatgcgggtgaagctgaacaagaccccagagcaggtgatcgagacttcggtcgcgatggtcgcgcgtgcccgcaaccagatcgacgatgtcgaatggtcggccgaggacggcacccgcagcgagatggactatctgtgccgcatcgtcgaggccgtcatcaaggccggcgcgaccacggtgaacatccccgacaccgtcggctacacggtgccggaggaatacacccacttcatgaagacgctgatcgagcgcgtgccgaactcggataaggcggtgttctcggtccattgccataacgatctcggcatggccgttgccaattcgctggccggggtcgtcggcggtgcgcgccaggtcgagtgcaccatcaacggcatcggcgagcgcgccggcaacgccgcgctcgaagagatcgtgatggcgatcaacgtgcgcaacgacaaattcccctactggaacaagatcgacaccacgcagctcacccgcgcctcgaaggtggtgtcggcggcgacctcgtttccggtgcagtacaacaaggccatcgtcggccggaacgccttcgcgcatgagagcggcatccatcaggacggcgtgctgaaggacgcctccacctacgagatcatgcggccggaaatggtcggcctgaagcagtcctcgctggtgctcggcaagcactccggccgccatgccttcgtgcacaaactggaggagatgggctacaagctcggtccgaaccagctggaagatgcgttcacgcggatgaaggcgctcgccgaccgcaagaaggacatctacgacgaggacatcgaggcgctggtcgacgaggagatggcggcctcccacgaccgcatcaagctgacctcgctgaccgtgatcgccggcacccatggcccgcagcgcgcgaccatgaagctcgacgtcgacggccagatcaagatcgaggaggccgagggcaatggtccggtggacgcggtgttcaactgcatcaagcgcctcgttccgcacgaggccaagctcgagctgtaccaggtccatgccgtgaccgaaggcaccgacgcccaggcggaagtctcggtgcgtttgtcgcatgacggccgctcgatgacggcgcgcgcggccgatcccgatacgctggtggcctcggccaaggcctatctcggcgcgctcaacaagatcgtcatgaagcgccagcgcgacacggtgacgaccgccgcggcgagctga

SEQ ID NO: 13299 - protein, 520 aa, Bradyrhizobium japonicum
MAPVNKSDKDRVIIFDTTLRDGEQCPGATMTFEEKLEVAELLDDMGVDVIEAGFPITSEGDFQAVSEIARRSKNAVIAGLSRAHPADIDRCAEAVKFAKRGRVHTVIATSPLHMRVKLNKTPEQVIETSVAMVARARNQIDDVEWSAEDGTRSEMDYLCRIVEAVIKAGATTVNIPDTVGYTVPEEYTHFMKTLIERVPNSDKAVFSVHCHNDLGMAVANSLAGVVGGARQVECTINGIGERAGNAALEEIVMAINVRNDKFPYWNKIDTTQLTRASKVVSAATSFPVQYNKAIVGRNAFAHESGIHQDGVLKDASTYEIMRPEMVGLKQSSLVLGKHSGRHAFVHKLEEMGYKLGPNQLEDAFTRMKALADRKKDIYDEDIEALVDEEMAASHDRIKLTSLTVIAGTHGPQRATMKLDVDGQIKIEEAEGNGPVDAVFNCIKRLVPHEAKLELYQVHAVTEGTDAQAEVSVRLSHDGRSMTARAADPDTLVASAKAYLGALNKIVMKRQRDTVTTAAAS

SEQ ID NO: 13300 - DNA, 1173 bp, Buchnera aphidicola subsp
  CDS (1)..(1173): transl_table=11
atgactcaaaaaataattatttttgatacaacattacgagatggagaacagtctctaaaaatgagtttaagtgttaaaaaaaaactcaaaattgcttttgctttagaaaaattaggtgttgatgtaattgaagcaggttttccaatttcttcgcctggtgattttgagtctgttaaaaaaatttcggaaagaattaaagacgctaaaatttgtagtttagcacgatgtatagatggggatatagatatagcagctaaagctatgaaaaaagcgaattcatttcgtatacatatatttttgggaacatctgctttgcatgttcaatctaaattaaagaaaacatttgatcaaataatagatatgatggtttcttctgtaaaaagagctcagaaatatactgatgatgttgaattttcgtgtgaagatgctggtagaacatcattagatgatttatgtcgtattatagaattagctatagatttaggagtaaaaactattaatattcctgatacagtaggctatactattccttatgaatttagtaatattatttcatctatttacaaaaaagttccaaatattgataaagctataatatctgtacattgccatgatgatttgggaatggctgtagctaattctatttctgctattcaagttggtgctagacaaatcgaaggaactattactggagtaggagaacgtgcaggaaatgcagcattggaagaaatattgatggcaataaaaataagaaaagatattttaaattttaaaacaaatataaaatatcaagaaatttacagtacttgtagggttattagttcaatttgtaatatacctgttcctgtgaataaagcgataataggaagtaatgcgttttcgcattcatctggaattcatcaagatggaattttaaaagataaaaaaacttatgaaattatagtgccagaaagtataggatttgtgtctcagccattaaatttaacttctcgatctggtcgtgcagctgtaaaatatcgcatgaaaaagataggttataaagatagtgattataatatagatattttgtattctaggtttttaaagttagctgataaaaaaggtcgagtatctgatagtgatttaaaacagttagtatgttttaataataaattaaaaaatttaaaggattaa

SEQ ID NO: 13301 - protein, 390 aa, Buchnera aphidicola subsp
MTQKIIIFDTTLRDGEQSLKMSLSVKKKLKIAFALEKLGVDVIEAGFPISSPGDFESVKKISERIKDAKICSLARCIDGDIDIAAKAMKKANSFRIHIFLGTSALHVQSKLKKTFDQIIDMMVSSVKRAQKYTDDVEFSCEDAGRTSLDDLCRIIELAIDLGVKTINIPDTVGYTIPYEFSNIISSIYKKVPNIDKAIISVHCHDDLGMAVANSISAIQVGARQIEGTITGVGERAGNAALEEILMAIKIRKDILNFKTNIKYQEIYSTCRVISSICNIPVPVNKAIIGSNAFSHSSGIHQDGILKDKKTYEIIVPESIGFVSQPLNLTSRSGRAAVKYRMKKIGYKDSDYNIDILYSRFLKLADKKGRVSDSDLKQLVCFNNKLKNLKD

SEQ ID NO: 13302 - DNA, 1572 bp, Escherichia coli O157
  CDS (1)..(1572): transl_table=11
atgagccagcaagtcattattttcgataccacattgcgcgacggtgaacaggcgttacaggcaagcttgagtgtgaaagaaaaactgcaaattgcgctggcccttgagcgtatgggtgttgacgtgatggaagtcgggttccccgtctcttcgccgggtgattttgaatcagtgcaaaccatcgctcgccaggttaaaaacagccgtgtatgcgcgttagctcgctgcgtggagaaagatatcgacgtggcggccgaatccctgaaagtcgccgaagccttccgtattcatacctttattgccacttcgccaatgcacatcgccaccaagctgcgcagcacgctggacgaggtgatcgaacgcgctatctatatggtgaaacgcgcccgtaattacaccgatgatgttgaattttcttgcgaagatgccgggcgtacacccattgccgatctggcgcgagtggtcgaagcggcgattaatgccggtgccaccaccatcaacattccggacaccgtgggctacaccatgccgtttgagttcgccggaatcattagcggcctgtatgaacgcgtgcctaacatcgacaaagccattatttccgtacatacccacgacgatttgggcctggcggtcggcaactcactggcggcggtacatgccggtgcacgccaggtggaaggtgcaatgaacgggatcggcgagcgtgccggtaactgttccctggaagaagtcatcatggcgattaaagttcgtaaggatattctcaacgtccacaccgccattaatcaccaggagatatggcgcaccagccagttagttagccagatttgtaatatgccgatcccggcaaacaaagccattgttggcagcggcgcattcgcacactcctccggtatccaccaggatggcgtgctgaaaaaccgcgaaaactacgaaatcatgacaccagaatctattggtctgaaccaaatccagctgaatctgacctctcgttcggggcgtgcggcggtgaaacatcgcatggatgagatggggtataaagaaagtgaatataatttagacaatttgtacgacgccttcctcaagctggcggacaaaaaaggtcaggtgtttgattacgatctggaggcgctggccttcatcggtaagcagcaagaagagccggagcatttccgtctggattacttcagcgtgcagtctggctctaacgatatcgccaccgccgccgtcaaactggcctgcggcgaagaagtcaaagcagaagccgccaacggtaacggtccggtcgatgccgtctatcaggcgattaaccgcatcactgactataacgtcgaactggtgaaatacagcctgaccgccaaaggtcacggtaaagatgcgctgggtcaggtggatattgtcgccaactacaacggtcgccgcttccacggcgtcggcctggccaccgatattgtcgagtcctccgccaaagccatggtgcacgtacttaacaatatctggcgtgccacagaagtcgaaaaagagttgcaacgcaaagctcaacacaacgaaaacaacaaggaaaccgtgtga

SEQ ID NO: 13303 - protein, 523 aa, Escherichia coli O157
MSQQVIIFDTTLRDGEQALQASLSVKEKLQIALALERMGVDVMEVGFPVSSPGDFESVQTIARQVKNSRVCALARCVEKDIDVAAESLKVAEAFRIHTFIATSPMHIATKLRSTLDEVIERAIYMVKRARNYTDDVEFSCEDAGRTPIADLARVVEAAINAGATTINIPDTVGYTMPFEFAGIISGLYERVPNIDKAIISVHTHDDLGLAVGNSLAAVHAGARQVEGAMNGIGERAGNCSLEEVIMAIKVRKDILNVHTAINHQEIWRTSQLVSQICNMPIPANKAIVGSGAFAHSSGIHQDGVLKNRENYEIMTPESIGLNQIQLNLTSRSGRAAVKHRMDEMGYKESEYNLDNLYDAFLKLADKKGQVFDYDLEALAFIGKQQEEPEHFRLDYFSVQSGSNDIATAAVKLACGEEVKAEAANGNGPVDAVYQAINRITDYNVELVKYSLTAKGHGKDALGQVDIVANYNGRRFHGVGLATDIVESSAKAMVHVLNNIWRATEVEKELQRKAQHNENNKETV

SEQ ID NO: 13304 - DNA, 1572 bp, Escherichia coli
  CDS (1)..(1572): transl_table=11
atgagccagcaagtcattattttcgataccacattgcgcgacggtgaacaggcgttacaggcaagcttgagtgtgaaagaaaaactgcaaattgcgctggcccttgagcgtatgggtgttgacgtgatggaagtcggtttccccgtctcttcgccgggcgattttgaatcggtgcaaaccatcgcccgccaggttaaaaacagccgcgtatgtgcgttagctcgctgcgtggaaaaagatatcgacgtggcggccgaatccctgaaagtcgccgaagccttccgtattcatacctttattgccacttcgccaatgcacatcgccaccaagctgcgcagcacgctggacgaggtgatcgaacgcgctatctatatggtgaaacgcgcccgtaattacaccgatgatgttgaattttcttgcgaagatgccgggcgtacacccattgccgatctggcgcgagtggtcgaagcggcgattaatgccggtgccaccaccatcaacattccggacaccgtgggctacaccatgccgtttgagttcgccggaatcatcagcggcctgtatgaacgcgtgcctaacatcgacaaagccattatctccgtacatacccacgacgatttgggcctggcggtcggaaactcactggcggcggtacatgccggtgcacgccaggtggaaggcgcaatgaacgggatcggcgagcgtgccggaaactgttccctggaagaagtcatcatggcgatcaaagttcgtaaggatattctcaacgtccacaccgccattaatcaccaggagatatggcgcaccagccagttagttagccagatttgtaatatgccgatcccggcaaacaaagccattgttggcagcggcgcattcgcacactcctccggtatacaccaggatggcgtgctgaaaaaccgcgaaaactacgaaatcatgacaccagaatctattggtctgaaccaaatccagctgaatctgacctctcgttcggggcgtgcggcggtgaaacatcgcatggatgagatggggtataaagaaagtgaatataatttagacaatttgtacgatgctttcctgaagctggcggacaaaaaaggtcaggtgtttgattacgatctggaggcgctggccttcatcggtaagcagcaagaagagccggagcatttccgtctggattacttcagcgtgcagtctggctctaacgatatcgccaccgccgccgtcaaactggcctgtggcgaagaagtcaaagcagaagccgccaacggtaacggtccggtcgatgccgtctatcaggcaattaaccgcatcactgaatataacgtcgaactggtgaaatacagcctgaccgccaaaggccacggtaaagatgcgctgggtcaggtggatatcgtcgctaactacaacggtcgccgcttccacggcgtcggcctggctaccgatattgtcgagtcatctgccaaagccatggtgcacgttctgaacaatatctggcgtgccgcagaagtcgaaaaagagttgcaacgcaaagctcaacacaacgaaaacaacaaggaaaccgtgtga

SEQ ID NO: 13305 - protein, 523 aa, Escherichia coli
MSQQVIIFDTTLRDGEQALQASLSVKEKLQIALALERMGVDVMEVGFPVSSPGDFESVQTIARQVKNSRVCALARCVEKDIDVAAESLKVAEAFRIHTFIATSPMHIATKLRSTLDEVIERAIYMVKRARNYTDDVEFSCEDAGRTPIADLARVVEAAINAGATTINIPDTVGYTMPFEFAGIISGLYERVPNIDKAIISVHTHDDLGLAVGNSLAAVHAGARQVEGAMNGIGERAGNCSLEEVIMAIKVRKDILNVHTAINHQEIWRTSQLVSQICNMPIPANKAIVGSGAFAHSSGIHQDGVLKNRENYEIMTPESIGLNQIQLNLTSRSGRAAVKHRMDEMGYKESEYNLDNLYDAFLKLADKKGQVFDYDLEALAFIGKQQEEPEHFRLDYFSVQSGSNDIATAAVKLACGEEVKAEAANGNGPVDAVYQAINRITEYNVELVKYSLTAKGHGKDALGQVDIVANYNGRRFHGVGLATDIVESSAKAMVHVLNNIWRAAEVEKELQRKAQHNENNKETV

SEQ ID NO: 13306 - DNA, 1617 bp, Gloeobacter violaceus
  CDS (1)..(1617): transl_table=11
atgtttcaggaccgcttgattatcttcgacaccacccttagagacggcgagcagtcgccgggggccacgctcaacgccgacgaaaaggtggagattgcccggcagcttgcccgactcggtgtcgatgtgatcgaggccggttttgcctacgccagccccggggattttgaggcggtcgagcgggtggcccgcacggtgggtaccgaggacgggccggtaatctgcagtctggcgcgggccatccgctcagacattcaagcggcggccgaggcgatccgccccgccgcccgcggtcgtatccacacgttcatctcgacttcggacattcacctggagcaccagttgcgcaaaagccgcgccgaggtgctcgccatcgccgccgagatggtggcctttgccaagggtttcgtggacgatgtcgaattttcaccgatggacgccggccgctccgccccggagtatctctaccgggtgctcgaagcggcaatcgcagccggggcgacgaccgtcaacatccccgacacggtgggctatctgacgcccgcagaattcggcggcctcatccgcgggatcacccagaacgtgcggggcatcgagcgggcggtgatttcggtgcactgccacaacgacctgggtctggcggtggccaattccctcgcggccatcgagaacggtgcccgtcagatcgagtgcacggtgaacgggatcggcgagcgggcgggcaactgttctctcgaagaaatcgtcatggccctgcacgtgcgccgccagttcttcaacccgatcttcggccgtccggccgattcgaccgtacccttgagtaccatcgacacccgccagatctacaaaagttcgcggctggtctcccacctgaccggcatgctcgtccagcccaacaaggcgatcgtcggggcgaacgcctttgcccacgagtcgggcatccatcaggacggcgtgctcaaaaaccggctcacctacgagatcatggacgccgagacagtcggggtcaacgaaaaccgcatcgtcctgggcaagcactcgggccgcaacgcctttcgcacccgattggtcgagttgggctacgaactgggcgacgccgatctcaaccgtgccttcttgcgctttaaagaactggcggacaagaaaaagaccgtgagcgactgggacatcgaggccgtcatctccgatgaaattcgcctcatccccgaagcctaccgcctggagcaggtgcaggtgagctgcggtgagccgggactgcccaccgccaccgtccgcctcaccggccccgacggcgtcgagcgcgtcgatgcggccgtgggcaccggcccggtggacgcggtctacaaggcgatcaaccgccttatcgaactacccaacgaactgatcgaattttcggtgcagtcggtgacggcgggcatcgatgcgatgggcgaagtgaccatccgcgtgcgccaggacggacgcaccttcagcggccacgcggccaacaccgatatcatcgtcgcctccgcccgcgcctacctcaacgccctcaacaagctccacttcgctctggcccaccccacccactccggcggcgccctcgcccaccccgacgccgccgcccagaaactctga

SEQ ID NO: 13307 - protein, 538 aa, Gloeobacter violaceus
MFQDRLIIFDTTLRDGEQSPGATLNADEKVEIARQLARLGVDVIEAGFAYASPGDFEAVERVARTVGTEDGPVICSLARAIRSDIQAAAEAIRPAARGRIHTFISTSDIHLEHQLRKSRAEVLAIAAEMVAFAKGFVDDVEFSPMDAGRSAPEYLYRVLEAAIAAGATTVNIPDTVGYLTPAEFGGLIRGITQNVRGIERAVISVHCHNDLGLAVANSLAAIENGARQIECTVNGIGERAGNCSLEEIVMALHVRRQFFNPIFGRPADSTVPLSTIDTRQIYKSSRLVSHLTGMLVQPNKAIVGANAFAHESGIHQDGVLKNRLTYEIMDAETVGVNENRIVLGKHSGRNAFRTRLVELGYELGDADLNRAFLRFKELADKKKTVSDWDIEAVISDEIRLIPEAYRLEQVQVSCGEPGLPTATVRLTGPDGVERVDAAVGTGPVDAVYKAINRLIELPNELIEFSVQSVTAGIDAMGEVTIRVRQDGRTFSGHAANTDIIVASARAYLNALNKLHFALAHPTHSGGALAHPDAAAQKL

SEQ ID NO: 13308 - DNA, 1602 bp, Microcystis aeruginosa
  CDS (1)..(1602): transl_table=11
atgaataccagtccagatcgtgtgattatcttcgataccacccttcgagatggggaacagtccccgggtgccgctttaaatgtggatgagaagctaaccatagcgcgcgcactggcacgactgggagttgatgtcattgaagcaggttttccccacgctagtccgggggactttgaagctgtacagaaaattgccggcagcgtcggcagcgaagctgatagcccaattatttgcggattagcccgggctacccaaaaagatatcaaatctgccgccgatgcgctcagacccgccgccaagcccagaattcacaccttcctagccacatctgatatacatctccaatacaaacttaagaagactcgtcaggaagttcttgagattgtgccggaaatggtggcctatgctaaatccttccttaatgatgtggaattttcccccgaagatgctggccgcagcgatccggaattcctctaccaagtcctcgaaagagcgatcgccgcaggagccaccaccgttaatattcccgataccgtcggttataccacccccagcgaatttggggctttaatccgtggtattaaggaaaatgtccccaatatcgaccaagcgattatctccgtccatggtcacgacgatctagggttagcggtggctaatttcctcgaagcagttaaaaatggcgctcgacagttggaatgtaccattaatgggatcggtgagcgtgccggtaatgcttccctagaagagttggtgatggcccttcatgtccggcgctcctattttaatcctttccttggtcgtccagcagagtccacggaacctttaaccaagatcaacaccaaggaaatctatcgcacttctcgcctagtttctaatcttaccggcatgatcgtgcaaccgaataaggcgatcgtcggtgctaacgctttcgcacacgagtcgggaatccatcaggacggggtgttaaaacataaactcacctatgagattatggatgcagaatcgatcggtttgactaataatcagatcgttctcggtaaactctccggccgcaacgcttttcgctctcggttacaggaattgggttttgagctttcggaaacggaacttaataacgcttttatccagtttaaagaaatggccgatcgcaaaaaggaaatcaccgatcgcgatctagaagctattgttaacgatgaaatcgatacggttcccgatcacttccgccttgaattagtacaagtgtcctgtggcaataacgccagacccacggccacggtaacgattcgcactcccgacggtagcgagttatccgatgcggccattggtacagggccagtagatgctctctgcaaagcgatcgatcgagtggtgcagattcctaacgaattaatctctttctcggtgcgagaagtgaccgagggaatcgatgctttaggagaagtgaccatccgtctccgttacgcaggacgcacctattctgctcgcgcagccgataccgatattattgttgcctccgctcgtgcctacgtcagtgccttaaaccgtctccacgtcgcactgcagcagaaggaaaaaaccccagaaatgctacaagtctag

SEQ ID NO: 13309 - protein, 533 aa, Microcystis aeruginosa
MNTSPDRVIIFDTTLRDGEQSPGAALNVDEKLTIARALARLGVDVIEAGFPHASPGDFEAVQKIAGSVGSEADSPIICGLARATQKDIKSAADALRPAAKPRIHTFLATSDIHLQYKLKKTRQEVLEIVPEMVAYAKSFLNDVEFSPEDAGRSDPEFLYQVLERAIAAGATTVNIPDTVGYTTPSEFGALIRGIKENVPNIDQAIISVHGHDDLGLAVANFLEAVKNGARQLECTINGIGERAGNASLEELVMALHVRRSYFNPFLGRPAESTEPLTKINTKEIYRTSRLVSNLTGMIVQPNKAIVGANAFAHESGIHQDGVLKHKLTYEIMDAESIGLTNNQIVLGKLSGRNAFRSRLQELGFELSETELNNAFIQFKEMADRKKEITDRDLEAIVNDEIDTVPDHFRLELVQVSCGNNARPTATVTIRTPDGSELSDAAIGTGPVDALCKAIDRVVQIPNELISFSVREVTEGIDALGEVTIRLRYAGRTYSARAADTDIIVASARAYVSALNRLHVALQQKEKTPEMLQV

SEQ ID NO: 13310 - DNA, 1611 bp, Prochlorococcus marinus
  CDS (1)..(1611): transl_table=11
atggccaaagatccaggccgagttcttatttttgatacgacactaagggatggcgagcagtctcctggtgcaagccttaacttggaagagaagcttgcgattgctcaacagcttgcaagattaggtgtagatataattgaagctggattcccttatgctagtcaaggggattttaaagctgttcaaaggattgctgatcaagtaggaggagaagagggtccgattatttgtggattagcaagggcatctaaggcagatattaaggcatgtgctgaagcaatagcacctgctcctcgcaaaaggattcatacctttattgcaactagtgatattcatttaaaacataagcttaggaagtcacgtgcagatgttctcaaaattgttccagagatggttggctatgcaagatcacttgcttctgatgttgaattctcttgtgaagatgcagcaagaagtgaccctgattttatgtacgaagtaatagaaagtgctattgcagcaggtgctgggacaataaatattcctgatacagttggttatataactccagcggaatttggagatttaattataggaataaacaaaaatgtatctaatatcgatgaatcaattttatcagtgcatggtcataacgatttaggcctcgctgttgcaaatttccttgaagcagtaaagaacggagcaaggcagcttgaatgcactattaatggtattggcgaaagagcaggtaatgctgctttagaggagttggtgatggctttgcatgtgcgaagaagatatttcaatcctttttttggtaaggattcagaaagtccaactccattaaccgctattcgaactgaagaaataacaaagacatctaggttggtttcaaatctcactggaatggttgttcagcctaataaagcaatagtaggtgcaaacgcttttgctcatgagtctggaattcatcaagatggagttttgaaaaacccactaacttatgaaattgttgatgctaagactgtgggacttgctgaaaatagaatttcattaggaaaattgagtggcaggagtgctgttagagctaggcttgaagagctaggttatgacttgactagagaagacttgaatgatgcttttgcaagattcaaggatctagcagatcgaaaaagagagatttcagatagagatcttgaggcaatagttagtgaacaagttatgcagcctgaagcgcgttttaagcttcacttggttcaagtaagttgtggtactgccttaagaccaactgcaactgtaactattgctgatcaagatgggatagaaaacacagcggtggcattaggtactggccctgttgatgcagtctgcaaagctctaaggtctttgaccaatgaaaaaaacgatttgattgagttttcagttaaatcagttacagaggggatagatgcccttggtgaagtaacaattaggcttagacgtgatggaaagattttttctggacattcagctgatacggatgtagttgtggctgctgctcaggcttatatcaatgcccttaatagacttgtctattccttgaaaaaatcatcactacatccacagcacgatgtagtgaaagcaaatttgtga

SEQ ID NO: 13311 - protein, 536 aa, Prochlorococcus marinus
MAKDPGRVLIFDTTLRDGEQSPGASLNLEEKLAIAQQLARLGVDIIEAGFPYASQGDFKAVQRIADQVGGEEGPIICGLARASKADIKACAEAIAPAPRKRIHTFIATSDIHLKHKLRKSRADVLKIVPEMVGYARSLASDVEFSCEDAARSDPDFMYEVIESAIAAGAGTINIPDTVGYITPAEFGDLIIGINKNVSNIDESILSVHGHNDLGLAVANFLEAVKNGARQLECTINGIGERAGNAALEELVMALHVRRRYFNPFFGKDSESPTPLTAIRTEEITKTSRLVSNLTGMVVQPNKAIVGANAFAHESGIHQDGVLKNPLTYEIVDAKTVGLAENRISLGKLSGRSAVRARLEELGYDLTREDLNDAFARFKDLADRKREISDRDLEAIVSEQVMQPEARFKLHLVQVSCGTALRPTATVTIADQDGIENTAVALGTGPVDAVCKALRSLTNEKNDLIEFSVKSVTEGIDALGEVTIRLRRDGKIFSGHSADTDVVVAAAQAYINALNRLVYSLKKSSLHPQHDVVKANL

SEQ ID NO: 13312 - DNA, 1086 bp, Pyrococcus horikoshii
  CDS (1)..(1086): transl_table=11
atgatattagactcaacattaagagaaggagaacaaactccaggggttaactactcaccagaacagaggttaagaatagctttagcgttggatgaaattggggtagatttcattgaagtggggcatccagcagtaagcaaggacgtatttataggtataaagctcatagcaagtcaagaccttaatgcaaatttactagcccactctagggccttactagaggatattgattacgttattcaggcagatgttgagtgggtgggaatattcttctgtctatctaatgcctgcttaagaaagaggtttaggatgtcactctctcaggccctcgagaggataagtaaagctatagaatacgcaaaagatcacggactaaaagtccgatttactccggaggatacaactagaacagaatgggagaacttgaggagggcaatagagcttgcaaaggagcttaaggtagataggataagcgtcgcagacactacaggaggtacccatccacttaggttctatactttggttaagaaggttgtgaactttgggatccctgtaaacgtacattgtcacaatgacttaggacttgcacttgcaaatgctataatgggaattgagggaggagcaactgtcgttgatgcgacagtcaacggacttggagagagagctggaatagttgacttagctcagatagtaacggttctttactatcactatggggtcaaaaagtacaggcttgataagctctatgagataagcagaatggtaagtgaaattacgggaatagctcttcaaccaaactatccaatagtgggcgaaaatgccttcacacacaaggctggtcttcacgtttcggccgttctaaaagatccaagattttacgagttcctgcctgcagaggtatttggaagggagagaacgatttacgtggatagatttgcgggaaaggacacgatcaggtactatttgcagaagcttgggataaatgatgaggagtttgttaaggttcttttaaagagagttaaaagctctagagagccgtttacctgggataagtttattgaagaagttaggaggctcaaaacatga

SEQ ID NO: 13313 - protein, 361 aa, Pyrococcus horikoshii
MILDSTLREGEQTPGVNYSPEQRLRIALALDEIGVDFIEVGHPAVSKDVFIGIKLIASQDLNANLLAHSRALLEDIDYVIQADVEWVGIFFCLSNACLRKRFRMSLSQALERISKAIEYAKDHGLKVRFTPEDTTRTEWENLRRAIELAKELKVDRISVADTTGGTHPLRFYTLVKKVVNFGIPVNVHCHNDLGLALANAIMGIEGGATVVDATVNGLGERAGIVDLAQIVTVLYYHYGVKKYRLDKLYEISRMVSEITGIALQPNYPIVGENAFTHKAGLHVSAVLKDPRFYEFLPAEVFGRERTIYVDRFAGKDTIRYYLQKLGINDEEFVKVLLKRVKSSREPFTWDKFIEEVRRLKT

SEQ ID NO: 13314 - DNA, 1572 bp, Salmonella typhimurium
  CDS (1)..(1572): transl_table=11
atgagccagcaagtcattatttttgatacgaccttacgcgacggcgaacaagcgttacaggccagcctgagcgcgaaagagaagctgcagattgccctggcccttgagcgcatgggtgttgatgtcatggaagtaggcttcccggtctcttctccgggtgattttgaatccgtccaaaccatcgcccgcaccattaaaaacagccgcgtttgcgccctggcgcgttgtgtagaaaaagacatcgacgtcgcggcacaggcgctgaaggtcgccgacgcgtttcgcatccatacttttatcgccacctcgccaatgcacatcgccaccaagctgcgcagcacgctggatgaggttatcgaacgcgcggtatacatggttaagcgggcgcgtaattacactgatgacgtagagttctcctgcgaagatgctggccggacgcctgttgacgatctggcgcgcgtggtggaagccgctataaacgccggcgcgagaaccattaatattcccgataccgtgggctataccatgccgtttgagtttgcgggaatcatttccggcctgtatgaacgtgtccccaatatcgacaaagctatcatctccgttcatacccacgacgatttagggatagcagtaggcaactcgctggcggcagtacatgcgggcgcgcgtcaggttgaaggcgcgatgaacggtatcggagaacgtgccggtaactgcgcactggaagaagtgatcatggcgattaaagtgcgcaaagacatcatgaacgtacacaccaacatcaatcaccacgaaatctggcgcaccagccagaccgtcagccagatctgtaacatgccgatcccagccaacaaagcgattgtcggcagcggcgctttcgcccactcttccggcatccaccaggatggcgtcctcaagaaccgcgaaaactatgaaatcatgacgccagagtccatcggtctgaaccagatacagctgaacctgacctcccgctctggccgtgccgccgtgaaacatcgcatggaagagatgggttacaaggacacagactacaacatggaccacctgtacgacgcgttcctgaagctggcggacaaaaaaggccaggtgttcgactatgacctggaagcgctggcgtttattaataaacagcaagaagaaccagagcatttccgtctggattacttcagcgtgcagtccggctccagcgatatcgccaccgcttccgtgaagctggcctgtggtgaagagatcaaggccgaagcggcgaacggcaacggtccggtcgacgccatctatcaggcgattaaccgcatcactggctacgacgttgagttggttaaatacgacctgaacgccaaaggccagggcaaagacgcgctgggtcaggtcgatatcgtcgtgaaccatcatggtcgccgcttccacggcgtcgggctggcgacggatatcgtcgaatcctccgccaaagcgatggtgcacgtactgaacaatatctggcgcgccgccgaagttgaaaaagaattgcaacgcaaagctcaaaataaagagaacaacaaggaaaccgtgtaa

SEQ ID NO: 13315 - protein, 523 aa, Salmonella typhimurium
MSQQVIIFDTTLRDGEQALQASLSAKEKLQIALALERMGVDVMEVGFPVSSPGDFESVQTIARTIKNSRVCALARCVEKDIDVAAQALKVADAFRIHTFIATSPMHIATKLRSTLDEVIERAVYMVKRARNYTDDVEFSCEDAGRTPVDDLARVVEAAINAGARTINIPDTVGYTMPFEFAGIISGLYERVPNIDKAIISVHTHDDLGIAVGNSLAAVHAGARQVEGAMNGIGERAGNCALEEVIMAIKVRKDIMNVHTNINHHEIWRTSQTVSQICNMPIPANKAIVGSGAFAHSSGIHQDGVLKNRENYEIMTPESIGLNQIQLNLTSRSGRAAVKHRMEEMGYKDTDYNMDHLYDAFLKLADKKGQVFDYDLEALAFINKQQEEPEHFRLDYFSVQSGSSDIATASVKLACGEEIKAEAANGNGPVDAIYQAINRITGYDVELVKYDLNAKGQGKDALGQVDIVVNHHGRRFHGVGLATDIVESSAKAMVHVLNNIWRAAEVEKELQRKAQNKENNKETV

SEQ ID NO: 13316 - DNA, 1698 bp, Glycine max
  CDS (1)..(1698)
atgccaaccaaaacctccactccaagttctcaatccccaaaactctctcatctccgccctcaatacattcccaaccacatccccgactcctcctacgtccgcatcttggacaccaccctccgcgacggcgaacaatccccgggagccaccatgacagcaaaggagaagctcgacatcgcacggcagctggtgaagctgggcgtggacatcatccagcccggcttcccttctgcgtcgaacagcgacttcatggccgtcaaaatgatagcacaagaggttggcaatgctgttgatgatgatggttatgtgcctgtcattgctggcttctgtcggtgcgttgagaaggacatttctactgcatgggaggctgtgaagtatgctaagaggccacggctttgtacttccatagctacgagccctattcacatggagcacaagctgagaaagagtaaagatcaggtgattcagattgccagggatatggtcaagtttgcacggagtttgggttgcaatgatattcagttcggtgctgaagatgctactagatcagatagagaatttctctatgaaattcttggagtagttattgaagccggggcaacaacagtgaacatagccgacactgtaggtatagtaatgccattggagttaggaaaattaattgttgatataaaagacaataccccaggaattgcgaatgttattatttcgactcattgccataatgatcttgggcttgctacggctaacaccatcgagggtgctcgtacaggtgcacggcaattagaagtaaccattaatgggattggtgaaagggctggaaatgcgtcgttagaagaggttgtgatggccttggcatccaagggagatcatgccttaaatggtctatatacaagaatcaatacaagacacatattagagacaagcaagatggtcgaagaatactccggtatgcatttacaacctcacaagcctcttgttggagctaatgcatttgtccatgcaagtggcattcatcaggatggaatgcttaaacataaaggtacatatgaaacaatatctcctgaggaaattggacataaaagaaccaccagaattggtattgtgctagggaagcttagtggaagccaagctttgagaaagagacttgaagagcttggttatgatcttaaggaagatgaagttgatagtgtgttttggcaattcaaagcaatggctgagaaaaaaaaggttgtaactgatgttgacctcaaagcattagtatcatataaagcttttcatgcagaatctatctggaagcttggtgatttacaagtgacttgtggaactattggtctttctacagcaacagtaaaacttgttaatattgatggtagcacacatgttgcttgttctattggtataggagcagtggattcaacttacaaggccattaatctcattgtgaaggaacctacaaaacttttggattactcattgaattcagttacagaaggcattggtgtaaatgtcacagcacgtgttgtaatttgtagggagaacaatcatacatctacttatgctttcactgaagatgctaattatccaacatttagtgggattgcagcagaaatggatgttgttgtttccactgttaaggcttatctggttgcactaaacaagttgttacgatggaaggaatcatttagatgtgcttaa

SEQ ID NO: 13317 - protein, 565 aa, Glycine max
MPTKTSTPSSQSPKLSHLRPQYIPNHIPDSSYVRILDTTLRDGEQSPGATMTAKEKLDIARQLVKLGVDIIQPGFPSASNSDFMAVKMIAQEVGNAVDDDGYVPVIAGFCRCVEKDISTAWEAVKYAKRPRLCTSIATSPIHMEHKLRKSKDQVIQIARDMVKFARSLGCNDIQFGAEDATRSDREFLYEILGVVIEAGATTVNIADTVGIVMPLELGKLIVDIKDNTPGIANVIISTHCHNDLGLATANTIEGARTGARQLEVTINGIGERAGNASLEEVVMALASKGDHALNGLYTRINTRHILETSKMVEEYSGMHLQPHKPLVGANAFVHASGIHQDGMLKHKGTYETISPEEIGHKRTTRIGIVLGKLSGSQALRKRLEELGYDLKEDEVDSVFWQFKAMAEKKKVVTDVDLKALVSYKAFHAESIWKLGDLQVTCGTIGLSTATVKLVNIDGSTHVACSIGIGAVDSTYKAINLIVKEPTKLLDYSLNSVTEGIGVNVTARVVICRENNHTSTYAFTEDANYPTFSGIAAEMDVVVSTVKAYLVALNKLLRWKESFRCA

SEQ ID NO: 13318 - DNA, 1608 bp, Synechococcus elongatus
  CDS (1)..(1608): transl_table=11
atgcgcattaaatatcctccccagaccgttgatcgggtgttaattttcgataccacattgcgggacggtgagcagtctccaggtgcctcactgaatgtggatgaaaaactgacgatcgcccgtcaactggctcgactgggggtggatattattgaggcgggttttccctttgccagccccggcgattttgaagccgtacagcggattgccgaaactgtcggcaccgaaaccgggcctgtcatttgtggtttggctcgtgccacccgccaagatattgaagccgctgccaaagccctcaaacccgcctactatcctcgcattcacacgtttattgccacctccgatattcacctagagtacaagctcaggaaaacccgcgctgaagtactggaaattgcccaagaaatggtggcctatgccaagtcttttgtggatgatgtcgagttttccccagaggatgctgggcgatcagatcctgagtttctctatgaagtcctagagcgggtcattgacgccggtgcaacgacggtcaacattcctgacactgtggggtacaccacccccgccgaatttggtgccctgatcaaaggcattaaggaaaatgtgcccaatatcgatcgcgccgtcatctcggttcatggtcacaatgacttgggtttggcagttgctaacttcctggaagcggtgaaaaatggcgcccggcaactggagtgtacgattaatggcattggtgagcgtgcgggaaatgccgcccttgaggaattggtgatggcactctatgtgcggcggcagtacttcaatcccttcctaggtcgcccacccgaatcagaggcacccctaacaaatatcaacacccgtgaaatttataaaacctcccgcttggtctcaaatctaacggggatgctgattcaacccaacaaggcgatcgtgggtgccaatgcctttgcccatcaatcggggattcaccaagatggcgtcctcaagcacaagcaaacctatgaaatcatggatgcccaactcattggccttgccgataaccaaattgtcttgggcaagctctctggccgtaatgcctttgccactcgcctgcgggaattgggctttgaactcagtgaaacggaactcaataaggcctttttgcgctttaaggatctcgccgacaagaaaaaagaaatcactgactgggatctggaggcgatcgccaaggatgaaacccaagggattgatctacagggctatcaactggaatttgtccaagtttcctgtggtgatcatgcccgcccaaccgcaacggttaccgtacgtacccccagtggggaagagttgaccgatgccgccatcggcactggccctgtggacgcagtctatcgcgccattaaccgtgtggtgcaaattcccaatcgcctcattgaatactcagtacaatcggttaccgccggcattgatgctatcggtgaggtgacgattcggctacagcaccaggatcgcatctactctggccatgccgccaacacggatattattgtcgcctctgcccaagcctatatgaatgccctgaaccgcctctaccgcggtcttgaacaacgggcgctacatccccaagcgtag

SEQ ID NO: 13319 - protein, 535 aa, Synechococcus elongatus
MRIKYPPQTVDRVLIFDTTLRDGEQSPGASLNVDEKLTIARQLARLGVDIIEAGFPFASPGDFEAVQRIAETVGTETGPVICGLARATRQDIEAAAKALKPAYYPRIHTFIATSDIHLEYKLRKTRAEVLEIAQEMVAYAKSFVDDVEFSPEDAGRSDPEFLYEVLERVIDAGATTVNIPDTVGYTTPAEFGALIKGIKENVPNIDRAVISVHGHNDLGLAVANFLEAVKNGARQLECTINGIGERAGNAALEELVMALYVRRQYFNPFLGRPPESEAPLTNINTREIYKTSRLVSNLTGMLIQPNKAIVGANAFAHQSGIHQDGVLKHKQTYEIMDAQLIGLADNQIVLGKLSGRNAFATRLRELGFELSETELNKAFLRFKDLADKKKEITDWDLEAIAKDETQGIDLQGYQLEFVQVSCGDHARPTATVTVRTPSGEELTDAAIGTGPVDAVYRAINRVVQIPNRLIEYSVQSVTAGIDAIGEVTIRLQHQDRIYSGHAANTDIIVASAQAYMNALNRLYRGLEQRALHPQA

SEQ ID NO: 13320 - DNA, 1602 bp, Synechocystis sp
  CDS (1)..(1602): transl_table=11
atgaatagtcctgttgatcgtattttgattttcgacaccacgcttcgcgatggggaacagtcccccggagccaccctgaccgtggaagaaaaactatcgatcgccagggctctagcccgtttaggggtggatattatcgaagcgggttttccctttgctagccccggggattttgaggcggtgcagaaaatcgcccaaacggtgggtacggaaaatgggccagtaatttgcggcttagctcgggccacccaaaaagatatcaaagcagcggcggaagcgttaaaaccagcggctaaacaccgtattcacaccttcttagctacgtcggacattcacctggagcataagttaaagaaaaccagggcggaggtgttggcgatcgtgccggaaatggtggcctatgccaaatccttagtgaatgacattgagttttccccggaggatgccgggcgcagtgatcccgaatttctttaccaagtgttagaagcggcgatctccgccggagccaccacgatcaacattcccgatacggtgggttacacaaccccggcagaatatggggctttaatcaaaggtattgccgataacgtgcctaacattgaccaggcgattatttccgtccatggccacaacgatttgggcttagcggtggccaattttctggaagcggtgaaaaatggggctcgacaactggaatgtaccatcaatggcattggcgaacgggctggtaatgcggccttggaagaattggtcatggctttacatgtgcgccgcagttacttcaatccctttttaggtcgccccgccgattccaccgcacctctgaccaacattgataccaaacatatttacgccacttcccgcttggtgtcggagttaacggggatgatggtgcaacccaataaggccattgttggcgctaatgcctttgcccatgaatccggcattcaccaggatggggtgctaaaaaataagctcacctacgaaatcatggatgcggaatccatcggtttaaccaataaccagattgtgttgggtaaactctccggccgcaatgcctttggtactcgcttaaaggaattgggttttgacctgagcgatacggaattaaataacgcctttattcgctttaaggaagtggcggataagcgtaaagaaattaccgattgggatttagaggcaatcgttaacgatgaaattcgccaaccccccgaactcttccgtttggaacgggtacaggtttcctgtggtgagccttcggtgcccaccgctaccctaaccattcgtaccccggctggcccagaagaaaccgctgtggcgatcggtacgggcccggtggatgcagtgtataaagctattaatcagattgtgcaattgcccaatgagctgctggaatattccgtcacctccgtcaccgaaggcattgatgcgttgggtaaagtgagtgtgcgtctgcgccataacggggtgatctacaccggctatgcggccaacacggatatcattgtcgcctcggcccgggcctatctgggggcattaaaccgtctttatgctgccctggagaaatcccgggagcatccccccgtcgtcgcttccctttaa

SEQ ID NO: 13321 - protein, 533 aa, Synechocystis sp
MNSPVDRILIFDTTLRDGEQSPGATLTVEEKLSIARALARLGVDIIEAGFPFASPGDFEAVQKIAQTVGTENGPVICGLARATQKDIKAAAEALKPAAKHRIHTFLATSDIHLEHKLKKTRAEVLAIVPEMVAYAKSLVNDIEFSPEDAGRSDPEFLYQVLEAAISAGATTINIPDTVGYTTPAEYGALIKGIADNVPNIDQAIISVHGHNDLGLAVANFLEAVKNGARQLECTINGIGERAGNAALEELVMALHVRRSYFNPFLGRPADSTAPLTNIDTKHIYATSRLVSELTGMMVQPNKAIVGANAFAHESGIHQDGVLKNKLTYEIMDAESIGLTNNQIVLGKLSGRNAFGTRLKELGFDLSDTELNNAFIRFKEVADKRKEITDWDLEAIVNDEIRQPPELFRLERVQVSCGEPSVPTATLTIRTPAGPEETAVAIGTGPVDAVYKAINQIVQLPNELLEYSVTSVTEGIDALGKVSVRLRHNGVIYTGYAANTDIIVASARAYLGALNRLYAALEKSREHPPVVASL

SEQ ID NO: 13322 - DNA, 1551 bp, Vibrio cholerae
  CDS (1)..(1551): transl_table=11
atgaacaatcaggtgattatattcgataccacattacgcgatggagagcaggctttgtctgccagcctgacggtaaaagagaaactgcaaatcgcctacgcactggagcgcttaggggtagatattatcgaagcaggtttccctgtttcctctccgggcgattttgaatcggtacaaaccatcgctaaaaacatcaaaaatagccgtgtttgtgccctttcgcgagccgttgcgaaagacattgatgccgcggcagaagccttgaaagtcgccgaagcctttcgtattcacacttttatctccacatccactatccatgtacaagacaaattgcgccgcagctatgacgatgtcgtcgcaatggcagtcaaagcggtgaaacatgcgcgtcaatatacggatgatgtggagttctcttgtgaagatgctggccgcacacctatcgataacttgtgccgtatggtcgaagccgcgatcaatgccggtgcgcgtaccatcaatattccagatacggtcggctacacagtgccgagcgaatttggcggcattattcaaacgctgtttaaccgagtgcccaatatcgataaagcgatcatctccgtgcattgtcatgacgacttaggcatgtcggtagccaactcgattgccgctattcaagcgggagctcgtcaagtagagggaaccatcaacggtattggcgaacgtgcgggtaactgcgcattggaagagatcgcgatgatcatcaaaacccgtcaagagttgctcggggtaaccacaggcattaaacacgacgagatcagccgtaccagcaagcttgtcagccagctatgcaacatgccgattcaaagcaacaaagcgattgtcggagccaatgcgtttagccactcttcgggcattcaccaagatggcatgctcaaaaacaaaaatacctacgaaatcatgacccccgaatcgataggcctcaaaaaccaagcactgaacctcactagtcgtagtgggcgtgccgcagtgaaaagccatatggattcaatgggctacaacgaaaatgaatacaatttggatgccttgtatgaagacttcttgaagctggcagatcgcaaaggccaagtgtttgattacgatttagaggccttgatgcatttctctaatttgcgtgaagaagatgacttctacaaactcaattacttgagcgtgcaatcgggtagcgtgatggccaccaccagtattaagttgctgtgtggcggtgaagaaaaatgcgaagccgctgttggtaatggtccagtcgatgcgttatatcagtgtatctatcgcatcacagggtatgagattgtactcgataaattcgatctcaccgccaaaggcgaaggtgaagatggtcttggtcaagcggatatcatcgccaactacaaaggacgtaaatatcacggtaccggcgtctcaaccgacatcgttgaagcttccggtcaagccttgttgcatgttatcaatagcattcatcgcgcggatcaaatcgcccagattaaacagaaaaaaagcgtcgctacggtttaa

SEQ ID NO: 13323 - protein, 516 aa, Vibrio cholerae
MNNQVIIFDTTLRDGEQALSASLTVKEKLQIAYALERLGVDIIEAGFPVSSPGDFESVQTIAKNIKNSRVCALSRAVAKDIDAAAEALKVAEAFRIHTFISTSTIHVQDKLRRSYDDVVAMAVKAVKHARQYTDDVEFSCEDAGRTPIDNLCRMVEAAINAGARTINIPDTVGYTVPSEFGGIIQTLFNRVPNIDKAIISVHCHDDLGMSVANSIAAIQAGARQVEGTINGIGERAGNCALEEIAMIIKTRQELLGVTTGIKHDEISRTSKLVSQLCNMPIQSNKAIVGANAFSHSSGIHQDGMLKNKNTYEIMTPESIGLKNQALNLTSRSGRAAVKSHMDSMGYNENEYNLDALYEDFLKLADRKGQVFDYDLEALMHFSNLREEDDFYKLNYLSVQSGSVMATTSIKLLCGGEEKCEAAVGNGPVDALYQCIYRITGYEIVLDKFDLTAKGEGEDGLGQADIIANYKGRKYHGTGVSTDIVEASGQALLHVINSIHRADQIAQIKQKKSVATV

SEQ ID NO: 13324 - DNA, 1560 bp, Wolinella succinogenes
  CDS (1)..(1560): transl_table=11
atgtccgctgaaatgattaaaatatttgacactaccctaagagatggggagcagagccccggagcttcgatgaacaccgaggagaagattcgaatcgccaagcagttggagcgcctaggcgtggatgtgattgaagcaggttttgctgcggcaagccctggggattttgatgcaatctccaaaatcgcctcagccgtgagcgaaagcaccatctgctcgttggctagagccgttgaaaaggatatcaaagccgccgctgattctttggcgcctgctaagcttaagcgaatccataccttcatcgcgacaagtcccattcatatggaatataagcttcgtatgactccaagcgaagtgatcaaaagggcagtggaggcgattgcctatgccaaaagtttcatggaggatgtagagtttagctgcgaagatgcagggcgaagtgatgtaggatttttgaaggagattctagcggcagtcattgaggcaggagcaggaacgctcaatattcccgatacagtagggtatcgacttcctcatgagatgggggctatcatcaaagagttgcatgaatttgtggggaatcgagcgattctctccgtgcattgccacaatgacttgggtctagcggtggccaactctctctattgcattcaaagtggagctaggcaagtggagtgcacggtcaatggtttgggtgagcgagcaggaaatgcggcgctagaggagatcgtcatggcgattaagactcgcagagatatctttggggggcttgatacaagaatcaacaccaaagagatatacgcaagcagtcaattggtcgccaatatcacgggaatcagaccccagcccaacaaggccattgtgggcaaaaatgcttttgcacacgagagcggaatccatcaagatggcgtgctcaagcacaaagagacctatgagatcatgcacgctagcgatattgggctaggcgagcaagagagtattgtgcttgggaaacactcaggacgtcacgcctttaaagacaagatcaaggcgcttggttttgaggtgagctatgaagaacttaacgccgcttttgatcggtttaaggcgctctgcgatcaaaaaaaagagatttatgatgaggacattcgagcgattcttgcggaagagacctcgcatattcccaaggtttatgagcttgtgggaatccagcttagcgattgctcgatgggccgaccctatgcagccatcactcttaaaaaagaagggagtgaagagattgtggacgccgcgattggaaatggtagtgtggatgccctctttaagaccatcgatcgaatcagtcagatcaaaggagagctcaaggattacaaagtggaagcggtcacgcaaggaaaagatgccttggcgaaggtggtggtgaaggtcgagtttgaggagaataaacctgctattattggtcatggtcttcatattgacacgatgctagcgacagcgaaggcctacgtgggcgcgctcaatagctacttgtcgatgagggagcttatgggtaagaagaagtgcgaagaggagagaatctaa

SEQ ID NO: 13325 - protein, 519 aa, Wolinella succinogenes
MSAEMIKIFDTTLRDGEQSPGASMNTEEKIRIAKQLERLGVDVIEAGFAAASPGDFDAISKIASAVSESTICSLARAVEKDIKAAADSLAPAKLKRIHTFIATSPIHMEYKLRMTPSEVIKRAVEAIAYAKSFMEDVEFSCEDAGRSDVGFLKEILAAVIEAGAGTLNIPDTVGYRLPHEMGAIIKELHEFVGNRAILSVHCHNDLGLAVANSLYCIQSGARQVECTVNGLGERAGNAALEEIVMAIKTRRDIFGGLDTRINTKEIYASSQLVANITGIRPQPNKAIVGKNAFAHESGIHQDGVLKHKETYEIMHASDIGLGEQESIVLGKHSGRHAFKDKIKALGFEVSYEELNAAFDRFKALCDQKKEIYDEDIRAILAEETSHIPKVYELVGIQLSDCSMGRPYAAITLKKEGSEEIVDAAIGNGSVDALFKTIDRISQIKGELKDYKVEAVTQGKDALAKVVVKVEFEENKPAIIGHGLHIDTMLATAKAYVGALNSYLSMRELMGKKKCEEERI

SEQ ID NO: 13326 - DNA, 1605 bp, Streptomyces coelicolor
  CDS (1)..(1605): transl_table=11
atgaccgcaaccagcgaactcgacgattcgttccacgtcttcgacaccaccctgcgcgacggcgcgcagcgcgagggcatcaacctcacggtcgcggacaagctggccatcgcacggcacctggacgacttcggggtgggcttcatcgagggcggctggcccggcgccaacccgcgggacaccgagttcttcgcccgcgcccggcaggagatcgacttcaagcacgcccagctggtcgccttcggctccacccgccgcgcgggcgcgaacgccgccgaggaccaccaggtcaaggcgctgctcgactccggcgcccaggtgatcaccctggtcgccaagtcgcacgaccggcacgtcgaactggccctgcgcaccacgctggacgagaacctcgcgatggtggccgacacggtctcccacctgaaggcgcagggccgccgggtcttcgtcgactgcgagcacttcttcgacggctaccgcgccaaccccgagtacgcgaagtcggtcgtgcgcaccgcctccgaggccggcgccgacgtcgtcgtcctgtgcgacaccaacggcggcatgctcccggcgcagatccaggcggtggtcgccacggtgctggccgacaccggcgcccggctcggcatccacgcccaggacgacaccggctgcgccgtcgccaacaccctcgccgccgtcgacgcgggcgcgacccacgtccagtgcacggccaacggctacggcgagcgggtcggcaacgccaacctgttccccgtcgtggccgcgctggagctgaagtacggcaagcaggtgctgcccgagggccggctgcgcgagatgacccgcatctcccacgccatcgccgaggtcgtcaacctcacgccctccacccaccagccctacgtgggcgtctccgccttcgcccacaaggccggcctgcacgcctccgcgatcaaggtcgacccggacctctaccagcacatcgaccccgaactggtcggcaacaccatgcggatgctggtctccgacatggcgggacgtgcctccatcgagctgaagggcaaggagctcgggatcgacctcggcggcgaccgcgagctggtcggccgggtcgtggagcgggtcaaggagcgcgagctggccggctacacctacgaggccgccgacgcgagcttcgagctgctgctgcgcgccgaggccgagggcaggccgctgaagtacttcgaggtcgagtcctggcgcgcgatcaccgaggaccgccccgacggcagccacgccaacgaggccacggtcaagctctgggccaagggcgagcgcatcgtcgccaccgccgagggcaacggcccggtcaacgccctggaccggtcgctgcgcgtggccctggagaagatctaccccgagctggccaagctcgacctggtcgactacaaggtccgcatcctggagggcgtgcacggcacccagtccaccaccagggtcctcatctccacgtccgacggcacgggggagtgggccacggtgggtgtcgcggagaacgtcatcgccgcctcctggcaggcgctggaggacgcgtacacgtacgggctgctgcgggcgggggtcgcgcccgccgagtga

SEQ ID NO: 13327 - protein, 534 aa, Streptomyces coelicolor
MTATSELDDSFHVFDTTLRDGAQREGINLTVADKLAIARHLDDFGVGFIEGGWPGANPRDTEFFARARQEIDFKHAQLVAFGSTRRAGANAAEDHQVKALLDSGAQVITLVAKSHDRHVELALRTTLDENLAMVADTVSHLKAQGRRVFVDCEHFFDGYRANPEYAKSVVRTASEAGADVVVLCDTNGGMLPAQIQAVVATVLADTGARLGIHAQDDTGCAVANTLAAVDAGATHVQCTANGYGERVGNANLFPVVAALELKYGKQVLPEGRLREMTRISHAIAEVVNLTPSTHQPYVGVSAFAHKAGLHASAIKVDPDLYQHIDPELVGNTMRMLVSDMAGRASIELKGKELGIDLGGDRELVGRVVERVKERELAGYTYEAADASFELLLRAEAEGRPLKYFEVESWRAITEDRPDGSHANEATVKLWAKGERIVATAEGNGPVNALDRSLRVALEKIYPELAKLDLVDYKVRILEGVHGTQSTTRVLISTSDGTGEWATVGVAENVIAASWQALEDAYTYGLLRAGVAPAE

SEQ ID NO: 13328 - DNA, 1131 bp, Anabaena sp
  CDS (1)..(1131): transl_table=11
atgaataaagttctaattaatgacactacactacgcgatggagagcaagcggctggtgttgcttttagcgtagaggaaaaaatagcgatcgccaaatttctcgatgcaattggtgtgcatgaaatcgaagtgggaatacccgcaatgggtaaagcagaacaagaggcgatcgctaatattgtgaagttagatttgtcagcaaatttacttggttggaaccgcgccgtgattgctgatattcaggcttccatcgcttgtggtttacagcgagtacatatctctattcccgtttctgcaatccaaatcgccgtcaaatttcacggacaatggcaagtagttttacaaaaactccacgatagtattagctttgctgttgaccaaggtttatttgtctccatcggtggtgaagactcatcaagagccgaagaaagcttcctccttgatgtagtgctagctgctcaagaatggggtgcgtcacgatttcgcttttgcgacacagtaggtattcttgacccgttcactacccacgccaaggtaaaacaattggtggcatctttgacaatacctgtagaaatgcacacccacaatgattttggtttggcaacagccaacgctctggcaggtaccaaagcaggcgctttatctgtaaatactactgtgaatggattaggtgaaagagccgggaatgctgctttagaagaggtggttatggctctcaagcacttgtatcaccatgacttaggaattgatacacggcgtttactggaaatatctcaactcgtagcatcagcatcaggtcatcctgtaccaccttggaaagcaattgttggtgaaaatacttttgctcacgaatccgggattcacgctcatggtgtactgcaaaatcctcaaacctacgagccatttgcaccagaagaagtagggagagagcgccgtttagttgtgggtaaacattctggtagacatttactctctagtattttgcagcaacacgacattattctcaatcacgaagaaacccaatttgtcttagatgcagttagacaagaatcagtagaaaaaaaacgcagcctcacagatcaagaacttttgcatttagtgcagacaaaacaacattttcgtgcttgttga

SEQ ID NO: 13329 - protein, 376 aa, Anabaena sp
MNKVLINDTTLRDGEQAAGVAFSVEEKIAIAKFLDAIGVHEIEVGIPAMGKAEQEAIANIVKLDLSANLLGWNRAVIADIQASIACGLQRVHISIPVSAIQIAVKFHGQWQVVLQKLHDSISFAVDQGLFVSIGGEDSSRAEESFLLDVVLAAQEWGASRFRFCDTVGILDPFTTHAKVKQLVASLTIPVEMHTHNDFGLATANALAGTKAGALSVNTTVNGLGERAGNAALEEVVMALKHLYHHDLGIDTRRLLEISQLVASASGHPVPPWKAIVGENTFAHESGIHAHGVLQNPQTYEPFAPEEVGRERRLVVGKHSGRHLLSSILQQHDIILNHEETQFVLDAVRQESVEKKRSLTDQELLHLVQTKQHFRAC

SEQ ID NO: 13330 - DNA, 1149 bp, Azotobacter chroococcum mcd 1
  CDS (1)..(1149): transl_table=11
atggctagcgtgatcatcgacgacaccaccctgcgtgacggcgagcagagtgccggggtcgccttcaatgccgacgagaagatcgccatccggcgtgcgctcgccgagctgggcgtaccggagctggagatcggcattcccagcatgggcgaggaggagcgcgaggtgatgcgcgccattgccggcctcggcctgtcgtcgcgcctgctggcctggtgccggctgtgcgacttcgacctctcggccgcgcgctccaccggggtgaccatggtcgacctgtcactgccgatctccgacctgatgctgcgccacaagctcaatcgtgatcgcgactgggcactgggcgaggtcgcccggctggtcagcgaggcgcgcatggccgggcttgaggtgtgcctgggctgcgaggacgcctcgcgggcggatcaggacttcatcgtgcgggtgggggcggtggcgcaggccgcgcgcccgccgcctgcgttcgccgataccgtcggggtgatggagccgttcggcatgctcgaccgcttccgtttcctccgccagcgcctggacgtggagctggaggtgcacgcccacgacgacttcgggctggccaccgccaacaccctggcggcggtgatgggcggggcgacccacatcaataccacggtcaacgggctcggcgagcgcgccgccaacgccgcgctggaagagtgcgtgctggcgctcaagaacctccacggcatcgacaccggcatcgacacccgcggcatcccggccatctcggcgctggtcgagcgggcctcggggcgtcagtggcctggcagaagagcgtggttggcgccggtgttcacccacgaggccggcatccacgtcgacgggctgctcaagcaccggcgcaactacgagggactgaatcccgacgagctcggccgcagccacagcctggtgctgggcaagcattccggcgcgcacatggtgcgcaacagctaccgcgagctgggcatcgagctggccgactggcagagccaggcactgctcggccgcatccgcgccttctccacccgcaccaagcgcagcccgcaggctgccgagctggaggacttctatcgccagctgtgcgagcaggggactgccgaactggcggcaggaggaatggcatga

SEQ ID NO: 13331 - protein, 382 aa, Azotobacter chroococcum mcd 1
MASVIIDDTTLRDGEQSAGVAFNADEKIAIRRALAELGVPELEIGIPSMGEEEREVMRAIAGLGLSSRLLAWCRLCDFDLSAARSTGVTMVDLSLPISDLMLRHKLNRDRDWALGEVARLVSEARMAGLEVCLGCEDASRADQDFIVRVGAVAQAARPPPAFADTVGVMEPFGMLDRFRFLRQRLDVELEVHAHDDFGLATANTLAAVMGGATHINTTVNGLGERAANAALEECVLALKNLHGIDTGIDTRGIPAISALVERASGRQWPGRRAWLAPVFTHEAGIHVDGLLKHRRNYEGLNPDELGRSHSLVLGKHSGAHMVRNSYRELGIELADWQSQALLGRIRAFSTRTKRSPQAAELEDFYRQLCEQGTAELAAGGMA

SEQ ID NO: 13332 - DNA, 1158 bp, Azotobacter vinelandii
  CDS (1)..(1158): transl_table=11
atggctagcgtgatcatcgacgacactaccctgcgtgacggtgaacagagtgccggggtcgccttcaatgccgacgagaagatcgctatcgcccgcgcgctcgccgaactgggcgtgccggagttggagatcggcattcccagcatgggcgaggaagagcgcgaggtgatgcacgccatcgccggtctcggcctgtcgtctcgcctgctggcctggtgccggctatgcgacgtcgatctcgcggcggcgcgctccaccggggtgaccatggtcgacctttcgctgccggtctccgacctgatgctgcaccacaagctcaatcgcgatcgcgactgggccttgcgcgaagtggccaggctggtcggcgaagcgcgcatggccgggctcgaggtgtgcctgggctgcgaggacgcctcgcgggcggatctggagttcgtcgtgcaggtgggcgaagtggcgcaggccgccggcgcccgtcggctgcgcttcgccgacaccgtcggggtcatggagcccttcggcatgctcgaccgcttccgtttcctcagccggcgcctggacatggagctggaagtgcacgcccacgatgatttcgggctggccacggccaacaccctggccgcggtgatgggcggggcgactcatatcaacaccacggtcaacgggctcggcgagcgtgccggcaacgccgcgctggaagagtgcgtgctggcgctcaagaacctccacggtatcgacaccggtatcgatacccgcggcatcccggccatctccgcgctggtcgagcgggcctcggggcgccaggtggcctggcagaagagcgtggtcggcgccggggtgttcactcacgaggccggtatccacgtcgacggactgctcaagcatcggcgcaactacgaggggctgaatcccgacgaactcggtcgcagccacagtctggtgctgggcaagcattccggggcgcacatggtgcgcaacacgtaccgcgatctgggtatcgagctggcggactggcagagccaagcgctgctcggccgcatccgtgccttctccaccaggaccaagcgccgcagcccgcagcctgccgagctgcaggatttctatcggcagttgtgcgagcaaggcaatcccgaactggccgcaggaggaatggcatga

SEQ ID NO: 13333 - protein, 385 aa, Azotobacter vinelandii
MASVIIDDTTLRDGEQSAGVAFNADEKIAIARALAELGVPELEIGIPSMGEEEREVMHAIAGLGLSSRLLAWCRLCDVDLAAARSTGVTMVDLSLPVSDLMLHHKLNRDRDWALREVARLVGEARMAGLEVCLGCEDASRADLEFVVQVGEVAQAAGARRLRFADTVGVMEPFGMLDRFRFLSRRLDMELEVHAHDDFGLATANTLAAVMGGATHINTTVNGLGERAGNAALEECVLALKNLHGIDTGIDTRGIPAISALVERASGRQVAWQKSVVGAGVFTHEAGIHVDGLLKHRRNYEGLNPDELGRSHSLVLGKHSGAHMVRNTYRDLGIELADWQSQALLGRIRAFSTRTKRRSPQPAELQDFYRQLCEQGNPELAAGGMA

SEQ ID NO: 13334 - DNA, 1203 bp, Enterobacter agglomerans
  CDS (1)..(1203): transl_table=11
atggcggcttcagaatcggaacggactggcggcggtaacaggcccatggcggtcataatcaacgacaccactttgcgtgatggcgaacaaagccccggcgtggcatttcgcgccagtgaaaaactggaaattgcccaggcgctggtgaatgccggtgtccgtgagctggaagcggggacaccggcgctcggcgaggaagagtgcgtgcggctggcgattttgcgcagacaactgccggacacggtgatgatgtcgtggtgccggatgaattcagcagaaattcacgattctgcgcgggtgggcatggactgggtagatatctcggtaccggcgtcagatttactgcgcgagcagaaactacatcggccatggcctgcggtgattgcctcacttaaaccgctggtgcagcttgcacaccgtctcggtatgcgggtgtgtatgggctgtgaggatgcctcgcgctccgccgatgaaactttgcacatgctggcggaagtggcggcggatctgggcatagaacggatgcggtttgccgatacgctgggcattctcgatcccttcagtacctttacccgtatttcggcattacgccagcactggcacggcgggttggaaatacatgcgcataacgatctgggtatggcaactgccaacacgctggcggcggtcagggcgggtgcgacgcatgtgaacactacggtgctcgggcttggcgaacgggcggggaatgcggcgctcgaaagcgtgaccttgtcactcgaccgttgcctgcatctcgactgtggtatcgatttcaccgaactgccggcgttgtgccgccttgtggctgctgcggcggggagaaccattgacgtgcagcatccgctggtcggcgggcaggttttcacccacgaatccggcttgcatgtggcggcactgctgcgcgacccgcgcagttatcagggcatcgatccctctctggtcgggcgggaatttaatctggtgcttggcaaacactcaggcaggcaggcggtgagcggcatctgcgcgcgtctggggtatatcctcagcgagacacaaaccctgttgatgttgcaggaggtgaaacgctttgccgaacatttcaaacgtaatccgggtgaggatgaagtgatcgccatgtgccagatgcggatggacgatcagatcccgttcgaaggacaacttcaggctcagggaggctga

SEQ ID NO: 13335 - protein, 400 aa, Enterobacter agglomerans
MAASESERTGGGNRPMAVIINDTTLRDGEQSPGVAFRASEKLEIAQALVNAGVRELEAGTPALGEEECVRLAILRRQLPDTVMMSWCRMNSAEIHDSARVGMDWVDISVPASDLLREQKLHRPWPAVIASLKPLVQLAHRLGMRVCMGCEDASRSADETLHMLAEVAADLGIERMRFADTLGILDPFSTFTRISALRQHWHGGLEIHAHNDLGMATANTLAAVRAGATHVNTTVLGLGERAGNAALESVTLSLDRCLHLDCGIDFTELPALCRLVAAAAGRTIDVQHPLVGGQVFTHESGLHVAALLRDPRSYQGIDPSLVGREFNLVLGKHSGRQAVSGICARLGYILSETQTLLMLQEVKRFAEHFKRNPGEDEVIAMCQMRMDDQIPFEGQLQAQGG

SEQ ID NO: 13336 - DNA, 1056 bp, Frankia alni
  CDS (1)..(1056): transl_table=11
gtgatgacagtgcgagacccccgttttcccagctcatctaccacggcgatacagtcggacgcggcgatcaaattctgcgacaccacgctccgcgacggcgagcaggcgcctggcgtcgcattcaccgcggccgagaaactcgccatcgccgctgccctggacgccatcggggtacaccagatcgaggccggaatcccggcgatgggtgtcaccgagcgggacgtgctgcgggagatcctcgcaaccgatccgcacgcggacatcgtgggctggtgccgggccgaccaccgcgacgtcgaggccgcggcaagctgcggcctcgtcaccgcgcacctgaccatcccggtctccgacttgcacctgaagagcaagttggggcgggatcgggcctgggcgcggctgcgggtccgcgactgtgtcgcggatgcgacggaccgcgggatgcgggtgagcgtcggtttcgaggacgcctcccgcgccgacgacgcgttcgtcacggacctggcgggcgaactgcgggaactgggcgtcaccaggctgcgctgggccgacaccgtcggcctgctcgacccggtgagcgcgcacgatcggctggggcgactggtcagggcggtcccggggccgtgggagatccacgcccacgacgacttcggcctggcgacggccaacaccatcgccgccgtccaggcggggttcacctgggtcagcaccaccgtgctcggcctgggcgaacgcgccgggaacgccccgatcgaagaggtcgcgatggcgcttcggcacctgctgaagctgcccgtcgacctggacacgacgtcgtttcgcagcctcgcccggctggtgtcgcgggccgcacgccggcccctgccggcgggcaaggcggtggtcggcgagtcggtgttcgcgcatgagtcgggcatccatgtgcacggcatcctgcgccacccggcgacgtacgagccgttcgaccccgccgaggtcggcgggcgccggcggctggcgatcggcaagcacagcgggcgggcctcggtgcgctacgcgctcgagcagtacggctga

SEQ ID NO: 13337 - protein, 351 aa, Frankia alni
MMTVRDPRFPSSSTTAIQSDAAIKFCDTTLRDGEQAPGVAFTAAEKLAIAAALDAIGVHQIEAGIPAMGVTERDVLREILATDPHADIVGWCRADHRDVEAAASCGLVTAHLTIPVSDLHLKSKLGRDRAWARLRVRDCVADATDRGMRVSVGFEDASRADDAFVTDLAGELRELGVTRLRWADTVGLLDPVSAHDRLGRLVRAVPGPWEIHAHDDFGLATANTIAAVQAGFTWVSTTVLGLGERAGNAPIEEVAMALRHLLKLPVDLDTTSFRSLARLVSRAARRPLPAGKAVVGESVFAHESGIHVHGILRHPATYEPFDPAEVGGRRRLAIGKHSGRASVRYALEQYG

SEQ ID NO: 13338 - DNA, 1146 bp, Klebsiella pneumoniae
  CDS (1)..(1146): transl_table=11
atggaacgcgtgctgattaacgataccaccctgcgcgacggcgagcagagccccggcgtcgcctttcgcaccagcgaaaaggtcgccattgccgaggcgctttacgccgcaggaataacggcgatggaggtcggcaccccggcgatgggcgacgaggagatcgcgcggatccagctggtgcgtcgccagctgcccgacgcgaccctgatgacctggtgtcggatgaacgcgctggagatccgccagagcgccgatctgggcatcgactgggtggatatctcgattccggcttcggataagctgcggcagtacaaactgcgcgagccgctggcggtgctgctggagcggctggcgatgtttatccatcttgcgcataccctcggcctgaaggtatgcatcggctgcgaggacgcctcgcgggccagcggccagaccctgcgcgctatcgccgaggtcgcgcagaatgcgccggccgcccgcctgcgctatgccgatacggtcggcctgctcgacccttttaccaccgcggcgcaaatctcggccctgcgcgacgtctggtccggcgaaatcgaaatgcatgcccataacgatctgggtatggcgaccgccaatacgctggcggcggtaagcgccggggccaccagcgtgaatacgacggtcctcggtctcggcgagcgggcgggcaacgcggccgcatggaaaccgtccgcgctgggccttgaacgctgcctgggcgtggagaccggcgtgcatttttcggcgctgcccgcgctctgtcagagggtcgcggaagccgcgcagcgcgccatcgacccgcagcagccgctggtcggcgagctggtgtttacccatgagtcaggtgtccacgtggcggcgctgctgcgcgacagcgagagctaccagtccatcgccccttccctgatgggccgcagctaccggctggtgctgggcaaacactccgggcgtcaggcggtcaacggcgtttttgaccagatgggctatcacctcaacgccgcgcagattaaccagctgctgcccgccatccgccgcttcgccgagaactggaagcgcagcccgaaagattacgagctggtggctatctacgacgagctgtgcggtgaatccgctctgcgggcgagggggtaa

SEQ ID NO: 13339 - protein, 381 aa, Klebsiella pneumoniae
MERVLINDTTLRDGEQSPGVAFRTSEKVAIAEALYAAGITAMEVGTPAMGDEEIARIQLVRRQLPDATLMTWCRMNALEIRQSADLGIDWVDISIPASDKLRQYKLREPLAVLLERLAMFIHLAHTLGLKVCIGCEDASRASGQTLRAIAEVAQNAPAARLRYADTVGLLDPFTTAAQISALRDVWSGEIEMHAHNDLGMATANTLAAVSAGATSVNTTVLGLGERAGNAAAWKPSALGLERCLGVETGVHFSALPALCQRVAEAAQRAIDPQQPLVGELVFTHESGVHVAALLRDSESYQSIAPSLMGRSYRLVLGKHSGRQAVNGVFDQMGYHLNAAQINQLLPAIRRFAENWKRSPKDYELVAIYDELCGESALRARG

SEQ ID NO: 13340 - DNA, 1149 bp, Rhodobacter capsulatus
  CDS (1)..(1149): transl_table=11
atgacacccgaccgaacgcttgcgctttgcgacaccaccctgcgcgacggcgaacagaccgccggggtggccttttccttggccgaaaagaaggccatcgcccgggcgctggaccgggcgggcgtggcggagatcgaggtcggcatcgccgcgatgggctgggccgaggtcgccgaaatccgcgccgtcgtcgccgaaatcgcccatgcgacgcctgtcgtctggtgtcggctgcggatgcatgatctggacatggcgcagaaaaccggggtcaagcgggtgcatttcgcggtgcccacctccaccgcgcagctggagggcaagctgcgcgtcgatcgcgactggatcttgcgcgagaccgcggctttggtcttttgcgccagtgatcgcggcctgcaggtctcggtcggcgccgaggatgccagccgcaccgatcccgacttcctgatccgtctggccgaggtcgccgccgccgcgggcgccatccggttccgcatcgccgacacgcttggcttgctggatccgctgggcgcgtttcggcttgtggccgagctttcggcgcggatctccctgccgatcgagatgcatgcccacaatgatttcggcatggcgacggcgaatacgatcatggccgcccatgccggggcgacgcatctgtcggtcacggtgaacgggctgggcgaacgcgcgggcaatgccgcgtgcgaagaggtcggcgccgcgctggaagccggggggatcgacaccgggcttgatctttgcgcgctgcccgaactttccgccgtcgtcgccaaggcctcgggccgcgcgttccgcgcacaaaagccgatcaccggggacgactggctctttgcgcatgaatccggcatccatgtcgatgcgatcctcaaacgcgccgacacctacgaagacccgcgctgcgcccccgcccgctttggccgcgaacggcagatcgtgatcggcaagcattcgggcagcgccggtctgcgcgccgccctgctggaggcgggcctgcccgccgacgatgccgtgctcgaccggctgaagccgctgttgcgcgcccatgccgtgcgggtgaaacgccccgtcgaggccggggatctgcgccgcatggtggcgcggctcgcccgcccgtcgccccgaacctga

SEQ ID NO: 13341 - protein, 382 aa, Rhodobacter capsulatus
MTPDRTLALCDTTLRDGEQTAGVAFSLAEKKAIARALDRAGVAEIEVGIAAMGWAEVAEIRAVVAEIAHATPVVWCRLRMHDLDMAQKTGVKRVHFAVPTSTAQLEGKLRVDRDWILRETAALVFCASDRGLQVSVGAEDASRTDPDFLIRLAEVAAAAGAIRFRIADTLGLLDPLGAFRLVAELSARISLPIEMHAHNDFGMATANTIMAAHAGATHLSVTVNGLGERAGNAACEEVGAALEAGGIDTGLDLCALPELSAVVAKASGRAFRAQKPITGDDWLFAHESGIHVDAILKRADTYEDPRCAPARFGRERQIVIGKHSGSAGLRAALLEAGLPADDAVLDRLKPLLRAHAVRVKRPVEAGDLRRMVARLARPSPRT

SEQ ID NO: 13342 - DNA, 1176 bp, Rhodobacter sphaeroides
  CDS (1)..(1176): transl_table=11
atgtcgcgccagcagccgcgggcgagcttcctgcccgaaagcccgctcgcccccgtggccctctgcgacacgacgctgcgcgacggagagcagacggcgggcgtggccttcacccgcgccgagaagcgggccatcgccgaggcgctgcaggccgcaggcgtggccgaggtcgaggtgggcgtgcccgccatgggcgaggaagagcgggccgacatccgcgcggtggcggcggtgctgaagacggcggcgcccgtcgtctggtgccgcctgcgcgccgaggatctggcggccgcgcagcgcacgggcgtcgtgcggctccatatcggcgtccccgtctccgagcgccagatcagtgccaagctcggcaaggacgcggcctgggtgcgcgacaaggtcgagaagctcgtgcgcgccgcttcctgggccggtcacaaggtgtcggtgggggccgaggatgcctcgcgcgccgatccgttctttctggccgagatcgcccatgtcgcggccgaggcgggcgcgatccgcttccgcatctcggacacgctgggcgtgctcgacccgttcgctgcgcacgaactggtgggccgcgtcgtcacgcgctgcccgctgccggtggagttccacggccacaacgatctgggcatggccacggccaacagcctcgccgccgcgcgcgccggggcctcgcacctgtcggtcacggtgaacgggctgggcgagcgggcgggcaatgccgcgctcgaggaggtggcggccgcgctcgaagcggcgggccgcgccaccggcgtcgcgctgggccagctctgcgccctctcggagctggtggcccgcgcctcgggacggccgctctcgccgcagaagcccatcgtgggcgagggggtcttcacccatgaatgcggcatccatgtcgacgggctgatgaaggaccgcgccacctacgagagcgcggacctgcgccccgagcggttcggccgcagccaccgcatcgccatcggcaagcattcctcggccgccgggctcgcccgggcgctggccgaggcggggcttcccgccgacgcggcgacgctcgcggccctgatgcccgcgctgcgcgactgggcggccatcaccaagcgcgcggccgcccccgaggatcttgcggcgctccttgccgcgcaaaccgaaaccgcccgttga

SEQ ID NO: 13343 - protein, 391 aa, Rhodobacter sphaeroides
MSRQQPRASFLPESPLAPVALCDTTLRDGEQTAGVAFTRAEKRAIAEALQAAGVAEVEVGVPAMGEEERADIRAVAAVLKTAAPVVWCRLRAEDLAAAQRTGVVRLHIGVPVSERQISAKLGKDAAWVRDKVEKLVRAASWAGHKVSVGAEDASRADPFFLAEIAHVAAEAGAIRFRISDTLGVLDPFAAHELVGRVVTRCPLPVEFHGHNDLGMATANSLAAARAGASHLSVTVNGLGERAGNAALEEVAAALEAAGRATGVALGQLCALSELVARASGRPLSPQKPIVGEGVFTHECGIHVDGLMKDRATYESADLRPERFGRSHRIAIGKHSSAAGLARALAEAGLPADAATLAALMPALRDWAAITKRAAAPEDLAALLAAQTETAR

SEQ ID NO: 13344 - DNA, 1908 bp, Oryza sativa
  CDS (1)..(1908)
atggcctcctccctcctctcctccccaaaaccctcctccttctcctccgcaaaccccacctccactccacgcccacgcgcccaaactctctcccccttccgcgccgccgccccacgcttctcccatggcctcgccaccgccgccgccgccgcaaaccctagcgcctcccgccgctgctaccaccgcgccttcgcccgccccgtccgggcgtccatggcgcagccgcggcgcccggagtacgtccccaaccgcatcgacgaccccaactacgtccgcatcttcgacaccaccctccgcgacggggagcagtcccccggggccaccatgaccagcgccgagaagctcgtcgtcgcgcgccagctcgcccgcctcggcgtcgacatcatcgaggccgggttcccggcctcctcccccgacgacctcgacgccgtgcgctccatcgccatcgaggtcgggaacacgcccgtcggggaggacggccacgtgccggtcatctgtggcctctcgagatgcaataagcgagacattgatgctgcctgggaggccgtgcggcacgcgcggcggccgcgcatccacaccttcattgccaccagcgagatccatatgcagcacaagctaaggaagacgcccgagcaggtggtggccattgccaaggaaatggtggcctacgcccgcagcctaggctgccctgatgtcgagttcagccctgaagacgctggcaggtcaaacagagagtttctatatcatattctagaggaagtcataaaagctggagcaacaacactcaatatcccagacactgttggatacactcttccttatgaatttgggaagctaattgctgatataaaagcaaacactccaggaattgaaaatgctattatttctactcattgccagaatgaccttggtctagcaaccgccaatacattagcgggcgctcatgcaggagcacggcaattagaggtgactatcaacggtattggtgaaagggctggaaatgcttctttggaagaggttgtgatggcaattaaatgtcgccgagagctcttaggaggtctgtatactggaatcaatacccaacatatcactatgtcaagcaaaatggtacaagagcacagtggacttcatgtacaaccacataaagctattgtcggtgccaatgcctttgcacatgaaagtggaattcatcaggatgggatgcttaaatacaaaggaacttatgaaataatttctcctgatgatattggtctaacacgtgcaaacgagtttggtattgttcttgggaaactcagtggaaggcatgctgtgagatctaaactagtggagcttggatatgaaatcactgacaaggaatttgaggatttctttaaacgctacaaagaggttgcagagaagaaaaagcgtgtaactgatgaagacattgaggcgctgttgtctgatgagatatttcagcccaaggttttttggtcccttgctgatgtacaggcaacttgtggaacacttggtctgtctacagcaactgtcaaactgataggtccggatggagaggagaagattgcatgtgcagttggaacaggtccagttgatgcagcttacaaggctgttgatgatataatacagatcccaactgttcttcgagaatatagcatgacatcggtcacagaaggcattgatgcaattgcaactactagagtggttgtcactggagatgttagcgactctaaacatgctttgactggtcactccttcagccgggcattcagtgggagtggtgccgcactggatattgttgtttccagtgtgcgagcttacctgagtgccctgaacaagatgtccagttttgttggggctatcaaggctagtagtgaagtatctgaaagccaaagagttcaaaccacagaatga

SEQ ID NO: 13345 - protein, 635 aa, Oryza sativa
MASSLLSSPKPSSFSSANPTSTPRPRAQTLSPFRAAAPRFSHGLATAAAAANPSASRRCYHRAFARPVRASMAQPRRPEYVPNRIDDPNYVRIFDTTLRDGEQSPGATMTSAEKLVVARQLARLGVDIIEAGFPASSPDDLDAVRSIAIEVGNTPVGEDGHVPVICGLSRCNKRDIDAAWEAVRHARRPRIHTFIATSEIHMQHKLRKTPEQVVAIAKEMVAYARSLGCPDVEFSPEDAGRSNREFLYHILEEVIKAGATTLNIPDTVGYTLPYEFGKLIADIKANTPGIENAIISTHCQNDLGLATANTLAGAHAGARQLEVTINGIGERAGNASLEEVVMAIKCRRELLGGLYTGINTQHITMSSKMVQEHSGLHVQPHKAIVGANAFAHESGIHQDGMLKYKGTYEIISPDDIGLTRANEFGIVLGKLSGRHAVRSKLVELGYEITDKEFEDFFKRYKEVAEKKKRVTDEDIEALLSDEIFQPKVFWSLADVQATCGTLGLSTATVKLIGPDGEEKIACAVGTGPVDAAYKAVDDIIQIPTVLREYSMTSVTEGIDAIATTRVVVTGDVSDSKHALTGHSFSRAFSGSGAALDIVVSSVRAYLSALNKMSSFVGAIKASSEVSESQRVQTTE

SEQ ID NO: 13346 - DNA, 1908 bp, Oryza sativa
  CDS (1)..(1908)
atggcctcctccctcctctcctccccaaaaccctcctccttctcctccgcaaaccccacctccactccacgcccacgcgcccaaactctctcccccttccgcgccgccgccccacgcttctcccatggcctcgccaccgccgccgccgccgcaaaccctagcgcctcccgccgctgctaccaccgcgccttcgcccgccccgtccgggcgtccatggcgcagccgcggcgcccggagtacgtccccaaccgcatcgacgaccccaactacgtccgcatcttcgacaccaccctccgcgacggggagcagtcccccggggccaccatgaccagcgccgagaagctcgtcgtcgcgcgccagctcgcccgcctcggcgtcgacatcatcgaggccgggttcccggcctcctcccccgacgacctcgacgccgtgcgctccatcgccatcgaggtcgggaacacgcccgtcggggaggacggccacgtgccggtcatctgtggcctctcgagatgcaataagcgagacattgatgctgcctgggaggccgtgcggcacgcgcggcggccgcgcatccacaccttcattgccaccagcgagatccatatgcagcacaagctaaggaagacgcccgagcaggtggtggccattgccaaggaaatggtggcctacgcccgcagcctaggctgccctgatgtcgagttcagccctgaagacgctggcaggtcaaacagagagtttctatatcatatactagaggaagtcataaaagctggagcaacaacactcaatatcccagacactgttggatacactcttccttatgaatttgggaaactaattgctgatataaaagcaaacactccaggaattgaaaatgccattatttctactcattgccagaatgaccttggtctagcaaccgcaaatacattagcgggcgctcatgcaggagcacggcaattagaggtgactatcaatggtattggtgaaagggctggaaatgcttctttggaagaggttgtgatggcaattaaatgtcgtcgagaactcttaggaggtctgtatactggaatcaatacccaacatatcactatgtcaagcaaaatggtacaagagcacagtggacttcatgtacaaccacataaagctattgtcggtgccaatgcctttgcacatgaaagtggaattcatcaggatgggatgcttaagtacaaaggaacttatgaaataatttctcctgatgatattggtctaacacgtgcaaatgagtttggtattgttcttgggaagctcagtggaaggcatgctgtgagatctaaactagtggagcttggatatgaaatcactgacaaggaatttgaggatttctttaaacgctacaaagaggttgcagagaagaaaaagcgtgtaactgatgaagacattgaggcgctgttgtctgatgagatatttcagcccaaggttttttggtcccttgctgatgtacaggcaacttgtggaacacttggtctgtctacagcaactgtcaaactgataggtccggatggagatgagaagattgcatgtgcagttggaacaggtccagttgatgcagcttacaaggctgttgatgatataatacagatcccaactgttcttcgagaatatagcatgacatcggtcacagaaggcattgatgcaattgcaactactagagtggttgtcactggagatgtcagcgactctaaacatgctttgactggtcactccttcaaccgggcattcagtgggagtggtgccgcactggatattgttgtttccagtgtgcgagcttacctgagtgccctgaacaagatgtccagttttgttggggctatcaaggctagtagtgaagtatctgaaagccaaagagttcaaaccacagaatga

SEQ ID NO: 13347 - protein, 635 aa, Oryza sativa
MASSLLSSPKPSSFSSANPTSTPRPRAQTLSPFRAAAPRFSHGLATAAAAANPSASRRCYHRAFARPVRASMAQPRRPEYVPNRIDDPNYVRIFDTTLRDGEQSPGATMTSAEKLVVARQLARLGVDIIEAGFPASSPDDLDAVRSIAIEVGNTPVGEDGHVPVICGLSRCNKRDIDAAWEAVRHARRPRIHTFIATSEIHMQHKLRKTPEQVVAIAKEMVAYARSLGCPDVEFSPEDAGRSNREFLYHILEEVIKAGATTLNIPDTVGYTLPYEFGKLIADIKANTPGIENAIISTHCQNDLGLATANTLAGAHAGARQLEVTINGIGERAGNASLEEVVMAIKCRRELLGGLYTGINTQHITMSSKMVQEHSGLHVQPHKAIVGANAFAHESGIHQDGMLKYKGTYEIISPDDIGLTRANEFGIVLGKLSGRHAVRSKLVELGYEITDKEFEDFFKRYKEVAEKKKRVTDEDIEALLSDEIFQPKVFWSLADVQATCGTLGLSTATVKLIGPDGDEKIACAVGTGPVDAAYKAVDDIIQIPTVLREYSMTSVTEGIDAIATTRVVVTGDVSDSKHALTGHSFNRAFSGSGAALDIVVSSVRAYLSALNKMSSFVGAIKASSEVSESQRVQTTE

SEQ ID NO: 13348 - DNA, 1770 bp, Oryza sativa
  CDS (1)..(1770)
atggcctcctccctcctctcctccccaaaaccctcctccttctcctccgcaaaccccacctccactccacgcccacgcgcccaaactctctcccccttccgcgccgccgccccacgcttctcccatggcctcgccaccgccgccgccgccgcaaaccctagcgcctcccgccgctgctaccaccgcgccttcgcccgccccgtccgggcgtccatggcgcagccgcggcgcccggagtacgtccccaaccgcatcgacgaccccaactacgtccgcatcttcgacaccaccctccgcgacggggagcagtcccccggggccaccatgaccagcgccgagaagctcgtcgtcgcgcgccagctcgcccgcctcggcgtcgacatcatcgaggccgggttcccggcctcctcccccgacgacctcgacgccgtgcgctccatcgccatcgaggtcgggaacacgcccgtcggggaggacggccacgtgccggtcatctgtggcctctcgagatgcaataagcgagacattgatgctgcctgggaggccgtgcggcacgcgcggcggccgcgcatccacaccttcattgccaccagcgagatccatatgcagcacaagctaaggaagacgcccgagcaggtggtggccattgccaaggaaatggtggcctacgcccgcagcctaggctgccctgatgtcgagttcagccctgaagacgctggcaggtcaaacagagagtttctatatcatatactagaggaagtcataaaagctggagcaacaacactcaatatcccagacactgttggatacactcttccttatgaatttgggaaactaattgctgatataaaagcaaacactccaggaattgaaaatgccattatttctactcattgccagaatgaccttggtctagcaaccgcaaatacattagcgggcgctcatgcaggagcacggcaattagaggtgactatcaatggtattggtgaaagggctggaaatgcttctttggaagaggttgtgatggcaattaaatgtcgtcgagaactcttaggaggtctgtatactggaatcaatacccaacatatcactatgtcaagcaaaatggtacaagagcacagtggacttcatgtacaaccacataaagctattgtcggtgccaatgcctttgcacatgaaagtggaattcatcaggatgggatgcttaagtacaaaggaacttatgaaataatttctcctgatgatattggtctaacacgtgcaaatgagtttggtattgttcttgggaagctcagtggaaggcatgctgtgagatctaaactagtggagcttggatatgaaatcactgacaaggaatttgaggatttctttaaacgctacaaagaggttgcagagaagaaaaagcgtgtaactgatgaagacattgaggcgctgttgtctgatgagatatttcagcccaaggttttttggtcccttgctgatgtacaggcaacttgtggaacacttggtctgtctacagcaactgtcaaactgataggtccggatggagatgagaagattgcatgtgcagttggaacaggtccagttgatgcagcttacaaggctgttgatgatataatacagatcccaactgttcttcgagaatatagcatgacatcggtcacagaaggcattgatgcaattgcaactactagagtggttgtcactggagatgtcagcgactctaaacatgctttgactggtcactccttcaaccgggcattcaggtaa

SEQ ID NO: 13349 - protein, 589 aa, Oryza sativa
MASSLLSSPKPSSFSSANPTSTPRPRAQTLSPFRAAAPRFSHGLATAAAAANPSASRRCYHRAFARPVRASMAQPRRPEYVPNRIDDPNYVRIFDTTLRDGEQSPGATMTSAEKLVVARQLARLGVDIIEAGFPASSPDDLDAVRSIAIEVGNTPVGEDGHVPVICGLSRCNKRDIDAAWEAVRHARRPRIHTFIATSEIHMQHKLRKTPEQVVAIAKEMVAYARSLGCPDVEFSPEDAGRSNREFLYHILEEVIKAGATTLNIPDTVGYTLPYEFGKLIADIKANTPGIENAIISTHCQNDLGLATANTLAGAHAGARQLEVTINGIGERAGNASLEEVVMAIKCRRELLGGLYTGINTQHITMSSKMVQEHSGLHVQPHKAIVGANAFAHESGIHQDGMLKYKGTYEIISPDDIGLTRANEFGIVLGKLSGRHAVRSKLVELGYEITDKEFEDFFKRYKEVAEKKKRVTDEDIEALLSDEIFQPKVFWSLADVQATCGTLGLSTATVKLIGPDGDEKIACAVGTGPVDAAYKAVDDIIQIPTVLREYSMTSVTEGIDAIATTRVVVTGDVSDSKHALTGHSFNRAFR

SEQ ID NO: 13350 - DNA, 1518 bp, Brassica napus
  CDS (1)..(1518)
atggcatcgtcacttctgacatcttccggaattatccctaccaccagttccaacatggttgtccggtcattcttaccctttggatctgtccgcctgacccgtccgtacaacaagtcgtccttgctcatctcatgttgctcctctgtgtccaagaaggctgagactagtggtactgacctcaaaaccgttgtggaacggtggccagagtatattccgaacaagctccccgacaagaactacgtgcgtgtatttgatacgacgctccgtgacggcgaacaatctcccggtgcagcccttactccaccgcagaagatagagattgcccggcagctcgctaaactcagagtagacatcatggaagttggttttcccgtgtcatcagaggaagagttcgaaaccatcaaaaccatcgccaaaaccgtgggaaacgaggttgatgaggaaacaggttatatcccagtgatatgcgtcatcgcacgaagcaaagaaagagatataaaggcggcttgggagtcagtgaagtacgcaaagaggccgaggatagtcatattcacttctactagtgacattcacttgaaatataagttgaaaatgactagagaagaagtcgtcgagatggtcgcgagtagcattaggtttgctaaaagtttaggcttcgaagacatcgagtttggttgcgaagatggcggcaggtccgacaaggattatatatgcaaggtttttgaagaagcgatcaaagcgggtgcaaccaccctggcctgcccggacacggtggggatcaacatgccgcacgaatacgggaaacttgtgagatacatcaaagcaaacactcctggaattgatgatgttatcttcagcgctcattgtcacaatgaccttggtgttgctaccgccaacacaatcgccggtatatgtgcgggagcacgacaagtcgaagtaacaatcaatggaataggtgaaagaagtgggaatgcaccgcttgaagaggtcgtgatggctttgaaatgtcgaggagcatttgtgatgggtggtgtttacacaagaatagacacacgccaaattatggctaccagcaagatggttcaagaatatactggcttgtatgttcagccacataaacctatagttggagccaactgttttgttcatgagagcggcattcaccaggatgggatattgaaaaatcggagtacatatgagatcttatcaccagaagatgttggagttgtaaaatctcaaaattcaggcattgttcttggaaagcttagtggacgtcatgcggttaaaggtcgtctgaaagagttgggatatggaatcagtgatgagaaactgaacgaggttttctcacggttcagagatttaaccaagcagaaaaagagagtcacggatgatgatctaagggcattagtaacgtgtggtgatgaaatcttctcctcagagaaattaaacggcactaacgacaacgaaatcaacagaaacggctatgtaccgtctcctcagatttcctctgtggtatga

SEQ ID NO: 13351 - protein, 505 aa, Brassica napus
MASSLLTSSGIIPTTSSNMVVRSFLPFGSVRLTRPYNKSSLLISCCSSVSKKAETSGTDLKTVVERWPEYIPNKLPDKNYVRVFDTTLRDGEQSPGAALTPPQKIEIARQLAKLRVDIMEVGFPVSSEEEFETIKTIAKTVGNEVDEETGYIPVICVIARSKERDIKAAWESVKYAKRPRIVIFTSTSDIHLKYKLKMTREEVVEMVASSIRFAKSLGFEDIEFGCEDGGRSDKDYICKVFEEAIKAGATTLACPDTVGINMPHEYGKLVRYIKANTPGIDDVIFSAHCHNDLGVATANTIAGICAGARQVEVTINGIGERSGNAPLEEVVMALKCRGAFVMGGVYTRIDTRQIMATSKMVQEYTGLYVQPHKPIVGANCFVHESGIHQDGILKNRSTYEILSPEDVGVVKSQNSGIVLGKLSGRHAVKGRLKELGYGISDEKLNEVFSRFRDLTKQKKRVTDDDLRALVTCGDEIFSSEKLNGTNDNEINRNGYVPSPQISSVV

SEQ ID NO: 13352 - DNA, 1881 bp, Zea mays
  CDS (1)..(1881)
atggcgtcctcgctgctctcctcccccgctaaacccaccatcaccaccaccaccaaaacgaccccggccccaagacccgcccgctccgcccatgtccatgtcctctccgccgcccgctgcctccgcctccgcctccgcgcgtcgtcgcagcatcctccgcctccgcccaccccgcggtcgcggcggccggattacgtcccgaaccgcatcgacgaccccaactacgtgcgcatcttcgacaccacgctgcgcgacggggagcagtcgccgggcgccaccatgacgagcgcccagaagctcgtcgtcgcgcgccagctggcccgcctcggcgtcgacatcatcgaggccgggttcccggcctcctcccccgacgacctcgacgccgtgcgctccatcgccatcgaggtcggcaacccggcgccaggacccgccggggaggaggacgccgtccacgtgccggtcatctgcggcctctcgcggtgcaaccggaaggacatcgacgccgcgtgggaggccgtgcgccacgcgcgccgcccccggatccacaccttcatcgccaccagcgacattcacatgcagcataagctcaggaagacgcccgaccaggtggtcgccattgccagggagatggtggcctacgcccgcagcctcggatgcactgacgtcgagttcagccccgaggacgccggcaggtcaaatagagagttcttgtatcatattctaggggaagtcataaaagctggagctacgactctcaatatcccggacactgtcggatacaatcttccttatgaatttggaaagttgattgctgatataaaggcaaacactcctggaattgaaaaggctatcatttccactcattgtcagaatgaccttggtcttgcgactgccaacacactagcgggcgctcgtgcaggagcacggcagttagaggttactattaatggtattggtgaaagggctggaaatgcttctttggaggaggttgtcatggcaattaaatgccgcagagaactgttagatggtctctatactggaatcgattcccgacatatcactttgacgagcaaaatggtgcaagagcatagtggacttcacgtgcagccacataaagctattgttggtgccaatgcgttcgctcatgaaagtggaattcatcaggatgggatgcttaaatataaaggaacatacgaaattatatcgcctgatgatattagtctaacacgtgcaaatgaatttggtattgttcttgggaaactcagcggaaggcatgctgtgagatctaagctagtagagcttggatatgaaatcggtgacaaggaatttgaggacttctttaaacgctacaaagaggttgcagagaagaaaaagcgcgtaactgatgaagacttagaagcgttattgtcagatgagatattccagcctaaggttatttggtcccttgctgatgtacaggcaacatgtggtacacttgctttatctacggcaacagtgaaattggtagcaccagatggagaggagaaaatagcatgttcagtcggaacaggtccagtcgatgcagcttacaaggctgttgacaaaataatccagattccaacggttctccgagaatacagtatgacatcagtcacagaaggcattgacgcaatcgcgacaactcgggttgttgtcactggagatgtgagcaacaacgccaaacatgccctgactggccagtccttcaaccgctccttcagcgggagcggggcatccatggacattgtggtgtccagtgtcagagcttacctgagcgccctgaacaagatctgcagtttcgctggcgccgtgaaagccagcagcgatgtagctgagaccgcaagcgtcccgagcacagaatga

SEQ ID NO: 13353 - protein, 626 aa, Zea mays
MASSLLSSPAKPTITTTTKTTPAPRPARSAHVHVLSAARCLRLRLRASSQHPPPPPTPRSRRPDYVPNRIDDPNYVRIFDTTLRDGEQSPGATMTSAQKLVVARQLARLGVDIIEAGFPASSPDDLDAVRSIAIEVGNPAPGPAGEEDAVHVPVICGLSRCNRKDIDAAWEAVRHARRPRIHTFIATSDIHMQHKLRKTPDQVVAIAREMVAYARSLGCTDVEFSPEDAGRSNREFLYHILGEVIKAGATTLNIPDTVGYNLPYEFGKLIADIKANTPGIEKAIISTHCQNDLGLATANTLAGARAGARQLEVTINGIGERAGNASLEEVVMAIKCRRELLDGLYTGIDSRHITLTSKMVQEHSGLHVQPHKAIVGANAFAHESGIHQDGMLKYKGTYEIISPDDISLTRANEFGIVLGKLSGRHAVRSKLVELGYEIGDKEFEDFFKRYKEVAEKKKRVTDEDLEALLSDEIFQPKVIWSLADVQATCGTLALSTATVKLVAPDGEEKIACSVGTGPVDAAYKAVDKIIQIPTVLREYSMTSVTEGIDAIATTRVVVTGDVSNNAKHALTGQSFNRSFSGSGASMDIVVSSVRAYLSALNKICSFAGAVKASSDVAETASVPSTE

SEQ ID NO: 13354 - DNA, 1518 bp, Brassica napus
  CDS (1)..(1518)
atggcatcgtcacttctgacatcttccggaattatccctaccaccagttccaacatggttgtccggtcattcttaccctttggatctgtccgcctgacccgtccgtacaacaagtcgtccttgctcatctcatgttgctcctctgtgtccaagaaggctgagactagtggtactgacctcaaaaccgttgtggaacggtggccagagtatattccgaacaagctccccgacaagaactacgtgcgtgtatttgatacgacgctccgtgacggcgaacaatctcccggtgcagcccttactccaccgcagaagatagagattgcccggcagctcgctaaactcagagtagacatcatggaagttggttttcccgtgtcatcagaggaagagttcgaaaccatcaaaaccatcgccaaaaccgtgggaaacgaggttgatgaggaaacaggttatatcccagtgatatgcgccatcgcacgaagcaaacaaagagacataaaggcggcttgggaagcagtgaagtacgcaaagaggccgaggatagtcatattcacttctactagtgacattcacatgaaatataagttgaaaaagactagagaagaagtcatcgagatggccgcgagtagcattaggtttgctaaaagcttaggcttcgaagacatccaatttggctgcgaagatggcggcaggtcggacaaggattatatatgcaagattctagaagaagcgatcaaagcgggtgcaaccaccctgaactgcccggacacggtagggatcaacatgccgcaagaatacggaaaacttgtgagatacatcaaagcaaacactcctggaattgatgatgttatcttcagcgctcattgtcacaacgaccttggtgttgctaccgccaacacaatcgccggtatatgtgcgggagcacgacaagtcgaagtaacaatcaacggaataggtgaaagaagtgggaatgcaccgcttgaagaggtcgtgatggctttgaaatgtcgaggagcatttgtgatggatggtgtttacacaagaatagacacacgccaaattatggctaccagcaagatggttcaagaatatactggcttgtatgttcaaccacataaacccatagttggagccaactgttttgttcatgagagcggcattcaccaggatgggatattgaaaaatcggagtacatatgagatcttatcaccagaagatgttggagttgtaaaatctcaaaattcaggcattgttcttggaaagcttagtggacgtcatgcggttaaaggtcgtctgaaagagttgggatatggaatcagtgatgagaaactgaacgaggttttctcacggttcagagatttaaccaagcagaaaaagagagtcacggatgatgatctaagggcattagtaacgtgtggtgatgaaatcttctcctcagagaaattaaacggcactaacgacaacgaaatcaacagaaacggctatgtaccgtctcctcagatttcctctgtggtatga

SEQ ID NO: 13355 - protein, 505 aa, Brassica napus
MASSLLTSSGIIPTTSSNMVVRSFLPFGSVRLTRPYNKSSLLISCCSSVSKKAETSGTDLKTVVERWPEYIPNKLPDKNYVRVFDTTLRDGEQSPGAALTPPQKIEIARQLAKLRVDIMEVGFPVSSEEEFETIKTIAKTVGNEVDEETGYIPVICAIARSKQRDIKAAWEAVKYAKRPRIVIFTSTSDIHMKYKLKKTREEVIEMAASSIRFAKSLGFEDIQFGCEDGGRSDKDYICKILEEAIKAGATTLNCPDTVGINMPQEYGKLVRYIKANTPGIDDVIFSAHCHNDLGVATANTIAGICAGARQVEVTINGIGERSGNAPLEEVVMALKCRGAFVMDGVYTRIDTRQIMATSKMVQEYTGLYVQPHKPIVGANCFVHESGIHQDGILKNRSTYEILSPEDVGVVKSQNSGIVLGKLSGRHAVKGRLKELGYGISDEKLNEVFSRFRDLTKQKKRVTDDDLRALVTCGDEIFSSEKLNGTNDNEINRNGYVPSPQISSVV

SEQ ID NO: 13356 - DNA, 1875 bp, Glycine max
  CDS (1)..(1875)
atggccaccgtgatccgcaatcctatcctctttccctccacctctcaccgccccaaccaaaaccacagcaacaacacattcctcattttccgcttccctcaaacctcacgctcttctctccactccaaatcccgattcgccttttcctgctcccaatcggagcctcctcctccttctccttctgcttctcctcgacggcgtcctccgtacatcccgaaccgcattcctgacccttcctatgtccgcattttcgacaccactctccgcgacggcgagcagtccccgggcgcctccatgacctccaaggagaagctggatgtggcgcggcagcttgccaagctcggcgtcgacatcatcgaggccggcttccctgccgcctccaaggatgacttcgaggccgtcaaaatgatcgcccaagaggtcggcaacgccgttgacgacgacggatacgtccccgtcatctgtggcctctcccgctgcaacgagaaggacattcgaacagcctgggaggccgtcaagtacgccaagaggcccaggattcacaccttcatcgccaccagcgccattcacatggagtacaagttgagaatgtccaaagacaaggtcgtcgacattgcccgcaatatggtcaagttcgctcgtagtttgggctgcgaagacgtcgagttcagtcctgaagatgctggaaggtcggatagggagtttctttatgaaattcttggagaagttattaaggccggcgccaccacgctcaacatacctgacactgttggtataaccatgcccagtgaatttggaaagttgattgctgatattaaagctaatacccctggaattgaaaatgttattatttccacccactgccagaatgatctcggactttctactgcaaacactatagagggtgcgcgtgccggtgcaaggcaactggaagtgacgattaatgggattggtgaaagggctggaaatgcctccctagaagaggttgtgatggccttgagatgcggagcacatgtcaatggcaatctctacactggaattaatacaaagcacatctttctgacgagcaagatggtcgaagagtacactggtttgcagatacagccacacaaggctcttgtgggagctaatgccttcgcccatgaaagtggcatacatcaggatggaatgctaaaacacaaaggtacatatgaaataatatcacccgaggacatcggacttgaaagaaccaatgaagcaggtattgtactggggaagcttagtggtcgccatgctttgagaaagcgacttgaagagcttggttatgaacttaatgacgaccaagttcagactttattttggtgttttaaagcagtggctgagcaaaaaaagagggttactgatgctgacctcagagcattggtatcagatgaagtttttcaagcagagcctgtctggaaacttggtgatttgcaggtgacttgtggaactcttggcctttctacagcaactgtcaaacttttgagtagtgatggtagcacacacgttgcctgttccattggtacaggaccagtggattcggcttacaaggctgttgatctgattgtgaaggagcaagtaacacttcttgagtactcgatgaatgcagtgacagaaggcattgatgcaattgccactacccgggttgtaattcgtggggagagtgaaacaagtactattactacccatgctttaacgggagaaactgttattcgaacatttagtgggactggagcgggaatggatgtcgttgtttccagtgtcaaggcctatattgctgcactaaacaagatgtcgggtttcaaggaatcctctcaatctgctgaaaaaatttcaatttcttcattgaagatttga

SEQ ID NO: 13357 - protein, 624 aa, Glycine max
MATVIRNPILFPSTSHRPNQNHSNNTFLIFRFPQTSRSSLHSKSRFAFSCSQSEPPPPSPSASPRRRPPYIPNRIPDPSYVRIFDTTLRDGEQSPGASMTSKEKLDVARQLAKLGVDIIEAGFPAASKDDFEAVKMIAQEVGNAVDDDGYVPVICGLSRCNEKDIRTAWEAVKYAKRPRIHTFIATSAIHMEYKLRMSKDKVVDIARNMVKFARSLGCEDVEFSPEDAGRSDREFLYEILGEVIKAGATTLNIPDTVGITMPSEFGKLIADIKANTPGIENVIISTHCQNDLGLSTANTIEGARAGARQLEVTINGIGERAGNASLEEVVMALRCGAHVNGNLYTGINTKHIFLTSKMVEEYTGLQIQPHKALVGANAFAHESGIHQDGMLKHKGTYEIISPEDIGLERTNEAGIVLGKLSGRHALRKRLEELGYELNDDQVQTLFWCFKAVAEQKKRVTDADLRALVSDEVFQAEPVWKLGDLQVTCGTLGLSTATVKLLSSDGSTHVACSIGTGPVDSAYKAVDLIVKEQVTLLEYSMNAVTEGIDAIATTRVVIRGESETSTITTHALTGETVIRTFSGTGAGMDVVVSSVKAYIAALNKMSGFKESSQSAEKISISSLKI

SEQ ID NO: 13358 - DNA, 1875 bp, Glycine max
  CDS (1)..(1875)
atggccaccgtgatccgcaatcctatcctctttccctccacctctcaccgccccaaccaaaaccacagcaacaacacattcctcattttccgcttccctcaaacctcacgctcttctctccactccaaatcccgattcgccttttcctgctcccaatcggagcctcctcctccttctccttctgcttctcctcgacggcgtcctccgtacatcccgaaccgcattcctgacccttcctatgtccgcattttcgacaccactctccgcgacggcgagcagtccccgggcgcctccatgacctccaaggagaagctggatgtggcgcggcagcttgccaagctcggcgtcgacatcatcgaggccggcttccctgccgcctccaaggatgacttcgaggccgtcaaaatgatcgcccaagaggtcggcaacgccgttgacgacgacggatacgtccccgtcatctgtggcctctcccgctgcaacgagaaggacattcgaacagcctgggaggccgtcaagtacgccaagaggcccaggattcacaccttcatcgccaccagcgccattcacatggagtacaagttgagaatgtccaaagacaaggtcgtcgacattgcccgcaatatggtcaagttcgctcgtagtttgggctgcgaagacgtcgagttcagtcctgaagatgctggaaggtcggatagggagtttctttatgaaattcttggagaagttattaaggccggcgccaccacgctcaacatacctgacactgttggtataaccatgcccagtgaatttggaaagttgattgctgatattaaagctaatacccctggaattgaaaatgttattatttccacccactgccagaatgatctcggactttctactgcaaacactatagagggtgcgcgtgccggtgcaaggcaactggaagtgacgattaatgggattggtgaaagggctggaaatgcctccctagaagaggttgtgatggccttgagatgcggagcacatgtcaatggcaatctctacactggaattaatacaaagcacatctttctgacgagcaagatggtcgaagagtacactggtttgcagatacagccacacaaggctcttgtgggagctaatgccttcgcccatgaaagtggcatacatcaggatggaatgctaaaacacaaaggtacatatgaaataatatcacccgaggacatcggacttgaaagaaccaatgaagcaggtattgtactggggaagcttagtggtcgccatgctttgagaaagcgacttgaagagcttggttatgaacttaatgacgaccaagttcagactttattttggcgttttaaagcagtggctgagcaaaaaaagagggttactgatgctgacctcagagcattggtatcagatgaagtttttcaagcagagcctgtctggaaacttggtgatttgcaggtgacttgtggaactcttggcctttctacagcaactgtcaaacttttgagtagtgatggtagcacacatgttgcttgttctgttggtacaggaccagtggattcggcatacaaggctgtggatctgattgtgaaggagccagtaacacttcttgagtactcaatgaatgcagtcacggaaggcatcgatgcaattgccactacccgggttgtgattcgtggggagagtgaaacaagtactagtactactcatgctttaactggagaagctgttcttcgaacatttagtgggactggagcgggaatggatgtcgttgtttccagtgtcaaggcctatattgctgcactaaacaagatgttgggtttcaaggaaacatctccatctgctgaaaaaattccagtttcttcattgaagatttga

SEQ ID NO: 13359 - protein, 624 aa, Glycine max
MATVIRNPILFPSTSHRPNQNHSNNTFLIFRFPQTSRSSLHSKSRFAFSCSQSEPPPPSPSASPRRRPPYIPNRIPDPSYVRIFDTTLRDGEQSPGASMTSKEKLDVARQLAKLGVDIIEAGFPAASKDDFEAVKMIAQEVGNAVDDDGYVPVICGLSRCNEKDIRTAWEAVKYAKRPRIHTFIATSAIHMEYKLRMSKDKVVDIARNMVKFARSLGCEDVEFSPEDAGRSDREFLYEILGEVIKAGATTLNIPDTVGITMPSEFGKLIADIKANTPGIENVIISTHCQNDLGLSTANTIEGARAGARQLEVTINGIGERAGNASLEEVVMALRCGAHVNGNLYTGINTKHIFLTSKMVEEYTGLQIQPHKALVGANAFAHESGIHQDGMLKHKGTYEIISPEDIGLERTNEAGIVLGKLSGRHALRKRLEELGYELNDDQVQTLFWRFKAVAEQKKRVTDADLRALVSDEVFQAEPVWKLGDLQVTCGTLGLSTATVKLLSSDGSTHVACSVGTGPVDSAYKAVDLIVKEPVTLLEYSMNAVTEGIDAIATTRVVIRGESETSTSTTHALTGEAVLRTFSGTGAGMDVVVSSVKAYIAALNKMLGFKETSPSAEKIPVSSLKI

SEQ ID NO: 13360 - DNA, 1674 bp, Glycine max
  CDS (1)..(1674)
atggcagccaaaacatctaccaacggcactcattattctcgctctcgccccgagtacattccaaaccgcatccccgacccgcattatggccgcatcctggacaccacgcttcgcgacggcgagcaagcccccggagcctccatggtttccagccagaagctccggattgctcgccagctcgcgaagcttggcgtcgatgtcatcgaaggaggctttccttcagcgtcgcaggaagacttcaatgctgtcaagatgatagcacaagaagttggcaacaactgtgatgctgatggctatgttcccgtcattgccgccctctgtaggtgcaatgagaaggacattgccacagcgtgggaggctctgaaatacgccaagaggccgaggcttatgcctttcatagcagtgagccccattcacatggagtacaagctcaataagactaaagaagaggtgcttcaaatagctaaagatatgatcaaatttgcacgcagtttaggttgcagtgacatccagttctgttccgaagatgcagccagatcggatagagagtttctttatcaaattttggaagaagttatcaaagctggggcatcaactttgggcataggtgacactgtgggcataacaatgccattcgagattagacaattgattgctgatataaaagccaatgtccctggagcagaaaatgttattatttctatgcactgtcataatgatcttggacatgctactgcaaacgcaatagaggctgctcaagctggtgcaatgcaattagaagtaacaattaatgggattggtgaaagggctggtaatgcctcattagaagaggttgtgatggccctaaaatgcaggggagatcaagtcttaggtggtttgtatactggaattaatacaaggcacttattgaagacaagcaagatggtcgaagagttttctggtatgtatttacaaccacacaaagctgttgtaggtgataatgcctttctccatgaaagtggcgttcaccaggctggattgttaaagcatagagctacatatgaaataatgtctcccgaagatattggtcatgaaaagtccagtggagttaatatggtactagggaagctaagtggacgccaagctttgaaaagtcgtctcaaagagcttggctatgaacttagggatgaagaagttgagagtgtgtttaggaacttcaaagcaatagccgagaaaaaaaagagagttaccgatgttgacctcaaagcattggtgtcaaatcaagtttctcatgatgaacctatttggaagcttgatggtttgcaggtgacttgtggaactatgggttcttcaacagcaactatcaaacttgtcactagtgatggtatcacacatgttgcttgttctgttggtgtaggaccagtagattcagcttacaagactatcaatctcatcgtgaaggaaactgtaaaagtacttgagtactcactaagtacagttacagaaggcactgatgcaattgcaactacacgtgttgtaattcgtagagagaataagcaatcaccaactcctgctttgaatggaaacgtaatttatccaacatttagtggaaccggagaaggggtggatgttgttacttcaagtgtagaggcttatcttactgcactaaacaaaatgctcgatttaaaggaatga

SEQ ID NO: 13361 - protein, 557 aa, Glycine max
MAAKTSTNGTHYSRSRPEYIPNRIPDPHYGRILDTTLRDGEQAPGASMVSSQKLRIARQLAKLGVDVIEGGFPSASQEDFNAVKMIAQEVGNNCDADGYVPVIAALCRCNEKDIATAWEALKYAKRPRLMPFIAVSPIHMEYKLNKTKEEVLQIAKDMIKFARSLGCSDIQFCSEDAARSDREFLYQILEEVIKAGASTLGIGDTVGITMPFEIRQLIADIKANVPGAENVIISMHCHNDLGHATANAIEAAQAGAMQLEVTINGIGERAGNASLEEVVMALKCRGDQVLGGLYTGINTRHLLKTSKMVEEFSGMYLQPHKAVVGDNAFLHESGVHQAGLLKHRATYEIMSPEDIGHEKSSGVNMVLGKLSGRQALKSRLKELGYELRDEEVESVFRNFKAIAEKKKRVTDVDLKALVSNQVSHDEPIWKLDGLQVTCGTMGSSTATIKLVTSDGITHVACSVGVGPVDSAYKTINLIVKETVKVLEYSLSTVTEGTDAIATTRVVIRRENKQSPTPALNGNVIYPTFSGTGEGVDVVTSSVEAYLTALNKMLDLKE

SEQ ID NO: 13362 - DNA, 1881 bp, Zea mays
  CDS (1)..(1881)
atggcgtcctcgctgctctcctcccccgctaaacccaccaccgccaccaccaccaaaacgaccccggccccaagacccgcccgctccgcccatgtcctctccgccgcccgctgcctccgcctccgcctccgcgcggtccccgcccgagcgtcgtcgcagcatcctccgcctccgcccaccccgcggtcgcggcggccggattacgtcccgaaccgcatcgacgaccccaactacgtgcgcatcttcgacaccacgctgcgcgacggggagcagtcgccgggcgccaccatgacgagcgcccagaagctcgtcgtcgcgcgccagctggcccgcctcggcgtcgacatcatcgaggcagggttcccggcctcctcccccgacgacctcgacgccgtgcgctccatcgccatcgaggtcggcaacccgcccactgccagcgctgggaccgtccacgtgcccgtcatctgcggcctgtcgcggtgcaacaggaaggatatcgacgccgcatgggaggccgtcaggcacgcgcggaggccccggatccacactttcatcgccaccagcgagatccacatgcagcataagctcaggaagacgcccgagcaggtcgtcgctattgccagggagatggtggcgtacgcgcgcagcctcgggtgccccgatgttgaattcagccctgaggatgccggcaggtcaaatcgagaattcctgtatcatatactggaggaagtcattaaagctggagcaaccactcttaatatcccagacactgtcggatacactcttccttatgaatttgggaaattaattgctgacataaaggcaaacacttctggaattgaaaatgctatcatttccactcattgccagaatgaccttggtcttgcgactgccaacacattagcgggtgctcgctcaggagcaagacagttagaggtgactattaatggtattggtgaaagagctggaaatgcttcattggaagaggttgtcatggcaattaaatgtcgtggggagctcttagatggtctatatacgggaattaattcccagcatattactttgacaagcaaaatggtacaagagcatagtggacttcatgtgcaaccacataaggctattgttggtgccaatgcctttgctcatgaaagtggaattcatcaggatggcatgcttaaatataaaggaacatatgaaataatatcgcctgatgatattggtttaacacgtgcaaatgaatttggtattgttcttgggaaactcagcggaaggcatgcagtgagatctaagctagtggagcttggatatgaaatcagtgacaaggaatttgaagatttctttaaacgctacaaagaggtcgcagagaagaaaaagcgtgtaactgatgaagacatagaagcgttattgtcagatgagatattccagcctaaggttatttggtcccttgctgatgtacaggcaacatgtggaacacttggcttatctacagcaacagtgaaactgatagcaccagatggagaggagagaatagcatgttcagttggaacaggtccagttgatgcagcttacaaggctattgaccaaataatccagatcccaactgttctccgagaatatggtatgacctcagtcaccgaaggcatcgacgcaatcgcaacaacccgggtggttgtcaccggagatgtgaccaacaactccaaacatgccttgactggccgcgctttcaaccgctccttcagcgggagcggggcagcaatggacatcgtcgtctccagtgtcagagcttacctgagtgccctgaacaagatgtgtagctttgctggtgccgcgaaagccagcggcgaggtacctgagagtgcaagcgtccaaagcgcagagtga

SEQ ID NO: 13363 - protein, 626 aa, Zea mays
MASSLLSSPAKPTTATTTKTTPAPRPARSAHVLSAARCLRLRLRAVPARASSQHPPPPPTPRSRRPDYVPNRIDDPNYVRIFDTTLRDGEQSPGATMTSAQKLVVARQLARLGVDIIEAGFPASSPDDLDAVRSIAIEVGNPPTASAGTVHVPVICGLSRCNRKDIDAAWEAVRHARRPRIHTFIATSEIHMQHKLRKTPEQVVAIAREMVAYARSLGCPDVEFSPEDAGRSNREFLYHILEEVIKAGATTLNIPDTVGYTLPYEFGKLIADIKANTSGIENAIISTHCQNDLGLATANTLAGARSGARQLEVTINGIGERAGNASLEEVVMAIKCRGELLDGLYTGINSQHITLTSKMVQEHSGLHVQPHKAIVGANAFAHESGIHQDGMLKYKGTYEIISPDDIGLTRANEFGIVLGKLSGRHAVRSKLVELGYEISDKEFEDFFKRYKEVAEKKKRVTDEDIEALLSDEIFQPKVIWSLADVQATCGTLGLSTATVKLIAPDGEERIACSVGTGPVDAAYKAIDQIIQIPTVLREYGMTSVTEGIDAIATTRVVVTGDVTNNSKHALTGRAFNRSFSGSGAAMDIVVSSVRAYLSALNKMCSFAGAAKASGEVPESASVQSAE

SEQ ID NO: 13364 - DNA, 1881 bp, Zea mays
  CDS (1)..(1881)
atggcgtcctcgctgctctcctcccccgctaaacccaccatcaccaccaccaccaaaacgaccccggccccaagacccgcccgctccgcccatgtccatgtcctctccgccgcccgctgcctccgcctccgcctccgcgcgtcgtcgcagcatcctccgcctccgcccaccccgcggtcgcggcggccggattacgtcccgaaccgcatcgacgaccccaactacgtgcgcatcttcgacaccacgctgcgcgacggggagcagtcgccgggcgccaccatgacgagcgcccagaagctcgtcgtcgcgcgccagctggcccgcctcggcgtcgacatcatcgaggccgggttcccggcctcctcccccgacgacctcgacgccgtgcgctccatcgccatcgaggtcggcaacccggcgccaggacccgccggggaggaggacgccgtccacgtgccggtcatctgcggcctctcgcggtgcaaccggagggacatcgacgccgcgtgggaggccgtgcgccacgcgcgccggccccggatccacaccttcatcgccaccagcgacattcacatgcagcataagctcaggaagacgcccgaccaggtggtcgccattgccagggagatggtggcctacgcccgcagcctcggatgcactgacgtcgagttcagccccgaggacgccggcaggtcaaatagagagttcttgtatcatattctaggggaagtcataaaagctggagctacgactctcaatatcccggacactgtcggatacaatcttccttatgaatttggaaagttgattgctgatataaaggcaaacactcctggaattgaaaaggctatcatttccactcattgtcagaatgaccttggtcttgcgactgccaacacactagcgggcgctcgtgcaggagcacggcagttagaggttactattaatggtattggtgaaagggctggaaatgcttctttggaggaggttgtcatggcaattaaatgccgcagagaactgttagatggtctctatactggaatcgattcccgacatatcactttgacgagcaaaatggtgcaagaacatagtggacttcacgtgcagccacataaagctattgttggtgccaatgcgttcgctcatgaaagtggaattcatcaggatgggatgcttaaatataaaggaacttacgaaattatatcgcctgatgatattggtctaacacgtgcaaatgaatttggtattgttcttgggaaactcagcggaaggcatgctgtgagatctaagctagtagagcttggatatgaaatcggtgacaaggaatttgaggacttctttaaacgctacaaagaggttgcagagaagaaaaagcgcgtaactgatgaagacttagaagcgttattgtcggatgagatattccagcctaaggttatttggtcccttgctgatgtacaggcaacatgtggtacacttgctttatctacggcaacagtgaaattgatagcaccagatggagaggagaaaatagcatgttcagtcggaacaggtccagtcgatgcagcttacaaggctgttgacaaaataatccagattccaacggttctccgagaatacagtatgacatcagtcacagaaggcattgacgcaatcgcgacaactcgggttgttgtcactggagatgtgagcaacaacgccaaacatgccctgactggccagtctttcaaccgctccttcagcgggagcggggcatccatggacattgtggtgtccagtgtcagagcttacctgagcgccctgaacaagatctgcagtttcgctggtgccgtgaaagccagcagcgatgtagctgagaccgcaagcgtcccgagcacagaatga

SEQ ID NO: 13365 - protein, 626 aa, Zea mays
MASSLLSSPAKPTITTTTKTTPAPRPARSAHVHVLSAARCLRLRLRASSQHPPPPPTPRSRRPDYVPNRIDDPNYVRIFDTTLRDGEQSPGATMTSAQKLVVARQLARLGVDIIEAGFPASSPDDLDAVRSIAIEVGNPAPGPAGEEDAVHVPVICGLSRCNRRDIDAAWEAVRHARRPRIHTFIATSDIHMQHKLRKTPDQVVAIAREMVAYARSLGCTDVEFSPEDAGRSNREFLYHILGEVIKAGATTLNIPDTVGYNLPYEFGKLIADIKANTPGIEKAIISTHCQNDLGLATANTLAGARAGARQLEVTINGIGERAGNASLEEVVMAIKCRRELLDGLYTGIDSRHITLTSKMVQEHSGLHVQPHKAIVGANAFAHESGIHQDGMLKYKGTYEIISPDDIGLTRANEFGIVLGKLSGRHAVRSKLVELGYEIGDKEFEDFFKRYKEVAEKKKRVTDEDLEALLSDEIFQPKVIWSLADVQATCGTLALSTATVKLIAPDGEEKIACSVGTGPVDAAYKAVDKIIQIPTVLREYSMTSVTEGIDAIATTRVVVTGDVSNNAKHALTGQSFNRSFSGSGASMDIVVSSVRAYLSALNKICSFAGAVKASSDVAETASVPSTE

SEQ ID NO: 13366 - DNA, 1926 bp, Zea mays
  CDS (1)..(1926)
atggccttcaacgctaaaccctactgctccaccaccgccaaaccgcccacccccgccgcccaccgctcgccgtccggcccgtccccctgcatctccgtccgcgccgccgccgtatccccccgcgcccggcactcagcctatggcctctccgccgccggcaacgcgtcctccagcaccgtccgcctccgcgcgctggcccagcgcacccgggcgcagccgcagcctccccggcggcggcccgagtacgtgccgaaccgcatcgacgaccccaactacgtgcgcatcttcgacaccacgctccgcgacggggagcagtcgccgggcgccaccatgacgagcgccgagaagctcgtcgtcgcgcgccagctggcccgcctcggcgtcgacgtcatcgaggccgggttcccggcctcctcccccgacgacctcgacgccgtgcgctccatcgccatcaaggtcggcaacccgccgccgggggacgacgggggcgcccacgtgcccgtcatctgcggcctctcgcgctgcaacaggagggacatcgacgccgcgtgggaggccgtcaggcacgcgcggaggcccaggatccacaccttcatcgccaccagcgagatccacatgcagcacaagctcaggaagacgcccgaccaggtcgtcgccgttgccagggagatggtggcgtacgcacgcagccttgggtgcgccgatgtcgagttcagccctgaggatgccggcaggtcaaatcgagaattcctgtaccatatactggaggaagtcataaaagctggggcaaccactcttaatatcccagatactgtcggatacactcttccttatgaatttgggaagttaatttctgacataaaggaaaacactcctggaattgaaaatgccattatttccactcattgccagaatgaccttggccttgcaactgccaacacattagcgggtgctcatgcaggagcacgacagttagaggtgactattaatggtattggtgaaagggctggaaatgcttcattggaagaggttgtcatggcaattaaatgtcgtggggagctcttagatggtctatatacgggaataaattcccaacatattactttgacaagcaaaatggtacaagagcacagtggacttcatgtacaaccacataaagctattgttggtgccaatgcctttgcccatgaaagtggaattcatcaggatgggatgcttaaatataaaggaacatatgaaataatatcgcctgatgatattggtttagcacgtgcaaatgaatttggtattgttcttgggaaactcagtggaagacatgcagtgagatctaagctggtagagcttggatatgaaatcagtgacaaggaatttgaagatttctttaaacgctacaaagaggtcgcagagaagaaaaagcgtgtaactgatgaggacatagaagctttattgtcagatgagatattccagcctaaggttatttggtcccttgctgatgtacaggcaacatgtggaacacttggcttatctacagcaactgtgaaactgatagggccagatggagaggagagaatagcatgttcagttggaacaggtccagttgatgcagcttacaaggctgttgaccaaataatccagattccaaccgtcctccgagaatacggcatgacttcagtcacagaaggcattgacgctattgcgacgactcgagtggttgtcaccggagacgtggccaacaactccaaacacgccttgactggccactctttcaaccgctccttcagcgggagcggggcggcaatggacatcgtcgtgtccagcgtcagagcttacctgagtgccctgaacaagatgtgcagcttcgctggcgctgcgagagccagcagcaccgaggtgcctgggagcgcaagtgttcaacgcgcagaatga

SEQ ID NO: 13367 - protein, 641 aa, Zea mays
MAFNAKPYCSTTAKPPTPAAHRSPSGPSPCISVRAAAVSPRARHSAYGLSAAGNASSSTVRLRALAQRTRAQPQPPRRRPEYVPNRIDDPNYVRIFDTTLRDGEQSPGATMTSAEKLVVARQLARLGVDVIEAGFPASSPDDLDAVRSIAIKVGNPPPGDDGGAHVPVICGLSRCNRRDIDAAWEAVRHARRPRIHTFIATSEIHMQHKLRKTPDQVVAVAREMVAYARSLGCADVEFSPEDAGRSNREFLYHILEEVIKAGATTLNIPDTVGYTLPYEFGKLISDIKENTPGIENAIISTHCQNDLGLATANTLAGAHAGARQLEVTINGIGERAGNASLEEVVMAIKCRGELLDGLYTGINSQHITLTSKMVQEHSGLHVQPHKAIVGANAFAHESGIHQDGMLKYKGTYEIISPDDIGLARANEFGIVLGKLSGRHAVRSKLVELGYEISDKEFEDFFKRYKEVAEKKKRVTDEDIEALLSDEIFQPKVIWSLADVQATCGTLGLSTATVKLIGPDGEERIACSVGTGPVDAAYKAVDQIIQIPTVLREYGMTSVTEGIDAIATTRVVVTGDVANNSKHALTGHSFNRSFSGSGAAMDIVVSSVRAYLSALNKMCSFAGAARASSTEVPGSASVQRAE

SEQ ID NO: 13368 - DNA, 1881 bp, Zea mays
  CDS (1)..(1881)
atggcgtcctcgctgctctcctcccccgctaaacccaccatcaccaccaccaccaaaacgaccccggccccaagacccgcccgctccgcccatgtccatgtcctctccgccgcccgctgcctccgcctccgcctccgcgcgtcgtcgcagcatcctccgcctccgcccaccccgcggtcgcggcggccggattacgtcccgaaccgcatcgacgaccccaactacgtgcgcatcttcgacaccacgctgcgcgacggggagcagtcgccgggcgccaccatgacgagcgcccagaagctcgtcgtcgcgcgccagctggcccgcctcggcgtcgacatcatcgaggccgggttcccggcctcctcccccgacgacctcgacgccgtgcgctccatcgccatcgaggtcggcaacccggcgccaggacccgccggggaggaggacgccgtccacgtgccggtcatctgcggcctctcgcggtgcaaccggaaggacatcgacgccgcgtgggaggccgtgcgccacgcgcgccgcccccggatccacaccttcatcgccaccagcgacattcacatgcagcataagctcaggaagacgcccgaccaggtggtcgccattgccagggagatggtggcctacgcccgcagcctcggatgcactgacgtcgagttcagccccgaggacgccggcaggtcaaatagagagttcttgtatcatattctaggggaagtcataaaagctggagctacgactctcaatatcccggacactgtcggatacaatcttccttatgaatttggaaagttgattgctgatataaaggcaaacactcctggaattgaaaaggctatcatttccactcattgtcagaatgaccttggtcttgcgactgccaacacactagcgggcgctcgtgcaggagcacggcagttagaggttactattaatggtattggtgaaagggctggaaatgcttctttggaggaggttgtcatggcaattaaatgccgcagagaactgttagatggtctctatactggaatcgattcccgacatatcactttgacgagcaaaatggtgcaagagcatagtggacttcacgtgcagccacataaagctattgttggtgccaatgcgttcgctcatgaaagtggaattcatcaggatgggatgcttaaatataaaggaacatacgaaattatatcgcctgatgatattggtctaacacgtgcaaatgaatttggtattgttcttgggaaactcagcggaaggcatgctgtgagatctaagctagtagagcttggatatgaaatcggtgacaaggaatttgaggacttctttaaacgctacaaagaggttgcagagaagaaaaagcgcgtaactgatgaagacttagaagcgttattgtcagatgagatattccagcctaaggttatttggtcccttgctgatgtacaggcaacatgtggtacacttgctttatctacggcaacagtgaaattggtagcaccagatggagaggagaaaatagcatgttcagtcggaacaggtccagtcgatgcagcttacaaggctgttgacaaaataatccagattccaacggttctccgagaatacagtatgacatcagtcacagaaggcattgacgcaatcgcgacaactcgggttgttgtcactggagatgtgagcaacaacgccaaacatgccctgactggccagtccttcaaccgctccttcagcgggagcggggcatccatggacattgtggtgtccagtgtcagagcttacctgagcgccctgaacaagatctgcagtttcgctggcgccgtgaaagccagcagcgatgtagctgagaccgcaagcgtcccgagcacagaatga

SEQ ID NO: 13369 - protein, 626 aa, Zea mays
MASSLLSSPAKPTITTTTKTTPAPRPARSAHVHVLSAARCLRLRLRASSQHPPPPPTPRSRRPDYVPNRIDDPNYVRIFDTTLRDGEQSPGATMTSAQKLVVARQLARLGVDIIEAGFPASSPDDLDAVRSIAIEVGNPAPGPAGEEDAVHVPVICGLSRCNRKDIDAAWEAVRHARRPRIHTFIATSDIHMQHKLRKTPDQVVAIAREMVAYARSLGCTDVEFSPEDAGRSNREFLYHILGEVIKAGATTLNIPDTVGYNLPYEFGKLIADIKANTPGIEKAIISTHCQNDLGLATANTLAGARAGARQLEVTINGIGERAGNASLEEVVMAIKCRRELLDGLYTGIDSRHITLTSKMVQEHSGLHVQPHKAIVGANAFAHESGIHQDGMLKYKGTYEIISPDDIGLTRANEFGIVLGKLSGRHAVRSKLVELGYEIGDKEFEDFFKRYKEVAEKKKRVTDEDLEALLSDEIFQPKVIWSLADVQATCGTLALSTATVKLVAPDGEEKIACSVGTGPVDAAYKAVDKIIQIPTVLREYSMTSVTEGIDAIATTRVVVTGDVSNNAKHALTGQSFNRSFSGSGASMDIVVSSVRAYLSALNKICSFAGAVKASSDVAETASVPSTE

SEQ ID NO: 13370 - DNA, 1866 bp, Zea mays
  CDS (1)..(1866)
atggccttcaacgctaaaccctactgctccaccaccgccaaaccgcccacccccgccgcccaccgctcgccgtccggcccgtccccctgcatctccgtccgcgccgccgccgtatccccccgcgcccggcactcagcctatggcctctccgccgccggcaacgcgtcctccagcaccgtccgcctccgcgcgctggcccagcgcacccgggcgcagccgcagcctccccggcggcggcccgagtacgtgccgaaccgcatcgacgaccccaactacgtgcgcatcttcgacaccacgctccgcgacggggagcagtcgccgggcgccaccatgacgagcgccgagaagctcgtcgtcgcgcgccagctggcccgcctcggcgtcgacgtcatcgaggccgggttcccggcctcctcccccgacgacctcgacgccgtgcgctccatcgccatcgaggtcggcaacccgccgccgggggacgacgggggcgcccacgtgcccgtcaggcacgcgcggaggcccaggatccacaccttcatcgccaccagcgagatccacatgcagcacaagctcaggaagacgcccgaccaggtcgtcgccgttgccagggagatggtggcgtacgcacgcagccttgggtgcgccgatgtcgagttcagccctgaggatgccggcaggtcaaatcgagaattcctgtaccatatactggaggaagtcataaaagctggggcaaccactcttaatatcccagacactgtcggatacactcttccttatgaatttgggaaattaattgctgacataaaggcaaacacttctggaattgaaaatgctatcatttccactcattgccagaatgaccttggtcttgcgactgccaacacattagcgggtgctcgctcaggagcaagacagttagaggtgactattaatggtattggtgaaagagctggaaatgcttcattggaagaggttgtcatggcaattaaatgtcgtggggagctcttagatggtctatatacgggaattaattcccagcatattactttgacaagcaaaatggtacaagagcatagtggacttcatgtgcaaccacataaggctattgttggtgccaatgcctttgctcatgaaagtggaattcatcaggatggcatgcttaaatataaaggaacatatgaaataatatcgcctgatgatattggtttaacacgtgcaaatgaatttggtattgttcttgggaaactcagcggaaggcatgcagtgagatctaagctagtggagcttggatatgaaatcagtgacaaggaatttgaagatttctttaaacgctacaaagaggtcgcagagaagaaaaagcgtgtaactgatgaagacatagaagcgttattgtcagatgagatattccagcctaaggttatttggtcccttgctgatgtacaggcaacatgtggaacacttggcttatctacagcaacagtgaaactgatagcaccagatggagaggagagaatagcatgttcagttggaacaggtccagttgatgcagcttacaaggctattgaccaaataatccagatcccaactgttctccgagaatatggtatgacctcagtcaccgaaggcatcgacgcaatcgcaacaacccgggtggttgtcaccggagatgtgaccaacaactccaaacatgccttgactggccgcgctttcaaccgctccttcagcgggagcggggcagcaatggacatcgtcgtctccagtgtcagagcttacctgagtgccctgaacaagatgtgtagctttgctggtgccgcgaaagccagcggcgaggtacctgagagtgcaagcgtccaaagcgcagagtga

SEQ ID NO: 13371 - protein, 621 aa, Zea mays
MAFNAKPYCSTTAKPPTPAAHRSPSGPSPCISVRAAAVSPRARHSAYGLSAAGNASSSTVRLRALAQRTRAQPQPPRRRPEYVPNRIDDPNYVRIFDTTLRDGEQSPGATMTSAEKLVVARQLARLGVDVIEAGFPASSPDDLDAVRSIAIEVGNPPPGDDGGAHVPVRHARRPRIHTFIATSEIHMQHKLRKTPDQVVAVAREMVAYARSLGCADVEFSPEDAGRSNREFLYHILEEVIKAGATTLNIPDTVGYTLPYEFGKLIADIKANTSGIENAIISTHCQNDLGLATANTLAGARSGARQLEVTINGIGERAGNASLEEVVMAIKCRGELLDGLYTGINSQHITLTSKMVQEHSGLHVQPHKAIVGANAFAHESGIHQDGMLKYKGTYEIISPDDIGLTRANEFGIVLGKLSGRHAVRSKLVELGYEISDKEFEDFFKRYKEVAEKKKRVTDEDIEALLSDEIFQPKVIWSLADVQATCGTLGLSTATVKLIAPDGEERIACSVGTGPVDAAYKAIDQIIQIPTVLREYGMTSVTEGIDAIATTRVVVTGDVTNNSKHALTGRAFNRSFSGSGAAMDIVVSSVRAYLSALNKMCSFAGAAKASGEVPESASVQSAE

SEQ ID NO: 13372 - DNA, 22 bp, Artificial sequence
  primer
atgcgggagtggaagattattg

SEQ ID NO: 13373 - DNA, 24 bp, Artificial sequence
  primer
ttacgccgtgatccactcccggag

SEQ ID NO: 13374 - protein, 371 aa, Artificial sequence
  consensus sequence
  Variant (10)..(19): Xaa in position 10 to 19 is any amino acid
  Variant (21)..(22): Xaa in position 21 to 22 is any amino acid
  Variant (25)..(26): Xaa in position 25 to 26 is any amino acid
  Variant (28)..(31): Xaa in position 28 to 31 is any amino acid
  Variant (33)..(35): Xaa in position 33 to 35 is any amino acid
  Variant (37)..(37): Xaa in position 37 is any amino acid
  Variant (39)..(39): Xaa in position 39 is any amino acid
  Variant (41)..(52): Xaa in position 41 to 52 is any amino acid
  Variant (54)..(64): Xaa in position 54 to 64 is any amino acid
  Variant (65)..(80): Xaa in position 65 to 80 is any or no amino acid
  Variant (82)..(85): Xaa in position 82 to 85 is any amino acid
  Variant (87)..(101): Xaa in position 87 to 101 is any amino acid
  Variant (102)..(112): Xaa in position 102 to 112 is any or no amino acid
  Variant (114)..(149): Xaa in position 114 to 149 is any amino acid
  Variant (150)..(152): Xaa in position 150 to 152 is any or no amino acid
  Variant (154)..(156): Xaa in position 154 to 156 is any amino acid
  Variant (158)..(159): Xaa in position 158 to 159 is any amino acid
  Variant (161)..(165): Xaa in position 161 to 165 is any amino acid
  Variant (167)..(176): Xaa in position 167 to 176 is any amino acid
  Variant (177)..(177): Xaa in position 177 is any or no amino acid
  Variant (179)..(184): Xaa in position 179 to 184 is any amino acid
  Variant (185)..(185): Xaa in position 185 is any or no amino acid
  Variant (188)..(188): Xaa in position 188 is any amino acid
  Variant (190)..(192): Xaa in position 190 to 192 is any amino acid
  Variant (194)..(212): Xaa in position 194 to 212 is any amino acid
  Variant (213)..(221): Xaa in position 213 to 221 is any or no amino acid
  Variant (223)..(223): Xaa in position 223 is any amino acid
  Variant (227)..(227): Xaa in position 227 is any amino acid
  Variant (229)..(229): Xaa in position 229 is any amino acid
  Variant (231)..(231): Xaa in position 231 is any amino acid
  Variant (234)..(240): Xaa in position 234 to 240 is any amino acid
  Variant (242)..(242): Xaa in position 242 is any amino acid
  Variant (244)..(248): Xaa in position 244 to 248 is any amino acid
  Variant (250)..(251): Xaa in position 250 to 251 is any amino acid
  Variant (253)..(253): Xaa in position 253 is any amino acid
  Variant (257)..(257): Xaa in position 257 is any amino acid
  Variant (260)..(261): Xaa in position 260 to 261 is any amino acid
  Variant (262)..(262): Xaa in position 262 is any or no amino acid
  Variant (264)..(290): Xaa in position 264 to 290 is any amino acid
  Variant (291)..(305): Xaa in position 291 to 305 is any or no amino acid
  Variant (307)..(320): Xaa in position 307 to 320 is any amino acid
  Variant (323)..(324): Xaa in position 323 to 324 is any amino acid
  Variant (325)..(326): Xaa in position 325 to 326 is any or no amino acid
  Variant (328)..(328): Xaa in position 328 is any amino acid
  Variant (330)..(331): Xaa in position 330 to 331 is any amino acid
  Variant (335)..(338): Xaa in position 335 to 338 is any amino acid
  Variant (340)..(343): Xaa in position 340 to 343 is any amino acid
  Variant (347)..(351): Xaa in position 347 to 351 is any amino acid
  Variant (352)..(353): Xaa in position 352 to 353 is any or no amino acid
  Variant (355)..(365): Xaa in position 355 to 365 is any amino acid
  Variant (366)..(370): Xaa in position 366 to 370 is any or no amino acid
DTTLRDGEQXXXXXXXXXXKXXIAXXLXXXXVXXXEXGXPXXXXXXXXXXXXIXXXXXXXXXXXXXXXXXXXXXXXXXXXRXXXXDXXXXXXXXXXXXXXXXXXXXXXXXXXSXXXXXXXXXXXXXXXXXXXXXXXXXXXXXXXXXXXXXXXEXXXDXXRXXXXXLXXXXXXXXXXXGXXXXXXXDTXGXXXPXXXXXXXXXXXXXXXXXXXXXXXXXXXXHXHNDXGXAXANXXXXXXXGXAXXXXXTXXGXGERXGNXXXLXXXXXXXXXXXXXXXXXXXXXXXXXXXXXXXXXXXXXXXXXXVXXXXXXXXXXXXXXVGXXXXFXHXXGIHXXXXLXXXXTYEXXXXXXXGXXXXXXXXXXXXXXXXG

SEQ ID NO: 13375 - protein, 16 aa, Artificial sequence
  protein pattern
  Variant (2)..(3): Xaa in position 2 to 3 is any amino acid
  Variant (4)..(4): Xaa in position 4 is Asp or Asn
  Variant (6)..(6): Xaa in position 6 is any amino acid
  Variant (7)..(7): Xaa in position 7 is Asp or Gly
  Variant (8)..(8): Xaa in position 8 is any amino acid
  Variant (10)..(10): Xaa in position 10 is any amino acid
  Variant (13)..(15): Xaa in position 13 to 15 is any amino acid
  Variant (16)..(16): Xaa in position 16 is Ala or Gly
HXXXDXXXAXANXXXX

SEQ ID NO: 13376 - DNA, 1185 bp, Saccharomyces cerevisiae
  CDS (1)..(1185)
atgactctacaagaatctgataaatttgctaccaaggccattcatgccggtgaacatgtggacgttcacggttccgtgatcgaacccatttctttgtccaccactttcaaacaatcttctccagctaaccctatcggtacttacgaatactccagatctcaaaatcctaacagagagaacttggaaagagcagttgccgctttagagaacgctcaatacgggttggctttctcctctggttctgccaccaccgccacaatcttgcaatcgcttcctcagggctcccatgcggtctctatcggtgatgtgtacggtggtacccacagatacttcaccaaagtcgccaacgctcacggtgtggaaacctccttcactaacgatttgttgaacgatctacctcaattgataaaggaaaacaccaaattggtctggatcgaaaccccaaccaacccaactttgaaggtcaccgacatccaaaaggtggcagaccttatcaagaagcacgctgccggccaagacgtgatcttggttgtcgacaacaccttcttgtccccatatatctccaatccattgaacttcggtgcagacatcgttgtccactccgctacaaagtacatcaacggtcactcagacgttgtgctcggtgtcctggccactaataacaagccattgtacgagcgtctgcagttcttacaaaacgccattggtgctatcccatctcctttcgatgcttggttgacccacagaggtttgaagactttgcatctacgtgtcagacaagctgccctcagcgccaacaaaatcgctgaattcttggcagcagacaaggaaaacgttgtcgcagtcaactacccaggtttgaagacacaccctaactacgacgtagtgttaaagcaacaccgtgatgcccttggtggtggtatgatctccttcagaatcaagggtggtgctgaagctgcttccaagttcgcctcctccacaagactgttcacattggccgaatcccttggtggtatcgaatctctattggaagtgcccgctgtgatgacccacggtggtatcccaaaggaggccagagaggcctctggtgtttttgacgacttggttagaatctctgtcggtattgaagacactgacgatcttttggaagacatcaagcaagccttgaaacaagccaccaactaa

SEQ ID NO: 13377 - protein, 394 aa, Saccharomyces cerevisiae
MTLQESDKFATKAIHAGEHVDVHGSVIEPISLSTTFKQSSPANPIGTYEYSRSQNPNRENLERAVAALENAQYGLAFSSGSATTATILQSLPQGSHAVSIGDVYGGTHRYFTKVANAHGVETSFTNDLLNDLPQLIKENTKLVWIETPTNPTLKVTDIQKVADLIKKHAAGQDVILVVDNTFLSPYISNPLNFGADIVVHSATKYINGHSDVVLGVLATNNKPLYERLQFLQNAIGAIPSPFDAWLTHRGLKTLHLRVRQAALSANKIAEFLAADKENVVAVNYPGLKTHPNYDVVLKQHRDALGGGMISFRIKGGAEAASKFASSTRLFTLAESLGGIESLLEVPAVMTHGGIPKEAREASGVFDDLVRISVGIEDTDDLLEDIKQALKQATN

SEQ ID NO: 13378 - DNA, 2115 bp, Glycine max
  CDS (442)..(1848)
agggtcgggggcgcgtccgtacggctgcgaagacgacagaagggtacggctgcgaagacgacagaagggtacggctgcgagaagacgacagaagggtacggctgcgagaagacgacagaagggtacggctgcgagaagacgacagaagggtacggctgcgagaagacgacagaagggtacggctgcgagaagacgacagaagggtacggctgcgagaagacgacagaagggtacggctgcgagaagacgacagaagggtacggctgcgagaagacgacagaagggtacggctgcgagaagacgacagaagggtacggctgcgagaagacgacagaaggggggtgaccaaatgcaaagacggcattgaaattgaacacaatccatgactaacacaagcgcagacgacaacataacactgctccaaacatatcaatttcaataatgttttcttctgcaatttctccgaagcccttccttcggtccctcgtcattgatcgttacgctcagagcacaactactgcaaccaggtgggagtgcttggggtttaacaagtcagaaaatttcagtaccaagagagagttgtgtgctgaggggttcaagctgaattgcttggttgaaaatagagagatggatgtggagtcatcatcatcatcatctttggtggatgatgcttccttgagcttaagtgaagaggatttaggggagcctagtatttcaacattggtgatgaatttcgagagtaagttcgatccttttggagcaattagtacccctctttaccaaacggctacttttaagcagccttctgcaatagaaaacggcccctatgactataccagaagtggaaatcctacacgagatgctttagaaagtttactagcaaagcttgataaagcagatagagccctgtgcttcaccagtggaatggctgctttgagtgctgttgttcgtcttgttggaactggcgaggaaattgtcgccggagatgatgtatatggtggctcagataggttgctgtctcaagtggttccaaggactggaattgtggtgagacgggcaaatacatgtgatctaaatgaggttgcagcagccattggacccaagactaagcttgtgtggcttgagagtccaaccaatcctcggctacaaatttctgatattcaaaaaatatcagagatagctcattcacatggtgctcttgtgttagtggacaatagtataatgtcacctgtgttgtctcggccattggaacttggagcagatattgtcatgcactctgctacaaaatttattgctggacatagtgacattatggctggtgtgcttgctgtgaagggtgaaaagttgggaaaggaattgtatttcttgcaaaatgcagagggttcaggcttagcaccatttgactgttggctttgtttgcgaggaatcaagacaatggccccgcgaattgaaaaacaacaggataatgcacagaagattgctgagttccttgcctcccatcctcgagtgaagaaagtgaattatgctggcttgcctggtcatcctggtcgtgatttacactattctcaggcaaagggtgcaggatctgtgcttagcttcttgactggttcattggaactttcaaagcatattgttgaaactaccaaatacttcagtataaccgtcagctttgggagtgtgaagtcccttattagcatgccatgctttatgtcacatgcaagcatacctgctgcagttcgtgaggccagaggtttaactgaagatcttgtacgtatatctgtgggaattgaggatgtgagtgctcgcattgctgatcttgacaatgcacttagaacagggcctctttaatgttttttttgtctaaatattcatccttaggaagttgcattggcaagatgttagttagcatgttgaggatttgagagcatgcattgttatcttttctttggattcttgtgagtggaaatttgatgtgtttcttacgtgcatgtaataaaatccgtatttcctgtaattttcttgttacaattgttatcctcaccttcaaatatcgggtcataagttattaaagagtggtaaaagtattggcctatgaagattgacagagcctagtcc

SEQ ID NO: 13379 - protein, 468 aa, Glycine max
MFSSAISPKPFLRSLVIDRYAQSTTTATRWECLGFNKSENFSTKRELCAEGFKLNCLVENREMDVESSSSSSLVDDASLSLSEEDLGEPSISTLVMNFESKFDPFGAISTPLYQTATFKQPSAIENGPYDYTRSGNPTRDALESLLAKLDKADRALCFTSGMAALSAVVRLVGTGEEIVAGDDVYGGSDRLLSQVVPRTGIVVRRANTCDLNEVAAAIGPKTKLVWLESPTNPRLQISDIQKISEIAHSHGALVLVDNSIMSPVLSRPLELGADIVMHSATKFIAGHSDIMAGVLAVKGEKLGKELYFLQNAEGSGLAPFDCWLCLRGIKTMAPRIEKQQDNAQKIAEFLASHPRVKKVNYAGLPGHPGRDLHYSQAKGAGSVLSFLTGSLELSKHIVETTKYFSITVSFGSVKSLISMPCFMSHASIPAAVREARGLTEDLVRISVGIEDVSARIADLDNALRTGPL

SEQ ID NO: 13380 - DNA, 1182 bp, Ashbya gossypii
  CDS (1)..(1182)
atgggtgttcttccgacagacaagtttgcaacgaaagctattcatgctggcgcacatactgacctacatgggtcggtcatcgagcccatctcgctttcgaccaccttcaagcagtcgagtcccggcaacccagtgggcgcctacgaatactctcgtggtcagaaccccaaccgtcagaacctagaggaagccattgctgcactcgagagcgcaaagtacgggttggctttctcctctggatccgcgaccacagccgtgatagtgcagtctctgccacaaggctcgcacgcgatctcgatcggcgatgtctatggtgggacccatcgctactttacaaaggttgccaatgcccatggtgtggagacctccttcacaaatagcctgcttgaggacctgcctaagctggtccgcgacaacactcgtctagtctggatcgagtctcccaccaaccccactctgcaggtcactgatatccagcaggttgcggacaccgtgaaggccttgaatgaggacattattctggttgtggacaacacattcctctccccatacctgtcgaacccgctcaacttcggtgctgacatcgtcatccattcggctacaaagtacatcaatggccactccgacgttgtgcttggtgctttagccacgaactccaccagtttatatgaacggcttgcattcctacaaaatgccattggcgccatcccatcgccgttcgacgcatggctgacacacagaggcctaaaaaccttgcacctgcgtgtgcgccaggctgctcagtctgctcagaaaattgctgagtacctggagcagtcagagcacgttgtgtctgttaactacccgggcctgccctcgcaccgcggctaccagattgctcagaaacagcacagagatggtttgggcggcggtatgatctcattccgtgttaagggcggcgcgcagggcgctgctctactttctcaatccaccagactatttactctagctgagtctctaggcggcattgagtccttgttggaggtccctgcggtaatgactcatgctggcattccgaaggaggccagagaggcttctggtgtctacgacgatctggtcagagtctccgtgggaattgaggacactgatgaccttctggaggacatcaagcaggcgctgagtgtagtcgctgaatctatctaa

SEQ ID NO: 13381 - protein, 393 aa, Ashbya gossypii
MGVLPTDKFATKAIHAGAHTDLHGSVIEPISLSTTFKQSSPGNPVGAYEYSRGQNPNRQNLEEAIAALESAKYGLAFSSGSATTAVIVQSLPQGSHAISIGDVYGGTHRYFTKVANAHGVETSFTNSLLEDLPKLVRDNTRLVWIESPTNPTLQVTDIQQVADTVKALNEDIILVVDNTFLSPYLSNPLNFGADIVIHSATKYINGHSDVVLGALATNSTSLYERLAFLQNAIGAIPSPFDAWLTHRGLKTLHLRVRQAAQSAQKIAEYLEQSEHVVSVNYPGLPSHRGYQIAQKQHRDGLGGGMISFRVKGGAQGAALLSQSTRLFTLAESLGGIESLLEVPAVMTHAGIPKEAREASGVYDDLVRVSVGIEDTDDLLEDIKQALSVVAESI

SEQ ID NO: 13382 - DNA, 1628 bp, Acremonium chrysogenum
  CDS (151)..(1404)
cctctcaagagtgcgcctgttcttgcttcgaccggttcctgcgaggggcacgaaaaaaaaaacaagaggaggggcaagagaagcgcgggtcacattccatcgaacgaacccgtcaacacaaaccaaagaacaaataccttcacacagaccatgtctcctacagcggcacccgccattgacggcgccgtcgtcgagacgcctccgcgccctcctactcctgtccacaacttcggcaccctcgccgtccacgcgggctcgccgcacgatgccgccaccggtgccgttatcgagtccatctcgctgtctaccacctttgcccagaccgccgtcggcaaacccgtaggtgactacgagtactcgcgctccgccaaccccaaccgcaccaacttcgagacggccgtcgcggccctcgaacacgcccgctacgccctcgccttctccagtggtagcgccaccaccgccaccatcctccagagccttgccgccggctcccacgttatctcagtctccgacgtttacggcggcacccaccgctacttcacccaggttgccaaggcccacggtgtcaaggtcacattcactccggaaattgaagtcgacgtcagtgagcacatcaccgaccaaacccgcctcatctggatcgagacccctagcaaccccaccctgcgtcttgtcgacatccgcgccgttgtctccgtcgcccacaagcatggtgtcctcgttgtcgtcgacaataccttcctctcaccttatgtgcagaacccgctcgacctcggcgccgacattgtcgtccacagcgtcaccaagtacattaacggccacagcgacgtcgtcatgggcgttgccgctttcaactccccggaattgaaggaccgcctcggcttcctccagaacgccattggcgccgtcccctccgccttcgacagctggctcgcccaccgcggcctcaagaccctccacctccgcgcccgcgaggcgtcgcgcaacgccgccgctgtcgccgctgccctcgaggcctcccctaatgtcatctccgtcaactaccctggccttgactcgcaccctcatcgccacatcgccctcaagcagcaccgcgacggcatgggcggcggcatgctctccttccgcattcgcggtggccacgacgccgccgagcgcttctgccagcagacccgaatcttcaccctagccgagtcccttggcggcgttgagtcgctcgtcgagttgcccagcagcatgacccatgccggtatcccccgcgaccagcgcgaggccgtcggcgtctttgacgacctggtccgcgtgagctgcggtgttgaggatgccgaggacctgaagaatgacgtgctccgcgccgtggagaaggccgtggagttgtcaaagaatggtgtcaagggccaataacgccgacctacctcccctgaccccgatttatatacacacataaggagttcctagacgcacgaggtaatatcactgcctcctgacgaaacacaaaaagttagtagaagatgaaagcaagacagaaaaaaaaaggcatagcattcaaaacgagtacgtagaaagaggattcagagtcatgagaaatgatatttcattcctgtaatgggaattagaggtttcacgca

SEQ ID NO: 13383 - protein, 417 aa, Acremonium chrysogenum
MSPTAAPAIDGAVVETPPRPPTPVHNFGTLAVHAGSPHDAATGAVIESISLSTTFAQTAVGKPVGDYEYSRSANPNRTNFETAVAALEHARYALAFSSGSATTATILQSLAAGSHVISVSDVYGGTHRYFTQVAKAHGVKVTFTPEIEVDVSEHITDQTRLIWIETPSNPTLRLVDIRAVVSVAHKHGVLVVVDNTFLSPYVQNPLDLGADIVVHSVTKYINGHSDVVMGVAAFNSPELKDRLGFLQNAIGAVPSAFDSWLAHRGLKTLHLRAREASRNAAAVAAALEASPNVISVNYPGLDSHPHRHIALKQHRDGMGGGMLSFRIRGGHDAAERFCQQTRIFTLAESLGGVESLVELPSSMTHAGIPRDQREAVGVFDDLVRVSCGVEDAEDLKNDVLRAVEKAVELSKNGVKGQ

SEQ ID NO: 13384 - DNA, 1149 bp, Klebsiella pneumoniae subsp. pneumoniae MGH 78578
  CDS (1)..(1149): transl_table=11
atgtcatctatccacaccctgagtgtacatagcggaaccttcaccgacagccacggcgcagtgatgccgccgatttatgccacctccacttttgctcagccagcgccggggcagcataccggttatgaatattcccgcagcgggaatcccacccgccacgcgctggagacggcgatcgccgacctggaaaacggcacgcgcggctacgcgttcgcctccgggctggccgccatctccaccgtgctggagctgctggataaggacagtcacctggtggcggtcgatgatgtgtatggcggcacttaccgcctgctggaaaacgttcgccgccgtagcgcgggtctgcaggtgagctgggtgaaacccgacgacctggcgggaattgaagcggcgatccgccccgacacccgcatgatctgggtggaaacgcccaccaacccgctgctgaagctcgcggatctcagcgccatcgccgccatcgcgcgccgccataacctgatcagcgtcgccgataacaccttcgcttcgccggcgatccatcgcccgctggagcatgagtttgatattgtggtgcactccgcgaccaagtacctcaacggccattccgatgtcgtcgccggcctggcggtggttggcgataactccgagctcgcggaaaagcttggctatctgcagaatgcggtaggcggcgtgcttgacccgttcagcagcttcctgacgctgcgcggcatccgtaccctggcgctgcggatggagcgccacagcgcgaacgcgctgcagctcgccgaatggctggaacagcagccggaagtggagcgagtctggtttccctggctggcctcgcacccgcatcatcagctggcgcgccagcaaatggccctgcccggcggcatgatttcggtggtggtgaagggcgatgaaggttacgccgagcgcatcatcagcaagctgcgctggtttacgcttgcggagagcctgggcggcgtggagagtctggtgagccagcccttcagcatgacccatgcctcgattccgctggagaaacgcctggcgaacggtatcacaccgcagctgatccgcctgtcggtggggatcgaagatcctcacgatctgattgccgactggcagcaggcgctgcggagggagtga

SEQ ID NO: 13385 - protein, 382 aa, Klebsiella pneumoniae subsp. pneumoniae MGH 78578
MSSIHTLSVHSGTFTDSHGAVMPPIYATSTFAQPAPGQHTGYEYSRSGNPTRHALETAIADLENGTRGYAFASGLAAISTVLELLDKDSHLVAVDDVYGGTYRLLENVRRRSAGLQVSWVKPDDLAGIEAAIRPDTRMIWVETPTNPLLKLADLSAIAAIARRHNLISVADNTFASPAIHRPLEHEFDIVVHSATKYLNGHSDVVAGLAVVGDNSELAEKLGYLQNAVGGVLDPFSSFLTLRGIRTLALRMERHSANALQLAEWLEQQPEVERVWFPWLASHPHHQLARQQMALPGGMISVVVKGDEGYAERIISKLRWFTLAESLGGVESLVSQPFSMTHASIPLEKRLANGITPQLIRLSVGIEDPHDLIADWQQALRRE

SEQ ID NO: 13386 - DNA, 1161 bp, Klebsiella pneumoniae subsp. pneumoniae MGH 78578
  CDS (1)..(1161): transl_table=11
atgacgcgtaaacaggccaccatcgcagtgcgtagcggtttaaatgacgacgagcagtacggttgcgttgtcccgccgattcacctctccagtacctataacttcaccggctttaatgaaccgcgcgcccacgactactcccgtcgtggcaatccgacgcgcgatgtggtgcagcgcgccttagcggagctggagggcggcgccggcgcggtgctgaccaataccggaatgtcggcgatcctgctggtgacgacagtgttccttaaaccgggcgatctgctggtggcgccgcacgactgctacggcggcagctaccgtctgttcgacagcctggcgaagcgcggctgctatcgcgtccagtttgtcgatcaaagcgatgagcaggcgctgcgggcggcgctggcggaaaaaccgaagctggtgttggtggaaagcccaagtaatccattgctgcgggtggtggatattgcgaaaatctgtggtctggcgcgtgaggccggggcaattagcgtggtggacaacaccttcctgagcccggcgttgcaaaacccgctggcgctgggcgccgatctggtgctgcattcctgtaccaaatacctcaatggtcactccgatgtggtggccggggtggtgattgccaaagatccggcaactgtcaccgaactggcatggtgggcgaataatattggcgtcaccggcagcgccttcgacagctatctgctgttgcgcgggctgcggacgctgtctccacggatggaagtggcgcagcgaaatgccctggcgatcgttgagtatctgaaaacccagccgctggtgaaaaagctgtatcatccatcgctgccggaaaaccaggggcatgaaattgcggcgcgtcagcaaaaaggttttggcgcaatgttaagcttcgagcttgacggtgacgagcagacgctgcgccgttttctgagcgggctgtcgctgtttacactggcggaatcgctggggggcgttgaaagcctgatttcccatgcggcaacgatgacgcatgccggcatggcgcctgaagcgcgtgccgccgccggaatttcagaaacgctcctgcgtatatcgaccggtattgaagatggtgaagatttaattgccgacctggaaaatggcttccgggcagcaaacgaggaataa

SEQ ID NO: 13387 - protein, 386 aa, Klebsiella pneumoniae subsp. pneumoniae MGH 78578
MTRKQATIAVRSGLNDDEQYGCVVPPIHLSSTYNFTGFNEPRAHDYSRRGNPTRDVVQRALAELEGGAGAVLTNTGMSAILLVTTVFLKPGDLLVAPHDCYGGSYRLFDSLAKRGCYRVQFVDQSDEQALRAALAEKPKLVLVESPSNPLLRVVDIAKICGLAREAGAISVVDNTFLSPALQNPLALGADLVLHSCTKYLNGHSDVVAGVVIAKDPATVTELAWWANNIGVTGSAFDSYLLLRGLRTLSPRMEVAQRNALAIVEYLKTQPLVKKLYHPSLPENQGHEIAARQQKGFGAMLSFELDGDEQTLRRFLSGLSLFTLAESLGGVESLISHAATMTHAGMAPEARAAAGISETLLRISTGIEDGEDLIADLENGFRAANEE

SEQ ID NO: 13388 - DNA, 1221 bp, Xanthobacter autotrophicus Py2
  CDS (1)..(1221): transl_table=11
atgtccgtggcgcaaaagccagcccccaaattcatccccaaagatccccttacactccacccggagacgcgcctagtccatggcggtaccacgcgctcgccctatggggagacctccgaggcgctgttcctgacccagggcttcgtctacgacaatgccgagtcctgcgaggcccgcttcaagggcgaggatccgggcttcgtctattcccgctacggcaatcccaccaccgccatgttcgaggaacgcatggcgctgctggagggcgccgaggcggcccgggccacggcttccggcatggcggcggtgaacgcggcgctgctgtgccagctctcggccggcgaccatgtggtggcggcgcgcgcgctgttcggctcgtgtcgctggatcctggaggacttcctgccgcgcttcggcatcgagaccaccctggtggacggcaccgaccttgccgcctggcaggcggcagcacggccgagcaccaaggtgttcttcctggaaagccccaccaaccccaccctggagctgatcgacatcgcggcggtggcgcagatcgcccacgccgccggcgcccggctggtggtggacaatgtgttcgccactcccctgctccagcacccgttcgagctgggcgcggacatcgtggtctattccaccaccaagcatgtggacggccagggccgctgcctcggcggcgtcatcctctcctcccagcagttcgtcactgaccacctgcagaccttcctgcgccagaccggcccctccatctcccccttcaacgcctggatcatgctgaagggcctggagacgctggcgctgcgggtggagcgcatgcaggcgagcgccggccgcatcgccgatgctctggccggcctgcccaagatcgagaccgtgctctatcccggccgcgccgaccatccgcaggccgagctggcccgccggcagatgaagggcggcggcaccctcgtgaccttcgtggtggagggcggcaaggagggcgccttccgtttcgccaacgccctcgggctgatccgcatctccaacaacctcggcgatgccaagagcctgatcacccatccggccaccaccacccaccagcgcttcacgccggaggcccgcgccgagatggggatttccgacggcctgcttcgcctgtccgtggggctcgagcatcccgacgacctgatcgccgatctcgccaccgccgccggagccttgtaa

SEQ ID NO: 13389 - protein, 406 aa, Xanthobacter autotrophicus Py2
MSVAQKPAPKFIPKDPLTLHPETRLVHGGTTRSPYGETSEALFLTQGFVYDNAESCEARFKGEDPGFVYSRYGNPTTAMFEERMALLEGAEAARATASGMAAVNAALLCQLSAGDHVVAARALFGSCRWILEDFLPRFGIETTLVDGTDLAAWQAAARPSTKVFFLESPTNPTLELIDIAAVAQIAHAAGARLVVDNVFATPLLQHPFELGADIVVYSTTKHVDGQGRCLGGVILSSQQFVTDHLQTFLRQTGPSISPFNAWIMLKGLETLALRVERMQASAGRIADALAGLPKIETVLYPGRADHPQAELARRQMKGGGTLVTFVVEGGKEGAFRFANALGLIRISNNLGDAKSLITHPATTTHQRFTPEARAEMGISDGLLRLSVGLEHPDDLIADLATAAGAL

SEQ ID NO: 13390 - DNA, 1182 bp, Bombyx mori
  CDS (1)..(1182)
atggcagatcacggatttctaaagcaaaaacctggttttgctactatcgctattcacgctggccaagaaccggaaaaatggaattcagcagccgtggttacacccattgtcacatccactacattcaaacagccagcaccggccgaacatacgggttttgaatacggtcgctctggaaatcctactagaaacaccctagaagaatgcttagctgcattagacggcggaaaatacggtctaacgttcgcttctggcctcggagcgaccacaactttggttgctctgctaaatcacggagatcacatcgtgtcctcagatgatgtatacggcggtacaaacagactattaaggcaagtaatcgcaagattgggaatcaacactacatttacggactttacaaatattgaaaaagtaaagaacgccatgcaagaaaacaccaagatgatctggatagagaccccaacaaatccattattaaaagtcgttgacattgaggcgatcgtaaagatcgcgaggagtcgcggagacattatcgttgttgtagacaataccttcttgacgccgtatttacaaaagcctttagatttcggagcggacatcgttatgtactcgctaacgaaatatatgaatggtcattctgacgtcataatgggagccgctattgtaaatgacaaagctatcggagacaaactaagattcttgcaaaacgccatgggcatcgttccgtcaccgatagactgctattttgtgaacaggagcttaaagacgttagcattaagaatggagcatcacaagaagtcgtcattgatcattgccaattggttggagaaacatccgaaaatcgtcgaagtgcttcacccagggctgccaactcacccgcaacacgagatagctaaaaaacagatgacgggtcactcgggtgtgttcagtttcaaacattccggagggctcaaggaatctagaaaattcctgagctcattgaaagtgttcacgctggccgagagcttggggggctatgaaagtctcgctgagctaccatctgtgatgacacacgcatcagttccggcgctgcagagggaggaactcggcatcaccgattcgctggtaagactttccgtcggtctcgaagataccgaggatcttatcgaagatttagatcaagcttttaaagctgcattttaa

SEQ ID NO: 13391 - protein, 393 aa, Bombyx mori
MADHGFLKQKPGFATIAIHAGQEPEKWNSAAVVTPIVTSTTFKQPAPAEHTGFEYGRSGNPTRNTLEECLAALDGGKYGLTFASGLGATTTLVALLNHGDHIVSSDDVYGGTNRLLRQVIARLGINTTFTDFTNIEKVKNAMQENTKMIWIETPTNPLLKVVDIEAIVKIARSRGDIIVVVDNTFLTPYLQKPLDFGADIVMYSLTKYMNGHSDVIMGAAIVNDKAIGDKLRFLQNAMGIVPSPIDCYFVNRSLKTLALRMEHHKKSSLIIANWLEKHPKIVEVLHPGLPTHPQHEIAKKQMTGHSGVFSFKHSGGLKESRKFLSSLKVFTLAESLGGYESLAELPSVMTHASVPALQREELGITDSLVRLSVGLEDTEDLIEDLDQAFKAAF

SEQ ID NO: 13392 - DNA, 1185 bp, Mesorhizobium loti MAFF303099
  CDS (1)..(1185): transl_table=11
atgaccagccacacaccaccaccatcgggcaagaatcgcctggccttctcgacacgcaccatccatggcggccagagccacgatccgctgaccggcgcggtgatggtgccgatctatgcgacctcgacctatggccagcagtcgccgggcgtgcacaaggggtttgagtacgcccgcagccagaacccgacgcgcttcgccttcgagcgcgcggtggccgatctcgaaagcggaacggcggctttcgccttcgcctccggcctggcggcgatctcgacggtgctggagttgctcgattccggcgcgcatatcgtcgccaccgacgatatctatggcgggtcgttccggctgatggagcgggtgcgcaagcgctcggcgggcctgcaggtctcgttcgtcgacttcaccgaccttgcggcggtcgaagccgcgatccggccggagacgaagctgctctgggtcgagacgccgaccaacccgctgctgcgcatcgtcgacctcgaaggcgtcgccgcgctcgccaagcgcaagggcgtcctcaccgtcgccgacaacacgttctgcagcccctatatccagcggccgctggaactcggcatcgatatcgtcgtgcactcgacaaccaaatatctcaacggccattccgacatggtcggcggcgtggctgtggtaggcgacaacaaggaattggcgacccagctgaaattcctgcagaacgccatcggcgccatatcgggcccgttcgacagtttcctggcgctgcgcggcctgaagacgctggcgctccgcatggagcggcattccgacaacgggctgaaaatcgcgcagtggctggaggcccgcaaggacgtgcgccgcgtcctctatcccggcctcgccagccatccgcagcattccatcgccgtccagcagatgcacgccttcggcggcatgatcacggccgtgctcgaccgcgatctcgccggcacaaaacgtttcctcgaacgcacgcaattgttcacgctggccgaaagcctcggcggggtggagagcctgatcgagcatccggcgctgatgacgcatgggtctattccggccgagaaacggtcggagatcggcatttcggattcgctggtaaggctgtcggcggggatcgaggatggcgatgatctgatcgcggatctggagcaggcgctggggggatga

SEQ ID NO: 13393 - protein, 394 aa, Mesorhizobium loti MAFF303099
MTSHTPPPSGKNRLAFSTRTIHGGQSHDPLTGAVMVPIYATSTYGQQSPGVHKGFEYARSQNPTRFAFERAVADLESGTAAFAFASGLAAISTVLELLDSGAHIVATDDIYGGSFRLMERVRKRSAGLQVSFVDFTDLAAVEAAIRPETKLLWVETPTNPLLRIVDLEGVAALAKRKGVLTVADNTFCSPYIQRPLELGIDIVVHSTTKYLNGHSDMVGGVAVVGDNKELATQLKFLQNAIGAISGPFDSFLALRGLKTLALRMERHSDNGLKIAQWLEARKDVRRVLYPGLASHPQHSIAVQQMHAFGGMITAVLDRDLAGTKRFLERTQLFTLAESLGGVESLIEHPALMTHGSIPAEKRSEIGISDSLVRLSAGIEDGDDLIADLEQALGG

SEQ ID NO: 13394 - DNA, 1191 bp, Mesorhizobium loti MAFF303099
  CDS (1)..(1191): transl_table=11
atgagcaacaagaagcgcaactggaagcctcagacagcactcgtgcatagcggaaccctgcgttcaggcttcggcgagacctccgaggcaatgtacctgacccagggctatgtctatcaaacggcgcaagccgccgaagcccgtttcaagggcgaggaacccggtttcatctattcgcgctacgccaatccgaccgtcgacatgttcgaaaagcgcatgtgcgcgctggaaggcgcggaggacgcgcgcgccacggcatcgggcatggcggccgtgacggcggcgcttctgtgcagcgtcaagaccggtgaccacatcgtagcggcgcgcgcgctgttcggctcctgccgctgggtggtcgagacgctggcgccgcgctacggcatcgaggcgacgctcgtcgacggcaccgatatcgccaactgggaaaaggtggtcaggcccaacaccaagctgttcttcctggaaagccctaccaacccgacattggaagtggtcgacatcgccgccgtggctgcgctcgccaactcgatcggcgcgcggcttgtcgtcgacaatgtcttcgccacgcccctgcagcagaagccgttgcagctcggcgcgcatatcgtcgtctattcggcaaccaagcacatcgacggccagggccgctgtctcggcggcgtgatcctgtcggacaagaagtggatcgacgagaatctgcatgactatttccgccacaccggccctagcctgtcgcccttcaacgcctggacgctgctgaagggcctggagacgctgccgctgcgcgtgcgccagcaaacggagagcgccggcaagatcgccgatttcctggccgagcagccgcagatcgcccgcgtcatctatcccggccgcgccgaccatccgcaggccgagatcgtcaagaagcagatgtcgggcggctcgacacttatctgcctcgacgtcaaaggcggcaagcaggcggccttcgccctgcagaacgcgctcgatattgtgctgatctccaacaatctcggcgacgccaagagcctgatcacccatccggcgacgaccacccacaagaatttgagcgacgaggcgcgcgccgaactcggcatcgggccgggcacgctcaggctgtcggtcggcctggaggataccgacgaccttctggaagatatcgcgcaggcgctgaaggccgccaaatag

SEQ ID NO: 13395 - protein, 396 aa, Mesorhizobium loti MAFF303099
MSNKKRNWKPQTALVHSGTLRSGFGETSEAMYLTQGYVYQTAQAAEARFKGEEPGFIYSRYANPTVDMFEKRMCALEGAEDARATASGMAAVTAALLCSVKTGDHIVAARALFGSCRWVVETLAPRYGIEATLVDGTDIANWEKVVRPNTKLFFLESPTNPTLEVVDIAAVAALANSIGARLVVDNVFATPLQQKPLQLGAHIVVYSATKHIDGQGRCLGGVILSDKKWIDENLHDYFRHTGPSLSPFNAWTLLKGLETLPLRVRQQTESAGKIADFLAEQPQIARVIYPGRADHPQAEIVKKQMSGGSTLICLDVKGGKQAAFALQNALDIVLISNNLGDAKSLITHPATTTHKNLSDEARAELGIGPGTLRLSVGLEDTDDLLEDIAQALKAAK

SEQ ID NO: 13396 - DNA, 1170 bp, Thermoplasma volcanium GSS1
  CDS (1)..(1170): transl_table=11
atggcagaaaagaggctctttaatggttttaatacccgggcggtacaatcgggagaactgcgagaccctaggtttggcaacgtcactacgcctatatttgagacatccacttttgtctttcctaattcagaaaaagatgcctatatcgataacacgagaaatttgccatacatatatacgaggtggggaaacccaacagtccaagcgtttgaagaaaaatatgcttcgctagaaaaggccgaacatgcactctcattctcatccggtatgggtgctataacatcggtaatccttgctttagcagaaaggggagacaagatattgtctgtttctgatctttatggacagacattctactttcttaacaaagttctcccagagtacggcatatccgttgaatacataagcacagataggctaaattcaggggaattcaagccctcggattacgatatcatttatctcgaatccataactaaccccacattaaaagttccagacataaaagcggtttctgaaaggtctaccggaaaaaaaataatagtcgatgctacatttgcatctccatacaaccagaaccctctggaccttggtgcggatgtagttatacacagtgcaaccaagtacatatcaggacacagtgacgtagtaatgggcgtattttctacaaacgataaatctatattcgataaggttgttgtaaggagaaagacttttggatcaaacccggatccgatacagtcttatctggcgcttagaggaataaaaactctcggcctaaggatggagaaacacaacaaaaacggtatggaactagcgaaataccttagaacagaacccaggataagccacgtctactatcctgacactgaaattggcaaaaaagtcctaaggggattcggaggcatgatatcttttgaactaaggccagaactagatgttcacgtattcatgaggaaccttaagatacccatggttgctgcaagcctaggtggtgtggagagcctcattactcttcctgttgaaacttcacactcgtccatgactaaagaagagagggagaggataggcataacagacaacctagtccgattctcaataggcatagaagaccatgtagacttgatcgatgatataaaacaagctttggataaggcttcagagtcttga

SEQ ID NO: 13397 - protein, 389 aa, Thermoplasma volcanium GSS1
MAEKRLFNGFNTRAVQSGELRDPRFGNVTTPIFETSTFVFPNSEKDAYIDNTRNLPYIYTRWGNPTVQAFEEKYASLEKAEHALSFSSGMGAITSVILALAERGDKILSVSDLYGQTFYFLNKVLPEYGISVEYISTDRLNSGEFKPSDYDIIYLESITNPTLKVPDIKAVSERSTGKKIIVDATFASPYNQNPLDLGADVVIHSATKYISGHSDVVMGVFSTNDKSIFDKVVVRRKTFGSNPDPIQSYLALRGIKTLGLRMEKHNKNGMELAKYLRTEPRISHVYYPDTEIGKKVLRGFGGMISFELRPELDVHVFMRNLKIPMVAASLGGVESLITLPVETSHSSMTKEERERIGITDNLVRFSIGIEDHVDLIDDIKQALDKASES

SEQ ID NO: 13398 - DNA, 1182 bp, Pyrococcus abyssi GE5
  CDS (1)..(1182): transl_table=11
atggttatatttaggatcaaaaattatgtcgaaaaagatataaatcttccgtgggatcaacgtgaaggtgagataaaaatgaaaccgcttcacgatcctctctacataacggccgtgttcaagcaagtcggtgatgcttatccaaccgataggggaaccgagttgaagtattccagggaggaaaatccaacggttagaaaactagaggataaactagcagaacttgaaggttcagacaatgctttggccttcaatagcggaatgtcagcgatctcaactctctacttttccctacttgaaggtggtgataaagtagtgctatcgatggaaggctatggaacgacgattgagttggcaaagctccttaggaaattcggcgtagatgttaagctcgcctatccaagtgcagattctctgatagaaaccatagatgaggagactaagctcgttttggtggaaacgatgactaatccaacactgaaagttatagacgttccggaggtcgcgaagaggtgtcgggaagttggggcgatattagttgtagacaacaccttcgtgactccactcctctacaaacccttggaagatggggcaagttacgtcgttcatagcctcacgaagtacatagcgggtcacaatgacgttttaggtggggccgttctctggaatggggaattctccagggatctctgggagtggaggaggaggctcggaacgataatccagcccttcgatgcgtggatgattgagaggggaatgagaacccttgaagttaggttcgaaaggcaatccgagaacgccatggccatagcggaattcttaaaggatcacccaaaggttagggaagtccactatcctggacttaaagacgatccctattataaggtagccaggaggctttttaagaaggatctttacggcggagtagtcgcctttgacttgggtagtggagataatgccctggccttcttgaggggattgaaaaggatattcccatcgccttccctgggaggcgttgagagcatagcaacttatccagtgaaaagtgccgccaaaactctagatgaggagattagagaaattctcgggataactgatggtttaataaggctctcggttggccttgaacctcttgacgagcttattgaggacatagacaacgccttgggggtggtgagatga

SEQ ID NO: 13399 - protein, 393 aa, Pyrococcus abyssi GE5
MVIFRIKNYVEKDINLPWDQREGEIKMKPLHDPLYITAVFKQVGDAYPTDRGTELKYSREENPTVRKLEDKLAELEGSDNALAFNSGMSAISTLYFSLLEGGDKVVLSMEGYGTTIELAKLLRKFGVDVKLAYPSADSLIETIDEETKLVLVETMTNPTLKVIDVPEVAKRCREVGAILVVDNTFVTPLLYKPLEDGASYVVHSLTKYIAGHNDVLGGAVLWNGEFSRDLWEWRRRLGTIIQPFDAWMIERGMRTLEVRFERQSENAMAIAEFLKDHPKVREVHYPGLKDDPYYKVARRLFKKDLYGGVVAFDLGSGDNALAFLRGLKRIFPSPSLGGVESIATYPVKSAAKTLDEEIREILGITDGLIRLSVGLEPLDELIEDIDNALGVVR

SEQ ID NO: 13400 - DNA, 1155 bp, Aeropyrum pernix K1
  CDS (1)..(1155): transl_table=11
gtgaggggcttcaccaccaaggccgtccacgcgggggaggacccccgggagaccctccacggcgacgtcgtccaccctatacacctctccgtcacgtattggaagaggagtgtggctgaggccgaggagggctacgtgtactcgaggacctccaaccccaccagggacgcccttgagaagaagctggccgccctcgagaacgccaggtacgccctggccttctcctccggcctggcggccgaggccaccgtcatactcgccctgctgagggagggagaccatatagtggcgttcgacgacctctacggcggcaccaagaggctcttccagagggtgatggcccggttcgggattaaggtcacctacgtggacgcccgcgaccccgggaacatcgagaaggccctgacacccgccaccaggatgatatggctcgagacccccaccaacccgctgctgaagctgaccgacatcagggccgcggcggagatagcgtcccgggcgggggcttacctggtggtagacaacaccttcgccaccccatacttccagaggcccctggagctgggggcggatatagtggtgcacagcgccactaaatacctctcaggccactcagacctcctcgcgggggccgtgatggtcaacagcagcgaggtctacgagaagctcaagtaccaccagaacgccgtcggcgccgtcccaccacccctcgactcctacctcctcatgagatccctcaaaaccctagccctcaggatggagtggcaccagcacaacgccatgaagatagccgaacacctagagagccacccgaaggtggaccgggtaatctaccccggcctctcaacacacccccagcacagcctggcgaagaggcagatgacaggctacagcggcatgctctccttcgagctcaaggggggcgccggggcggcggtcaggttcgtagagagcctcaggatcatagccctcgccgagagcctaggaggggtagaatccctagtggagataccctcgctcatgacacacgcctcaatacctagggaggagaggctcaagaaagggataacagacggcctagtaagactctcagtaggcatagaggacctcgaagacctcatagaagacatagaacaagccctcaagaaaacatag

SEQ ID NO: 13401 - protein, 384 aa, Aeropyrum pernix K1
MRGFTTKAVHAGEDPRETLHGDVVHPIHLSVTYWKRSVAEAEEGYVYSRTSNPTRDALEKKLAALENARYALAFSSGLAAEATVILALLREGDHIVAFDDLYGGTKRLFQRVMARFGIKVTYVDARDPGNIEKALTPATRMIWLETPTNPLLKLTDIRAAAEIASRAGAYLVVDNTFATPYFQRPLELGADIVVHSATKYLSGHSDLLAGAVMVNSSEVYEKLKYHQNAVGAVPPPLDSYLLMRSLKTLALRMEWHQHNAMKIAEHLESHPKVDRVIYPGLSTHPQHSLAKRQMTGYSGMLSFELKGGAGAAVRFVESLRIIALAESLGGVESLVEIPSLMTHASIPREERLKKGITDGLVRLSVGIEDLEDLIEDIEQALKKT

SEQ ID NO: 13402 - DNA, 1239 bp, Arabidopsis thaliana
  CDS (1)..(1239)
atgcaaatattaaaagaaaatgcaagtaaccaacgtttcgtaaccagagaatcagaggtaaataggatttgttgtgggtttaatggttttcaattaggtgaaagattacgtcgtgatatgaagacgagttcgatcacgacccttgtagtcaacacaacgacctacttcttcaaagatactaccgagctaatcgacttcaaggaaaaacggattgacttgtatgagtatgctcgttatggaaacccaacaactatggcactcgaagaaaagattagtgtacttgaaggggctgaatcaactttggtaatggcatcggggatgtatgcaagtaatgttatgcttttggctttggttcctacaaatggacatattgtggcaactaaagattgttacaaggagacaaggattttcatggagaattttcttactaaactgggaatcactgtaacttttattgactctgatgatattgcggggctccaaactcttgttaataaccatgaggtttctttgttctttaccgagtccccaacaaatccatttcttcgatgtgtagatattaagttagtttcaaaaatctgtcatagaagaggaactcttgtttgtatagacgctaccattgcaacacctatcaatcaaaagacacttgctcttggtgctgatcttgttcaccattctgctactaagtacattggaggccacaacgattttctagctggaagcatatccggttcaatggagttggtttccaagattcgcaatttgcataagcttttgggaggcacgcttaatccgaacgctgcatatttactcatacgaggcatgaagacgatgcatcttcgtgtaagacaacagaattcaaccggtatgaagatggcccaagtgttagaagcacatcccaaggtgagtcgcgtttactatctaggccttccgagtcatcccgaacatttaatagccaagcgacaaatgactggtattggtggcctgatctctttcgagattgatggagatctcaagactacaatcaagttcatcgatgctctgaagatcccttaccttgcagcatcgtttggtggatgcgagagcctcgtggaccaactcgccacagggatctgggatataccacgagaagaaaggcttaaagatggattccaagacaacctagttcgcttcagttttggtattgaagactttgaggacatcaaggctgacgttctccaagctcttgaaaccatctga

SEQ ID NO: 13403 - protein, 412 aa, Arabidopsis thaliana
MQILKENASNQRFVTRESEVNRICCGFNGFQLGERLRRDMKTSSITTLVVNTTTYFFKDTTELIDFKEKRIDLYEYARYGNPTTMALEEKISVLEGAESTLVMASGMYASNVMLLALVPTNGHIVATKDCYKETRIFMENFLTKLGITVTFIDSDDIAGLQTLVNNHEVSLFFTESPTNPFLRCVDIKLVSKICHRRGTLVCIDATIATPINQKTLALGADLVHHSATKYIGGHNDFLAGSISGSMELVSKIRNLHKLLGGTLNPNAAYLLIRGMKTMHLRVRQQNSTGMKMAQVLEAHPKVSRVYYLGLPSHPEHLIAKRQMTGIGGLISFEIDGDLKTTIKFIDALKIPYLAASFGGCESLVDQLATGIWDIPREERLKDGFQDNLVRFSFGIEDFEDIKADVLQALETI

SEQ ID NO: 13404 - DNA, 1326 bp, Arabidopsis thaliana
  CDS (1)..(1326)
atggctcatttcctcgagacacaggagcccctcgtattctccgggaagaaacgaaacgatcgcgatgacgaagacggtgacgccttggttgcgaagaaatcagcactggcggtgtgtgatgccgaccctgcagcggccatagcgaatatccgacatgagtttggggagcacgggggagtaaacatgtccatcgaagcctccgccaccttcaccgtcatggaaccggataccatgaggcggatgttcaccggagaactgggaccggacaacgacttctacgtatacagccgacacttcaaccccaccgtgctcaacctcagccgccagatggctgctctcgaaggcacccaagctgcctactgtacctctagcggtatgtcggcgatatcgtcagtgatgctgcaactgtgcagcagcggaggacacgtggttgcggcaagcacgctatacggaggaacacacgctttgctctctcatttcttgccacggacatgtaacataaccacctccttcgttgacataacggaccatggcgccgtggcaaacgcgatcgttgagggtaggacacaggttctctactttgagtcggtggcaaacccgacgctgactgtggctgacatacctgagctgagccgtatggcacacgagaagggcgtgacggtggtggtggacaacacattcgcccccatggtgctgtctccggccaagcttggagcagatgtggtggttcacagtatctccaagttcatcagtggtggggctgacatcatcgcaggggccgtgtgtgggagtgagaatttggtgaaagagatgatggatcttcgtggcggatctctgatgcttctaggtcccaccatgaacgccaaggtggctttcgagctctccgagcgaatccctcacttgggcctacgcatgagagagcacagccacagagcccaagtgtatgcggagagaatgagggatttgggcatgaaagtcatatatccagggctcgagacccacccgcagcacaagctattcaaagggatggtgaatagagactatggatacggaggattgctgtcgatagacatggagacagaggagaaagccaacaagctcatggcatatctccagaacgccactcagtttggcttcatggccgtcagtttgggttactacgagacactcatgtcttgctccgggagcagcactagcagcgagcttgacccctcacagaaggaagctgcaggcatctctcctggtcttgtacgaatgtcggtggggtatgtgggtacattggagcagaagtggacacaattcgagaaagcattcctcagaatgtaa

SEQ ID NO: 13405 - protein, 441 aa, Arabidopsis thaliana
MAHFLETQEPLVFSGKKRNDRDDEDGDALVAKKSALAVCDADPAAAIANIRHEFGEHGGVNMSIEASATFTVMEPDTMRRMFTGELGPDNDFYVYSRHFNPTVLNLSRQMAALEGTQAAYCTSSGMSAISSVMLQLCSSGGHVVAASTLYGGTHALLSHFLPRTCNITTSFVDITDHGAVANAIVEGRTQVLYFESVANPTLTVADIPELSRMAHEKGVTVVVDNTFAPMVLSPAKLGADVVVHSISKFISGGADIIAGAVCGSENLVKEMMDLRGGSLMLLGPTMNAKVAFELSERIPHLGLRMREHSHRAQVYAERMRDLGMKVIYPGLETHPQHKLFKGMVNRDYGYGGLLSIDMETEEKANKLMAYLQNATQFGFMAVSLGYYETLMSCSGSSTSSELDPSQKEAAGISPGLVRMSVGYVGTLEQKWTQFEKAFLRM

SEQ ID NO: 13406 - DNA, 1293 bp, Thermotoga maritima MSB8
  CDS (1)..(1293): transl_table=11
atggactggaagaaatacggttacaacacaagggctcttcacgcaggttatgaaccacccgagcaggccacaggatcgagagcggtccctatatatcaaacgacttcttacgttttcagagactctgatcacgcggcgagactcttcgcactggaagaacctgggttcatctatacaaggattggaaatcctaccgtctcagttcttgaagaaagaatagccgccctggaagaaggggtgggagccttagcggttgccagtggacaagccgctataacttacgccattttgaacatcgcgggcccaggagatgagatcgtcagcgggagcgcgctgtatgggggaacgtacaatctgttcagacacactctctataaaaaatccggcatcatcgtgaagtttgtggatgagacagatccaaagaacatagaagaggccatcaccgagaaaacaaaggcggtgtaccttgaaactatcgggaatcccggtctcacagtgccggactttgaagcgatagcggagatcgctcacagacacggtgttcctttgatagtggacaatacggtagctccgtacatattcaggcccttcgaacacggtgccgacatcgttgtttattcggccacgaaattcatcggaggacacggaacatcgataggcggtctcatcgtagacagcggaaaattcgactggacgaacggaaagtttccagaactcgtggaaccagatcccagctaccacggtgtgagttatgtggagacgttcaaagaagcagcctacatagcaaaatgtagaacccagcttttgagggacctgggaagctgtatgagcccgttcaacgcgtttctgttcatcctcggacttgaaaccctcagcttgaggatgaagaaacactgtgaaaacgcactgaagatcgttgaatttctgaaatcgcatcccgccgtgagctgggtcaactatccgatagctgaaggcaataaaaccagagaaaatgcgctgaaatacctcaaagaaggatacggtgcgattgtaacgttcggtgtgaaaggcggaaaagaggcgggaaagaagttcatagacagtctcacactcatttcccacctcgccaacattggtgatgcaagaactctggctattcatcccgcttcgacaacccatcagcagctcacggaagaagagcagttgaaaacgggtgttactccggatatgataagattgtctgttggaatagaagatgtggaagatatcatagccgatctggatcaggctctcagaaaatctcaggagggatga

SEQ ID NO: 13407 - protein, 430 aa, Thermotoga maritima MSB8
MDWKKYGYNTRALHAGYEPPEQATGSRAVPIYQTTSYVFRDSDHAARLFALEEPGFIYTRIGNPTVSVLEERIAALEEGVGALAVASGQAAITYAILNIAGPGDEIVSGSALYGGTYNLFRHTLYKKSGIIVKFVDETDPKNIEEAITEKTKAVYLETIGNPGLTVPDFEAIAEIAHRHGVPLIVDNTVAPYIFRPFEHGADIVVYSATKFIGGHGTSIGGLIVDSGKFDWTNGKFPELVEPDPSYHGVSYVETFKEAAYIAKCRTQLLRDLGSCMSPFNAFLFILGLETLSLRMKKHCENALKIVEFLKSHPAVSWVNYPIAEGNKTRENALKYLKEGYGAIVTFGVKGGKEAGKKFIDSLTLISHLANIGDARTLAIHPASTTHQQLTEEEQLKTGVTPDMIRLSVGIEDVEDIIADLDQALRKSQEG

SEQ ID NO: 13408 - DNA, 1167 bp, Vibrio cholerae O1 biovar eltor str. N16961
  CDS (1)..(1167): transl_table=11
atgaccacacgcaagccagccaccattgcggttcgtaccggtattgaatcggacactcaataccatgccgttgtgccccccatttatctttcgaccaactatggttttcccgcgtttggcgaagtacctaaatacgattacacccgttcaggcaacccaaaccgaggacttttagaacaaaccttatatgagcttgaatgtggagaaggtgccgtagtgaccaactgtggcacttctgccatcaatttatgggtcacagccttgttaggccctgatgatctgattgtcgcgccgcatgactgctatggcggcacttatcgcttgctcaacactcgcgctaaaaaaggcgatttcaaagtgcagtttgtggatcaatccaacgcagccgcactcacccaagctttagcccgcaagcccaaactgttgctgattgaaaccccctccaaccctttagtgcgtgtggtggatattgctcatctttgccagttagcgaaagcgcaaggcactttggtggcagtcgataacaccttcttaaccccggtattccaaaaaccgctcaccttaggcgcggattttgtgctgcactccaccaccaaatacattaatggtcactcggatgtgattggcggcgtgttgatctgtaaacacaagcaacatgccgaagagttggcttggtggggcaactgtttagggtcaaccggcactccatttgatagctacatgaccttgcgtggcattcgcacgctgggcgcgcggatgcgcgtgcatgaagagagtgcgcaacagattttggcttatctgcagactcaatctttggttagcaaaatttatcatccaagtctgcccgaccatccggggcatgagattgccaaaaaacagcaatctggctttggcgctatgctcagtttcgagtttgccggcagttttgagcagctgaaattctttgtgggtaagttggcgctgttttcactggcggagtcacttggcggggtagaaagtcttatttgccatcctgcgtctatgactcatcgtgcaatgggcgaagaagccttagctgaagcgggaatttcccagcagttgctgcgtctttccgtcggtcttgaagatgcctctgatctgattgccgatcttgaccaagcctttttgcacactcttgccgcgaattaa

SEQ ID NO: 13409 - protein, 388 aa, Vibrio cholerae O1 biovar eltor str. N16961
MTTRKPATIAVRTGIESDTQYHAVVPPIYLSTNYGFPAFGEVPKYDYTRSGNPNRGLLEQTLYELECGEGAVVTNCGTSAINLWVTALLGPDDLIVAPHDCYGGTYRLLNTRAKKGDFKVQFVDQSNAAALTQALARKPKLLLIETPSNPLVRVVDIAHLCQLAKAQGTLVAVDNTFLTPVFQKPLTLGADFVLHSTTKYINGHSDVIGGVLICKHKQHAEELAWWGNCLGSTGTPFDSYMTLRGIRTLGARMRVHEESAQQILAYLQTQSLVSKIYHPSLPDHPGHEIAKKQQSGFGAMLSFEFAGSFEQLKFFVGKLALFSLAESLGGVESLICHPASMTHRAMGEEALAEAGISQQLLRLSVGLEDASDLIADLDQAFLHTLAAN

SEQ ID NO: 13410 - DNA, 1173 bp, Bacillus halodurans C-125
  CDS (1)..(1173): transl_table=11
gtgagcgaacagtacagcttgcaaacaaaactacttcataatgagcataaggttgaccaggcaactggtgcggtaagcgtaccaatccaacacgcttctacgtttcatcagtttgactttgatacgtttggaacgtatgactatagccgttcgggtaatccgacacgggatgctctcgaagcggcgattgctgagcttgagggaggcaatcatggatttgcgtttgcttctgggatggctgccatctccacagcgtttatgcttctatcaaagggcgatcatgttgttttaacgaaagatgtgtacggtgggacatttcgccttgtaacggaagttttaacccgacttggaattgaacatacatttgttgatatgacaaacttggcagaagtggcggcggccatcagaccaaatacccgtgtcctttatatggagacgccatccaatccaacgttgaacattaccgacattcgcggggtcgtttcgctggcaaaagaacacgaatgtctcacatttcttgacaacacctttttaacaccagctttgcagcgaccgctagaacttggtgtcgatgttgtcctccatagtgcgacgaagtttattggaggtcacagtgatgttgtcgcagggctggcggtgacgaagaatgaagaactcggaaaaaagctcgcctttttacaaaactcgttcggcgctattttaggagttcaagacgtatggctcgttctccgaggtctgaaaacacttcatgtgcggatggagcacggagagaaaggagctcagcagatcgccgaatggcttcaaggcgttccggaagtgaagcgggtctactaccctggtttaaaagatcacccaggacacgaattgcaaaaaaggcaggcggaagggtttggcgctgtgctatcgtttgagctagaaaatgaagaggcggttcgaaggttcgtggaacatgtaaagctccctgtttttgctgtcagtttaggagcggtagaatcgatcttgtcttaccccgccaaaatgtcccatgccgcgatgccgaaagaggagcgggaggcaagaggcattcgtgatggattgcttagactttcagtcgggttagaaaaaccggaagaactaatggctgactttaaagcggcatttgctcacgttcgaggaaaggtggaacatctatga

SEQ ID NO: 13411 - protein, 390 aa, Bacillus halodurans C-125
MSEQYSLQTKLLHNEHKVDQATGAVSVPIQHASTFHQFDFDTFGTYDYSRSGNPTRDALEAAIAELEGGNHGFAFASGMAAISTAFMLLSKGDHVVLTKDVYGGTFRLVTEVLTRLGIEHTFVDMTNLAEVAAAIRPNTRVLYMETPSNPTLNITDIRGVVSLAKEHECLTFLDNTFLTPALQRPLELGVDVVLHSATKFIGGHSDVVAGLAVTKNEELGKKLAFLQNSFGAILGVQDVWLVLRGLKTLHVRMEHGEKGAQQIAEWLQGVPEVKRVYYPGLKDHPGHELQKRQAEGFGAVLSFELENEEAVRRFVEHVKLPVFAVSLGAVESILSYPAKMSHAAMPKEEREARGIRDGLLRLSVGLEKPEELMADFKAAFAHVRGKVEHL

SEQ ID NO: 13412 - DNA, 1110 bp, Pasteurella multocida subsp. multocida str. Pm70
  CDS (1)..(1110): transl_table=11
atgacacaacattattcaattgaaacgttattagcgcaggctggaaatcgaacggatgagcgtactggtgcagtttctacaccgatctttttatcaacagcttatgcccaccatggaattggtgaaagtacaggctatgactatacacgtacgaaaaatccaacacgtagcgttttagaagaaaccattgctaaattagaaggtggggaacgaggctttgcttgtgcttcaggaatggcggcaattcaattaatcatgtccttatttacgtcccctgatgagtggattgtttcgcgtgatgtgtatggtggcacctatcgtttattggatttcgcgtacaaaaatacacaaggcgttaaaccagtttatgtgaatacatcagaggtatcctgtatcgaagcggcgattacgtctaatacaaaagcaatttttgtagaaactccttctaatcctttgatggaggaatgtgatgtagctgcgattgcaaaaattgcgaaaaaacataatctgcttttgattgtcgataatactttcttaacaccggttttatttagaccaattgaggctggtgcagatattgtgattcatagtggaactaaatacttggctggtcataacgatgctttggttggactggttgtggcaaaaggtgaagaactctgccaacgtttattctatattcagaatggggcaggtgcagttctgtcgcctttcgattcatggttaacgattcgaggcatgaaaaccctcgccttacgtatggaacgtcatgaacaaaatgccaaacagctggctgcgtttctggcttctcagccacaagtaaaaaatgtgttatatccaaataagggcggtatgctttctttccgcttacatgaagcacattgggttaatccttttttgaaagcgctgaaactaatcacttttgctgaaagtttggggggaacagagagctttattacttatccagcgacacaaacccatatggatattccagaagaggagcgtattgcgcgcggtgtgtgtaattgtcttttgcgtttttctgttggtttagaaaatgtagaggatattaaagcggatttattacaagcgtttgcacaattaaactaa

SEQ ID NO: 13413 - protein, 369 aa, Pasteurella multocida subsp. multocida str. Pm70
MTQHYSIETLLAQAGNRTDERTGAVSTPIFLSTAYAHHGIGESTGYDYTRTKNPTRSVLEETIAKLEGGERGFACASGMAAIQLIMSLFTSPDEWIVSRDVYGGTYRLLDFAYKNTQGVKPVYVNTSEVSCIEAAITSNTKAIFVETPSNPLMEECDVAAIAKIAKKHNLLLIVDNTFLTPVLFRPIEAGADIVIHSGTKYLAGHNDALVGLVVAKGEELCQRLFYIQNGAGAVLSPFDSWLTIRGMKTLALRMERHEQNAKQLAAFLASQPQVKNVLYPNKGGMLSFRLHEAHWVNPFLKALKLITFAESLGGTESFITYPATQTHMDIPEEERIARGVCNCLLRFSVGLENVEDIKADLLQAFAQLN

SEQ ID NO: 13414 - DNA, 1185 bp, Pseudomonas aeruginosa PAO1
  CDS (1)..(1185): transl_table=11
atgagccagcacgaccagcatcccgacgccccggcccaggcctttgcgacccgggtcatccacgccgggcaggcccccgatccctcgaccggcgcgatcatgccgccgatctacgccaactccacctatatccaggaaagccccggggtacacaaggggctcgactacggccgctcccacaacccgacccgctgggccctggagcgctgcgtggccgacctcgagggcggcacccaggccttcgccttcgcctccggcctggcggcgatctcctcggtgctggagctgctcgacgccggttcccacatcgtttccggcaatgacctctacggcggtaccttccgcctgttcgagcgggtccgccggcgcagcgccgggcatcgcttcagcttcgtcgacccgaccgacctgcaggccttcgaggccgcgctgaccccggaaacccgcatggtctgggtggaaaccccgagcaacccgctgctgcgcctcaccgacctgcgcgccatcgcccagctctgccgcgcccgcggcatcatcagcgtggccgacaacaccttcgccagcccctacatccagcgccccctggagctgggcttcgacgtggtggtgcactccaccaccaagtacctgaacggccattccgacgtgatcggcggcatcgccatcgtcggcgacaacccggacctgcgcgagcgcctgggcttcctgcagaactcggtgggcgccatctccgggccgttcgacgccttcctcaccctgcgcggggtgaagaccctggcgctgcgcatggagcgccattgcagtaacgccctggccctggcccagtggctggagcgccagccgcaagtggcgcgggtctactaccccggcctggcttcgcacccgcagcatgagctggcgaaacggcagatgcgtggcttcggcgggatgatctccctcgacctgcgttgcgacctggccggcgcccggcgcttcctggagaacgtgcggatcttctccctggcggagagcctgggcggggtggaaagcctgatcgagcatccggcgatcatgacccacgccagcatcccggcggaaacccgcgccgacctgggcattggtgactcgctgatccgcctgtcggtgggcgtcgaggcgctggaggacctgcaggccgacctggcgcaggcgctggcgaagatctga

SEQ ID NO: 13415 - protein, 394 aa, Pseudomonas aeruginosa PAO1
MSQHDQHPDAPAQAFATRVIHAGQAPDPSTGAIMPPIYANSTYIQESPGVHKGLDYGRSHNPTRWALERCVADLEGGTQAFAFASGLAAISSVLELLDAGSHIVSGNDLYGGTFRLFERVRRRSAGHRFSFVDPTDLQAFEAALTPETRMVWVETPSNPLLRLTDLRAIAQLCRARGIISVADNTFASPYIQRPLELGFDVVVHSTTKYLNGHSDVIGGIAIVGDNPDLRERLGFLQNSVGAISGPFDAFLTLRGVKTLALRMERHCSNALALAQWLERQPQVARVYYPGLASHPQHELAKRQMRGFGGMISLDLRCDLAGARRFLENVRIFSLAESLGGVESLIEHPAIMTHASIPAETRADLGIGDSLIRLSVGVEALEDLQADLAQALAKI

SEQ ID NO: 13416 - DNA, 1281 bp, Lactococcus lactis subsp. lactis Il1403
  CDS (1)..(1281): transl_table=11
atgactaatcacaattataaattcgacactttgcaagtccatgcaggacaagtccctgatcctgtcacgggttcacgcgccgttccgctctatcaaacaacttctttcgtttttaacaattcagaccatgccgaagctcgttttgctttacaagatcctggagctatttattcacgtttaggaaatccaaccaacgatgtttttgaagcacgcatcgcagctcttgaaggtggaagtgcagcccttggtgttggttctggctcagccgctattacctatgccatcttgaatatcgctacagtcggtgataatattgtttccgcaagtaccctttatggtggaacctatcaccttttttctgggactttaccaaaatatggaattacaactaaatttgtcaatccagatgacccgaagaattttgaagaggcgattgatgaaaaaaccaaagctatttattatgaaactttgggcaatccgggaaataatgtgattgattatgatgccattggtcaaattgctaaaaaacatggaattcccgttattgttgatgcaacgtttactacccctgtgacctttaaaccatttgaacatggtgctaatgtaattgttcattcagcaacgaaattcattggcggtcatggtacttctattggtggagtcatcgttgatggcggaaactttgattgggcaaatggtaattttcctgattttacacaagctgatgaaagctacaatgggattaaatttgccgaattgggtgaaattgcttttgtgactcgggttagagctattttattacgtgatacgggtgcggctttatcaccttttcattcttggcttttcttacaggggctagaaacactctcactccgggtagaacgtcacatctccaatactaaaaagattgtagaatttttagacaatcatcctaaggtggaacttgttaaccatcctctgcttgaaagtaattcctatcatgcgctctatcagaaatattatccaaaagatgctggatctatctttacctttgaactcaaagacaaagatgagaaaaaagcgcgtgatttgattgatcatcttgaaattttctcacttctagccaacgttggagataccaaatcattggccattcatcctgcttcgaccactcaccagcagctgaatgccgaagaacttgctagtgcagggatttccaaaggaaccattcgattatcggttggtattgaagatgtaactgacttgattgctgatttagagcaagcattagaaaaaatataa

SEQ ID NO: 13417 - protein, 426 aa, Lactococcus lactis subsp. lactis Il1403
MTNHNYKFDTLQVHAGQVPDPVTGSRAVPLYQTTSFVFNNSDHAEARFALQDPGAIYSRLGNPTNDVFEARIAALEGGSAALGVGSGSAAITYAILNIATVGDNIVSASTLYGGTYHLFSGTLPKYGITTKFVNPDDPKNFEEAIDEKTKAIYYETLGNPGNNVIDYDAIGQIAKKHGIPVIVDATFTTPVTFKPFEHGANVIVHSATKFIGGHGTSIGGVIVDGGNFDWANGNFPDFTQADESYNGIKFAELGEIAFVTRVRAILLRDTGAALSPFHSWLFLQGLETLSLRVERHISNTKKIVEFLDNHPKVELVNHPLLESNSYHALYQKYYPKDAGSIFTFELKDKDEKKARDLIDHLEIFSLLANVGDTKSLAIHPASTTHQQLNAEELASAGISKGTIRLSVGIEDVTDLIADLEQALEKI

SEQ ID NO: 13418 - DNA, 1089 bp, Lactococcus lactis subsp. lactis Il1403
  CDS (1)..(1089): transl_table=11
atggataaaagattagatactttattggcgcaagtcggaattcatcaagatgaggcaacgggagctttagttagtcctttgcatttttcaacgacctatcaacatccagaatttggccaatcgactggctttgattacaccagaaccaaaaatccaacaagagcaaccttggaagaagcacttgcttcaattgaatcaggacaatttgctctagcaacttcgtcaggaatggctgcaattgtcttggccttttcagttttcccaatcggttcaaaaattgttgccagtcgagatttgtatggaggttcatttcgctggttcgatgaacaagaaaaagagggacgattttacttttcctatgctaaaactgaaaaagaaatgcttgagctaatagatgaaaatactgatattgtttatattgaaacaccgacaaatccaatgatggttaaatataatattgaaaaaatcgccaataaagcacaggcatatcatgcaaaagtgattgttgtcaatactttttataccccaatttatcaaaaaccattagaattgggtgcggatttagtgattcattcggcaacaaaatatttatcaggacataatgacgtcttggctggagcggtcattgtttatgatgaagaactttatgaaagattattatatcagctcaatactactggagcagttctttctccatttgacagttatcttgtcatgcgaggtttgaaaactttaagcctcagaatggagagggcaactaaaaatgcccaaaaaattgtgactttcctaaaaaaacttccatcagtaaaagaagtactttactcaggattaggtggcatgatttctctaaaagttactgacaaaaccaaaattcctgctattttaaatcacttgggcgtttttacctttgctgaaagcttgggaggtgttgaatctttaatcacttatccaacagcgcaaactcaccatgatattccacttgagattagagaaagttatggtttaacagatgatttgcttcgcctttcgattgggatagaagatgttcgcgatttaatagaagatctcaaagaagctttagaaaattaa

SEQ ID NO: 13419 - protein, 362 aa, Lactococcus lactis subsp. lactis Il1403
MDKRLDTLLAQVGIHQDEATGALVSPLHFSTTYQHPEFGQSTGFDYTRTKNPTRATLEEALASIESGQFALATSSGMAAIVLAFSVFPIGSKIVASRDLYGGSFRWFDEQEKEGRFYFSYAKTEKEMLELIDENTDIVYIETPTNPMMVKYNIEKIANKAQAYHAKVIVVNTFYTPIYQKPLELGADLVIHSATKYLSGHNDVLAGAVIVYDEELYERLLYQLNTTGAVLSPFDSYLVMRGLKTLSLRMERATKNAQKIVTFLKKLPSVKEVLYSGLGGMISLKVTDKTKIPAILNHLGVFTFAESLGGVESLITYPTAQTHHDIPLEIRESYGLTDDLLRLSIGIEDVRDLIEDLKEALEN

SEQ ID NO: 13420 - DNA, 1158 bp, Neisseria meningitidis MC58
  CDS (1)..(1158): transl_table=11
atgaaattcgccacgaaagccattcattccagctacgattgcgacgaacacaaccgcgcgctgatgccgccgatttatcaaaacagtatgtttgcgttgcacgagattggcgaaaatgtgccttaccgttattcgcgcctgagcaacccgacccgtcagattttagaagacaccgttgccgatttggaacacggtgcggcaggttttgcgttttccagcggtatggcgggaattgatgccgtatggcgcactttcctgcgcccgggcgataccattgtcgccgtcgccgatatttacggcggcgcttatgatttattggtcgatgtttatcaaaaatggggggtgaacgttgtttttgccgatttaggcaatccggataatttggacgaactgcttaaagcgcacaaggtcaaactggtttggctggaaacgccgtccaatccacttttacgcttggtagacatcaaagtccttgccgcaaaagccaaagcagccggtgcgctggtcggtatcgacaacacttttgccacgccgtatctgcaacagccgttggatatgggttgcgattttgtattccattccgctaccaaatatttgtgcggccattccgacgtgttgatgggcatcgtcgttgccaaaaccaaagaactggcgcagcctttgcacgatatgatggtgcataccggcgcggttgccggcccgctggactgctggctggtgttgcgcggcatcaaaacactggctctgcgcatgaacgcccattgccaaaacgcactcgaaatcgcgcgccgtttggaagcccatcctgccattgaaaaagtgttccatcccggcctgccgtctcacgaacattacgaactggcgaaaacacaaatgcccaaaggcatcggcggcgtggttacggtttatctcaaaaacgacacgcgtgaagcggcaaacagcgtgattaaaaacatgaaactggtcaaaatggcttccagcctcggcggtgtggaaagtttggtcaaccattgctattcccagtcccacagcggcgtaccgcatgatgtgaaaatggaaatgggcatcaaagtcggtctgctgcgtttctccatcggcatcgaagacgcggacgatatttggaacgatatttccgccgcactcgatacaactttgtaa

SEQ ID NO: 13421 - protein, 385 aa, Neisseria meningitidis MC58
MKFATKAIHSSYDCDEHNRALMPPIYQNSMFALHEIGENVPYRYSRLSNPTRQILEDTVADLEHGAAGFAFSSGMAGIDAVWRTFLRPGDTIVAVADIYGGAYDLLVDVYQKWGVNVVFADLGNPDNLDELLKAHKVKLVWLETPSNPLLRLVDIKVLAAKAKAAGALVGIDNTFATPYLQQPLDMGCDFVFHSATKYLCGHSDVLMGIVVAKTKELAQPLHDMMVHTGAVAGPLDCWLVLRGIKTLALRMNAHCQNALEIARRLEAHPAIEKVFHPGLPSHEHYELAKTQMPKGIGGVVTVYLKNDTREAANSVIKNMKLVKMASSLGGVESLVNHCYSQSHSGVPHDVKMEMGIKVGLLRFSIGIEDADDIWNDISAALDTTL

SEQ ID NO: 13422 - DNA, 1182 bp, Halobacterium sp. NRC-1
  CDS (1)..(1182): transl_table=11
atgagcggcaacgacgacgccgatgacgcagccgaccggttccagacacgcgcgatccacgcgggccaagcgccggactcggagacgggcgcgctgatgacgccgatcttcgcgaactcgacgtacgtccaggacggccccggcgatcaccgcggctacgagtactcccggacgggcaacccgacgcgcacggatctggaagccaacctcgcgagcctggaaggcggcgagcacgggcgcgcgttcgcctccggaatggccgcgatcaacaccgtgttgaacctcctggcggccggcgaccacgtggtggcgggcgacgacgtgtacggcggcacccaccgcatcttcacgcaggtctacgaggactacgacatcgacttcgacttcgtcgacaccaccgaccacgacgccgtccgggaggccatgggggaggcgacggaactcctctgggtggagaccccgacgaacccgttgttgaacgtcaacgacatcggcgcgctcgcggacatcgcccacgagcacgacgcgctgtgtgcggtggacaacacgttcgcgacgccgtacctccagcgccccctggagttcggtgccgacatcgtctcgcacagcctcacgaagtacctcggcgggcacagcgacctcgttgcgggcgcgctgatcaccgacgacgacgacctcgacgagcagttcgggttctaccagaactccgtcggcgcgacgcccagtccgttcgactgcttcctggtgttgcgcggcacgaaaaccctgggcgtgcgcatggaccgccactgtgagacggccatggagcttgcggcgtggcttgcggatcacgagcacgtcagccaggtccactacccgggcctggagagccaccccgaccacgagctggccgccgcgcagatggacggcttcggcggcatggtctccttcgagttggacgccaccctcgaagcggccagcgcgttcgtcgaggagaccgacgtgttcacgctcgcggagtcactgggcggcgtggagtcactgatcgagcagcccgcggcgatgactcacgccgccatcccgaaggccgaacgggaggccgcggggctcaccgacgggctgatccgggcgagcatcggcgtcgagcacgtcgacgacctcaaggcggacctccagcaggccatcgaggccgccctgcagtag

SEQ ID NO: 13423 - protein, 393 aa, Halobacterium sp. NRC-1
MSGNDDADDAADRFQTRAIHAGQAPDSETGALMTPIFANSTYVQDGPGDHRGYEYSRTGNPTRTDLEANLASLEGGEHGRAFASGMAAINTVLNLLAAGDHVVAGDDVYGGTHRIFTQVYEDYDIDFDFVDTTDHDAVREAMGEATELLWVETPTNPLLNVNDIGALADIAHEHDALCAVDNTFATPYLQRPLEFGADIVSHSLTKYLGGHSDLVAGALITDDDDLDEQFGFYQNSVGATPSPFDCFLVLRGTKTLGVRMDRHCETAMELAAWLADHEHVSQVHYPGLESHPDHELAAAQMDGFGGMVSFELDATLEAASAFVEETDVFTLAESLGGVESLIEQPAAMTHAAIPKAEREAAGLTDGLIRASIGVEHVDDLKADLQQAIEAALQ

SEQ ID NO: 13424 - DNA, 1158 bp, Neisseria meningitidis Z2491
  CDS (1)..(1158): transl_table=11
atgaaattcgccacgaaagccattcattccagctacgattgcgacgaacacaaccgcgcgctgatgccgccgatttatcaaaacagtatgttcgcgttgcacgagattggcgaaaatgtgccttaccgctactcgcgcctgagcaacccgacccgtcagattttagaagacaccgttgccgatttggaacacggtgcggcaggttttgcgttttccagcggtatggcggggattgatgccgtgtggcgtaccttcctacaaccgggcgataccatcgtcgcggtcgccgatatttacggcggcgcgtatgatttattggtcgatgtttatcaaaaatggggggtgaacgttgtttttgccgatttgggcaatccggataatttggacgaattgctcaaagcgcacaaggtcaaactggtttggctggaaacgccgtccaatccgcttttgcgcttggtagacatcaaagcgcttgccgcgaaagccaaagcggccggcgcactggtcggtatcgacaacacctttgccacgccgtatctgcaacagcccttggatatgggttgcgattttgtgttccattccgctaccaaatatttgtgcggccattccgacgtgttgatgggcatcgtcgttgccaaaaccaaagagctggcgcagcctttgcacgatatgatggtgcataccggcgcggttgccggcccgatggactgctggctggtgttgcgcggcatcaaaacactggctctgcgcatgaacgcccattaccaaaacgcactcgaaatcgcgcgccgtttggaagcccatcctgccattgaaaaagtgttccatcccggcctgccgtctcacgaacattacgaactggcgaaaacacaaatgcccaaaggcataggcggcgtggttacggtttatctcaaaaacgacacgcgtgaagcggcaaacagcgtgattaaaaacatgaaactggtcaaaatggcttccagcctcggcggcgtggaaagtttggtcaaccattgctattcccagtcccacagcggcgtgccgcataatgtgaaaatggaaatgggcatcagggtcggcctgctgcgtttctctgtcggtatcgaagatgtagatgatatttggaatgatatttccgccgcactcgatacaactttgtaa

SEQ ID NO: 13425 - protein, 385 aa, Neisseria meningitidis Z2491
MKFATKAIHSSYDCDEHNRALMPPIYQNSMFALHEIGENVPYRYSRLSNPTRQILEDTVADLEHGAAGFAFSSGMAGIDAVWRTFLQPGDTIVAVADIYGGAYDLLVDVYQKWGVNVVFADLGNPDNLDELLKAHKVKLVWLETPSNPLLRLVDIKALAAKAKAAGALVGIDNTFATPYLQQPLDMGCDFVFHSATKYLCGHSDVLMGIVVAKTKELAQPLHDMMVHTGAVAGPMDCWLVLRGIKTLALRMNAHYQNALEIARRLEAHPAIEKVFHPGLPSHEHYELAKTQMPKGIGGVVTVYLKNDTREAANSVIKNMKLVKMASSLGGVESLVNHCYSQSHSGVPHNVKMEMGIRVGLLRFSVGIEDVDDIWNDISAALDTTL

SEQ ID NO: 13426 - DNA, 1188 bp, Escherichia coli O157:H7 EDL933
  CDS (1)..(1188): transl_table=11
  misc_feature (47)..(47): s is g or c
atggcggacaaaaagcttgatactcaactggtgaatgcaggacgcascaaaaaatacactctcggcgcggtaaatagcgtgattcagcgcgcttcttcgctggtatttgagagtatggaagccaaaaagcacgcgacgcgcaatcgcgccaatggcgagttgttctatggacggcgcggaacgttaacccatttttccttacaacaagcgatgtgtgaactggaaggtggcgcaggctgcgcgctatttccctgcggggcggcagcggttgctaattcgattcttgcttttgtcgaacagggcgatcatgtgttgatgaccaacaccgcctatgaaccgagtcaggatttctgtagcaaaatcctcagcaaactgggcgtaacgacatcgtggtttgatccgctgattggtgccgatatcgttaagcatctgcagccaaacactaaaatcgtgtttctggaatcgccgggttccatcactatggaagtccacgacgttccggcgattgttgccgccgtgcgcagtgtggtgccggatgccatcattatgatcgacaacacctgggcagccggtgtgctgtttaaggcgctggattttggcatcgatgtttctattcaagccgccaccaaatatctggttgggcattcagatgcgatgattggcactgccgtgtgcaatgcccgttgctgggagcagctacgggaaaatgcctatctgatgggccagatggtcgatgccgataccgcctatataaccagccgtggcctgcgcacattaggtgtgcgtttgcgtcaacatcatgaaagcagtctgaaagtggccgaatggctggcagaacatccgcaagttgcgcgagttaaccaccctgccctgcctggcagtaaaggacacgaattctggaaacgagactttacaggcagcagcgggctattttcctttgtgcttaagaaaaaactcaatgatgaagagctggcgaactatctggataacttcagtttattcagcatggcctactcgtggggcgggtatgaatcgttgatcctggcaaatcaaccagaacatatcgcagccattcgcccacaaggcgagatcgattttagcgggaccttgattcgcctgcatattggtctggaagatgtcgacgatctgattgccgatctggacgccggttttgcgcggattgtataa

SEQ ID NO: 13427 - protein, 395 aa, Escherichia coli O157:H7 EDL933
  misc_feature (16)..(16): The Xaa at location 16 stands for Ser, or Thr.
MADKKLDTQLVNAGRXKKYTLGAVNSVIQRASSLVFESMEAKKHATRNRANGELFYGRRGTLTHFSLQQAMCELEGGAGCALFPCGAAAVANSILAFVEQGDHVLMTNTAYEPSQDFCSKILSKLGVTTSWFDPLIGADIVKHLQPNTKIVFLESPGSITMEVHDVPAIVAAVRSVVPDAIIMIDNTWAAGVLFKALDFGIDVSIQAATKYLVGHSDAMIGTAVCNARCWEQLRENAYLMGQMVDADTAYITSRGLRTLGVRLRQHHESSLKVAEWLAEHPQVARVNHPALPGSKGHEFWKRDFTGSSGLFSFVLKKKLNDEELANYLDNFSLFSMAYSWGGYESLILANQPEHIAAIRPQGEIDFSGTLIRLHIGLEDVDDLIADLDAGFARIV

SEQ ID NO: 13428 - DNA, 1161 bp, Escherichia coli O157:H7 EDL933
  CDS (1)..(1161): transl_table=11
atgacgcgtaaacaggccaccatcgcagtgcgtagcgggttaaatgacgacgaacagtatggttgcgttgtccctcccatccatctttccagcacctataactttaccggatttaatgaaccgcgcgcgcatgattactcgcgtcgcggcaacccaacgcgcgatgtggttcagcgtgcgctggcagaactggaaggcggtgctggtgccgtacttactaataccggcatgtccgcgattcatctggtaacgaccgtctttttgaaacctggcgatctgctggttgcgccgcacgactgctacggcggtagctatcgcctgttcgacagcctggcgaaacgcggttgctatcgcgtgttgtttgttgatcaaggcgatgaacaggcattacgggcagcgctggcagaaaaccccaaactggtactggtagaaagcccaagtaatccattgttacgcgtcgtggatattgcgaaaatctgccatctggcaagggaagtcggggcggtgagcgtggtggataacaccttcttaagcccggcattacaaaatccgctggcattaggtgccgatctggtgttgcattcatgtacgaaatatctgaacggtcactctgacgtggtggctggcgtggtgattgctaaagacccggacgttgtcactgaacttgcctggtgggcaaacaatattggcgtgacgggcggcgcgtttgacagctatctgctgctacgcgggttgcgaacgctggtgccgcgtatggagctggcgcagcgcaacgcgaaggcgattgtgaaatatctgcaaacccagccgttggtgaaaaaactgtatcacccgtcgctgccggaaaatcaggggcatgaaattgccgcgcgtcagcaaaaaggctttggcgcaatgttgagttttgaactggatggcgatgagcagacgctgcgccgtttcctgggcgggctgtcgttatttacgctggcggaatcattagggggagtggaaagtttaatctctcacgccgcaaccatgacacatgcaggcatggcaccagaagcgcgtgctgccgccgggatctccgagacgctgctgcgtatctccaccggtattgaagatggcgaagatttaattgccgacctggaaaatggcttccgggctgcaaacaaggggtaa

SEQ ID NO: 13429 - protein, 386 aa, Escherichia coli O157:H7 EDL933
MTRKQATIAVRSGLNDDEQYGCVVPPIHLSSTYNFTGFNEPRAHDYSRRGNPTRDVVQRALAELEGGAGAVLTNTGMSAIHLVTTVFLKPGDLLVAPHDCYGGSYRLFDSLAKRGCYRVLFVDQGDEQALRAALAENPKLVLVESPSNPLLRVVDIAKICHLAREVGAVSVVDNTFLSPALQNPLALGADLVLHSCTKYLNGHSDVVAGVVIAKDPDVVTELAWWANNIGVTGGAFDSYLLLRGLRTLVPRMELAQRNAKAIVKYLQTQPLVKKLYHPSLPENQGHEIAARQQKGFGAMLSFELDGDEQTLRRFLGGLSLFTLAESLGGVESLISHAATMTHAGMAPEARAAAGISETLLRISTGIEDGEDLIADLENGFRAANKG

SEQ ID NO: 13430 - DNA, 1722 bp, Deinococcus radiodurans R1
  CDS (1)..(1722): transl_table=11
gtggccttcccgtgcggtcaggcggggaacaagataacaaggccgggccaatgtgtcaacgggggcagggcacgctcagccccgtctaagtttcgccttgaccccttacccgcctccgcgctactttttgaggagctcccgcagcaggagccacccacttcagagcgcccgagagacctggctcgacgacggcgcggcaaccggaccccatcacgtcacggtgccaaggccagccccctgggcgtgtcaacgatgagccgccgggcgggaccaagcgggaaggccacgcggatgacgatattcaagtgtcccttctcgattcacagcaggcagggggagtgccgtgactggcgcccccgaacctgcttcccccgaggagccgccaccatgaccgataccaaacagccgcagcctctgcacttcgagaccttgcaggtgcacgccggacaacgccccgaccccgtgaccggagcgcagcaaacgcccatctacgccaccaactcctacgtgttcgagtcgcccgagcacgccgccgacctcttcgggctgcggcaattcggcaacatctacagccgcatcatgaaccccaccaacgacgtgttcgagcagcgggtggccgccctcgaagggggcgtgggggcgctgtcggtgtcgagcgggcacgcggggcagctcgtgacattgctcacgctggcgcaggcgggagacaacatcgtctcgtcgcccaacctgtacggcggcaccgtcaaccagttccgcgtcacgctcaagcggctcggcatcgaggtgcggtttaccagcaaagacgagcgccccgaggaattcgccgcgctgatcgacgagcgcacgcgggccgtatatctggaaaccatcggcaacccggcgctgaacattcccgatttcgagggcgtggcgaaagtcgcgcacgagcacggcgtcgcggtggtcgtggacaacaccttcggggccggcggatactactgccagccgctgcggcacggcgccaacatcgtgctgcactcggcgagcaagtggatcggcgggcacggcaacggcatcggcggggtcatcgtggacggcgggaacttcgactggggcagcgggcggtatccgctgatgaccgagccctcgccgagttatcacgggctgaagttctgggagacgttcggggaaggcaacgggctggggctgccgaacatcgccttcatcacccgcgcccgcaccgaggggctgcgcgacctgggaacgaccctggcgccgcagcaggcgtggcagtttctgcaaggccttgaaaccctgagcctgcgcgccgagcgccacgccgagaacaccctggcgctggcgcactggctcatcagccacccggacgtgaagcaggtcacttaccccggcctgagcaaccacccccactacgaccgggcgcagacctacttgccgcgcggggcgggcgcggtgctcaccttcgagctgcgcgggggccgggcggcgggcgaagcgtttattcgctcggtcaagctcgcgcagcacgtcgccaacgtgggcgacacccgcacgctggtcattcatccggcgagcaccacccacagccagctcgacgaggtgacgcagacgaacgccggggtcacgccgggcctcatccgggtgtcggtgggcatcgagcacgtagacgacatccgcgaggacttcgcgcaggccctggcgagcgctggggagcgggcgtga

SEQ ID NO: 13431 - protein, 573 aa, Deinococcus radiodurans R1
MAFPCGQAGNKITRPGQCVNGGRARSAPSKFRLDPLPASALLFEELPQQEPPTSERPRDLARRRRGNRTPSRHGAKASPLGVSTMSRRAGPSGKATRMTIFKCPFSIHSRQGECRDWRPRTCFPRGAATMTDTKQPQPLHFETLQVHAGQRPDPVTGAQQTPIYATNSYVFESPEHAADLFGLRQFGNIYSRIMNPTNDVFEQRVAALEGGVGALSVSSGHAGQLVTLLTLAQAGDNIVSSPNLYGGTVNQFRVTLKRLGIEVRFTSKDERPEEFAALIDERTRAVYLETIGNPALNIPDFEGVAKVAHEHGVAVVVDNTFGAGGYYCQPLRHGANIVLHSASKWIGGHGNGIGGVIVDGGNFDWGSGRYPLMTEPSPSYHGLKFWETFGEGNGLGLPNIAFITRARTEGLRDLGTTLAPQQAWQFLQGLETLSLRAERHAENTLALAHWLISHPDVKQVTYPGLSNHPHYDRAQTYLPRGAGAVLTFELRGGRAAGEAFIRSVKLAQHVANVGDTRTLVIHPASTTHSQLDEVTQTNAGVTPGLIRVSVGIEHVDDIREDFAQALASAGERA

SEQ ID NO: 13432 - DNA, 1179 bp, Deinococcus radiodurans R1
  CDS (1)..(1179): transl_table=11
atggacaactcagcacgtttccgcacgcgggccgttcacgccgggcatggtctcgacccggcgaccggggcgcacgccatgccgatctatgccacgtccaccttcgggtatggcgacgcggcgcgcgggcagcggctctttgccggagaggaacagggccacttctattcgcgcctgagcaaccccaccgtgcgggccttcgaggaaaagctcgccagcctggaaggaacagaggacgccctcgcctttgccagcggcatgggagcagcgagcgccattttgttgacgctgctgcggagcggcgatgaggtggcttttctcgccccgctgtacggcggcaccgaggggctgctgcaagacatgctgcccaagttcggcatccgggtgtgggaggccaaagacccggcggacctgcgcgggcggctgaccgaccggacgcggctggtgtggctggaaacgccgagcaaccccaccctgcgcctgaccgacctgcgcgaagtggccgacctcgcccacggcgccggggcgcggctggtggtggacaacaccttcagcaccccgtacctgacgcggcctgctgagttcggggccgacctcgtgatgcactcggccaccaagtacctcggtgggcacggcgacgtgattgggggcgtagtcgccggggacgccgccaccctgctcgacctgcggttgcacgggctgcggcatgtcggggccagcctcgggccgttcgaggcgtacctgttgctgcgcggcatgaagacgttgccgctgcggatggaggcccactgcgcgggggcgcaccttatcgccgagcgattggcggcgcggggcgacctgaaggtgtactaccccggcttgcctgagcaccccggccacgacctcgcccggcggcaaatgtcggggcgcttcggcggcatcgtcagcctggatctcggggattttgcggccgcgcagcagtttctggacgcgctacagctctttacgcaggcggtcagcctcggcgacgtggagagcctgagcagccacccggcgagcaccacccaccaactgctcggcgaggaagtgctgaacgcgcacggcatcgtgccggggctggtgcggttgtcggtggggattgaggaccccgaagacctctgggcggacatcgagcaggcgctgaggcaggcgcggcgctga

SEQ ID NO: 13433 - protein, 392 aa, Deinococcus radiodurans R1
MDNSARFRTRAVHAGHGLDPATGAHAMPIYATSTFGYGDAARGQRLFAGEEQGHFYSRLSNPTVRAFEEKLASLEGTEDALAFASGMGAASAILLTLLRSGDEVAFLAPLYGGTEGLLQDMLPKFGIRVWEAKDPADLRGRLTDRTRLVWLETPSNPTLRLTDLREVADLAHGAGARLVVDNTFSTPYLTRPAEFGADLVMHSATKYLGGHGDVIGGVVAGDAATLLDLRLHGLRHVGASLGPFEAYLLLRGMKTLPLRMEAHCAGAHLIAERLAARGDLKVYYPGLPEHPGHDLARRQMSGRFGGIVSLDLGDFAAAQQFLDALQLFTQAVSLGDVESLSSHPASTTHQLLGEEVLNAHGIVPGLVRLSVGIEDPEDLWADIEQALRQARR

SEQ ID NO: 13434 - DNA, 1218 bp, Xylella fastidiosa 9a5c
  CDS (1)..(1218): transl_table=11
atgagtattcatgatgtgcacgaaggcacgtgtcacgtgaccacttccgcggtgcgtgctgggatcgattccgacactgctcatggggcagtgacgccaccgattgtgctttcatccaacttttcgtttgaacgtttcggtcataagcgtaagtacgattacacacgtagtgctaatccaacccgggatctgctcggtgaggcgcttgcggagttggagggtggtgtcggtggtgtggtcacggcgactgggatcgctgcgattatgttggtgttgcacgcattgctccggccgggtgatcgtttggttgtgccacatgatgcttacggtggcagttggcgtttgttcaatgcgctggctcaaaagggacattttgaattgatcacggtcgatttgacggatgcacgatcagtggttgaggcattggcactaccaccgaagttggtattgatcgaaactccttccaatccattgttacgtattactgatttgggtgcggtgattgaggcagcgcaccgtgttggtgctttgactgtggtcgacaatacgtttatgtctccggtgttgcagcgtcctttagagttcggcgctgacttggtattgcattcgactacgaagtacatcaatggccacagtgatgttgtcggtggcgttgttgtggcacgtgatgttgcccactatcagcagttggtgtggtgggcgaatgcgctgggtctgaccggctcgccattcgatgcgttcttgacgttgcggggggtgcgcacgctggatgcgcgtttgcgtgtgcatcaggagaatgcgcagatgattgcagcgttactggaggggcatggtgtggtgaagcacgtgcattacccaggcttggcttcgcatccggggcatgtgctggcggggcggcagcaaaaagggttcggtgccatgctcagtttcgagttgcagggtggggaagcggcggtgcgggcttttgtcagtggcttgcgttatttcacgctggctgagtcgctgggtggggttgagagtttgatcgctcatccggcttcgatgacgcatgctgccatgacgccccaggcgcgtgctaaagcgggtatctctgatgggttgttgcgcttgtcggtggggattgaggccagtgaggatttgatcgttgatctggtggctggtttggggcgtgctcaggcggtgtgtgatggggcggcgcgggaagagtgcaacgtgtga

SEQ ID NO: 13435 - protein, 405 aa, Xylella fastidiosa 9a5c
MSIHDVHEGTCHVTTSAVRAGIDSDTAHGAVTPPIVLSSNFSFERFGHKRKYDYTRSANPTRDLLGEALAELEGGVGGVVTATGIAAIMLVLHALLRPGDRLVVPHDAYGGSWRLFNALAQKGHFELITVDLTDARSVVEALALPPKLVLIETPSNPLLRITDLGAVIEAAHRVGALTVVDNTFMSPVLQRPLEFGADLVLHSTTKYINGHSDVVGGVVVARDVAHYQQLVWWANALGLTGSPFDAFLTLRGVRTLDARLRVHQENAQMIAALLEGHGVVKHVHYPGLASHPGHVLAGRQQKGFGAMLSFELQGGEAAVRAFVSGLRYFTLAESLGGVESLIAHPASMTHAAMTPQARAKAGISDGLLRLSVGIEASEDLIVDLVAGLGRAQAVCDGAAREECNV

SEQ ID NO: 13436 - DNA, 1155 bp, Clostridium acetobutylicum ATCC 824
  CDS (1)..(1155): transl_table=11
atgggagaaatagattgtagaaattttgagacaaaagcagttcatggggagagtggttttgagagcagaactggggcaataagctacccaatataccaaagttctacctttagacatgaaggcttaaataaaggaactggatatgattattcaagaacaggaaatcccactagagatgaagttgaaaagacagttgcagcacttgaaaatggtagagcgtgtctcgcatactcctctggtatggctgcaatatcaagtgttcttaccatatttaaaggtggagatcatataatcgtttcagatgacttgtatggaggaacctatagaatatttgaggagatatatgaacattatggaattgaagtcacatatacagatacaacaagcactgaaaatatagaaaaggaattgagggaaaatacaaaagccatatacctagaaactccaacaaaccctcttatgaaaattactgatataagagaggttagtaaattagcaaaagaacataatactttacttatagtggacaatacttttatgacgccttactatcaaaaaccactagagcttggagcagacatagttcttcacagcggaactaagtatctttgtggacataatgatgccttagcaggttttgtcattttaaatgatgaaaggttaattgaaaagcttagatttatacaaaactctgttggagctgtgcttgcaccttttgatagttggctaattttaagaggaataaaaacccttcacataagacttgatagacagcaggaaaacgcaattaaaatagcaaacttcttaaaaaaacataagaaaattacaaaggttctttatccaggattagaggagcacgttggtcatgatattttaaaaagtgaagcatcaggttttggagcaatgatttccttttacgtagatagtaaagaaaccgtagaaaaagtacttgaaagcgtaaaagtaataatttttgctgaaagccttggtggagtggaaagtttaataacctatccttatactcaaactcatgcagatattccagatgatataaggaaaaggctaggcgttacagataagcttcttagattttctgtgggaatcgaaaatgtagatgatttaataaaagacttagataaagcattgcaagcataa

SEQ ID NO: 13437 - protein, 384 aa, Clostridium acetobutylicum ATCC 824
MGEIDCRNFETKAVHGESGFESRTGAISYPIYQSSTFRHEGLNKGTGYDYSRTGNPTRDEVEKTVAALENGRACLAYSSGMAAISSVLTIFKGGDHIIVSDDLYGGTYRIFEEIYEHYGIEVTYTDTTSTENIEKELRENTKAIYLETPTNPLMKITDIREVSKLAKEHNTLLIVDNTFMTPYYQKPLELGADIVLHSGTKYLCGHNDALAGFVILNDERLIEKLRFIQNSVGAVLAPFDSWLILRGIKTLHIRLDRQQENAIKIANFLKKHKKITKVLYPGLEEHVGHDILKSEASGFGAMISFYVDSKETVEKVLESVKVIIFAESLGGVESLITYPYTQTHADIPDDIRKRLGVTDKLLRFSVGIENVDDLIKDLDKALQA

SEQ ID NO: 13438 - DNA, 1284 bp, Agrobacterium tumefaciens str. C58
  CDS (1)..(1284): transl_table=11
atgaccgcgccgcatccgtccaaaacccatatcggcaaccacgccctccatcctgaaacccagatgctcaattacgggtatgatccggaattgtcggagggtgccgtcaagcccccggtattcctgacgtcgaccttcgtcttcaaatcggcagaggatgggcgtgacttcttcgactacgtttccggccgcaaggagccgccggcgggcaagggtgcgggtctcgtttactcccgttttaaccaccccaacagcgagattgtcgaggatcgccttgccgtttacgaacgtacggagagttgtgcgcttttctcgtccggcatgtccgccatttccacgacgcttttcgccttcgtccggcccggcgacaccgtgctccattcccagccgctgtatggtggcactgagacgctgctggcaaagaccttccataattttggcgtctcggcggtgggttttgccgacggtgtcagcgaggcatcggtgatggccgccgcagagaccgcgatggcgaagggcagggtgtcggtcattctgatcgaaacgccggccaacccgacaaatagcattgtcgatgttgcgatgatgaggcgtgtcgctgacgtgatcggcgaaaaacaaggccacagaccgatcatcgcctgcgacaacacccttctcggcccagttttccagcagcccatcgagcacggcgccgatatttcgctctattcgctcacgaaatacgtcggcgggcattccgacctcatcgccggggcggcgctcgggcggaaggatgtcatgaagcaggtgaaggccctgcgcggagcgatcggcacgcagctcgatccgcactcctgctggatgctcggacgttcgctcgagacgctgcaaatccgaatggagcgggcaaacagcaacgcgaaaatcgttgcggaattcctgaaagcgcatccgaaggtcgagaaaattcattatttgccgttcagcgatccggcatctgcagtcggcaaggtgtttgccgctcaatgctccggtgcgggatcgaccttctcgttcgacattgttggcgggcagccggcgtctttcaaattcctcaatgcgctgaccatattcaaacttgccgtgagcctcggcggtacggaatccctcgcgtctcaccccgcaacgatgacgcattcaggcgttcccgccgatgtccgccagcgcattggtgtactggattccacgattcgcctgtcgatcggcatcgaacatcccgatgatcttatcgccgatctgacccttgctttggacatgtcctga

SEQ ID NO: 13439 - protein, 427 aa, Agrobacterium tumefaciens str. C58
MTAPHPSKTHIGNHALHPETQMLNYGYDPELSEGAVKPPVFLTSTFVFKSAEDGRDFFDYVSGRKEPPAGKGAGLVYSRFNHPNSEIVEDRLAVYERTESCALFSSGMSAISTTLFAFVRPGDTVLHSQPLYGGTETLLAKTFHNFGVSAVGFADGVSEASVMAAAETAMAKGRVSVILIETPANPTNSIVDVAMMRRVADVIGEKQGHRPIIACDNTLLGPVFQQPIEHGADISLYSLTKYVGGHSDLIAGAALGRKDVMKQVKALRGAIGTQLDPHSCWMLGRSLETLQIRMERANSNAKIVAEFLKAHPKVEKIHYLPFSDPASAVGKVFAAQCSGAGSTFSFDIVGGQPASFKFLNALTIFKLAVSLGGTESLASHPATMTHSGVPADVRQRIGVLDSTIRLSIGIEHPDDLIADLTLALDMS

SEQ ID NO: 13440 - DNA, 1173 bp, Agrobacterium tumefaciens str. C58
  CDS (1)..(1173): transl_table=11
atgaaccaaggcaacgatctctttgatcccgcctccctgattgtcgcgcatgacgagacccacgctttcgaagccgtggtgccgcctctcgtgcagacctcgcttttcaccttttccagctacgatgaaatggtctccacctatcgcggtgaaaaggtgcgaccggtctatacgcgcgggcttaacccgacggtgcgcatgttcgaagaaatgctggccagactcgaaggcgctgaagacgcgctcggttttgccagcggcatgtctgctatctcttccaccgtgctgtccttcgtgtcgccgggcgaccgcattgtcgcggtgcgccatgtctatcccgatgccttccgcctgttcggcaccttcatgcagcgcatgaatgttgaggtcgtctatgtcgatggtcgtgatgaggcggcggttgaaaaggcgatgccgggcgcaaagctgttctacatggaaagcccgacgagctgggtgatggaagcccatgatgtcggtgcgctggccgccatcggcaaacggcatggcgcggtcaccgtcatcgacaattcctgggcaagcccggtcttccagcagccgatctcgcttggcgtcgatctcgtcgtgcattcggcctcgaaatatctcggcggccatagcgatgtggtctccggcgtggtggccggttcgaaggcgatgatcgaccgcatccgggaggaaacctatccctatctcggtggcaagatgtcgcctttcgatgcgtggctgctcattcgcggacttcgcaccctgccgctgcgcatgaaggcgcatcaggcttcggcgctcgacatcgcaacccgcctgcaggcgctggatgtggtggagaaggtctgccatccggggctggcgaaccgcctgccgcccggccttcacggcacgtcgggcctgttttcattcatcttcaaggaaggcgtggatgtgcgggcttttgccgaccgcctccagcttttcaaactgggcgtttcctggggcgggcatgaaagcctgatcgttccgggcgaagtggtgctcgaacagaaggcgcagccaaactccgcccacacgttcggcatcagcgcgcgttcggtgcgcctgcatgtcggactggagggcacggaagcgctctggaacgatctcgaacccgcgatcaaggcggcctcagccgtctga

SEQ ID NO: 13441 - protein, 390 aa, Agrobacterium tumefaciens str. C58
MNQGNDLFDPASLIVAHDETHAFEAVVPPLVQTSLFTFSSYDEMVSTYRGEKVRPVYTRGLNPTVRMFEEMLARLEGAEDALGFASGMSAISSTVLSFVSPGDRIVAVRHVYPDAFRLFGTFMQRMNVEVVYVDGRDEAAVEKAMPGAKLFYMESPTSWVMEAHDVGALAAIGKRHGAVTVIDNSWASPVFQQPISLGVDLVVHSASKYLGGHSDVVSGVVAGSKAMIDRIREETYPYLGGKMSPFDAWLLIRGLRTLPLRMKAHQASALDIATRLQALDVVEKVCHPGLANRLPPGLHGTSGLFSFIFKEGVDVRAFADRLQLFKLGVSWGGHESLIVPGEVVLEQKAQPNSAHTFGISARSVRLHVGLEGTEALWNDLEPAIKAASAV

SEQ ID NO: 13442 - DNA, 1227 bp, Sinorhizobium meliloti 1021
  CDS (1)..(1227): transl_table=11
atgcctcggctgatcccgaccagccacgctgatttgatgccatcaagggacctactgccgatgctcgagcgaaaatccagatctgacagagccgaaaccacggccgcagcccacggggtcgcgaccgacccggcattcggctccgtggtgccgccgctatacttgtcaagcacctacgagttcgccggtttcgacacgccgcgcgcctacgactacggccgctctggaaatccgacccgtgacttgctggcgcaagcacttgcgaagctcgagggaggtgccgacgcggttgtcacgccgagcggcatggccgcgctcgacctcctgctagggcgcttgagacgaaaccatctcgtgctggcaccgcatgattgctatggcggcacattgcgactgctgaaggcgcgtgccgatctggggcacctcacattccggcttaccgaccagagggatttcggcggattcgaggccgcattgtcggacgctccggccctcgtcctcatcgagagccccagcaatcctctgatgcgcgtcaccgacattgcccgattgtccacgctcgccaaggcggcaggctccgccgtagccgtcgacaacacgtttctgtcccccgctctccagcaacccctttctctcggagccgattacgccattcactcggcgaccaaattcctgaacggacattcggacgtcatcgccggtgcggtgatcgctgccgagccgcaggaggcgcatgatctcaagcgctgggccaacgttaccggggcagtcgcggcacctttcgatgcctggttgactttgcgcgggctgagaacgttgtttgcgcgaatgtccagccaagaacgcagtgccatgacgatcgcagagtatctcgacgcccaccctgcggtccgccacgtccactatgcgggacttccggatcacgcagaccacgaagtcgcaagacggcagcagcgcggcttcggcgccatgatgagcttcgaactcgaagggggcgttccagccgttcggcgattcctggcacatattcgctgcttcacgctggccgagtcgctcggaggggtcgaaagtctcgtggctcatccggccaccatgacccatctcgacatgggtcctgaagccagagagcgcgcgggtattcgcgacgaactgctcagactttcgatcgggctcgaacatattgacgatcttatggaggggcttgaacttggattgggcgcctgttga

SEQ ID NO: 13443 - protein, 408 aa, Sinorhizobium meliloti 1021
MPRLIPTSHADLMPSRDLLPMLERKSRSDRAETTAAAHGVATDPAFGSVVPPLYLSSTYEFAGFDTPRAYDYGRSGNPTRDLLAQALAKLEGGADAVVTPSGMAALDLLLGRLRRNHLVLAPHDCYGGTLRLLKARADLGHLTFRLTDQRDFGGFEAALSDAPALVLIESPSNPLMRVTDIARLSTLAKAAGSAVAVDNTFLSPALQQPLSLGADYAIHSATKFLNGHSDVIAGAVIAAEPQEAHDLKRWANVTGAVAAPFDAWLTLRGLRTLFARMSSQERSAMTIAEYLDAHPAVRHVHYAGLPDHADHEVARRQQRGFGAMMSFELEGGVPAVRRFLAHIRCFTLAESLGGVESLVAHPATMTHLDMGPEARERAGIRDELLRLSIGLEHIDDLMEGLELGLGAC

SEQ ID NO: 13444 - DNA, 1140 bp, Bacillus subtilis subsp. subtilis str. 168
  CDS (1)..(1140): transl_table=11
atgaagaaaaaaacattgatgatacatggcggaatcacaggtgatgagaaaacaggcgcagtttccgtgccgatttatcaagtaagcacgtacaagcagccgaaagcagggcagcatacaggctacgagtattcaagaacggccaatccgactcgaaccgctctcgaagcacttgtgacagaactggaaagcggggaagcaggctatgcgttcagctcaggaatggctgccattacagcggttatgatgctgtttaacagcggagatcatgtcgtgttgactgatgatgtgtacggcggaacatatcgcgtgatgacaaaggtgcttaaccgtcttggcattgaatcaacatttgttgatacgagcagcagggaagaagttgaaaaagcgattcgccctaatacaaaagcaatttatattgaaacaccgacaaacccgttgctcaaaatcaccgacctgacgctcatggctgatatcgcaaaaaaagcgggtgttctgcttatcgtagacaatacctttaatactccttattttcaacagccgcttactttaggcgctgatatcgtactgcacagtgcgacaaaatatcttggcggacacagtgatgtcgtcggaggtttagttgtgacagcttcgaaagagcttggagaagagctgcattttgtgcaaaactccacaggcggcgtgctcggccctcaagattcctggctgttaatgagaggaatcaaaacgttgggactcagaatggaagcgatcgatcaaaatgcgcggaaaatcgcaagctttcttgagaatcaccctgctgtccaaacgttatattaccctggttcttcaaatcatcccggacatgagcttgcaaaaacgcaaggagcgggcttcggcggcatgatctcctttgatattggcagtgaagaacgggttgatgcgtttttaggaaatctgaaactgtttaccattgctgaaagcctgggggcggttgaaagcttaatttctgttcctgcaagaatgacacatgcctctattccgagagaacgccggcttgagctcggcattacggacggcttgatcagaatttctgtaggaattgaagatgcggaagacttgttggaagatatcggccaagcgcttgaaaatatataa

SEQ ID NO: 13445 - protein, 379 aa, Bacillus subtilis subsp. subtilis str. 168
MKKKTLMIHGGITGDEKTGAVSVPIYQVSTYKQPKAGQHTGYEYSRTANPTRTALEALVTELESGEAGYAFSSGMAAITAVMMLFNSGDHVVLTDDVYGGTYRVMTKVLNRLGIESTFVDTSSREEVEKAIRPNTKAIYIETPTNPLLKITDLTLMADIAKKAGVLLIVDNTFNTPYFQQPLTLGADIVLHSATKYLGGHSDVVGGLVVTASKELGEELHFVQNSTGGVLGPQDSWLLMRGIKTLGLRMEAIDQNARKIASFLENHPAVQTLYYPGSSNHPGHELAKTQGAGFGGMISFDIGSEERVDAFLGNLKLFTIAESLGAVESLISVPARMTHASIPRERRLELGITDGLIRISVGIEDAEDLLEDIGQALENI

SEQ ID NO: 13446 - DNA, 1155 bp, Thermoplasma acidophilum DSM 1728
  CDS (1)..(1155): transl_table=11
atggtatcacacaggtataagggcttcaacaccaaggctgttcagtctggagagctcagggatccaagattcggaaacgtcaccacacctatattcgagacttctacattcgtatatccgaatcctgaaaaggaagcttacaccgatcacacaagagaccagccttacatatacaccagatggggaaacccaacggtacaggcatttgaggagaagtatgcagcagttgagggcgccgaatatgcactttctttctcctccggtatgggtgcaataacctctgcgatcactgggcttctccatccgggttcaagaatgctttctttgtcggatctctacgggcagacgttttatttttttaacaaggtactcggtgatcttggcataaaggtcgattacatcgataccgagaggatcaacagcctagattttgatccatcaaaatacgatgctatctacatggagtcgataacgaatccgacactcaaggtaccggacataagatccgtgtcagactatgcgaagaaatcccttgttatagttgatgcaacgtttgcatccccgtacaaccagcaccctcttgatctgggggctgacgtagtgatacacagtgccacaaaatacattggaggtcacagcgacatcgttatgggcgttgtgggtacgaacagcaaggagatattcaacagcctcgtcatccgtaggaagacctatggatcgaacccagatcccatacaggcctatcttgcgcttcgcggcttgaagactctcggcttgaggatggagaagcataacagaaatggtatggagattgcaaccttcctgaggaaaaacgattccatatcccgggtttattatccggacaccgaaatgggaaaaaaggtgctcagcgggtttggaggcatggtatcctttgagataaggcgcgatagggatgtccactcatttctgaggaaactcagcataccgatggtggccgcaagccttggcggtgttgaaagcctcataacactaccggcggagacttcgcattcctcgctgtccagagaagaaagggaacgaatgggcataagcgacaaccttgtaaggttctcaataggcatagaggatgcagaggatctgatcgcagatatccagaatgcccttggagcttga

SEQ ID NO: 13447 - protein, 384 aa, Thermoplasma acidophilum DSM 1728
MVSHRYKGFNTKAVQSGELRDPRFGNVTTPIFETSTFVYPNPEKEAYTDHTRDQPYIYTRWGNPTVQAFEEKYAAVEGAEYALSFSSGMGAITSAITGLLHPGSRMLSLSDLYGQTFYFFNKVLGDLGIKVDYIDTERINSLDFDPSKYDAIYMESITNPTLKVPDIRSVSDYAKKSLVIVDATFASPYNQHPLDLGADVVIHSATKYIGGHSDIVMGVVGTNSKEIFNSLVIRRKTYGSNPDPIQAYLALRGLKTLGLRMEKHNRNGMEIATFLRKNDSISRVYYPDTEMGKKVLSGFGGMVSFEIRRDRDVHSFLRKLSIPMVAASLGGVESLITLPAETSHSSLSREERERMGISDNLVRFSIGIEDAEDLIADIQNALGA

SEQ ID NO: 13448 - DNA, 1206 bp, Caulobacter crescentus CB15
  CDS (1)..(1206): transl_table=11
atgcgcgacgaccagaccggcttttccacgcgggcgatccatgcgggctacgatcccgccgacgagcacggcgccctgaccccgccgctgcacctgacctcgaccttcgcgttcgagagcgccgaggcgggtggcgagatgttcgccggaacccgcgaggggcacttctactcgcgcatttccaaccccacgaccgacctcctggagcgtcgtctggccagcctggagggcgccgaggcggcggtcgccacggcctcgggcatgggcgcgatcaccgccaccctgtggagcttcctgcgggccggtgacgaggtgatcaccgaccagaccctgtatggctgcacctttgcgttcctgcgcgatggcctgacccggttcggcgtgacggtgaagcaggtcgacatgacccggcccgaaaccctggcggccgccatctcggaccagacgcggatcgtctattttgagaccccggccaatccgaacatgcgtctggtcgacatcgccgcgatcacccggatcgcgcacgctgcgggcgccaaggtggtggtcgacaacacctacgccacgccctgcctgacccggcctctggccctgggcgccgacatcgtcgtgcactcggcgaccaagtatctgggcggccacggcgacctggtgggcgggatcgccgccggcgggatcgaagacatggcgcgcgtgcgcctgtgcggggtaaaggacatgaccggtgcggtgatgtcgcccttcacggcctttctcgtcctgcgcgggctcaagaccctgtcgctgcgcatggcccgccacagccagagcgcccaggcggtggcccgctggctggaggatcaccccgccgtcgagcaggtgttctatcctggcctgcagagcttcccgcagcgcgatctggcggcgcgccagatggcggcgggcggcggcatgatggcgttcgagctgaagggcggccacgccgctggcgtggcgatgatgaaccggctggcgctgatccgccgcgccgtgtcgctgggcgacgccgagaccctgatccagcatccggccagcatgacccattcgccctacacgcctgaggagcgggccgccgccggaatcggcgagggcatggtgcgcctctccgtgggtctggaggacgtggccgatatcctggctgatcttgcgatggcgctggagcctctcaaggtcgcgcaaccggcttga

SEQ ID NO: 13449 - protein, 401 aa, Caulobacter crescentus CB15
MRDDQTGFSTRAIHAGYDPADEHGALTPPLHLTSTFAFESAEAGGEMFAGTREGHFYSRISNPTTDLLERRLASLEGAEAAVATASGMGAITATLWSFLRAGDEVITDQTLYGCTFAFLRDGLTRFGVTVKQVDMTRPETLAAAISDQTRIVYFETPANPNMRLVDIAAITRIAHAAGAKVVVDNTYATPCLTRPLALGADIVVHSATKYLGGHGDLVGGIAAGGIEDMARVRLCGVKDMTGAVMSPFTAFLVLRGLKTLSLRMARHSQSAQAVARWLEDHPAVEQVFYPGLQSFPQRDLAARQMAAGGGMMAFELKGGHAAGVAMMNRLALIRRAVSLGDAETLIQHPASMTHSPYTPEERAAAGIGEGMVRLSVGLEDVADILADLAMALEPLKVAQPA

SEQ ID NO: 13450 - DNA, 1146 bp, Haemophilus influenzae Rd KW20
  CDS (1)..(1146): transl_table=11
gtgcggtcaattttttcattatttttagaggatgttatgacacaacaatatgctatcgatactttattagctcaagcaggcaatcgcagtgatgagcgtacgggcgcggtttctgcaccaatttttctttctacggcttatggtcattgtggtatcggtgaaagtacgggatttgattacacacgtaccaaaaatccaactcgcacagtattagaagaaacgatagctaaattagagaatggagatcgtggttttgcgttttcttctggtatggctgcaattcaagttttgatgacgctttttaccgccccagatgaatggattgtttctagcgatgtgtatggtggtacttatcgattattagatttttcttataaaaataacaatagtgtaaaacctgtttatgttaatacagcatctgcttcagcaattgaggctgccattaacccaaatacgaaagcgatttttattgaaaccccatcgaatcctttaatggaagaatgtgatgtggttgaaattgcaaaacttgcgaaaaaacataacttaatgttgatcgtggataatacgtttttaacgcctgtgctttctcgtccattagatttaggtgcggatgtggtaattcacagcggaactaaatatattgctgggcataatgatgcacttgttggtttaattgttgcgaaagggcaagaactttgtgatcgcattgcttatattcaaaatggtgcaggggcggtgctttctccttttgattcttggctgactattcgtggtatgaagaccctttctttgcgtatgaaacgccatcaagaaaatgcacaagctattgcggaatttttaaaagctcaaccacaagtggaatcggtgctttatccgaataaaggtgggatgttgtctttccgtttgcaagatgaagcttgggttaatacatttttaaaatccatcaaattgattacttttgcagaaagtctaggcggcacagaaagttttattacttatcctgccactcaaactcatatggatattccagaatccgagcgtgtagctcgtgggattactaataccttgttgcgtttttcagtcggtattgaagatgtagaagatattaaagcggacttattacaagcttttgcaaacttaaaataa

SEQ ID NO: 13451 - protein, 381 aa, Haemophilus influenzae Rd KW20
MRSIFSLFLEDVMTQQYAIDTLLAQAGNRSDERTGAVSAPIFLSTAYGHCGIGESTGFDYTRTKNPTRTVLEETIAKLENGDRGFAFSSGMAAIQVLMTLFTAPDEWIVSSDVYGGTYRLLDFSYKNNNSVKPVYVNTASASAIEAAINPNTKAIFIETPSNPLMEECDVVEIAKLAKKHNLMLIVDNTFLTPVLSRPLDLGADVVIHSGTKYIAGHNDALVGLIVAKGQELCDRIAYIQNGAGAVLSPFDSWLTIRGMKTLSLRMKRHQENAQAIAEFLKAQPQVESVLYPNKGGMLSFRLQDEAWVNTFLKSIKLITFAESLGGTESFITYPATQTHMDIPESERVARGITNTLLRFSVGIEDVEDIKADLLQAFANLK

SEQ ID NO: 13452 - DNA, 1161 bp, Salmonella enterica subsp. enterica serovar Typhi str. CT18
  CDS (1)..(1161): transl_table=11
atgacgcgtaaacaggccactatcgcagtgcgtagcggattaaacgatgacgaacaatacggctgcgttgtgccgccaatccatctctccagtacctataactttaccggtttcaatgagccgcgcgcgcatgattattcccgccgcggtaatcccacgcgtgatgtggttcagcgcgcattagcggaactggaaggcggcgcgggcgcagtattgacgaataccggcatgtcggcgattcatctggtcaccaccgttttcctcaagccgggcgatctgctggtcgcgccgcatgattgctacggcggcagttatcgtctgtttgacagtctggcgacgcgcggctgttatcgtgtgcggtttgtcgatcagggcgatgaacgcgccttacaggcggcgctggaagaaaaaccgaagctggtactggtagaaagtccaagtaatccattgttacgcgtggtggatattgcgaaaatctgtcggctggcgcgcgaggcgggcgcagtgagcgtcgttgataacacatttttaagcccggcgctgcaaaatccgctggcgttgggtgccgatctggtgttgcattcatgcacgaaatatctcaatggtcattcggatgtcgtggccggcgtgatgattgctaaggatccggaaatggtcactgaactggcgtggtgggcgaataatattggcgtgaccggcggggcgtttgatagctatctgctgctgcgcggtttgcgaactctggtgccgcgtatggagctggcgcagcgcaacgcgcaggcgattgtgaaatatctgcaaacccagccgttggtgaaaaaactgtatcacccgtcgctgccgaataatcagggacatgagattgccgcgcgtcagcaaaaaggctttggcgcaatgttgagttttgaactggatggggatgaggagacgctacgtcgttttctgggcgggctgtcgctgtttacgctggcggaatctttagggggagtggaaagtttgatctctcacgccgccaccatgacgcatgccggtatgtcgccgcaggcgcgtgccgccgccgggatctccgaaacgctactgcgtatctccaccggtattgaagatggcgaagatttaattgccgacctggaaaatggcttccgggctgcaaacaaggggtaa

SEQ ID NO: 13453 - protein, 386 aa, Salmonella enterica subsp. enterica serovar Typhi str. CT18
MTRKQATIAVRSGLNDDEQYGCVVPPIHLSSTYNFTGFNEPRAHDYSRRGNPTRDVVQRALAELEGGAGAVLTNTGMSAIHLVTTVFLKPGDLLVAPHDCYGGSYRLFDSLATRGCYRVRFVDQGDERALQAALEEKPKLVLVESPSNPLLRVVDIAKICRLAREAGAVSVVDNTFLSPALQNPLALGADLVLHSCTKYLNGHSDVVAGVMIAKDPEMVTELAWWANNIGVTGGAFDSYLLLRGLRTLVPRMELAQRNAQAIVKYLQTQPLVKKLYHPSLPNNQGHEIAARQQKGFGAMLSFELDGDEETLRRFLGGLSLFTLAESLGGVESLISHAATMTHAGMSPQARAAAGISETLLRISTGIEDGEDLIADLENGFRAANKG

SEQ ID NO: 13454 - DNA, 1161 bp, Salmonella typhimurium LT2
  CDS (1)..(1161): transl_table=11
atgacgcgtaaacaggccactatcgcagtgcgtagcggattaaacgatgacgaacaatacggctgcgttgtgccgccaatccatctctccagtacctataactttaccggtttcaatgagccgcgcgcgcatgattattcccgccgcggtaatcccacgcgtgatgttgttcagcgcgcattagcggaactggaaggcggcgcgggcgcggtattgacgaataccggcatgtcggcgattcatctggtcaccaccgttttcctcaagccgggcgatctgctggtcgcgccgcatgattgctatggcggcagttatcgtctgtttgacagtctggcgacacgcggctgttatcgtgtgcggtttgtcgatcagggcgatgaacgcgccttacaggcggcgctggaagaaaaaccgaagctggtactggtagaaagtccaagtaatccattgttacgcgtggtggatattgcgaaaatctgtcggctggcgcgcgaggcgggcgcagtgagcgtcgttgataacacgtttttaagcccggcgctgcaaaatccgctggcgttgggtgccgatctggtgttgcattcatgcacgaaatatctcaacggtcattcggatgtcgtggccggcgtggtgattgctaaagatccggaagtggtcactgaactggcgtggtgggcgaataatattggcgtgaccggcggggcgtttgatagctatctgctgctgcgcggtttgcgaactctggtgccgcgtatggagctggcgcagcgcaacgcgcaggcgattgtgaaatatctgcaaacccagccgttggtgaaaaaactgtatcatccgtcgctgccggaaaatcaggggcatgaaattgccgcgcgccagcaaaaaggctttggcgcaatgttgagttttgaactggatggggatgaggagacgctgcgtcgttttctgggcgggctgtcgctgtttacgctggcggaatctttagggggagtggaaagtttgatctctcacgccgccaccatgacgcatgccggtatgtcgccgcaggcgcgtgcctccgccgggatctccgaaacgctactgcgtatctccaccggtattgaagatggcgaagatttaattgccgacctggaaaatggcttccgggctgcaaacaaggggtaa

SEQ ID NO: 13455 - protein, 386 aa, Salmonella typhimurium LT2
MTRKQATIAVRSGLNDDEQYGCVVPPIHLSSTYNFTGFNEPRAHDYSRRGNPTRDVVQRALAELEGGAGAVLTNTGMSAIHLVTTVFLKPGDLLVAPHDCYGGSYRLFDSLATRGCYRVRFVDQGDERALQAALEEKPKLVLVESPSNPLLRVVDIAKICRLAREAGAVSVVDNTFLSPALQNPLALGADLVLHSCTKYLNGHSDVVAGVVIAKDPEVVTELAWWANNIGVTGGAFDSYLLLRGLRTLVPRMELAQRNAQAIVKYLQTQPLVKKLYHPSLPENQGHEIAARQQKGFGAMLSFELDGDEETLRRFLGGLSLFTLAESLGGVESLISHAATMTHAGMSPQARASAGISETLLRISTGIEDGEDLIADLENGFRAANKG

SEQ ID NO: 13456 - DNA, 1173 bp, Listeria monocytogenes EGD-e
  CDS (1)..(1173): transl_table=11
gtggctaaagaatacgcgcaagatacggctgtaattaaagcgagcctcgggattgataaagaaacaggtgcgcttaatacgccgattcatttatcttctactttccatcaacatgattttgataactaccatgcttatgattatgcaagaagtggaaacccaaccagggaaaaagtggaacaggcgattgcagaattggaaggtggtacgaatggttttgcctttgctagtggaatggcggctgtttctgcggcactttttacgctttcaaaaggagatcattttattattgcaaaagatgtgtacggcgggacgtttcgtttggtggaacaagtgttgccgcggtttgggattacgcatacttttgttgatacaacaaatattgacgaggttgctaaggcgtttcaagcaaatacaaaattggtttatttggaaactccttctaatccgctgctacatgtgacggatattcgcacagttgctaaacttgcgaaagcgaatggttgctatacatttgtcgataatacatttttaacgccgctgattcaaaaaccgttagaattaggtgcggacttagttatccatagtgcgacgaaatttcttggtgggcatagtgatattttggcggggctaattgtcacaaataatcctaatcttgctgaagcagtgtactttttgcaaaattcgactggtggggttcttggagtgcaggattcgtggttgttattgcgcggactaaaaacactttctgtgcggatgaaggctgggacggaaacggcggagaaaattgcgctatttttaaatgcggagccagatgtggttgcggtgcattatccggggttaccgtcgcatgcggggtatgacattcaagtggaacaggcgacaagcggcggggctgttttatcgtttgatttaggcagtgaggaagcggtgcgagaactagttacacatttggaattgccagtgttctctgtgagtctaggtgcggtcgagagtattctttcttacccggctaaaatgtctcatgcggctgttccggaagaggaacgtttggcgcaagggattacgccaggattattacgtttttcagctggactagaagatgctgaagacttgattgcagatttaaaacaagcactttcattcattaagaagggaagtgttgcgaagtga

SEQ ID NO: 13457 - protein, 390 aa, Listeria monocytogenes EGD-e
MAKEYAQDTAVIKASLGIDKETGALNTPIHLSSTFHQHDFDNYHAYDYARSGNPTREKVEQAIAELEGGTNGFAFASGMAAVSAALFTLSKGDHFIIAKDVYGGTFRLVEQVLPRFGITHTFVDTTNIDEVAKAFQANTKLVYLETPSNPLLHVTDIRTVAKLAKANGCYTFVDNTFLTPLIQKPLELGADLVIHSATKFLGGHSDILAGLIVTNNPNLAEAVYFLQNSTGGVLGVQDSWLLLRGLKTLSVRMKAGTETAEKIALFLNAEPDVVAVHYPGLPSHAGYDIQVEQATSGGAVLSFDLGSEEAVRELVTHLELPVFSVSLGAVESILSYPAKMSHAAVPEEERLAQGITPGLLRFSAGLEDAEDLIADLKQALSFIKKGSVAK

SEQ ID NO: 13458 - DNA, 1173 bp, Listeria innocua Clip11262
  CDS (1)..(1173): transl_table=11
gtggctaaggattatgggcaagatacagctgtaattaaagctagtttaggaatcgataaagaaacaggtgcacttaatacgcccattcatttatcgtctacatttcatcaacatgattttgataattaccatacttatgattatgcaagaagtggcaatccgacgagagaaaaagtggagcaagcgattgccgagttagaaagtggcacgaacggttttgcttttgcaagtggtatggctgctgtttctgcggcacttttcacactatctaaaggggatcattttattatttcaaaagatgtgtatggtggaacttttcgtttggttgagcaagtgttgccgaggtttgggattacgcatacttttgttgatacgacaaatattgatgaagttgcgaaggcatttcaagcgaatactaagttggtttacttggaaacaccatccaatccgctattacatgtgacggacattcggactgtttctaaacttgcgagagcgaatggctgccatacgtttgttgacaatacttttttaacaccacttattcaaaaaccgttagagctaggggcagatttggttatccacagtgcgacgaaatttcttggcggtcatagtgatattttggcggggcttattgttactaataacccggatttggctgaagctatttactttttgcaaaattcaactggtggggttcttggggtgcaagattcttggctgttgcttcgtggacttaaaacgctatctgttcggatgaaagctgggacggaaactgcggaaaaaattgctttgtttttaaatgcggaaccagatgtagtcgcggtgcattatcctgggttaccatcccatgcaggctatgaaattcaagtagaacaagcgacgagtggtggagctgttttgtcttttgatcttggtagcgaagaagcagtgcgcgagctcgtgaatcatttggagttaccggtattttccgtgagtttaggtgcggttgagagtattttatcttatcctgctaaaatgtctcatgctgctgttccggaagaggagcgattaaaacaaggaattactccaggattattacgtttttcagcggggcttgaggatgcagatgatttgattgctgatttaaaacaagcactttcgttcattaagaaaggaagtgtcgcgaaatga

SEQ ID NO: 13459 - protein, 390 aa, Listeria innocua Clip11262
MAKDYGQDTAVIKASLGIDKETGALNTPIHLSSTFHQHDFDNYHTYDYARSGNPTREKVEQAIAELESGTNGFAFASGMAAVSAALFTLSKGDHFIISKDVYGGTFRLVEQVLPRFGITHTFVDTTNIDEVAKAFQANTKLVYLETPSNPLLHVTDIRTVSKLARANGCHTFVDNTFLTPLIQKPLELGADLVIHSATKFLGGHSDILAGLIVTNNPDLAEAIYFLQNSTGGVLGVQDSWLLLRGLKTLSVRMKAGTETAEKIALFLNAEPDVVAVHYPGLPSHAGYEIQVEQATSGGAVLSFDLGSEEAVRELVNHLELPVFSVSLGAVESILSYPAKMSHAAVPEEERLKQGITPGLLRFSAGLEDADDLIADLKQALSFIKKGSVAK

SEQ ID NO: 13460 - DNA, 1185 bp, Agrobacterium tumefaciens str. C58
  CDS (1)..(1185): transl_table=11
atgagcaataaatggcgcccggcaacccagctcgttcacggcggtacgctacgctcaccctatggtgaaacgtcggaagcgatctatctgacccagggtttcgtttacgaaaactccgaagccgccgaagcccgcttcaagggcgaaacggatggcttcatctacgcccgctacgccagcccgaccaatgacatgttcgaaaagcgcatgtgcctgctggaaggcgcggaagacgcgcgcgcgcttgcctccggcatggccgccgtcaccgccgccatcatgtgccagctgcgcgccggcgatcacatcgttgccgcacgagcccttttcggctcctgccgctgggtggtggaaacgctcgcaccgaaatacggcatcgaatgcacgctgatcgacggacgtgatctcgacaattgggaaaaggcgatccagccgaacaccaagctgttcttccttgaaagcccgaccaacccgacgctcgaagtggttgatattgccggtgtggcgaagctcgccaaccagatcggcgcgaaagtggtggtcgataacgtctttgcgacgccgcttttccagaagccgctcgaactcggcgcccatatcgtggtttattcggccaccaaacatattgacggccagggccgctgcctgggtggcgtgatcctctccgacaagaagtggatcgaagaagagctgcaggactatttccgccatacgggcccggccatgtcgccgttcaacgcctggacgcttctgaagggcatcgagaccctgccgcttcgcgtcaagcagcagacggagaatgccgcgaagatcgccgatttcctcgccgatagcggcaaggtcgccaaggtcatctatcccggccgcgccgatcatccgcaggcggatatcatcgcacggcagatgtccggaggctccactttggtggccttcgaactgaagggcggcaaggacgcagccttcaagttgcagaacgcgcttgagatcgtgaagatttccaacaatctcggcgatgccaagagcctcatcacccatcccggtacgacgacacacaagaacctctccgacgaggcgcgtgccgaactcggcatttccggaggcaccctgcgcctttcctgcggcatcgaggataccgacgatctgctggaagatctcgcaaagggtcttgcggccgtttccgcctga

SEQ ID NO: 13461 - protein, 394 aa, Agrobacterium tumefaciens str. C58
MSNKWRPATQLVHGGTLRSPYGETSEAIYLTQGFVYENSEAAEARFKGETDGFIYARYASPTNDMFEKRMCLLEGAEDARALASGMAAVTAAIMCQLRAGDHIVAARALFGSCRWVVETLAPKYGIECTLIDGRDLDNWEKAIQPNTKLFFLESPTNPTLEVVDIAGVAKLANQIGAKVVVDNVFATPLFQKPLELGAHIVVYSATKHIDGQGRCLGGVILSDKKWIEEELQDYFRHTGPAMSPFNAWTLLKGIETLPLRVKQQTENAAKIADFLADSGKVAKVIYPGRADHPQADIIARQMSGGSTLVAFELKGGKDAAFKLQNALEIVKISNNLGDAKSLITHPGTTTHKNLSDEARAELGISGGTLRLSCGIEDTDDLLEDLAKGLAAVSA

SEQ ID NO: 13462 - DNA, 1284 bp, Agrobacterium tumefaciens str. C58
  CDS (1)..(1284): transl_table=11
atgtcgagcaacaatcccggattttcgacgttggccgttcacgccggtgcgcagcctgatccgaccaccggcgcgcgcgcgacgccgatttatcagacgacggcctatgctttccgcgatgccgatcacgccgccgctttgttcggattgaaagagttcggcaatatctacacccgcatcatgaaccccacccaggcagttctggaggagcgcgtggcggcgctcgaaggcggcacggcggcgctcgctgtcgcttccggtcacgcagcacaattgctggttttccatacgctcatgcaatccggtgataatttcgtcgcggcccgccagctttatggcggctcgatcaaccagttcggccacgccttcaagggtttcgactggcaggtgcgctgggcggacgcggcagacccggcgagcttcgaggcgcagatcaatgagcgcacgcgcgccatcttcatcgaaagcctcgccaatcccggcggcaccttcgtcgatattgccgcgattgccgatgtcgcccatcgtcacggcctgccgcttatcgtcgacaataccatggcgagcccctatctgctgcggccgctggaacacggcgctgacatcgtgctgcattcgctgacgaaattccttggcggacacggcaattccatgggtggcatcattgtcgatggcggcaccttcgactggtcggcgacagacagatttccggcgctgtcgcagccgcggccggaatattccggcgtcctgttgcaccagaccttcggcaatttcgcctttgccatcgcctgccgcgttctgggattgcgtgatctcggcccggcaatctcgcccttcaacgccttccttatcctgaccggcatcgagacgctgccgctgcgcgttcagcgccattccgacaatgcactcgccgtcgcgaaatggctgaaggcacatccaaaggtcggctgggtgcattatgcgggcctggaggacagcgacaaccacgccatccagcagcattattcgccgaagggggcgggctccgtctttaccttcggcgtcaagggcggttatgccgccggcaaggcgctggtggaggggctgcagcttttctcccatctggccaatatcggcgatacgcgctcgctcgtcatccatccggcctccaccacccacgcccagctgacaccggaacagcagacggcagccggcgccgggccagacgtggtgcgcctgtcgatcggcatcgaagacgtcaaggacatcatcgccgatctcgaacagtcatttgccaaggtgtga

SEQ ID NO: 13463 - protein, 427 aa, Agrobacterium tumefaciens str. C58
MSSNNPGFSTLAVHAGAQPDPTTGARATPIYQTTAYAFRDADHAAALFGLKEFGNIYTRIMNPTQAVLEERVAALEGGTAALAVASGHAAQLLVFHTLMQSGDNFVAARQLYGGSINQFGHAFKGFDWQVRWADAADPASFEAQINERTRAIFIESLANPGGTFVDIAAIADVAHRHGLPLIVDNTMASPYLLRPLEHGADIVLHSLTKFLGGHGNSMGGIIVDGGTFDWSATDRFPALSQPRPEYSGVLLHQTFGNFAFAIACRVLGLRDLGPAISPFNAFLILTGIETLPLRVQRHSDNALAVAKWLKAHPKVGWVHYAGLEDSDNHAIQQHYSPKGAGSVFTFGVKGGYAAGKALVEGLQLFSHLANIGDTRSLVIHPASTTHAQLTPEQQTAAGAGPDVVRLSIGIEDVKDIIADLEQSFAKV

SEQ ID NO: 13464 - DNA, 1188 bp, Agrobacterium tumefaciens str. C58
  CDS (1)..(1188): transl_table=11
atgaccaagaccaatgacctgcgttccgccgcaggtgtgaatacgcgcctgacccatggcggcaacgatcccgcggactgtttcggtttcgtcaatcctcccatcgtgcgtggctcgaccgtgctttttcccgatgcggagacgctttcgaccgaagaccagaaatacacctatggcacccatggtacgccgacgacggacgcgctctgcaatctggtcaacgagctggaaggttctttcggaaccattctcgtcccgtcgggccttgcggcgattaccgtgccgttccttgcctatctcggtgctggcgatcatgcgctgatcgttgattccgtctatttccccacccgccgtttctgcaacaccatgctgaagaagctgggcgtggaggtggagtattacgatcccgcgatcggggctggcatcgaggcgcttatccgaccaaatacgaagctcgtgcatctggaagcgccgggttccaacaccttcgagattcaggatgtccggctgatcactgacatcgctcaccggcatgattgcgtggtgaccatggacaatacctgggcgacgccgctttatttcaagccgctcgatttcggcgtcgatgtctccattcacgccgccaccaaatatccctcgggccattccgacgtgctgatgggcttcgtttcggccaatgaaaagtactggaaagcgctttatcaggccaacaccaatctcggcatctgcgtcacccccgacgatgcctatcagatcctgcgcggcatgcgcaccatggggatcaggctggaacaccatcagaagagcgcgctggatatcgcgcaatggctcgagggtcgcgacgacgttgtgcgcgtgctgcatccggccttgccgagctttgccgggcatgaactctggaagcgtgatttcaagggcgcgagcggtgtcttctccttcgtattgaaggcggaagagggcaaatacaaacagacggcatctgccttccttgatgcgctgacgttcttcgggctcggctattcctggggcggctacgaatcgcttgccgtatcggtatcgctcgtcgacagaacgattgcgaagggcccgtcggaaggaccggtcatccgtctgcagatcgggctcgaggatgtcgccgatctcaagaaagacctcgaggccggtttttcagccgcggccggggtctga

SEQ ID NO: 13465 - protein, 395 aa, Agrobacterium tumefaciens str. C58
MTKTNDLRSAAGVNTRLTHGGNDPADCFGFVNPPIVRGSTVLFPDAETLSTEDQKYTYGTHGTPTTDALCNLVNELEGSFGTILVPSGLAAITVPFLAYLGAGDHALIVDSVYFPTRRFCNTMLKKLGVEVEYYDPAIGAGIEALIRPNTKLVHLEAPGSNTFEIQDVRLITDIAHRHDCVVTMDNTWATPLYFKPLDFGVDVSIHAATKYPSGHSDVLMGFVSANEKYWKALYQANTNLGICVTPDDAYQILRGMRTMGIRLEHHQKSALDIAQWLEGRDDVVRVLHPALPSFAGHELWKRDFKGASGVFSFVLKAEEGKYKQTASAFLDALTFFGLGYSWGGYESLAVSVSLVDRTIAKGPSEGPVIRLQIGLEDVADLKKDLEAGFSAAAGV

SEQ ID NO: 13466 - DNA, 1206 bp, Brucella melitensis 16M
  CDS (1)..(1206): transl_table=11
ttggaaaaaatgacgactgagaatgcccgcaaatttcgccctgcaaccgaactcgtccatgccggatcgttgcgctccggtttcgccgaaatgtcggaagccctgtttttgacgcaaggcttcctttaccccacggcggaagctgccgaagcgcgtttcaagggtgaagatccgggtttcatctattcgcgctacgccaacccgaccaccgacatgtttgaaaagcgcatgtgtgcgctggaaggcgcggaagacgcccgcgccaccgcctccggcatggccgccgttgccgccgccattctctgccaggtacaggcgggcgatcatgtcatctcggcccgcgccgtcttcggctcgtgtcgttatatcgtcgaaaccgtcctgccgcgctatggcgtggaagtctcgatcatcgacggctcggatgtggccaactggaaagcggccgtgcgccccaataccaaggtcatgtttcttgaaagcccgtcgaacccgacactcgaaatcatcgacattgccgccgttgcacagattgccaacgaagcgggcgcaaagctgatcgtggacaatgttttcgccacgccgcttttccagaagccgctggagcttggcgcacatatcgtcgtctattcagccacgaaacatattgacggccagggccgctgcctcggcggcgtggtgctttccgaccgcgaatggatcgaaaccacattgcaggattatttccgccatacgggaccgggcctcagccccttcaatgcatggatcatgctgaagggcctggaaacgctttcggtgcgcgtgcgccagcagacgcaatcggctgccgcaatcgccgacttccttgcaggcaagccgggcgtcaagcgtgtgatctatccgggccgcgccgaccatccgcagaccgacatcattgctaagcagatgacaggcggatccacgctcatcgcgctggagctggagggcggcaaggaagcagctttcaagtttgaaaatgcattgcaaattttcagcatcaccaacaatctgggcgacaccaagagcctgattacccatccggccaccacgacgcacaagaacctctccaacgaggcgaaggcagaactcggcatttcggatggcctgctgcgcgtttcggtcggcctcgaagacaccgacgatcttctggaagatgttgaagtggcgctgaaagtagcgcgcggctga

SEQ ID NO: 13467 - protein, 401 aa, Brucella melitensis 16M
MEKMTTENARKFRPATELVHAGSLRSGFAEMSEALFLTQGFLYPTAEAAEARFKGEDPGFIYSRYANPTTDMFEKRMCALEGAEDARATASGMAAVAAAILCQVQAGDHVISARAVFGSCRYIVETVLPRYGVEVSIIDGSDVANWKAAVRPNTKVMFLESPSNPTLEIIDIAAVAQIANEAGAKLIVDNVFATPLFQKPLELGAHIVVYSATKHIDGQGRCLGGVVLSDREWIETTLQDYFRHTGPGLSPFNAWIMLKGLETLSVRVRQQTQSAAAIADFLAGKPGVKRVIYPGRADHPQTDIIAKQMTGGSTLIALELEGGKEAAFKFENALQIFSITNNLGDTKSLITHPATTTHKNLSNEAKAELGISDGLLRVSVGLEDTDDLLEDVEVALKVARG

SEQ ID NO: 13468 - DNA, 1152 bp, Pyrobaculum aerophilum str. IM2
  CDS (1)..(1152): transl_table=11
atgcgcaaaggtacagtcgccgtgagggggtataaacacagcgacccctacggcgctttacaacctcctatttacctaactgctcttttcaggatggagggagaggctttgaagtcagacagggggtttgaccttaaatacagccgggaggaaaaccccactctgcgccccctggaagaggtagtggccaatttagagggcggcgtagactctcttgcttttaatagcggcatggccgctctctccacggtgtttttctcacttctctccgccgacgcctccgtgttgacgccaatggaggcgtacggggctactctcagacttctaaacgccttggagaaatacggcgtcagaatgcgaaaggcatatcctgacactgaaacgtatatagaggccttaaaggcggttaagcctaatttggcgttttttgaaactattacaaatcccatgttgagagttttagacggacctgagattattaaggcggctaaggatttaggagctgtggtagtggtggacaacacctttgccactcccgtactgacaacgcctatttcctacggagctgatgtagtagtgcactcggccactaaatatctggcgggacataacgacgtagtagggggaatagctgttgtggccagaggcgatttattagaggagctttggatttggcgggcgatgctaggcagcataatgcaaccttttgaggcgtttttaacgcttagaggactgaagacgttatttgtacgttttgaaaaacagtgtaagacggcaatggccgtggcccagttcctagagggacacggcaaagtggctgaggttatataccccggcctatctagccacccccaccacgccactgctaagaggctatttggcgacaaattcggcgcggttgtctcctttagaattaagggaggtagggatgctgtcgtgaggtttttcaagtcgttgagacttataactccgggtccaagtcttggcggagtggagagcaatgcgacgtacccagtggcgagtgcagcgtcgccaattcctgaagacgagagaaagatcttgggaataactgaggatttagtgaggctgtctatagggctggaggaggctgaggatttaatagaggatttagacagggctttaaacagctaa

SEQ ID NO: 13469 - protein, 383 aa, Pyrobaculum aerophilum str. IM2
MRKGTVAVRGYKHSDPYGALQPPIYLTALFRMEGEALKSDRGFDLKYSREENPTLRPLEEVVANLEGGVDSLAFNSGMAALSTVFFSLLSADASVLTPMEAYGATLRLLNALEKYGVRMRKAYPDTETYIEALKAVKPNLAFFETITNPMLRVLDGPEIIKAAKDLGAVVVVDNTFATPVLTTPISYGADVVVHSATKYLAGHNDVVGGIAVVARGDLLEELWIWRAMLGSIMQPFEAFLTLRGLKTLFVRFEKQCKTAMAVAQFLEGHGKVAEVIYPGLSSHPHHATAKRLFGDKFGAVVSFRIKGGRDAVVRFFKSLRLITPGPSLGGVESNATYPVASAASPIPEDERKILGITEDLVRLSIGLEEAEDLIEDLDRALNS

SEQ ID NO: 13470 - DNA, 1155 bp, Clostridium perfringens str. 13
  CDS (1)..(1155): transl_table=11
atgaagaagaattctttattaatacatgggggtataagtatagatgaaaaaactggggcagtaaatattccaatatatcaaacatccacatacaagcaaagatcttttggggaaaatagtggatatgaatattcaagaacaggaaacccaactagggaatcattagaaaagttaattgcagatatagaatatggaaaaagaggatttgcctttgcatcaggtcttgcagcaattactgcagtattaagtttatttaaaagtggagataaattattaattactaataatctttacggtggaacatttagagtaattgataagatattctctaactttgggataggttatgaaataattgatgactttaccaatattgaagaaaaaattgacaagagtgttaaagctatttatatagaaacacctacaaatcctctgttagatgtcatagatataaaaatagcatcagataaagctaaaaagtataatttattaacaatagtagataacacatttatgactccatattttcaaaatccattaaatcttggggcagatatagttattcattcagcaactaaatatcttggggggcacagtgatttagttgctgggcttgtagttgtgaaagatgaagagcttggagagaaaatacactttatacaaaactctactggtggaatacttcaaccttttgatagcttcttactaataagaggaatcaaaactttatcagtaagaatggatagacatgaattaaatgctaattttatagctgaaaagttaggtgatttagaggggatagataatgtatattatccaggacttaaaactcatattggacatgacatacaaaagaaacaagcttcaggttttgggggaataatctctttcactttaaataagaaatataattatgagaagttctttaatagtttagaacttataacctttggggaaagcttaggtggagtggagtctttggcatgtcacccagcttctatgactcatgcagctatgccattagaacttagagaacgtataggaataacagataggttaataagaatttcagttggtatagaagataaagaggatattttagaagatatacaaaaagctttagtaaaggctggtgataaaaatgaaatattataa

SEQ ID NO: 13471 - protein, 384 aa, Clostridium perfringens str. 13
MKKNSLLIHGGISIDEKTGAVNIPIYQTSTYKQRSFGENSGYEYSRTGNPTRESLEKLIADIEYGKRGFAFASGLAAITAVLSLFKSGDKLLITNNLYGGTFRVIDKIFSNFGIGYEIIDDFTNIEEKIDKSVKAIYIETPTNPLLDVIDIKIASDKAKKYNLLTIVDNTFMTPYFQNPLNLGADIVIHSATKYLGGHSDLVAGLVVVKDEELGEKIHFIQNSTGGILQPFDSFLLIRGIKTLSVRMDRHELNANFIAEKLGDLEGIDNVYYPGLKTHIGHDIQKKQASGFGGIISFTLNKKYNYEKFFNSLELITFGESLGGVESLACHPASMTHAAMPLELRERIGITDRLIRISVGIEDKEDILEDIQKALVKAGDKNEIL

SEQ ID NO: 13472 - DNA, 1173 bp, Schizosaccharomyces pombe 972h-
  CDS (1)..(1173)
atgcccagcgattgtaaatattctgtcgataccgaattggtacatgttgaaggcaatgaagaccagtatcatgcgtcttcagtcccaatttatcaatcagctacctttaaacagccatgcttagagcatatgggcaaatttgattacactcgttccggtaatcctactcgctctgttcttcaagtgcacttggctaaacttatgaaggcgaaacatgcttttgtaactagcaatggtatgtccgctttagacatgattttacgctgctgcaagtctaatagccatgtcgttgctggccacgatctatatggtggctctgatcgcttactctcttttaaccaaaggcaatatggatttaaagtggataacgttgatacttctgacttggcagcctttgaggcagctttgcgcccagacacaaacttggttttgattgaaagtcctactaatccccgtatcagcatttgtgatattcgggctattgttaaaataactcgttcaaaagccaaggatgccttattggtaatggacaatactatgctttctcctgtcctttgtaaccctttggactttggttatgatatagtttacgagtcggccacaaagtatctctcaggtcatcacgatttaatgggtggtgtcattgccacaaaaagcgatgagattgctaaatctgtgttttttaacatcaacgcaatgggtgctgctatggctcccttcgaatgtttccttctgttgcgcggtattaaaacgatgggattgcgtgttgaacgtgcacagcagaatgcaatagaaattgccaaattcttaaagagcaagggacttcaggtcaacttccctggattagaccctgacgctaagtcaaccgcaatcttttactcctttgcacgtggaccaggtgctgtaatgtctgtttttactggcgacgttgaagtctctaaaactattgtaaacactactaagctctttgaaatatcggtttcgtttggtgctgttaactctttgatcagtatgcccgcttatatgagtcatgcttctatcaagaaggaggttcgagacgctcggggattgagtgaagatttgattcgcatctgtgtcggcatcgaaaacgtcgatgatctcaaggctgacctcgaaaatgcccttgctcaagcaaattttaaacagaattga

SEQ ID NO: 13473 - protein, 390 aa, Schizosaccharomyces pombe 972h-
MPSDCKYSVDTELVHVEGNEDQYHASSVPIYQSATFKQPCLEHMGKFDYTRSGNPTRSVLQVHLAKLMKAKHAFVTSNGMSALDMILRCCKSNSHVVAGHDLYGGSDRLLSFNQRQYGFKVDNVDTSDLAAFEAALRPDTNLVLIESPTNPRISICDIRAIVKITRSKAKDALLVMDNTMLSPVLCNPLDFGYDIVYESATKYLSGHHDLMGGVIATKSDEIAKSVFFNINAMGAAMAPFECFLLLRGIKTMGLRVERAQQNAIEIAKFLKSKGLQVNFPGLDPDAKSTAIFYSFARGPGAVMSVFTGDVEVSKTIVNTTKLFEISVSFGAVNSLISMPAYMSHASIKKEVRDARGLSEDLIRICVGIENVDDLKADLENALAQANFKQN

SEQ ID NO: 13474 - DNA, 1314 bp, Corynebacterium glutamicum ATCC 13032
  CDS (1)..(1314): transl_table=11
atgccaaagtacgacaattccaatgctgaccagtggggctttgaaacccgctccattcacgcaggccagtcagtagacgcacagaccagcgcacgaaaccttccgatctaccaatccaccgctttcgtgttcgactccgctgagcacgccaagcagcgtttcgcacttgaggatctaggccctgtttactcccgcctcaccaacccaaccgttgaggctttggaaaaccgcatcgcttccctcgaaggtggcgtccacgctgtagcgttctcctccggacaggccgcaaccaccaacgccattttgaacctggcaggagcgggcgaccacatcgtcacctccccacgcctctacggtggcaccgagactctattccttatcactcttaaccgcctgggtatcgatgtttccttcgtggaaaaccccgacgaccctgagtcctggcaggcagccgttcagccaaacaccaaagcattcttcggcgagactttcgccaacccacaggcagacgtcctggatattcctgcggtggctgaagttgcgcaccgcaacagcgttccactgatcatcgacaacaccatcgctaccgcagcgctcgtgcgcccgctcgagctcggcgcagacgttgtcgtcgcttccctcaccaagttctacaccggcaacggctccggactgggcggcgtgcttatcgacggcggaaagttcgattggactgtcgaaaaggatggaaagccagtattcccctacttcgtcactccagatgctgcttaccacggattgaagtacgcagaccttggtgcaccagccttcggcctcaaggttcgcgttggccttctacgcgacaccggctccaccctctccgcattcaacgcatgggctgcagtccagggcatcgacaccctttccctgcgcctggagcgccacaacgaaaacgccatcaaggttgcagaattcctcaacaaccacgagaaggtggaaaaggttaacttcgcaggcctgaaggattccccttggtacgcaaccaaggaaaagcttggcctgaagtacaccggctccgttctcaccttcgagatcaagggcggcaaggatgaggcttgggcatttatcgacgccctgaagctacactccaaccttgcaaacatcggcgatgttcgctccctcgttgttcacccagcaaccaccacccattcacagtccgacgaagctggcctggcacgcgcgggcgttacccagtccaccgtccgcctgtccgttggcatcgagaccattgatgatatcatcgctgacctcgaaggcggctttgctgcaatctag

SEQ ID NO: 13475 - protein, 437 aa, Corynebacterium glutamicum ATCC 13032
MPKYDNSNADQWGFETRSIHAGQSVDAQTSARNLPIYQSTAFVFDSAEHAKQRFALEDLGPVYSRLTNPTVEALENRIASLEGGVHAVAFSSGQAATTNAILNLAGAGDHIVTSPRLYGGTETLFLITLNRLGIDVSFVENPDDPESWQAAVQPNTKAFFGETFANPQADVLDIPAVAEVAHRNSVPLIIDNTIATAALVRPLELGADVVVASLTKFYTGNGSGLGGVLIDGGKFDWTVEKDGKPVFPYFVTPDAAYHGLKYADLGAPAFGLKVRVGLLRDTGSTLSAFNAWAAVQGIDTLSLRLERHNENAIKVAEFLNNHEKVEKVNFAGLKDSPWYATKEKLGLKYTGSVLTFEIKGGKDEAWAFIDALKLHSNLANIGDVRSLVVHPATTTHSQSDEAGLARAGVTQSTVRLSVGIETIDDIIADLEGGFAAI

SEQ ID NO: 13476 - DNA, 1161 bp, Corynebacterium glutamicum ATCC 13032
  CDS (1)..(1161): transl_table=11
ttgtcttttgacccaaacacccagggtttctccactgcatcgattcacgctgggtatgagccagacgactactacggttcgattaacaccccaatctatgcctccaccaccttcgcgcagaacgctccaaacgaactgcgcaaaggctacgagtacacccgtgtgggcaaccccaccatcgtggcattagagcagaccgtcgcagcactcgaaggcgcaaagtatggccgcgcattctcctccggcatggctgcaaccgacatcctgttccgcatcatcctcaagccgggcgatcacatcgtcctcggcaacgatgcttacggcggaacctaccgcctgatcgacaccgtattcaccgcatggggcgtcgaatacaccgttgttgatacctccgtcgtggaagaggtcaaggcagcgatcaaggacaacaccaagctgatctgggtggaaaccccaaccaacccagcacttggcatcaccgacatcgaagcagtagcaaagctcaccgaaggcaccaacgccaagctggttgttgacaacaccttcgcatccccatacctgcagcagccactaaaactcggcgcacacgcagtcctgcactccaccaccaagtacatcggaggacactccgacgttgttggcggccttgtggttaccaacgaccaggaaatggacgaagaactgctgttcatgcagggcggcatcggaccgatcccatcagttttcgatgcatacctgaccgcccgtggcctcaagacccttgcagtgcgcatggatcgccactgcgacaacgcagaaaagatcgcggaattcctggactcccgcccagaggtctccaccgtgctctacccaggtctgaagaaccacccaggccacgaagtcgcagcgaagcagatgaagcgcttcggcggcatgatctccgtccgtttcgcaggcggcgaagaagcagctaagaagttctgtacctccaccaaactgatctgtctggccgagtccctcggtggcgtggaatccctcctggagcacccagcaaccatgacccaccagtcagctgccggctctcagctcgaggttccccgcgacctcgtgcgcatctccattggtattgaagacattgaagacctgctcgcagatgtcgagcaggccctcaataacctttag

SEQ ID NO: 13477 - protein, 386 aa, Corynebacterium glutamicum ATCC 13032
MSFDPNTQGFSTASIHAGYEPDDYYGSINTPIYASTTFAQNAPNELRKGYEYTRVGNPTIVALEQTVAALEGAKYGRAFSSGMAATDILFRIILKPGDHIVLGNDAYGGTYRLIDTVFTAWGVEYTVVDTSVVEEVKAAIKDNTKLIWVETPTNPALGITDIEAVAKLTEGTNAKLVVDNTFASPYLQQPLKLGAHAVLHSTTKYIGGHSDVVGGLVVTNDQEMDEELLFMQGGIGPIPSVFDAYLTARGLKTLAVRMDRHCDNAEKIAEFLDSRPEVSTVLYPGLKNHPGHEVAAKQMKRFGGMISVRFAGGEEAAKKFCTSTKLICLAESLGGVESLLEHPATMTHQSAAGSQLEVPRDLVRISIGIEDIEDLLADVEQALNNL

SEQ ID NO: 13478 - DNA, 1149 bp, Corynebacterium glutamicum ATCC 13032
  CDS (1)..(1149): transl_table=11
atgaatttttacccaccatctgtacctattaaccctgcgtggcgtccacccacagtaactgtgcaagcgggacggccagccagaactcctggtgcgccgatgaacccacctatcacgttgtccagcacttatgttcatgattcagaaaaagcttatgggcgcgatggcaatgatggatggggtgcatttgaggctgccatgggaactctagatggtgggttcgcggtatcttattcttcaggtttggcagcggcaacgtcgattgctgatttggttcctactggtggcacagttgttttacctaaagctgcctattatggcgtgaccaatattttcgccaggatggaagcccgcggaaggctgaaggttcgaactgttgatgcagacaataccgaagaagtgattgctgctgctcaaggtgcagatgtggtgtgggtggaatcgatcgctaatccgacgatggtggtagctgatatccctgcaatagtcgacggtgtgcgtgggcttggagttttgactgtcgttgacgcgactttcgcaacgccacttcgtcaacgtccattggaacttggtgctgatattgtgctttactcggcaaccaaacttatcggtggacactctgatcttcttcttggagtcgcagtgtgcaagtctgagcaccatgcgcagtttcttgccactcaccgtcatgatcatggttcagtgccgggaggtcttgaagcgtttcttgctctccgtggattgtattccttggcggtgcgtcttgatcgagcagaatccaacgcagcagaactttcgcggcgacttaacgcgcatccttcggttacccgcgtcaattatccaggacttcctgatgatccccaacatgaaaaagccgtgcgagtcctaccctctggatgtggaaacatgttgtcatttgagcttgatgcaacacctgaacgaactgatgagattctcgaaagcctgtcacttttaacccacgcgaccagttggggaggtgtggaaacagccattgaacgtcgcaccaggcgggatgctgaagtggtggcaggagtaccgatgactctttgccgcgtttccgtaggaattgaagacgttgaagatctatgggaagacctcaacgcctcaatcgacaaagttctgggttag

SEQ ID NO: 13479 - protein, 382 aa, Corynebacterium glutamicum ATCC 13032
MNFYPPSVPINPAWRPPTVTVQAGRPARTPGAPMNPPITLSSTYVHDSEKAYGRDGNDGWGAFEAAMGTLDGGFAVSYSSGLAAATSIADLVPTGGTVVLPKAAYYGVTNIFARMEARGRLKVRTVDADNTEEVIAAAQGADVVWVESIANPTMVVADIPAIVDGVRGLGVLTVVDATFATPLRQRPLELGADIVLYSATKLIGGHSDLLLGVAVCKSEHHAQFLATHRHDHGSVPGGLEAFLALRGLYSLAVRLDRAESNAAELSRRLNAHPSVTRVNYPGLPDDPQHEKAVRVLPSGCGNMLSFELDATPERTDEILESLSLLTHATSWGGVETAIERRTRRDAEVVAGVPMTLCRVSVGIEDVEDLWEDLNASIDKVLG

SEQ ID NO: 13480 - DNA, 1191 bp, Fusobacterium nucleatum subsp. nucleatum ATCC 25586
  CDS (1)..(1191): transl_table=11
atggaaaaagaatatgcagaagctacagaattgctttataagggaagaaaagtaaaaggaatggattttaataaaccagaagcatttccattatttactacaacagcatttacaatgaatagtttaacagaagtgaaaaaagcatatgctgaaaaatatacctacattagaacatgtaatccaaatagagatgctcttgcagatatggttacatttttagaagcaggtgaaaaatctttgatattttcatcaggaatgggagcaattacaactaccataatgacaatattaaaaccaggagatcatgttgtttgtaacagaaatatttatggtgaaacatttgatgtatttacaaaattaatgccaaaatttgggattagtgcagatttagtagattttgatgacattgaaaattgtaaaaaggcaattaaagctgagacaaaattaatttattctgaagtatttgcaaaccctacattaaatattgcagatatcccaactttagctgatattgcacataaaaatggagcattgttaatgatagacaatacattttcaacaccaatcgcaataaaacccattaagtttggagcagatattgtaattaatagtttaactaaatttatgaatggacatagtgatgctattgctggttctattacttcaactactgaaattatagatgctatacatcctgtaagaatgttatgtggtactccaggagatcctcatgcagctcatgctatgatgaaaagttttgcaactatggatcttcgtttaaaaaaacaaatgtctaatgcagcaaagttagcagcagcattagaagaaaataaatatgtatctaaagtaaatcatccaagccttaaaagtttttcacaacatgaattagctcttaaattatttacttctaatgatactatgagtggaatgatgagttttattgttcctgaagattttgaaaaaatagataaatttatgttacgattaaattttgcacactatgcaatgactcttggtggtgtgcgtacaacacttgttcatccagtaacaagttctcatagtcatatgcctgatgaagcgagaagggctatgggtatcactcctgggttgtttagattatcagttggaatagaagatgtagatgatttaatagaagactttaaccaagcacttaaagtttttggagaataa

SEQ ID NO: 13481 - protein, 396 aa, Fusobacterium nucleatum subsp. nucleatum ATCC 25586
MEKEYAEATELLYKGRKVKGMDFNKPEAFPLFTTTAFTMNSLTEVKKAYAEKYTYIRTCNPNRDALADMVTFLEAGEKSLIFSSGMGAITTTIMTILKPGDHVVCNRNIYGETFDVFTKLMPKFGISADLVDFDDIENCKKAIKAETKLIYSEVFANPTLNIADIPTLADIAHKNGALLMIDNTFSTPIAIKPIKFGADIVINSLTKFMNGHSDAIAGSITSTTEIIDAIHPVRMLCGTPGDPHAAHAMMKSFATMDLRLKKQMSNAAKLAAALEENKYVSKVNHPSLKSFSQHELALKLFTSNDTMSGMMSFIVPEDFEKIDKFMLRLNFAHYAMTLGGVRTTLVHPVTSSHSHMPDEARRAMGITPGLFRLSVGIEDVDDLIEDFNQALKVFGE

SEQ ID NO: 13482 - DNA, 1188 bp, Fusobacterium nucleatum subsp. nucleatum ATCC 25586
  CDS (1)..(1188): transl_table=11
atggaaatgaaaaaatctggtttaggaacaactgctatacatgcaggaactttaaaaaatttatatggaactcttgcaatgcctatatatcaaacttctacttttatatttgattcagcagaacaaggaggaagaagatttgcccttgaagaagctggatatatttacacaagactaggcaatcctacaacaacagtgttagaaaataaaattgctgctcttgaagaaggtgaagctggaatagctatgtcatctggtatgggagctatctcttcaacattgtggactgtattaaaagctggagatcatgttgttacagataaaactttatatggttgtacttttgctttgatgaatcatggacttacaagatttggagttgaagttacttttgttgatacttctaatttagaagaagttaaaaatgctatgaaaaaaaatacaagagttgtttatcttgaaactcctgccaatccaaatttaaaaatagttgatttagaagctttatctaaaattgctcacacaaatccaaatactttggttatagtagataatacttttgcaactccatatatgcaaaaacctttaaaattaggtgtagatattgttgtacactctgcaactaaatatttgaatggacatggagatgtaatagcaggtcttgttgtaacaagacaagaacttgcagatcaaatccgttttgttggattaaaagatatgacaggagctgttttaggacctcaagaagcatattacattataagaggattgaaaacatttgaaattcgtatggaaagacactgtaaaaatgcaagaactattgtagatttcttaaataaacatccaaaagttgaaaaagtttattatcctggacttgagactcatcctggttatgaaatagctaaaaaacaaatgaaagattttggagcaatgatttcatttgaattaaaaggtggctttgaagcaggtaaaactttattaaataatttaaaactttgttcattagcagtttcattaggagatactgaaactcttattcaacacccagcatctatgacacactctccttatacaaaggaagaaagagaagttgctggaatcactgatggtttagttagattatcagttggacttgaaaatgttgaagatattatagctgatttagaacaaggactagaaaaaatttaa

SEQ ID NO: 13483 - protein, 395 aa, Fusobacterium nucleatum subsp. nucleatum ATCC 25586
MEMKKSGLGTTAIHAGTLKNLYGTLAMPIYQTSTFIFDSAEQGGRRFALEEAGYIYTRLGNPTTTVLENKIAALEEGEAGIAMSSGMGAISSTLWTVLKAGDHVVTDKTLYGCTFALMNHGLTRFGVEVTFVDTSNLEEVKNAMKKNTRVVYLETPANPNLKIVDLEALSKIAHTNPNTLVIVDNTFATPYMQKPLKLGVDIVVHSATKYLNGHGDVIAGLVVTRQELADQIRFVGLKDMTGAVLGPQEAYYIIRGLKTFEIRMERHCKNARTIVDFLNKHPKVEKVYYPGLETHPGYEIAKKQMKDFGAMISFELKGGFEAGKTLLNNLKLCSLAVSLGDTETLIQHPASMTHSPYTKEEREVAGITDGLVRLSVGLENVEDIIADLEQGLEKI

SEQ ID NO: 13484 - DNA, 1182 bp, Drosophila melanogaster
  CDS (1)..(1182)
atgagctacagagtccagccgagcggcttcgccaccaagtccatccactcgggccagagccccgaccagtggaagagtgctgccgtgattccgccgatatcgctgagcaccaccttcaagcaagatgcaccgggcgagcacaggggctatgagtactcccgcagtggaaatcccactaggaacgtgctggagacgtgcttcgccgccttggataatgccaaatacggcctcacgttctcatcgggattgggagccaccaccgctgtgctaactatgctgagcagcggcgatcacatcatcatgggcgacgatgtttacggaggcaccaaccgtttgatccgacaggttgccacccgtctgggaatctcagccacctttgtggatcccacgaagttggatctaattaaaagttccatcaagccggagaccaagttggtgtggatcgagtcaccaactaatccattggtaaaggtagccgacatcgaggctattgcgcagctggtccatggagtacgcgaggatatcgtcctggccgtcgacaacaccttcctgacctcctacttccagcgacccttggagctgggcgctgatctggtctgctactccctgaccaagtacatgaacggtcatacggatgtggtcatgggtggcatcaccatgaactcggagaagctctacaaaagcttgaagttcctgcagaacgcagtgggcattgtgccgtctccattcgactgctatcaggtgaacagaagtcttaagacgctctcgctgcgcatggaacagcaccagaagaatgctctgaaggttgccaaatacctggagacgaatccgttcgtggagaaggtgttgcatccctctttgccctcccatccgcagcacaagatcgctctgaagcaggcatacggatacagcggcgtgttctccttctacattaagggcgagctgaagcactcctcggctttcctcaaggccctcaaggtgttcaccctggcagagagtctgggtggctacgagagtctggccgagcttccatcaataatgacccatgcctcggttccagcggaggataggaaaactttgggcatcactgacggtctagttcgcttgtccgtcggactggaggatgccgatgatttgatcaaggatctggagcaggcccttgaaattgcatcgaaggcctaa

SEQ ID NO: 13485 - protein, 393 aa, Drosophila melanogaster
MSYRVQPSGFATKSIHSGQSPDQWKSAAVIPPISLSTTFKQDAPGEHRGYEYSRSGNPTRNVLETCFAALDNAKYGLTFSSGLGATTAVLTMLSSGDHIIMGDDVYGGTNRLIRQVATRLGISATFVDPTKLDLIKSSIKPETKLVWIESPTNPLVKVADIEAIAQLVHGVREDIVLAVDNTFLTSYFQRPLELGADLVCYSLTKYMNGHTDVVMGGITMNSEKLYKSLKFLQNAVGIVPSPFDCYQVNRSLKTLSLRMEQHQKNALKVAKYLETNPFVEKVLHPSLPSHPQHKIALKQAYGYSGVFSFYIKGELKHSSAFLKALKVFTLAESLGGYESLAELPSIMTHASVPAEDRKTLGITDGLVRLSVGLEDADDLIKDLEQALEIASKA

SEQ ID NO: 13486 - DNA, 1221 bp, Methanosarcina acetivorans C2A
  CDS (1)..(1221): transl_table=11
atggaaagagaacttaagtttgcaaccaaatgtgtgcatgcaggagaagagccggaccctgtcttcggggcgcatacgactccgatatttcagacttcaactttcatttttaagaatgtcgaacagggggctgccaggtttgcaggagaggaatcagggtacgtatacacaagaatccctccgaacacacctacacatgcggtccttgccgaaaaggttgctgtacttgagggcggggaggcaggacagacctttgcttccggaatggctgcaataaccgcagttgtactctcaaccctgaaacagggagaccacctgatctcaacggatgtggtgtacggctgcacctacagcctcttttcggagatcctgcccgggtttgggatagatgtcagttttgttgatacatccgatataaaaaaggtgagagcagcctttaagccggaaaccagaatggtttttctggaaacgcctgccaatcccacaataacggtctgcgacatcagggagatttccaaacttgcaaaggcacagggggccatttgcatcgtggataatacctttgcaacgccgtatttccagaaaccccttgaactcggggcagacatatccctaagcagctgcacaaaatacataggcgggcacgctgaccttctcggtggaatcgttgtagggagcagggattttatgaaaagcctgggaaaggttgttgggtataccggagggatcatgggactgcacgaagcctggctctgtatcagggggcttaagactctgcacatccggatggaaaggcatgctgaaaacgccctgacggttgcaaacttccttgaggctcatcccacagtagaatgggtcaggtatcccggactttcaaaccatcctcagcacgaggtcgcaaaaaaacagatgagcggctatggtggaatgctctctttcgagatcaggggaggagttgaagccgggcgcaggcttatggacagcgtcaggctctgctctcttgcagtgagcctgggggcaactgatacccttatccaacaccccgcttccatgacccatgcctgcattcccgggcatataagaaacaaggtcggaatcaaagacggacttgtcaggctgtctgttggaatcgaagaccctgaagatataattgcagaccttgaacaggccctctcaaaagtttattgccggagaggaaacggattcgacccatgtaattga

SEQ ID NO: 13487 - protein, 406 aa, Methanosarcina acetivorans C2A
MERELKFATKCVHAGEEPDPVFGAHTTPIFQTSTFIFKNVEQGAARFAGEESGYVYTRIPPNTPTHAVLAEKVAVLEGGEAGQTFASGMAAITAVVLSTLKQGDHLISTDVVYGCTYSLFSEILPGFGIDVSFVDTSDIKKVRAAFKPETRMVFLETPANPTITVCDIREISKLAKAQGAICIVDNTFATPYFQKPLELGADISLSSCTKYIGGHADLLGGIVVGSRDFMKSLGKVVGYTGGIMGLHEAWLCIRGLKTLHIRMERHAENALTVANFLEAHPTVEWVRYPGLSNHPQHEVAKKQMSGYGGMLSFEIRGGVEAGRRLMDSVRLCSLAVSLGATDTLIQHPASMTHACIPGHIRNKVGIKDGLVRLSVGIEDPEDIIADLEQALSKVYCRRGNGFDPCN

SEQ ID NO: 13488 - DNA, 1182 bp, Thermoanaerobacter tengcongensis MB4
  CDS (1)..(1182): transl_table=11
gtggaacttcatttcaaaacaaaagtagttcatattggaaattatgtggatgaaaaaattcctccaaaacccaaaactctccctatatatcaaacttctgtatttacttttgatactcttgaagaagtttatgattacttagacggcaatccttcaaggtatatgtacacaaggcttggaaacccaaaccaaactgctgtagaagaattaattgcaaatttagaaggagcagaggcagggcaagcctgtgcttcagggatggcagcaatttcctcagctctcctggcagaagtaaattcaggcgaccacataatcgcagcaaaagacatatacggaggaacaaacagcctttttaatttggagtttaagagattgggaattgaaataagtttggtggatttttcggacttagaatctgtagaaaaggctatcaagccaaatacaaaagtcatatacatggaaatcatgacaaatcctttgataagagtatttgacattgaagaagttgtaaaaatagcaaaaaggcacggattaaaacttatagtagacaatacttttacaactccttacctgataaggcctttagaagtcggcgcttatgctgtaatacatagcgccacaaaatacataaacggacacagtgatgtaataggaggacttatagcaggaaataaagaatttattttccgcacaaggagaatagtccacaattttggaggctctatgagtccttttgacgcatggctcactttaagaggtgctaaaacactgtttttaaggatgagagagcactgcaaaaacgcaatgcgattggccgaatttttagaaagccatccaaaagtgaaaaaggtcttctatccaggactgccttctcaccctgattacagcatcgccaaaaagctttttaaggatgaatttggaggcatgttgagctttgaaattgacggtggtgaacaatctgtaaatagattcatgcaggagctcaaacttataaaatttgctccatcactggcaggagttcaaaccatgataacacatccgaagtccacttcccacagggctttgagcaaagaagaattaaaagctcttggaatttcagaaggactcataagggtgtctgtcggaattgaggaaatagaagatgtgataagagactttaaacaggctctagataaagtgtaa

SEQ ID NO: 13489 - protein, 393 aa, Thermoanaerobacter tengcongensis MB4
MELHFKTKVVHIGNYVDEKIPPKPKTLPIYQTSVFTFDTLEEVYDYLDGNPSRYMYTRLGNPNQTAVEELIANLEGAEAGQACASGMAAISSALLAEVNSGDHIIAAKDIYGGTNSLFNLEFKRLGIEISLVDFSDLESVEKAIKPNTKVIYMEIMTNPLIRVFDIEEVVKIAKRHGLKLIVDNTFTTPYLIRPLEVGAYAVIHSATKYINGHSDVIGGLIAGNKEFIFRTRRIVHNFGGSMSPFDAWLTLRGAKTLFLRMREHCKNAMRLAEFLESHPKVKKVFYPGLPSHPDYSIAKKLFKDEFGGMLSFEIDGGEQSVNRFMQELKLIKFAPSLAGVQTMITHPKSTSHRALSKEELKALGISEGLIRVSVGIEEIEDVIRDFKQALDKV

SEQ ID NO: 13490 - DNA, 1185 bp, Thermoanaerobacter tengcongensis MB4
  CDS (1)..(1185): transl_table=11
gtgaaaaaagagtttagatttgatacaaaggcgattcacggcgaagagcttaagaaaaatcctgaaaacgcattgaatccccctatttttcaaaccactacttttgtctttgaagatttggaccatgttgagaaggtaatgtcttttgagtctcaagactatgtttacacacgcggcaacaatcccaccctgaggctgtttgaaaacagaatggcagagctggagtacgggaagggagctgtagcattttcatcgggaatggcggcaataagttctgtgctcttttctcttttaaggcctaatgacaaagttttagcacacaaaactctgtacggctcaagctacaacgtgataactaaccttttgcccaaatacggggttaaatataaactcatagacatgacaagtttagaagagttaaaagagagtttagatgataccgtgaaggtgatttactttgaaactccctccaatcctgatttgtcaataatagacatagaagaagtgagtaagatagcctatcaaagaggtataaaagtagtggtagacaacacttttgccacaccttgttttcaaaatcctcttcttttgggagccgatgtggtagtacatagtgctactaagtatatatgcgggcatggggatgcgctgggaggagttgctatttcaaaagatgaagcctatattcactatttaaaattcgactacatgtgcgagtttggaggggttatgagcccttttaacgcttggcttatgttaaggggtataaagactttagggctcaggatgaggcagcatgagaagaatgccatggaggtcgcaaaatttttgagtaggcatcccaaagtgaaaaatgttttgtaccctggtcttgaatcctttaaaggacatggaattgcaaaaaagcagatgagaggatttggagctataataagttttgagatagagggtggaaggaaagaattagaagaattcataaaagggttgaaactttgccagctggcggtgagtctgggggacgcagagactttggtggaagttccttctattatgacccacagaggatatccaaaggaaaaactagaagattttggatttaaagaaaataccgtgaggatttcagtagggcttgaagattacaacgacataatagaggatttagaagatgccttgaagagaatttaa

SEQ ID NO: 13491 - protein, 394 aa, Thermoanaerobacter tengcongensis MB4
MKKEFRFDTKAIHGEELKKNPENALNPPIFQTTTFVFEDLDHVEKVMSFESQDYVYTRGNNPTLRLFENRMAELEYGKGAVAFSSGMAAISSVLFSLLRPNDKVLAHKTLYGSSYNVITNLLPKYGVKYKLIDMTSLEELKESLDDTVKVIYFETPSNPDLSIIDIEEVSKIAYQRGIKVVVDNTFATPCFQNPLLLGADVVVHSATKYICGHGDALGGVAISKDEAYIHYLKFDYMCEFGGVMSPFNAWLMLRGIKTLGLRMRQHEKNAMEVAKFLSRHPKVKNVLYPGLESFKGHGIAKKQMRGFGAIISFEIEGGRKELEEFIKGLKLCQLAVSLGDAETLVEVPSIMTHRGYPKEKLEDFGFKENTVRISVGLEDYNDIIEDLEDALKRI

SEQ ID NO: 13492 - DNA, 1284 bp, Thermoanaerobacter tengcongensis MB4
  CDS (1)..(1284): transl_table=11
atgaggagaaaatacggtttttctactatagcaattcatgagggatgggaacctgaccctactactggtgcagtagcgctgccaatctaccaaactacctcctttgcctttaagagcacgcagcatgcagcagacttattttctctaaaggaagacggatatatttacacgaggatgatgaatcccactgtagacgcttttgaaaggaaaatggctgcattagaagggggagtaggagcgctggcagtagcttcagggcaggctgctataactatagctgttacaaatattgcaggggctggagatgagattgtagcttctacgaatctctacggcgggacttataacctttttgcctctacccttaagaaatttggtataaatgtgaagtttgcagatccaagtgaccctgaaaattttagagaaaaaataacggagaagaccaaagctttatacgtagagacaattggcaatcccaaaattgatgtggctgatatagaaaaaatagcatcagttgctcacaatgcaggtataccccttattgtagataatacttttgcaactccatatctttcaaggcctatagaatttggggcagacatagtagtccactcaaccacaaagtttataggagggcatggtacttctatcggaggtgtaattgtggactctggaaaatttaattgggcgaatggcaagtttccagagcttacagaacctgacccctcttaccacgggataaggtatgtgaaagagtttggagagagggcttatatagtcaaagcgagagtgcagcttttaagagacttgggggcggctctttcgccttttaacgctttcttgttcgttcaagggcttgagacacttgcactcagaatggaaaggcatagttataatgcacttcgcgtggcagaatttctggcttctcatcctcttgtgagctgggtaaactatcctggccttaagtcaagcccttattatgagcttgctcaaaaatatcttccaaaagggcagggtggagttttgacttttggaataaaaggaggctttgaggcaggggtaaagtttatagagaacttaagattattcacccatcttgcaaatataggagatgtaaggtctttggtcatacatcctgctagcaccacccatcagcagctttcaaaagaagaacaattggcttcaggcgttactgaggatatgattaggctttctattggccttgaagatatagaggatattcttgaagacctggattttgcactttacagttctcaaaagtaa

SEQ ID NO: 13493 - protein, 427 aa, Thermoanaerobacter tengcongensis MB4
MRRKYGFSTIAIHEGWEPDPTTGAVALPIYQTTSFAFKSTQHAADLFSLKEDGYIYTRMMNPTVDAFERKMAALEGGVGALAVASGQAAITIAVTNIAGAGDEIVASTNLYGGTYNLFASTLKKFGINVKFADPSDPENFREKITEKTKALYVETIGNPKIDVADIEKIASVAHNAGIPLIVDNTFATPYLSRPIEFGADIVVHSTTKFIGGHGTSIGGVIVDSGKFNWANGKFPELTEPDPSYHGIRYVKEFGERAYIVKARVQLLRDLGAALSPFNAFLFVQGLETLALRMERHSYNALRVAEFLASHPLVSWVNYPGLKSSPYYELAQKYLPKGQGGVLTFGIKGGFEAGVKFIENLRLFTHLANIGDVRSLVIHPASTTHQQLSKEEQLASGVTEDMIRLSIGLEDIEDILEDLDFALYSSQK

SEQ ID NO: 13494 - DNA, 1224 bp, Streptomyces coelicolor A3(2)
  CDS (1)..(1224): transl_table=11
atggactcagcgcgcacgcacacgtcaccacccgacgacgtacgcttcaccgcacccgcgggcagggcactggccaccgaagccgtgcacgccggccgcgacgacctcgccgcccagggactgcacgccccgcccatcgacctgtccacgacctacccgtcgtacgacagccgcggcgaggccgcccgcatcgacgcgttcgccgcgaccggtgccgagccggacgggccgcccgtctacggccgcctcggcaacccgaccgtcgcccgcttcgagacggcactggcccggctggaggggacggaggccgcagtcgccttcgccagcggcatggccgcgctgagcgccgtactgctggtccgcggctcgatggggctccgtcacgtcgtcgccgtacggcccctgtacggctgcagcgaccacctgctgaccgccgggctgctcgggtccgaggtcacctggaccgacccggcgggcgtcgccgacgcgctgcgcccggacaccggactggtgctcgtggagtcgccggccaacccgacgctggccgaggtcgacctgcgggccgtcgcccacgcctgcgggtcggtgccgctgctcgtggacaacaccttcgccacgcccgtgctccagcgccccgccgagcacggggcccggctggtgctgcacagcgccaccaagtacctgggcgggcacggggacgtactggcgggcgtggtcgcctgcgacgaggagttcgccgggcggctgcggcaggtccgcttcgccacgggcggagtgctgcacccgctggccggctacctcctgctgcgtgggctgtccaccctgcccgtgcgggtacgggccgcctccgccaacgccgccgacctggccgggcggctggccgccgacccgcgggtggcccgcgtccactacccgcgcatcggcggtgcgatggtctccttcgaggtccacggcgacccgcacgcggtcatcggcggcgtccggctgatcaccccggccgtgagcctcggcagcgtcgacacgctcatccagcacccggcgtcgatcagccaccgcatcgtggacgcggacgaccggcggggggccggggtcggcgaccggctgctgcggctgtcggtcggcctggaggacgtcgacgacctgtgggccgacctggaccgggccctgggggagcgggcggccggggccgtctcgccgcgggaggcgctgtcgcgggccgactga

SEQ ID NO: 13495 - protein, 407 aa, Streptomyces coelicolor A3(2)
MDSARTHTSPPDDVRFTAPAGRALATEAVHAGRDDLAAQGLHAPPIDLSTTYPSYDSRGEAARIDAFAATGAEPDGPPVYGRLGNPTVARFETALARLEGTEAAVAFASGMAALSAVLLVRGSMGLRHVVAVRPLYGCSDHLLTAGLLGSEVTWTDPAGVADALRPDTGLVLVESPANPTLAEVDLRAVAHACGSVPLLVDNTFATPVLQRPAEHGARLVLHSATKYLGGHGDVLAGVVACDEEFAGRLRQVRFATGGVLHPLAGYLLLRGLSTLPVRVRAASANAADLAGRLAADPRVARVHYPRIGGAMVSFEVHGDPHAVIGGVRLITPAVSLGSVDTLIQHPASISHRIVDADDRRGAGVGDRLLRLSVGLEDVDDLWADLDRALGERAAGAVSPREALSRAD

SEQ ID NO: 13496 - DNA, 1161 bp, Streptomyces coelicolor A3(2)
  CDS (1)..(1161): transl_table=11
gtgcccatgagcgacaggcacatcagtcagcacttcgagacgctcgcgatccacgcgggcaacaccgccgatcccctgacgggcgcggtcgtcccgccgatctatcaggtgtcgacctacaagcaggacggcgtcggcggattgcgcggcggctacgagtacagccgcagcgccaacccgacccgtaccgcgctggaggagaacctcgccgccctggagggcggccgccgcggcctcgcgttcgcgtccggactggcggccgaggactgcctgttgcgtacgctgctgcgccccggcgaccacgtggtgatcccgaacgacgcgtacggcggcaccttccgcctcttcgccaaggtcgccacccggtggggtgtggagtggtccgtggccgacacgagcgacgccgccgccgtgcgggccgccctcaccccgaagaccaaggcggtgtgggtggagacgccctccaacccgctgctcggcatcaccgacatcgcgcaggtcgcccaggtcgcccgggacgccggcgcccggctcgtcgtcgacaacaccttcgccaccccgtacctccagcagccgctggccctcggcgccgacgtcgtcgtgcactcgctgaccaagtacatgggcgggcactcggacgtcgtgggcggcgcgctgatcgtgggcgaccaggagctgggcgaggagctggcgttccaccagaacgcgatgggcgcggtcgccggacccttcgactcctggctggtgctgcgcggcaccaagaccctcgccgtgcgcatggaccggcacagcgagaacgcgaccaaggtcgccgacatgctctcccggcacgcgcgcgtgacgagcgtgctgtacccggggctgcccgagcacccggggcacgaggtcgccgccaagcagatgaaggcgttcggcggcatggtgtcgttccgcgtcgagggcggcgagcaggccgccgtcgaggtgtgcaaccgcgcgaaggtcttcacgctcggcgagtccctcggcggcgtcgagtcgctgatcgagcacccgggccggatgacgcacgcctccgcggcgggctcggccctggaggtgcccgccgacctggtgcggctgtcggtcggcatcgagaacgccgacgacctgctggccgacctccagcaggcgctgggctag

SEQ ID NO: 13497 - protein, 386 aa, Streptomyces coelicolor A3(2)
MPMSDRHISQHFETLAIHAGNTADPLTGAVVPPIYQVSTYKQDGVGGLRGGYEYSRSANPTRTALEENLAALEGGRRGLAFASGLAAEDCLLRTLLRPGDHVVIPNDAYGGTFRLFAKVATRWGVEWSVADTSDAAAVRAALTPKTKAVWVETPSNPLLGITDIAQVAQVARDAGARLVVDNTFATPYLQQPLALGADVVVHSLTKYMGGHSDVVGGALIVGDQELGEELAFHQNAMGAVAGPFDSWLVLRGTKTLAVRMDRHSENATKVADMLSRHARVTSVLYPGLPEHPGHEVAAKQMKAFGGMVSFRVEGGEQAAVEVCNRAKVFTLGESLGGVESLIEHPGRMTHASAAGSALEVPADLVRLSVGIENADDLLADLQQALG

SEQ ID NO: 13498 - DNA, 1200 bp, Xanthomonas campestris pv. campestris str. ATCC 33913
  CDS (1)..(1200): transl_table=11
atgtccaaccgcaccgcaaacagccacgatggcgagcgcgcgctgtcgctcgcaacgctggcgatccatggtggacagtcgccggaccccagcaccggggcggtgatgccgccgatctacgcgacgtccacctatgcgcagtccagcccgggcgagcatcagggctttgagtactcgcggacccacaaccctacgcgttttgcctatgagcgctgtgttgccgtgctggaaggcggcacccgcgggtttgccttcgcctccggcatggccgcgacctccacagtgatggagttgttggacgccggcagccacgtggtagcgaccgatgacctgtacggcggctcgttccgtctgttcgagcgtgtgcgtcgccgcaccgccggcctggacttcagtttcgtcgacctgaccgacccggccgcgttcgaggccgcgatccgcccgaccaccaagatggtctggatcgaaaccccgaccaacccgatgctcaagctggtcgacatcgccgccattgcggcgatcgcgcgtaggcacggcctgctggtggtggtggacaacaccttcgcctcgccgatgctgcagcgcccgctggaattgggcgccgacctggtggtgcattcggccaccaagtacctcaatggccactcggacatggtgggcggcatcgccgtggtcggcgacaacgccgaactcgccgaacagatggccttcctgcagaactcgatcggcggcgtacaaggcccgttcgacagcttcctggccctgcgcgggctcaagaccctgccgctgcgcatgcgcgcgcactgcgaaaacgccctggcgctggcgcagtggctggagacccaccaggcgatcgaaaaagtgatctaccccggcttggcctcgcacccgcagcacgcactcgccaagcagcagatgtccggcttcggcggcatcgtctcgatcgtcctcaagggcggcttcgaggcagccaagcgtttctgcgaaaagaccgaactgttcaccctggccgaatcgttgggtggtgtggaaagtttggtcaatcatcccgccgtcatgacccatgcctcgatccctgtggcccgccgtgaacagctaggcatcagcgatgcgctggtgcggctgagtgtgggggttgaggatgtgggggatttgcggggggatttggagcgtgcgcttgaggcgtctcagtctccatga

SEQ ID NO: 13499 - protein, 399 aa, Xanthomonas campestris pv. campestris str. ATCC 33913
MSNRTANSHDGERALSLATLAIHGGQSPDPSTGAVMPPIYATSTYAQSSPGEHQGFEYSRTHNPTRFAYERCVAVLEGGTRGFAFASGMAATSTVMELLDAGSHVVATDDLYGGSFRLFERVRRRTAGLDFSFVDLTDPAAFEAAIRPTTKMVWIETPTNPMLKLVDIAAIAAIARRHGLLVVVDNTFASPMLQRPLELGADLVVHSATKYLNGHSDMVGGIAVVGDNAELAEQMAFLQNSIGGVQGPFDSFLALRGLKTLPLRMRAHCENALALAQWLETHQAIEKVIYPGLASHPQHALAKQQMSGFGGIVSIVLKGGFEAAKRFCEKTELFTLAESLGGVESLVNHPAVMTHASIPVARREQLGISDALVRLSVGVEDVGDLRGDLERALEASQSP

SEQ ID NO: 13500 - DNA, 1218 bp, Xanthomonas campestris pv. campestris str. ATCC 33913
  CDS (1)..(1218): transl_table=11
atgagctttcgtgaccctgccgacgcgccctgtagcgctgccaccgccgccgtccgtgccggaatcgaccgggacaccgcctacggcgcggtgacgccgccgatcgtgctgtcgtcgaacttctccttcgacggcttcggcaacaagcgccaatacgactacacccgcagcggcaaccccacccgcgacctgctcggcgaagctttggccgaactggaaggcggcgccggcggcgtgatcacctctaccggcatgggcgcgatcaacctggtgctcaatgccttgctgcagcccggcgacaccctggtggtgccgcacgatgcctacggcggcagctggcggttgttcaacgcgctggccaagaagggccatttcgccctgatcaccgccgacctcaccgacccgcgctcgctggccgatgcattggcgcagtcgcccaagctggtgctgatcgaaaccccgtccaacccgttgctgcgcatcactgatctgcgctttgtcatcgaggccgcgcacaaggtgggcgcgctgaccgtggtggacaacaccttcctgtctccggcgctgcaaaagccgctggaatttggcgccgatctggtgctgcattcgaccaccaagtacgtcaacggccacagcgatgtggtgggtggcgcagtgatcgcgcgcgatgcggagctgcaccagcagctggtgtggtgggccaacgcgctgggcctgaccggttcgccgtttgacgcgtttttgaccttgcgcgggctgcgcacgctcgatgcccgcctgcgggtgcaccaggaaaacgccgatgcgatcgcggtgctgctggacgaacacgcggcagtgaaccaggtgtatttccccgggctggcatcgcatcctggccatgcgctggcggcgcgccagcagaagggcttcggcgcgatgatcagcttcgagctcaatggcggtgaggcggcggtgcgtgcgttcgtcgacgggctgcgttatttcaccctggccgaatcgctgggcggcgtggagagcctgatcgcgcatccggcctcgatgacgcacgcggcgatgaccgccgaagcgcgcgctgcggccggtatttccgatggcttgttgcggctgtcggtgggcattgaatccgctgaggatctgctgatcgatctgcgcgccggcctggcgcgtgcggaagccgcggtgagcgcggtcgcgcgcaaacaggtcgacgcgtga

SEQ ID NO: 13501 - protein, 405 aa, Xanthomonas campestris pv. campestris str. ATCC 33913
MSFRDPADAPCSAATAAVRAGIDRDTAYGAVTPPIVLSSNFSFDGFGNKRQYDYTRSGNPTRDLLGEALAELEGGAGGVITSTGMGAINLVLNALLQPGDTLVVPHDAYGGSWRLFNALAKKGHFALITADLTDPRSLADALAQSPKLVLIETPSNPLLRITDLRFVIEAAHKVGALTVVDNTFLSPALQKPLEFGADLVLHSTTKYVNGHSDVVGGAVIARDAELHQQLVWWANALGLTGSPFDAFLTLRGLRTLDARLRVHQENADAIAVLLDEHAAVNQVYFPGLASHPGHALAARQQKGFGAMISFELNGGEAAVRAFVDGLRYFTLAESLGGVESLIAHPASMTHAAMTAEARAAAGISDGLLRLSVGIESAEDLLIDLRAGLARAEAAVSAVARKQVDA

SEQ ID NO: 13502 - DNA, 1218 bp, Xanthomonas axonopodis pv. citri str. 306
  CDS (1)..(1218): transl_table=11
atgagctttcgtgaccccgccgacgccccctgtactgctgccactgccgccgtgcgtgccggtatcgatcgcgacaccgcctacggtgcggtgaccccgccgatcgtggtgtcgtcgaatttctcgttcgatggtttcggcaacaagcgccagtacgactacacccgcagcggtaatccgacccgcgacctgttaggcgaagcgctggccgaactggaaggcggcgcgggcggcgtgatcacctccaccggcatgggcgcgatcaatctggtgctcaatgcggtgctgcagcccggcgatacgctggtggtgccgcacgatgcgtacggcggcagctggcgcctgttcaatgcgttggccaagaagggccacttcgcgctggtcaccgctgacttgaccgatccgcgctcgctggccgatgcattggcgcagtcgcccaaactggtgctgatcgaaaccccgtccaacccgctgctgcgcatcaccgatctgcgcttcgtcatcgaagctgcaaagaaggtcggcgcactgacggtggtggacaacaccttcttgtcgccggcattgcagaagccgctggatttcggtgccgatctggtcctgcattccaccaccaaatacatcaacggccatagcgatgtggtgggcggtgcggtggtggcacgcgatgcccagctgcatcagcaactggtgtggtgggccaatgcgttgggcctgaccggctcgccgttcgatgccttcctcaccttgcgcggtctgcgcacgctggatgcccggctgcgcgtgcatcaggaaaacgccgatgcgatcgccgcgctgctggatgggcatgcggcggtgaatcaggtgtatttcccgggtctggcctcgcatccgggccacgcactggccgcgcgccagcagaagggcttcggggcgatgatgagtttcgaactggaaggcggcgaagcggccgtgcgtgcgttcgtcgatggcttgcgttacttcaccctggccgaatcgttgggcggcgtggaaagcctgatcgcgcatccggcctcgatgacgcacgcggcaatgaccgccgaagcgcgtgcggcagccggcatttccgatggcttgctgcgcttgtcgatcgggatcgaatcggccgaagatctgctggccgatctgcgcgccggtctggcccgtgccgaagcgaccctgactaacgccagccgcaaacaggtcgacgcgtga

SEQ ID NO: 13503 - protein, 405 aa, Xanthomonas axonopodis pv. citri str. 306
MSFRDPADAPCTAATAAVRAGIDRDTAYGAVTPPIVVSSNFSFDGFGNKRQYDYTRSGNPTRDLLGEALAELEGGAGGVITSTGMGAINLVLNAVLQPGDTLVVPHDAYGGSWRLFNALAKKGHFALVTADLTDPRSLADALAQSPKLVLIETPSNPLLRITDLRFVIEAAKKVGALTVVDNTFLSPALQKPLDFGADLVLHSTTKYINGHSDVVGGAVVARDAQLHQQLVWWANALGLTGSPFDAFLTLRGLRTLDARLRVHQENADAIAALLDGHAAVNQVYFPGLASHPGHALAARQQKGFGAMMSFELEGGEAAVRAFVDGLRYFTLAESLGGVESLIAHPASMTHAAMTAEARAAAGISDGLLRLSIGIESAEDLLADLRAGLARAEATLTNASRKQVDA

SEQ ID NO: 13504 - DNA, 1197 bp, Xanthomonas axonopodis pv. citri str. 306
  CDS (1)..(1197): transl_table=11
atgtccaatcgcaccactcatagccatgacggcgagcgcgcgctgtcgctcgcaacgctggcgatccatggagggcagtcgccagatccgagcaccggcgcggtgatgccgccgatctacgcgacgtccacctatgcgcagtccagccccggcgagcatcagggtttcgagtattcgcgtacccataaccccacgcgcttcgcctacgagcgttgcgtcgccgcgctggaaggaggcacgcgcgcatatgcgttcgcctccggcatggccgccacctcgacggtgatggagttgctggatgccggcagccacgtggtggcgatggacgacctgtacggcggcacctttcgcttgttcgagcgcgtgcgtcgccgcactgccggcctggatttcagcttcgtcgacctgaccgacccggctgcgttcgaggcggcgattcgccccgataccaagatggtgtggatcgagaccccgaccaacccgatgctcaagctggtcgatatcgctgccattgccgagatcgcgcgcaagcgcggcctgctgatcgtggtcgacaacacctttgcttccccgatgctgcagcgcccgctcagcctgggtgcggacatcgtcgtgcactcggccaccaagtatctcaacggccactcggacatggtgggcggtatcgcggtcgttggcgacaacgccgagctcgccgagcagatggcgttcctgcagaactccatcggcggcgtccagggcccgttcgacagcttcctcgccttgcgcggcctcaagaccctcccgctgcgcatgcgggcgcactgcgaaaacgcactggcgcttgcgcaatggctggaaacccaccctgcgatcgaaaaggtcatttaccccggccttgcctcgcacccgcaacatgcgctcgcgaagagccagatgtccggcttcggcggcatcgtctccatcgtcctcaagggcggcttcgacgcagccaagcgtttctgcgaaaagaccgaattgttcaccctggccgaatcgctcggtggtgtggaaagcctggtgaatcatcccgccgtcatgacgcacgcctccattccggtggcccgccgcgaccagctcggtatcagcgatgcgctggtgcggttgagtgtggggatcgaggatgtggaggatttgcgtggggatttgcaggctgctttggcgggagatgaagggtaa

SEQ ID NO: 13505 - protein, 398 aa, Xanthomonas axonopodis pv. citri str. 306
MSNRTTHSHDGERALSLATLAIHGGQSPDPSTGAVMPPIYATSTYAQSSPGEHQGFEYSRTHNPTRFAYERCVAALEGGTRAYAFASGMAATSTVMELLDAGSHVVAMDDLYGGTFRLFERVRRRTAGLDFSFVDLTDPAAFEAAIRPDTKMVWIETPTNPMLKLVDIAAIAEIARKRGLLIVVDNTFASPMLQRPLSLGADIVVHSATKYLNGHSDMVGGIAVVGDNAELAEQMAFLQNSIGGVQGPFDSFLALRGLKTLPLRMRAHCENALALAQWLETHPAIEKVIYPGLASHPQHALAKSQMSGFGGIVSIVLKGGFDAAKRFCEKTELFTLAESLGGVESLVNHPAVMTHASIPVARRDQLGISDALVRLSVGIEDVEDLRGDLQAALAGDEG

SEQ ID NO: 13506 - DNA, 1143 bp, Chlorobium tepidum TLS
  CDS (1)..(1143): transl_table=11
atgcactttgaaaccatcgccatccatgacggcaatacgccggagagctgcaccggatcggtgacgccgccggtttaccagacctcgactttcgcgcgtcccagcctcgacgagcggggtgaatttttctattcgcgcatcggcaacccgacgcgctcggcgctcgaatcgaccctcgcgctgcttgaaaatggcaaacatgcaacgacctttgcctccggcgtagcggcgatgatggccgctatgcaggtgctcaaaccgggcgatcacgtcgtttcgagcctcgacgtttatggcggcagctaccggattttcgagcagctcatgcgtccgtggggcgtcgaaacctcctacgcggcgagcgaagcaacggagagttatatcgagtgcatccgcccggaaacccgcatgatctggatcgaatcgccctcgaatcctcttttgcagatttgcgacatccgcgccctcgccgagatcgccaacgaacgtggcatcgtactcgcggtcgataacaccttcgccagcccctacttccagcgcccgctcgacctcggcgcgcacattgtcgtgcacagcaccaccaagtatctcggcgggcacagcgacgtgatcggcggcgcggtcgtcgcgtcggacgacaacctcaatctcacgatccgcaactaccagggcgcggcgggcgcgattcccggcccgtgggattgctggctgatttcgcgcggcatcaagacgctgaaaatccgtatggaggagcaccagaaaaacgcgctgcatctggcgcgagcgctcgaaaagcacccggcggtgagccgcgtcatctaccccggactagagtctcacccgcagcacgagctggccaaacgccagatgagcggcttcggcggaatgctgaccatcgcgctgaaaggcggacttccggcagtccgcaaaatgatcgagagcctgaaactcttcgtcatcgccgacagcctcggcggcgtggagtcactcgtcgcctcgcccgcgcggatgactctcggcccactgagtcaggccgagcgcgaccgacgcgcctgcaccgacgacctcgtgcggctctcgattggcctcgaaaacgcggaggatctcgaagcggacctcctgcaagcccttgcaaccatctaa

SEQ ID NO: 13507 - protein, 380 aa, Chlorobium tepidum TLS
MHFETIAIHDGNTPESCTGSVTPPVYQTSTFARPSLDERGEFFYSRIGNPTRSALESTLALLENGKHATTFASGVAAMMAAMQVLKPGDHVVSSLDVYGGSYRIFEQLMRPWGVETSYAASEATESYIECIRPETRMIWIESPSNPLLQICDIRALAEIANERGIVLAVDNTFASPYFQRPLDLGAHIVVHSTTKYLGGHSDVIGGAVVASDDNLNLTIRNYQGAAGAIPGPWDCWLISRGIKTLKIRMEEHQKNALHLARALEKHPAVSRVIYPGLESHPQHELAKRQMSGFGGMLTIALKGGLPAVRKMIESLKLFVIADSLGGVESLVASPARMTLGPLSQAERDRRACTDDLVRLSIGLENAEDLEADLLQALATI

SEQ ID NO: 13508 - DNA, 1134 bp, Oceanobacillus iheyensis HTE831
  CDS (1)..(1134): transl_table=11
atgagagataagacaaaaatgatacatggtggaattacttcagatgaacgtactggagcagtaaatgtcccgatatatcaagtaagcacatataaacaagatgctccaggagaacaccgtggttacgagtattctcgtacgggaaatcctactagacatgcactcgaaactgtaattgccgaattagaagaagggaatgctggctttgcttttggatcaggaatggctgccattacttcgattatgatgttattggaatccggagatcatgtcatcatgacagatgatgtctacggcggatcttaccgattaatgactaaagtgttgaatcagtataatatagagcatacttttattgatacaagttcagaggaatctgtgatcaatgcgattaaaccaaatacaaaagcgatttatgtagaaacaccaactaatccgttgttgaaaattacagatattaaggaaatatcaacgattgcgcaaaaacataatcttttactaattgtagataacacttttgcaactccctattggcaaaaaccactaacaatgggtgcagatattgtattgcatagtgctacgaagtatattggtggacatagtgatgttgttgcgggattagtggcagtgaaatccaatgaattagcggaacggattcattttatacaaaactctgtaggagcagtacttggcccacaagactcatggctcttacaacgtggaattaaaaccttagcaattcgtatggaagctattgagcaaaacacgaaaaaactaattgcttatttagaacagaatccaagagtagaaaaaatatattatcctggactagaaaatcatccaggacaccatattgccaaacaacaagcatccgggtttggtggaatggtatcgatagatgtaggaagtggcgaccttgcagataaaattttaagcaaagtagaattttttacactggcagaaagtcttggtgccattgaaagtttgatatcgattcctgccaaaatgacacatgcctctatacctgctgaccgtagacaagaacttggtattactgacggattaattcgtttatcggttggtattgaagatatagatgaccttattgacgatttagaaaaatcgatgcagtaa

SEQ ID NO: 13509 - protein, 377 aa, Oceanobacillus iheyensis HTE831
MRDKTKMIHGGITSDERTGAVNVPIYQVSTYKQDAPGEHRGYEYSRTGNPTRHALETVIAELEEGNAGFAFGSGMAAITSIMMLLESGDHVIMTDDVYGGSYRLMTKVLNQYNIEHTFIDTSSEESVINAIKPNTKAIYVETPTNPLLKITDIKEISTIAQKHNLLLIVDNTFATPYWQKPLTMGADIVLHSATKYIGGHSDVVAGLVAVKSNELAERIHFIQNSVGAVLGPQDSWLLQRGIKTLAIRMEAIEQNTKKLIAYLEQNPRVEKIYYPGLENHPGHHIAKQQASGFGGMVSIDVGSGDLADKILSKVEFFTLAESLGAIESLISIPAKMTHASIPADRRQELGITDGLIRLSVGIEDIDDLIDDLEKSMQ

SEQ ID NO: 13510 - DNA, 1206 bp, Oceanobacillus iheyensis HTE831
  CDS (1)..(1206): transl_table=11
atgacagataagaagaaagtaaacgtaggtacagaagcagtttgggcgggagaaaaggaatatcttgtacatggagcaacgcaagtacctgttgtccttagtgttgcctacaattatgacgatatggatgaatggtatgatgtagcaattggaaaaaagaaggggcatatttatggacgaaacacaaacccaacagttcaagcttttgaagataaagtgaagcagttagaaggagcagaggctgctactagtttttctacaggaatggcagcaataagtaatacactctctacgtttttattaccaggagatcgcattgtttcgattaaagacacgtatggtggaacgaataaaatatttactgaatttcttcctcgtcagcaagtagaagtaacgttatgtgagactggagatcatgaacaaattgaaaaagaagtgaataaaggctgtaagattctatatttagaatcaccaacaaatcctactgtgaaaattaccgatctgaagaaaatggcggaagtaggaaaacgagcaggagccattgtgatcgtcgataacacgttcggtactccaataaatcaaaatccattagcacttggagccgatttggttattcatagtgctacaaaatttctaggtggtcatgcagatgcgttaggaggagtagtttgtggccctgaagattatgtagagcaaatttaccattttcgtgaaataaatggagcaacaatggatccaatggctgcttatttaacattacgtggcatgaagacattgcatctacgggtaagggaacaatcatttaatgcaatgcaattagcaaagttcctacagcagcaagatattgtagaagaagtgttttacccaggattaacgacacatccgaatcatgatattgcaaaagaacaaatgaaagactttggcggtatgttaagtttttcagtaaaaggcggcgtggacacggtaagagaattgttaccgaagctgcagtatgcacatcgagcagcaaatctaggtgcagtggaaacaacagtcggccctgcacgtacaacaagtcatgtcgaatgtacaccagaggaacgggcagcaatgggaattccagaagggcttattcgcgtgtcctgtggtattgaatatattgatgatatattggaagactttgctcaagcatttgctcatatagaaaatagcttagaaatttcttag

SEQ ID NO: 13511 - protein, 401 aa, Oceanobacillus iheyensis HTE831
MTDKKKVNVGTEAVWAGEKEYLVHGATQVPVVLSVAYNYDDMDEWYDVAIGKKKGHIYGRNTNPTVQAFEDKVKQLEGAEAATSFSTGMAAISNTLSTFLLPGDRIVSIKDTYGGTNKIFTEFLPRQQVEVTLCETGDHEQIEKEVNKGCKILYLESPTNPTVKITDLKKMAEVGKRAGAIVIVDNTFGTPINQNPLALGADLVIHSATKFLGGHADALGGVVCGPEDYVEQIYHFREINGATMDPMAAYLTLRGMKTLHLRVREQSFNAMQLAKFLQQQDIVEEVFYPGLTTHPNHDIAKEQMKDFGGMLSFSVKGGVDTVRELLPKLQYAHRAANLGAVETTVGPARTTSHVECTPEERAAMGIPEGLIRVSCGIEYIDDILEDFAQAFAHIENSLEIS

SEQ ID NO: 13512 - DNA, 1179 bp, Oceanobacillus iheyensis HTE831
  CDS (1)..(1179): transl_table=11
atgaaatataaacatatggagacttcagttattcatgaaggatacgactcaacacagatgcttgggagcttgactcctccaatatttcaaacgtcaacatacacctttgactcggcagaacaaggggaagcacgatttgccgcagaggaagaaggatatatctattctcgtttaggtaatccaactgtgcgcattttagaagagaaaattgcagcattagaaggcggagagcgagggttagctttttcatctggaatggcggcggtatctgctattttatttgcattaacaaaagctaatgatcatattatttgctcttcaggattatatggttgtacttatggattgttatcaatgatgaaagaaaaatataatattaaaacggattattccaatatgtcatccgaacaggaattggaaaatcagataacgaaagaaacagtattaatctatgtggaaacaccgattaatcctaccatgcaagtaattgatttagaattagttgtgaaagtagctaagaagcatcaacttttagtagtggtagataatactttttcctcaccttacttgcaacgtcctttagagataggatgtgattttgttattcatagtgcaacgaagtatattagtggacatggtgatgtgattgcaggacttgcggttggaaaaaaagatatcatggataccattgctttaactacgcaaaaagatattggcggagttttgtctccttttgatgcttggttattgattcgaggattaaaaacattaccattgcgaatggatagacatagtagtaacgcagaaaaaatagttcaacaactaaagttacacaaagcggttaaaaatgtctattatcctggagaccctgatttttctaatgttgctatcaccaataagcaaatgaaactcgcaggaggcgtacttgcttttgaaatcaatggtggaaagaaagaagcgcaaaaagtgttaaatcaattacactttatcaaaattgctgttagcttaggggatgcagaatcattaatggaacatccagcttccatgacacatgctgtaattcctgttgaagaacgagagaaaatgggcataacggaatctttattaagactttcagtgggaattgaagcatgggaggatatttgggaagatatccaacaagcacttgataacatctaa

SEQ ID NO: 13513 - protein, 392 aa, Oceanobacillus iheyensis HTE831
MKYKHMETSVIHEGYDSTQMLGSLTPPIFQTSTYTFDSAEQGEARFAAEEEGYIYSRLGNPTVRILEEKIAALEGGERGLAFSSGMAAVSAILFALTKANDHIICSSGLYGCTYGLLSMMKEKYNIKTDYSNMSSEQELENQITKETVLIYVETPINPTMQVIDLELVVKVAKKHQLLVVVDNTFSSPYLQRPLEIGCDFVIHSATKYISGHGDVIAGLAVGKKDIMDTIALTTQKDIGGVLSPFDAWLLIRGLKTLPLRMDRHSSNAEKIVQQLKLHKAVKNVYYPGDPDFSNVAITNKQMKLAGGVLAFEINGGKKEAQKVLNQLHFIKIAVSLGDAESLMEHPASMTHAVIPVEEREKMGITESLLRLSVGIEAWEDIWEDIQQALDNI

SEQ ID NO: 13514 - DNA, 1185 bp, Bifidobacterium longum NCC2705
  CDS (1)..(1185): transl_table=11
atgtccgctgaatacaacgccaagttcgccaacaccgacatcgccactcgcgccatccacgccggccaggagcccgacccgaccaccggtgcggtcgtcacgccgatcttcgccacctccactttcaagcaggatggcgtgttgggcctcaggggaggccacgactactcccgctccatcaaccccactcgcaccagcttcgacgagcagctcgccgccgtggaaggcggcaagtacgcgctgagcttctcctcgggcttggccgccatcgacgtgctgctgcgctccaccatcaagcccggcgacaacatcctgctcggcaacgatgtgtacggcggcacctaccgcctgctctccaaggtgttcgtgccgtggggtgtgggcctcgacgtggtgaacatcaccgatctgaaagccgtggaaaccgcattggcctccaagcactaccagtatgtgtgggtcgagaccccgtccaacccgctgctcaacatcaccgacatcgcggccaccaccgaagtcgcccacaagtacggcaccaaggtcgctgtcgacaacaccttcgcctcgcccgcccttcagcacccgctggccgatggcgccgatgtggtggtctactccaccaccaagtacatcggcggccactccgacgtggtcggcggtgccgtggtggtcaacgatgaggagacccgcgagaaggtcgccttcctgcagaacgccgccggcgcagtgccctccccgttcgactcctggctggacatccgcggcctgaagaccctggatctgcgcgtcaagcgccacagtgccaacgccctgaaggtggccgaatggctcgaatcccagccctctgatgtgattgagcgcgtctggtacccgggcctcgagtcccacccgggtcatgaaatcgccgcccgccagatgcacggcggcttcggcggcatcgtctccgtgcagctcgcggccggcgccgaggcggccaagcacttcgtggaccacacgcagatcttcacactggccgaatcgctcggcggtgtggaaagcctcatcgaggtgcccgccgccatgacccacgcctccgtggccggcaccaccctgcaggtgcccgccaacctggtgcgcatttcggtcggtatcgagaacgccgacgaccttatcgccgatctcaagcaggcgttggatcgtatctga

SEQ ID NO: 13515 - protein, 394 aa, Bifidobacterium longum NCC2705
MSAEYNAKFANTDIATRAIHAGQEPDPTTGAVVTPIFATSTFKQDGVLGLRGGHDYSRSINPTRTSFDEQLAAVEGGKYALSFSSGLAAIDVLLRSTIKPGDNILLGNDVYGGTYRLLSKVFVPWGVGLDVVNITDLKAVETALASKHYQYVWVETPSNPLLNITDIAATTEVAHKYGTKVAVDNTFASPALQHPLADGADVVVYSTTKYIGGHSDVVGGAVVVNDEETREKVAFLQNAAGAVPSPFDSWLDIRGLKTLDLRVKRHSANALKVAEWLESQPSDVIERVWYPGLESHPGHEIAARQMHGGFGGIVSVQLAAGAEAAKHFVDHTQIFTLAESLGGVESLIEVPAAMTHASVAGTTLQVPANLVRISVGIENADDLIADLKQALDRI

SEQ ID NO: 13516 - DNA, 1284 bp, Brucella suis 1330
  CDS (1)..(1284): transl_table=11
atgtcaaaacgttcgcccggaattgaaacgcttgctgttcacgccggcgtaaagccagatccggcgacaggtgcccgtgcaacgccgatctatcaaaccacatcctttgtgttcgaggatgccgaccatgcggcggccctgttcggccttcaggccttcggcaatatctatacgcgcatcaccaatccgacgaccgccgttctcgaagagcgcattgcagcacttgaaggcggaacggccgcggtcgcgacggcttccggccatgccgcgcagtttctcgccttccatacgttgttgcagccgggtgataattttatcgccgcgcgccagctttatggcggttcgatcaatcagtttggtcagtcgttcaaatctttcgactggcaggtgcgctgggccgatgcgacgaacccggccgattttgccaaacagatcgatgagcgcacacgcgccatcttcatcgaaagcttcgccaatccgggcggcatcgtggtggatatcgaggccattgcggaaatcgcgcatcgcaatggcctgccattgatcgtggacaatacgcttgcctcaccctatctggtgcgtccgatcgagcacggtgcggatatcgtggtccattcgctgaccaaatttatcggcgggcacggcaattccatgggcggcattctggtcgatggcggcacgttcgactgggccaaatccggcaattatccgcttctgaccgaaccgcgcccggattatgccggtctggaactgcacaagacttttggcaatatttcctttgccattgcggcccgtgtgctggggcttcgtgatttcggccctgccatttcgcctttcaatgcgttccagattctcaccggcgttgaaacgcttgccctgcgtatgcagcgccatagcgacaatgcgctgaaggttgccacatggctgcatggccatgaaaaagtatcctgggtcaattatgccggtctgccgcatgacaaatatcatgccttgcagcagaaatatgcgccgaagggtgcggggtccgttttcactttcggcatcaagggcggttatgaagcgggtgtgaagttcgtggatagtctcgaacttttctcgctgcttgccaatctgggcgatacgcgttcgctggtcattcatccggcttcaacgacgcaccgtcagttgagtgacgagcagaaagtggctgcaggcgccgggccggacgtggttcgcctttccatcggcattgaagatgccgacgatatcatcgccgatctggagcaggcgctcgcaaaagcctga

SEQ ID NO: 13517 - protein, 427 aa, Brucella suis 1330
MSKRSPGIETLAVHAGVKPDPATGARATPIYQTTSFVFEDADHAAALFGLQAFGNIYTRITNPTTAVLEERIAALEGGTAAVATASGHAAQFLAFHTLLQPGDNFIAARQLYGGSINQFGQSFKSFDWQVRWADATNPADFAKQIDERTRAIFIESFANPGGIVVDIEAIAEIAHRNGLPLIVDNTLASPYLVRPIEHGADIVVHSLTKFIGGHGNSMGGILVDGGTFDWAKSGNYPLLTEPRPDYAGLELHKTFGNISFAIAARVLGLRDFGPAISPFNAFQILTGVETLALRMQRHSDNALKVATWLHGHEKVSWVNYAGLPHDKYHALQQKYAPKGAGSVFTFGIKGGYEAGVKFVDSLELFSLLANLGDTRSLVIHPASTTHRQLSDEQKVAAGAGPDVVRLSIGIEDADDIIADLEQALAKA

SEQ ID NO: 13518 - DNA, 1314 bp, Streptococcus mutans UA159
  CDS (1)..(1314): transl_table=11
atggagctaattaataataaaaggagagcttccatgactcgagaattttcttttgaaactttacaattacatgcgggacaaagtgttgatcctacaacaaaatcgcgtgcagtaccaatctatcagacgacttcctatgtgtttaatgatgcacaagatgctgaagattcttttgcacttcgtacacccggcaatatttatacgcggatcactaatccgactacagccgtttttgaagaacggatggccgctcttgaaggtggtgtcggtgcactggcaacagcttctggtatggcagcagtaacttatattgccttggctcttgctcatgcaggtgatcatattgtgtcagcagcgacagtttacggtggcacttttaatcttcttaaggaaactttacctcgctatggcattactacaagttttgttgatgttgctaatttcgctgaaattgaagcggctattacagacaagactaagtttattatcgctgaaacgttaggaaatcctcttggaaatatcgctgatcttgaaaaattagctgagattgcccatcgacatgctattcccttggttattgataatacctttggtactccttatttgcttaatgtcttctcttacggtgttgatattgctgttcattctgccactaaatttatcggtggacatgggacatctattggcggtgtcattgttgattctggaaactttgattgggaaaaatctggaaaattcccacaatttgtagaaccagatccttcctatcatgacattagttatacacgtgatattggaaaagcagcttttgtaactgcggtgcgtacgcaactgctgcgtgatacaggcgcctgcctttcacctttcaatgcctttcttttgctacaaggtctagaaaccttatcacttcgtgttgagcgtcatgtggaaaatgctaagaaaattgcgtactatctggaaaatcatcctaaagtcacaaaagttaattatgctagtttgccatcaagtccttattatgacttggctcaaaaatacttgccaaaaggagctagttctatctttacttttaatgttgcaggcagtgcgaaagccgctcgcgaggtcattgacagtcttgaaatcttttctgatttggcgaatgttgctgatgccaaatcactagttgttcatccggcaacaaccactcatggtcaaatgactgaagaagatctacgagcttgcggtattgaacctgagcaaatccgtgtttctattggtttggaaaatgctgatgacttaatcgaagatttgcgcctagcacttgaaaaaatataa

SEQ ID NO: 13519 - protein, 437 aa, Streptococcus mutans UA159
MELINNKRRASMTREFSFETLQLHAGQSVDPTTKSRAVPIYQTTSYVFNDAQDAEDSFALRTPGNIYTRITNPTTAVFEERMAALEGGVGALATASGMAAVTYIALALAHAGDHIVSAATVYGGTFNLLKETLPRYGITTSFVDVANFAEIEAAITDKTKFIIAETLGNPLGNIADLEKLAEIAHRHAIPLVIDNTFGTPYLLNVFSYGVDIAVHSATKFIGGHGTSIGGVIVDSGNFDWEKSGKFPQFVEPDPSYHDISYTRDIGKAAFVTAVRTQLLRDTGACLSPFNAFLLLQGLETLSLRVERHVENAKKIAYYLENHPKVTKVNYASLPSSPYYDLAQKYLPKGASSIFTFNVAGSAKAAREVIDSLEIFSDLANVADAKSLVVHPATTTHGQMTEEDLRACGIEPEQIRVSIGLENADDLIEDLRLALEKI

SEQ ID NO: 13520 - DNA, 1095 bp, Streptococcus mutans UA159
  CDS (1)..(1095): transl_table=11
atgactgaagactataaattagatactattctggcacatgcaggaattaatacggacaagacaacaggagctctgacggctcctattcatttgtcaacaacttatcagcatcctcaatttggtcaatcaacaggttttgattacacacggacaaaaaatcctacccgcactgttcttgaagaaacgctggctaaaattgaaaaggctaaatacgctttagtaacatcgtcgggtatggcggcgcttgttttgctttttactggctttcctattgggagtaaggtagttgcggcgcgtgatttatatggtggttcttttcgttggtttaacgaacaggaaaaagcaggaagattttcttttgtttacaccaatacagaaactgatatgattgctgccatttcagatgagaccgattatgtttttatcgaaacgccaaccaatccgctcatgattgaatttgacattagtaaagttgctcaagcagctcataagcatggtgccaaggtcattgttgataacactttttacagccctatttatcaaaatccgctcgttttaggtgctgatgtggttttgcattcagcaaccaagtatctatcaggtcataatgatgttcttgccggtgttttaatgaccagcgatcaagaaatttacgataagcttttttatgaccaaaatacaacaggtccaacactctcgcccttagatacttatttgctgatgcgcggtctgaaaacacttaaattgcgtatggaaaaagcaacacaaaatgctaagacagttgttgcttatttagaaaaatcacctgctgttaaagaggtactttatacaggaaaaggcggaatgatttcttttaaagttgtggatgaaaaaaaaattccgcaaattctcaatcatttacagctgttcacctttgcagaaagtttaggtggcgttgaaagtttaattacttatccagcgacacagacacacttggatataccggaggaagtgcgtcattcctatggtttgacagatgacttactgcgtctgtccattggaattgaagatgcggaagacttgattgatgatttaaaagctgctttagaagcttaa

SEQ ID NO: 13521 - protein, 364 aa, Streptococcus mutans UA159
MTEDYKLDTILAHAGINTDKTTGALTAPIHLSTTYQHPQFGQSTGFDYTRTKNPTRTVLEETLAKIEKAKYALVTSSGMAALVLLFTGFPIGSKVVAARDLYGGSFRWFNEQEKAGRFSFVYTNTETDMIAAISDETDYVFIETPTNPLMIEFDISKVAQAAHKHGAKVIVDNTFYSPIYQNPLVLGADVVLHSATKYLSGHNDVLAGVLMTSDQEIYDKLFYDQNTTGPTLSPLDTYLLMRGLKTLKLRMEKATQNAKTVVAYLEKSPAVKEVLYTGKGGMISFKVVDEKKIPQILNHLQLFTFAESLGGVESLITYPATQTHLDIPEEVRHSYGLTDDLLRLSIGIEDAEDLIDDLKAALEA

SEQ ID NO: 13522 - DNA, 1230 bp, Corynebacterium efficiens YS-314
  CDS (1)..(1230): transl_table=11
atggacagcttggtctattattgcccacagccccgcagtatatttcttcaggagttgatccagttgtcccacaagcccaccgaccagggtttttccaccgcctcgatccacgccggatacgagccggacgaatactatggttcgatcaacgtcccgatctacgcctccaccaccttcgcgcagaacggccccaatgagctgcgccgtggttatgaatacacccgtgtgggtaaccccaccatcaccgtgctggagcaaaccgtcgccgcactcgagggcgccgagtacggtcgtgccttctcctccggcatggcggccaccgacatcctgttccgcattctgctcaagccgggcgaccacatcatcctgggcaatgacgcctacggtggcaccttccggctcatcgacaccgtcttcgtcgcctggggtgtggaatacaccgtggtggacacctccaacgttgatgaggtcaaggccgccatccgcgacaacaccaagctgatctgggtggagacccccaccaacccggcactggccatcaccgacatcgaggccgtggccaaggccgccgagggcaccgacgccaagctcgtggtggataacaccttcgcctccccctacctgcagcagccgctgaagctcggcgcctacgccgtgctgcactccaccaccaagtacatcggtggtcactccgatgtggtcggtggactcgtggtgaccaatgaccagcagctggatgaggaactgctgttcatgcagggtagcatcggcccgatccccagcgtgttcgacgcctacctcaccggccgcggcgtcaagaccctcgctgtgcgcatggaccgccactgcgacaacgccgagaagatcgccgaattccttgactcccgccccgaggtgtccaccgtgctctacccgggcctggaatcccacccgggacacgaggtggccaagcgccagatgaagcgcttcggcggcatgatctccgtgcgcttcgccggcggagaggaggccgccaagaagttttgtacctccaccaagctgatctgcctggcggaatccctcggcggtgtggaatccctgctggagcaccccgccaccatgacccaccagtccgcagccggttcccagctggaggtgccccgtgacctggtgcgcatctccatcggcatcgaggacatcgaggacctgcttgccgacgttgaacaggccctggaccagctgccccagtag

SEQ ID NO: 13523 - protein, 409 aa, Corynebacterium efficiens YS-314
MDSLVYYCPQPRSIFLQELIQLSHKPTDQGFSTASIHAGYEPDEYYGSINVPIYASTTFAQNGPNELRRGYEYTRVGNPTITVLEQTVAALEGAEYGRAFSSGMAATDILFRILLKPGDHIILGNDAYGGTFRLIDTVFVAWGVEYTVVDTSNVDEVKAAIRDNTKLIWVETPTNPALAITDIEAVAKAAEGTDAKLVVDNTFASPYLQQPLKLGAYAVLHSTTKYIGGHSDVVGGLVVTNDQQLDEELLFMQGSIGPIPSVFDAYLTGRGVKTLAVRMDRHCDNAEKIAEFLDSRPEVSTVLYPGLESHPGHEVAKRQMKRFGGMISVRFAGGEEAAKKFCTSTKLICLAESLGGVESLLEHPATMTHQSAAGSQLEVPRDLVRISIGIEDIEDLLADVEQALDQLPQ

SEQ ID NO: 13524 - DNA, 1272 bp, Pseudomonas putida KT2440
  CDS (1)..(1272): transl_table=11
atgaacaacaacgaaaaattcgagggcaatgctgcggccggtgtggggacgcgggtcgtgtggagcggggagcaggtacagcacccgtacaacgccacgcagaccccgatcgtggtcagcgccgcttatggctacaacgacatcgatgcctggtacgacgtggcgcagggcaagcagccgggcttcatctacagccgcatgagcaaccccacggtcgccacgctggaagcaaaactggccgagctggagcaagccgagtcggcagtcgcgttcagcagcggcatggcggccatcagtgccgtgctgcacaccttcctgtccaacggcaaacgcgtggtgtcgacccgcgacagctatggcggcaccaacaagatcttcgaagagttcctgccgcgcatgggcgtgcaagtgtgcctgtgcgataccttggacactgaagcgctggagcgcgagattgccgccggttgcgacctgctgtacctggaaacccccaccaacccgacgctgaaggtgctggacattcgtcggctgagcgccgctgcgcacaaggtgggggcgctggtggtggccgacaacacctttgccacgccactgaaccagaacccgctggcgctgggcgtggatgtggtggtgcacagcgcaaccaagtttctgtccgggcatggtgacgtgctgggtggggtggtgtgcggcgcggaggcgttgatggcccaggtgcggcactaccgggaaatcaacggcgcggcgctggacccgttctcggcctacctgatcatccgcggtatcaagaccctggcagtgcgcctgcgccagcagcaagccagtgccatggcgttggcccattacctgagcaccgagccgctggttgaagcggtgaactacccaggtttgccggcgcatgccgggcatgccattgccaaggcgcaaatgcgcgggtttggcgccattgtcagcttcgtgctgaagggcggcatgccaaccgtggcccgtttgctgccgcggctgaagtatgcccatcgggccggcaacctcggcgcggtagagaccatctatggcccggcgcgcaccaccagccatgtcgagaacactttggaagagcgcctggcgctgggcatttccgaagggctggtgcgcatttcagtgggcatcgaggaaaccgatgacctgctggcggacctggcacaggcctgtgcatcggtgcgtgaggaactggccgtcgcaaaggaattgcacgctgacgcagacgcctgccagagcccggtgcaggcctga

SEQ ID NO: 13525 - protein, 423 aa, Pseudomonas putida KT2440
MNNNEKFEGNAAAGVGTRVVWSGEQVQHPYNATQTPIVVSAAYGYNDIDAWYDVAQGKQPGFIYSRMSNPTVATLEAKLAELEQAESAVAFSSGMAAISAVLHTFLSNGKRVVSTRDSYGGTNKIFEEFLPRMGVQVCLCDTLDTEALEREIAAGCDLLYLETPTNPTLKVLDIRRLSAAAHKVGALVVADNTFATPLNQNPLALGVDVVVHSATKFLSGHGDVLGGVVCGAEALMAQVRHYREINGAALDPFSAYLIIRGIKTLAVRLRQQQASAMALAHYLSTEPLVEAVNYPGLPAHAGHAIAKAQMRGFGAIVSFVLKGGMPTVARLLPRLKYAHRAGNLGAVETIYGPARTTSHVENTLEERLALGISEGLVRISVGIEETDDLLADLAQACASVREELAVAKELHADADACQSPVQA

SEQ ID NO: 13526 - DNA, 1197 bp, Pseudomonas putida KT2440
  CDS (1)..(1197): transl_table=11
atgcgcgactcccaccacaacaccggtttttccacgcgggccattcatcatggctatgacccgctttcccatggtggcgccctggtgccaccggtgtaccagacggctacctatgccttccccactgtcgagtacggtgctgcctgcttcgccggggaggagcctgggcatttctacagccgcatttccaaccccacgctggccttgctggagcagcgcatggcttcgctggagggcggtgaagcggggttggcgttggcatcggggatgggcgcaattacctcaaccctctggaccctgctcaggcctggggatgagctgattgtcgggcgcaccctgtatggctgtaccttcgcttttctgcaccacggtattggtgagttcggggtgaaagttcgccatgtcgatctcaacgatgccaaggccctgaaagcggcgatcagcagcaaaacacggatgatctacttcgaaacaccggccaaccccaacatgcaacttgtggatatcgcggcggttgtggaggccgtgcgggggcatgatgtgcatgtggtggtcgataacacctactgtacgccgtacctgcagcggccactggagctgggggcggacctggtggtgcactcggcaaccaagtacctcagtgggcatggtgatatcactgccgggttggtggtggggcgcaaggtgttggtcgatcgcattcgcctggaagggctgaaggatatgaccggggcagtgctgtcgccccatgacgcggcgctgctgatgcgcgggatcaagacgcttgccttgcgcatggaccggcattgtgccaatgcccagcaggtggcggagtttctcgtccggcagccgcaggtggaattgattcattacccggggctaccgtcttttgcccagtacgcgttggcccagcgacagatgcgtttgcctggcgggatgattgcctttgagctcaagggtggcattgaggcggggcggcgcttcatgaatgcactgcagctctttgcccgggcggtgagcctgggggatgcagaatcgctggcgcagcatccggcgagcatgacgcattccagctatacgccgcaggagcgggcgcatcacgggatatcggaggggttggtgcgtctgtcggtggggctggaggatgtggaggacctgctggcagatgtcgaacaggcattgcaggcctgctgttag

SEQ ID NO: 13527 - protein, 398 aa, Pseudomonas putida KT2440
MRDSHHNTGFSTRAIHHGYDPLSHGGALVPPVYQTATYAFPTVEYGAACFAGEEPGHFYSRISNPTLALLEQRMASLEGGEAGLALASGMGAITSTLWTLLRPGDELIVGRTLYGCTFAFLHHGIGEFGVKVRHVDLNDAKALKAAISSKTRMIYFETPANPNMQLVDIAAVVEAVRGHDVHVVVDNTYCTPYLQRPLELGADLVVHSATKYLSGHGDITAGLVVGRKVLVDRIRLEGLKDMTGAVLSPHDAALLMRGIKTLALRMDRHCANAQQVAEFLVRQPQVELIHYPGLPSFAQYALAQRQMRLPGGMIAFELKGGIEAGRRFMNALQLFARAVSLGDAESLAQHPASMTHSSYTPQERAHHGISEGLVRLSVGLEDVEDLLADVEQALQACC

SEQ ID NO: 13528 - DNA, 1212 bp, Pseudomonas putida KT2440
  CDS (1)..(1212): transl_table=11
atgacggatcaatgggatgccgggcgactggacagtgacctcgagggtgtcggtttcgacaccctggcggtacgcgctggccaaaaccgtaccccggaaggcgagcacagcgaagcgctgttcctgacctccagctatgtgttccgcacggcagccgatgctgctgcgcgctttgccggcgaaacgccgggcaacgtctactcgcgctacaccaacccgtcggtgcgtgccttcgaggagcgcctggcggccatggaaggtgccgaacaggccgtgggtacgtccaccggcatggcggcgatcctggccgtggtcatgtcgctgtgcagcgccggtgaccatgtgctggtgtcgcagagcgtattcggctccaccatcagcctgttcgagaagtacttcaagcgctttggtgtagaagtggactacgtgccactggtcgacctcaccggttgggaaaaggccatcaaggccaacaccaagctgctgatcgtcgaatcgccctccaacccgctggccgagttggtcgatatcaccgcgctcagcgaaatcgcccatgctcagggtgccatgctggtggtggacaactgtttcagtaccccggcgttgcagcagccgctgaagctgggtgccgacattgtgttccactcggccaccaagttcatcgacggccagggccgctgcatgggcggtgtggttgccggccgtactgagcaaatgaaagaagtggtgggtttcctgcgaaccgcaggtccaaccctcagcccgttcaacgcctggatcttcaccaagggcctggaaacgctgcgcctgcgtatgcgtgcgcactgcgaaagcgctcaggccctggccgaatggctggagcagcaggacggcgtggagaaggtgcattacgccggcctgcccagccacccgcagcacgaactggccaagcgccagatgagcggttttggtgcagtggtcagctttgaagtcaaggggggcaaagagggcgcctggcgtttcatcgacgctacccgagtgatttccatcacgaccaacctgggtgacagcaaaaccaccatcgctcatccggcgaccacctcacacggtcgtctgtcgccgcaggagcgtgaagcggctggtatccgcgacagcctgatccgtgttgccgtgggtctggaagacgtggctgacctgcaggctgacctggcgcgcgggctggcggcattgtga

SEQ ID NO: 13529 - protein, 403 aa, Pseudomonas putida KT2440
MTDQWDAGRLDSDLEGVGFDTLAVRAGQNRTPEGEHSEALFLTSSYVFRTAADAAARFAGETPGNVYSRYTNPSVRAFEERLAAMEGAEQAVGTSTGMAAILAVVMSLCSAGDHVLVSQSVFGSTISLFEKYFKRFGVEVDYVPLVDLTGWEKAIKANTKLLIVESPSNPLAELVDITALSEIAHAQGAMLVVDNCFSTPALQQPLKLGADIVFHSATKFIDGQGRCMGGVVAGRTEQMKEVVGFLRTAGPTLSPFNAWIFTKGLETLRLRMRAHCESAQALAEWLEQQDGVEKVHYAGLPSHPQHELAKRQMSGFGAVVSFEVKGGKEGAWRFIDATRVISITTNLGDSKTTIAHPATTSHGRLSPQEREAAGIRDSLIRVAVGLEDVADLQADLARGLAAL

SEQ ID NO: 13530 - DNA, 1278 bp, Pseudomonas putida KT2440
  CDS (1)..(1278): transl_table=11
atgaagctggaaacgcttgccatccatgcgggcttcagccccgacccgaccaccaaggcggtggccgtaccgatctaccagaccacctccttcgccttcgacgacacccagcacggcgccgacctgtttgacctgaaggttgccggcaacatctattcgcgcatcatgaaccccaccaacgacgtgctcgagcagcgcatggccgccctggaaggcggggttggcgcgctggccgtagcctcgggcatggcggctatcacctacgccatccagaccgtcgccgaagccggcgacaatatcgtctcggtggccaagctgtacggcggcacctacaacctgctggcgcacaccctgccacgcatgggtatccacacccgcttcgcggcccatgacgatatcgccgccctcgaagcgctgatcgatgcgcgtaccaaagcggtattctgcgagtccatcggcaaccccgccggcaatatcgttgatatcgctgcgctggccgaggccgcccaccgccacggggtgccgctgatcgtcgacaacaccgtggccaccccggtgctgtgccggccgttcgagcacggcgccgatatcgtcgtgcactcgctgaccaagtacatcggcggtcacggcaccagcatcggcggcatcgtcatcgactccggcaaattcccctgggccgaaaacaaggaacgcttcgccctgctcaacacccccgacccgtcctaccacggcgtcacctacaccgaagctttcgggcctgccgccttcatcggccgctgccgtgtggtgcccttgcgcaacaccggcgccgcgctgtcgccgttcaacgccttcctgatcctgcaaggcctggaaaccctggccctgcgcatggagcgccataccgagaacgcgctaaaggtcgcccattacctgcaagcccacgagcaagtggcctgggtgaagttcgccgggctgcccgaccaccccgaacatgcactggcccagcgctacaccggcggcaagccggcatcgatcctgtcgttcggcatcaagggtggccaggcggctggcgcgcgtttcatcgacgcgttgcagttggtggtacgcctggtgaacatcggcgacgccaagtcactggcctgtcaccccgcttccactacccaccgtcagctcaacgacgacgaactggagaaggccggtgtgccacgggacatggtgcgcctgtcgatcggcatcgaacacagtgacgacatcatcgccgacctggcccaggccttggaggccagccgcggctga

SEQ ID NO: 13531 - protein, 425 aa, Pseudomonas putida KT2440
MKLETLAIHAGFSPDPTTKAVAVPIYQTTSFAFDDTQHGADLFDLKVAGNIYSRIMNPTNDVLEQRMAALEGGVGALAVASGMAAITYAIQTVAEAGDNIVSVAKLYGGTYNLLAHTLPRMGIHTRFAAHDDIAALEALIDARTKAVFCESIGNPAGNIVDIAALAEAAHRHGVPLIVDNTVATPVLCRPFEHGADIVVHSLTKYIGGHGTSIGGIVIDSGKFPWAENKERFALLNTPDPSYHGVTYTEAFGPAAFIGRCRVVPLRNTGAALSPFNAFLILQGLETLALRMERHTENALKVAHYLQAHEQVAWVKFAGLPDHPEHALAQRYTGGKPASILSFGIKGGQAAGARFIDALQLVVRLVNIGDAKSLACHPASTTHRQLNDDELEKAGVPRDMVRLSIGIEHSDDIIADLAQALEASRG

SEQ ID NO: 13532 - DNA, 1182 bp, Pseudomonas putida KT2440
  CDS (1)..(1182): transl_table=11
atgggcctgaccatgtccgacaagccgcgcaatttcgccacccgtaccattcacgccggcgagcagttcagcgttgccgataacgccattttcccggctatcgtcaccgccagttcgttcaccaagcgcagcctggacgataagccggaatattcctacagccgcgtcggcaaccccacccggcatgcctacgaaacctgtgtcgctgccttggaagaaggcgtgggcgctgtggcctgcgcctcgggagtcaatgccaccgcaaccgtgcttgagctgctgcccaaggatgcccacgtggtggtgatgaacggcgtgtacggtggcacgttccgcatcatggaagattaccgcagccgcacctcggggctgaccaccacctatgtcgatctcaacgacattgaagccgtagcggctgcgatcaagccggaaacccagctgatctggatcgagtcgccgaccaacccgttgctgcacctggtcgacatcaaggcggtgtgcgacctggccaaggccaagggcatcctcacctgcatcgacaacaccttctgctcgccgtggaaccagcgcccgatcaccctgggcgtggacttggtgatgcactcggccagcaagtacatcggtggccactccgacctcaccggcggtgtggtggtggcggccaacgatgcgttgctggcacgcctgcgccgtatcagcatggcgattggtgcggtgcaggggccgttcgactgctacctggccctgcgcggtctgaagaccctggatgtgcgcatggagcgccagtgcgccaatgccctgcaggtggcgcgcttcctggaaggtcacgcgcaggtcgagcaggtgtattacccggggctggaaagccacccgcagcatgaactgtgcaaacgccagatgcgcagtggcggggcggtggtggcgatgaaagtaaaaggcgaccgcgccgcgctcaaccgcctggtggaggcgctgcagatttttgtgctggccgactcgctgggcggggtggagagcatgatcaaccactcctggagcatgtcgcactgctcgctgagcccagagcagaaaggggtgatggggatcagcgagaacctgctgcggttgtcggtagggatcgaggattaccgtgacctggtcgaggacctggatggggcgttgaaagcgctggtcgctgtgtga

SEQ ID NO: 13533 - protein, 393 aa, Pseudomonas putida KT2440
MGLTMSDKPRNFATRTIHAGEQFSVADNAIFPAIVTASSFTKRSLDDKPEYSYSRVGNPTRHAYETCVAALEEGVGAVACASGVNATATVLELLPKDAHVVVMNGVYGGTFRIMEDYRSRTSGLTTTYVDLNDIEAVAAAIKPETQLIWIESPTNPLLHLVDIKAVCDLAKAKGILTCIDNTFCSPWNQRPITLGVDLVMHSASKYIGGHSDLTGGVVVAANDALLARLRRISMAIGAVQGPFDCYLALRGLKTLDVRMERQCANALQVARFLEGHAQVEQVYYPGLESHPQHELCKRQMRSGGAVVAMKVKGDRAALNRLVEALQIFVLADSLGGVESMINHSWSMSHCSLSPEQKGVMGISENLLRLSVGIEDYRDLVEDLDGALKALVAV

SEQ ID NO: 13534 - DNA, 1254 bp, Bradyrhizobium japonicum USDA 110
  CDS (1)..(1254): transl_table=11
gtggatatatccaggccggttttttttgtgaccgttttcgacgagacggtcatgtcggaggtacctatgtcgaagtcgcctgccacttaccgtcccgaaacccgcctggtccattccggcaccctgcgctcgcaattcggcgagacgtcggaggcgctgttcctgacccagggctacgtctacaacagcgccgaggagtgcgaggcgcggttcaagggcgaggatcccggcttcatctattcgcgttattcgaacccgaccatctcgatgttcgagcgccgcatgatcgagctagaaggcgccgaagcggcgcgttcggcggcgaccggcatggccgctgtgacgaccgcgatcctggcgccgctgaagaccggcgaccacgtggtcgcctcccgcgcgctgttcggctcgtgcctctacgtcattcaggatctgttgccgcgctacggcatcgaaaccacgctggtcgacggcctcgatctcgaccagtggcagcgggccttgcggccgaacaccaagacgttcttcctggagagcccgaccaacccgacgctcgacgtgctcgacatccccggcatcgccgagatcgcgcacaagggcggcgcgcggctcgtcgtcgacaacgtgtttgcgacgccgatctggcagagcccgctcgcgctcggggccgacgtcgtggtctattccgcgaccaagcacatcgacggccagggccgctgcctcggcggcatcatcctgtcgtcggaagccttcgtcgccgagcacctccacaatttcatgcgccagaccgggccgtcgatctcgccgttcaacgcctgggtcttgcttaagggcctggagacgctggccgtgcgcgtgcgcgcgcagaccgacaccgcggcaagcgttgcggaagtgctggccggccatccgaagatctcgcgattgatctatcccggccgcgccgatcatccgcaggcagcgctggtgaagaagcagatgcgcggcggctcgacgctggtcggcttcgaggtcaagggcggcaaggcggccgcgttccgcgtgctcaacgagctcaagcttgcgaagatctcgaacaatctcggcgacgccaagagcctcgtcacccatccggcgaccacgacgcatcagcgcctgaagccggaagaccgcgccgcgctcggcatcagcgagggcttcatccgcttctccgcggggctggagcatgcggacgatctgatcgaggatctgacggcggcgctggagaaggcgtga

SEQ ID NO: 13535 - protein, 417 aa, Bradyrhizobium japonicum USDA 110
MDISRPVFFVTVFDETVMSEVPMSKSPATYRPETRLVHSGTLRSQFGETSEALFLTQGYVYNSAEECEARFKGEDPGFIYSRYSNPTISMFERRMIELEGAEAARSAATGMAAVTTAILAPLKTGDHVVASRALFGSCLYVIQDLLPRYGIETTLVDGLDLDQWQRALRPNTKTFFLESPTNPTLDVLDIPGIAEIAHKGGARLVVDNVFATPIWQSPLALGADVVVYSATKHIDGQGRCLGGIILSSEAFVAEHLHNFMRQTGPSISPFNAWVLLKGLETLAVRVRAQTDTAASVAEVLAGHPKISRLIYPGRADHPQAALVKKQMRGGSTLVGFEVKGGKAAAFRVLNELKLAKISNNLGDAKSLVTHPATTTHQRLKPEDRAALGISEGFIRFSAGLEHADDLIEDLTAALEKA

SEQ ID NO: 13536 - DNA, 1284 bp, Bradyrhizobium japonicum USDA 110
  CDS (1)..(1284): transl_table=11
atggtaaaaccctttccgtcgaagacccacatcggcaaccatatgctgcatccggaaacgctgatgctgacctatggctatgatccgcagctgtcggaaggcgccatcaagccgccggtattcctgacctcgaccttcgtgttcaggaccgccgaggacgggcaggacttcttcgatttcgtcgccggccggcgcgagccgccggaggggatgggcgcgggcctggtctattcgcgcttcaaccaccccaacagcgagatcgtcgaggacaggctcgcggtctatgagcgcaccgagagttgcgcgctgttctcctccggcatggcggccatcgcaaccacgatcctcgccttcgtgcgccccggcgacgtcatcctgcactcccagccgctctatggcgggacggaaaccctgctgaccaacacgcttgcgcgcctgtcgatcggcgccgtcggctttgccgacggcatcgacgaggcggcggtcaagcaggcctcggaggaggcgatgggcaagggccgggtttcgatgatcctgatcgagaccccggccaacccgaccaatggcctcgtcgacgtcgcgatgatccgccgcatcgccgacgcgatcggaaaggcccaggggcatacgccgatcatcgcctgcgacaatacgctgctcgggccggtgtttcagcggccgatcgagcatggcgcggacctttcgctgtactcgctgaccaaatatgtcggcggtcactccgacctgatcgcgggcgccgcgctcggcgcgaaggcgatcatgaagggcatcaaggcgctgcgcggcgccatcggcacccagctcgatccgcattcctgctggatgatcaaccgctcgctcgagacgctgagcctgcgcatggaaaaagccgatgcgaatgcgcgcctcgtggcggcttatttgcgcgatcatcccaaggtggccaaggtccactatctcggtcatcacgaggaggcatcgccggcggggcgtgtgtttgcgaggcagtgcctgggggcgggatcgacgttctcgttcgacatcgccggcggcaaggaggccgcggtcaaattcctcaacgcgctgcaaatcctcaagctggcggtgagcctcggcggcacggagtcgctggccagcctgccggcgacgatgacccattccggcgttcccgccgacatccgccagaagatcggcgtgctcgattccacgatccggttgtcgatcggcatcgagaacccgtcggatctgatcgcggacctcgcgcaggcgctgaacgcggcttga

SEQ ID NO: 13537 - protein, 427 aa, Bradyrhizobium japonicum USDA 110
MVKPFPSKTHIGNHMLHPETLMLTYGYDPQLSEGAIKPPVFLTSTFVFRTAEDGQDFFDFVAGRREPPEGMGAGLVYSRFNHPNSEIVEDRLAVYERTESCALFSSGMAAIATTILAFVRPGDVILHSQPLYGGTETLLTNTLARLSIGAVGFADGIDEAAVKQASEEAMGKGRVSMILIETPANPTNGLVDVAMIRRIADAIGKAQGHTPIIACDNTLLGPVFQRPIEHGADLSLYSLTKYVGGHSDLIAGAALGAKAIMKGIKALRGAIGTQLDPHSCWMINRSLETLSLRMEKADANARLVAAYLRDHPKVAKVHYLGHHEEASPAGRVFARQCLGAGSTFSFDIAGGKEAAVKFLNALQILKLAVSLGGTESLASLPATMTHSGVPADIRQKIGVLDSTIRLSIGIENPSDLIADLAQALNAA

SEQ ID NO: 13538 - DNA, 1203 bp, Xylella fastidiosa Temecula1
  CDS (1)..(1203): transl_table=11
atgagcattcatgatgtgcacgaaggcacgtgtcacgtgaccacttccgcggtgcgtgctgggatcgattccgacactgctcatggggcagtgacgccaccgattgtgctttcatccaacttctcgtttgaacgtttcggtcataagcgtaagtacgattacacacgtagtgctaatccaacgcgggatctgctcggcgaggcgcttgcggagttggaggggggtgccggtggtgtggttacggcgactgggatcgctgcgattacgttggtgttgcacgcattgctccggccgggtgatcgtttggttgtgccacatgatgcttacggtggcagttggcgtttgttcaatgcgttggctcaaaagggacattttgaattgatcactgtcgatttgacggatgcacgatcactggttgaggcattggcactaccaccgaagttggtattgatcgaaactccttccaatccattgttacgtattactgatttgggtgcggtgattgaggcagcgcaccgtgtcggtgctttgactgtggtcgacaatacgtttatgtctccggtgttgcagcgtcctttagagttcggcgctgacttggtattgcattcgaccacgaagtacatcaatggccacagtgatgttgtcggtggcgttgttgtggcacgtgatgttgcgcactatcagcagttggtgtggtgggcgaatgcgctgggtctgaccggctcgccattcgatgccttcttgacgttgcggggggtgcgcacgctggatgcgcgtttgcgtgtgcatcaggagaatgcgcagatgattgcagccttactggaggggcatggtgtggtgaagcacgtgcattacccaggattagcttcgcatccggggcatgtgctggcggggcggcagcaaaaagggttcggtgccatgctcagtttcgagttgcagggtggggaagaggcggtgcgggcttttgtcagtggcttgcgttatttcacgctggctgagtcgctgggtggggttgagagtttgatcgctcatccggcttcgatgacgcatgctgccatgacgcccgaggcgcgtgctaaagcgggtatctctgatgggttgttgcgcttgtcggtggggattgaggccagtgaggatttgatcgttgatctggtggctggtttggggcgtgctcaggcggtgcgggaagagtgcaaggtgtga

SEQ ID NO: 13539 - protein, 400 aa, Xylella fastidiosa Temecula1
MSIHDVHEGTCHVTTSAVRAGIDSDTAHGAVTPPIVLSSNFSFERFGHKRKYDYTRSANPTRDLLGEALAELEGGAGGVVTATGIAAITLVLHALLRPGDRLVVPHDAYGGSWRLFNALAQKGHFELITVDLTDARSLVEALALPPKLVLIETPSNPLLRITDLGAVIEAAHRVGALTVVDNTFMSPVLQRPLEFGADLVLHSTTKYINGHSDVVGGVVVARDVAHYQQLVWWANALGLTGSPFDAFLTLRGVRTLDARLRVHQENAQMIAALLEGHGVVKHVHYPGLASHPGHVLAGRQQKGFGAMLSFELQGGEEAVRAFVSGLRYFTLAESLGGVESLIAHPASMTHAAMTPEARAKAGISDGLLRLSVGIEASEDLIVDLVAGLGRAQAVREECKV

SEQ ID NO: 13540 - DNA, 1197 bp, Clostridium tetani E88
  CDS (1)..(1197): transl_table=11
atggatataaaaaatatgggatttggtactaaagcaatacatgggggaaataaaaaagatacacagtatggagcattgtctacaccaatatatcagacatcaacctttatatttgactctgctgaacagggtggaaaaagatttgcaggagaagaaagtggacatatatatacaagactaggaaatcctacaactggtcaattagaggataaaatggctatattagaaggtggagaggctgtaatagcaactgcatcaggtatgggagctatatcttcagcattatggacagctctaaaggcaggggatcatgtagtagcaggtgaaacattatatggatgtacatttgctttattatgccatggtttaccaagattcggtgttgaagttacttttgtagatactactaatttagaggaagtagaaaaggctataaaagaaaatacaaaagtagtttacttagaaacacctgctaatcctaatttaaaggtagcagatataaaagctataagtgaaattgctcacaaaaaggaagattgtatggtttttgtagataacactttctgtacaccatgtattcaaagacctttagagttaggagcagatgtggtagttcactcagctactaagtacttaaatggacatggagatgttcttgctggatttgtagtaggaaagcaagagtttataaataatgttagaggttttggagtaaaggatatgacaggatcagttttaagtccttttgatgcattcttggttttaagaggattaaaaacattagaaattagaatggaaagacattgtgcaaatgctcaaaaagtggcagaatttttacaaggacatgaagctgttagtaaggtatactacccaggtttaaatgattctgaatattatgatatagctaaaaaacaaatgagaatgcctggagctatgatttcctttgaagttaatggaggtttagaagaaggtaaaaagattatggatagtgttaagttagctaatttagctgtaagcttaggggatgctgaaaccttaatacaacatccagcgtctatgacacattctccatatactaaggaagagagagaagcggcaggcattagtgataatttagttagattatctgttggacttgaaaatgttgaagatataattgaagatttaagacaagcgttagatactataaaaaaataa

SEQ ID NO: 13541 - protein, 398 aa, Clostridium tetani E88
MDIKNMGFGTKAIHGGNKKDTQYGALSTPIYQTSTFIFDSAEQGGKRFAGEESGHIYTRLGNPTTGQLEDKMAILEGGEAVIATASGMGAISSALWTALKAGDHVVAGETLYGCTFALLCHGLPRFGVEVTFVDTTNLEEVEKAIKENTKVVYLETPANPNLKVADIKAISEIAHKKEDCMVFVDNTFCTPCIQRPLELGADVVVHSATKYLNGHGDVLAGFVVGKQEFINNVRGFGVKDMTGSVLSPFDAFLVLRGLKTLEIRMERHCANAQKVAEFLQGHEAVSKVYYPGLNDSEYYDIAKKQMRMPGAMISFEVNGGLEEGKKIMDSVKLANLAVSLGDAETLIQHPASMTHSPYTKEEREAAGISDNLVRLSVGLENVEDIIEDLRQALDTIKK

SEQ ID NO: 13542 - DNA, 1146 bp, Lactobacillus plantarum WCFS1
  CDS (1)..(1146): transl_table=11
atgaaatttgaaacccaattaattcacggtggtatcagtgaggatgccactactggcgcgacttcggtacccatctacatggcctcgaccttccgccaaacaaaaatcggtcaaaatcaatacgaatattcacggacgggaaatccaacccgggccgccgtcgaagcattaattgccaccctcgaacatggcagcgctggcttcgcatttgcttctggctccgctgccattaataccgtcttctcactattctcggctggtgatcacattattgtgggaaatgatgtctacggtggcaccttccgcttgatcgacgccgttttgaaacactttggcatgacttttacagccgtagatacgcgtgacttggccgccgttgaagccgcaattacccccacaactaaggcgatttatttggaaacaccgacgaacccgttattacacattacggatattgctgccattgcgaagctcgcgcaagcacacgatttactgagtatcatcgacaacaccttcgcctccccatacgtccagaagcccctggatttaggcgttgacattgttttacacagtgcttccaagtatctcggtggtcacagtgatgttatcggtggcttggttgtcaccaagacgccagcacttggcgaaaaaatcggctacttgcaaaatgccatcggtagtattttggccccgcaagaaagctggctattacaacgtggtatgaagactctggcattgcgcatgcaagcccacctgaataatgccgctaaaatctttacttacttaaagtctcacccagcagttactaagatttactatccaggcgatcctgataatcccgatttttcgattgccaagcaacagatgaatggcttcggcgcaatgatctcgtttgaattacaaccaggaatgaacccccagaccttcgttgaacatttacaagtcatcacgctcgccgaaagtctcggagcattggaaagtttaattgaaattccagccttaatgactcacggtgccatcccacgcacaattcggctacagaatggcatcaaagacgagctgattcgcttatcagtcggtgttgaagccagtgacgatttgttagcagaccttgagcgcgggttcgctagcattcaggcagattaa

SEQ ID NO: 13543 - protein, 381 aa, Lactobacillus plantarum WCFS1
MKFETQLIHGGISEDATTGATSVPIYMASTFRQTKIGQNQYEYSRTGNPTRAAVEALIATLEHGSAGFAFASGSAAINTVFSLFSAGDHIIVGNDVYGGTFRLIDAVLKHFGMTFTAVDTRDLAAVEAAITPTTKAIYLETPTNPLLHITDIAAIAKLAQAHDLLSIIDNTFASPYVQKPLDLGVDIVLHSASKYLGGHSDVIGGLVVTKTPALGEKIGYLQNAIGSILAPQESWLLQRGMKTLALRMQAHLNNAAKIFTYLKSHPAVTKIYYPGDPDNPDFSIAKQQMNGFGAMISFELQPGMNPQTFVEHLQVITLAESLGALESLIEIPALMTHGAIPRTIRLQNGIKDELIRLSVGVEASDDLLADLERGFASIQAD

SEQ ID NO: 13544 - DNA, 1287 bp, Lactobacillus plantarum WCFS1
  CDS (1)..(1287): transl_table=11
atgacaacaacgaatcctgaaaattatcactttgaaacgttacaagtccatgcgggccagacggttgatgaaacgggcgcacgggccgtgccaatctatcaaacgacttcatacgtctttaaggatgccaagcaagccgcgggtcgctttgccctgactgatgccggcaatatttatacacgactgacgaacccaacgacggacgtggtcgacaaacgagtggccgccttggagcacgggacggctggggtaacgatcgcaacgggttctgctgcgataaccgcggcaattttaaacattgcgcaacagggggatgaaattgtggcggccaacaccttgtatggtgggacctatgacctgtttagcgtgacgttaaagaagttgggcatcacaacgcactttgttgatcctgacgaaccggcaaattttgagacggcaattaacgatcatactaaggccttgtacgttgaaagtatcggtaatcctggcattaacttagttgattttgaagccattggaaaaatcgctcatgatcatggcattatttttattgttgataatacctttgggacaccatacctagttcggccacttgaacatggggccgacgtggtcgtacattcagcaactaagtttatcggtggtcacgggacgaccatgggtggcgttattgttgaaggcggccaatttgactggcgtgcgagtggcaagtatccagatttcacaacgccagatccgcaatataacggcctcgtttttgccgatttgggcggggcagcctttacgactaaggtccgggcggaaacgctgcgagataccggtgcaactatcagtccctttaattccttcttgttgttgcaaggtctagaatccttgtcattgcgagtagaacgacacgtgaccaatacacgcaagattgttgccttcttaaaagcacatccaaaagttgcctggatcaattatccagaactggaagatagcccgtaccacgacttagcaactaagtacttcccgaatggggttggttcgatcttcaccctgggcttgactggtggcgaggctgctggtaaggcattaattgaacatctacaactcttttcattgttagcaaacgtcgctgatgctaaatcattaattatccatcccgcttccaccacgcatgcgcaattaaatgaacaggaattgttagcagctggtgtaacgcctgacttgattcgaatttcagtaggtgtcgaaaatgccgatgatttaattgctgatttggatcaagcattggcacaggtttaa

SEQ ID NO: 13545 - protein, 428 aa, Lactobacillus plantarum WCFS1
MTTTNPENYHFETLQVHAGQTVDETGARAVPIYQTTSYVFKDAKQAAGRFALTDAGNIYTRLTNPTTDVVDKRVAALEHGTAGVTIATGSAAITAAILNIAQQGDEIVAANTLYGGTYDLFSVTLKKLGITTHFVDPDEPANFETAINDHTKALYVESIGNPGINLVDFEAIGKIAHDHGIIFIVDNTFGTPYLVRPLEHGADVVVHSATKFIGGHGTTMGGVIVEGGQFDWRASGKYPDFTTPDPQYNGLVFADLGGAAFTTKVRAETLRDTGATISPFNSFLLLQGLESLSLRVERHVTNTRKIVAFLKAHPKVAWINYPELEDSPYHDLATKYFPNGVGSIFTLGLTGGEAAGKALIEHLQLFSLLANVADAKSLIIHPASTTHAQLNEQELLAAGVTPDLIRISVGVENADDLIADLDQALAQV

SEQ ID NO: 13546 - DNA, 1122 bp, Lactobacillus plantarum WCFS1
  CDS (1)..(1122): transl_table=11
atgacaaaacaagctgagaaattacacattgaaacgcggttagcacaagctggtaatcggagtgatgatgagaagaccggggcaatttcggcgcccatctacttgtcgacagcatatcgacatgctggtttaggacaatctacgggatttgactacccgcgcgaggcccaaccgacccgctgtattttggaacgagtgctggcagagatggaacacggcatcgctgcgtatgcgctgacttctggcatggcggcaatccagctcgttttcacgcttttcaatagtggtgacaaaattattgtgtctgatgacttatacgggggttcgtaccgcttctttgacctcttacacgaccattatcatttggattttgctgtctgggatgggcaggatcaagcgacattggcagcactggcagacgatcaaaccgttgccctgtggttggaaacgccatcgaatccaaccatgaaggtcatagatattacggccacagcggctaccgcacacgcccatgacctcaagttaatcgttgataatactttctatacaccgttgattcaaaagccactggatctaggcgcagacatcgtcgttcattccgcaactaagtatttagccggtcataatgatgttttagccggtgcagtggtagtcaagtcgcaggcggatgctgatgcgcttgaatttaatctggtgacgactggtgcggtccttgacccgttcgacgcttggctgctcttacggagcttgaagactttgccattacgtttgcatcagcaggaggctaatgcgcaggaactcgttacggtccttgaggcagatgaacacgttgaacgcgtcttatattcaggacgtggtggaatgattagtttttatctcgctacgggtaccgacgtcgatacctttttacgagcattgaacgtaatctcgtttgcggaaagtcttggcggtgtcgagagcctgttaacagttccggcagttcagacacacgcagatttaacggaagagcaacgacaatcaaaggggatcaccgctaacttattgcggctatccgttgggatcgaaaatagtgctgatttagcagcggatctcaagcaagcgctgatccgagcaacaaaataa

SEQ ID NO: 13547 - protein, 373 aa, Lactobacillus plantarum WCFS1
MTKQAEKLHIETRLAQAGNRSDDEKTGAISAPIYLSTAYRHAGLGQSTGFDYPREAQPTRCILERVLAEMEHGIAAYALTSGMAAIQLVFTLFNSGDKIIVSDDLYGGSYRFFDLLHDHYHLDFAVWDGQDQATLAALADDQTVALWLETPSNPTMKVIDITATAATAHAHDLKLIVDNTFYTPLIQKPLDLGADIVVHSATKYLAGHNDVLAGAVVVKSQADADALEFNLVTTGAVLDPFDAWLLLRSLKTLPLRLHQQEANAQELVTVLEADEHVERVLYSGRGGMISFYLATGTDVDTFLRALNVISFAESLGGVESLLTVPAVQTHADLTEEQRQSKGITANLLRLSVGIENSADLAADLKQALIRATK

SEQ ID NO: 13548 - DNA, 1212 bp, Pseudomonas syringae pv. tomato str. DC3000
  CDS (1)..(1212): transl_table=11
atgactcaggaatgggatgcaggtcggctggacagcgaccttgaaggcgtgggtttcgataccctcgccgtacgtgccgggcaacaccgcaccccggaaggtgagcatggcgaccccatgttctttacctccagctacgtatttcgcacggccgcggatgctgccgcgcgttttgcaggcgaggtgccgggtaacgtctattcgcgttacaccaacccgaccgtacgctcctttgaagagcgtattgccgcgctggaaggcgcagagcaggccgttgccaccgctacaggtatggcggcaactctggcggtggtgatgagtttgtgcagcgccggtgatcatgtgctggtgtcgcgcagcgtattcggctcgaccatcagcctgttcgacaaatatttcaagcgtttcggcattgaggtggattacgttccgctggcagagttgagcggttggaatgcggcgatcaaggccaacaccaaaatgttgttcgtcgaatcgccttccaacccgttggccgagcttgtggacatcgctgcgctggccgagattgcccacgccaagggcgcgatgctgatcgtcgacaactgtttctgcacgccagccttgcagcagccgctgctgctgggtgccgacattgtcgtgcactcggccaccaagtttatcgacggccagggtcgttgcatgggcggtgtggttgccggtcgcagcgagcagatgaaagaagtggtgggctttctacgtaccgccgggccgacgctcagccccttcaatgcgtggatcttcctcaagggcctcgaaaccctgaacctgcggatgcgcgcgcactgcgccaatgcccaggcgctggccgagtggctcgagcagcaggacggcatcgaaaaggtccactacgcagggctcgagagccatccgcagcatgagctggctaaacgtcagcaaaagggctttggcgccgtggtgagctttgaggtcaagggcggcaaggacggcgcatggcgtttcatcgatgccacgcggttgatctccattactgccaacctgggcgacaccaagaccacgatcacgcacccgagcaccacgtcccatggccgtctggcgcctcaagagcgtgaggcggcgggtattcgcgacagcctgattcgggttgctgtggggcttgaagacgtggctgacctgcaggctgacctggcccgtggtctggcggcactgtga

SEQ ID NO: 13549 - protein, 403 aa, Pseudomonas syringae pv. tomato str. DC3000
MTQEWDAGRLDSDLEGVGFDTLAVRAGQHRTPEGEHGDPMFFTSSYVFRTAADAAARFAGEVPGNVYSRYTNPTVRSFEERIAALEGAEQAVATATGMAATLAVVMSLCSAGDHVLVSRSVFGSTISLFDKYFKRFGIEVDYVPLAELSGWNAAIKANTKMLFVESPSNPLAELVDIAALAEIAHAKGAMLIVDNCFCTPALQQPLLLGADIVVHSATKFIDGQGRCMGGVVAGRSEQMKEVVGFLRTAGPTLSPFNAWIFLKGLETLNLRMRAHCANAQALAEWLEQQDGIEKVHYAGLESHPQHELAKRQQKGFGAVVSFEVKGGKDGAWRFIDATRLISITANLGDTKTTITHPSTTSHGRLAPQEREAAGIRDSLIRVAVGLEDVADLQADLARGLAAL

SEQ ID NO: 13550 - DNA, 1287 bp, Bacteroides thetaiotaomicron VPI-5482
  CDS (1)..(1287): transl_table=11
atggaaagaaagaatttacactttgagacattacaggttcatgtaggacaggaacaagcagatccggcaacagacgcacgcgcagtacctatttatcagaccacttcttatgtattccacaattccgctcatgcagccgcacgtttcggtttgcaagatccgggcaatatctacggccgcctgaccaactccacccaaggagtttttgaagaacgtgtagccgtcctcgaaggaggcgtagcaggtctggcagttgcctccggtgccgccgctattacttatgctttcgaaaacattactcgtgcaggcgaccacatcgtagctgccaaaacaatttacggaggaagctataacttactggcacatactttgcccaattatggcgttaccaccactttcgttgatccgagcgacctttccaactttgagaaagcgattcaggagaacaccaaagccgtatttatcgaaacactcggaaacccgaattccaatattatagacatagaagcggtatccgaaattgctcaccgtcacaaaatacctttgattatagacaatacgttcggcactccctacttaatccgccccatcgaacacggagcagacattgtggtacactccgccaccaaattcattggcggtcatggcagttccttgggaggagtaatcgttgactccggtaaattcgactgggtagcttcgggtaaattcccgcagttgacagagcccgatccgagttaccacggagtacgctttgtagacgctgccggtccggctgcttacgtcacccgcattcgtgccactttgctacgggatacgggagcaacgatcagtccgttcaatgccttcatcctgctgcaagggctggaaacactttctttgcgtgtagaacgtcatgtagaaaacgcgctaaaagtggtgaacttcctgaataatcatccgaaggtgaagaaagtcaatcatccgtcactctccgatcatccggatcatgcactctatcaacgctatttcccgaatggtgcaggctccatctttacgtttgaagtaaaaggaggacaggaagaagcacaccgcttcatcgacagtctggagattttctcgttgctggccaatgtagctgacgtgaaatcactagtcatccatccggcaagtaccacacactcgcaacttaatgcgcaggaacttgcagaacaggagatttatccgggcactgtacgtctatccatcggaacggaacatatcaatgacctgatagccgatctggaacaggcactcgccaaaatctga

SEQ ID NO: 13551 - protein, 428 aa, Bacteroides thetaiotaomicron VPI-5482
MERKNLHFETLQVHVGQEQADPATDARAVPIYQTTSYVFHNSAHAAARFGLQDPGNIYGRLTNSTQGVFEERVAVLEGGVAGLAVASGAAAITYAFENITRAGDHIVAAKTIYGGSYNLLAHTLPNYGVTTTFVDPSDLSNFEKAIQENTKAVFIETLGNPNSNIIDIEAVSEIAHRHKIPLIIDNTFGTPYLIRPIEHGADIVVHSATKFIGGHGSSLGGVIVDSGKFDWVASGKFPQLTEPDPSYHGVRFVDAAGPAAYVTRIRATLLRDTGATISPFNAFILLQGLETLSLRVERHVENALKVVNFLNNHPKVKKVNHPSLSDHPDHALYQRYFPNGAGSIFTFEVKGGQEEAHRFIDSLEIFSLLANVADVKSLVIHPASTTHSQLNAQELAEQEIYPGTVRLSIGTEHINDLIADLEQALAKI

SEQ ID NO: 13552 - DNA, 1137 bp, Enterococcus faecalis V583
  CDS (1)..(1137): transl_table=11
atgaaattcaataccaaattaattcatggcggcattagtaaagacacaacaacaggtgcagtgagtgttcctatttatcaaacgtcaacctttgaacaaaatggcgtgggccagccaaaagaatatgaatattctcgttcaggtaatcccacacgtcacgcgttagaaaccttaatcgctgagttagaaggtgggagccatggctttgcgtttagctcaggcttagctggtatccatgcaatcatttctatgtttggacccgaagatcatattttattaggtgacgatgtctatggggggagtttccgtttattggataaagtatttgtagcaaatgggttaagctacacgattgtaaacgccagcgacttatcaacaattgaagccgcaattcagccaaatacaaaagccttgtttttggaaacaccaagtaatccactgttaaaaattacagatattgaagcggcagctaagcttgctaaaaaacatcagttgttaactattgtcgataatacatttgcgacaccttattttcaacggccgttagcgttaggtgctgatattgtggttcacagcgggacaaaatatttagggggccatagtgatgtagtctctggtttagtcgtaacgaatcatccagaaagcgcagaaaagattgcctttttacaaaatgcgattggtgctgttttaggaccacatgatagttggctggtccaacgtagtttaaaaacattaggcgtccggatggcagcgcatgcccaaaatgctcaaaaaatcgcagaatttttagaagcgcatccagcggtagcaacggtgtattatccaggactagcgagtcatcctggtcacgaaattgcgcaaaaacagatgtcgggatttagtggcatgatttcttttgaattagccaaggatgagcaagtcgttcctttcgtagaagcgttggaaatttttactttagcggaaagtttaggtggcgtagaaagtttaattgaagtacctgccattatgactcacgcatctatccccaaagaaaatcgtgaagccgtgggaattaaagatggactcattcgtttatctgtaggaattgaagcagtcgaagatttattggctgatttagaaaagggattacaagcataa

SEQ ID NO: 13553 - protein, 378 aa, Enterococcus faecalis V583
MKFNTKLIHGGISKDTTTGAVSVPIYQTSTFEQNGVGQPKEYEYSRSGNPTRHALETLIAELEGGSHGFAFSSGLAGIHAIISMFGPEDHILLGDDVYGGSFRLLDKVFVANGLSYTIVNASDLSTIEAAIQPNTKALFLETPSNPLLKITDIEAAAKLAKKHQLLTIVDNTFATPYFQRPLALGADIVVHSGTKYLGGHSDVVSGLVVTNHPESAEKIAFLQNAIGAVLGPHDSWLVQRSLKTLGVRMAAHAQNAQKIAEFLEAHPAVATVYYPGLASHPGHEIAQKQMSGFSGMISFELAKDEQVVPFVEALEIFTLAESLGGVESLIEVPAIMTHASIPKENREAVGIKDGLIRLSVGIEAVEDLLADLEKGLQA

SEQ ID NO: 13554 - DNA, 1164 bp, Coxiella burnetii RSA 493
  CDS (1)..(1164): transl_table=11
gtgacagctaacaacaataaaaaatcacacatcgatacacgtgtcattcacgccggacaaaaaccggaccccttaaccggcgccgtcatgacgcccatctataccgcttccacttatgcgcaaaaaagtccaggcgttcatcaagggtacgaatattctcgcagccaaaatccgacgcgctttgcttatgaacgttgtgttgcggatttagagtctggacaacacggttttgcttttgcgtcaggaatggccgccaccgccactattttagaactcttgcaaccgggcgatcatgtagtggtgatggacgacgtttatgggggctcctatcgtttatttgaaaatgtacgaaagcgatcagccggcctttctttttcgttcgtcgatttcacggacgaaaataaagtgcgagaagccgtcaccgcaaaaactaaaatgttgtgggtagaatcaccaagcaatcctcggcttaaaatcgttgatcttgcaaaaattgcggaaatcgcaaaagaaaaaaatatcatcgcggttgccgacaacaccttcgccacaccgattattcaacgcccattagaattaggcttcgatatcgttacacattcggcaacaaaatatttaaatggccattctgatatcatcggcggcgtagccgtggtgggcgacaataaaactttagccgaacaattaaaatatttacaaaacgccataggcgctatcgccgcgcctttcgatagttttatggttttacgcggattaaaaacgttagccattcgaatggaacgccattgtgaaaatgcgatgcagttagcccaatggctagaaaaacaccccaaagtaaaacgcgtttattaccctggcttaccaagccacccccagcactcgattgctaaaaaacaaatgcgttattttggcggcatgatttctgtcgaactaaaatgcgatttaaatgagactaaaaaagtactcgaacgctgccaactgttcaccttagcggaaagcctcggcggtgttgaaagcctcatcgaacaccccgccataatgacccacgcctccattccacaagcagaacgccaaaaactgggcataacggatggttttatccgcctctccgttggcatcgaagcgataactgatttgcgccacgatctagaagcagcgctttaa

SEQ ID NO: 13555 - protein, 387 aa, Coxiella burnetii RSA 493
MTANNNKKSHIDTRVIHAGQKPDPLTGAVMTPIYTASTYAQKSPGVHQGYEYSRSQNPTRFAYERCVADLESGQHGFAFASGMAATATILELLQPGDHVVVMDDVYGGSYRLFENVRKRSAGLSFSFVDFTDENKVREAVTAKTKMLWVESPSNPRLKIVDLAKIAEIAKEKNIIAVADNTFATPIIQRPLELGFDIVTHSATKYLNGHSDIIGGVAVVGDNKTLAEQLKYLQNAIGAIAAPFDSFMVLRGLKTLAIRMERHCENAMQLAQWLEKHPKVKRVYYPGLPSHPQHSIAKKQMRYFGGMISVELKCDLNETKKVLERCQLFTLAESLGGVESLIEHPAIMTHASIPQAERQKLGITDGFIRLSVGIEAITDLRHDLEAAL

SEQ ID NO: 13556 - DNA, 1155 bp, Streptomyces avermitilis MA-4680
  CDS (1)..(1155): transl_table=11
atgagcgacaggcacatcagtcagcacttcgagaccctcgcgatccacgcgggcaacaccgccgatcccctgaccggcgcggtcgtcccgccgatctaccaggtctcgacctacaaacaggacggcgtcggggggctgcgcggcggctacgagtacagccgcagcgccaaccccaccaggaccgccctggaagagaacctcgccgccctcgagggcggccgccgcggcctcgcgttcgcgtccggactggcggccgaggactgcctgttgcgtacgctgctcagccccggcgatcacgtggtcatccccaacgacgcgtacggcggaacgttccgtctcttcgcgaaggtcgtctcccggtggggcgtggagtggtcggtcgccgacaccagcgaccccgaggccgtccgggccgcgatcaccccgaagaccaaggccatctgggtggagaccccgtccaacccgctcctcggcatcaccgacatccccgcgatcgcccagatcgcgcgcgaggccggcgccaagctggtcgtcgacaacaccttcgccaccccctacctccagcagccgctcgcgctcggcgcggacgtcgtcgtgcactcgctgaccaagtacatgggcggccactcggacgtcgtcggcggtgcgctcgtggtgagtgaccaggagctgggcgaggagctcgcctaccaccagaacgcgatgggcgcggtcgccgggcccttcgactcctggctggtactgcgcggcaccaagacgctctccgtgcgcatggaccggcacagcgagaacgccaccaaggtcacggagatgctcacccggcacgcgcgcgtgacgcgcgttctgtacccgggcctgccggagcaccccggtcacgagatcgccgccaagcaaatgcgggcgttcggcggcatggtctccttccaggtcgagggcggcgaggaggcggccgtcgaggtctgcaaccgcgccaaggtcttcaccctcggcgagtccctgggcggcgtcgagtccctgatcgagcaccccgggcggatgacgcacgcgtccgcggccggctccgcgctcgaggtccccgccgacctcgtacgcctctccgtgggcatcgagaacgtcgacgacctgcttcaggacctccagcaggccctgggctag

SEQ ID NO: 13557 - protein, 384 aa, Streptomyces avermitilis MA-4680
MSDRHISQHFETLAIHAGNTADPLTGAVVPPIYQVSTYKQDGVGGLRGGYEYSRSANPTRTALEENLAALEGGRRGLAFASGLAAEDCLLRTLLSPGDHVVIPNDAYGGTFRLFAKVVSRWGVEWSVADTSDPEAVRAAITPKTKAIWVETPSNPLLGITDIPAIAQIAREAGAKLVVDNTFATPYLQQPLALGADVVVHSLTKYMGGHSDVVGGALVVSDQELGEELAYHQNAMGAVAGPFDSWLVLRGTKTLSVRMDRHSENATKVTEMLTRHARVTRVLYPGLPEHPGHEIAAKQMRAFGGMVSFQVEGGEEAAVEVCNRAKVFTLGESLGGVESLIEHPGRMTHASAAGSALEVPADLVRLSVGIENVDDLLQDLQQALG

SEQ ID NO: 13558 - DNA, 1242 bp, Streptomyces avermitilis MA-4680
  CDS (1)..(1242): transl_table=11
gtggacgacggccggggcgccggcggcttcgggggcgggcccgcggtgcgggcgctggacaccgaggccgtgcacgccgggcgggacgacctcgcccggcagggtctgcacgccgcgccgatcgacctgtccacgacctacccctcgtacgacagccgtgcggaggcggcccgcatcgacgccttcgccgccgacggcgcggagccggccgggccgcccgtctacggccggctgggcaacccgaccgtggcccgcttcgagaccgccctcgcccggctcgagggcacggacagcgcggtcgcgttcgcgagcggcatggcggcgctgagcgcggtgctgctcgtacggaacgccatgggcctgcggcatgtcgtcgccgtacggcccctgtacggctgtagcgaccatctgctgaccgccggactgctcggctccgaggtgacctgggtcgacccggcgggcgtcgcggacgccctgcgccccgacaccggtcttgtcatggtggagtcaccggccaacccgacgctggccgaactcgatctgcgggcgctcgcccacgcctgcggctccgtaccgctgctggcggacaacaccttcgccacccccgtgctgcaacgccccgccgaacacggcgcccggctcgtgctgcacagcgccaccaaatacctgggcggccacggggacgtgatggccggagtggtggcctgcgacgaggagttcgcccgggggctgcgccagatccgcttcgcgacgggcggggtgctccatccgctcgccggctatctgctgctgcgcggtctctcgacgctcccgatacgtgtacgggccgcctcctcgaacgccgccgaactcgcccgtcggctcgccgccgacccgcgggtcgcccgcgtccactatccccgcatcggcggcgccatgatcgccttcgaggtgtacggcgatccccatgaggtcatcgccggggtccgcctgatcacccccgccgtgagcctcggcagcgtcgacagcctcatccagcacccggcgtccatcagccatcgcatcgtggacgcggcggaccgccggggtgccggagtgagcgaccggctgctgcggctgtcggtgggcctcgaggacgtcgaggacctgtgggcggacctggacggggcgctggggacggaccggctccccgagacggcgggagcgggccgcgaaccgtcgcggaccgcgctccggctcccggagcgggccgcggaccgatag

SEQ ID NO: 13559 - protein, 413 aa, Streptomyces avermitilis MA-4680
MDDGRGAGGFGGGPAVRALDTEAVHAGRDDLARQGLHAAPIDLSTTYPSYDSRAEAARIDAFAADGAEPAGPPVYGRLGNPTVARFETALARLEGTDSAVAFASGMAALSAVLLVRNAMGLRHVVAVRPLYGCSDHLLTAGLLGSEVTWVDPAGVADALRPDTGLVMVESPANPTLAELDLRALAHACGSVPLLADNTFATPVLQRPAEHGARLVLHSATKYLGGHGDVMAGVVACDEEFARGLRQIRFATGGVLHPLAGYLLLRGLSTLPIRVRAASSNAAELARRLAADPRVARVHYPRIGGAMIAFEVYGDPHEVIAGVRLITPAVSLGSVDSLIQHPASISHRIVDAADRRGAGVSDRLLRLSVGLEDVEDLWADLDGALGTDRLPETAGAGREPSRTALRLPERAADR

SEQ ID NO: 13560 - DNA, 1164 bp, Bacillus cereus ATCC 14579
  CDS (1)..(1164): transl_table=11
atgagctattctatagatacactcttactacacaaccaatataaacacgactcgcaaacaggcgctgtgaacgttcctatttataatacatcaacttttcaccagtttgatgtagatacgttcggaaaatatgactatagcaggtcaggaaatccaactcgtgaagctcttgaagatatcattgctttattagaaggcggaacaaaaggattcgcctttgcatcaggcattgcagcgatttccactgcattcctccttctttcacaaggtgatcacgtactcatttcagaagatgtgtacggaggcacttaccgagtgataactgaggtactctcccgttacggtgtttcacatacatttgttgatatgaccaatttagaagaaataaaacaaaacattaaaccaaatacaaagctcttttatgtagaaacaccttctaacccacttttaaaagtgacagatattcgcgaggtttctaaactcgcaaaatctattggcgctcttacttttgttgataatacatttttgacaccactattccaaaaaccacttgaacttggagctgatgtcgttcttcatagtgctacaaaatttattgctggtcatagtgatgttactgccggattagcagtagtaaaagattcagaactcgctcaaaagcttggatttttacaaaatgcattcggtgctattttaggacctcaagattgttctctcgtacttcgcggtctaaaaacattgcatgtacgcctcgaacattcagctaaaaatgccaataaaatcgcacattatttacaagagcactctaaagtaaaaaatgtctattatccgggattacaaactcatctcggatttgatattcaacaatctcaagcaacatcagctggagcggtcttatcgtttactttgcagtcagaagatgcactccgcaaatttttatcaaaagtaaaattacctgtttttgcagttagtttaggagctgtagagtcaattctttcttatccagcaaaaatgtcacatgcagcactgtcgcaagaagctcgtgataaaagaggaatctctaattcattacttcggttatcagtcggtcttgaaaatgttaacgatttaatatccgattttgaaaatgccctttcttatgtagaagaacctgtaaatgcatag

SEQ ID NO: 13561 - protein, 387 aa, Bacillus cereus ATCC 14579
MSYSIDTLLLHNQYKHDSQTGAVNVPIYNTSTFHQFDVDTFGKYDYSRSGNPTREALEDIIALLEGGTKGFAFASGIAAISTAFLLLSQGDHVLISEDVYGGTYRVITEVLSRYGVSHTFVDMTNLEEIKQNIKPNTKLFYVETPSNPLLKVTDIREVSKLAKSIGALTFVDNTFLTPLFQKPLELGADVVLHSATKFIAGHSDVTAGLAVVKDSELAQKLGFLQNAFGAILGPQDCSLVLRGLKTLHVRLEHSAKNANKIAHYLQEHSKVKNVYYPGLQTHLGFDIQQSQATSAGAVLSFTLQSEDALRKFLSKVKLPVFAVSLGAVESILSYPAKMSHAALSQEARDKRGISNSLLRLSVGLENVNDLISDFENALSYVEEPVNA

SEQ ID NO: 13562 - DNA, 1134 bp, Bacillus cereus ATCC 14579
  CDS (1)..(1134): transl_table=11
atgagagcaaagacaaagttaattcatggtattcgcataggagaaccttcaactggatctgtaaacgtaccgatttatcaaacaagtacgtacaaacaagaagcagttggtaagcatcaaggatatgaatattcacgtacaggtaacccaacacgtgcagctttagaagaaatgattgctgtattagaaaatgggcatgctggatttgcatttggttcaggaatggctgctattacagcgacaattatgttgttctcaaaaggtgaccacgttattttaacagatgatgtgtatggcggaacataccgcgttattacgaaagtattaaaccgtttcggtattgagcatacatttgtagatacaacaaacttagaggaagttgaagaagcgattcgtccaaatacgaaagcaatttatgtagaaacaccaacgaacccactactaaaaattactgatattaagaaaatatctactcttgctaaagagaaagacttattaacaattatcgataacacattcatgacgccatattggcagtcgccgatttctttaggagcagatattgtgcttcatagtgcaacgaaatatttaggaggtcatagtgacgtagttgcaggtctagtagttgtaaatagcccacaactagcagaagatcttcactttgtacaaaactcaacaggcggtattcttggaccacaagatagcttcttactacttcgtggtttaaaaacgttaggaattcgtatggaagaacatgaaacgaattcacgcgctattgctgagttcttaaataatcatccaaaagtaaataaagtatattacccaggtcttgaatcacatcaaaaccacgaattagcaacagaacaagcaaatggatttggtgctattatctcatttgatgtagatagtgaagagacattaaataaagtacttgagaaattgcagtactttacacttgctgaaagtttaggagcagtagaaagtttaatttctattccatctcaaatgacacatgcatcaatcccagctgatcgccgcaaagaattaggaattacagatacattaattcgtatttctgtcggtattgaagatggtgaagatttaattgaagatttagcacaagcgttagcataa

SEQ ID NO: 13563 - protein, 377 aa, Bacillus cereus ATCC 14579
MRAKTKLIHGIRIGEPSTGSVNVPIYQTSTYKQEAVGKHQGYEYSRTGNPTRAALEEMIAVLENGHAGFAFGSGMAAITATIMLFSKGDHVILTDDVYGGTYRVITKVLNRFGIEHTFVDTTNLEEVEEAIRPNTKAIYVETPTNPLLKITDIKKISTLAKEKDLLTIIDNTFMTPYWQSPISLGADIVLHSATKYLGGHSDVVAGLVVVNSPQLAEDLHFVQNSTGGILGPQDSFLLLRGLKTLGIRMEEHETNSRAIAEFLNNHPKVNKVYYPGLESHQNHELATEQANGFGAIISFDVDSEETLNKVLEKLQYFTLAESLGAVESLISIPSQMTHASIPADRRKELGITDTLIRISVGIEDGEDLIEDLAQALA

SEQ ID NO: 13564 - DNA, 1176 bp, Nitrosomonas europaea ATCC 19718
  CDS (1)..(1176): transl_table=11
atgacgaacgatctggatccggaaacactggccattcataccggtgttcaccgcagtcaattcaatgaacattcggaatcactttacctgacctcgagttttgtatttgacagtgctgcccaggctgcagcgcgtttttccggacaagagcccgggaatatctattcgcgtttcactaacccgaccgtgactgcaatgcaggaacggctggctgttctggagggtgcagaagcctgtattgcgactgcttccggtatgtctgccattctcacctgtgtcatgggcctgttgtctgccggggatcatatcgttgcttctcgcagcctgtttggatctactgtcagtctgttcaacaatattctcagtcgcttcggtattcaaacgacatttgtttcagcgacggatcctgctgaatggcaggctgcagtcaggcccaacaccaggttgtttttcctggaaacaccttccaatccgctgactgagatttccgatattgctgcactggcagaaatagccaaacgagccggtgtgtggctggcagtggataactgtttctgtacgccgatcatacagcagccactcaagctgggtgcggatctggtgattcattcagcaacgaaatatctggacgggcagggcagagtactggggggggccatcctgggtaaacgtgatttactcatggacagcggcatattcagttttctgcgtactgccggcccgtctctgagtgcattcaatgcctggatcatcctgaaagggatggaaacattgagccttagagtaaaggcgcattcggatcatgcactggaagtggcacgctggctggaaacccatccccgggtggggcgtgtgttttatcccggtctgccatcacatccgcaacatgagcttgcaatgcgccagcagaaaacaggagggggtatcgtttcgttcgaggtgaaaggcggcagggaggctgcctggcgtgttgtcgatgccgcccggctgatgtcgattacagccaatcttggtgataccaaaagtacactgacgcatcctgctaccacgactcacggacgaatcagtcaggaagcacgtgaagctgccggaatcagggatggtttgctgcgtatcgcggtaggtctggaatcaccagatgacctcaaggccgatcttgctcgcggattgcaataa

SEQ ID NO: 13565 - protein, 391 aa, Nitrosomonas europaea ATCC 19718
MTNDLDPETLAIHTGVHRSQFNEHSESLYLTSSFVFDSAAQAAARFSGQEPGNIYSRFTNPTVTAMQERLAVLEGAEACIATASGMSAILTCVMGLLSAGDHIVASRSLFGSTVSLFNNILSRFGIQTTFVSATDPAEWQAAVRPNTRLFFLETPSNPLTEISDIAALAEIAKRAGVWLAVDNCFCTPIIQQPLKLGADLVIHSATKYLDGQGRVLGGAILGKRDLLMDSGIFSFLRTAGPSLSAFNAWIILKGMETLSLRVKAHSDHALEVARWLETHPRVGRVFYPGLPSHPQHELAMRQQKTGGGIVSFEVKGGREAAWRVVDAARLMSITANLGDTKSTLTHPATTTHGRISQEAREAAGIRDGLLRIAVGLESPDDLKADLARGLQ

SEQ ID NO: 13566 - DNA, 1350 bp, Arabidopsis thaliana
  CDS (1)..(1350)
atgacatcttctctgtcacttcactcctccttcgtaccttccttcgctgatctctccgaccgaggtttgatcagtaagaactctccgaccagtgtttccatttccaaggttccaacttgggagaagaagcagatctcaaatcggaactctttcaagctgaattgcgtgatggagaaaagtgtcgatgctatgaatatcaaagaagaagctagcgtctctacattattggtgaacttggataataaatttgatccctttgatgcaatgagcactccgctttaccaaactgctacttttaagcagccttctgctattgaaaatggaccttatgattatacaagaagtggcaatcctacacgggatgcattggaaagcctccttgcgaagcttgacaaggcagatagagcattttgctttactagcggaatggctgctcttagtgctgttacacatcttatcaaaaatggcgaagaaattgttgctggagatgatgtatatggtggctctgacagattactatcccaagttgttccaagatctggcgttgtggtaaaacgagtaaacacaactaagttagacgaggttgctgctgcaattggtccccaaacaaagcttgtgtggcttgagtctccaacaaacccaagacaacaaatttctgatatacgaaaaatatctgagatggctcatgctcaaggtgctcttgtgttggtggacaacagtattatgtcaccagtgctctctcggccattagaacttggagctgacatcgtgatgcactcggctactaagtttatagccggacacagtgacgtgatggcaggtgtgcttgctgtaaaaggcgaaaaattggcaaaggaggtgtatttcctccaaaactcagaaggttctggattagctcctttcgactgttggctttgccttcgaggaatcaagacaatggctttacggatagaaaagcaacaggaaaacgcacggaaaattgcaatgtacttgtcttctcatccaagagtaaagaaagtgtactatgctggtctaccagatcatcctggtcaccatctccacttctctcaggcgaagggtgcaggatcagtttttagctttataactggatcagttgcgctttcaaagcatctcgtagaaaccaccaaatacttcagcatagctgtcagttttgggagtgttaagtcactgataagcatgccatgcttcatgtcacatgcaagcatacctgcagaagttcgtgaggccagaggtttgacggaagatcttgtccgtatatctgcaggaattgaagatgttgatgatttgatatctgatcttgacattgccttcaaaaccttccctctctag

SEQ ID NO: 13567 - protein, 449 aa, Arabidopsis thaliana
MTSSLSLHSSFVPSFADLSDRGLISKNSPTSVSISKVPTWEKKQISNRNSFKLNCVMEKSVDAMNIKEEASVSTLLVNLDNKFDPFDAMSTPLYQTATFKQPSAIENGPYDYTRSGNPTRDALESLLAKLDKADRAFCFTSGMAALSAVTHLIKNGEEIVAGDDVYGGSDRLLSQVVPRSGVVVKRVNTTKLDEVAAAIGPQTKLVWLESPTNPRQQISDIRKISEMAHAQGALVLVDNSIMSPVLSRPLELGADIVMHSATKFIAGHSDVMAGVLAVKGEKLAKEVYFLQNSEGSGLAPFDCWLCLRGIKTMALRIEKQQENARKIAMYLSSHPRVKKVYYAGLPDHPGHHLHFSQAKGAGSVFSFITGSVALSKHLVETTKYFSIAVSFGSVKSLISMPCFMSHASIPAEVREARGLTEDLVRISAGIEDVDDLISDLDIAFKTFPL

SEQ ID NO: 13568 - DNA, 1152 bp, Helicobacter hepaticus ATCC 51449
  CDS (1)..(1152): transl_table=11
atgaaaagcacgcttgatacattgctgatacacgggggagcaaccacagacccacgaacaggtgcagttaatatccctatctatcaaacttctacctatgcccaaagtgcgctcggagaacatttaggatatgaatactcacgcactaagaatccaacgcgagatggcattgagagccttattgcccaatgtgagggtggaaaatttggcttcgcttttgcttcgggtatggcagctattggcacgattttaagtctctttcaaagtggagattgcattatcatttcaaataatgtctatggtggcacttttagaatcttagataaagttttttcacattttaatattagctataaaattgttgatacacgtgatttgaaagcattagaatctgctattacgcctgaagtcaaagctgtgcttattgaaactccagcaaatccgcttctaagtgttacgcctttagagcaggttgctatacttgcgaaaaaaaaaggtattttaagcattgtagataatacctttatgacgccttatttacaaaaacctttagagcttggcattgatatcgtgatgcattcagcaacaaaatatcttggaggacatagcgaccttatagcaggactcgtagttgtaaatgattctgcacttgcagaacgtatcggctttttacaaaatagtattgggggagtgttagcaccttttgatagctttttgcttattcgcggtatgaaaacactcggggtgcgtctccagcgccattgtgaaaatgctctctttttagcacaagcacttagcgagcatagtggggttgaaaaggtatattatcccggacttaaaagtgatgaaggctatcaaatacaaaactcacaggctcgtagcggtggaggaatgctaagttttgaactcaaaaaaaattatgattatagaatcttttttaaatccacgcaaacaatcgttttagccgaaagtttaggaggtgtagaatccttgctttgccaccctgcatctatgactcatgcttcaatccccaaagatgtgcgtgagcgtatgggtataagcgaacatcttatccgcctttctgttggtattgaatatgcacaagatttacttgatgatttaaatcaagccattaaaaaagcaaaggtatag

SEQ ID NO: 13569 - protein, 383 aa, Helicobacter hepaticus ATCC 51449
MKSTLDTLLIHGGATTDPRTGAVNIPIYQTSTYAQSALGEHLGYEYSRTKNPTRDGIESLIAQCEGGKFGFAFASGMAAIGTILSLFQSGDCIIISNNVYGGTFRILDKVFSHFNISYKIVDTRDLKALESAITPEVKAVLIETPANPLLSVTPLEQVAILAKKKGILSIVDNTFMTPYLQKPLELGIDIVMHSATKYLGGHSDLIAGLVVVNDSALAERIGFLQNSIGGVLAPFDSFLLIRGMKTLGVRLQRHCENALFLAQALSEHSGVEKVYYPGLKSDEGYQIQNSQARSGGGMLSFELKKNYDYRIFFKSTQTIVLAESLGGVESLLCHPASMTHASIPKDVRERMGISEHLIRLSVGIEYAQDLLDDLNQAIKKAKV

SEQ ID NO: 13570 - DNA, 1194 bp, Rhodopirellula baltica SH 1
  CDS (1)..(1194): transl_table=11
atgagctcttccaactcgaaccacaagtttcgaactcgcgcgattcatgtcggcaacgaagtggatccacaaaccggcgcggttgttccgcccattcacttcgccagtacgtttcgacaacccggtgcgggtgagtggggacaatacgactattcgcgtagcggcaacccaactcgaacgggcctgcaagacacgctctcctcgctggaaaatggttgtggatcgcttgcgttttcgtccggcatggctgccattcacgcggtcaccatgctgttggaatcgggcgatcacgtcgtcgcgggatctgatatctacggtggtgcctaccgactgctacaccagatctgcaatcgcagcggtatcgaagtcaccttggtcgacgtcaccgatttacaggcaatcgaaaacgcaatcaccgatcggaccaaactgatctggaccgaatcgatcggtaatccccgcatgacgatttccgatttaccagccatcgctcgcctagccaaatccaaaggaatcctttcgggtgtcgacaacacattcggcaccccggcacttttgcggccgctggacttcggcatcgacatcgtcatgcactcggcaacgaagtacctgggcgggcacagcgattgtctgggtggcaccctcgcggtcgcggattccgagctttatgaccaactctattttgtccaaaacgcgactggcgccgtgctcgacccgatgagcagtttcttgatcgctcgcgggctgaagactctcgatctgcgtgttcgcgaacaatcaagaacggcgcttcgattggcgaaatggctggaagcccatcccatggttcgatcggtgctttacccaggcttgccatcgcacaaccagcacgaacttgcccgccaactgttcggacaacatcaaagtgactcagaagaaacacacttcggcgctatgatcacgttcgaactggatgcgaccttggaccaagttcgcgaggtttgccaatcgaccgaattattccacctggcggtcagcctcggtgcggtggaatccttgatcgagcaacccgccacgatgtctcacgcttcctacgctccggaagctcgtgcggctcacgggatcacggattcattgatccgtctttcggtcggcctagaatctccttccgatctggaagccgatttggaacgcgcgatcgccattatcgggtag

SEQ ID NO: 13571 - protein, 397 aa, Rhodopirellula baltica SH 1
MSSSNSNHKFRTRAIHVGNEVDPQTGAVVPPIHFASTFRQPGAGEWGQYDYSRSGNPTRTGLQDTLSSLENGCGSLAFSSGMAAIHAVTMLLESGDHVVAGSDIYGGAYRLLHQICNRSGIEVTLVDVTDLQAIENAITDRTKLIWTESIGNPRMTISDLPAIARLAKSKGILSGVDNTFGTPALLRPLDFGIDIVMHSATKYLGGHSDCLGGTLAVADSELYDQLYFVQNATGAVLDPMSSFLIARGLKTLDLRVREQSRTALRLAKWLEAHPMVRSVLYPGLPSHNQHELARQLFGQHQSDSEETHFGAMITFELDATLDQVREVCQSTELFHLAVSLGAVESLIEQPATMSHASYAPEARAAHGITDSLIRLSVGLESPSDLEADLERAIAIIG

SEQ ID NO: 13572 - DNA, 1170 bp, Prochlorococcus marinus subsp. marinus str. CCMP1375
  CDS (1)..(1170): transl_table=11
ttggaatcaacagaacttaaggagggctcccacccaggaataaatacaagggtaattcatcacggtgaaagtttcgctaaaaccactggcacagttatgccgcctatatttcaaagctcaacttttagacaaggtaatgaagaaggatttgattacacccgctcaggaaatccaaactttcgaatattagagtctgttttagcatctttagaagattgcaagtattcaacagtttttggttccggagtaagtgctattacggctatcgcaagttcccttaaatcaggagatcttgtcttatgtgaggaaaacctttatggctgtacagttcggttatttgaaaaggtatttagtaaattcggtctgcgaactaaatggttagatttctcgaacccatcttgcttcgatgagattaagaagctaagcccagcaatgatttggttagaaagtccaactaatcctctattaaaagttcttgatttgaagacaatttgtacgaaagcaaaagagaatcaaatcccagtagtagttgacaacacattctctacggccattttacaaaaaccattggacctaggagcaagcctgtctctcacaagtacaacaaagtacattaatgggcattctgatgccttaggtggcgcagtgtgcactcaagactcttattggcatgagcaaatgagatttgctcaaaaagctttaggactgcaagcctctccatttgattgttggctaatcactagaggcgttaaaactctccctcttcgtttgcaaaggcaagtttccaatgcaacatctcttgctaatcaattagctaagaatgaatatgtgcaatggattagctatccatttagatcagaccaccctcaatatgaaattgcaaaaaagcaaatggcagcaggaggggcaattatcacaatcagactgaaagcaaatcttgatcaaacttatgcattttgtgaaaggcttaaatatttcaccatggctgagagccttggaggagtggaaagtcttgtttgccatccagccactatgactcatgcatcagtatcatctcaaacaaaagaaaagttaggcatcagcgaatcactagttcgcttttcaataggatgtgaagacgttttagatctcgatcaagatctaaaacaaagtttagaaaaactgaagtga

SEQ ID NO: 13573 - protein, 389 aa, Prochlorococcus marinus subsp. marinus str. CCMP1375
MESTELKEGSHPGINTRVIHHGESFAKTTGTVMPPIFQSSTFRQGNEEGFDYTRSGNPNFRILESVLASLEDCKYSTVFGSGVSAITAIASSLKSGDLVLCEENLYGCTVRLFEKVFSKFGLRTKWLDFSNPSCFDEIKKLSPAMIWLESPTNPLLKVLDLKTICTKAKENQIPVVVDNTFSTAILQKPLDLGASLSLTSTTKYINGHSDALGGAVCTQDSYWHEQMRFAQKALGLQASPFDCWLITRGVKTLPLRLQRQVSNATSLANQLAKNEYVQWISYPFRSDHPQYEIAKKQMAAGGAIITIRLKANLDQTYAFCERLKYFTMAESLGGVESLVCHPATMTHASVSSQTKEKLGISESLVRFSIGCEDVLDLDQDLKQSLEKLK

SEQ ID NO: 13574 - DNA, 1158 bp, Candidatus Blochmannia floridanus
  CDS (1)..(1158): transl_table=11
atgaaaaataataagtcaactgttagtgttagaagcggtttaaataatgataaacaacatggttgtgttgtatctcctattactttatcaacaacttataatttttttgagtttaataaacctaggctttatgattattcaagacgaaaaaatcctactcgcgatatagttcagaaaactgtagcagatttagaacaagggaaaaatgcaattattacaagtagtggtatgtcagctatttatttaatatgtatagctttgctaaattcagatgattgtctaatagctccgtatgattgttatggaggtacatatagattattaaatgcattaaattctaaaaaagtatgtcgggtacagttcgttaatcaaaatgatactgagcttatgttgaaatgtttaaaacaaaaagatgttaaattagtttttattgaaactccaagtaatcctatgcttcgtgtagtagatattcggtatatgtgtagtttaaaggaaagagatgatattgtttatgttgtagataatacttttatgactccaatttttcagaatcctttaaatttaggagcagatttagtagtacattcttgtagtaagtatttaaatggacattcagatgtaatattaggagcagttatttctaaagatatatatttacatgaaaagttaatgtggtggtcgaatgcactgggaattaccggaggtgcttttgatagttatcaattgttacgtggcattcgaacattatcgattcgagtttgtcaacaacagtgtaatactaaaaatattgttgattttttattaaaacaacctcaaattaagtctatatattatccgggattatatagtcatgttggatataaaatagcttgtcaacagcaaactggatttggatcaatatttagttttgaattaaaaggaactgagggtgtcgtatcaaagtttttaaaatcgttaaagttgtttactttagcggaatcttttgggggggtagagagtttaattgcacatccagagactatgactcatgctgctatgtcaaagcaatctcgcgatacagctgggatcaataatatgttgttgcgtgtatcggtaggtttagaagatagtgttgatttaattaatgatttggatcaagcattacaatcaatatcttaa

SEQ ID NO: 13575 - protein, 385 aa, Candidatus Blochmannia floridanus
MKNNKSTVSVRSGLNNDKQHGCVVSPITLSTTYNFFEFNKPRLYDYSRRKNPTRDIVQKTVADLEQGKNAIITSSGMSAIYLICIALLNSDDCLIAPYDCYGGTYRLLNALNSKKVCRVQFVNQNDTELMLKCLKQKDVKLVFIETPSNPMLRVVDIRYMCSLKERDDIVYVVDNTFMTPIFQNPLNLGADLVVHSCSKYLNGHSDVILGAVISKDIYLHEKLMWWSNALGITGGAFDSYQLLRGIRTLSIRVCQQQCNTKNIVDFLLKQPQIKSIYYPGLYSHVGYKIACQQQTGFGSIFSFELKGTEGVVSKFLKSLKLFTLAESFGGVESLIAHPETMTHAAMSKQSRDTAGINNMLLRVSVGLEDSVDLINDLDQALQSIS

SEQ ID NO: 13576 - DNA, 1194 bp, Bordetella pertussis Tohama I
  CDS (1)..(1194): transl_table=11
atgaccgacgaatcccgccacatcgacaccctgctccagcacctgggcaccgcgcccttcgaccccgataccggcgccgccccggtcaacctgccgtcgatgcgcgccagcacggtgcgctttcgtgacctggccgcgctggaacaggcgcagcgccgcaaggccggcggcgaccgggccgtgacctatggccggatgggcatggatacgcatgcggcgctggaacacgtgttcaaggagctggaagccggcacgcactgctacctggcgtcttcgggcatgggcgccgtcacgatggcgtttctgtcgctgctgtcggccggcgagcatgcgctggtggccgattgcgtctatggcccggtctacgaactggacaacgcggtgctcaagcgcatgggtatcgagctgaccttcttcgcgcccggcgacgacctgcaggcgctggtgcgtcccaacacccgcctgctgtatgtcgagtcgccggggtcgctgctgttccagatgctggatctgcccgcgctggccgagttcgcgcgccgcaaccagctggtgctggccaccgacaacacctggggctcgggctacatctatcgcccgctggaactgggcgcgcaggtttcggtgatcgccggcaccaagtacgtgggcggccactccgacctgatgctgggcgcggtggttaccaatgacgaggccgtggcgcagcgcctgaaccgcacgcagtacgccatgggctactcggtcagcgccgacgatgcctggctggcgttgcgcggcgtgcgtacgctgccgatacgcatggcccagcacgcgcgccacgcccagcgcgtgtgcgagttcctgcagggccgtcccgaggtcgcgcgcatctaccatccggcctggcctcaggaccccggccacgcgctgtggctgcgcgactgctccggctccaacggcatgctgacggtcgagctgcgcctgtcgcagcccgcggcgcgcgtgttcgtcgagtcgctgcagctgttcgacatcggcttctcgtggggcggcttcgaaagcctggtgcagctggtcacgcccggggagctggcccgccaccgctattggcagggcggcggcaatgcgctggtgcggctgcatatcgggctggagtcgcccgaggatgtcattgccgacctgacccaggcgctggcgcgcgcagcctcggcctga

SEQ ID NO: 13577 - protein, 397 aa, Bordetella pertussis Tohama I
MTDESRHIDTLLQHLGTAPFDPDTGAAPVNLPSMRASTVRFRDLAALEQAQRRKAGGDRAVTYGRMGMDTHAALEHVFKELEAGTHCYLASSGMGAVTMAFLSLLSAGEHALVADCVYGPVYELDNAVLKRMGIELTFFAPGDDLQALVRPNTRLLYVESPGSLLFQMLDLPALAEFARRNQLVLATDNTWGSGYIYRPLELGAQVSVIAGTKYVGGHSDLMLGAVVTNDEAVAQRLNRTQYAMGYSVSADDAWLALRGVRTLPIRMAQHARHAQRVCEFLQGRPEVARIYHPAWPQDPGHALWLRDCSGSNGMLTVELRLSQPAARVFVESLQLFDIGFSWGGFESLVQLVTPGELARHRYWQGGGNALVRLHIGLESPEDVIADLTQALARAASA

SEQ ID NO: 13578 - DNA, 1164 bp, Prochlorococcus marinus subsp. pastoris str. CCMP1986
  CDS (1)..(1164): transl_table=11
atgggaaataagaaaaatattatcaaaaagccaggtgttaaaaccttatcaattcatcatggagaaacattttctgaagaaactggatgtgtcatgccaccaattttttctacctcaacatttaaacatggtaataagggcaatttcgattacaccagatcaggtaatccaaactttaaaattctagaaaatatacttaaatccatagaagaatccaaatattgtacaatttttgggtctggcataagtgcagtaactgcaattacatcttcattaaaatcaggcgataaaatactatgcgagtcaaatctatatggttgtactgtaagaatgttcgataaaatattcaaaaaatttggaatacaagttttatatacagatttagcaaataaagaaaatttaaaaaaaattaaagactttcagccaactttaatctggctcgaaagtccaacaaatcctcttttgaaagtacttgatattaaacttatttgtgatgaagctaataagtacaaaatacctgttgttctagataataccttttctacagctcttattcaaaaacctctagaactaggcgcaacactatctcttataagtacaacaaaatttataaatggccatagtgatgcacttggtggagcagtcctaacaaacaatgaggaatggaatagtaagatgcttttctctcaaaaagctttaggacttcaaccctcgccttttgatacatggttaattacaagaggggtaaaaactctccctctaagaatcgaacaacaaacaaaaagtgcagagataatttctaaggaaattgcaaatcatagaataattagtaaagttttttatccctttaatcaaaaacatccacaatttaatttagcaaaatcacaaatgaaatctggtggttcaatgatcacccttaaattaaatttaaacaaatcggacacttttaaattttgtaaatcactcagatatttctcattagcagagagtcttggtggtgttgaaagtttaatttgccacccagcaacaatgactcatgcatctgttgatgacaaaacaaaaaacctcctaggtattgatgattcacttataagattgtcggtaggttgtgaagatacaaatgatttaatttcagatatcttatttgccttaaatagattctaa

SEQ ID NO: 13579 - protein, 387 aa, Prochlorococcus marinus subsp. pastoris str. CCMP1986
MGNKKNIIKKPGVKTLSIHHGETFSEETGCVMPPIFSTSTFKHGNKGNFDYTRSGNPNFKILENILKSIEESKYCTIFGSGISAVTAITSSLKSGDKILCESNLYGCTVRMFDKIFKKFGIQVLYTDLANKENLKKIKDFQPTLIWLESPTNPLLKVLDIKLICDEANKYKIPVVLDNTFSTALIQKPLELGATLSLISTTKFINGHSDALGGAVLTNNEEWNSKMLFSQKALGLQPSPFDTWLITRGVKTLPLRIEQQTKSAEIISKEIANHRIISKVFYPFNQKHPQFNLAKSQMKSGGSMITLKLNLNKSDTFKFCKSLRYFSLAESLGGVESLICHPATMTHASVDDKTKNLLGIDDSLIRLSVGCEDTNDLISDILFALNRF

SEQ ID NO: 13580 - DNA, 1170 bp, Prochlorococcus marinus str. MIT 9313
  CDS (1)..(1170): transl_table=11
gtggccccagctcaaaacgatcaacagcaggaggttgcagggatcagtacccgcgccatccaccacggcgaaagctttgcagcagagaccggtgccgtgatgccaccgatctttaccagttcaacctttgcccacggcaatcctcagggcttcgactacacccgttcaggcaatcccaatttccgcatcctcgaatcagtgttggcagccgtagaaagctgtcaattcgccactgtcttcgcttcaggggtgagcgccatcacagccatcgcctcaacactgcaagccggagatctggtgctctgtgaggaaaatctttacggctgcaccgtgcgcttattcgagcaggtttttagtcgttttggtgtacaaacagcctggttggatttcaccaatccatcagcgcttgatgccattgcagttcaaaaacccgcaatgatctggctggagagtccaaccaatcccctgctcaaagtgatcgatctagcagccgtctgtgatgccgctgcagcagaaaaaatcccagttgtagtcgacaacacgtttgccacagccctactgcaacaaccactgcagctgggcgccaccctctcactcaccagcaccaccaaatacatcaacggccattccgatgcccttggcggtgtggtctgcagcgacgacccgcaatggcagcaaaagatggtgttcgcacaaaaggccttgggattacaaccctccccatttgacgcctggttgattacgcgcggcatcaaaaccctgccactcaggctggaacgccacatcgctaatgctgccgccatcgctgatcaactggccagccatccacgcatgcactgggtgcgctatccattgcgttcagaccatccccagcaggctgtagcccgcaagcagatgagtggtggtggtgccattgtcacggtcagtctcgacgctgaccaaagccagacttacgccttctgcaagagcctgcgctatttcaccatggccgaaagcctgggcggtgttgaaagcctcgtttgtcatcccgccaccatgacccatgcctcagtcgatccagatgtcaagcgaaaacttggcatcgatgatggtctggtgcgcttctccgtgggctgcgaagacctcgctgatctcagcagagatttagatcaagccctcaaacagctgtag

SEQ ID NO: 13581 - protein, 389 aa, Prochlorococcus marinus str. MIT 9313
MAPAQNDQQQEVAGISTRAIHHGESFAAETGAVMPPIFTSSTFAHGNPQGFDYTRSGNPNFRILESVLAAVESCQFATVFASGVSAITAIASTLQAGDLVLCEENLYGCTVRLFEQVFSRFGVQTAWLDFTNPSALDAIAVQKPAMIWLESPTNPLLKVIDLAAVCDAAAAEKIPVVVDNTFATALLQQPLQLGATLSLTSTTKYINGHSDALGGVVCSDDPQWQQKMVFAQKALGLQPSPFDAWLITRGIKTLPLRLERHIANAAAIADQLASHPRMHWVRYPLRSDHPQQAVARKQMSGGGAIVTVSLDADQSQTYAFCKSLRYFTMAESLGGVESLVCHPATMTHASVDPDVKRKLGIDDGLVRFSVGCEDLADLSRDLDQALKQL

SEQ ID NO: 13582 - DNA, 1143 bp, Synechococcus sp. WH 8102
  CDS (1)..(1143): transl_table=11
gtgagcgaaggccttagcacccgggtgatccaccacggcgagagctttgccggggacaccggcaccgtgatgccgccgatcttccccaccagcacctttgcccatggcaatgcgggcggatttgattacacccgctcgggcaaccccaacttccgcatcctcgacagcgttctggcttcggtggaaggctgcgcccacgccaccgtgttcgcctccggcgtcagcgctatcaccgctgtggtctcccaactaaaacagggtgatctggtgctctgcgaggagaacctctacggctgcaccgtgcggctgttcgagcaggtgttcgccaagttcgggttgaagaccgcttgggtggacttcacccagccagccgcactggagcagatccaagctcagacgccggcaatggtgtggctggagagccccaccaaccctttgctcaaggtgatcgacctggaggcggtctgtgccatcacccaacccctgggtatccccgtggtggtcgacaacaccttcgccaccgccctggtgcagcgccccctcgatctgggcgccaccctctcgctcaccagcaccaccaaatacatcaacggccactccgatgccctcggtggagcggtctgcaccaacgatcacgagtggcaccaaaagatggtgttctcccagaaggccctggggctgcagccctccccctttgattgctggttgatcacgcggggcatcaagaccctgccattgcgactcaagcagcagatggccaatgcagcggccctggccgatcagttagctgatcacgccaaggtgaactgggtgcgttacccccaccgcagcgatcaccctcagcatcaggtggcgacccgtcagatgcgcgccggcggagccatcgtgacggtgagcttcaacgcctgccaggagcagacctatgccctctgcaaacaactgcgctggttcaccatggccgaaagtctgggcggcatcgaaagcctgatctgccacccagccaccatgacccacgccgctgtctctgccgaggtgaaggccaagctgggcattgacgatggcctggtgcgcttctcagtgggctgtgaagacctcgccgatctgcaggccgatctggagcaggccctggagttgctggcgtga

SEQ ID NO: 13583 - protein, 380 aa, Synechococcus sp. WH 8102
MSEGLSTRVIHHGESFAGDTGTVMPPIFPTSTFAHGNAGGFDYTRSGNPNFRILDSVLASVEGCAHATVFASGVSAITAVVSQLKQGDLVLCEENLYGCTVRLFEQVFAKFGLKTAWVDFTQPAALEQIQAQTPAMVWLESPTNPLLKVIDLEAVCAITQPLGIPVVVDNTFATALVQRPLDLGATLSLTSTTKYINGHSDALGGAVCTNDHEWHQKMVFSQKALGLQPSPFDCWLITRGIKTLPLRLKQQMANAAALADQLADHAKVNWVRYPHRSDHPQHQVATRQMRAGGAIVTVSFNACQEQTYALCKQLRWFTMAESLGGIESLICHPATMTHAAVSAEVKAKLGIDDGLVRFSVGCEDLADLQADLEQALELLA

SEQ ID NO: 13584 - DNA, 1185 bp, Chromobacterium violaceum ATCC 12472
  CDS (1)..(1185): transl_table=11
atggcatccgacgcgccgcatcttccgctgcaccctgaaaccctggccatccgggccgggttggaaaccagccagttcaacgagcacagccagggcctgttcctgacgtccagcttcacctacgaatcggccgcgcaggcggcggcgatgttcctgggcgagatcgacggctacacctattcccgcttcaccaatccgaccgtcgccgcgttccagcataggctggcgcagatggagggcggggagcgcgccatcgccaccgccaccggcatggcggcgatccaggccatcatgatgactttgctgcaggctggcgaccacatcgtgtcgtcgcaaagcctgttcggctccaccaccaatctgttcgccaaccagttggccaagttcgccgtggccaccgacttcgtcgacgcgcgcgacctgtccgcctggcgggaggcgctgcggccgaacaccaagctgctgttcctggagacgccgtccaatcccttgaccgaagtggccgacatcgcggccatcgccgacatcgcccacgcgcatggcgcgctgctggtggtggacaacagcttctgttcgccggccttgcagcagccgttgaaactgggcgccgatctggtcatgcattccgccaccaagttcatcgacggccatggccgggtgatgggcggggcggtggtcggcagcgacaagctggtcgagcaggtctatttgcacgtgcgcgccgccggtccctcgctggcgccgttcaatgcctggacgctgctgtccggtttggagacgctgcacctgcggatggagaagcacagcgccaacgcgctggagctggcgcgctggctggaggcgcagcccaatgtggagcgcgtctattacccgggcctggagagccacccccagcacgagctggcgctgcgccagcagaagagcggcggagcggtggtgtccttcgtggtcaagggcggccgcaaggccgcgtggaaagtggtggacgcggtcagggtgatctcgcgcaccgccaatctgggcgatgtgaaaaccaccctcactcatccggccagcaccacccacgcccgcgtgacgcaggaggcgcgcgagcgcgccggcatcgtcgaggggctgttgcgcgtcagcgtcggcctggaaaatgtacgggaccttcaacaagatctgttgcggggccttgactaa

SEQ ID NO: 13585 - protein, 394 aa, Chromobacterium violaceum ATCC 12472
MASDAPHLPLHPETLAIRAGLETSQFNEHSQGLFLTSSFTYESAAQAAAMFLGEIDGYTYSRFTNPTVAAFQHRLAQMEGGERAIATATGMAAIQAIMMTLLQAGDHIVSSQSLFGSTTNLFANQLAKFAVATDFVDARDLSAWREALRPNTKLLFLETPSNPLTEVADIAAIADIAHAHGALLVVDNSFCSPALQQPLKLGADLVMHSATKFIDGHGRVMGGAVVGSDKLVEQVYLHVRAAGPSLAPFNAWTLLSGLETLHLRMEKHSANALELARWLEAQPNVERVYYPGLESHPQHELALRQQKSGGAVVSFVVKGGRKAAWKVVDAVRVISRTANLGDVKTTLTHPASTTHARVTQEARERAGIVEGLLRVSVGLENVRDLQQDLLRGLD

SEQ ID NO: 13586 - DNA, 1143 bp, Chromobacterium violaceum ATCC 12472
  CDS (1)..(1143): transl_table=11
atgaccgatttccacaccctggccgtgaccgccggcgcgcacgaggacccgttcggcgcggtgatgccgccgatctacgccacctccacctaccgccagcacgcgccgggcgagcacaccggctacgagtattcccgctcgcagaacccgacccgcgaggcgctggagcgcgcggtggccgaactggaaggcggcatccgcggctacgctttcggctccggcttggcggcgatctccaccgtgctggagctgctgccggccggcagccacctgatcgcggtcaacgacctgtacggcggcacctatcgtctgttcgagaaggtgcgcaaggccagcgccaacctggaagtgacctatgtcgcctccgacgacagcgccgcgctggaggccgccatccgcccgaacacccggatgatctgggtggaaacgccgtccaatccgttgaaccagctggtggacctgcaacaggtgtcggccatcgcccgccgccacaagctgatcggcgtggtcgacaacactttcgcctcgccggtcaaccagcggccgctggacttcggcttcgacatcgtcgtccactccgccaccaaatacctgaacggccattccgacgtggtggccggcgtggctgtggtcagccgcgaccagccggaactggccgaacagctggccttcctgcataacgcggtgggcgccatcctggacgccttccccagcttcctggtgctgcgcggcttgcgcacgctggcgctgcgcatcgagcagcacaaccgcaacggcctggccatcgcgcgctggctggaggcgcagccttgggtggaaaaggtgctgtacccaggcttggaaagccatccgcagcacgcgctggcgcgccgccagatgcagggctacggcggcatcgtgtcgttctatctgaagggcgacgtcaaggccttcctggccaggctcaagctgttcgcgctggccgaaagcctgggcggcgtcgaaagcctggtctgcctgccggcggcgatgacccacgcgtcgattccggccgagcgccgcgccgcgctcggcatccacgacaacctgatccgcctgtcggtcggcgtcgagggcgaggcggcgctgatcgccgacctggagcaggcgcggcgggacagctga

SEQ ID NO: 13587 - protein, 380 aa, Chromobacterium violaceum ATCC 12472
MTDFHTLAVTAGAHEDPFGAVMPPIYATSTYRQHAPGEHTGYEYSRSQNPTREALERAVAELEGGIRGYAFGSGLAAISTVLELLPAGSHLIAVNDLYGGTYRLFEKVRKASANLEVTYVASDDSAALEAAIRPNTRMIWVETPSNPLNQLVDLQQVSAIARRHKLIGVVDNTFASPVNQRPLDFGFDIVVHSATKYLNGHSDVVAGVAVVSRDQPELAEQLAFLHNAVGAILDAFPSFLVLRGLRTLALRIEQHNRNGLAIARWLEAQPWVEKVLYPGLESHPQHALARRQMQGYGGIVSFYLKGDVKAFLARLKLFALAESLGGVESLVCLPAAMTHASIPAERRAALGIHDNLIRLSVGVEGEAALIADLEQARRDS

SEQ ID NO: 13588 - DNA, 1146 bp, Chromobacterium violaceum ATCC 12472
  CDS (1)..(1146): transl_table=11
gtgaaattcgctacccgcgccatccatgtcggctacgacaatgccgaacacaaccgctcggtgatgccgccgctgtaccagacctcggccttcgccttcgaccatgtcggcgaggatttgcgctacgcctacgcccgcaccggcaatccgacccgcagcgcgctgcaggactgcctggccagcctggaagaggccaggcacggcctggccttctccagcggcatggcggcgatagacgcggtgctgcgcgcctgcctgaagccgggcgacgaggtgatcgcggtggcggatctgtacggcggcgcttaccggctgctgacccgggtgatgcagccggccggtatcaaggtgagcttcgtggacctgtccgacccggcgcggctggaggcggcgatcacgccggccacccggctgctgtggctggagtcgccgaccaatccgctgctgggcatggtcgatatcgccgcgctgtccgcgatcgcccatcgccacaatgtaaaagtggcggtggacaataccttcgccacgccgtatctgcagcagccgctgctgctcggcgccgacatcgtcgtgcactcggccaccaagtacctgggcgggcactccgacgtgctgctgggcctggtggcggtcagcgacgacaagctgcaccacgatatccgcttcctgcagaacgccgccggcgcggtgcccgggccgcaggattgcttcctgacgctgcgcggcatcaagacgctggcgctgcggatggagcgccattgcgacagcgcggagaaagtggcggtctggctggccggacagccggccgtggccaaggtgttctaccccggactcccggagcatccggggcatgagctggcgaagcggcagatgcggcgcttcggcggcatcatcagcatccggctgcaggacgacagccgcgaggcggccagccgcgtcgcgcagaggctgaagctgtttgcgctggcggagtcgctgggcggggtggagtcgctggtcaaccatagctacacgatgtcgcacggcggcatgccggccgagcagaaggcggcgctgggcattgtcgagggcggcctgcggctgtcgatcggcatcgaggatctggacgacatcctggcggacctggagcaggcgctgcgcgattga

SEQ ID NO: 13589 - protein, 381 aa, Chromobacterium violaceum ATCC 12472
MKFATRAIHVGYDNAEHNRSVMPPLYQTSAFAFDHVGEDLRYAYARTGNPTRSALQDCLASLEEARHGLAFSSGMAAIDAVLRACLKPGDEVIAVADLYGGAYRLLTRVMQPAGIKVSFVDLSDPARLEAAITPATRLLWLESPTNPLLGMVDIAALSAIAHRHNVKVAVDNTFATPYLQQPLLLGADIVVHSATKYLGGHSDVLLGLVAVSDDKLHHDIRFLQNAAGAVPGPQDCFLTLRGIKTLALRMERHCDSAEKVAVWLAGQPAVAKVFYPGLPEHPGHELAKRQMRRFGGIISIRLQDDSREAASRVAQRLKLFALAESLGGVESLVNHSYTMSHGGMPAEQKAALGIVEGGLRLSIGIEDLDDILADLEQALRD

SEQ ID NO: 13590 - DNA, 1182 bp, Porphyromonas gingivalis W83
  CDS (1)..(1182): transl_table=11
atgcgtagtggctttgccacacgtgccatccatggaggcgctatcgagaacgccttcggctgcttagccactcccatttaccaaacatcgactttcgtttttgacactgccgaacagggaggccgccgctttgccggagaggaagacggatacatctatacccgtctgggcaaccccaactgcacccaagtggaagagaaactggccatgctcgaaggcggagaagccgccgcatcggcctcatccggtatcggagccatcagctctgccatctgggtatgcgtgaaggccggcgaccatatcgtagccggcaagacgctctacggctgcaccttcgccttcctcacccacggactgagccgctacggtgtggaagtcaccctcgtggatacccgccatccggaagaggtggaggccgccattcgcccgaatacgaagctcgtctatctggagactccggccaaccccaatatgtacctgaccgacatcaaggcagtctgcgacatcgctcataagcacgaaggcgtacgcgtcatggtggacaatacctactgcacgccctatatctgccgtccgctggagctgggtgccgacatcgtggtacacagcgcgaccaagtacctgaacggacatggcgacgtcatcgccggattcgtcgtaggtaaagaggactacatcaaggaggtgaagctcgtcggcgtcaaggacctcacgggggccaatatgagtccgttcgatgcttatctgatcagccgcggcatgaagacgctgcagatacgtatggagcagcactgccgcaatgctcagaccgtagccgaatttctcgaaaagcatccggccgtagaagcagtttatttccccggacttccgagcttcccccaatacgaattggccaagaagcagatggcactgcccggagccatgatcgccttcgaagtgaagggcggttgcgaagccggtaagaagctgatgaacaacctgcacctctgctccctcgccgtgagcttgggcgatacggaaaccctcatccagcatccggccagcatgacccactcgccctacacacccgaagagcgtgctgccagcgacatatccgaaggactggtacgcctgtccgtgggtctggagaacgtggaggacatcatcgccgacctcaagcacggtctggacagcctgatctaa

SEQ ID NO: 13591 - protein, 393 aa, Porphyromonas gingivalis W83
MRSGFATRAIHGGAIENAFGCLATPIYQTSTFVFDTAEQGGRRFAGEEDGYIYTRLGNPNCTQVEEKLAMLEGGEAAASASSGIGAISSAIWVCVKAGDHIVAGKTLYGCTFAFLTHGLSRYGVEVTLVDTRHPEEVEAAIRPNTKLVYLETPANPNMYLTDIKAVCDIAHKHEGVRVMVDNTYCTPYICRPLELGADIVVHSATKYLNGHGDVIAGFVVGKEDYIKEVKLVGVKDLTGANMSPFDAYLISRGMKTLQIRMEQHCRNAQTVAEFLEKHPAVEAVYFPGLPSFPQYELAKKQMALPGAMIAFEVKGGCEAGKKLMNNLHLCSLAVSLGDTETLIQHPASMTHSPYTPEERAASDISEGLVRLSVGLENVEDIIADLKHGLDSLI

SEQ ID NO: 13592 - DNA, 1155 bp, Photorhabdus luminescens subsp. laumondii TTO1
  CDS (1)..(1155): transl_table=11
atgaccaagttcgatactaaaactgttcacgccggctacacaccagatcacacgggtgcggtaatgccggcaatttatgcaacatcaacttacgcccaatcagcccccggtcaacacactggttatgaatattcccgtagtggcaacccaactcgtgatgctctggaaagcgcgatcgccgaactggaaaacggtagccgaggctacgcttttagttcagggctcgctgccagttccacggtgctagaactcttggataaggatagccatttggtggcagtcgatgatctgtacggtggtacctaccggctactcgaaaaagtacgtagccgcaccgccggtttgcgtgtcacttacgtggaagccaatgatatttccggccttgaagcagccattcgtcccgatacaaaaatgatttgggtggagactcctaccaatccgttgctgaaactggccgatctgacggctatcgcacaaatagcgcaacgtcacagtattattagtgttgcagataacactttcgcttcaccatatctccaacgcccagttgatttgggatttgatatcgtcgtgcactccgccactaaatatttaaacggccactctgatgtgatcgcaggactggccgtcgtcggaaaaaatgcagaactagcagaaaaacttggttttctgcaaaactctgtcggtggcgtgctcgatccctttagtagtttcctggtgctgcgcggaatgcggacacttgccctacgtatgcagcgccacattgatagtgcatcaaagatcgcacattggttggagcaacaacctcagatcgaaaccgttttctatcccggtctcgcttcccatccacagcatgaattggcgaagcgtcaaatgaaaggctttggtggtatgatttctgttcacttaaaaggtgatgatgattatgcccgccggttaattcaagagctaaaactatttaccctggcagaaagtctgggcggggtggagagcctgatcagccaaccattcagtatgactcacgcgtctattccattagaaaaacgccttgcttctgggatcacgccacagttggtacgcatttctgtgggtatagaggatgcagaggatcttatcgccgatttggctcaagcgttagaaaaagccgctcaataa

SEQ ID NO: 13593 - protein, 384 aa, Photorhabdus luminescens subsp. laumondii TTO1
MTKFDTKTVHAGYTPDHTGAVMPAIYATSTYAQSAPGQHTGYEYSRSGNPTRDALESAIAELENGSRGYAFSSGLAASSTVLELLDKDSHLVAVDDLYGGTYRLLEKVRSRTAGLRVTYVEANDISGLEAAIRPDTKMIWVETPTNPLLKLADLTAIAQIAQRHSIISVADNTFASPYLQRPVDLGFDIVVHSATKYLNGHSDVIAGLAVVGKNAELAEKLGFLQNSVGGVLDPFSSFLVLRGMRTLALRMQRHIDSASKIAHWLEQQPQIETVFYPGLASHPQHELAKRQMKGFGGMISVHLKGDDDYARRLIQELKLFTLAESLGGVESLISQPFSMTHASIPLEKRLASGITPQLVRISVGIEDAEDLIADLAQALEKAAQ

SEQ ID NO: 13594 - DNA, 1173 bp, Photorhabdus luminescens subsp. laumondii TTO1
  CDS (1)..(1173): transl_table=11
gtggtagctgatatgacacgcaagccggcaacaatagcagttcgcaatgggctgaataatgatgaacagtatggttgtgttgttccgcctatatatctttccagcacatataactttactgattttaatcagccaaggacacatgattattcccgcaggagtaatccgggccgcgatatggtgcaacaggcattagctgagctggaggggggagcgggtgctatcatgaccagcagtggaatgtcagctattcacctgttatgcatggttttccttcaacctggcgatctgttggttgcgcctcatgactgttatggtggcagttaccgtttatttgacagccagactaaacgcggtgcttatgaagtggcctttgtcgatcagagtgatgaacaggcattaaagcaagtcttgtccaaaaaaccaaagttggtattgattgaaacacccagtaatcctttattgcgtattgtcgatattgctcatatatgccagctttcccatgaggtaggtgcgacagtcattgttgataacactttcctgagtcctgtactacagaagcctttggcgttgggggcagatctggttgtgcattcctgtactaaatatcttaatggacattctgatgtgattgccggagctattattgcaaaggatgaagaggttgcaacggagctcgcttggtgggcgaataatattggtgtaaccggtgcggcgtttgatagctacctgctgttgcgtggcatgcgcactttatcgccacgggtcctgttacagcaaaagaatgcattggaactcgtcaattatcttcaacagcaaccgttagtgaaaaaacttttttatcctgctttgaaagatcatcctgggcatgaaattgcttgtaagcaacaatttggttttggcgcaatgataagctttgagttcgatggtggtgaacaggcgatacgccgttttctgtctgagttgaagttatttactttggcggaatcactgggcggtgtggaaaccttaatttctcatacggctaccatgactcacgctggaatgtcagcacaggcaagggcggaagcggggattacggattcactattgcgtgtttctgtgggtattgaagatagtcaggatttaatcgctgatttggaaaatgcatttcaggcagtagtaaaggagtga

SEQ ID NO: 13595 - protein, 390 aa, Photorhabdus luminescens subsp. laumondii TTO1
MVADMTRKPATIAVRNGLNNDEQYGCVVPPIYLSSTYNFTDFNQPRTHDYSRRSNPGRDMVQQALAELEGGAGAIMTSSGMSAIHLLCMVFLQPGDLLVAPHDCYGGSYRLFDSQTKRGAYEVAFVDQSDEQALKQVLSKKPKLVLIETPSNPLLRIVDIAHICQLSHEVGATVIVDNTFLSPVLQKPLALGADLVVHSCTKYLNGHSDVIAGAIIAKDEEVATELAWWANNIGVTGAAFDSYLLLRGMRTLSPRVLLQQKNALELVNYLQQQPLVKKLFYPALKDHPGHEIACKQQFGFGAMISFEFDGGEQAIRRFLSELKLFTLAESLGGVETLISHTATMTHAGMSAQARAEAGITDSLLRVSVGIEDSQDLIADLENAFQAVVKE

SEQ ID NO: 13596 - DNA, 1185 bp, Rhodopseudomonas palustris CGA009
  CDS (1)..(1185): transl_table=11
atgaccgaatcgtcccactcgcccggctttgccaccaccgcgatccaccacggctacgacccgctggcgcatcacggtgcgctcaacccgccgctgttcctgacctcgacctacgcgttcgccagcgccgctgagggcgcggcgcggttcgccggcgaggccgaaggcttcgtgtattcgcgggtcggcaatccgacggtggcggtgctggagagccgactggcggcgctggaaggcggcgaggccgcgctcgccaccgcctcgggcgtcggggccctgacggcgctgatctggacgctgctgaagacgggcgacggcatcatcgccgaccagatgctgtacggctgcaccttcggtctgttcgagcatcatctgccacggttcgacatcgaggtggtgttcgccgatctcaccgatccggccaatctgcaggccgcgctgcggccgaatacccgcttggtgttcaccgagaccccgaccaatccgaacatgcggctggtcgacatcgccgcctgcgccgagatctgccggcgcgccgacgctcgcctcgtcgtcgacaacacctactgcacgccctatctgcagcgcccgctcgatctcggcgcagatctcgtcacccattcggcgacgaagtatctcggcggccatggcgacctgctcgccggcgcggtggtggggccgaaggagatcatcgatcaggtccgcttcgtcggcgttaaggagctgaacggtgcctgcatctcggcgttcgacgccttcctgatcctgcgcggcctgaagacgttgaacctgcggatggatcgccacagcgccaccgccgtaaagctcgcgcacgatctcgaagcgcatcccgccgtcgccgctgtgtactaccccggtctcgacagccacaagcagcgcaacctcgcgcagcggcagatgcgccagcccggcggcatgatcgcactcgagctcagaggcggattagcagccggccgcagcttcatggacaaggtgaagctggcgacgcgagcggtcagtctcggcgacgccgagaccctgatccaacacccggccagcatgacccacgcgacctacgatccggccgaacgcgcgcggcacggatttacggacggactgatcaggatctcagtgggactggaggattatgaggatctgaaacaggacttgcttggggcgctatga

SEQ ID NO: 13597 - protein, 394 aa, Rhodopseudomonas palustris CGA009
MTESSHSPGFATTAIHHGYDPLAHHGALNPPLFLTSTYAFASAAEGAARFAGEAEGFVYSRVGNPTVAVLESRLAALEGGEAALATASGVGALTALIWTLLKTGDGIIADQMLYGCTFGLFEHHLPRFDIEVVFADLTDPANLQAALRPNTRLVFTETPTNPNMRLVDIAACAEICRRADARLVVDNTYCTPYLQRPLDLGADLVTHSATKYLGGHGDLLAGAVVGPKEIIDQVRFVGVKELNGACISAFDAFLILRGLKTLNLRMDRHSATAVKLAHDLEAHPAVAAVYYPGLDSHKQRNLAQRQMRQPGGMIALELRGGLAAGRSFMDKVKLATRAVSLGDAETLIQHPASMTHATYDPAERARHGFTDGLIRISVGLEDYEDLKQDLLGAL

SEQ ID NO: 13598 - DNA, 1173 bp, Rhodopseudomonas palustris CGA009
  CDS (1)..(1173): transl_table=11
atggataagaccaccaacctgcggcagcgcggggccaatacccgcgcggtgcacggcggccagcatttcgatccggcgaccggtgcggtgacgaccccgatctacgccacctcgaccttcgtccagtcggcgccgggcgtgcacaagggctacgaatacgcgcgctcgcagaacccgacgcgcgccgcgttcgaggccgcgatcgccgacgccgagcgcggccacgccggcttcgctttcgcctccggcctcgcggccgaggctgcgctcttggaaatcgccgggcagggcagtcacatcgtcgcgtcggacgacctctatggcggaagctggcggctgttccatcgggtgcgcagccattcggccggcctgacgatcacccatgtcgatccggccaatctcgacgcgctgcgcgacgccatccagccgaacacagccttcatctggatcgagacaccgagcaacccgacgctgcgcctcgccgatctcgaagcgatcgcggcgatcggccgcgaacgcggcgtgctgaccgtggtcgacaacactttcgcttcgccggcggtgcagcgcccgctggagcacggcatcgacatcgtggtgcattctgtgacgaagtacatcggcggccattccgacatcgtcggcggcgcgatcgtggtgcgtgatccggatttggcgcagaagctgcaattcctgcagaacgccacgggaggcatcctcgatccgttctccagcttcctggcgctgcgcggcatcaagacgctgccgctgcgggtgcaacgccacagttcgaatgcgctggcggtcgcccgctggctcgacgcccatcccaagatcgagcgagtggtctatcccgggctcaacagtcatccgcagcacgcgctcgcggtgcgccagatggatggcggcggcggcatggtggcagcttatctgaaggccgacgagcagcaggtcgtcgatgtgctgagccgcttcaggttgttcgcgctggcggaaagtctgggcgccgtggagagcctggtcgggcagccgtggaccatgagccatggctcgctgccggaagccgatcggctggcgcgcgagatcacgcctaatctgatccggctgtcgatcggtatcgaagacgtcgaggacttgaccgacgatctcgagcaggcgctgtccatcctgtga

SEQ ID NO: 13599 - protein, 390 aa, Rhodopseudomonas palustris CGA009
MDKTTNLRQRGANTRAVHGGQHFDPATGAVTTPIYATSTFVQSAPGVHKGYEYARSQNPTRAAFEAAIADAERGHAGFAFASGLAAEAALLEIAGQGSHIVASDDLYGGSWRLFHRVRSHSAGLTITHVDPANLDALRDAIQPNTAFIWIETPSNPTLRLADLEAIAAIGRERGVLTVVDNTFASPAVQRPLEHGIDIVVHSVTKYIGGHSDIVGGAIVVRDPDLAQKLQFLQNATGGILDPFSSFLALRGIKTLPLRVQRHSSNALAVARWLDAHPKIERVVYPGLNSHPQHALAVRQMDGGGGMVAAYLKADEQQVVDVLSRFRLFALAESLGAVESLVGQPWTMSHGSLPEADRLAREITPNLIRLSIGIEDVEDLTDDLEQALSIL

SEQ ID NO: 13600 - DNA, 1212 bp, Rhodopseudomonas palustris CGA009
  CDS (1)..(1212): transl_table=11
atgtccgagtccaaaccgaccattcccgttcccgccaccgcgcatttccgccgcgaaacccgcctggtgcattccggcagcttgcgctcgcagttcggcgagacctccgaggcgttgttcctgactcagggcttcgtctacgaaagcgccgagcagtgcgaggcgcgcttcaccggcgacgacgccggcttccaatattcgcggttctcgaacccgaccgtgttcagcttcgaacagcggatggcggagttcgaaggcgccgaagcggcgcgctcgaccgccaccggcatggccgcggtgacggccgcgatgctggcgccgctgcgggcaggcgatcacgtcgtcgcctccaaggcgatgttcggctcgtgccgctacgtcgtcgaagacctgctgccgcgctacggcatcgagtcgacgctggtcgacggcctcgatctcgaccaatggcagcgtgcggtccggccgaacaccaagacgttcttcctggagagcccgaccaacccgaccctcgacgtgctcgacatcggcgcgatcgcggagattgcccatgcggcgggcgcgcgcctcgtggtcgacaacgtgttcgcaacgccgatctggcaaagcccgctgcagcttggtgccgacgtcgtggtttactccgccaccaagcacatcgacggacagggccgctgtctcggcggcgtggtgctgtcgtcgcaggcgttcatcgaagaacatatccagatgtatctgcgccagaccggcccgtcgctgtcgccgttcaacgcctgggtgctgctgaagggcctggaaacgctggcggttcgtgtcgagaagcagacctccaatgcggccgcgatcgccgatgcgctggccggccaaccgaaggtgccgcgcctggtatatccgggccgggcggatcacccgcaggccgcgacggtcaagaagcagatgggcgcaggctcgaccctggtcggcttcgaggtgaagggcggcaaggccgaagcgttccgcttcctcaatgccctcaagctggtgaagatcagcaacaatctcggcgacgccaagagcctcgttacccatccagccacgacgacgcatcagcggctgaagccggaagcgcgcgccgaactcggcatcagcgaaggcttcatccggttgtcggccggcctcgaacacaaagacgatctgatcgaggacctgctcgccgcgctcgacaaggtgtga

SEQ ID NO: 13601 - protein, 403 aa, Rhodopseudomonas palustris CGA009
MSESKPTIPVPATAHFRRETRLVHSGSLRSQFGETSEALFLTQGFVYESAEQCEARFTGDDAGFQYSRFSNPTVFSFEQRMAEFEGAEAARSTATGMAAVTAAMLAPLRAGDHVVASKAMFGSCRYVVEDLLPRYGIESTLVDGLDLDQWQRAVRPNTKTFFLESPTNPTLDVLDIGAIAEIAHAAGARLVVDNVFATPIWQSPLQLGADVVVYSATKHIDGQGRCLGGVVLSSQAFIEEHIQMYLRQTGPSLSPFNAWVLLKGLETLAVRVEKQTSNAAAIADALAGQPKVPRLVYPGRADHPQAATVKKQMGAGSTLVGFEVKGGKAEAFRFLNALKLVKISNNLGDAKSLVTHPATTTHQRLKPEARAELGISEGFIRLSAGLEHKDDLIEDLLAALDKV

SEQ ID NO: 13602 - DNA, 1137 bp, Geobacter sulfurreducens PCA
  CDS (1)..(1137): transl_table=11
atgaaattcggcacccgcatcatccatacgggccgtgagatcgatccgaccaccggagcgctctcggttcccatttaccagacgtccacctatcggcaggaatcggtggaccatttcggcaagtacgattacgcccgctcggacaaccccacccgcgaggcccttgaggaaaccgtggcccagctggagaacgggacgcggggattcgccttcgcctcgggcatggccgccatctcctccacgctgctcctgttctcgcccggcgatcacctggtggtctgcgaggatgtctatggcggtaccttccgggcgctgacccagcttttcagccggctgggggtcgagtccaccttcgtggacgccacggacacggccgccattgaggcggccttccgcccgaacaccaagggcctctatctggagaccccctccaatccactcatgaagatcaccgacctggccgccgcggcccgcctggcccgggagaggggggccatcaccctggtggacaacacgttcatgactccctacctgcagcggcccctggacctgggctgcgacgtggtgctccacagcgggaccaagttcctgaacggccacagcgatgtggtctgcggctttgccgtggtgagggacccggagttggggcagcggatcaggttcatccagaatgccttcggcgccatcctgggcccccaggattcatggctcgtgctgcggggtatcaagaccctgcgggtccggatggaggaaagccaggccggggcggtcaaaattgccaactggctggctggggaaaaacgggtgagccgggttttctatcccggactccccgatcatccgggtcacgatatccatggccggcagtcgtcgggccccggcgcggtcctgtcgttcaccctggataccgttgaaaccacccgccgcctgctggaggggatgcgtctggctgcctttgccgtgagcctcggcggggtggaaagcatcatctcctatcccgccaggatgtcccacgcggccatgccgccggccgagcgggccgcccgggggatcggcgataccctggtacggctttccgtggggcttgaggacgccgacgacctcctggccgagatggaccgcctgatcaacggctga

SEQ ID NO: 13603 - protein, 378 aa, Geobacter sulfurreducens PCA
MKFGTRIIHTGREIDPTTGALSVPIYQTSTYRQESVDHFGKYDYARSDNPTREALEETVAQLENGTRGFAFASGMAAISSTLLLFSPGDHLVVCEDVYGGTFRALTQLFSRLGVESTFVDATDTAAIEAAFRPNTKGLYLETPSNPLMKITDLAAAARLARERGAITLVDNTFMTPYLQRPLDLGCDVVLHSGTKFLNGHSDVVCGFAVVRDPELGQRIRFIQNAFGAILGPQDSWLVLRGIKTLRVRMEESQAGAVKIANWLAGEKRVSRVFYPGLPDHPGHDIHGRQSSGPGAVLSFTLDTVETTRRLLEGMRLAAFAVSLGGVESIISYPARMSHAAMPPAERAARGIGDTLVRLSVGLEDADDLLAEMDRLING

SEQ ID NO: 13604 - DNA, 1167 bp, Mycobacterium avium subsp. paratuberculosis K-10
  CDS (1)..(1167): transl_table=11
atgagcgacgacggcaacgcacaccccgagttcagcggactggccaccaaggcgattcacgccggctaccggccggacccggcgaccggagcggtcaacacgccgatctacgccagcagcaccttcgcccaggacggggtgggcgcgctgcgcggcgggtacgagtacgcccgcaccggcaacccgacccgggccgcgctggaggccacgctggccgcggtggaggccggcagccacgggcgggccttcgcctccggcatggccgccaccgactgcgcgctgcgggcggtgctgcggcccggcgaccatgtggtgatcccgaatgacgcctacggcggcacctttcggctgatcgacaaggtgttcactcgctggaacgtcgaatacacgccggtgccgttgcatcagctcgacgccgtggccgccgcgatcacgccgcgcacccggctgatctgggtggagaccccgaccaacccgttgctgtcgatcgccgacatcgccgcgctggcccagctgggccaccagcactcggcaaaggtgttggtggacaacacctttgcctcgccggcgctgcagcagccgttgacgctgggcgccgacatcgtgctgcattccaccaccaagtacatcggcgggcactccgacgtggtgggcggtgcgctggtcaccaacgacgccgagctggacgacgcgttcgggttcttgcagaacggggcgggcgcggtgcccggcccgttcgacgcctacctgaccatgcgcgggctgaagaccctggtgctgcggatgcagcggcacaccgaaaacgcctctgccgtagcgcaattcctcgccgggcaccccgcggtgagcgcggtgctctatcccggcctgcccggccatccgggccacgacgtcgccgcccggcagatgtcgggcttcggcggcatggtctcggtgcggatgcgcggcggccggcaggccgcccgaaagctgtgcgccaacacccgggtgttcatcctggccgagtcgctgggcggggtcgagtcgctgatcgagcaccccagcgcgatgacgcacgcgtcgacggcggggtcgcaactggaggtgcccgacgatctggtgcggctgtcggtcggcatcgaggacgtcgacgacctgctggccgacctcgaccgggcgctcagttga

SEQ ID NO: 13605 - protein, 388 aa, Mycobacterium avium subsp. paratuberculosis K-10
MSDDGNAHPEFSGLATKAIHAGYRPDPATGAVNTPIYASSTFAQDGVGALRGGYEYARTGNPTRAALEATLAAVEAGSHGRAFASGMAATDCALRAVLRPGDHVVIPNDAYGGTFRLIDKVFTRWNVEYTPVPLHQLDAVAAAITPRTRLIWVETPTNPLLSIADIAALAQLGHQHSAKVLVDNTFASPALQQPLTLGADIVLHSTTKYIGGHSDVVGGALVTNDAELDDAFGFLQNGAGAVPGPFDAYLTMRGLKTLVLRMQRHTENASAVAQFLAGHPAVSAVLYPGLPGHPGHDVAARQMSGFGGMVSVRMRGGRQAARKLCANTRVFILAESLGGVESLIEHPSAMTHASTAGSQLEVPDDLVRLSVGIEDVDDLLADLDRALS

SEQ ID NO: 13606 - DNA, 1164 bp, Bdellovibrio bacteriovorus HD100
  CDS (1)..(1164): transl_table=11
atgaaaaaaatgaacgacaaccttggtttttccactcgtgcgattcatgccggccaagctccggatccttccacgggcgccatcatgacgccggtttatctgacctcgacttacgtacaagaatctcctggtgttcacaaaggctgggaatattcccgcacgcacaatcccactcgtcacgcttacgaaagctgcatggcaagtttggagggtggcaaacatggttttgcgttttcttccggttgcgcggcaacgacaactgtattgcatcttctaaaaggtggcgatcatgtgattgccatggatgacatgtacggcggcaccttccgtctgtttgacaaaatccttaagcacgacggcatggagttttctttcgttgatctgacgaaggttgaaaactttgaaaaagccgtaaaaccaaacaccaagctggtatggttggaaactccgaccaatccgactttgaaactggttgatatcaaaaaaatcgcagccattgccaaagccaaaggcattctggtagcggttgataacacgttcatgagcccctacttccaaagacctttggagctgggtgcggatatcgtggttcattctgcgacaaaatacatcggcggccacagtgatacggtcggcggtatggtcgttgtatcccgcgcggatctggcagaaagaatggcgttcctgagcaacggtatcggggcgactcaaggggcgtttgattccttcatgttcctgagaagtttgaaaactttgccacttcgtatgaaggcccatcaggaaaacgccatggcgattgcgaagtttttggaatctcatccaaaagtggacaaagtcatctatccgggtctggaaagccatcctcagcatgctttggcgaaagaacaaatgcatggtttcggtgggatgatcactttctacatcaaagggggcctggattcggctcgtaagttcctggaaaacgtgaatgtcttttcattggccgagagtttgggaggggttgagtccctgatcgagcatccggcgattatgacgcacgcctccgttccacctgaaaaccgcaaggctttggggatcgacgacaccctgatccgcctttctgtaggtgtagaggatctgaacgacctgattgccgaccttaaaactgcttttgataaggcttaa

SEQ ID NO: 13607 - protein, 387 aa, Bdellovibrio bacteriovorus HD100
MKKMNDNLGFSTRAIHAGQAPDPSTGAIMTPVYLTSTYVQESPGVHKGWEYSRTHNPTRHAYESCMASLEGGKHGFAFSSGCAATTTVLHLLKGGDHVIAMDDMYGGTFRLFDKILKHDGMEFSFVDLTKVENFEKAVKPNTKLVWLETPTNPTLKLVDIKKIAAIAKAKGILVAVDNTFMSPYFQRPLELGADIVVHSATKYIGGHSDTVGGMVVVSRADLAERMAFLSNGIGATQGAFDSFMFLRSLKTLPLRMKAHQENAMAIAKFLESHPKVDKVIYPGLESHPQHALAKEQMHGFGGMITFYIKGGLDSARKFLENVNVFSLAESLGGVESLIEHPAIMTHASVPPENRKALGIDDTLIRLSVGVEDLNDLIADLKTAFDKA

SEQ ID NO: 13608 - DNA, 1206 bp, Treponema denticola ATCC 35405
  CDS (1)..(1206): transl_table=11
atgaatagaaaagaattggaaaagttgggatttgcttcaaaacagattcacgcaggaagcattaagaacaagtacggtgctttagctacacctatttatcaaacttcaacatttgcatttgattcggcagaacaaggcggcagaagatttgccttagaggaagaaggttatatctacacccgtttaggtaaccctacgactacggttgttgaagaaaaacttgcctgccttgaaaacggggaagcctgtatgtccgcgagctccggtataggtgccgttacctcatgcatttggtcaattgtaaatgcaggagaccatatcgttgccggaaagactctttacggctgtacatttgcgtttttaaatcacggtctgtcacgattcggtgttgatgtaaccttcgttgatacccgtgatcctgaaaacgttaaaaaagctttaaaaccgaatacaaaaatcgtttatttggaaacgccagccaacccgaacatgtatctttgcgacattgcagcagtaagtaaaattgcccatgctcataatcccgaatgtaaggtaatagtagataatacttatatgactccctatcttcaaaggcctcttgatttaggtgcagacgtcgttcttcattctgcaacaaaatacctaaacggccatggagacgttattgcaggttttgttgtcgggaaaaaagaattcatcgatcaggtacgctttgtaggtgttaaggatatgacaggttctacattaggtccatttgaagcttacttaataggccgaggtatgaagaccctcgatatccgaatggaaaagcactgcgccaatgctcaaaaagttgcagagttcttggaaaaacatccggcagttgagtccatcgccttccccggtcttaaatccttcccgcaatatgagcttgcaaaaaaacagatgaaactttgcggagctatgattgcctttaccgttaagggcggattggaagccggtaaaacccttataaactcggttaaatttgcaaccattgcagtaagcttaggcgatgccgaaacccttattcagcatcctgcaagtatgacccactctccgtatacccctgaagaaagagccgcttcggatattgccgaaggtttggtacgtctttctgtcggtcttgaagatgcggaagatattattgccgatttaaaacaagccttggataaacttgttaaataa

SEQ ID NO: 13609 - protein, 401 aa, Treponema denticola ATCC 35405
MNRKELEKLGFASKQIHAGSIKNKYGALATPIYQTSTFAFDSAEQGGRRFALEEEGYIYTRLGNPTTTVVEEKLACLENGEACMSASSGIGAVTSCIWSIVNAGDHIVAGKTLYGCTFAFLNHGLSRFGVDVTFVDTRDPENVKKALKPNTKIVYLETPANPNMYLCDIAAVSKIAHAHNPECKVIVDNTYMTPYLQRPLDLGADVVLHSATKYLNGHGDVIAGFVVGKKEFIDQVRFVGVKDMTGSTLGPFEAYLIGRGMKTLDIRMEKHCANAQKVAEFLEKHPAVESIAFPGLKSFPQYELAKKQMKLCGAMIAFTVKGGLEAGKTLINSVKFATIAVSLGDAETLIQHPASMTHSPYTPEERAASDIAEGLVRLSVGLEDAEDIIADLKQALDKLVK

SEQ ID NO: 13610 - DNA, 1164 bp, Bacillus cereus ATCC 10987
  CDS (1)..(1164): transl_table=11
atgagttattctatagatacactcttactgcacaaccaatataaacatgactcgcaaacaggagctgttaacgttcccatctataacacatcaacatttcaccaatttgatgtagatacgtttgggaaatatgactatagcaggtcaggaaatccaactcgtgaagctcttgaagacatcattgctttattagaaggcggaacaaaaggatttgccttcgcatcaggaattgcagcgatttctactgcattcctcctcctttcacaaggtgatcacgtactcatttcagaagacgtatacggagggacttatcgaatgataactgaagttctctcccgttacggtgtttcacatacatttgttgatatgaccaatttagaagaaataaaacaaaacattaagccaaatacaaaactcttttatgtagaaacaccttccaatccacttttaaaagtaacagatattcgcgctgtttctaaacttgcaaaatctattggcgcccttacttttgttgataatacatttttgacaccactattccagaaaccaattgaccttggcgctgatgtcgttcttcatagtgccacaaaattcattgccggtcatagtgatgttactgccggattagcagttgtaaaagataccgatctcgctcaaaaacttggctttttacaaaattcattcggcgctattctaggcccgcaagattgttctctcgtacttcgtggtctaaaaacattgcatgtacgtcttgagtattcagctgctaatgccaataaaattgcacactatttacaagagcacgctaaagttcaaaatgtctattatccaggattacaaacacatcttggatttaacattcaacaatctcaagctacatcagcaggagctgtcctatctttcactttacaatcagaagacgcactccgccaatttttatcaaaagtaaaattacctgtctttgcggttagtttaggggctgtcgaatcgatcctttcctacccagctaaaatgtcacatgcagcactatcgcaagaagctcgtgatgaaagagggatttcaaattcattacttcggctatccgtcggtcttgaaaatgttgacgatttaatatccgattttgaaaatgccctttcttatgtagaagaacctgtaaatgcatag

SEQ ID NO: 13611 - protein, 387 aa, Bacillus cereus ATCC 10987
MSYSIDTLLLHNQYKHDSQTGAVNVPIYNTSTFHQFDVDTFGKYDYSRSGNPTREALEDIIALLEGGTKGFAFASGIAAISTAFLLLSQGDHVLISEDVYGGTYRMITEVLSRYGVSHTFVDMTNLEEIKQNIKPNTKLFYVETPSNPLLKVTDIRAVSKLAKSIGALTFVDNTFLTPLFQKPIDLGADVVLHSATKFIAGHSDVTAGLAVVKDTDLAQKLGFLQNSFGAILGPQDCSLVLRGLKTLHVRLEYSAANANKIAHYLQEHAKVQNVYYPGLQTHLGFNIQQSQATSAGAVLSFTLQSEDALRQFLSKVKLPVFAVSLGAVESILSYPAKMSHAALSQEARDERGISNSLLRLSVGLENVDDLISDFENALSYVEEPVNA

SEQ ID NO: 13612 - DNA, 1134 bp, Bacillus cereus ATCC 10987
  CDS (1)..(1134): transl_table=11
atgagagcaaagacaaagttaattcatggtattcgcataggagaaccttcaactggatctgtaaatgtaccgatttatcaaacgagtacgtacaaacaagaagcagttggtaagcatcaaggatatgaatattcacgtacaggcaacccaacacgtgcagctttagaagaaatgattgcggtattagaaaacggccatgctggtttcgcatttggttcaggaatggcggctattacagctacgattatgttgttctcaaaaggtgaccacgttattttaacagatgatgtgtatggcggaacgtaccgcgtgattacgaaagtattaaaccgtttcggtattgagcatacatttgtagatacaacaaacttagaggaagttgaagaagcgattcgtccaaatacgaaagcgatttatgtagaaacaccaacgaatccgttactaaaaattactgatattaaaaaaatatctactcttgctaaagagaaagatttattaacaattattgataacacattcatgacgccatattggcagtcgccgatttctttaggagcagacattgtacttcatagtgcaacgaaatatttaggaggtcatagtgacgtagttgcaggtctagtagttgtaaatagcccgcaattagcagaagaccttcactttgtacaaaactcaacaggcggcattcttggcccgcaagatagtttcttactacttcgtggtttaaaaacattaggaattcgaatggaagagcatgaaacgaattcacgtgcaattgctgagtttttaaataaccacccaaaagtaaataaagtatattacccaggccttgagtcacatcaaaaccatgaactggcaacagaacaagcaaatggatttggtgctattatctcatttgatgtagatagcgaagaaacattaaataaagtgcttaagaaattacaatactttacgctggctgaaagtttaggagcagtagaaagtttaatttctatcccctctcaaatgacgcatgcatcaatcccagcagatcgtcgcaaagaattaggaattacagatacattaattcgaatttctgtcggtattgaagacggagaagatttaattgaagatttagcacaagcgttagcgtag

SEQ ID NO: 13613 - protein, 377 aa, Bacillus cereus ATCC 10987
MRAKTKLIHGIRIGEPSTGSVNVPIYQTSTYKQEAVGKHQGYEYSRTGNPTRAALEEMIAVLENGHAGFAFGSGMAAITATIMLFSKGDHVILTDDVYGGTYRVITKVLNRFGIEHTFVDTTNLEEVEEAIRPNTKAIYVETPTNPLLKITDIKKISTLAKEKDLLTIIDNTFMTPYWQSPISLGADIVLHSATKYLGGHSDVVAGLVVVNSPQLAEDLHFVQNSTGGILGPQDSFLLLRGLKTLGIRMEEHETNSRAIAEFLNNHPKVNKVYYPGLESHQNHELATEQANGFGAIISFDVDSEETLNKVLKKLQYFTLAESLGAVESLISIPSQMTHASIPADRRKELGITDTLIRISVGIEDGEDLIEDLAQALA

SEQ ID NO: 13614 - DNA, 1242 bp, Yersinia pestis biovar Microtus str. 91001
  CDS (1)..(1242): transl_table=11
atgtccagatgtattgacgtccgtaatttgtgcgtctactctggcgtaacattttctcgatcccggctggtggaaatcaatatgacgcgtaaacaggcaacaatagcagtccgtagcgggttgaatgatgacgagcaatacggctgcgttgtccccccgattcacctttccagtacctacaattttattgattttaatcagccgcgcacgcatgactattcacgtcgtggtaatccaacgcgtgatgttgtccaacgggcgctggcggaattggaagggggggccggtgccgtcatgaccagcagcgggatgtcggcgcttcatttggtttgcactacattcttacagccgggcgatctgttggtcgctccgcatgactgttacggtggcagttaccgtttatttgacagcttgagcaagcgtggtgcgtatcgggtgttatttgttgatcagggcgatgaagcggcactaaactgcgcattggcggagaaaccgaagttggtcttgattgaaacaccgagtaatccattgctacgggttgttgatattgccgccatctgccaagccgcccgtgctgcgggcgcactgacggtttgtgataacaccttcctcagccccgccttacagcagcctctctctcttggggccgatttagtggtgcactcctgtaccaaatatctcaatggtcactctgatgtggtggctggtgctgttattgcgaaagatccagaactggttgtcgagctggcatggtgggcaaataatattggtgtaaccggtgctgcgtttgacagctatctactccttcgtggtttacgcacgttatcaccacgcatggctcaacagcagcgtaacgcggatgacattgtgcgttatttacagcaacagcctttagtgaaaaagctgtatcatccttccctgccacaacatcccggccacgaaatagcctgccgtcagcaatcaggttttggtgcaatgctcagttttgagctggatggtgatgagcaggtcatgcgccgtttcctttctgcccttgagctatttaccttggcagagtctttggggggggtagaaagcctgatctcccatgcagcgaccatgacccacgcgggtatggcggcagaggcgcgtattgccgcaggcattactgatagtttgttgcgtatttccgtgggtattgaagacagtgaagatttgattgctgatttggaccacgcgttccaattggcagtaacgaggtaa

SEQ ID NO: 13615 - protein, 413 aa, Yersinia pestis biovar Microtus str. 91001
MSRCIDVRNLCVYSGVTFSRSRLVEINMTRKQATIAVRSGLNDDEQYGCVVPPIHLSSTYNFIDFNQPRTHDYSRRGNPTRDVVQRALAELEGGAGAVMTSSGMSALHLVCTTFLQPGDLLVAPHDCYGGSYRLFDSLSKRGAYRVLFVDQGDEAALNCALAEKPKLVLIETPSNPLLRVVDIAAICQAARAAGALTVCDNTFLSPALQQPLSLGADLVVHSCTKYLNGHSDVVAGAVIAKDPELVVELAWWANNIGVTGAAFDSYLLLRGLRTLSPRMAQQQRNADDIVRYLQQQPLVKKLYHPSLPQHPGHEIACRQQSGFGAMLSFELDGDEQVMRRFLSALELFTLAESLGGVESLISHAATMTHAGMAAEARIAAGITDSLLRISVGIEDSEDLIADLDHAFQLAVTR

SEQ ID NO: 13616 - DNA, 1167 bp, Nasonia vitripennis
  CDS (1)..(1167)
atgccaatcaattccgaagaaggtttcgcaaccaaagccatccatgcgggacaggatcctctgcaatggaaccactgtgcggtcgtccctccgatagttatgtccacaacgtttcgtcaggatggaccggctgaacataggggttttgagtacggccgcagcggtaacccgagtcggaactgcttggaagcctgcctggcgagtttggagggtggaaaacacggtctggtattttcctccggactcggcgctaccacgactctcatgtcgcttctcgaagccggcgatcatgttatctgcggcgacgacgtatatggcggtactaaccgatttttcaagctctgtgcttccaggcaaaacatcaaaacttcgttcgtcgatgcttctaacaccgagaactttatcaatgctatccaaccgcacaccaagatggtctggatcgaaagcccaacgaacccactgctcaagttggccgatatccaagccatatgcgagaagaccaagagcattaggcccgacatttacatcgtggttgataacacgttcgtgacctgctatttccaaaggccactggaactcggtgcggacattgtcgtgtactccttgaccaagtacatgaacggccactcagacgtaataatgggctccgccatcacgagacgagacgacatcggcgaaaaactgcgcttcacgcaaaatgcaatgggtattgtgccgtcgccgttcgattgcgcaatggtgaacagaagtctcaagactctagagcttaggatgcagcagcactccaagaacggacttgccgttgccaaattcttggaagatcatcctgtggtcacgaaagtcttccatccctatcttccctctcatccacaacacgagctggctctcagacagatgacaggtcacagtggcgtgatttcattctatcacaaaggagattcaaataaattattgaaggctctcaagatatttttcctagccgaatctcttggaggatacgagtctctagctgaactaccttccgttatgactcatgcgtcggtgccggaggaagaacgagcaaagctcggaatcaacgatcagctcatccgactatccgttggaatcgagactgtgaaggatctcatcgctgatttggatcaagccttgaaggcttcacttctgtaa

SEQ ID NO: 13617 - protein, 388 aa, Nasonia vitripennis
MPINSEEGFATKAIHAGQDPLQWNHCAVVPPIVMSTTFRQDGPAEHRGFEYGRSGNPSRNCLEACLASLEGGKHGLVFSSGLGATTTLMSLLEAGDHVICGDDVYGGTNRFFKLCASRQNIKTSFVDASNTENFINAIQPHTKMVWIESPTNPLLKLADIQAICEKTKSIRPDIYIVVDNTFVTCYFQRPLELGADIVVYSLTKYMNGHSDVIMGSAITRRDDIGEKLRFTQNAMGIVPSPFDCAMVNRSLKTLELRMQQHSKNGLAVAKFLEDHPVVTKVFHPYLPSHPQHELALRQMTGHSGVISFYHKGDSNKLLKALKIFFLAESLGGYESLAELPSVMTHASVPEEERAKLGINDQLIRLSVGIETVKDLIADLDQALKASLL

SEQ ID NO: 13618 - DNA, 1167 bp, Nasonia vitripennis
  CDS (1)..(1167)
atgtctgaagaaatcaaaggcggtttcgcgaccaaagccattcacgcaggactggatcctcagcaatggacacatagtccggtcgtacctccactggtgatgtcaacgacattccgacacgacgcgccgggccagcatcagggatactactacagcagaagcggtaatccaactagggacgctttgcaagtctgtctggcagctctggagaacggaactgacgcgaaagttttttcgtcgggactcggtgcgttgacagccttaatgtcgctactccagacaggagatcacgttgtctccggtgatgacatttacgggggcaccaaccgtttcttcaagcaagtcgcttccaggcaaaacatccaggtcagctttgtcagtcccgaagataccgagagctttgtcaaggccatcaaagcgaacaccaagatggtttggttggaaagccccactaatcctctgatgcaattggctgacatagagaccatatccgaagaaatcagaaagatcaggtctgacatatacatcgtagtcgacaacaccttcgcaacctgctattttcagaaaccattagagctgggcgcagacatcgccatgtattctctgacaaagtacatgaatggccattccgacatcacgatgggcgcagcgatcaccaagagaaaggacatcgcggaaaaattggcattcgcgcagaaagccatgggtatcattccatctccatacgattgcgcattgctgcatcgaagtctcaagactctggagttgaggatgaagcaacattcgaaaaatggactggtcgttgccatgtttttggaaactcacccagcggtaacgaaggtgatgcatccgttcttgccatcacatccacaacacgagttggccaaaaagcagatgacaggccacagtgggatgctctctttttaccacaaaggaaattcgttgaaatttttcaaagcattgaaactatttttactggctgagtcacttggtggctatgagtcattggcagagttaccatctgtaatgacacacgcgtcgatatcagaagatgagcgagaaaaacttggaattactgatgatttgattcgattgtcatgtggaatcgagacaactgaagatctcattgaagatttaggtcgagctttggatgctgctatgtcttga

SEQ ID NO: 13619 - protein, 388 aa, Nasonia vitripennis
MSEEIKGGFATKAIHAGLDPQQWTHSPVVPPLVMSTTFRHDAPGQHQGYYYSRSGNPTRDALQVCLAALENGTDAKVFSSGLGALTALMSLLQTGDHVVSGDDIYGGTNRFFKQVASRQNIQVSFVSPEDTESFVKAIKANTKMVWLESPTNPLMQLADIETISEEIRKIRSDIYIVVDNTFATCYFQKPLELGADIAMYSLTKYMNGHSDITMGAAITKRKDIAEKLAFAQKAMGIIPSPYDCALLHRSLKTLELRMKQHSKNGLVVAMFLETHPAVTKVMHPFLPSHPQHELAKKQMTGHSGMLSFYHKGNSLKFFKALKLFLLAESLGGYESLAELPSVMTHASISEDEREKLGITDDLIRLSCGIETTEDLIEDLGRALDAAMS

SEQ ID NO: 13620 - DNA, 1188 bp, Anopheles gambiae str. PEST
  CDS (1)..(1188)
atggcccaatcaaacagcgatggcttcctcagccagccgaagggcttctccaccaaagcgatccacgttgggcaggatccggagcagtggaacagcatggcggtggtgccaccgatcagcatgagcaccacgttcaagcagcacggcccggggcagcatgcgggcttcgagtacgggcgcagcggaaacccaacgcgcgacgtgctggaacgctgccttgcctcgctggacaatggacgcttcgggctaacgttctcgtccgggctcggtgcgacgacgaccatcattacgatgctgcagaacggtgaccacatcgtggccggtgacgatctgtacggtggcaccaaccggttgctgcgcaatgtcgccctcaagatgggcattgaggttgatttcgtcgatcttaccaacatgcagctggtggagcaagcgatcaaaccgaacacgcggctgttctggatggaaacgccaaccaatccgctgctgaaggtggtggacatacgggcggtgtcggagatcgcccacaagcatccgggtatcgtggtggttgtggacaacacgttcctgtcgtcgtacctgcagcgcccgcttgatttgggcgcggacgtcgtcatgtactcgctgacgaagtacatgaacggtcactcggatgtcattatgggtgccatggtaacgaacgatgaggctgtgtacgaacgtttgaagttcctgcaaaatgccgccggtattgtgccatccccgttcgactgctatctggtcaaccggagcctgaaaacgctcgccctgcgcatggaacgccacaagagcaactcgctggcgattgccaggttcctcgaaacgcatccaaaggtggagcgggtgctgcacccgggcctgccaagccacccacagcatgagctggccaagcgacaaacgtacgggcacagcggcatcatgtcgttctacatccgcggcgggctggaggagtcgagcaacttcctgaaggcgctgcacgtgttcacgctcgcggaaagcctcggcgggtacgaaagcctggccgagctgccgtcggtgatgacgcacgcgtcggtgccgctgcagcagcgccaggagctcggcatcaccgacggactggttcggctttccgtcgggctggaggatgtggatgatctgatcgccgatttgcagcaagcgctggataaggcataa

SEQ ID NO: 13621 - protein, 395 aa, Anopheles gambiae str. PEST
MAQSNSDGFLSQPKGFSTKAIHVGQDPEQWNSMAVVPPISMSTTFKQHGPGQHAGFEYGRSGNPTRDVLERCLASLDNGRFGLTFSSGLGATTTIITMLQNGDHIVAGDDLYGGTNRLLRNVALKMGIEVDFVDLTNMQLVEQAIKPNTRLFWMETPTNPLLKVVDIRAVSEIAHKHPGIVVVVDNTFLSSYLQRPLDLGADVVMYSLTKYMNGHSDVIMGAMVTNDEAVYERLKFLQNAAGIVPSPFDCYLVNRSLKTLALRMERHKSNSLAIARFLETHPKVERVLHPGLPSHPQHELAKRQTYGHSGIMSFYIRGGLEESSNFLKALHVFTLAESLGGYESLAELPSVMTHASVPLQQRQELGITDGLVRLSVGLEDVDDLIADLQQALDKA

SEQ ID NO: 13622 - DNA, 1302 bp, Magnaporthe grisea 70-15
  CDS (1)..(1302)
atgatcaacagcaagatgcatcccgaaaccaaaccacaggaaactagtgccagcgccgacgtccgttcgggcccggcggcgctggaggcggcgtttccgcaacatgcactttccctaacgtcgcgtgccatgcacgccgatgactacatcaacaaccaccgtgccgtcgcccctccgatgcacgtcagcaccacctaccgctacacagacgacccggataagctcacgtactggggcaatgtagatcctaacgccccctacgactcccacgtctactcgcgcgagacggcacccaacacgactcggctcgaggccatcctcacgtccctgctgggagggccgtcgctgtcgtacggctcgggcctcgcggccttccacgccatgctcaccatgctcaacccgcgccgcatcgccatcggcggcggctaccacggctgccacggcgtcatccgcctgatgaatcggctcacgggcgtcgagcagctcaccctcgcccccgaggacctcgaaaagctccaggcgggcgacgtactgcacgtcgagaccccgctgaatcccacgggcgaggcccgcgacctggagcactacgcctccatcgccaaggccaagggcgccatcttgacggtcgacgcgacctttgccccgccgcctctgctggagccgtttgtttttggtactgacatagtcatgcacagcgggaccaagtactttggcggccactcggacatgctctgtggcgtgctctccatcaacccccagcgcaagtccgagggctggtttgagaagctcttcgaggaccgtctcttcctcgggtccgtcatggggagcatggagggctggttgggcgtgcgcagcctgaggacgttggagcttcgcgtccagaggcagagcagtaccacagatgagcttgttgcctggcttgcctcggcgactggaccggacccggcgtcacccctgggcggcctgttgagaagagtacagcacgcaagcctccaacccgaggccgcagacccgaattcgtggctgcgaaggcagatgcctcgtggctttgggcccgtcttctccatctaccttgacagcgaagatcacgccaagcggctccccggaaagctgcacctgttccatcatgccacaagtctgggtggcgtcgaatcactgattgagtggcgcgccatgacggacccgaatctcgacaaggctctgctgagagtcagcatcggtattgaggcgcttgaggatctcaaagctgattttgttcaaggattccgtgccctcattgaagaggacaagaccagaagctga

SEQ ID NO: 13623 - protein, 433 aa, Magnaporthe grisea 70-15
MINSKMHPETKPQETSASADVRSGPAALEAAFPQHALSLTSRAMHADDYINNHRAVAPPMHVSTTYRYTDDPDKLTYWGNVDPNAPYDSHVYSRETAPNTTRLEAILTSLLGGPSLSYGSGLAAFHAMLTMLNPRRIAIGGGYHGCHGVIRLMNRLTGVEQLTLAPEDLEKLQAGDVLHVETPLNPTGEARDLEHYASIAKAKGAILTVDATFAPPPLLEPFVFGTDIVMHSGTKYFGGHSDMLCGVLSINPQRKSEGWFEKLFEDRLFLGSVMGSMEGWLGVRSLRTLELRVQRQSSTTDELVAWLASATGPDPASPLGGLLRRVQHASLQPEAADPNSWLRRQMPRGFGPVFSIYLDSEDHAKRLPGKLHLFHHATSLGGVESLIEWRAMTDPNLDKALLRVSIGIEALEDLKADFVQGFRALIEEDKTRS

SEQ ID NO: 13624 - DNA, 1281 bp, Magnaporthe grisea 70-15
  CDS (1)..(1281)
atgacggcttcaaatctccacgaacaggctcctgctgtggcggccgtggcacaccagcagcagcaacaacagcagcagtcatcccgaggcttcgcgacccgagctgtccacgccggtagctcacccgacccaacgaccggagcggtcatcccagccatctcgctctctacgacattccgacaatcggcaccatcacagcccgtcggcctttacgaatacagccgcagtgcaaacccgaaccgtgacaacttcgaggaggccgtcgcttccctcgaaaatgcccggcatggcttcgccttcagctcaggcagcgccaccacagccgtggtgctccaaagcctggccagtggctcccatgtcatctcggtctcggatgtgtacggcggaacgcatcgttacttcacacaggtcgcccaagcacacaatatcgaggtgacctttagccacgacattgttgccgatgtgggctcgcaaattcgcccagacaccaagctcatctggattgagtcccccagcaaccctaccctgagcttggtcgacatccgtgccgttgccgatgccgcccacgcgcgcggcgtcctggtcgtcgtcgacaacaccttcctctccccatacatccagaacccgctaaaccttggcgccgacatcgtcgtccacagcgtcaccaagtacatcaacggccacagcgatgtggtcatgggtgtggccgcctgcaacgacgacgccctagcgagccgcttgcgctttctgcaaaacgccatcggcgccgtgccctcggccttcgactcgtggctagctcaccgtggactcaagacgctgcacctgcgtgctcgcgaggcttcgcgcaacgccgccgccgttgctgcctttctcgagaccagtccttacgtcatctcggtcaactacccggggctcgagtcccacccgcagcgggatattgcccgccggcagcaccgcgacggcatgggaggtggcatgctgtcattccgcgttaagggtggtttggttgctgccgacagcttctgcagtaccacgcgtgtcttcacattggccgagtcgctgggcggagtcgagtccttggttgagttgcccagcgtcatgacccacgcaggtatccctcgccagagcagggaggccgttggtatctacgacgatctgatccgcatcagctgcggcatcgaggaggccgaagatctggtggccgatgtcaggcaggctcttgaggctgctgctttggccagcaagctacacagtagcagcggcaacggcaatgggcactga

SEQ ID NO: 13625 - protein, 426 aa, Magnaporthe grisea 70-15
MTASNLHEQAPAVAAVAHQQQQQQQQSSRGFATRAVHAGSSPDPTTGAVIPAISLSTTFRQSAPSQPVGLYEYSRSANPNRDNFEEAVASLENARHGFAFSSGSATTAVVLQSLASGSHVISVSDVYGGTHRYFTQVAQAHNIEVTFSHDIVADVGSQIRPDTKLIWIESPSNPTLSLVDIRAVADAAHARGVLVVVDNTFLSPYIQNPLNLGADIVVHSVTKYINGHSDVVMGVAACNDDALASRLRFLQNAIGAVPSAFDSWLAHRGLKTLHLRAREASRNAAAVAAFLETSPYVISVNYPGLESHPQRDIARRQHRDGMGGGMLSFRVKGGLVAADSFCSTTRVFTLAESLGGVESLVELPSVMTHAGIPRQSREAVGIYDDLIRISCGIEEAEDLVADVRQALEAAALASKLHSSSGNGNGH

SEQ ID NO: 13626 - DNA, 1365 bp, Magnaporthe grisea 70-15
  CDS (1)..(1365)
atggcgggccaacccagcattccgtctgccatcggcgccaagaaggctcttggcctggtggatgttgacggtcatgacctgccgccatcgccggcaccttctagcccttccaacggccgccgccgttacgccctggcaaccgagctggtatacacagaaaccaaggaccaatatggcgcctccagcattcccatctaccaatccgccaccttcaagcaatcttcagcagccggcggcaacagcgagtatgactacacacgctcaggaaacccgacgaggacgcacctggagcgtcacatggctaagatcatgaacgcaaaccgcgccctggctgttggctctggcatgggcgccttggatgtcatcacacgtctgctccgtcctggcgatgaggtcatcacgggagacgacctgtacggcggtaccaaccgtctgctcacctacctctcggcgaaccagggcattatcgtccaccacattgacaccaccgacatcgaccgtgttgctgccacagtctcggacaagactgccatggtccttctcgagaccccgacgaacccgcttatcaaaattgtcgatgttgccaccatcgcccgcgctgcccacgaccgcaactctaaagccctggtcgtcgttgacaacaccatgctttcccccatgctttgcaaccccctggatcttggcgccgatattgtgtacgagtccggaaccaaatatctctctggacaccacgacattatgtcgggtattgttgcctgcaacgatgccgctctggccgaccgcatgtacttcaccgtcaatgccactggctgtggtctctcgccaaacgactccttcctactcatgcgcggcatcaagacgttggctgtgcgcatggaaaagcagcaggccaacgcccaacgcatagccgagtttctcgagtctcacggcttccgcgtccgctaccctggtctgaagtcgcacccgcaatacgatttgcactggtcgatggcccggggcgccggtgccgtcctgtcctttgagacgggcgatgcggaactgtctcaacgcatcgtcgaggccgcacgcctctgggccatcagcgtcagctttggctgtgtcaacagtctgatcagcatgccctgccagatgagccacgccagtattgatgccaagacgcgcaaggaaagacagatgccagaggatattatccgactttgcgtcggaattgaggatgttcaggatttgatagacgatctttccagagcccttgtaactgccggtgccgtctccataactgttgacggattccatgccacaggaactgccctggagctcggccagacaccgctgacgacgacgaaaaacgacagccccgcacaataa

SEQ ID NO: 13627 - protein, 454 aa, Magnaporthe grisea 70-15
MAGQPSIPSAIGAKKALGLVDVDGHDLPPSPAPSSPSNGRRRYALATELVYTETKDQYGASSIPIYQSATFKQSSAAGGNSEYDYTRSGNPTRTHLERHMAKIMNANRALAVGSGMGALDVITRLLRPGDEVITGDDLYGGTNRLLTYLSANQGIIVHHIDTTDIDRVAATVSDKTAMVLLETPTNPLIKIVDVATIARAAHDRNSKALVVVDNTMLSPMLCNPLDLGADIVYESGTKYLSGHHDIMSGIVACNDAALADRMYFTVNATGCGLSPNDSFLLMRGIKTLAVRMEKQQANAQRIAEFLESHGFRVRYPGLKSHPQYDLHWSMARGAGAVLSFETGDAELSQRIVEAARLWAISVSFGCVNSLISMPCQMSHASIDAKTRKERQMPEDIIRLCVGIEDVQDLIDDLSRALVTAGAVSITVDGFHATGTALELGQTPLTTTKNDSPAQ

SEQ ID NO: 13628 - DNA, 1371 bp, Magnaporthe grisea 70-15
  CDS (1)..(1371)
atgtctgacctgagcaagaactttgaaaccctccagctccatgctggccagcaacctgacccagcaaccaattctcgcgccgtcccgatctatgccacaactagcttcgtcttcaatgactcggcccacggtgccaggctcttcggcctcaagcagtttggcaacatctacagccgcctagcgaacccgaccgtcgatgtattcgagaagcgagttgcggcgctcgagggtggcgtcgctgccgttgccacggcctcgggccaagcggcccagttcatgacaatcctggccctcgcccacgccggcgacaacatcgtatcgacgtcgaacctctacggcggcacctacaaccagttcaaggtcatgttcccaaggctaggcatccagacaaagttcgtcgacggcgacaagcccgaggacctgatcgccgccattgacgacaagacaaaggccgtctacctcgagagcatcggaaacccgaggtacaacatcccggactttgagaagatcaccaagctggcgcacgaaaagggggtgcccgttgttgtcgacaacacctttggtgccggcggatactttgtcaggcccatcgagcacggcgccgacatcgtggtgcactcggctaccaagtggatcggcggacacggcaccaccatcggcggcatcatcgtcgacagcggcaagttcgactggggcgccaactccaagcgcttccctcagatggtcgagccatccgagggctaccatggcctcaagttctgggagacgtttgggcccatcacctttgccatccgtgtgcgcgttgaggtgctccgcgacctgggagcctgcctcagcccctttgcggcgcagcagctcatcctgggtctcgagacgctgagcctgcgcgcagagcggcatgcgcagaacgcactcgcgctggccaggcacctcgagaagagcccctacgtcgcgtgggtgtcgtacccgggtctcgagagccacggcagccacgagaacgccaagaagtacctcaagcgcgggttcggtggcgtgctcagcgtcggcgtcaagggcggtggcgctgcgggcagccaggtcgtggacggcttcaagatgattagcaacttggccaacgttggagactccaagaccctggccatccacccgtggacgaccacccatgagcagctgtcggagcaggagcgcatcagctcgggagtcactgaggacctcatccgcatctcggttggcacggagcacatcgacgacatcattgccgactttgagcagtcgttcaagagtgccgcggccaccaccaagtcgacagacggtggggacgctaagggtgctcccggaaaggaggacgaggccgcgccggtcgtcgtgtga

SEQ ID NO: 13629 - protein, 456 aa, Magnaporthe grisea 70-15
MSDLSKNFETLQLHAGQQPDPATNSRAVPIYATTSFVFNDSAHGARLFGLKQFGNIYSRLANPTVDVFEKRVAALEGGVAAVATASGQAAQFMTILALAHAGDNIVSTSNLYGGTYNQFKVMFPRLGIQTKFVDGDKPEDLIAAIDDKTKAVYLESIGNPRYNIPDFEKITKLAHEKGVPVVVDNTFGAGGYFVRPIEHGADIVVHSATKWIGGHGTTIGGIIVDSGKFDWGANSKRFPQMVEPSEGYHGLKFWETFGPITFAIRVRVEVLRDLGACLSPFAAQQLILGLETLSLRAERHAQNALALARHLEKSPYVAWVSYPGLESHGSHENAKKYLKRGFGGVLSVGVKGGGAAGSQVVDGFKMISNLANVGDSKTLAIHPWTTTHEQLSEQERISSGVTEDLIRISVGTEHIDDIIADFEQSFKSAAATTKSTDGGDAKGAPGKEDEAAPVVV

SEQ ID NO: 13630 - DNA, 1266 bp, Gibberella zeae PH-1
  CDS (1)..(1266)
atggcatctgacgaagttccaaccaacctcaatgacatctcctccgtcactgacggtactgggggggctcaggctgggcttgacgataaacttgccgggctctcgctggcttcacgcgcagtccatgccgataatggtatccagtcgcacagggccgttgcaccggctatgcatgtcagcacgacttttaggtacaatgacgatcctgatgcactgagggcttgggataataccgatcctaacaaccctcttgactctcatgtctactccagagcaactggtccaaacactacccgtctcgaagccgtcctgacatctgtcatcggtgctccaaccgtaacttactcttctggtctatccgcctttcatgctatgctggttcacttgaaccctaagcgcattgccattggagacggttaccacggctgccatggtgtcatcagcatcatgacccgtctaacaggcctcaaggtcctggcccttgactgtgccgtcgaggacctcgagcctggcgatatcatccacgtcgagacaccactgaacccgacaggtgaagcccgtgatctggctgcgtatgcagagaaggcgaagaaggccggcgcttacttgactgtcgatgcaacatttgcgccgcctcctctgcaggatcctttccagtatgacgttgatgtggttatgcatagcgggacgaaatattttggcggccactccgacatgctctgcggtacactttctattaaccgcaagcatactaactgggaagctgctcttcttagtgaccgtatgctcatcggttctgtcatgggtagtctggaaggctggttaggtattcgctcgctgcgaactttggagctccgtgttcaacgtcagagcgccacggctactgcactcgtggcctggctggtcgagcaacagcgtgattcttcatctgtagtcggtgccctggtcgagcggatccagcatgctagtctacagcccgaagcgtctgttgaaggcagctggctgcaaaaacagatgccaaacggctacgggcctgtgttctcaatttatctccgtgatgaggagcacgccaagcggttgccttccaagctggagctattccaccacgctaccagtctaggaggcgtggagagccttattgagtggcgtgcaatgacggatcccaaaatcgacaagaaactgctgcgggtcagcatcggtgttgaaggtctcgaggatttaaagcaagatcttctccagggtctggaggctttgagaaagaaataa

SEQ ID NO: 13631 - protein, 421 aa, Gibberella zeae PH-1
MASDEVPTNLNDISSVTDGTGGAQAGLDDKLAGLSLASRAVHADNGIQSHRAVAPAMHVSTTFRYNDDPDALRAWDNTDPNNPLDSHVYSRATGPNTTRLEAVLTSVIGAPTVTYSSGLSAFHAMLVHLNPKRIAIGDGYHGCHGVISIMTRLTGLKVLALDCAVEDLEPGDIIHVETPLNPTGEARDLAAYAEKAKKAGAYLTVDATFAPPPLQDPFQYDVDVVMHSGTKYFGGHSDMLCGTLSINRKHTNWEAALLSDRMLIGSVMGSLEGWLGIRSLRTLELRVQRQSATATALVAWLVEQQRDSSSVVGALVERIQHASLQPEASVEGSWLQKQMPNGYGPVFSIYLRDEEHAKRLPSKLELFHHATSLGGVESLIEWRAMTDPKIDKKLLRVSIGVEGLEDLKQDLLQGLEALRKK

SEQ ID NO: 13632 - DNA, 1272 bp, Gibberella zeae PH-1
  CDS (1)..(1272)
atgtcttccgctcctctcaactcagaccccgtggccaccccacctcgtcctccgtctcccgtccacaacttcggtactctcgccgtccacgccggcgctccacatgaccccgccaccggagccgtgatcgagtctatctcattgtccaccacctttgctcagtccgctgttggcaagcccgttggcgagtacgagtactctcgatcctccaaccctaaccgtaccaacttcgagacggctgttgctgctctcgagcacgccaagtacgctctcgccttctcctccggttccgccaccaccgccaccattctccagagtctggctgccggcagccatgtcatttccgtctccgacgtctacggcggtacccaccgttacttcacccaggtcgcaaaggcccacggcgtcaaggtcactttcacaccagagatcgaggtcgacatcgccgagcacatcactcccgatactcgtctgatctggatcgagactcccagcaaccctacactgcgcctcgtcgatatccgagctgtcgttactgaggcccacaagcatggtgtcctcgtcgttgtcgacaacaccttcctctctccctacgtccagaaccctctcgactttggtgccgatatcgttgttcacagtgtcaccaagtacatcaatggtcacagtgatgtcgttatgggtgttgctgcctttaacagcgacgagctcaaggcccgcctgagcttcctccagaacgccattggtgctgttccctctgctttcgactcctggctcgcccaccgtggtctcaagaccctgcacctgcgagctcgcgaggccagccgcaacgcggacgctgttgcccgagctctggaggcttctcctctggtcattgctgtcaactaccccggccttgactcccacccccaccgacacatcgccaagaagcagcaccgcgacgctctcggcggcggtatgctctctttccgtatccagggcggccacgctgccgctgagcgcttctgccaggtgacaaagatcttcaccctcgccgagagtctgggtggtgttgagagtctggtggaggttcccagcagcatgacccacgctggtatccctcgggatcagcgtgaggccgtcggtatcttcgacgaccttgtccgcatcagctgcggtgtcgaggatgctcaggatctcaccaacgatgtcctccaggccctcgagaaggctacctccgcagctaaggctaacggtctcaacggcaacggcgttaacggctccaacggacactaa

SEQ ID NO: 13633 - protein, 423 aa, Gibberella zeae PH-1
MSSAPLNSDPVATPPRPPSPVHNFGTLAVHAGAPHDPATGAVIESISLSTTFAQSAVGKPVGEYEYSRSSNPNRTNFETAVAALEHAKYALAFSSGSATTATILQSLAAGSHVISVSDVYGGTHRYFTQVAKAHGVKVTFTPEIEVDIAEHITPDTRLIWIETPSNPTLRLVDIRAVVTEAHKHGVLVVVDNTFLSPYVQNPLDFGADIVVHSVTKYINGHSDVVMGVAAFNSDELKARLSFLQNAIGAVPSAFDSWLAHRGLKTLHLRAREASRNADAVARALEASPLVIAVNYPGLDSHPHRHIAKKQHRDALGGGMLSFRIQGGHAAAERFCQVTKIFTLAESLGGVESLVEVPSSMTHAGIPRDQREAVGIFDDLVRISCGVEDAQDLTNDVLQALEKATSAAKANGLNGNGVNGSNGH

SEQ ID NO: 13634 - DNA, 1365 bp, Gibberella zeae PH-1
  CDS (1)..(1365)
atgtcggaggaacttagcaagaactttgagacattgcagctccacgcgggagctgagattgatcccactactcgctctcgagctgtcccaatctacgccacaactagctatgccttcaaggactctgcccatggcgccaggctctttggtctcaaggagtttggcaatatctacagccgtatcatgaaccccacagtcgatgtctttgaaaagagaatagccgctcttgaaggtggtgtcgccgctctagctgcctcttcgggccaggcagcccaattcctcgccatcagcactcttgctcaagccggcgacaacattgtttctacctctaacctctacggtggtacttacaatcagttcaaggttttcttccctcgcctcggcatcaaaaccaagtttgtcgacggtgacaagcccgaggatatcgccgctgctattgacgacaagacaaaggctgtctatgtcgagagtatcggcaaccccaagtacaacattcctgacctcgaggctatttccaaggctgctcacgagaagggcgttcctgtgattgttgacaacacattcggtgctggaggttacttcatccgtcccatcgaccatggcgctgatatcgttgtccactctgccaccaaatggatcggtggccacggaacaaccatcggaggcgtcgtcgtcgactctggaaagtttgactggggcaagaacgcctctcgtttccctcaattccacgagccctcagaaggctaccatggtctcaagttttacgagacatttggcaacatcactttcatcatccgcgcccgtgttgagattctccgtgatctcggttcagccctgaaccctttcgctgcccagcagttgcttttgggcattgaaactctcagcttgcgagctgagcgacatgcccagaacgctctggctctggcgcagtacctcgagaagagtccttatgtcagctgggtctcctaccctggtcttgagagtcacccgtaccacgagacggctaagaagtacctgaagaggggttttggtggtgttcttagctttggtgtcaagggtggtggtgctggtagcgaagtcgttgatggcttcaagctcatttctaaccttgctaacgtcggcgatgctaagacattggctattcacccctggagcaccactcacgagcagctttccgatgaggagaagcgaagctctggtgttactgaggatcttattcgaatctctgttggtatcgagcacattgacgacatcattgccgactttgatcaatctttcaaggctgcttcagatgttaccaccaagggtgagaagaaggagattccccttgatgataaggaagccgaggctccccttgccccttaa

SEQ ID NO: 13635 - protein, 454 aa, Gibberella zeae PH-1
MSEELSKNFETLQLHAGAEIDPTTRSRAVPIYATTSYAFKDSAHGARLFGLKEFGNIYSRIMNPTVDVFEKRIAALEGGVAALAASSGQAAQFLAISTLAQAGDNIVSTSNLYGGTYNQFKVFFPRLGIKTKFVDGDKPEDIAAAIDDKTKAVYVESIGNPKYNIPDLEAISKAAHEKGVPVIVDNTFGAGGYFIRPIDHGADIVVHSATKWIGGHGTTIGGVVVDSGKFDWGKNASRFPQFHEPSEGYHGLKFYETFGNITFIIRARVEILRDLGSALNPFAAQQLLLGIETLSLRAERHAQNALALAQYLEKSPYVSWVSYPGLESHPYHETAKKYLKRGFGGVLSFGVKGGGAGSEVVDGFKLISNLANVGDAKTLAIHPWSTTHEQLSDEEKRSSGVTEDLIRISVGIEHIDDIIADFDQSFKAASDVTTKGEKKEIPLDDKEAEAPLAP

SEQ ID NO: 13636 - DNA, 1311 bp, Gibberella zeae PH-1
  CDS (1)..(1311)
atggcctctccttcgcccaccgagtccggcaatgagggacacgaccttcctccatctcctgctccatcgagcccgcgcactggtcgcaagcgttatgccctcgccaccgaacttgtatacacagatagcaaagatcaatatggcgcctccagcgttcccatctaccagtctgccacctttaagcagacatcggccagcggtggtcagcaagaatacgattacacacgctcaggaaaccctacccgaacccatcttgaacgacacattgccaagattatgaacgctcagcgagcattggccatcagctctggaatgggtgctctcgatgtcattactagattgcttcgacctggcgacgaagtcatcaccggtgatgatctttacggtggcagccatcgtctgcttacttacttggctgctaaccaaggcattgtcgtccaccacgtcgacaccacgactgtcgatagcgtgcgggcacgcctttcggaaaagaccgccatggtgcttcttgagacccctaccaaccctttgatcaaggttgttgatattccttccattgctcgcctggttcacgacgtcaaccccaaggctctggttgttgtcgataacacaatgctctcgcccatgctattcaaccctctggatgtgggctgtgacattgtgtacgagtccggaaccaagtacttgtctggtcatcacgacatcatggctggtgttattgccgtgaacgactctcagatcggagacaagctcttctttgttatcaactccacaggatgtggtctgtctcccaacgactcattcctcctcatgcgtggtgtcaagactctcgctattcgaatggaaaagcagcaagccaatgcccaggccatcgcagagttccttgagtctcgcggcttccgtgtccgctacccaggtctcaagtctcatcctcaatacgatttacattggtctatggctcgtggtgctggtgctgttctctctttcgagaccggcgaccctgctgtttctgagcgtatcgttgaggccgcccggctgtgggccatcagcgttagctttggctgtgtgaacagtttgatcagcatgccttgtcagatgagccatgccagtattgacgccaagacacgggcggagcgacaaatgcccgaggacattattcgactgtgtgttggtatcgaagacccaactgacttgattgaggatctttcccgcgccttggttcaagctggtgctgtcactgtcactatggatggcttccacgcaactggagctgccaaggagcttggagagacccctctcgttttccaataa

SEQ ID NO: 13637 - protein, 436 aa, Gibberella zeae PH-1
MASPSPTESGNEGHDLPPSPAPSSPRTGRKRYALATELVYTDSKDQYGASSVPIYQSATFKQTSASGGQQEYDYTRSGNPTRTHLERHIAKIMNAQRALAISSGMGALDVITRLLRPGDEVITGDDLYGGSHRLLTYLAANQGIVVHHVDTTTVDSVRARLSEKTAMVLLETPTNPLIKVVDIPSIARLVHDVNPKALVVVDNTMLSPMLFNPLDVGCDIVYESGTKYLSGHHDIMAGVIAVNDSQIGDKLFFVINSTGCGLSPNDSFLLMRGVKTLAIRMEKQQANAQAIAEFLESRGFRVRYPGLKSHPQYDLHWSMARGAGAVLSFETGDPAVSERIVEAARLWAISVSFGCVNSLISMPCQMSHASIDAKTRAERQMPEDIIRLCVGIEDPTDLIEDLSRALVQAGAVTVTMDGFHATGAAKELGETPLVFQ

SEQ ID NO: 13638 - DNA, 1146 bp, Apis mellifera
  CDS (1)..(1146)
atggagcaaggcttttctacaaaagctattcatgctggacaagatccattacaatggaatgattgttcagtgatacctcctattacattatcaactacttttcaacaagatggacctggacaacctagaacttttatttatggaagaagtggcaatcctacaagaaatgttttacaaacatgtttagctgctttagaagatggaaaatatggatttgttttttcatcaggtttaggtgctacaacagttttaatttcattattaaatgcaggagatcatattatatctggagatgatatttatggtggaactaatcgttttttcaaaaattgtttaaaaaatatttcagtaacatttgtagatatgatagacataaataatattataactaatatacaaccaaatacaaagatgatttggttagaaacaccaactaatcctttacttaaagtaattgatattgaagcagttactcaagcagtaaagcaagtaaattctgaaattcttgtagtagtagataatacttttctaacatgttattatcaaaaaccattaaaattaggtgcagatattgtaatatattctttaacaaaatatatgaatggacattcagatgttattatgggtgcagcaattacaaatagagaagatattgcaaatagacttcgatttttacaaaatgctatgggtattgtttcatcacctctagattgttttttggttaatcgcagtttaaaaactttagaacttagaatgcagcaacatatgaaacatggacttgcagttgcagtatttttacaatcacatccatgtgtagaaaaagtaattcatccatatttaccatcacatccacagcatgaaattgctattaaacaaacatctggtcatagtggaatggtttcattttacctaaaaggtgactctagtaaatttctaaaggcattaaaggtatttacattagcagaatcacttggtggttatgaatctcttgctgaattgccatctgttatgactcatgcttcaattcctgaagaaactaaagaaatgttaggtattaatgataaattgattcgtttgtctgttggtcttgaaactgaaagggatattttggctgatcttgatcaagctcttaaagctagtcaataa

SEQ ID NO: 13639 - protein, 381 aa, Apis mellifera
MEQGFSTKAIHAGQDPLQWNDCSVIPPITLSTTFQQDGPGQPRTFIYGRSGNPTRNVLQTCLAALEDGKYGFVFSSGLGATTVLISLLNAGDHIISGDDIYGGTNRFFKNCLKNISVTFVDMIDINNIITNIQPNTKMIWLETPTNPLLKVIDIEAVTQAVKQVNSEILVVVDNTFLTCYYQKPLKLGADIVIYSLTKYMNGHSDVIMGAAITNREDIANRLRFLQNAMGIVSSPLDCFLVNRSLKTLELRMQQHMKHGLAVAVFLQSHPCVEKVIHPYLPSHPQHEIAIKQTSGHSGMVSFYLKGDSSKFLKALKVFTLAESLGGYESLAELPSVMTHASIPEETKEMLGINDKLIRLSVGLETERDILADLDQALKASQ

SEQ ID NO: 13640 - DNA, 1329 bp, Candida glabrata CBS 138
  CDS (1)..(1329)
atgccatcccacttcgatactcttcaattgcacgctggtcaggagaaccctgacgacaacaaccacagacctagagctgtgccaatctactccaccacttcctttgtgttcaacgactcgcagcacggtgcgcagttgtttggcctagaagtgccaggctacatctactcccgtttccagaaccctactaacaacgtcctggaggagagaatcgctgcgctggaaggcggtgccgctgcgctggctgtatcctcgggccaggctgctcagactttggccgtcgctggtctagcgcacaacggtgacaacatcgtgtccacctctttcctatacggtggtacttacaaccaattcaaagtcgctttcaagagactgggcatcgaggcaagatttgtcgaaggtgacaagccagaggacttcgagaagttgttcgacgaaaggacgaaagctgtctacttggagtccatcggtaacccaaagtacaacgtcccagacttcgagaacatcgtcgccgtcgcccacaagcacggcatcccagtcgtggtcgacaacaccttcggtgctggtggtttcttctgccaacctatcaagtacggtgccgatatagtcacacactccgctacaaagtggatcggtggccacggtactaccatcggtggtatcatcgtcgactccggtaagttcccatggaaggactacccagaaaagttccctcaattctcgaaacctgccgagggttaccacggtaccgtctacaacgagacatacggtaacttggcatatatcgtccatgtcagaactgaactgctaagagacttgggtccaggtatgagtcctttcgctgccttcctgctgctacaaggtgtcgaaactttgtccttgagaggtgaaagacacggccagaacgctttggccttggctaaatggctagaaaagaacccacatgtcgcttgggtttcctaccctggtcttccatcccactcacaccacgaaaacgctaagaagtatctatctaatggtttcggtggtgtgctatcctttggtgttaaggacctacctaatgctgacaaggagaccgacccattcaagctagctggtgctcaagttgttgacaacttgaagattgcttctaacttggccaacgtcggtgactcaaagactctagtcattgctccgtacttcaccactcaccaacaactttctgacccagaaaagttggcttccggtgtcactaaggatttgatccgtgtctccgtcggtaccgaattcatcgatgatatcattgctgatttcgaacaatcctttgccaaggtctacggttccaactaa

SEQ ID NO: 13641 - protein, 442 aa, Candida glabrata CBS 138
MPSHFDTLQLHAGQENPDDNNHRPRAVPIYSTTSFVFNDSQHGAQLFGLEVPGYIYSRFQNPTNNVLEERIAALEGGAAALAVSSGQAAQTLAVAGLAHNGDNIVSTSFLYGGTYNQFKVAFKRLGIEARFVEGDKPEDFEKLFDERTKAVYLESIGNPKYNVPDFENIVAVAHKHGIPVVVDNTFGAGGFFCQPIKYGADIVTHSATKWIGGHGTTIGGIIVDSGKFPWKDYPEKFPQFSKPAEGYHGTVYNETYGNLAYIVHVRTELLRDLGPGMSPFAAFLLLQGVETLSLRGERHGQNALALAKWLEKNPHVAWVSYPGLPSHSHHENAKKYLSNGFGGVLSFGVKDLPNADKETDPFKLAGAQVVDNLKIASNLANVGDSKTLVIAPYFTTHQQLSDPEKLASGVTKDLIRVSVGTEFIDDIIADFEQSFAKVYGSN

SEQ ID NO: 13642 - DNA, 1176 bp, Candida glabrata CBS 138
  CDS (1)..(1176)
atgggtctattagaatctgacaagtttgctaccaaggctattcatgctggtgctcatgaagacattcatggttctgttattgagccaatttctttgtctactactttcaagcaaagcgagccagccaagccaattggtacatatgaatactctagatcccaaaacccaaacagagagaacctagaagctgccattgcctctttggaaggtggtaagtacggtcttgccttctcttccggttccgctaccaccgctgtgatcttgcaatccttgcctcaaggttctcatgctgtctccatcggtgacgtctacggtggtactcacagatacttcaccaaagttgccaacgcccacggtgttgacacttccttcaccaacaacttgatcgaagacttgccaaagcttgtcaaggacaacaccaagttggtctggatcgagtccccaactaacccaactctaaaggttaccgatatccaattggtcgctgaaaacgtcaagaagatcaacaaggacatcctactggtcgtcgacaacacattcttgtccccatacttgtccaacccattgaagttcggtgctgacatcgtcgtccactccgctaccaagtacatcaacggtcactccgatgtggttctaggtgtcttggccaccaacagcaaggacatctacgaaagattgcaattcctacaaaacgccatcggttgtatcccatccccattcgacgcttggttgacccaccgtggtctaaagaccttgcacttgcgtgttagacaagcatccttgaacgccaccaagatcgccactttcctagagagcaacgaaaacgtcgttgccgtcaactacccaggtctacaatctcatccaaactatgatgtcgtcaagaagcaacacagagaagccctaggtggtggtatgatttctttcagaatcaagggtggtgccgaagccgctgctaagttttcttcctctaccagactattcactttggctgaatctctaggtggtatcgaatctctactagaagtcccagctgtgatgacccacggtggtattccaaaggaagccagagaagcctccggtgtctttgacgatctagttagattatcagtcggtattgaagacggtgaagaccttctagaagacatcaagcaagctttgcaaaaggccaccgcttaa

SEQ ID NO: 13643 - protein, 391 aa, Candida glabrata CBS 138
MGLLESDKFATKAIHAGAHEDIHGSVIEPISLSTTFKQSEPAKPIGTYEYSRSQNPNRENLEAAIASLEGGKYGLAFSSGSATTAVILQSLPQGSHAVSIGDVYGGTHRYFTKVANAHGVDTSFTNNLIEDLPKLVKDNTKLVWIESPTNPTLKVTDIQLVAENVKKINKDILLVVDNTFLSPYLSNPLKFGADIVVHSATKYINGHSDVVLGVLATNSKDIYERLQFLQNAIGCIPSPFDAWLTHRGLKTLHLRVRQASLNATKIATFLESNENVVAVNYPGLQSHPNYDVVKKQHREALGGGMISFRIKGGAEAAAKFSSSTRLFTLAESLGGIESLLEVPAVMTHGGIPKEAREASGVFDDLVRLSVGIEDGEDLLEDIKQALQKATA

SEQ ID NO: 13644 - DNA, 1143 bp, Candida glabrata CBS 138
  CDS (1)..(1143)
atgactagacaggacttggccactacattgatccacggtgatgacattaaaaatagggtgcccgatgtggcaccacctattaacgttgctaccacattcaggtacgatgagaacgacctggtaccttggaatgaaagggaagacctagaattcatggatagaacacccatttactcccggttaggccaccctaatgccactaggctcgagagtatattctctgagattttggaaggccatgctgtcatatattcgtcaggcctggcggctttccatgcagccatgactcattttaaccctaagcagttattcataggtcaaagttaccacggtgtccacggtattgcagacatattgtccagaaactacggcctcatacaaaggtctctggatgatatcgaagagtatgcccaaaaaggtgacatagttcacatcgagacgcctgttaacccattcggcacctcttatgacttacaatcgtttgccgacaaggctcattccaggggagctctactaatggtcgattcaacatttgctccacctccactacaatatgcttggaactttggtgctgatataattatgcactctgcgactaaattctttggtggtcattcggacttgttgagtggtgtcttggtgaccaaagatgaagaagtgagcaaacgcctgaaggatgacagaatatacctgggaaccaatgttgcaaacctggaaagccatttgctactaaggtcattaagaacttttgaaatgagaattttgaagcaatcacaaaatgtaactaaaattgtcgaacatttagtctcaaacagagataaatactcaaaggtcttgagacaagtatttcattcatcattacaagatgaatcattcgtaaagaaacaattaataggtggttatacaccagtattctcgatcacactgatgaataaggaacaatgtaagcaattgcctctaaagttgaaatatttccaccatgctacctctttgggtggtgtagagtccctcattgaatggagagccatgacagatccatatattgaccaaacactgattagattttctataggctgtgaatcagccgatgacctgattgctgatcttgatgcagcttttattgaacttgaaaagctacaatag

SEQ ID NO: 13645 - protein, 380 aa, Candida glabrata CBS 138
MTRQDLATTLIHGDDIKNRVPDVAPPINVATTFRYDENDLVPWNEREDLEFMDRTPIYSRLGHPNATRLESIFSEILEGHAVIYSSGLAAFHAAMTHFNPKQLFIGQSYHGVHGIADILSRNYGLIQRSLDDIEEYAQKGDIVHIETPVNPFGTSYDLQSFADKAHSRGALLMVDSTFAPPPLQYAWNFGADIIMHSATKFFGGHSDLLSGVLVTKDEEVSKRLKDDRIYLGTNVANLESHLLLRSLRTFEMRILKQSQNVTKIVEHLVSNRDKYSKVLRQVFHSSLQDESFVKKQLIGGYTPVFSITLMNKEQCKQLPLKLKYFHHATSLGGVESLIEWRAMTDPYIDQTLIRFSIGCESADDLIADLDAAFIELEKLQ

SEQ ID NO: 13646 - DNA, 1140 bp, Candida glabrata CBS 138
  CDS (1)..(1140)
atggttgaactagctaccaaattgatccatgatgatgacaagcacaacagagtttctgatgtcgctccaccaatcaatgtctcgaccacttatcgttacgctgaagaagacttgattccttgggcacaaagagagaacttcgattttatggatgaggcccctgtctactctagggagggtcatcctaactgcactcggttggaaacaatattttctgacattttagaaggccatgccgttttatacgcctcagggttggctgctttctttgcagcaatgatgcactacaacccaaagcaagtgtttctcggacaatgttaccatggtgtgcactgtatcagtgatatgtttaccagaaattttaatgttcaacaaaggactctagaagacatcgcggagtttgccaagaaaggagatgttgtacacttggagtctcctgttaacccgtttggtaccgtaattgatgtaaagaagcttgctgatcttgcccactcaaaaggtgctattgtcatcattgactctacatttgctcctccacctttacaatacgcttgggacctaggagctgatatgatcatgcattctgctaccaaatactttggaggacattctgacttgcttggaggcatcttagtcaccaaagacaaggagattagtagagcattgaaagaagatagaataaatcttggcagtatgattggcaacttagaaagttatttattaatgagatctttgagaacttatgaaatgagaattatgaaacaatccgaaaatgtggttaaaattgttaaatatctgaacgataataaagagaaatatcccaatgtcttgggagacatttatcactcctccattcaaagcgatgcttttgttaaggatcagctggttggcggctacaattctgtcttttcattttgtttgaaatctgaagaacaatgtaagaaattccctgacaaattaaagtactttcatcatgcaacatccttgggtggcattgagtccctaattgaatggagagcgctatctgacgataaaattgatcaaaaactaatgagagtgtctgttggctgtgaatctgcaaaagatttgatcgatgatctatcacaagcattacaagaattggagaatgaatacaaataa

SEQ ID NO: 13647 - protein, 379 aa, Candida glabrata CBS 138
MVELATKLIHDDDKHNRVSDVAPPINVSTTYRYAEEDLIPWAQRENFDFMDEAPVYSREGHPNCTRLETIFSDILEGHAVLYASGLAAFFAAMMHYNPKQVFLGQCYHGVHCISDMFTRNFNVQQRTLEDIAEFAKKGDVVHLESPVNPFGTVIDVKKLADLAHSKGAIVIIDSTFAPPPLQYAWDLGADMIMHSATKYFGGHSDLLGGILVTKDKEISRALKEDRINLGSMIGNLESYLLMRSLRTYEMRIMKQSENVVKIVKYLNDNKEKYPNVLGDIYHSSIQSDAFVKDQLVGGYNSVFSFCLKSEEQCKKFPDKLKYFHHATSLGGIESLIEWRALSDDKIDQKLMRVSVGCESAKDLIDDLSQALQELENEYK

SEQ ID NO: 13648 - DNA, 1353 bp, Candida glabrata CBS 138
  CDS (1)..(1353)
atgtcacagcattatggtgcatctgtagcgcctctatacttgtctactacttttaaagttgatctagaaaatgaaaacaaccaatatgactattccaggtcaggtaaccctacgagaacgctcctgcaacaacaagttgccaaactatatgatgatatcgatccaaacttcgtttttgctgtttccagtggtatgactgctctagacgttgtactgaggtcttttctaccttctgagaccaacaatcactgcattattgcaggtgatgacctttatggtggtactcagagactactaaaccttctgaagatttccatagatactatgcattttgatctctctcatacagaaaattttaaagccaaattctatgacttggtcactataaagaagacaattgtggatataatagtgcttgagtcgccaacaaacccactttgcaaaattatagacattcctcatttgattaaatttatcagaaagtactctccagaaaccctaattgtgatagacaacaccatgatgagtgggctaaattgcaatccattaaaatttggtgcagatgtggtttatgaatctgcaaccaaatatctaaatggtcaccatgatattatggccggtgtgataatagcaaagaataagttattggcagaaaagatatactttctgatcaattcaacaggttctgggttaaatcctatggattcatggttattaattagaggtttaaagacattgtcaattaggctgcacaaacaacaattgaacgccttggccatcagtcactggttggaggaaggatgtggtttcaaaacccataataacaacaacaatctaaagacaagatatattggtctaaaatcacatccagattatgagttgcatagaagtttcaacaaaggccctggtgcagttatcagtttacaaacaggctccataccaatatcaaagaaaatcgttgcctcaaagctactgaaactgtggaatgtcactgtttcatttggctgtgtaaactctttgatctccatgccatgtttaatgtcccatgcatctattgacccagaactgaggaaagaaagacagtttccagaagatctgattcgtctttgttgtggtattgaagatgtaaaggccttacaagaagatctcttaggagcattcgtggaggcaggtgtgataacaattaaaaagcatgacggaagaacatacttgatcaacaatttgaacggtcacattggtgagcatttcatctacagtgaattggaacataagaatgtctacgatcaattctttagttaccaaaattatattgaaaaaaacctactagcaaagcaaagactctcaaagctttga

SEQ ID NO: 13649 - protein, 450 aa, Candida glabrata CBS 138
MSQHYGASVAPLYLSTTFKVDLENENNQYDYSRSGNPTRTLLQQQVAKLYDDIDPNFVFAVSSGMTALDVVLRSFLPSETNNHCIIAGDDLYGGTQRLLNLLKISIDTMHFDLSHTENFKAKFYDLVTIKKTIVDIIVLESPTNPLCKIIDIPHLIKFIRKYSPETLIVIDNTMMSGLNCNPLKFGADVVYESATKYLNGHHDIMAGVIIAKNKLLAEKIYFLINSTGSGLNPMDSWLLIRGLKTLSIRLHKQQLNALAISHWLEEGCGFKTHNNNNNLKTRYIGLKSHPDYELHRSFNKGPGAVISLQTGSIPISKKIVASKLLKLWNVTVSFGCVNSLISMPCLMSHASIDPELRKERQFPEDLIRLCCGIEDVKALQEDLLGAFVEAGVITIKKHDGRTYLINNLNGHIGEHFIYSELEHKNVYDQFFSYQNYIEKNLLAKQRLSKL

SEQ ID NO: 13650 - DNA, 1383 bp, Kluyveromyces lactis NRRL Y-1140
  CDS (1)..(1383)
atgagcaagccatcactgaataccagtttggtatccgtttcccataacgataaatacggatcaagcgtgcctccactataccaatctaccacttttaaagcctcttctttcgaccagttgcaagagtacgactacacgaggtcaggaaacccaactagaaccgtattgcaacaacagatcgctaatctttacgatgtggcaccagaacaggtgtttgccgtctcgagtgggatgactgcactagatatcattttgagaactttgatagataattcagatcacatcccaacgataatcgctggtgatgatttatacggtggtactcaacgtttattaacgttcctacagacgagaaaccatgctaaagtgattcacacagatactacggatgccgagtcgttcatcaaattgtacaattctttggggcaagttgatatcgtgcttttagaatctccaaccaacccgttgatgaaagtcgccgatttaccaaggctgtgccaatttgtgaaacaaaaaggtggttcaagttccaactgtaaaatcgtcgttgataacaccatgatgtcaggtttgaattccaaccctttgcaattcggagcagatgtagtatacgaatccggtacgaaatacctcaatggacaccacgatatcatggctggtgtaataatagccaagaaggacgtggctccatccgtatatttcgtcattaacagtaccggtgccggtctatctccgatggattcatggctcttgatccgtggtctcaagaccttatctgttcgtctttacaaacaacagataaacgcaatggtgctctcgcactggctacaagatatatgcggattcaagcctacagataataaccagcaactaaagacaaggtttgttgggttggaatctcaccctcagttcgaattgcataaaagtttcaacaatggtcccggtgcagtgctatccattgagactggcgacctagcactaagcgaagccattgtaacttctaaaagactaaatatatgggccgtcacggtatcgtttggatgtgtcaactcgttgatctccatgccatgcaagatgtcacatgcctccatcgatccagaactacggaaacaaagagcgttccctgaagacttgatcagactctgttgtgggatagaagacgtcaaagatttacaatatgacttacttgccgcattcgaggaagcaggcttgatcgaattgcaacagagaggtaacgatacatatttattgaacaagaagaacggacacattgcaagaaacaatatcggagaaacataccaagaaaactacaacgtttacgaccaatttttcggtcaacgtctcgtatcaaagacatctcatctacacactgcaaagttgtag

SEQ ID NO: 13651 - protein, 460 aa, Kluyveromyces lactis NRRL Y-1140
MSKPSLNTSLVSVSHNDKYGSSVPPLYQSTTFKASSFDQLQEYDYTRSGNPTRTVLQQQIANLYDVAPEQVFAVSSGMTALDIILRTLIDNSDHIPTIIAGDDLYGGTQRLLTFLQTRNHAKVIHTDTTDAESFIKLYNSLGQVDIVLLESPTNPLMKVADLPRLCQFVKQKGGSSSNCKIVVDNTMMSGLNSNPLQFGADVVYESGTKYLNGHHDIMAGVIIAKKDVAPSVYFVINSTGAGLSPMDSWLLIRGLKTLSVRLYKQQINAMVLSHWLQDICGFKPTDNNQQLKTRFVGLESHPQFELHKSFNNGPGAVLSIETGDLALSEAIVTSKRLNIWAVTVSFGCVNSLISMPCKMSHASIDPELRKQRAFPEDLIRLCCGIEDVKDLQYDLLAAFEEAGLIELQQRGNDTYLLNKKNGHIARNNIGETYQENYNVYDQFFGQRLVSKTSHLHTAKL

SEQ ID NO: 13652 - DNA, 1143 bp, Kluyveromyces lactis NRRL Y-1140
  CDS (1)..(1143)
atgtcgttatcaacagagttagtccacgcagatgacaagcacaacagagtcactgacatagtttctccaatcaatgtcgctaccacgttcaggtacgaagaagttgatttgattccatggaatgagcgagaagatttcagtgtcttggaaaagaagcctatatattccagattggctcatccaaactcccttagggtggaatctgtcctttcgaaggttttggaaggtgaagccgtggtgtatgccaacggtttggctgcatactttgctatgctaacgtattataacccaaagagactttttatcggtgaagggtatcatgggtgccgtagtattgctgatattcacactaggaattggaatttggagcaacacaagttggaaattgatgaaattttgcaacatgcgggtaaaggcgatgtggttcacatagagactccagttaacccgtacgggacctcattcgatatcaaagctttcgctgatgctacacatagtaaaggtgccatcttggtgattgattccacttttgcaccacctccgttgcaaaatccttgggatttcggagttgatgtaattctacattctgcgactaaatacttcggtggtcactctgatcttttagccggtgttctcgccgtcaaggataaagaagttgcttcaaaattgagaactgatagaatctatttgggtacaaatattgctaatttggaggccttcctgttattgagatctttgagaacatttgaaatgagaatccaaactcaatccgaaaatgctaccaagcttgtatcctacttgattgagcataaatctgatttcgaaggtgtgttagaaggtgtattccactcctcgttacagactgaacctttcgttaaggaacaattaaagggtggttacggaccagtgttcgcagtcactttaaattcaaaggaacaatgtaggaaattccctcaattattgacgtgcttccagcatgctacctccttaggtggtgttgaatctctcgttgaatggagagccttgacagatccctacatcatccccaccttgatcagagtttctgttggtgtggaaaatgttgatgatttgattaaggatttcgctaacgctttgaagactttgcaaggagcaaagaattga

SEQ ID NO: 13653 - protein, 380 aa, Kluyveromyces lactis NRRL Y-1140
MSLSTELVHADDKHNRVTDIVSPINVATTFRYEEVDLIPWNEREDFSVLEKKPIYSRLAHPNSLRVESVLSKVLEGEAVVYANGLAAYFAMLTYYNPKRLFIGEGYHGCRSIADIHTRNWNLEQHKLEIDEILQHAGKGDVVHIETPVNPYGTSFDIKAFADATHSKGAILVIDSTFAPPPLQNPWDFGVDVILHSATKYFGGHSDLLAGVLAVKDKEVASKLRTDRIYLGTNIANLEAFLLLRSLRTFEMRIQTQSENATKLVSYLIEHKSDFEGVLEGVFHSSLQTEPFVKEQLKGGYGPVFAVTLNSKEQCRKFPQLLTCFQHATSLGGVESLVEWRALTDPYIIPTLIRVSVGVENVDDLIKDFANALKTLQGAKN

SEQ ID NO: 13654 - DNA, 1176 bp, Kluyveromyces lactis NRRL Y-1140
  CDS (1)..(1176)
atgggtttgttaccaactgataagtttgctacaaaggctattcacgccggtactcacgtggatgttcacggttctgtcattgaaccaatttctttgtctactactttcaagcagtctgctccagctcaaccaattggtgaatacgaatactctagatctcaaaatccaaatagaaagaatttggaagatgccattgctgctttggaaaatggtaaatacggtttagcgttctctagtggttccgccaccactgctgtgattctacaatccttgccacaaggttctcatgcagtttctattggtgatgtttacggtggtactcacagatacttcaccaaagttgccaatgctcatggtgttgaaaccactttcaccaacaacttggtagctgagttgccatctttgatcaaggaaaacactaaattggtttggattgaaaccccaactaacccaactttaaaagttactgatatcgaattagtagccaagaccgctaagtccattaataaggatatcctactggttgttgacaacactttcctatctccatatttgtctaaccctctgaacttcggtgctgacatcgtcgtccactctgctactaaatacattaacggtcactctgacgtcgtcttgggtgtcttagctaccaacgacaaagtcatctacgaaaagttgcaatttttgcaaaacgctattggtgccattccatcaccatttgattcttggttggtacaccgtggtgtcaagactttgcacttgagagttagacaagcttctttgtccgctcacaagattgctgaattcttatcctctaacgaaaatgtcatcgcagttaattacccaggtttaccaactcacgaaagttatgcagtcgttaagaaacaacaccgcgatgctctaggtggtggtatgatctccttcagaatcaaaggtggtgcagaagctgcttctaccttctcatcttctaccagattattcactctggctgaatctcttggtggtatcgaatccctattggaagttcctgccgtcatgacccacggtggtatcccaaaggagcaaagagaagcatccggtgtttacgacgatttggtcagattatccattggtattgaggatacagatgatctattggaagatattaagcaagctcttgcatccgcatccaactaa

SEQ ID NO: 13655 - protein, 391 aa, Kluyveromyces lactis NRRL Y-1140
MGLLPTDKFATKAIHAGTHVDVHGSVIEPISLSTTFKQSAPAQPIGEYEYSRSQNPNRKNLEDAIAALENGKYGLAFSSGSATTAVILQSLPQGSHAVSIGDVYGGTHRYFTKVANAHGVETTFTNNLVAELPSLIKENTKLVWIETPTNPTLKVTDIELVAKTAKSINKDILLVVDNTFLSPYLSNPLNFGADIVVHSATKYINGHSDVVLGVLATNDKVIYEKLQFLQNAIGAIPSPFDSWLVHRGVKTLHLRVRQASLSAHKIAEFLSSNENVIAVNYPGLPTHESYAVVKKQHRDALGGGMISFRIKGGAEAASTFSSSTRLFTLAESLGGIESLLEVPAVMTHGGIPKEQREASGVYDDLVRLSIGIEDTDDLLEDIKQALASASN

SEQ ID NO: 13656 - DNA, 1125 bp, Debaryomyces hansenii CBS767
  CDS (1)..(1125)
atgacaggaatttcaactaatgcaatccacgcaagcgatgaagtaaatcctgtgcgtgatgttataccaccaattaacgtttcaacaacgtacaaatacgctgataatccagacgatttggtgaaatggtcggacatgccagaagaaagttcgattataggaaatattttctattctagaattacgcatcccaattcggagagggtggagaaagcattagagagtattgttggagggccatctgtggcttattcgtcagggttgggggcgttttttgctgcgttgacgtattttaacccaagcatcgtttgcattggaaaggggtatcatgggtgtcacagcataattgatatattcacccgtcttaagggattgaaggtaattggattggatgacgatttggatcaattgaatgcgggagaccttatatgtttagaaacccctgttaatcctgatggaactgtgtttgacatcgagtattttgctcagaaggcgcacaaaaaaggggcattcttgctaatagattcgacgtttgcacctcctccattgcaggatccattcaaatggggtgcagatatggttttacattcagcaacaaaatatcttggtggtcatagtgatttattagcaggagttcttgtaacaaatgatgataaggttaagaatcagttagtcacggatcgccttgctttgggaacaaacattgctaatttagaaagttatttactattaagaagtttaagaacctttgaactaagaataacgagacaggcagagaatactgaaaagcttgtgaaacatttggtaaagaatcgtgatagttatcctaaattgaagaaaatttaccattcttctttgcaaacagaggcatttgttaaaaagcagttaccgaacggatattcgccggtcttttgcattgaactagacaatgaatcgagtgcaaaagaatttccttcgaaattgcgctattttcatcatgcaacttcattaggcggggtagaaagtttgatagaatggagagttctcagtgattccactgttagtccaacattgttaagagttagtgttggtgcggagaatgcagatgacctaattgcagattttgacgaagctttgagatcttaa

SEQ ID NO: 13657 - protein, 374 aa, Debaryomyces hansenii CBS767
MTGISTNAIHASDEVNPVRDVIPPINVSTTYKYADNPDDLVKWSDMPEESSIIGNIFYSRITHPNSERVEKALESIVGGPSVAYSSGLGAFFAALTYFNPSIVCIGKGYHGCHSIIDIFTRLKGLKVIGLDDDLDQLNAGDLICLETPVNPDGTVFDIEYFAQKAHKKGAFLLIDSTFAPPPLQDPFKWGADMVLHSATKYLGGHSDLLAGVLVTNDDKVKNQLVTDRLALGTNIANLESYLLLRSLRTFELRITRQAENTEKLVKHLVKNRDSYPKLKKIYHSSLQTEAFVKKQLPNGYSPVFCIELDNESSAKEFPSKLRYFHHATSLGGVESLIEWRVLSDSTVSPTLLRVSVGAENADDLIADFDEALRS

SEQ ID NO: 13658 - DNA, 1128 bp, Debaryomyces hansenii CBS767
  CDS (1)..(1128)
atgccaggaatttcaactaatagtattcacgcggctgatgaagtgcacaaagtggctgatgtaatgacgccaattcatgttacaactacgtataagtttgatgacgatccagaaaagttaattaaagacgaggatttgcctgaaaattcaataattggaaatgtggtttacgcaagagaaacaaatccaaattccgaaagagtagaaaagcttttagatagtattttagacgggcatactgtggcatacacttctggtttagctgctttttttgctgcgttgacgtactttaatcctaaagtagctagtattggtaaaggttatcatggttgtcatggcatattgaatatattttctcgtctcaaaggtttaaagcaaatatctttagaagatgacttgaatcaattgaatgcgggagatttgatttgtttggaaacccctgtcaatccggacggaaccgtttttgatatccagtactatgctgataaggcacacgaaagaggtgcatttttgttagttgattcgacattcgcacctcctccgttgcaagatccattcaaatggggggctgatatggtatttcactcggccactaaatattttggagggcacagtgatttgttagccggtgtgttggcgacaaaggacatcaatgtgaaaaatcaattggtaaaagatcgtgttgatttgggaagtaacatatctaacttggagagttttttgttgattagaagtttgagaacctacgaacttagaatattgaagcaagcggagaacgcagagaagttgatcaagttcttggtagataacagagaaaagtatcctaagttgaaaaaaatttctcattcttccttacaaacggaaccatttgtcaaaaagcaactttcgaatggatattcgccagtattttgcattgaacttgaaagtgaagctgatgcgaaacaattcccttccaaattgcgttattttcaccacgccacttctttaggaggagtagaaagtttaatagaatggagagttcttagcgattcgactgtcagtcctactttattgaggcttagtgtgggtgtggaaaacattgatgatctaattgctgatgttgaccaggggcttaagtcaattgcttaa

SEQ ID NO: 13659 - protein, 375 aa, Debaryomyces hansenii CBS767
MPGISTNSIHAADEVHKVADVMTPIHVTTTYKFDDDPEKLIKDEDLPENSIIGNVVYARETNPNSERVEKLLDSILDGHTVAYTSGLAAFFAALTYFNPKVASIGKGYHGCHGILNIFSRLKGLKQISLEDDLNQLNAGDLICLETPVNPDGTVFDIQYYADKAHERGAFLLVDSTFAPPPLQDPFKWGADMVFHSATKYFGGHSDLLAGVLATKDINVKNQLVKDRVDLGSNISNLESFLLIRSLRTYELRILKQAENAEKLIKFLVDNREKYPKLKKISHSSLQTEPFVKKQLSNGYSPVFCIELESEADAKQFPSKLRYFHHATSLGGVESLIEWRVLSDSTVSPTLLRLSVGVENIDDLIADVDQGLKSIA

SEQ ID NO: 13660 - DNA, 1215 bp, Debaryomyces hansenii CBS767
  CDS (1)..(1215)
atggcaccacccaaatcgtataatattgagacagaattagtcttttcaaagtcaacggaccaacataatgcatcggttccaccgttgtatcagtccgcgacgtttaaacaaaattcgttatccgatatgggtgaatacgactatactaggtcgggaaatccaactagaacatatttgcaaaatcatatggccaagatcatgaaagctaagcacgcgtttgctgttacaagtggtatgggatgtcttgatgttataaccagaattttaaaaccaggcgatgaagtattggccggagatgatttgtatgggggtactaacagattattgacgtatttgaataagaagggagacttgaaggtgcaacattgggacaccacaaacacagaattatttacttctaagataactaataataccaagatgatttttcttgagtctcctacgaacccgttgatcaaggtgtgcgatgtcaagtccattactgattatgcgcatagaaagaaccctgacgtggttgttgtctttgataacacgatgatgtcgccaatattgatgactcctcttgatttgggagttgatatccagtacgagtctgctaccaagtatcttaacggacaccatgatattatggcgggggttattgctacccgggatgcgaaattggccgaaaaggtgtattttgtcataaactcaactgggtgtggattatcgccttttgattcgtggttattgagcagagggttgagaactctcgctgtcagagtcgagagacagcagcaaaactgccagaagatcgccgaattcttgtccagtattggtttcagagtcagatacccgggattgaagagccatccccaatacgagttacatgcttccatgtgtaaaggtgcgggtgcagtcataagtttcgagactggtagcatcaagacgtcggaaaagattgtggaaaacaccgatatctttggaattgccgtttcgttcgggtgtgtcaactcgttgatatccatgccttgtaagatgtcacatgcctctatcgatgccaagaccagagaagaaagagatttccctgaagatttgatcagattgtgcattggtattgaaaactccgatgatttgattaatgatttgactaaggccttattgaagagtggagccgtcaagatcaactctaaggacgaattattcaatgccgtgtcggtgcaaccaaagttataa

SEQ ID NO: 13661 - protein, 404 aa, Debaryomyces hansenii CBS767
MAPPKSYNIETELVFSKSTDQHNASVPPLYQSATFKQNSLSDMGEYDYTRSGNPTRTYLQNHMAKIMKAKHAFAVTSGMGCLDVITRILKPGDEVLAGDDLYGGTNRLLTYLNKKGDLKVQHWDTTNTELFTSKITNNTKMIFLESPTNPLIKVCDVKSITDYAHRKNPDVVVVFDNTMMSPILMTPLDLGVDIQYESATKYLNGHHDIMAGVIATRDAKLAEKVYFVINSTGCGLSPFDSWLLSRGLRTLAVRVERQQQNCQKIAEFLSSIGFRVRYPGLKSHPQYELHASMCKGAGAVISFETGSIKTSEKIVENTDIFGIAVSFGCVNSLISMPCKMSHASIDAKTREERDFPEDLIRLCIGIENSDDLINDLTKALLKSGAVKINSKDELFNAVSVQPKL

SEQ ID NO: 13662 - DNA, 1203 bp, Debaryomyces hansenii CBS767
  CDS (1)..(1203)
atgactattgaatctaccactaatgttgaatatggctttggtacaaaagccatccatgctggtgcaccaatagatcctaccaccggtgccgttattgaaccactttcgttgtctactacatttgcacaatcggaaccatccaaaccggttggtctttacgagtactcgagatctgctaatcctaacagagataactttgaagccgcagttgctgcgttagaaaaggccaagcatgccatcgctttgagttcgggttctgcgaccacagctttgattatacagtctttgcctatgaactcgcacatcatctcagggggagatgtttacgggggaacccacagatatttcaccaaagttggtgttactcacggtgtcacctcgacatttgttggaaacttggttgaggacttggaatcgaaaatacaggaaaacaccaagttggtctggttagaaaccccatcgaacccaactttgaccgtcactgacattgccaaggttgccagtatcttgaagaaccacgaggccaagaccggctccaagatcttgttggctgtcgacaacacctttttgtctccatacatatccaatccattggaacacggtgccgatgtcgttgtgcactccgtcaccaaatacattaacggtcactctgatgtggttatgggtgttttggctaccaacagcgacgaattgcacgaccgcttcagattcttgcaaaatgccattggttccattccatctccattcgactcgtggttagcccacagaggtttaaagactttgcacttgagagtcagacaagcggccacctctgctcaacaaatcgcccaattcttaacccaacaccctgctgtgttgaaggtcaattacccaggattgaaatcggacccaaaccacgaaattgtcgttaaacaacacagagacagcttaggtggtggtatgatctctttcagaatcaacggtggtgccaaggctgcctccaccttcacctcttcgaccaagttcttcaccttggccgaatccttaggtggtattgaatccttagttgaggttccagccatcatgacccacggtggtattccaaaagaagaaagagaatctaacggtgtcttcgatgacttagttagagtttctgtcggtatcgaagatactgatgacttaatcgaagatgtcagacaagctttagaaaaagcttccaaataa

SEQ ID NO: 13663 - protein, 400 aa, Debaryomyces hansenii CBS767
MTIESTTNVEYGFGTKAIHAGAPIDPTTGAVIEPLSLSTTFAQSEPSKPVGLYEYSRSANPNRDNFEAAVAALEKAKHAIALSSGSATTALIIQSLPMNSHIISGGDVYGGTHRYFTKVGVTHGVTSTFVGNLVEDLESKIQENTKLVWLETPSNPTLTVTDIAKVASILKNHEAKTGSKILLAVDNTFLSPYISNPLEHGADVVVHSVTKYINGHSDVVMGVLATNSDELHDRFRFLQNAIGSIPSPFDSWLAHRGLKTLHLRVRQAATSAQQIAQFLTQHPAVLKVNYPGLKSDPNHEIVVKQHRDSLGGGMISFRINGGAKAASTFTSSTKFFTLAESLGGIESLVEVPAIMTHGGIPKEERESNGVFDDLVRVSVGIEDTDDLIEDVRQALEKASK

SEQ ID NO: 13664 - DNA, 1323 bp, Debaryomyces hansenii CBS767
  CDS (1)..(1323)
atgccatctcattttgatacacttcaattgcacgctggacaaccagttgagaaaccccacaaaccaagagcgcccccaatttatgctactacatcatatgtttttgatgattccaagcatggagctcaattgtttggtttagaaacccctggttatatttactcgcgtattatgaatccaactaacgatgtatttgaacaaagaatggctgctctagaacacggtattggtgcagtggccacatcgtccggacaatctgcacaattcttagcaattgcaggtcttgctcatgtgggagataatttcatctctacatctttcttatatggtggtacttacaatcaattcaaagttgcttttaagagattaggaatcgaaaccaaattcgttaatggggataaggttgaagacttcgctaagcttattgatgataagactaaagcaatctacatcgaaaccattggaaatccaaagtacaatgttccagattttgaagcaatctctaagttagcccatgatcatggtataccagttgttgtggacaatacctttggtgctggaggttatttgattaatccaattgatcacggtgctgatattgtcgttcactcggctaccaaatggattggaggtcacggtactactattgctggtgtcatcgtcgattctggtaatttcccatgggaaaaatacccagaaagattcccacaattctctaaaccatctgagggttaccatggtttagtcttaaatgacgctttaggcaaagctgcttttattggacatgttagaattgaattattgagagatttgggtccagcgttgaacccatttggttcattcttattattacaaggtttagaaactttgtcattacgtgttgaaagacaatcatacaacgctttgaaattagctcaatttcttgaaaaatctccttatgttgaatgggtctcctaccttggtttaccatcccacgaataccatgaaagaagtaagaaatacttaaataacaaagaaaactatggtggtgttttatcatttggtgttaaggatttgggtgaaaataaggaagatccattccaagaggcaagtccaagatttgttgataacttaaaggttgcttccaacttggctaatgtcggtgattccaagactttaatcattgcaccatattacactactcatcaacaattaagtgacgaagaaaaggctgcttctggtgtctcaaaggacttgattagagtttctgtaggtacagaatttattgatgatattattggtgatttcgaacaagccttcaaaacagtttatgagtcttcttaa

SEQ ID NO: 13665 - protein, 440 aa, Debaryomyces hansenii CBS767
MPSHFDTLQLHAGQPVEKPHKPRAPPIYATTSYVFDDSKHGAQLFGLETPGYIYSRIMNPTNDVFEQRMAALEHGIGAVATSSGQSAQFLAIAGLAHVGDNFISTSFLYGGTYNQFKVAFKRLGIETKFVNGDKVEDFAKLIDDKTKAIYIETIGNPKYNVPDFEAISKLAHDHGIPVVVDNTFGAGGYLINPIDHGADIVVHSATKWIGGHGTTIAGVIVDSGNFPWEKYPERFPQFSKPSEGYHGLVLNDALGKAAFIGHVRIELLRDLGPALNPFGSFLLLQGLETLSLRVERQSYNALKLAQFLEKSPYVEWVSYLGLPSHEYHERSKKYLNNKENYGGVLSFGVKDLGENKEDPFQEASPRFVDNLKVASNLANVGDSKTLIIAPYYTTHQQLSDEEKAASGVSKDLIRVSVGTEFIDDIIGDFEQAFKTVYESS

SEQ ID NO: 13666 - DNA, 1143 bp, Yarrowia lipolytica CLIB122
  CDS (1)..(1143)
atgacctctcctgacctctccactctcgcgattcacgcagacgacgaactcgctcgaaccaacgacgtggcaccctcaattgccgtctccaccaccttccggtactccagcaacccggaggatctggtccctctggctgaaaacgaagatgaagcggcctacggaaccaacgagtacgtctactcgcggatcgcccaccccaccacctcgcgagtggaaaaggtgctgtcgaccatcttcaacaacaagttcccggtggtctacaacaacggactggctgcgttcacggccctgattgtccacgtcaaccccaagcgcctgttcatcggagaagcctaccacggctgccatgctgtcagtgacatcttcaagcgaatccgatacaacttggagattctgtcgctagacgaactggacaaggtggagaagggagatctggttcacctggagactcctgtcaaccccaccggttactctagagacctgtcttactacgccgacgctgctcacaaaaagggcggcattttgtctgttgatgctacctttgctcctccccccctgcaggacccctttgattttggagccgacattgtcatgcactcagccaccaagtactttggaggccactctgatctgctggctggaattcttgtcgtcaagacgcacgaggaagccgatcagctggttggtgaccgatctttcctcggatcaggtcccggaaacctcgaatcgtggctactgctccgatctcttcgaacttacaggctgcgaatcaaacagcagtcggataacgccaccgccatcaccaagtacttctccgaccacctctctgacttccccgcgctcaagtgtgtccaccactcgtcctttcagaccgaggactttgtcaagaagcagcttgtgggaggctacggacctgttttcgtgctggaaatgcagtctcgagaagccgcccgagctctgcccagcaagctcaagttcttcaaccacgccacttctcttggaggagtcgaatcgctgattgaatggcgactcatgagtgacgctaccactaaccctgcttacctgcgggtctctgttggtgttgaggacgccaatgacctcatcggcgatctcaagcaggctcttgaggcttccaaataa

SEQ ID NO: 13667 - protein, 380 aa, Yarrowia lipolytica CLIB122 [sequence omitted]

SEQ ID NO: 13668 - DNA, 1305 bp, Yarrowia lipolytica CLIB122
  CDS (1)..(1305)
atgtccttcaacgaactagccagtaagctggaaaagctcaacacttccaccgagacagaagagctccctccttctcctgctctgtcttctcctcgacagagacgacagtatgccatcgagaccgagctggtgtacaccgatgctggcgagggagccgacaaataccacagatcgagcagtgtgccgatcttccagaccgccaccttcaagcaggagtcgctgagcaacatgggcgagtacgactacactcgaagtggcaatcctactcgaagtgctcttgagcgacatttggccaagatcatgggtgcctctcgggccctggctgtttcctcgggaatgaccgctctagatgtcgtgactagattgctcaagcccggagacgaggttgttaccggagacgatctgtacggaggaaccaaccgtctgctcacatacctcaaggagaacgctggaatcattgttcaccacgttgacacaactaacctggagtctgcctccaaggtgtttggccccaagactgcgttggtgctgctcgaatccccaactaatcctctcatcaaggtctgtgacatccaaggccttgcagcagctgcccatgctggaaaccccaatgcccttgtttgtgtcgacaacaccatgctgtcgccactgctcatgcgacctctggagcttggagccgacattgtctacgagtctggaacaaagtacctctctggtcatcacgacatcatggccggtgtactggctgtccgagaaaacaaggtgggcgatcgcctcttcttcacaatcaacgcatctggctgcggcttgtctcccttcgactcgtggcttctgctccgaggtatcaagacgctgtcagtccgtctggagaagcagcagagaaacgcacagcaggtggccgaatttttgcacgaggccggtttcaaggtccgatttcctggtctcaagtcgcatccacagtacgatctccactggaagcaatcgcgcggagcaggtgccgttctctctttcgagactggatctgtcgctttgtcggaaaagattgtcgaggctgcccgaatctggggtatctccgtctccttcggctgtgtcaactctctcatttccatgccttgcaagatgagccatgcctccatcgacgaaaagactcgaaaggaacgtgacttccctgaggatctcattcgattgtgtgttggtatcgaagaccccgatgatctgattgatgacctcaagaccgccctcgtgaaggctggtgctgttaccatcggcatcgatggccagcttaccaacaacgtcagcaactaa

SEQ ID NO: 13669 - protein, 434 aa, Yarrowia lipolytica CLIB122
MSFNELASKLEKLNTSTETEELPPSPALSSPRQRRQYAIETELVYTDAGEGADKYHRSSSVPIFQTATFKQESLSNMGEYDYTRSGNPTRSALERHLAKIMGASRALAVSSGMTALDVVTRLLKPGDEVVTGDDLYGGTNRLLTYLKENAGIIVHHVDTTNLESASKVFGPKTALVLLESPTNPLIKVCDIQGLAAAAHAGNPNALVCVDNTMLSPLLMRPLELGADIVYESGTKYLSGHHDIMAGVLAVRENKVGDRLFFTINASGCGLSPFDSWLLLRGIKTLSVRLEKQQRNAQQVAEFLHEAGFKVRFPGLKSHPQYDLHWKQSRGAGAVLSFETGSVALSEKIVEAARIWGISVSFGCVNSLISMPCKMSHASIDEKTRKERDFPEDLIRLCVGIEDPDDLIDDLKTALVKAGAVTIGIDGQLTNNVSN

SEQ ID NO: 13670 - DNA, 1278 bp, Yarrowia lipolytica CLIB122
  CDS (1)..(1278)
atgccctcgcactttgacactctgcagctccacgccggccaggaggtcgaccccgccaccaacgcccgagcggtgcccatctacgccaccacgtcgtacaacttcaactcgtcggaacatggcgccaagctgtttgggctccaggagtttggcaacatttactcgcgaatcatgaaccctaccaacgacgtgcttgagaagcgaattgcggctctcgagggcggcaaatccgccattgcggtctcctccggccagtcggcgtcgttcctcgcgctcaccgccctggcccagaccggagacaacattgtcgcctcctcctgtctctacggaggtacctacaaccagctcaaggtgattttcaagacctacggcatcaacgtcaagtttgtggagggagacgaccccaaggcgttcgctgcagccatcgacgacaagaccaaggctctgtatgtcgagtccatcggcaacccccgttacaacgtgcccgaccttaaggccctgtccgacctcgctcacaagaacaacatccccctggtggtggacaacacctttggagccggtggatacctcgttgcccccattgagcacggcgccgacattgtcgtgcactctgccaccaagtggatcggaggccacggcaccaccgttgctggtctcattgtcgatggcggcaactttgactggatcaagtccggcaagttcccccagctcaccgagccttccgagggctaccacggaatgaagtttgccgagacctttggcaacgagctggcctacgctctgtacgtgcgaaccgtgctgctgcgagacattggcccttgtctcaacccctttggcgccttccagatcatccagggtctcgagacgctgtctcttcgagtcgaccgacactgcgaaaacgccctcaagctcgcaaagtggctcgagaagaacgaacacattgcttgggtctcctacccgggtcttgagtcgcacccctaccacgagcacgccaagaaggtgctcaagcggggctacggcgccgtgctgtcgatcggtgtcaaggacgacaagggtgctgctgtcgtcgactctctgaagctggcctccaacctcgccaacgtcggagacgccaagactctcgtcatcgccccttacttcaccactcaccagcagctgtcggaggaggagaagaagagcgctggcgtgtccaaggatctcatccgggttgctgtcggtatcgagtttatcgacgatatcattgctgactttgagcaggctttcaaggcggtgtactag

SEQ ID NO: 13671 - protein, 425 aa, Yarrowia lipolytica CLIB122
MPSHFDTLQLHAGQEVDPATNARAVPIYATTSYNFNSSEHGAKLFGLQEFGNIYSRIMNPTNDVLEKRIAALEGGKSAIAVSSGQSASFLALTALAQTGDNIVASSCLYGGTYNQLKVIFKTYGINVKFVEGDDPKAFAAAIDDKTKALYVESIGNPRYNVPDLKALSDLAHKNNIPLVVDNTFGAGGYLVAPIEHGADIVVHSATKWIGGHGTTVAGLIVDGGNFDWIKSGKFPQLTEPSEGYHGMKFAETFGNELAYALYVRTVLLRDIGPCLNPFGAFQIIQGLETLSLRVDRHCENALKLAKWLEKNEHIAWVSYPGLESHPYHEHAKKVLKRGYGAVLSIGVKDDKGAAVVDSLKLASNLANVGDAKTLVIAPYFTTHQQLSEEEKKSAGVSKDLIRVAVGIEFIDDIIADFEQAFKAVY

SEQ ID NO: 13672 - DNA, 1185 bp, Yarrowia lipolytica CLIB122
  CDS (1)..(1185)
atgtctggattcggaactctcgcagtgcacgctggtgccccccacgacaagaccaccggagctgtcatccccgccatctctctgtccaccacctttgcccagagcgccgccgctaagcccgtgggcgagtacgagtactcgcgatcggccaaccccaaccgtgacggcttcgagcaggccattgctgctctggagaagggcaagtacggcctggcgttctcgtctggctctgctgccacagccaccattctgcagtctctggctcagggctcccacgtggtgtccattggcgacgtgtacggaggcactcaccgatacttctccaaggtggccaatgctcacggagtcgaaaccaccttctccaacgccgtggaggacgagctggcctctctgatccggcccgagacccgtctggtctggatcgagtctccttccaaccccaccctcaccgtcaccgacattgccaaggtcgccggcatcgtcaagcaggccaacgagggccgatccgccgacgagcaggtcttcctggttgtcgacaacaccttcatgtctccttacgtccagaaccccctgactctgggcgctgacattgtggtccactctgtcaccaagtacatcaacggccactccgacgtggtcatgggtgttgctgccaccaactccgacgccatccacgagaagctgcggttcctgcagaacgccattggtgctgttccctctcccttcgactcgtggctcgcccaccgaggtgtcaagactctccacatccgagtcggaaccgcctccaacaacgcccaggccattgccgagttcctggagaagtctcctctcgtcgaggccgtcaactaccctggcctcgagtccaacccccgacgagaggttgtaaagcgacagcaccgaaacggtcttggcggaggcatgatctccttccgaatcaagggaggagccgagtctgccaacaagttctgccagaacaccaagatcttcactctggccgagtctctgggaggcattgagtctctgtgcgaggtccccgccgccatgacccacgccggcatcgacgtcaaggcccgagaggcctccggtgtctttgacaacctcgtccgactgtctgttggaatcgaggacaaggaggatctgctcaaggatgttgagcaggctcttcagtctgccgcttctcagtaa

SEQ ID NO: 13673 - protein, 394 aa, Yarrowia lipolytica CLIB122
MSGFGTLAVHAGAPHDKTTGAVIPAISLSTTFAQSAAAKPVGEYEYSRSANPNRDGFEQAIAALEKGKYGLAFSSGSAATATILQSLAQGSHVVSIGDVYGGTHRYFSKVANAHGVETTFSNAVEDELASLIRPETRLVWIESPSNPTLTVTDIAKVAGIVKQANEGRSADEQVFLVVDNTFMSPYVQNPLTLGADIVVHSVTKYINGHSDVVMGVAATNSDAIHEKLRFLQNAIGAVPSPFDSWLAHRGVKTLHIRVGTASNNAQAIAEFLEKSPLVEAVNYPGLESNPRREVVKRQHRNGLGGGMISFRIKGGAESANKFCQNTKIFTLAESLGGIESLCEVPAAMTHAGIDVKAREASGVFDNLVRLSVGIEDKEDLLKDVEQALQSAASQ

SEQ ID NO: 13674 - DNA, 1200 bp, Aspergillus nidulans FGSC A4
  CDS (1)..(1200)
atgtcacccccagcctccgtgcatcctgcgacgtcggccctgcacgccgacgactaccttaacttagtcacggatgttgcaccaccaatccacttgtccacgacctttcggtttcccagagagccagaaaacttaatcccgtctgaagatccagtggaggaattcgatggcaaaaactacgtttactctcgggaattcgctccgaacgctacacgtttcgaagctgtgctctcggagctcctaaagggttatgcagtgagctattccacgggattagctgcgctgcatgcagcactggttcttcttaatccgcgtcgtgtctccgtgggcgaaggctatcacggtagtcatgaagttatcggcgttatatcgcgtctctcagggctagaaaagctgccgctcgactgcccagctgaaagtcttggagagggtgacgtgatcatactcgagacgccagtgaacccgcttgggactgcgttcagtatcaaggaatatgcagagaaagctcatgcgagaggggcatacctcattgttgatagcacatttgcgcctccaccgcttcaggatccattcgcatggggtgcagatattgtgatgcattctggttccaagtattttgggggccatagtgaccttctttgtggagtccttgtagtgaagataaaggactggcagaagaaactccgggaggacagactggcactcggcaatgtgatgggcaatatggagagctggctgggtcttcgcagccttcggacgctggatctccgagtgcagcgagctagcgaaagctcagcgaagctggttgcgtggctacatacggctttgaagacacgaggcccggctacaaacagcgacgagcaccttgtgcagactgtaatcaaggagatgcaccatgccagtctgcaagacgaaccttggctacgcgagcaaatgcccaatggcttcggcccggttttctcaatcatattgcggagtgaggattttgcccgcgctttgccgagcaagttagctctgtttcagcatgcgacaagtctgggtggtgtcgagtcattgatagagtggcgtgctttatcagattcccgggttgatcggaagctactgaggatcagtgtagggttggagaattgggaagatttgaagaatgatctgcttcacgggttcagatctcttttgagggagaggcaaggatgctcatag

SEQ ID NO: 13675 - protein, 399 aa, Aspergillus nidulans FGSC A4
MSPPASVHPATSALHADDYLNLVTDVAPPIHLSTTFRFPREPENLIPSEDPVEEFDGKNYVYSREFAPNATRFEAVLSELLKGYAVSYSTGLAALHAALVLLNPRRVSVGEGYHGSHEVIGVISRLSGLEKLPLDCPAESLGEGDVIILETPVNPLGTAFSIKEYAEKAHARGAYLIVDSTFAPPPLQDPFAWGADIVMHSGSKYFGGHSDLLCGVLVVKIKDWQKKLREDRLALGNVMGNMESWLGLRSLRTLDLRVQRASESSAKLVAWLHTALKTRGPATNSDEHLVQTVIKEMHHASLQDEPWLREQMPNGFGPVFSIILRSEDFARALPSKLALFQHATSLGGVESLIEWRALSDSRVDRKLLRISVGLENWEDLKNDLLHGFRSLLRERQGCS

SEQ ID NO: 13676 - DNA, 1233 bp, Aspergillus nidulans FGSC A4
  CDS (1)..(1233)
atgacgatgatggcgggacatccagatctcccctccaacggccagaacggcgactcgaacacacatcagcagcgccaatttgcgactctggccgtccatgctggagctcctcacgatcccaccactggagctgttatcgcaccggaaagtgttggtaagccggtagggctgtacgaatacactcgaagctcgaatcccaatcgagacaattttgaagaggcggttgcttcgctcgagcacgcgaaatatgcactagcattctcctccggatctgcgacgacggcaaccattctccactcgttagctcctggctcgcatgtcgtttccgtctcagatgtatatggaggaacacacagatatttcaccaaggttgccgcggcacatggcgtcaatgtgtcattctcctcgtgcttggaattggacgtggagaagctgatccggccaaacgagactaaacttgtctggattgagactccttcgaaccctaccctagcgctggttgatatccgcaaagttgccgcggttgcgcatcgccatggcgttctggttgtggtcgataataccttcatgagcccttacgttcagaatccattggatcacggtgctgatgtggtgattcactccgttacgaagtacattaacggccattccgatgttctgatgggtgttgcagccttcaattcggacgaattgaaagagcgctttacgttcctccagaatgccattggggctgtaccatctccattcgattgctggctggctcaccgtggtctcaaaacactgcatttgcgtgcgcgagaagccacagccaacgccacggctgttgctctagcactcgaatcttcacctcacgtcatatctgtgaattaccctggactcaactctcatccgaaccgtgaaatcgccgtcaagcagcatcgcaagggcatgggaggcggcatgctgagtttccggatcaagggaggtcacaaggccgcccatctgttctgtgaatataccaagatcttcacacttgcagagagcttaggtggtgtagagagtctctgcgaagttccttcaagcatgacccatgctggaattcccaaagaagagcgagaagctgctggtgtttacgatgacttggtccgcatgagctgcggaattgaagatgttgaggacctgacggctgatacaatgcaggcacttgagagggctgtggctgcaagccaggcgctggagaacggaagtgcttga

SEQ ID NO: 13677 - protein, 410 aa, Aspergillus nidulans FGSC A4
MTMMAGHPDLPSNGQNGDSNTHQQRQFATLAVHAGAPHDPTTGAVIAPESVGKPVGLYEYTRSSNPNRDNFEEAVASLEHAKYALAFSSGSATTATILHSLAPGSHVVSVSDVYGGTHRYFTKVAAAHGVNVSFSSCLELDVEKLIRPNETKLVWIETPSNPTLALVDIRKVAAVAHRHGVLVVVDNTFMSPYVQNPLDHGADVVIHSVTKYINGHSDVLMGVAAFNSDELKERFTFLQNAIGAVPSPFDCWLAHRGLKTLHLRAREATANATAVALALESSPHVISVNYPGLNSHPNREIAVKQHRKGMGGGMLSFRIKGGHKAAHLFCEYTKIFTLAESLGGVESLCEVPSSMTHAGIPKEEREAAGVYDDLVRMSCGIEDVEDLTADTMQALERAVAASQALENGSA

SEQ ID NO: 13678 - DNA, 1377 bp, Aspergillus nidulans FGSC A4
  CDS (1)..(1377)
atgtcggcttccagtacactgaaaaaagcattccctcaggtcgacgctgagggccataatctgcccccttcacctgccccttcgagtcctcatggcagcaggcgctacaacatcgcaactgagcttgtctacaccgagagcaatgaccaatacaatgccagcagtgtcccaatttaccagagcgcaacattcaagcagtcatcccacgagggaggaggcgagtatgactatacccggtccggcaacccgactcgaacgcatctcgaacgacacctagccaagataatgtcagcgcagcgcgctctcgtggtgtcttccggaatggcggccctggatgtgatcacccgtcttctccgacccggcgacgaggtggttactggtgatgatctgtacggtggaaccaaccgtctactcaaatacctctcaaccaacggcggcattatcgtgcaccacgtcgacactaccaaccccgacaaagtgaaggaagtcttgaccgacaagacagccatggtgctcctggaaaccccgaccaacccgcttatcaagattgtcgatatccctacgattgccgcggcgtcgcacgaagcgaaccctaactgtctagtcatcgtggacaacaccatgatgtctccgctcttgctcagcccgctcgaactcggcgcggacgttgtctacgagagcggcacgaaatacctgtccggccaccacgatgtcatggccggagttattgcagtcaacgacccggccctcggcgagaggctctactttccgatcaacgcgtccgggtgcggactgtcgcccttcgactcttggctgctcatgcgcggagtcaaaactctcaaggtccgcatggatcagcagcaggccaacgcacagcggatcgcagaattcctggagtcgcacggtttcaaggttcggtatccaggtctgcgctcgcacccccagtacgacctgcaccactccatggcccgaggagcaggcgccgtgctttcatttgagacaggcgatgtctctgtcagtgagcgcattgtcgcgaacgcgaagctgtgggctatcagcgttagctttggctgtgtcaacagcttgatcagtcttccctgccggatgagccatgccagtatcgatgcaaagacgcgaaaggagcgtgccatgccggaggatctgattagattgtgtgtgggcattgaagacgtagacgaccttattgatgacttgaggcgagcagtaagtgtttctacgcgtaatcgtgttttctgggttatgctaatattctctagctggtacaagctggcgctgtcaacgtcactctggacggcattgaagcgaacacgccgcagtctgcgtagtcaagtaatgaaggaatatggttatggatga

SEQ ID NO: 13679 - protein, 458 aa, Aspergillus nidulans FGSC A4
MSASSTLKKAFPQVDAEGHNLPPSPAPSSPHGSRRYNIATELVYTESNDQYNASSVPIYQSATFKQSSHEGGGEYDYTRSGNPTRTHLERHLAKIMSAQRALVVSSGMAALDVITRLLRPGDEVVTGDDLYGGTNRLLKYLSTNGGIIVHHVDTTNPDKVKEVLTDKTAMVLLETPTNPLIKIVDIPTIAAASHEANPNCLVIVDNTMMSPLLLSPLELGADVVYESGTKYLSGHHDVMAGVIAVNDPALGERLYFPINASGCGLSPFDSWLLMRGVKTLKVRMDQQQANAQRIAEFLESHGFKVRYPGLRSHPQYDLHHSMARGAGAVLSFETGDVSVSERIVANAKLWAISVSFGCVNSLISLPCRMSHASIDAKTRKERAMPEDLIRLCVGIEDVDDLIDDLRRAVSVSTRNRVFWVMLIFSSWYKLALSTSLWTALKRTRRSLRSQVMKEYGYG

SEQ ID NO: 13680 - DNA, 1200 bp, Candida albicans SC5314
  CDS (1)..(1200): transl_table=12
atgactattgaatcaagcactaactattcttttggtaccaaggccatccatgctggagctccacttgatccttccactggtgccgttattgaaccaatctcactttcaacaacttttgctcaatctgagccatccaaaccattgggtatttacgaatactccagatcttccaacccaaacagagacaactttgaaattgctgttgctgcattggaaagtgccaagtatgccattgccttgtcatctggttctgccactactgctttggttattcaatctttgccaatcaactcacacattgtttcaagtggtgatgtttatggaggaacacatagatactttaccaaagtcgccaatactcatggtgttgaagctcaattcgttggcaatttagttgaagacttgcaaggtgcattaagagaaaacaccagattggtgtggttggaaaccccatccaaccctacattacaggttactgacattgccaaggtgaaatctatcttggtcgatcatgaagctaaaaccggtaacaaagtcttgttggctgtcgataacactttcttatcgccatacctttccaatcctttgactcatggtgccgatgtcgttgtgcactcagtcacaaaatacatcaatggacactctgatgtcgttatgggagtcttggcaaccaacgattctcaattgcacgaaagatttagatttttgcaaaatgcaattggttcaattccttccccatttgactcatggttggcacacagagggttaaagacattacacttgagagtgagacaagcatccaactctgctcaaagaattgctgaatacttgagtcaacattctgctgtgttgaaagtcaactatccagggttgaaatcccacaggaaccacgacgttgttttacgtcaacaaagagacggtttaggtggtggtatgatttcatttagaattgctggtggagccaaaggtgctgctgtattcacttcatccaccaaattgttcaccttggctgaatccttgggtggtatcgagtcgttgatcgaagttccagcaatcatgacacacggtggtattccaaaggaagaaagagaagccaatggtgtctacgatgacttggtcagagtctctgttggtattgaagacaccgaagacttgttgaaagatattgaacaagctttacaaaaggctgcttctgtttga

SEQ ID NO: 13681 - protein, 399 aa, Candida albicans SC5314
MTIESSTNYSFGTKAIHAGAPLDPSTGAVIEPISLSTTFAQSEPSKPLGIYEYSRSSNPNRDNFEIAVAALESAKYAIALSSGSATTALVIQSLPINSHIVSSGDVYGGTHRYFTKVANTHGVEAQFVGNLVEDLQGALRENTRLVWLETPSNPTLQVTDIAKVKSILVDHEAKTGNKVLLAVDNTFLSPYLSNPLTHGADVVVHSVTKYINGHSDVVMGVLATNDSQLHERFRFLQNAIGSIPSPFDSWLAHRGLKTLHLRVRQASNSAQRIAEYLSQHSAVLKVNYPGLKSHRNHDVVLRQQRDGLGGGMISFRIAGGAKGAAVFTSSTKLFTLAESLGGIESLIEVPAIMTHGGIPKEEREANGVYDDLVRVSVGIEDTEDLLKDIEQALQKAASV

SEQ ID NO: 13682 - DNA, 1152 bp, Candida albicans SC5314
  CDS (1)..(1152): transl_table=12
atgactcgcttggcaactgactctatccatggtggtgatcatcttaaacgtgtgattgatgtaatcaacccaattcatatctcaacaacatacagttattctaacaatcctgatgaattagtacctggtggattaactgatcctaacactttggtttattcacgtgaaaaccatcctaatgccgctcaaatagaagccattattgaaaaaattactggatatccagcagtcatttataattctggattgggtgcgtttaatggattaatcacttatgttaatcctaagactatggcatttggccaaatttatcatggtgttcatggaattgccgatatttggacaagaaattttggattaaaacaaattggtatcgatgataattttgatggagtattacaaaagggagatttggttcatttagaaaccccagttaacccttatggtaccaatttggatattctgaaatatgctgaaagagctcatgctcaaggtgcattattatcagttgatgccacatttgctcctcctccattgatgaatccttttgattttggtgctgatattgttatgcattcggctactaaatttttcggtggtcatagtgatttactagcagggattttattggtcaaatctcaagaaattaaaaataaattattattggatagattagtgttgggaacaaacattggtaatttggaaagtgctttattgatgagaagtttgaggacttttgaattacgtattagaagacaatcagccacagcagaatttattgttaaatatattgctgaaaataaggataaattccctgatttagaaacaatttatcatgggtcattacaagacgatgaatatatcaagaaacaaatgccaattggtcaaagtcctgtgttttcaattgagttggtttctgaagataaagcaaaaagattaccttctaaattgaaattgtttcatcatgctactagtttgggtggtactgaaagtttgattgaatggagagctatgagtgatgatcatattagtaagaaattattgcgagtttcaattgggttagaagacccaagagatttattggcagattttgttcatggattaggtggtgatgatgatttagtcaaacagattgaaaatttggaaatttaa

SEQ ID NO: 13683 - protein, 383 aa, Candida albicans SC5314
MTRLATDSIHGGDHLKRVIDVINPIHISTTYSYSNNPDELVPGGLTDPNTLVYSRENHPNAAQIEAIIEKITGYPAVIYNSGLGAFNGLITYVNPKTMAFGQIYHGVHGIADIWTRNFGLKQIGIDDNFDGVLQKGDLVHLETPVNPYGTNLDISKYAERAHAQGALLSVDATFAPPPLMNPFDFGADIVMHSATKFFGGHSDLLAGILLVKSQEIKNKLLLDRLVLGTNIGNLESALLMRSLRTFELRIRRQSATAEFIVKYIAENKDKFPDLETIYHGSLQDDEYIKKQMPIGQSPVFSIELVSEDKAKRLPSKLKLFHHATSLGGTESLIEWRAMSDDHISKKLLRVSIGLEDPRDLLADFVHGLGGDDDLVKQIENLEI

SEQ ID NO: 13684 - DNA, 1215 bp, Candida albicans SC5314
  CDS (1)..(1215): transl_table=12
atgtcacctaaaaagtcttatagtcttgaaacagagttggtacttaacaagtccggcgaccaatacaatgcatctgttccaccgttgtatcaatccgcgactttcaagcaaccatctttatctaatatgggggaatacgattacacgagatcgggtaacccaacaagaactcatttgcaaaaccatattgccaaaattatgaaggccgaacatgcatttgccgtctcatccggaatggggtgtcttgatgttattacaagattattaaagcctggcgatgaagtaattgctggtgatgatttgtacggtggcactcacagattattgacttacttgagcaagaaaggtgatattgttgctcatcactatgatactactaataccgaattaataaaatcaaaaataaataacaagaccaagatgattttcttggagtcgcctaccaaccctttaatcaaagtggtcgatgtcaaatcgattgctgaccatgcccacaaggctaatcgcgacattgttgttgttttcgacaacactatgatgtctccagtgttgatgactccattggatttgggggttgatatccaatatgaatcggcaactaagtacctcaatggacaccacgatatcatggctggggtgatcgccaccagatcatcttctttagctgaacaattatattacattataaactctacaggatgcgggttatccccatttgactgctggttgttaagcaggggtttgaaaacattagcaatccgtgtggaaaaacagcaacaaaactgtattagaattgccaaatttttagaaaatataggctttaaggttagatacccgggattgaagtctcatccacaatacgagttacatagctctatgtgttcaggctatggtgctgtattatcttttgaaactgggagtgtcagattactggagaaaattgtggagaataccgatatttttggtatagcagtttcttttggttgtgttaattcgttgatatccatgccatgcaaaatgtctcatgcatccatcgatgcaaaaaccagagaagaaagagaatttcctgaagatttaataagattgtgcattggtattgaaaactgtgatgacttgatagacgatctaaccaaggcattattgagaagtggtgctgtgaaagtgaatgatagagatgagttatacaatgcggtaggcatacaaccaaaattgtaa

SEQ ID NO: 13685 - protein, 404 aa, Candida albicans SC5314
MSPKKSYSLETELVLNKSGDQYNASVPPLYQSATFKQPSLSNMGEYDYTRSGNPTRTHLQNHIAKIMKAEHAFAVSSGMGCLDVITRLLKPGDEVIAGDDLYGGTHRLLTYLSKKGDIVAHHYDTTNTELIKSKINNKTKMIFLESPTNPLIKVVDVKSIADHAHKANRDIVVVFDNTMMSPVLMTPLDLGVDIQYESATKYLNGHHDIMAGVIATRSSSLAEQLYYIINSTGCGLSPFDCWLLSRGLKTLAIRVEKQQQNCIRIAKFLENIGFKVRYPGLKSHPQYELHSSMCSGYGAVLSFETGSVRLSEKIVENTDIFGIAVSFGCVNSLISMPCKMSHASIDAKTREEREFPEDLIRLCIGIENCDDLIDDLTKALLRSGAVKVNDRDELYNAVGIQPKL

SEQ ID NO: 13686 - DNA, 2400 bp, Ustilago maydis 521
  CDS (1)..(2400)
atgacaatttcaagtaccaacggcgtctccaatgacaacgggcatgctgacgtgcttgtctcctcgggcttctccaccaaggccattcatgtcggttccgagcccaacgcagccacaggcgctgtcattccacccatcagtctgagctccacatttgcccaggatggtatcggaaaccacaagggctacgaatactctcgttcaggaaacccaaaccgcgattcttttgagcgcgcgcttgctgctctcgagggtggcagccgcggtctcgccttctcttctggttctgccgtgaccgcgacggtgctcaactcgatgccttctggctcgcacattgtcagcgtcaacgatgtctacggtggtacctaccgttattttaccaaggtagccaccgtttcacaaggcattcggaccagctttgtcgagatggatggacccgaggctgaggtgagcgagcgtgtcaacgctgccatccgtaaagagacatcgctcgtctggattgagactcccaccaaccccacgctccgtgtgatcgacgtgcctctgattgtcaagctcgtacgaaaccacccgaacgcaagcaaggacatcaagatcgttgtcgacaacactttcatgagcccatggttccagaatcctcttgctcacggtgccgatcttgtaatgcacagtgtcaccaagtatctcaacggccacagcgatgttgtcatgggtgctgcggtcaccaacgacgaggcctgggccgaccgcctcgcttttctgcaaaacagtatcggtgctatcccatctcccttcgactgctggctcgccttgcgcggtctcaagacgcttgcgctgcgtatgaaggcacacggcgcgtctgctttggctattgctcagttcctcgaaaatcacccatctgtcgagaccgtaatctacccgggcctcccttcacaccctggtcacgaggtggcacgacgacagatctcgaaacgtgctgctgctgcaggcccttccaactccaacggcgcgtttgcttatggaggaatgatctcgttccgcattaagtcgaatcctgctgacgacgaacccgccgacaagctgctgtccaacctcaacgtcttcacactcgccgagtcgctcggtggtgtcgagagtctgatcgagctgccctctaagatgactcacggctcggtagcgctcgaggacaggatcaagatcggtatcggccacaacctcattcgtgtcagtgtcggtatcgaggagacagccgacctaattcaggatctcgagcgcggtctcaaggctgctggatttatcctgcctcttcaagcagtcactgtgattcttgacgcctttgtgtcgacaccaagttgtgtagcggaaaagcacaatttcgcagctgacatcggtgacgcgatcgcgtcgcatctagagtccctcgactcgtgtccaaagacccgtcaaaagcttcgtctttgcagcctagaaacgttgtcgcatcactttgctcaacctggcctcgcctcgtccgaaacatgcacttctcgacgcagcatatccgaagcattcggtttgcttgccgggtcaacagcttcatcccgtactggtctacgcaggcggaacatctcgacctggtctcatccatcgcgatctttctcgtccaccagctcaaaccgtgaccttaaacaagatacgaaggacaagctagtggaagaaggcaagaagttcgccaaggacaagctcgactcgaaattgaatgcgacagaaaccagagagcaggccaaaaatctctcttcttccgtcagcaagattctcttcaccttgctagccgttgcaggcgtagcataccagtttgtgggcggaaagacacatgctgaagaagcatgcaccagccttaaaccagctcctaagtacacaaagcatcaagtgtcgctgttgtgtctcgtcgggccgtcgctctccggtaaaagtacgcaagccaagcgcctaagcaaccatttccctgagctggacgcggttgttcaacccaaatcgatcgatgaattgtcaagtatcatcgcctctcgagcgaccggcaagaaacgcacatctctcatactggatgacttcccaacgacgctagaagatgcgcaaagaatcgaggacgagatcgtccccatcttttgtttttccttctacgatcttccgctgggggattttgagaagcgtctatcggagaaagacgaaaagaagaagagggaaaaagtagatgagttcaacaagtattcagagagactggagccgctggtgaagaagtacagacaccagggaaacatctacgagataagcgcggactggaacagcgcggacgaggtgtgggaacaggtcgaggctaagacgcagcaaattttggagctgagagagagaggtgatctatga

SEQ ID NO: 13687 - protein, 799 aa, Ustilago maydis 521
MTISSTNGVSNDNGHADVLVSSGFSTKAIHVGSEPNAATGAVIPPISLSSTFAQDGIGNHKGYEYSRSGNPNRDSFERALAALEGGSRGLAFSSGSAVTATVLNSMPSGSHIVSVNDVYGGTYRYFTKVATVSQGIRTSFVEMDGPEAEVSERVNAAIRKETSLVWIETPTNPTLRVIDVPLIVKLVRNHPNASKDIKIVVDNTFMSPWFQNPLAHGADLVMHSVTKYLNGHSDVVMGAAVTNDEAWADRLAFLQNSIGAIPSPFDCWLALRGLKTLALRMKAHGASALAIAQFLENHPSVETVIYPGLPSHPGHEVARRQISKRAAAAGPSNSNGAFAYGGMISFRIKSNPADDEPADKLLSNLNVFTLAESLGGVESLIELPSKMTHGSVALEDRIKIGIGHNLIRVSVGIEETADLIQDLERGLKAAGFILPLQAVTVILDAFVSTPSCVAEKHNFAADIGDAIASHLESLDSCPKTRQKLRLCSLETLSHHFAQPGLASSETCTSRRSISEAFGLLAGSTASSRTGLRRRNISTWSHPSRSFSSTSSNRDLKQDTKDKLVEEGKKFAKDKLDSKLNATETREQAKNLSSSVSKILFTLLAVAGVAYQFVGGKTHAEEACTSLKPAPKYTKHQVSLLCLVGPSLSGKSTQAKRLSNHFPELDAVVQPKSIDELSSIIASRATGKKRTSLILDDFPTTLEDAQRIEDEIVPIFCFSFYDLPLGDFEKRLSEKDEKKKREKVDEFNKYSERLEPLVKKYRHQGNIYEISADWNSADEVWEQVEAKTQQILELRERGDL

SEQ ID NO: 13688 - DNA, 1356 bp, Ustilago maydis 521
  CDS (1)..(1356)
atggcttccaactttgcttctaactttgataccctccagttgcacgccggccaggaggtggaccctgccaccaacgctcttgctgtgcccatctacgccaacagttcgttcgccttcaatgactcggctcacggtgctgatctcttcggcctgcgcaagttcggcaacatttactcgcgtcttatgaaccccaccaacgatgtctttgagaagcgtatcgctgctctcgagggaggcgctgctgctcttgccacctcgtccggtcaggctgctcaaggtatggttgtcatgggactctgcggttccggcgacaacattgtttcctcgtcttacctgtacggtggtacatacaacgcttgggccaaccttttcccgcgtctcggcattacgacaaagtttgtcaagtccgaatcaccggaagcctacgctgccgccatcgacgccaagaccaaggcgatctacattgagtcgatcgccaaccccaagtacattgtgcacgacattgctgcgcttgccaaggtagcgcacgaccacggtattcctctgatcgtagacaacacgttcggtgctggtggatacctcgtccgaccgatcgagcacggtgcggatgtggttgtgcactcagcaaccaagtggatcggtggtcacggtaccaccatcggtggtgttatcatcgacagcggaaagtttgactggagcaagagtggcaagtttccgcagttcaccgagccttcggcgggctaccacggactcaagttctgggacacgttcgggcctatcactttcgctatttacctgcgtgttgtcatccttcgtgacctgggtccgtgccagaacccgttcggttcgttcttgctgctccaaggtctcgagacgctctcgctgcgtgttggccgtattgtcgagaacgcgcttgcgctggctcagtggctcgaggctcaccctcaggtctcgtgggtctcgtaccctggtctcaagagccacccttcgcacgagattgccaaaaagtacctgcagcgcggtttcggtggtgtgctctcgtttggcatcaagggcgacgctgccaccggttcggcttttgtcgacagcttgaagctcgccaccaacttggccaacgtgggtgatgccaagactctcatcatccacccggccagcactacgcaccagcagctttcggacgaggaccagttgagctcgggtgtcaccaaggacctgatccgtgtcagcgtcggttacgagtggatcgaggatatcaaggccgactttgcgcaggctttcgaaaagacctcgggtgtcaagggtaacgttgcatcgggacagactggccccgctcccggtctctctggatcggtgtaa

SEQ ID NO: 13689 - protein, 451 aa, Ustilago maydis 521
MASNFASNFDTLQLHAGQEVDPATNALAVPIYANSSFAFNDSAHGADLFGLRKFGNIYSRLMNPTNDVFEKRIAALEGGAAALATSSGQAAQGMVVMGLCGSGDNIVSSSYLYGGTYNAWANLFPRLGITTKFVKSESPEAYAAAIDAKTKAIYIESIANPKYIVHDIAALAKVAHDHGIPLIVDNTFGAGGYLVRPIEHGADVVVHSATKWIGGHGTTIGGVIIDSGKFDWSKSGKFPQFTEPSAGYHGLKFWDTFGPITFAIYLRVVILRDLGPCQNPFGSFLLLQGLETLSLRVGRIVENALALAQWLEAHPQVSWVSYPGLKSHPSHEIAKKYLQRGFGGVLSFGIKGDAATGSAFVDSLKLATNLANVGDAKTLIIHPASTTHQQLSDEDQLSSGVTKDLIRVSVGYEWIEDIKADFAQAFEKTSGVKGNVASGQTGPAPGLSGSV

SEQ ID NO: 13690 - DNA, 1173 bp, Tribolium castaneum
  CDS (1)..(1173)
atgtcaggcgagagtggatatcttccccagcataaaggttttgcaactgctgcaattcacgcgttccaagaaccggaacaatgggagtccttggctgtcgtcacccccatggtgtcttcgacgacttttaaacaatacgggcctgctaatttcaagaaatatgaatacggccgctctggcaaccccagcagggaggttttagagaaatgtttggcaaccctcgacaacgggaaatatgggttgtgctggtcgtcgggactgggggccaccacaggcgtcgccagtctttttacagccggggaccacatcatctgcggggatgatgtctatgggggcactaatcggcttttcagacaagtctgctccaagttcgggctcgaaatcaccttcgttaacgaaaaagagatcgaaaaaaatattaaacccaacacgaagctgatctggatcgagagtctcacaaacccgactttgaaagtcatggacataaaagcaacggctgaactggcccacaaacacaacgtcttgctggccgttgacagcaccttcgtgaccccttatttccaacatccgctggatttcggcgctgacctcgtcatacactccatcaccaagtacatcaacggccattcggacgtcatcatgggggccacaatcaccaacaataaggagatttacgacaaactgaaattcctacaaaactcaatggggatcatcccggccccctttgactgctaccaagtgacccgaagtttgaaaaccttggctttgaggatgcaacaacacatgaaaaattccattcaagtggccaagtttcttgagaaacaccccaaggtggcccgggtggtgcatccagggctgccctcgcacccccaacatgatattttcaaaaggcaatcgtcgggttgcagcggcatcatgtctttttatctcaaaaatgccactcttgagcagtcgagaacgtttctctctgcgttaaaaattttcactctggctgaaagtttgggcggatatgagagtttggccgaacttccgtcggttatgactcacgcgtccgttccggaagaccagagaaaagtcttgaaaatcaccgacgatttaattcggttgtcggtgggtctggaggacatcgaggacttgataagtgatctccaacaagcacttgaaaaaatctga

SEQ ID NO: 13691 - protein, 390 aa, Tribolium castaneum
MSGESGYLPQHKGFATAAIHAFQEPEQWESLAVVTPMVSSTTFKQYGPANFKKYEYGRSGNPSREVLEKCLATLDNGKYGLCWSSGLGATTGVASLFTAGDHIICGDDVYGGTNRLFRQVCSKFGLEITFVNEKEIEKNIKPNTKLIWIESLTNPTLKVMDIKATAELAHKHNVLLAVDSTFVTPYFQHPLDFGADLVIHSITKYINGHSDVIMGATITNNKEIYDKLKFLQNSMGIIPAPFDCYQVTRSLKTLALRMQQHMKNSIQVAKFLEKHPKVARVVHPGLPSHPQHDIFKRQSSGCSGIMSFYLKNATLEQSRTFLSALKIFTLAESLGGYESLAELPSVMTHASVPEDQRKVLKITDDLIRLSVGLEDIEDLISDLQQALEKI

SEQ ID NO: 13692 - DNA, 1164 bp, Prochlorococcus marinus str. AS9601
  CDS (1)..(1164): transl_table=11
atgggaaataaggaaaataatataaaaaagccaggttttaagaccttatctattcaccatggggaaacatttgctgaagaaactggatgcgttatgcctcctattttttctacatctactttcaaacatggaaataaagataatttcgactacaccagatcaggcaatccaaactttaaaattctagaaaacatccttaaatcaatagaagattctaaatactgtacagtttttggatctggaattagcgcggtaactgcaatttcatcaacactgaaatcaggtgacaagatactctgcgagtcaaatctctatggttgtacagtgaggatgttcgaaaaagttttcaagaaatttggactagaaattttatacacagattttacaaacgaaaataatgtcaaaaagatttcaaacttcgagccaaccttgatatggctagaaagtccaactaatccacttttaaaggtactcgatattaaggcgatttgtgatgaagcgaataaactagaaataccagtagttgtagacaacacattttctacagcgcttattcaaaaaccattggaccttggtgcaacactatcggttgtaagcaccacaaaattcattaatggacatagtgacgcacttggcggagcagtacttacaaataatgaagaatggaatagtaagatgcttttctctcaaaaagctctcgggcttcaaccatctccttttgatagttggctcattacgagaggagtaaaaactcttcctttaagaatcgaacaacaaactaaaagtgcagaatttatttctgaagaattaggtaatcataaaattattagtaaattaatttacccttttaatcaagaacatccgcaatttaatttagcaaaatcgcaaatgaaatctggaggttcaatgatcagcctaaaattaaatttaaataaagaggatacttttaaattttgcaaatctctcaaatatttctctctagcagaaagtcttggaggagttgaaagtttaatttgtcaccctgcaacgatgactcatgcttctgttgatgacaaaacaaaaaatctactagggatagatgatgctcttgtcagattatcaattggatgtgaagatacaaacgatttaatctcggacattttatttgctttaaataaattctaa

SEQ ID NO: 13693 - protein, 387 aa, Prochlorococcus marinus str. AS9601
MGNKENNIKKPGFKTLSIHHGETFAEETGCVMPPIFSTSTFKHGNKDNFDYTRSGNPNFKILENILKSIEDSKYCTVFGSGISAVTAISSTLKSGDKILCESNLYGCTVRMFEKVFKKFGLEILYTDFTNENNVKKISNFEPTLIWLESPTNPLLKVLDIKAICDEANKLEIPVVVDNTFSTALIQKPLDLGATLSVVSTTKFINGHSDALGGAVLTNNEEWNSKMLFSQKALGLQPSPFDSWLITRGVKTLPLRIEQQTKSAEFISEELGNHKIISKLIYPFNQEHPQFNLAKSQMKSGGSMISLKLNLNKEDTFKFCKSLKYFSLAESLGGVESLICHPATMTHASVDDKTKNLLGIDDALVRLSIGCEDTNDLISDILFALNKF

SEQ ID NO: 13694 - DNA, 1164 bp, Prochlorococcus marinus str. MIT 9515
  CDS (1)..(1164): transl_table=11
atgggaaataaggaaaataatatcaaaaagccaggcgtcaaaaccttaacaattcaccatggagaaacatttgccgaagagacaggttgtgttatgcctccaattttctcaacatctactttcaaatatggaaataaacaaaatttcgattacaccaggtcaggtaatccaaattttaaaattctagaaaatatacttaaatcagtagaagattctaaatactgtacagtttttggatccggcataagtgcagtaactgcaataacatccacattaaaatcaggagataagatactttgcgagtctaatctctatggttgtacggtaagaatgtttgataaaattttcaaaaaatttgggatagaaactctatacacagattttacggataaagaaagtatcaaaaaaattaaggactttaagccaactttaatatggctcgaaagtccaacaaatccactattaaaaatacttgatattaaatcgatctgtgacgaagcgaataaacacaaaatacctgtggttctagataatacctttactacagctctcattcaaaaacctttagaacttggagcaacactatcgctaataagtacaacaaaatttataaatggtcatagtgatgctcttggtggagcggtgctaactaatgatgaggaatggaatagtaagctacttttctctcaaaaagctttaggacttcaaccctcgccctttgattcatggctaattacaagaggagtaaaaactctccctctaagaatcgagcaacaaacaaaaagtgcagaaataatttctaaggaatttgaaaaccataggatcattagaaaagctctttatccctttaatcaaaaacatccacaatttaatttagcaaaatcacaaatgaaatctggtggttctatgatcactcttaaattgaacttaaataaagcagacacttttaatttttgtaaatctctcaaatatttctcattagcagagagtcttggtggagttgaaagtttaatttgccaccccgcaacaatgactcatgcatctgttgatgataaaacaaaaaatctcctaggtattgacgattctcttgtacgattatcggttggttgtgaagatacaaatgatttaatctcagatatcttatttgccttaaataaattttga

SEQ ID NO: 13695 - protein, 387 aa, Prochlorococcus marinus str. MIT 9515
MGNKENNIKKPGVKTLTIHHGETFAEETGCVMPPIFSTSTFKYGNKQNFDYTRSGNPNFKILENILKSVEDSKYCTVFGSGISAVTAITSTLKSGDKILCESNLYGCTVRMFDKIFKKFGIETLYTDFTDKESIKKIKDFKPTLIWLESPTNPLLKILDIKSICDEANKHKIPVVLDNTFTTALIQKPLELGATLSLISTTKFINGHSDALGGAVLTNDEEWNSKLLFSQKALGLQPSPFDSWLITRGVKTLPLRIEQQTKSAEIISKEFENHRIIRKALYPFNQKHPQFNLAKSQMKSGGSMITLKLNLNKADTFNFCKSLKYFSLAESLGGVESLICHPATMTHASVDDKTKNLLGIDDSLVRLSVGCEDTNDLISDILFALNKF

SEQ ID NO: 13696 - DNA, 1170 bp, Prochlorococcus marinus str. NATL1A
  CDS (1)..(1170): transl_table=11
atgggatcagtaaaaagagacaagaagttcagcaatggagtaaacacaagagtcattcatcacaaagataatttttctgaaggaactggttcaataatgccgccaatctttccaacctcaacgttcgttcatggcaatgagggtggctttgattacactcgttcaggaaatccaaattttcgaattcttgaatcagttttgtctgatctggaagagtgtcaattcgctagtgtatttagttctggagtcgctgcgattacagcaatagtctccactcttcaggctggagacttaatcctttgtgaggagaacctttatggatgtacggtgagattatttgaacaagtttttaatcgttttggattaaaaactcaatggatagactttactaagcccaatttccaagaagtcatttcaaatcacaaacccgcgatgatttggatcgaaagtcctactaacccactcctcaaaattattgatattgaagggatttgtcatttctcaaataaaatgaaaatacctgttgttgtagacaatacttttgcaacacctctattacaaagacctcttaaacttggagcgaccttatctttaactagcacgaccaagtttattaatggtcactcagatgcacttggaggtgcagtatgcaccgagaatcctatctggagagacaagctaaatttcgcccagaaagctcttggattaaacccttctccctttgattgctggcttatcacacgaggaataaaaactcttccacttcgcctagaaagacaagttaataatgcatccaaaatagctaatcaattagccgataatccagcaataaaatatgttcgatatcctttcaggaatgatcacccacaatgtaaattagcaaaaaaacaaatggctatgggaggagcaattgttactgccactgttaacgcaacccaagctcaaacctattcattttgtaaaagtcttcattacttcaaaatggcagaaagtctgggaggaattgaaagtcttgtttgccatccagctacaatgacacatgcttcagtgtccaaggaaacaaaattaaaaattggaattactgattcacttattcggttttctattggatgtgaggacattgaagacttaagtgctgatttgaatcaagccttaggaactatctcttga

SEQ ID NO: 13697 - protein, 389 aa, Prochlorococcus marinus str. NATL1A
MGSVKRDKKFSNGVNTRVIHHKDNFSEGTGSIMPPIFPTSTFVHGNEGGFDYTRSGNPNFRILESVLSDLEECQFASVFSSGVAAITAIVSTLQAGDLILCEENLYGCTVRLFEQVFNRFGLKTQWIDFTKPNFQEVISNHKPAMIWIESPTNPLLKIIDIEGICHFSNKMKIPVVVDNTFATPLLQRPLKLGATLSLTSTTKFINGHSDALGGAVCTENPIWRDKLNFAQKALGLNPSPFDCWLITRGIKTLPLRLERQVNNASKIANQLADNPAIKYVRYPFRNDHPQCKLAKKQMAMGGAIVTATVNATQAQTYSFCKSLHYFKMAESLGGIESLVCHPATMTHASVSKETKLKIGITDSLIRFSIGCEDIEDLSADLNQALGTIS

SEQ ID NO: 13698 - DNA, 1170 bp, Prochlorococcus marinus str. MIT 9303
  CDS (1)..(1170): transl_table=11
gtggccccagctcaaagcgatcaacagcaggaggttgcagggatcagcacccgcgccatccaccacggcgagagctttgcagcagagaccggcgccgtgatgccaccgatctttaccagttcaacctttgcccacggcaatcctcagggcttcgactacacccgttcaggcaatcccaatttccgcatcctcgaatcagtgttggcagcagtggaaagctgtcaattcgccactgccttcgcttcaggggtgagcgccatcacagccatcgcctccacactccaagccggagatctggtgctctgtgaggaaaatctctacggctgcacggtgcgcttattcgagcaggtttttagtcgttttggtgtacaaacagcctggctggatttcaccaatccatcagctcttgatgccattgcagttcaaaaaccagcaatggtctggctggagagtccaaccaatcccctgctcaaagtgatcgatctagcagccgtctgtgatgccgctgcagcagaaaaaatcccagttgtcgtcgacaacacgtttgccacagccctgctgcaacgaccactgcagctaggcgccaccctctcactcaccagcaccaccaaatacatcaacggccattccgatgcccttggcggtgtggtctgcagcgacgacccgcaatggcagcaaaagatggtgtttgcacaaaaggccttgggattacaaccctccccatttgacgcctggttgattactcgcggcatcaaaaccctgccactcaggctcgaacgccaaatcactaatgctgccgccatcgccgatcaactggccagccatccacgcatgcactgggtgcgctatccattccgttcagaccatccccagcaggctttagcccgcaagcagatgagcgcgggtggtgcaattgtcacggtcagtctcgacgctgaccaaaaccagacttacgccttctgcaagagcctgcgctatttcaccatggccgaaagcctgggcggtgttgaaagcctcgtttgtcatcccgccaccatgacccatgcctcagtcgatccagatgtcaagcgaaaacttggcatcgatgatggtctggtgcgcttctccgtgggctgcgaagacctcgctgatctcagcacagatttagatcaagccctcaaacagctgtag

SEQ ID NO: 13699 - protein, 389 aa, Prochlorococcus marinus str. MIT 9303
MAPAQSDQQQEVAGISTRAIHHGESFAAETGAVMPPIFTSSTFAHGNPQGFDYTRSGNPNFRILESVLAAVESCQFATAFASGVSAITAIASTLQAGDLVLCEENLYGCTVRLFEQVFSRFGVQTAWLDFTNPSALDAIAVQKPAMVWLESPTNPLLKVIDLAAVCDAAAAEKIPVVVDNTFATALLQRPLQLGATLSLTSTTKYINGHSDALGGVVCSDDPQWQQKMVFAQKALGLQPSPFDAWLITRGIKTLPLRLERQITNAAAIADQLASHPRMHWVRYPFRSDHPQQALARKQMSAGGAIVTVSLDADQNQTYAFCKSLRYFTMAESLGGVESLVCHPATMTHASVDPDVKRKLGIDDGLVRFSVGCEDLADLSTDLDQALKQL

SEQ ID NO: 13700 - DNA, 1161 bp, Clostridium thermocellum ATCC 27405
  CDS (1)..(1161): transl_table=11
atgatgaaagttgggaatgtgtcaaactatagtataagtacaaaagtggtacatggttcaaagtgttatgacccgcataccggggcggtaagtttccccatatatcaaagtgctactttcagacatccggcgctctatcagacaacgggttatgattattcacgcttgcagaatccgacaagggaagaacttgaaaacaccattgcaaatatcgaaaacgggaagtttggatttgccttttccagcggcatggcggcagtatccaccatactgtctcttttttcacccaaagaccatatcattgtttccgatgacctttatggtggtacttacagactgtttgaggaaatatacaaaaaatacggtttggaattttcctatgtcaacacaagcaggattcaggacatagaagaagctgtgaaagagaacacaaaggcgttttttattgagacccccacaaacccgatgatgaaggtggccgatttaaagacgatatcgcggtttgcaaaagacaggaaaatacttttgattgtggacaatacttttcttacaccgtattttcagaggcccttggagctgggggcggatattgtggttcacagcggaacgaaatatctcgggggacataacgatactttggcgggtcttgttgtagttaatgatgaagagcttgccgaaaggataaaacttattcaaaaatcggaaggggccgtactgtctccttttgacagctggctgattttaagaggtataaagacgctgggggtacgccttgaaaagcagcaggaaaatgccatgaaaattgcaaaatggctttgtacccataaaaatgtcacaaaggtcaactatgtgggattgcccgaccatgaaggctatgaaatttcgaaatcccaggcttccggttttggagccatgatttcctttaacgtaaaagacgttcagactgtggaaaaggttttaagcaaggtgcagcttgtaatgtttgctgagagcctcggcggtgtggaaagcttgattacctatcctgccgttcagacccatgctgccataccggaagaaatgagaaatagaatcggggttaccgatacgcttttaaggctttcggtgggaattgaggatgcagacgatataattgccgaccttgagcaggccttggaatag

SEQ ID NO: 13701 - protein, 386 aa, Clostridium thermocellum ATCC 27405
MMKVGNVSNYSISTKVVHGSKCYDPHTGAVSFPIYQSATFRHPALYQTTGYDYSRLQNPTREELENTIANIENGKFGFAFSSGMAAVSTILSLFSPKDHIIVSDDLYGGTYRLFEEIYKKYGLEFSYVNTSRIQDIEEAVKENTKAFFIETPTNPMMKVADLKTISRFAKDRKILLIVDNTFLTPYFQRPLELGADIVVHSGTKYLGGHNDTLAGLVVVNDEELAERIKLIQKSEGAVLSPFDSWLILRGIKTLGVRLEKQQENAMKIAKWLCTHKNVTKVNYVGLPDHEGYEISKSQASGFGAMISFNVKDVQTVEKVLSKVQLVMFAESLGGVESLITYPAVQTHAAIPEEMRNRIGVTDTLLRLSVGIEDADDIIADLEQALE

SEQ ID NO: 13702 - DNA, 1266 bp, Clostridium difficile 630
  CDS (1)..(1266): transl_table=11
atgtataataaagaaacaatatgtgtgcaaggaaattataaaccaggtaatggagaaccaagagtactacctttatatcaaagtacaacttttaaatatagcagtatagaccaacttgctgaattatttgatttaaaagttgatggacatatatattcaagaataagcaatcctactattcaagcttttgaagaaaaaataagtttactagagggtggagtatcttctgtagctgtatcatcagggcaatctgcaaatatgttggcagttttaaatatatgtaaatcaggagatagtatactttgttcttcaaaagtatatggaggaacattcaatttactaggacctagtcttaaaaaatttggtatagatttaatatcgtttgacttagattcaagtgaagatgagatagtagaacttgcaaaggaaaatactaaggttgtgtttgcagaaacacttgcaaatccaactcttgaagtcatagattttgaaaaaatagcaaatgtagctaagagaattaatgttccatttattgttgataattcattagcatctccagtgctttgtaaccctttaaagtatggagcaaatatagttactcattctaccacaaaatatttagatgggcatgcttcaagtgttggaggaattatagtggatggtggaaactttaactgggataatggaaaatttccagaattagttgagccagacccaacatatcatggtataagctatactcaaaaatttggaaatgccgcatatgcaactaaagcaagagttcagttgcttagagactatggaaattgtttaagcccattcaatgcgtatcttactaatttaaatgttgaaacactacatcttagaatggagagacatagtgaaaatgcacttaaaatagctagatttttagaaaaacatgaaaatgtagattggattaattacccaggacttgaagataacaagtattatgagaatgccaaaaagtatttatcaagaggatgtagtggtgttttatcatttggagtaagaggtgggttagaaaatgccaaaaaatttgtggaaaaattacagatagcatctttggttacacatgtttcagatgtaagaacttgtgttatacatccagcttcaactactcatagacaattaacagaagaacaattaattgcatctggagtattgccttcactaataagattatctgttggaatagaaaatgtagaggatttaatagctgatttaaatcaagctttaaatttctaa

SEQ ID NO: 13703 - protein, 421 aa, Clostridium difficile 630
MYNKETICVQGNYKPGNGEPRVLPLYQSTTFKYSSIDQLAELFDLKVDGHIYSRISNPTIQAFEEKISLLEGGVSSVAVSSGQSANMLAVLNICKSGDSILCSSKVYGGTFNLLGPSLKKFGIDLISFDLDSSEDEIVELAKENTKVVFAETLANPTLEVIDFEKIANVAKRINVPFIVDNSLASPVLCNPLKYGANIVTHSTTKYLDGHASSVGGIIVDGGNFNWDNGKFPELVEPDPTYHGISYTQKFGNAAYATKARVQLLRDYGNCLSPFNAYLTNLNVETLHLRMERHSENALKIARFLEKHENVDWINYPGLEDNKYYENAKKYLSRGCSGVLSFGVRGGLENAKKFVEKLQIASLVTHVSDVRTCVIHPASTTHRQLTEEQLIASGVLPSLIRLSVGIENVEDLIADLNQALNF

SEQ ID NO: 13704 - DNA, 1164 bp, Prochlorococcus marinus str. MIT 9301
  CDS (1)..(1164): transl_table=11
atgggaaataaggaaaataatatagaaaagccaggtgttaagaccttatctattcaccatgggaaaacatttgcagaagaaactggatgcgttatgcctcctattttttctacatctactttcaaacatggaaataaagataatttcgactacacaagatcaggcaatccaaactttagaattctagaaaacatccttaaattaatagaagaatctaaatactgtacagtttttggatctggaattagcgcggtaactgcaatttcatcaacactgaaatcaggtgacaaggtactctgcgagtcaaatctctatggttgtacagtgaggatgttcgaaaaagttttcaagaaatttggactagaagttttatacacagattttacaaacgaaaataacgtcaaaaagatttcaaaattggagccaaacttgatatggctagaaagtccaactaatccacttttgaaggtactcgatattaaggcgatttgtgatgaagcgaataaactcgaaataccagtagttgtagacaacacattttctacagctcttattcaaaaaccattggaccttggtgcaacactatcgcttgtaagcaccacaaaattcattaatggacatagtgacgcacttggcggagcagtacttacaaataatgaggaatggaatagtaagatgcttttctctcaaaaagctctagggcttcaaccatctccttttgatagttggctcattacgagaggagtaaaaactcttcctttaagaatcgaacaacaaactaaaagtgcagaatttatttctgaagaattaggtaatcataaaattattagtaaagtaatttacccttttaatcaagaacatccgcaatttaatttagcaaaatcgcaaatgaaatctggaggttcaatgatcaccctaaaattaaacttaaataaagaggatacttttaaattttgcaaatctctcaaatatttctctctagcagaaagccttggaggagttgaaagtttaatttgtcaccctgcaacgatgactcatgcttctgttgatgacaaaacaaaaaatctactagggatagatgatgctcttatcagattatcaattggatgtgaagatacagacgatttaatctcggacattttatttgctttaaataaattctga

SEQ ID NO: 13705 - protein, 387 aa, Prochlorococcus marinus str. MIT 9301
MGNKENNIEKPGVKTLSIHHGKTFAEETGCVMPPIFSTSTFKHGNKDNFDYTRSGNPNFRILENILKLIEESKYCTVFGSGISAVTAISSTLKSGDKVLCESNLYGCTVRMFEKVFKKFGLEVLYTDFTNENNVKKISKLEPNLIWLESPTNPLLKVLDIKAICDEANKLEIPVVVDNTFSTALIQKPLDLGATLSLVSTTKFINGHSDALGGAVLTNNEEWNSKMLFSQKALGLQPSPFDSWLITRGVKTLPLRIEQQTKSAEFISEELGNHKIISKVIYPFNQEHPQFNLAKSQMKSGGSMITLKLNLNKEDTFKFCKSLKYFSLAESLGGVESLICHPATMTHASVDDKTKNLLGIDDALIRLSIGCEDTDDLISDILFALNKF
